United States Patent Application Publication US 2007/0067865 A1 - sequence listing, part 2

SEQ ID NO: 3149 - DNA, 314 bp, Glycine max
ccagtcaagtaaacaaggttcagtgtaatggtaactttcagcatggtcacattgagctttggacaaagggcattatccagtttaacatggttaggatcatcacaatcttttgttagaacccagagttgtgcagcatgcttctcaatcagtggcaagattcatagatcttatgcatctcagtttgggttattccatgagaatgaattttgccttgtagctggattatatctaccttgggttttgattgttcaatatggctgccacattccttgttataaaaaaaaacgtaatataaaaaagcggccgctcgaatt

SEQ ID NO: 3150 - DNA, 2966 bp, Glycine max
cgtctctcacacacaccactttatatacgcacacgagagtcggaagcactactctcttcgccgcttgctctctctctctcgctctttcagctttgacttttgttggaaactaaggcctaatcaaaatggtgaagttcacagctgaagagctacgtcgtattatggactataagcataatatccgtaatatgtctgtcattgctcatgttgatcacggaaaatcaaccctcactgattctcttgtggctgctgctggtattattgctcaagaagttgccggtgatgtccgtatgactgatacccgtgcagatgaagctgagcgtggtattaccatcaagtctacaggtatctcactctactatgaaatgactgatgaagctctcaagagttttaagggagagcgcaatgggaatgagtatcttatcaatctcattgactcccctgggcacgttgacttctcatctgaggttactgctgcactccgtattactgatggagctctagttgtggtcgattgtgtggaaggagtttgtgtccaaactgaaactgtgctaagacaagcccttggagaaaggattaggcctgttctgactgtcaataagatggacaggtgcttccttgaactccaggttgatggagaggaggcttaccagacattccagagggttattgagaatgctaatgttatcatggctacatatgaagatccactacttggtgatgttcaggtctacccagagaaaggaacagttgctttttctgctggtttgcatggctgggcttttaccctgactaactttgccaagatgtatgcatccaagtttggagttgatgaaggaaagatgatggaaaggctctggggtgaaaacttttttgatccagccacaaagaaatggaccagcaagaatagtggttctgctacctgcaagcgtgggtttgttcagttctgttatgagcccatcaagcagattattaacacttgtatgaatgatcagaaggataagctgtggcctatgctgcaaaagcttggggtcaccatgaaatctgaggagaaggacctcatgggtaaagcattgatgaagcgtgtcatgcaaacctggcttccagcaagtagtgctctattggaaatgatgatatttcatctaccctctccatcaacagcccagaagtatcgtgtggagaacttgtatgagggtcctcttgatgatcaatatgcttctgctatcagaaattgtgatcctgaaggtcctctgatgctctatgtctccaagatgattccagcatctgataaggggagattttttgcctttggccgtgtattctctggcagggtttcaactggtttgaaggtgaggattatgggacctaattatgtccctggggagaaaaaggatttgtatgttaaaagtgtgcaacgaactgtcatttggatgggaaagaggcaagaaactgtagaggatgtcccctgtggtaatacagtggctatggttggtcttgaccagttcatcacaaagaatgctactttgactaatgaaaaggaagttgatgcccatcccattcgagctatgaagttttctgtctcacctgttgttcgtgttgctgttcaatgtaaggttgcatcagatcttcccaagcttgttgaaggtcttaagcggttggccaagtcagatcctatggttgtttgtaccattgaggagtctggtgaacacattgttgctggtgcaggagagcttcatcttgagatctgtttgaaggacttgcaggatgatttcatgggtggagctgagatcattaaatctgaccctgttgtgtcattcagggagactgttttggagagatcatgccgcaccgtgatgagcaaatcacccaacaagcacaatcgtctgtacatggaagcaagaccattggaggaaggtcttgccgaggccattgactgatggcaagattggaccaagggatgaccccaaggttcgttccaagatcttgtctgaagagtttcggttgggacaaggatcttgccaagaaaatctggtgctttggccctgagacccttggacccaacatggtggttgatatgtgcaagggagtccagtatttgaatgaaatcaaggattctgtggttgctggattccagtgggcatcaaaagaaggtgctttggctgaagaaaacatgagagccatctgctttgaagtatgtgatgttgtgctgcacgctgatgctatccacagaggaggtggtcaaatcattcctactgccaggagagtcttctatgcttcccagattactgccaaacccaggcttcttgagcctgtctacctggttgaaatacaggctcctgaacaagctcttggtggaatctacagtgttcttaaccagaagcgtggacacgtgttcgaggaaatgcagaggccaggtaccccactatacaacatcaaggcatacctccctgtcatcgagtcctttggtttctcgagcacattgagggctgcaacatcaggccaggccttcccacaatgtgtgtttgatcactgggacatgatgtcttctgacccattggaggctggatcacaagctgcacagcttgtcactgacattcgcaagaggaagggcttgaaggaacagatgactcctctctccgagtttgaagacaagctttaaatttgtttcatgaattattttactttgaacttagtcgaatttattttctcttgtgaacaatgctactttagatttaatttctgttagttttgtttgtggttttgcccgtgaatgttgtaatgctgttatttggtccttgcatcgatgtatttttgctctaataggattttgcatcggtgttggttcaaattattattttgcgaattttgcttgaaagatagtattttcaataattgtgtggcgcttttgtttttgtggccaatgatccaatgagaacttggtaattgaatacagctaaagatatttt

SEQ ID NO: 3151 - DNA, 467 bp, Glycine max
  unsure (1)..(467): unsure at all n locations
gtagaaacttgattttacagccaacaaccacaattatacataaagaacccgacactaggatgtacaggaggacccccttttacacatctcgttggtgcagtagaaattgaagaaaaacaaacccaacactaaccataaaagacatcatgaactaatatcctagattttgtaggcacatcctacctagtaataagtccacaaagggcataaaacagagtctaatagttatggtaaaatagatggccattccttctggcagctgcatcccttttcactgatatgacccatttgagagcaaccttgccaagaaaatctggtgctttggccctgagacccttggacccaacatggtggttgatatgtgcaagggagtccagtatttgaatgaaatcnaaggattctgggttgctggattnagtgggcatcanaaagaggtgctttggctgaagaaaacatgagagccatct

SEQ ID NO: 3152 - DNA, 545 bp, Glycine max
gttttattgaaaatactactatcttatctttcaagcaggattcccaaatagttcgaaccaacaccgatgcaaaatcctatggataaaaaatacacctattcaaggaccaaataacagaatttcaacatcaggccaggctttcccacaatgtgtctttgatcactgggacatgatgtcttcttacccatttgagactggatcacaatctgcacaacttgtaaccgacatccgcaatatgaatggcttgaaagaacagatgactcctctctacgagtttgaaacacaagctttaaatttgtttggaactatttaacttacttttgaactagccgaatttatttctcatatgaacaatgttactttagatttaagttttgtcgagttttgtttgtggttttgtccgtgaatgttgtacttcttgtatttggtccttgcatcggtgttatttttaatccataagaattttgcatcggtgtttgtttcgaacttttttgggaatttttgcttgaaaggataaaaaaaataaaaaaatgggccggccccct

SEQ ID NO: 3153 - DNA, 1586 bp, Glycine max
tcgtgacgcgtgggcggactcgtgggttcaaagtgaactttgcaactttgagcagaaaatctcacctctctcccaagaaagaatcatcaatggcgattgaacacgaagacgatctcaaagacgagaagaaccctcgacccctcgacgaggatgacatcgccctcctcaaaacctacggtttgggaccttactccacaagcataaaaaaggcggagaaggaaatcaaagatatggccaagaaagtgaatgacttatgtggtataaaggagtctgatactggtttagctgcaccaagccagtgggatcttgtttctgataagcaaatgatgcaggaagagcagcctcttcaggtggcacgatgcacaaagatcataaatccaaactctgaagatgccaaatatgttatcaatgtgaagcagatagcaaagtttgttgttgggctaggagacaaggtttcccccactgacattgaggaagggatgcgtgttggggttgatagaaacaaatatcagattcagattcctttgcctccaaaaattgatccaagtgtgaccatgatgactgttgaagagaagccagatgtaacatataatgatgttggcggttgtaaggagcagattgaaaagatgcgagaagttgttgaacttcccatgcttcatccagagaaatttgtcaagcttgggattgatcctccaaagggtgttctttgttatggccccccaggaactgggaaaacacttttagccagggctgtggctaataggactgatgcttgttttataagggttattggaagtgagctagttcagaaatatgttggtgagggggctaggatggttcgtgaactatttcagatggctcgttcaaagaaggcatgcattgtgttttttgatgaagttgatgcaattggaggtgcacgatttgatgatggcgttggtggtgacaatgaggttcagcgcaccatgcttgaaattgtgaatcagcttgatgggtttgatgctcggggaaacatcaaagttttgatggcaactaataggcctgacactctagatccagcactactacggcctgggcgattggaccgtaaagttgaatttggccttcctgacttagagagtaggactcagatattcaagatacacacaagaaccatgaactgcgaaagggatatccgatttgaacttctggctcggctttgcccaaattccactggagctgatataaggagtgtatgcacagaagctggtatgtatgctatccgtgcccggaggaagactgtaacagagaaagacttccttgatgcagttaataaagtcatcaaaggataccagaagttcagtgcaactcccaagtatatggtttataactgagtaattctttcctctatttcccagaaactatattagcggttaccagtgaaaatttaagggcgcatgtttctttcaattagcagtttctgaaattcgtttgtttgaatgttgaccccaaaatatctaccaaacgtcttcaaattgttacatccaaagtgtgtctcattgcttttattaacaataccaagagtaacgtttaagcagttgcgttctttg

SEQ ID NO: 3154 - DNA, 466 bp, Glycine max
gtaacagagaaagacttccttgatgcagtaaataaagtcatcaaaggataccagaagttcagtgcaactcccaagtatatggtctataactgagttattctttcatcttcttttcccgagaccatagtagaacgtacattatctttattttcccctgaaaattgaagggcatgcgattctttctatttaactcctgtttgaatgcatctttgtctgtagcaaacgtttccttcatgttacatccaaaattgagagcaaaaccttcttttagccttttgaagaatatacttgttatcaatggaagttgttcgttattggggaaaaactatcctcgtattgtcatttgcatggagaaattgattaggatggatataaggaaaattgatttaagttgttagatgaaaatggttattgtgaaaataagaacaatataaattactagatgttatttgaatataaaaagatg

SEQ ID NO: 3155 - DNA, 289 bp, Glycine max
cgagccgaatcggctcgagaaagattttgatttggtgatgaaggttggagcatttcactgagttatataaaaggcgtggcttgtgggctgtgtagaactcaaatcgatcaaataaatggctactgaacatgaagacgatttcaaggatgagaagaatccccgccccctcgacgaggatgacatcgcccttctcaaaacctatggtttggggccttattccacaagcataaaaaaactcgagaaggaaatcaaagacatggcaaaaaaggtcaatgatttatgtggtatc

SEQ ID NO: 3156 - DNA, 282 bp, Glycine max
aaaatagtgaaagattagatagaaaagaaaggaaaaaagaggttgtgaaggtggagcatttcactgcgttatataaaaaggcgtggctttggtcggaagtaaagggcagaaaggtgtatatataatatcatatcaaagcatcaatcaaataaatggcaactgaacatgaagacgatttcaaggatgagaagaatccccgccccctcgacgaggatgacatcgcccttctcaaaacctatggtttggggccttattccaccagcataaaaaaagccgagaagg

SEQ ID NO: 3157 - DNA, 410 bp, Glycine max
atcgagccgattcggctcgagccaaaacagaaacaccagaggccgagtaaaaggttctacttctacaagccatggacatcaaactagaaagtgatgattctcagaatgaggagaatgaagaaaggctaccactcctgagaaatagtgaggtgccagaagcagagaggattctgattcagaaggcccttagcccgccttttacagagcaccgcacatgggggcaaccttttaccaactggcacagtccctgctttccaacttctgtccccaatcttcacaaatgttggcaactgtgactctgtcagcaaggccatgactgctgcacttgtatctctctgtggtgcctcatgcttcatgtcatgtttaactgatagcttccgagacagaaaagggagcatctgttatgggtt

SEQ ID NO: 3158 - DNA, 1283 bp, Glycine max
tgaatacaagacgtgtctataaaaagttaacgtgacctgttccaatgagcaacaaagagagcaaggagagaggagatgtcggtggagcagaaagcagcagggaaggaggaggagggaaaactgcagaagggaattgcagagttctacgacgagtcgtctggcatatgggagaacatttggggcgatcacatgcaccacggcttttatgacccggattccaccgtttctgtttctgatcatcgcgctgctcagatccgaatgatccaagaatctcttcgttttgcctctctgctttctgagaacccttctaaatggcccaagagtatagttgatgttgggtgtggcatagggggcagctccagatacctggccaagaaatttggagcaacgagcgtaggcattactctgagtcctgttcaagctcaaagagcaaatgctcttgctgctgctcaaggattggctgataaggtttcctttcaggttgctgacgctctacagcaaccattctctgacggccagtttgatctggtgtggtccatggagagtggagagcatatgcctgacaaagctaagtttgttggagagttagctcgggtagcagcaccaggtgccactataataatagtaacatggtgccacagggatcttggccctgacgaacaatccttacatccatgggagcaagatctcttaaagaagatttgcgatgcatattacctccctgcctggtgctcaacttctgattatgttaagttgctccaatccctgtcacttcaggacatcaagtcagaagattggtctcgctttgttgctccattttggccagcagtgatacgctcagccttcacatggaagggtctaacttcactcttgagcagtggacaaaaaacgataaaaggagctttggctatgccattgatgatagagggatacaagaaagatctaattaagtttgccatcattacatgtcgaaaacctgaataaatggagaggcaggattacttttatagaatgaagcaagtttccaacaggtcgtttatttcgatagttgagaaacaagagaaaaaataaatgaaaggggttgttcgatttttattttagttttctacatatgcaatatctcctatgattggcgaaaatatattatctacttaaataagtggcacgagtatttataattaagtaattaaaaaagaagtattgtatatatagagatagaaaactaatatttgtgacttgtgaaaacatcgtaaaggtgataaagagaaatgttagttaacgcc

SEQ ID NO: 3159 - DNA, 413 bp, Glycine max
gactattgaaggttgggcacccgtgagtgacatggccaccgtggtgaggatcccaacaatctcatgcatccacatccacacgttccgttcccaatcccctcgcactttcgccagaatccgggtcggacccaggtcgtgggctcctattcgggcatcggcagcgagctcggagagaggggagatagtattggagcagaagccgaagaaggatgacaagaagaagctgcagaagggaatcgcagagttttacgacgagtcttctggcttatgggagaacatttggggcgaccacatgcaccatggcttttatgactcggattccactgtttcgctttcggatcatcgtgctgctcagatccgaatgatccaagagtctcttcgctttgcctctgtttctgaggagcgtagtaaat

SEQ ID NO: 3160 - DNA, 1497 bp, Glycine max
ctcgagccgctctgacccacgcatccccaaaaaccctaggtagagagctcttcctccctttctcacagcaatggccgccgcagcacgccctctcgtcaccgtgcaggccctcgacggtgacatggcaaccgatgcctccgccaccgttcccatccctgacgtcatgaaggcctctatccgccccgacatcgtcaatttcgtacactcgaacatctccaagaacagccgccagccatacgcagtcagtcgtcgcgctggtcaccagacctccgccgaatcctggggtaccggccgagccgtctcccgtatcccccgtgttcccggcggcggaacccaccgcgccggccaaggagcctttggaaacatgtgccgtggaggacgcatgtttgccccgaccaagatctggcgccgctggcacaggaagatcaacgtgaaccagaagcgctacgccgtcgtctccgccattgctgcctccgccattccttccctcgtcctcgcccgcggccaccgcatcgagtctgtcccggagctcccccttgtcgtcagcgactccgccgaaggagtcgagaagacaaaagaagcgatcaaagtcctcaagcagatcggagcattccctgacgcagagaaagcaaaagacagtcgcagcattcgtcctggaaaggggaaaatgcgtaaccgtcgctacatctcacgccgtggaccactcatcgtgtacggaacggaaggagccaaagccgttaaggccttccgtaacgtccccggcgtggaagtcgctaacgtcgagaggcttaaccttctgaaacttgctccaggaggacacctcgggaggtttgtggtttggacaaaaagcgcttttgagaagctggattcgatttacgggtcttttgataagccctctgagaagaagaaggggtacttgcttcccaggcccaagatggttaactctgatcttgccaggattattaattctgacgaggttcagtctgttgtgaggcccattaagaaggatgtgaagaaggccacgctgaagaagaaccctcttaagaacctgaactctatgctgaagctgaatccttatgccaagactgctaagaggatggctcttcttgctgaagctcagcgcgttaaggccaagaaggagaagctcgacaagaagaggaagactgtctctaaggaggaagcgtctgccatcaaggctgctgggaaagcatggtatcacactatggtgtcagattctgattatacagaattcgacaacttttctaagtggttgggtgtttcacagtaaacttcatgatttattttttcgtattagaattttgttttttatgctcatcagaactaaatatccttatctttggtttttttgttttgcgggttaaggttgtcatcataattatgcagacaatgtggaaattttgtttgttggattttagtgcaaattctggttcttatattaaaaacaacaacgtaaaaaacaaaaaaaagcggccgctc

SEQ ID NO: 3161 - DNA, 712 bp, Glycine max
  unsure (1)..(712): unsure at all n locations
gcgagaagacgacagagggtgagagaaagagagagaaagatgtcgaagcgtggtcgtggtggttcggcggggaacaagttccgcatgtcgctgggtctgccggtggcggcgacggtgaactgcgccgacaacacgggggcgaagaacctctacatcatatcggtgaaagggatcaaaggccgtttgaaccgtcttccctcggcttgcgttggcgacatggtgatggccaccgtgaagaagggaaaacccgatctgaggaagaaggtcttgccagctgtcatcgttcgccagcgcaagccatggcgccgaaaggacggcgtctacatgtacttcgaagataatgctggtgttattgtcaatcccaagggagaaatgaaaggttctgctatcactggtcccattggaaaagagtgtgctgatctgtggcctaggattgcaagtgcagctaacgccatcgtttgagtggaatttcttgttatgtttaagcttgtaggatttaagtgtgtctcagattttgtttaagcttgaaattggaatacaagtgatacagatttttaatcattcgtaacttataatcagcttgctttttgaagagacgatattaattattaattaagaattttgttttttgttaaaaaaaaaaaaaaaaaaanaaattannnnnnnnnnnnnnnnnnnnnnnnnnnnnnnnnnnnnnnnnnnnnnnnnnnnn

SEQ ID NO: 3162 - DNA, 737 bp, Glycine max
cccacgcgtccgcccacgcgtccgcccacgtagttccaccgagtagcaacaatgtcgaagcgaggtcgcggaggatcggcgggaaacaagttccgcatgtcgctgggtctgccggtggcggcgacggtgaactgcgccgacaacaccggcgcgaagaacctctacatcatatcagtgaaggggatcaagggtaggctgaaccggttgccgtcagcttgcgtcggagacatggttatggccaccgtcaagaagggaaagcccgatctccgtaagaaggtgctgcccgccgtcatcgtccgccagcgcaagccttggcgccgaaaggacggtgtttacatgtacttcgaagataatgctggtgttatcgtgaatcccaagggtgaaatgaaaggttctgctatcactggtccaattgggaaggagtgtgctgatctgtggcccaggattgcaagtgctgccaatgctattgtttaagctgggattttagtttatgtaatgtttctgcttcttgaagttgtttcagatattgttttaggttgaattgcagacaatattggcatttggcacatatagtttgtctttgcttgacttctcagggagaagtgttttgatgagattaattgatagttacaagaggtgttttcttggttgttcttgtgaaaaaaaaaaatatggaaccaaacaaaatagacctaatataaaaaaacttgaatgaagaaacaactcaagtaacatgg

SEQ ID NO: 3163 - DNA, 606 bp, Glycine max
tagcgtcacgaattctagggccgcaggacgtctaagagacgacgcggtggttcggcggggaacaagttccggatgtcgctgggtctgccggtggcggcgacggtgaactgcgccgacaatacgggggcgaagaacctctacatcatatcggtgaaagggatcaaagggcgtttgaaccgtctcccctcggcttgcgttggcgacatggtgatggccaccgtgaagaaggggaaacccgatctgaggaagaaggttttgccagctgtcattgttcgccagcgcaagccatggcgccgaaaggacggcgtctacatgtatttcgaagataatgctggtgttattgtcaatcccaaaggagaaatgaaaggttctgctatcactggtcccattggaaaagagtgtgctgatctgtggccaaggattgcaagtgcagccaatgctatcgtttgagtgggaattcttgttaaatgagttttatgtttaagcttgtaggactgaaatttgtctcaggtttttttcagccttgaaattgaattaccagggggaccagttttttttatccttcgtaacttgttatcagccagaagctttttgaagagacgagat

SEQ ID NO: 3164 - DNA, 364 bp, Glycine max
gtgagaagtgttttgatgagattaattgatagttataagaggtgttttcttggtttatgtaatgtttctgcttcttgaagttgtttcagatattgttttaggttgaattgcagacaatattggcatttggcacatatagtttgtttttgcttgacttctcagtgagaagtgttttgatgagattaattgatagttataagaggtgttttcttggttgttcttgcgaaataataacacacacaaaaataattggcttttataccattactaaaaaagtagcggtgtatccacaaaagaatacatccatggcgaacaaatatttattcaaacttctatacaactttaccaacaggccggccttttt

SEQ ID NO: 3165 - DNA, 1045 bp, Glycine max
accggatcgttagcacaagttcaggaactatgagtggcttggtgcccatttgttctagaacgcttatgttgggataccaatacatgaggacggtcattggaacttgatcattatttgtgtcccagacaaagaagatgaatcggggccaatcatacttcatttggattctttgggtcttcactctagtaaatcagtttttgataatattaaaagctatttgattgaagaaaagaactacatggatcgagaagacatggcttcagatgtttcaattgcggatagaatatggaagtgccttcctcgtagaatcgaatctcaaatcattcaggttccccaacagaagaatgactatgactgtggtctttttgtattgtacttcattgaacgtttcatggaggaggcaccggaaagactgaaaatgaaagatttagatatgtttggaaggcgatggttcaaacctcaagaggcgtccaatttgagagtgaaaatccgtaagttgcttgtagaaaaattacagaattcagtcacggataattgtaactcggaatcttctccttcgtcatctgctggccctgcaactgattgtgttgagactgccagggattctcttactggccctgcaactgattgtgttgagaccaccgaggattctgtgacttaacatggcagagaattgcaattgtcatttccttgaacgaacaatctgttgatattcgtatggttggggccagttttttttttccttgtacagaagccagctattcagctggtaatttttggatagagttttcctatgacctggtaaatagtccatcagtctttaatccaagcaagggtggctaacagttggctgtgcagaaataactaacaactctagttcctaacctttccaaatgtatagtgggggaaacagtacaaaactgacgactagaggcaatatagagttcaaatctacccggtatttttggaagttgttttcatcccaactttactttcgtatttatcatatataggaataaaccgattcatagcattcattttaccc

SEQ ID NO: 3166 - DNA, 268 bp, Glycine max
tttgtattgtacttcattgaacgtttcatggaggaggcaccggaaagactgaaaatgaaagatttagatatgtttggaacgcgatggttcaaacctcaagaggcgtccaatttgagagtgaaagccccgattcccttactgaccctgcaactgattgtgttgagaccaccgaggattctgtgacttaacatggcagaattgcaattgtcatttccttgaacgaacaatctgttgatattcgtatggttggtgccagtttttttttttc

SEQ ID NO: 3167 - DNA, 1700 bp, Glycine max
aggcttttatcttttgacttttattattgctgacttcctctttgttttctgatctatggcttccaaggagttctctggtctttgctccttggctccttcactatctgagagcattttgtgcactactgggttgaaaatgtatatgctggagagcaaaggaggtgccatagcatgcatgttcttgtctcttttcttcttggggacatggcctgctcttttgactatgttagagaggcgtggtcgtcttcctcagcatacctaccttgattactcaatcaccaatttcttggctgctttactcattgcttttacacttggtgggataggcaagggcacacatgatcagccaaatttcttagttcaacttgctcaggataactggccctccgttctttttgcaatggggggtggtctgttccttagccttgggaatctgtcaagccaatatgcatttgcttttgttgggctatctgttactgaagtgatcacggcaagcataactgttgtcataggcacaaccttgaattactttttggatgacaaaatcaacaaagctgagatccttttcccaggagttggttgctttctgattgcagtttttctaggttctgctgttcattcatctaatgctgctgataataaagcaaagctcaacaatttcaccggtgattataaaaatggagacacctctttgaaggatgggagatatagttaaatcaaaagatctcagagggtgaagtagttctgcagacaatgtcgaagcaggaactgcagtttttctcgtggagcttgaggaaaaaagagctattaaggtttttgggaagagcactttgattggattggctctaacattctttgctggactttgcttctctatgttctcaccagcattcaacatagcaacaaatgaccaatggaatactttgaaaaaaggggttccccatttgacagtttatactgccttcttctatttttcagtctcttgttttgttattgccatgattctaaacatcaccttcctctaccaccctgtcctaaacctacccaagtcatcatttaaggcttatttggcagactcagatggcagagtctgggccttgttggctggtctactttgtgggtttgggaatggtcttcaatttatgggtggtcaagcagcaggatatgcagcagcagatgcagtccaggcacttccacttgtaagcactttttggggcgtgattctgtttggagagtacaggaaatcatcaagaagaacatatatactgctagggagtatgttgtttatgtttatagtggctgttgctgtgctaatggcatcatcagggcaaagaaacagcactgccaaggaataattggacaacacacaagttgtttatagattgcctagtgcaaagggagaaaaattctcattgttcattggtgtgaataagagaagaagaaaaaatctattaagaaaagagtgcagaaaaagaaataaagcagggagcatagttgatatattcttattgaaatgcttttatgttttttatttttctgtatatttggacttccaaaatgaaaaattgtccgattatatatatatatatatatatatatatataatatctccaatgtttgttctggctttatattgtgtactatttgtcgtgtcctatgctttcaaaataatagttgaaacaaattacgtgattgaacac

SEQ ID NO: 3168 - DNA, 372 bp, Glycine max
tattgtggctgttgctgtgctaatggcatcatcagggcaaagaaccagcactgccaaggaataattggacaacacactacaagttgtttatagatttcctagtgcaaagggagaaaaattctcattgttcattggcgtgaataagagaagaaaaaaaaaagctattaagaaaagggtgttgaagaagaaataaaagcagggagcatagttgatatattgttattgaaatgcttttatgtttttgttttttgtatatatttgggactttcaaaatgaaaatttgtaccataatatatatatatatatatatatatatatatatatagacatatatatatccaatgtttttactgactttatttaaaaaaaaaa

SEQ ID NO: 3169 - DNA, 282 bp, Glycine max
actgtttctctattcaagtacttccaatttcaataaggctgacctgctgaggagttctctgctctttgttccttggtttcttcactctccgagagcattttgtgcactactgggttgaaaatgtatttggtggagagcaaaggaggtgccataacatgcatgttcttggctcttttcttcttggggacatggcctgctcttttgactatgttagaaaggcgtggtcgtcttcctcagcatacctaccttgattactcaatcaccaatttcttgtctgcttta

SEQ ID NO: 3170 - DNA, 413 bp, Glycine max
cagaaacaaacccacccgggacaacctcctcctatcattacactaccgccatggtcgaaccaaagtcccgaaccgtgggcaacaccgagcgaagctggtgccaagccgtccgcggtggcaccggcatcgccgtcctcgccctcctaacctcaaaaccccccgatatccccaagctccaaacctccctccgcaccctccaaacctcccacccaatcctcagttcccgactccaaaccaacgcaaccacattctccttcctcacctccccaaccccctccatcaaaatcttaacactcacgctccctactaacctcaccgaccccctggcccagatcctcgaactcgagctcaaccgtaacccgtggcaggattctaccaccgaagaaaacgtgttcttcaccaccatctacgca

SEQ ID NO: 3171 - DNA, 1195 bp, Glycine max
cccacgcgtccgttttaggatattatccatccaagactctcgctctcacagggactccatgaatgtatatttcgcactataatattagaccataaaataaacaaaataatgtggaagtttgggctaaggttgggccgagcccagttgaaattcaaattgagaagtgagcgtaatcaaagggtggatatagctgcgttaggttaacgcgttcattcaaaatacggaacttgaaaccctcccaatataaaccctcgcttccttgtgtactctctcactttccattctcttcaaacctaacgcagcatcgctattctcttcattccatggctttgcccaatcagcaaaccgtggattaccctagtttcaaactcgttatcgtcggcgatggtggcacaggaaagacaacctttgtgaaaaggcatctcaccggagaattcgagaagaaatatgagccaaccatcggtgtggaggttcacccattggattttttcacaaactgtggaaagattcgattctactgttgggatactgctggacaagagaagtttggtggcctcagagatggatattatatccatgggcaatgtgctattatcatgtttgatgttactgcccggctaacatacaaaaatgttcccacctggcaccgtgatctttgcagggtctgtgagaacatcccaattgttctttgcggtaacaaggttgatgtcaagaacaggcaagtgaaggcaaagcaggttactttccacaggaagaagaatttgcagtactatgagatttcagctaagagcaactacaattttgaaaagccattcttgtatttggccaggaaacttgcaggtgatcctaacttgcactttgtagaatctcctgcattggctccaccagaagttcaaattgatttagctgcacagcaacagcacgaggctgagcttcttgcagctgctagtcagccccttcctgacgatgatgatgaatcttttgagtagagggcttgagtgtttgtggactgtcttcctgagtgttggtatttgtatgctaccgtatgtgctgttgggggttgtagtgttgacatttttggatgtgaattcgaggatctgaatcaattatgatcagatttgttgcttaagtttaaaatctcattttactatatatccatgaacgttaaaaagatgagaggattggttttttcaac

SEQ ID NO: 3172 - DNA, 770 bp, Glycine max
atttcagcgaagagcaactacaatttcgagaagcctttcctctatttggccaggaaacttgcaggtgatcctaacttgcactttgtggaatctcctgcattggctccaccagaagttcaaattgatttagctgcacagcaacaacacgaagctgagcttcttgcagctgctagtcagccccttcctgacgatgatgatgaatcttttgagtaaaattgtgctttttctgagtcgtgttactgcgtatgctatgatatgtattttgggggggtgtattgttgacattttttggatgcggatttgagtatcagaaatttaatcattttgctttaattaaaaatctctcccaatagtttgacatatccttgtggccaagggctgtagtgcgtgtgtttgtgtgatttggctctcttgaacagagagacacgggggaaagagcaaacaaggctgtttgtgccaagtgctattttgcttctcgagtttgtccctccaacaagaaatgatattggcttatttcctcctatttaaaacgactagtttggtgaagtcaatttaatattcagtgaacaatgtcgaaaacattacgtacatattcgtatacattccattggcgtgaatggtttatgtattttggcctttgttttcttgtaaacggtcactttataacgtcatgtggtgtctggagatttatctagcttcatatttgagttgtgcttaaaacggattctgacaacgatgcttgacgttaatgtattcctctgttttttttt

SEQ ID NO: 3173 - DNA, 543 bp, Glycine max
aaaaccttcgcttcttttcacgctctcaaacaccatcatctacaacgcctcgaatccacacagttctactctacgctctaaaccctctctctctctctctctcgatctatcatggctttgcccaatcagcaaaccgtggattaccctagtttcaaactcgtcatcgtcggtgacggcggtacaggaaagacaacgttcgtgaaaaggcatcttaccggtgaattcgagaaaaaatacgaaccgaccattggagtggaggttcacccattggatttcttcacaaactgcggaaagattcgcttctactgttgggatactgctggacaagagaagtttggtggcctcagagatggatattatatccatgggcaatgtgcgattataatgtttgatgttactgcccgtctaacatacaaaaatgtccctacctggcacccggatctttggcgggtctgtgaaaacatcccaattggtctttggggtaacaagggtgatgcagaccgggcaggaggcaaacagtacctccacaggagagaattgcga

SEQ ID NO: 3174 - DNA, 1024 bp, Glycine max
gacacgaacttttataaacccttgacttcatttctttccaatctctcttaatacatatcactttcttcaccgttcgctctttctttctcccctacacaaaacatggctttgcccaatcagcaaaccgtcgattaccccagcttcaagcttgtcatcgtcggcgacggtggcacaggaaagacaaccttcgtgaagaggcatctcactggtgaattcgagaagaaatatgaaccgaccattggtgtggaggttcatccgttggattttttcacgaactgtggaaagattcgcttctattgttgggatactgctgggcaagagaagtttggtggcctcagagatggatattatatccatgggcaatgtgcgattatcatgtttgatgttactgcccgtctaacttacaaaaatgtccctacctggcatcgggatctttgccggttcataaatctgtttaacagtttcatcactgattatttatctgcaagttgtttacatcggatgatggacattttctgtataactgatttttcagggtctgtgagaacatcccaattgttctttgcggtaacaaggttgatgtcaagaacaggcaagtgaaggcaaagcaggttactttccacaggaagaagaatttgcagtactatgagatatctgctaagagcaactacaattttgaaaagccatttttgtacttggccaggaaacttgcaggcgatgctaacttgcactttgtagaatctcctgcattggctcccccagaagttcaaattgatttagctgcccaacaacagcacgaggctgagcttcttgcagctgctagtcagccccttcctgacgacgatgatgatcaatttgagtaggaattgtgggtctgtggatcattttacttagttaatggtatttgtgtatgctacaatgtgtctttggggttgtattattgacatttttttacgtggatttgaggatttaaaattaatcattatgaggtgttttactcctaaaaaaaaaaaaaaaaaaggag

SEQ ID NO: 3175 - DNA, 379 bp, Glycine max
cggctcgagcggctcgagcggctcgagcaccgttcgctcttcctctcccagacaaacacatggctttgcccaagcagcaaaccgtcgattaccccagcttcaagctcgtcatcgtcggtgacggtggcacaggaaagacaaccttcgtgaaaaggcatctcactggtgaattcgagaagaaatatgaaccgaccattggtgtggaggttcatccgttggattttttcactaactgcggaaagattcgattctactgctgggatactgctggacaggagaagtttggtggcctcagagatggatactagtaagtcaccttttatagtgtatcagattgtgtttgttatgacgattaagatggtttgtcaatctcaacttc

SEQ ID NO: 3176 - DNA, 416 bp, Glycine max
cgtttcgttcccactatcactttcttttcttcaccgttcgctcttcctctcccagacaaacacatggtaatgctattgatctctctctgtttttcgattttctctccacattcatttcattcttttgttttcgtcgcaggctttgcccaatcagcaaaccgtcgattaccccagcttcaagctcgtcatcgtcggtgacggtggcacaggaaagacaaccttcgtgaaaaggcatctcactggtgaattcgagaagaaatatgagccgaccatcggtgtggaggttcacccattggattttttcacaaactgtggaaagattcgatttttcttctgtccagcagtatcccagcagtaaaatcggatctttccacagtttgtgaaaagattcgattttactgctgggatactgctgg

SEQ ID NO: 3177 - DNA, 402 bp, Glycine max
gttagggttagggttatttcccaattcgtcttgtccggttctcgtaacgatctaggttattctataatccaaaacatttcggcaccgtcatacacatcagggagtatgaatttcactattattatttatttatttcgtgtaaaacgatttgcaggaaagacaaccttcgtgaagaggcatctcactggtgaattcgagaagaaatatgaacgtgagattcttccgctattattttatgattattaatcttttatttgggtttatctcattcttttgtcgattatgcttaatctgaatcagcgatcattggtgtgtaggttcatccgttggattttttcacgaactgtggaaagattcgcttctattgttgggatactgctgggcaagagaagtttggtggcc

SEQ ID NO: 3178 - DNA, 641 bp, Glycine max
cagaaggggactcacacctaccttgacacattttaaatgtagccactactaactttatcataccactcactcttacatcattgtccctaaatggcggaaaccctgatccaaatcggcgtggttgggtgcgccgacatagcccggaaggtctcccgcgccatcacgctcgcccccaacgccgccctctgcgccgtggcgagccgctctcacgacaaggcagccgcattcgccgccgccaacggcttccctctctcagccaaagtgtacggctcctacgagtcccttctggaggaccccgacgtggacgccgtctacatgccactccccaccagcctccatcttcactgggccgtgctcgcggcccagaacaagaaacacttgcttctggaaaagcccgtcgcgctcgacgtggcccagttcgaccgcattctcgaggcctgtgaatccagtggggcgcagttcatggataacaccatgtgggtccataacccaaggactgctgccatggcccacttcctcaacgatgctcaacgttttggtaacctcaaatcgttgcaatgcaagagttcattgagtattttgattgccatatttgcttggcctaacttctaaaaggagctgctgaataaataactcaaagg

SEQ ID NO: 3179 - DNA, 752 bp, Glycine max
ttagcagatgagcctaaggtgtatgacataagacgacaatattttgttccgatgggaccggacaagggacgatgaaatcagtgtagtggaagaagttgtgtttttgttgggacaattggtggctctcaaattgtgaaccgcacatatacccaccctgcttcccacgccacatcgatctcacgttctctctctttcttctttcttgttgaaactgtgagtctatgttatttgtggcggagcatgaactcctccaccaacacctcgaattctcagtcaatggctgcagcagccagtgatgggtctgggaagaaggtaagaaaaccttacaccataaccaagtccagggagagttggactgaggaagagcacgacaagtttctcgaagctcttcaattatttgacagggactggaagaaaattgaagattttgtaggttcaaaaacagttattcagattcgaagccatgctcagaagtacttcttgaaagttcaaaagaatgggacagtggcacatgtgcctcctccccgtccaaagcgcaaagctgctcatccttacccacaaaaggcatcaaaaaatgttttggtgccactaccagcttctgttggttatgcttcatcgagaaatacgcttgcacctgggtttgcctcatgggatgaaacttccctgctgatgaatgctggagccgataaacccatgacctgtcaggatgaactcaacatcttcatcatggaaatgaagctgatattggatca

SEQ ID NO: 3180 - DNA, 557 bp, Glycine max
cgacagaagggggagaatagttatactttaatatttcttttcccatatgatgagtgtggtgatgggtgggtgagtccgaattgtgaaagtaagcaaagatggctttcacggaatcgtctctcctccttccttcggtttcaggaaccaacaagaacaagaacaaggttccagaagacaaatggtatttagcctacattgtgtattttaccctgggtctcggttaccttctcccatggaacgctttcatcaccgccgttgattacttctcctttctctaccctgacgccagcgttgaccgcatcttcgccgtggtttacatgatagtcgggctggtggggatctccctcataatcctctacagccacaagtctgacgcctatgtgaggatcaacgttggattggccctattcgtcgtttcgcttctcgtcgttcccctccttgatgccttttacataaagggtcgggtcgggttttatagcgggttctacgtcaccgccggcgccgttggactttccggcgtggccgatgcgttggtgcagggctccattgttggctcc

SEQ ID NO: 3181 - DNA, 1270 bp, Glycine max
agcaaacacaaacacttgaagtactaagttagtgtttttgagcaaactatggcttcgttttgttctagattgaccatttgtttggctctgtttgtcctcatattggggagtgccaatgcccaactttctacaaacttctactaccattcgtgtccaaacctcttctccactgtgaaatccacagtgcaatctgccatatcaaaggagacccgcatgggtgcttctctcctccgcctgttcttccacgattgctttgtcaatggatgtgatggttcaattctattggatgacacatcaagcttcaccggagagaagaacgcaaaccccaacaggaactctgctcgtggatacgaggtcattgacaacattaaatcagccgtggagaaagcgtgtccaggagttgtctcctgcgcagatatccttgccatcgctgccagagactctgttcagatccttggaggccctagttggaatgttaaagttggaagaagagacgctagaactgctagccaatctgctgctaacaatggcatccctccacccacttcaaaccttaaccaactcatctcaagatttagcgctcttggactttccaccaaggacttggtcgccttgtccggtggtcacacaattggacaagcaaggtgcacaaacttcagagcccgcatctacaacgagaccaacatagacaccgcatttgcaaggacaaggcaacaaagctgcccaagaacatcagggtcaggggacaataatcttgcaccgcttgatcttcaaactccaaccggcttcgacaactactacttcaagaacctcgttcagaagaagggtctcctccactctgatcagcaactgttcaacggtgggtccaccgactccattgtgcgtggctacagcaccaacccgggcaccttctcctctgatttcgccgccgccatgatcaagatgggagacattagtcctctcactggctccaatggagaaatcaggaagaattgtagaaggattaactaatttaattcagtcttgaatattaagggtcctacacatacgcaagcaatttaattgtgtttaataagttgttaaaacatgttttggttgtattttggattcctagtgtagtttcggtgatcaatgccgtctactttagtgtgttctacttccctttatttttgtttcttttttactttttccttaactatattgtagggaaaaaaaaaatcctttatcaagcatttatcaagaacggagtttgctttttaattttcccttc

SEQ ID NO: 3182 - DNA, 632 bp, Glycine max
gcggccgcaagcagagatgacaacccgatttaagaagaaccgcaagaagcgcggccacgtcagcgccggccacggccgtattggaaagcaccgcaagcaccccggcggccggggaaatgccggcggcatgcaccaccacaggatcctcttcgacaagtaccacccggggttcttcgggaaggtagggattaggtactttcataagctccgcaacaaattctactcccccatcgtcaacatcgacaagctatggtctctgataccccaagacgcgaaggacaaagccctaaaatcgaaggacactgcccctctaatcgacgtcactcagcacgggtacttcaaggttctcggaaaaggtgtgctgccccaaaaccagcccattgttgtgaaggccaagcttatttcgaagatcgcggagaagaagatcaaggaagccggtggtgctgttcttcttacggcttaggttaatttttttttcccacacatccgaggctgttgtttgtgttgtgtgtgttttgtcccgcatgacttttctatattacatatcgcaagtaagacactgtgtttttttattgcttcgttgttgtcggattcagcttaattaaaaggtttatgcgaccaattttgcgccc

SEQ ID NO: 3183 - DNA, 547 bp, Glycine max
acgcccacgcgtccggagattaccaccctatggattaagaacctcaagaagcgcggccacgtaaagacccttctataccgtatcggaacgcaccgtatgcaccccgtctgccgatgaaacgccagtcgcatgcatcaccacacgatcctgttcgacaagtaccatccgggcttattcggtaaggtgggaatgaactacttccataagcttcacaataaattctactcccccatcgtcaacgtcgaaaagctatgatctctcataccccaagacgcgaaggaaaaagccctaaaatcgagggacactgcccctctaatcgacgtcacacagcacgggtacttcaaggtcctcggaaaaggtgttctgccccaaaatcagccttttgttgttaaggccaagcttatttccaagatcgccgagaagaagattaaggaagccggtggcgctgttcttctcaccgcttacgtttaaaaactggtttttaattgggttgctttgtttcggataacttttttgattatatattgcaagtgatacattgtgtttt

SEQ ID NO: 3184 - DNA, 821 bp, Glycine max
gtggttttgatgatggggccagccagttacatatcaacgccctgttgactcttgtaattattttgtttctcaaatttccctcccaggttgcaactagtggtagatttggctggaagttgggaccatttactttgccttgccatccccgcctccacaccaaccactcaagatgtctctccttaagctgctgagcaatgatggttgatatgatatgatatggatatcagggtcaggtcatacaccaccatgatgcatcacaaatgggcaatacattgatcctattccatggccacttgccaaaacaaaacgctaaaaataacattaaaaaaaaaggttaagctatgcagcagcattcagcagtttcaatgcagtgcatggcatcatttgttgaaactaaggactggccacgcatttgttgaagctttatacaaaatattgtggctgaaagaaagataacaatgtggactttttgatggttgtggtggtgaggggtttttggttgtaagtgaccagcttcggggtccatgtaaaaatagcatgacagggactggaggtgtcttggttctgttggtgttgttggggagggggtctagttgaggtctaataatggaaaaaaacgatagttaggatagtgttgtgaataaaaaatgagtccaggctttggtttatgctaacttgttcttttcccaattcaatttgttcactcagctattttagcttaagttcagcattgagaacaacactttgtgcatgttcagttgtttttgctcactttatctttttaacgttttgaaaataattctaagctatgatcattactt

SEQ ID NO: 3185 - DNA, 766 bp, Glycine max
ggaacaagagcatctccaatattctggaatgcggggaattatagtggagatactgttatcattgagattttttatctaccagtatggtctggtatatcacttaaatattacgaagaaaggcacaaaaagttttctggtctatggcatttcatggttggtgatattcgtaatattgtttgtgatgaagacggtatctgttgggaggcgtaaattcagtgcaaattttcaacttgtcttccgactaatcaagggaatgatattcctcacttttgtctcgattcttgtcattttgattgctcttccgcatatgacagtgcaggacattgttgtttgcattcttgctttcatgccaactggttggggaatgctgcagattgctcaagcattaaaacctgtagtacgccgggctgggttttggggatcagtgaaaactcttgctcgaggttatgagattgtcatgggtttgctattgttcactcctgttgcttttctggcttggtttccatttgtttcagaatttcaaacccgtatgctgttcaaccaagcattcagcagaggtttgcaaatttctcgtattcttggtggccaaaggaaggaacgctcttctcgcaacaaagaataggttgttaactctgaagggttaattattaggagtccaaaattcttggttgccgtaagagctgtattaattgtaagtagttgtaactatgaatctgacagattctactctttgctttcattgtaacatttgagtaatcattatcat

SEQ ID NO: 3186 - DNA, 718 bp, Glycine max
aaaaaagggtacggtggcaaagacgacagaaggggaccacattccaaaacacaaacacatacattgtagtatcacttttgtctcggaatttgttcttttgagttatggcaagcttaaaggttgcatgtgtggttttgatgtgcatggctgtgatgagtgcaccaatgatggtgcaagccgtgtcatgcaatgatgtttctgtgaacctagcaccgtgcctatcttacctgatgcagggtggagatgttccagaatcgtgctgtagcggagtgaggaacattctgggttctgccagcaccacctttgacaaacaaaccgtgtgcaaatgtcttcagcaagctgctaataactatggcatcaacgacgaatacgctcaggcactccccgcccgctgcaatgtcagcgtcccttacaagatcagccgatccaccaactgcgactccatcaagttctaaaggagcgggtagctttgccaatttcttccgcgggataatgaggcaacgtatgctgtaacacttgttatcgttatcattaaaataaaagaaagcgagtgtgactcgggttccactcatgtgagcctgttattgtattagtttctgtttcagatactctctagtctttgttgtttcggtgtgattaaatgtatcttagttgattgttgctcgcaacaattaatcacgtatttgatataataattccaagctactttgattgttgc

SEQ ID NO: 3187 - DNA, 848 bp, Glycine max
acgagagagaactagtctgagtttttttttttaacaataaacgaagtgtattattagtattgagtttgttcctccatcgcaaaatttattttcgtatcgaggaaaatggtctgttgtttgttccaaaaggccagggccagaatccgcaagcacagatgttctctgatccaaacatggccatggatatgatgaagaaaaacctttcaatgataattcctcagactcttacttttgcttgggtgaactttttcttttctggatttgtagcagccaagataccctttccattgacacagaggtttaggtcaatgctacagaacggaatagaccttagcacagtagatgttagctatgtcagcagtcgctcttggtacttcctcaatctgtttggattaagaggattctttagtctcatcttgggtgaagaaaatgctgtagatgatacacaacgtatgatgcaaatgggtggatttggatttgatccttcaaagggtctaagtgctgagaaagacaatcttgacataacccagcatgactgggccttaccgaattttgagcagcgggctgaagctgtgttgaggaaagtcgtcagttaaccatgttatgatgtaggaggcttaattgcttacatttgctggatactctctggaaattctattgttgcggtaggagctgtaccttttgcagcaaaagatatcaaagatcatgttgagacaatgagtggtcttgaaacttgacatttttcattttattatcagagaatgttgtcacgattttgttgaagctagaactgaaattattcattcttgcttatttttcttaatgccataaccataagacgcatgaag

SEQ ID NO: 3188 - DNA, 713 bp, Glycine max
attttaaagtttaaagtttctttgaataatgacacaacttgtattttgtattagtacatacatgtgttgacttatgatagtcatctgcttggcacaaccttggattcattacttttactatttatctcttgaaaatgtttaaaactttcttgcacagccaagataccctttccattgacacagaggtttaggtcaatgctacagaatggaatagaccttagcaccgtagatgttagctatgtcagcagtcgctcttggtacttcctcaatctgtttggattaagaggattctttagtctcatcttgggtgaagaaaatgctgtagatgatacacaacgtatgatgcaaatgggtggatttggatttgatccctcaaaggttcaaattaccaaattttatgagtggtttactctagatttttcataattttaaagatcaatcattgaaaattatcatgtgattccatgacttgttgatccccctttcccccggccataccacaaggtaaaagggataatttgtttcagtgtgagtccatgtggtttactctctgtaggtgcattcttctaaatgtataaggaaaaaagaatagtctttgctgaggatttgggggcatttgtaaaagcttatttgagcttatgaagatgacttatgttataatctttttagcttatgacataagctcttatttgataagagattattatttatta

SEQ ID NO: 3189 - DNA, 690 bp, Glycine max
aaacatgcgactttgtttttttaacgataaacgaagtgtattattagtattgagtttgttcctccatcgcgaaattagggttcgctcacttgtcttcaatttcccaaattcaccctgcaccatccttgaatcctccaattgacacgccttttggatccatttttctccgtgaggccgtgacgcatcgcgattttgttttgggaacccgcgaaactgaatcagatagtgcggcacggaaactaggaattagagcaatggcagaagatctggtgctggatactgcaatcagagactgggtgctgatccctctctctgtggttatggttctcattggggtgctccgttattttgtttctaagcttatgcactcttctcaaacccctgacgccaaaattgttaaagaagggcaagtgatcgttagagctcggaatttacgtgctgcggcgaattttattccatccaaggcatttcgcgctcgcaaaatttatttctgtaacgaggaaaatggtctgttgtttgttccaaagggccagggccagaatccgcaagcacagatgttctctgatccgaacatggccatggatatgatgaagacaaacctttcaatgatcattcctcagactcttacttttgcttgggtgaactttttcttttctggatttgtagcagccaagataccctttccattga

SEQ ID NO: 3190 - DNA, 412 bp, Glycine max
caacatgcgactttgtttttttaacgatgaaaacgaagtgtattgagtaatactccgttccctggttcctccatcgcgaaattagggttcgctcacttgtcttcaatttcccagattcacctagcaccatccataaatccccctattaacgtgtctttcggaccgatttttctacgtgacgcatcgcaattcttcagcggtttcgtttagggaacccgcgaaaccgaatcagatagtgcggcacggaaactaggaattaaagcaatggcagaagatctggtgctggatactgcaatcagagactgggtgttgatccctctctctgtggttatggttctcattggtgtgctccgttactttgtttctaagcttatgcactcttcacaaacccctgatgccaaaattgttaaag

SEQ ID NO: 3191 - DNA, 406 bp, Glycine max
tttacataacccagcatgactgggccttaccaaattttgagcagcgtgctgaagctgtgttgaggaaagttgctagttaaccatgttatggagtaggaagcttcattgctagcattagcaggatacacttactttctattgttgcggtaggaggtgtacctttttgcagaaaagatatcaaagatcttgttgagactgtagtcttgagactgaacattttgcaactatcagaaaacattgttcggttttgttgaagctagaactgaaactattcattcttgcttatttttctgaatgaccattgccataaaaagcatgaaggcttcccaggaaacgttgagtcccggtaatgtgtttcaaggcctattcaactattctatctgtatcccacattccactcctagaa

SEQ ID NO: 3192 - DNA, 1789 bp, Glycine max
  unsure (1)..(1789): unsure at all n locations
ctcggaattaggctcgagctgctgccatggtacagttacatgcagacccaagtgcagcagcgcattatgagactaccgtgtctcccatggatacattctctgagatgccctctagctctcaaactggtgcagaatatcctgctcatactgctttctctaatggaatgggaattggcctcagtaatctcacaatggatggtatggagactgatgaaaccagacctgctgaaggaagccaacatgggaacttgactaatacctattctcttaatggcatgctacacggactgtcgaggcaaactgcaaaccgtggggttctctcggagtttggtcaatttcatcagttttttccttcaagagacccaagtggatgggagattccttttctccatggatggataatgggtcaaagccaagttggtgttccttcaatgcttcctcacgtgggtgctagtcgtgacaatctatcccaacacattggttcttcttccataaaggcatctaatccttccacttctaatgttgatgcagcgatgccatcttcagcaatacctgccagcatcagcataccgggttcttcaatgagatcaggtttacggaatcatttttcacagtcccgtgtacctgtatctgaatctggcaatcttgctgcttctattaatgccccacatgatggattcgatatccaaaccatcgtaagtcgaattcagtcagaacttgccacatcagtggctgcaacagctgcagagttgccttgtactgtgaagttaagagtatggtcacatgacataaaaaatccctgtgccccacttaatgctgatagatgtcgtctaaccataccacatgctgtcctctgcagtgaaatgggtgctcatttttcaccatgtggtagatttttagctgcctgtgttgcatgtgtgcttcctcatatagaagcagatccaggattacaaactccagtacaccaagatcctggtgttgcaacatcaccaacccggcatccaatttcagcacaccaagtaatgtatgagctgcgcatatattccctcgaggaggcaacatttggttcggtgcttgcttcacgagcaattagagcagctcattgtctgacttcaattcagttctcacctacatctgagcacatactacttgcgtatggtcggcgccatggttctcttcttaaaagtattgtcattgatggagaaacaacattgcctatatatacagtgttagaggtatacaaagtgtcagatatggaacttgttagggtgcttcctagtgcagaagacgaggtcaatgtggcatgctttcatccttttgctgggggaggactagtttatggaacaaaggaaggaaagcttagggtcctccagtatgacggtgctcatgcagtgaatggcactggaccaagttactttcctgaggagaccatcgttggtgtcagtcagtgagcaaggtttagacgaatgattggacatgtaattcaaacatctgcttcacattacttactgtacaactcatatgctgtctctgctgatgatctgcacaaatacataaatgctgagcccatgcaaccgatggtggaacttcactcactgcaatagcaaaatgtatatttttgtattatccacgtatgaatatgtactaacattttcctttgttaacatgttttcttatttacccctccccctccaacccataagtgggcttctctttctacatgtgtaacttttagtggttaaagaaaatatttcttttccttttnnnnnnnnnnnnnnnnnnnnnnnnn

SEQ ID NO: 3193 - DNA, 785 bp, Glycine max
ctcgagcggttataattgatgttgaacctaaggaattgggaatcccaacaaaagcatattatgctgttgaagaggttaaagagaatgccactcaaaaaagtcaaaaggtgtttgtgcatgtgccatcagagattgctgctcatgaagttgaggaaataggagtggaacacttgcttagagatgtgaaggatacaaccattagcacccttgccacagaggtaagtgcaaaactcacagctttgaagggtttggatgcaagacttaaagagatcaggagttaccttgaccttgttattgatggaaagcttccattaaaccatgagatcctgtaccatctgcaggatgtgtttaacctgctaccaaatcttaatgttgctgatcttatcaaggctttcgcagtgaaaaccaatgatatgatgctggtaatatacctctcgtctctcattagaagtgtaattgcactccacaacttgattaacaacaagatgcttaacaaggaacatgaacgggcagaagactcgaaaacagttacagtgccaagtgcagctgcataagttttgaggggtttgtgatggccggagctctaaatgtcatttgagtacatggatttgagattgttacaccttttctctatttctgctaggggtagagaacttacacctaacatggcataacgatccttttatgctgttccggtgcttaatgtattttactcttcaatactttgctcattttccttgtttggtagctttggtgacagccgttaaaagaattcaatattagat

SEQ ID NO: 3194 - DNA, 533 bp, Glycine max
  unsure (1)..(533): unsure at all n locations
gtcccgcaatgcaaacgttgagtacttacggcgacacggtgtcaatggccaaaccgtcgaccctgacaccttcaagaggcttctccctgtcattacatacgaggacatccaaccagacatcaaccgcatcgccaatggtgacaaatctccaatccttacctcaaaacctgtcacagaatttctcaccagctctggcacatcagggggtgagagaaagttgatgccaacaattgaagaggagctaggaaggaggtgtatgttgtacagcctcttgatgccaataatgaatcaatttgtccccgacctagaaaagggcaaaggaatgtacctaatgttcataaaatgcgagtccaaaacacccggaggcatagtggctcgcccagtcctcacaagctattacaaaagcccttactttagggacagatcctacgacccatatacaaactacacaagcccaaatgagaccgtcctatgtcttgattcctaccanagcatgtactcccaacttctatgtgacctttgccaacacaaag

SEQ ID NO: 3195 - DNA, 642 bp, Glycine max
cctcgagccgaatcggactgaagaagtgagggcaagaactttgcagcataccagcatgagcatgaagctcttccagctcttctccctactcccattcttcctctacttctacacaatagaagcagccgttggcccattgcaactgacacacccactggaccccttaactcagcaagaaatcaccctcgtcaaaaccatagtcctaaaaaagtaccccaagccagccaaccgcgtcttcttccactacgtcggcctcgacgatcctgacaaggccgccgtcctcaaatggctctcctccggcgcccggacgccgcgcaacgccttttccatcgccctcatcaatggccaaatccacgagctcaccgtcaaccttctctccccgcgaaacgttgtcttggacaaaatccacacagggaacgggttccccaccttaacggaggaggaacaaaccgaagccctagagcttcttcccaagtacggtccctttcttgagtccttgaagaagaggggcttcaacgtgtcgcaggtggcttgcaccaccttctccgttgggtggtttggggagaccaagagcacaaggactgtgaaaatggagtgctttttgcaggatgggagccccaacatctacgtgaggccaatcag

SEQ ID NO: 3196 - DNA, 1530 bp, Glycine max
tcgatgcacacgcagctcaacggaagcacaaccaagcttctctgttaaaaaaaaattaggcgtctaaagggccaaagcttagaaagttgaagctttttttgttgaggtgaaagtgaaatggttggcaaggataatctgagggctgaggacttgaacttgtgctttaagaagcttatgatggtggccgggagtgggaacagtgagaaaggggtgaacttgaaggttggggtgatcaccgagtggaaggatattcctgtggagcttctgatgcaaattctgtcccttgtggatgatcagacggtgatcatagcttctggagtttgtcgtggatggagagatgctatttactttggccttgctcgtttatcactctcatggtgtagcaagaacatgaataacttggtcctatctcttgttcctaaattcgcaaaactgcaaactctaatcctccgtcaagacaagcctcaactagaggataatgctgttgagactattgcaaaatgctgtcatgaactgcagatcctggacctcagcaaaagtttcaagctaactgatcgttcactctatgagctcgcccttggttgtcgcgatcttacaaaactcaacatcagcgggtgttcagcatttagtgacaatgctctggcttaccttgccagcttctgcagaaaactgaaagttctaaatctttgtggatgtgttagagctgcatccgatactgcattacaggctattggacaatactgcaatcagctacaatctttgaaccttggatggtgtgataatgttggcgatgttggagtgactactttagcatatgggtgtcctgatcttaggatagttgacttgtgtggctgtgtccgtataacagatgacagtgtgattgctttggcgactagatgcccccatctgaggtccctaggactgtactactgcaagaacatcacagatagagcaatgtattccttggcacacagcaaggtgaacaacaggatgtggggaactgtgaaaggaggaggaaatgatgaagatggtttaaggactttgaacattagccaatgcactgcactcaccccatctgctgttcaagctgtttgtgactcattcccttctctccacacatgctcagggaggcactcactcatcatgagtggctgcctcaacttgacatcagtgcattgtgcctgtgctgtccatgcgcaccgtgcattcaccactttcccttatcctgcccattaagaagctcatgcttttgatgttgaacacacttcgaggatgtgccccttgaaagggctcagagaagtgaaagaagtgaaatccaccccccttgtagatgtatgcctgcataagagagacttgaatctagctgattatgtacatcttttcttcaactttatgtcttaaactcggtttgctttaatccccgaattgtgtaagctcgagacattttggatgctaaaactggcttgttcctagtaagctattttgagtttatggaaagacatggacttttaaatttgcatggttttatgg

SEQ ID NO: 3197 - DNA, 547 bp, Glycine max
ctaattttaagcattcccttctcttttccattgcagctagcagagaagcgaagacccctttttctggttattaacagagtcataaaaaaccaaagttttctattctctgtagctcacatggtgggctaagaatatctgactttggggtggaaagtatggttggcaaggagagtttgagaactgaggtcttgaacttgagctttgagaagcttatgatggttgaatgtggtggaaatagtgggaaaggagtgaacattaaagctggtgtgatcacggagtggaaggatattccagttgagcttttgatgcaaattttgtcacttgtggatgatcaaacggttatcatagcttctgaagtgtgtcgtggatggagagaggcaatttgctttggccttgctcgtttatcactctcatggtatattgttttctctcttgatgtcttgaggatccttttctgtttctctccaattggggattttgttatggtgggagttttctttgttctttttgcttgtttgtgtgagttgattttgctatgctgtaattt

SEQ ID NO: 3198 - DNA, 907 bp, Glycine max
cagcctttagtgacaatgctctggcttacctggccagtttttgtagaaagctgaaagttttgaatctctgtggatgtgttaaagctgcatctgatactgcgttacaggcaattgggcattactgcaatcagttacagtttttgaaccttggatggtgtgaaaatgtcagcgatgttggagtgatgagtttagcatatggctgccgtgatcttagaacactcgatttatgtggttgtgtccttataacagatgacagtgtaattgccttggcaaacagatgtcctcatctgaggtcccttggactttacttctgccaaaacatcacagacagggcaatgtattccttggcacaaagcaaagtgaacaacaggatgtggggttctatgaaaggtggtggaaataatgatgataatgatgatggactaagaactttgaacattagccaatgcacagcactcaccccttctgctgtgcaggctgtgtgtgactcatgcccttccctccacacctgttctggaagacactcactcatcatgagtggttgtctgaacctgacttctgtgcattgtgtttgtgctggccaagcacaccgtgctatcactctccctcatgcagctcattgagccagaggggttgatgatgtataaaaggacactttgatgaggaagtgcccttgaagggttttaaagttttaggggtcgtctggataagtttatgttcaatgctgcatcatgtcatgttggttgtagaacagcttgaaccttggtgcttgagtctcttttggtctccgattttcatgtgaagggttaggatatttttggtgtcaaaatgtggtttattcctagcttggttatgaatttatggtgagacatggacttttataaaaaaaataaaaaaagggcggccg

SEQ ID NO: 3199 - DNA, 417 bp, Glycine max
caaccaagcttctctgttagaacaaaaaaaaataagaaaaattggcgtcataagggccaaaggtgggaaagttgaagttttttgttgaggtgaaagtgaaatggttggcaaggatagtctgagggctgaggacttgaacttgtgctttgagaaacttatgatggtggctgggagtgggaacggtgagaaaggggtgaactcgaaggttggggtgatcaccgagtggaaggacattcctgtggagcttttgatgcagattctgtcccttgtggatgatcagacggtgatcacagcttctggagtttgtcgtggatggagagatgctatttactttggacttgctcgtttatcactctcatggtgtagcaagagcatgaataacttggtcctatctcttgttccgaaattcgtaaaact

SEQ ID NO: 3200 - DNA, 392 bp, Glycine max
ggcagctagctgagaagcgaaaacccattattcttgttattaacagagtcacaaagaatcaaacttttctgttctctatagtaacgttctgggctaagaatatctggctttggttgaagtagtaatggttggcaaggagagtttgagaactcatgaggtcttgaactttagctttgagaagcttatgatggttgactgtggtggaaatagtgggaaaggagtgaactttaaagcgggggtgatcacagaatggaaggatattccagttgagcttttgatgcagattttgtcacttgtggatgatcaaacggttatgatagcttctgaagtttggccttggttggaaagaggcaatttgctttggcctgactcggttatcactctcatggtgt

SEQ ID NO: 3201 - DNA, 1946 bp, Glycine max
  unsure (1)..(1946): unsure at all n locations
cttacgcgtccgtttacgcgtgggtcgttcttcaatgcccaacgatcggggaagttaccgaagcataacaatgtgtcttggaggggaaactcggggatgcaagatgggaaatcttcggatcattctgctgcgattaaggatctggtgggagggtactatgatgccggggatgctatcaagtttaactttcctgcttcgttttccattactatgttgagttggagtgtgattgagtacagtgcaaagtatgaggctgctggggagcttgatcatgtgaaggagattatcaagtggggtactgattattttctcaagagttttaatagcactgctgataccatcaccacccttgctgctcaggttgggcttggagatacttctggtggtgacagtccgaatgatcactattgctggatgcgtccggaggacatggactatgaccgccctgtgactgaatgccacagttgttccgatctcgcggctgagatggctgctgccttggcttctgcttccattgttttcaaggacaacaaggcctattccaagaaactggtgcatggtgcgaccacgctgttcaagttttccagggatcagagaggcaggtacagtgctgggagttcagaggcttctatattttacaattctaccagttactgggatgagtacgtttggggaggcgcatggatgtactttgcaactggaaattcatcgtaccttaagcttgctactgctcctggcctggccaagcatgctggtgccttctggggaggccctgattatggagtactcagctgggataacaagcttgctggtgctcaggttcttctgagtcgtttgaggttgttcttgagtcctgggtatccatatgaagaaattttaaggacctttcacaatcagacaagcataatcatgtgctcctatctaccagttttcacaagctttaatagaaccaaaggtggcttgattcaattaaaccatggtaggcctcagcctctccaatatgtggtcaatgcggcctttttggctgccctatatagtgattatcttgatgctgctgatacacctggatggtattgtggacctaatttcttttcaaccgacgtgctccgtaactttgccaagtcccagattgattacatccttggaaataacccaaggaaaatgagttatgtcgtaggttttggtaatcattacccaaaacacgtccaccatagaggagcatctgtaccgaagaacaagatcaagtatagctgtaaaggtggatggaaatggagggacacttctaagccaaacccaaatacaattgttggtgccatggttgccggtcctgacaagcatgatggcttccatgatgttcgtacaaactacaattacacagagccaacacttgctggaaatgccggtttagttgctgcactagtggcattgtcaggcgacaaaagcacatctattgacaaaaataccattttctctgctgttcccccaatgtttcctacaccgccaccaccaccagcaccatggaaaccataagcgcatcatgccattggttatttctttctagcaagtatcccagatgatttgagtgcaccggtaaccttcgttgttttgtatcaactgaaagatcaaggtaattttgcagaaaaaaagctttgagaaatagaagaaatggagcttggcctactgaatatagctgcctggggccaatgatcgactcaagatttagcattaagaattgataaagtggtacttgagagtgtgtctctttaaatttttgtgatacacatatagtatatatgtatctaaatcaaatcttgtattctttaaacatgaaaaactgaacagcttgtaattgtttgacagtttcatctaatgccttcacagttttactcnnnnnnnnnnnnnnnnnnnnnnnnnnnnnnnnnnnnnnnnnnnnnnnnnnnnnnnnn

SEQ ID NO: 3202 - DNA, 1215 bp, Glycine max
tgctcgagccgcacgatcctactaaaaccaaacaactactcgttgattgaaagaaacagtgtgtgttgtgttgtgttgtgtcggtggcatttttgttggttcgagtgagcgagggaagatgtactctagagattcatggggtggtccgttggagataaacgcgacggactcggcgacggaggacgagcggagccggaacctgcaggacgttgacagggcagcgctgtcgcgtcccttggatgagacgcagcagagctggctccttggccccggcgagcagaagaagaagaagtacgtcgatctcggctgcatcatcgtcagccgcaagatcttcaagtggaccctcggcacaatcctcttcgccgccttcctcgccggcctcatcgccctcatcgtcaacaccgtcccccgccaccgccacaaacacccccctgcccgacaactacaccctcgccctccacaaggccctcatgttcttcaatgcccaacgatcggggaagttgcccaagcataacaatgtttcgtggaggggaaactcgggaatgcaagatgggaagtcttcagatcattctgctgcgattaaggatctggtgggtgggtactatgatgccggggatgctatcaagtttaactttcctgcttcgttttccattactatgttgagttggagtgcgattgagtatagtgcaaaatatgaggctgcgggggagctgggtcacgttaaggagatcataaagtgggggaccgattaccttctcaagaacttcaacagcaccgccgacaccatcacccagctgggcatgcaggttggatcaggggacacctcccaaggtagcaccactcccaacgaccactactgctggatgcgtcccgaggacatcgactacgaccgccccacccagacctgcaccacatgctccgatctggccgccgagatggccgcggcgttggcggcggcatcgattgtgttcaaggacaacagggcctattcgcagaagctggttcacggggcgaccacgctctttaagttctctagggattcgagaggtaggtacagtccaaatgggagggaggcttctgtattctacaattccaccagctattgggatgagttcgtttggggacgggcatggatgtactttgccactggtaattcctcttacctcaagctcgctaacaactctcgcctcgccaaacacgctggcgccttctggg

SEQ ID NO: 3203 - DNA, 904 bp, Glycine max
gtgatgttcaagctttcagaaagatcagtctattcacgatagttaacccttcaatttgggggaaatttccatgtaaaatcaatgccagattttgaagtggtttttattttgcatgaatcttcaattgaattttatattacaaaaaccaaattgattacatacttgaaaataacccaaagaaaatgaattatgtcaaaaagatttggtaatcattacccaaaacacagtacaccatagaggagcatctgtaccgaagaacaagatcaagtatagctgtaaaggtggatggaaatggagggacacttctaagccaaacccacatacaattgttggtgctatggttgctggtcctgacaagcacgatcatttccatgatgtccgaaccaactacaactacactgagccaactctagcaggaaatgcaggtttagtagctgcacttgtggcattgtccggtgataaaaccaccggtatagacaaaaacacccttttctctgctgttcccccaatgtttcccacaccaccaccacctccagcaccatggaaaccatgaggtgttgtattgtgtcattcattgtcctcctttccatcaagtgccaaaagtgacttcatgattttgaagatggaggtagtagatcgaagaagtcaaggacggccgcacgtgaaaaaatggaagtagtgaaaactaggcctagtgattctagtttgtctaggaacaatctttggtttaagattagcattaaaatttcataatggtacttgagactgtcttttgtctacttgtttttttgttgttgtgatatacatagtatgtatgtatcaaatcttgaattctttaaacgtgcaaaacgaacagcatgtaatgtaggtgtcacgttttgattaaaaagaaaaaaaaagaaat

SEQ ID NO: 3204 - DNA, 494 bp, Glycine max
tttccctcattagcagtagcctggatgcatggcggacacggcagtatgattattaccagagggttttgaatgggatattgtgaaatagtttgtcaatggtgatcgtttgcttgttcccttttgactaagcttgcacggtgattgttcatcaattagtattttgcctttacaagtcatttgaagatggttggttcactgtgtgttatggctttggagtttttgtgagaagtaagaattaaaaggtggcagtgtgcattgtctattctcctggagtagtgtgaggaagattctgactcgcaaaagtacttcaacagtctgaggctaaatttacttgagccgagtctttttgatttttccatccctgtttcttgtgaatggagctctgctacctggagaaattgcattagcctcccaaatgctgagttagtgcaaattgtacagtgattttagcgggagtacggaccagattcatgttggctgtgaatatgagtatt

SEQ ID NO: 3205 - DNA, 1482 bp, Glycine max
tctctccccatcttttattgaattgattccaaatacaaacatggcaatgaagaagttcttgtgggttgttctgtccctttctttggtccttggagtggccaatagctttgattttcacgacaaggatttggagtccgaggaaagcctgtgggacttgtacgagagatggaggagtcaccacacggtttcgcgaagccttggtgacaagcacaagcggtttaacgtgttcaaagcgaatgtgatgcatgtccataacaccaacaaaatggataagccttacaagctgaaactaaacaagtttgctgacatgaccaaccatgaattcaggagtacctatgctggctcaaaggttaatcaccatagaatgttcagagacatgccacgtgggaacgggaccttcatgtatgagaaggttggtagtgttcctgcttcagtggattggaggaagaaaggtgctgtaactgatgtaaaagatcaaggccaatgtggtagttgttgggcgttttcaactgttgtagctgttgaaggcattaaccaaatcaagacgaataagctagtctccttgtctgaacaagagctggtggactgtgacaccaaaaaaaatgcaggatgcaatggtgggttaatggaatctgcttttgagttcatcaagcagaagggaggcataacaacagaaagcaattacccttacacagcacaagatggaacctgcgatgcatcaaaggcaaatgacctagctgtatcaattgatggccatgagaatgtccctgctaacgacgaaaatgcattgctcaaagctgttgccaaccaacctgtctctgtagccattgatcccgggggatctgatttccagttctactccgagggagtatttactggtgattgtagcacggagctaaatcatggtgtggcgattgtggggtatggagcaactgttgatgggactagttactggatagtgaggaactcttggggaccagaatggggagaacagggttacatcagaatgcaaaggaacatatctaaaaaggagggactttgtggcatagctatgttggcttcctacccaatcaaaaactcctccaataatccgacaggaccttcatcatctcctaaagatgaactttgaagtttgaatgcttcccacaaaatcatactctaattagctttggttgttgttttctattagtatctcagattcaatgccagtgtatccatcaatatatttatgcttattacatcccaaagaaataaatattttatatgatttgagtgctagcaatttctcatgtaatctcctttctatggccaagagtttcatgcaaaatgataactttactttaaagcatttatatagatagcaatagatcaactagagtccagattgcaatatgatttgatcactttgaagataaaaaaaaaaaaaaaaaaaaaaaaaaaaaaaaaaagggcgcgactagtagctcgtcgagcgacccggga

SEQ ID NO: 3206 - DNA, 268 bp, Glycine max
gtcactttgtaccaaaccacaaagctttataattgttttcttttgctgtcactgttgccgaatccctcactttctcactcctcagcaccattcaatctctttcctctactggcaataagcatcagcactctgccacatccagttcccttctgcgtgttcctttcttctactctctccagtccggccaaagcgaactccttccatcattttcagttttttctgtcaagtgctgttgcttctgctcccaaacttatccaaatattgcttg

SEQ ID NO: 3207 - DNA, 1770 bp, Glycine max
ttctccgtatattaataaaacccacttcctgcgactttctttgttttcatttggtttcttccttctcacacttcccccaattcccaaaccaaaccctctctcttccggcgttctgggggtggcgtcgccggcgattcccccctccggttccctctccacccttcaattcaaccctctcgtcttcgcttcactgattccctctttcaaaatgcttccgatcgcttgctagggttttccctctcccaaatctcctcctcggaaagcaccctgtaccttttattcctccgactaatcaacttctttgctatggctattcgtgtaaccttttccttttcgggctatgtcgcccagagcctcgcctcctccgccggcgtgcgcgtcgccaattcgcgttgcgtccaggaatgctggatccgcacgcgcctcttcgggggcgccacccagaagacggatctagattcctccgccggcggcggagtccgcaatttcgccaggcccaactgctgggcccagtccacttactcgagcctcgccggggaatttctcggcgacggttgcagcaagagcccaatcatcttgggcctgatttcgatcatgaagtcaacggtgggtgtgtctgggtcatccgcggcggctgcgggtattttcggtatttcgccatttaaaaccacttcgattatccccttcttgccaggttcgaagtggcttccttgcaacgagtccgttcccgaccccacctcctgggaggtcgacaaaggtggcacgcgacgcgtcgtttcggaaacagaatcgaattttgccaagattagttggctttcgcggttgatgaacgtgtgttccgaagacgcgaaggctgcgttcactgctcttaccgttagtttactctttaaatcgtccttggctgaacccagatcaattccctcctcttctatgtaccctactcttgaagtaggtgaccgtgttcttaccgagaaggtttcgttcttctttagaaagcctgatgtttcggatatagtcatttttaaagcgcctccttgtttagaggagtttggttttagttcgtctgatgtgtttataaagaggattgtggctaaggctggggacactgttgaggtgcgtgatgggaaactactggtaaatggtgctgctgaagaacggcaatttgtagtagagcctctagcttatgagatggatccaatggttgtgccagaaggatatgtgtttgtaatgggagacaatcggaacaacagctttgattctcataactggggccctctcccagttgagaacattgttggtaggtccatgtttcggtactggcctccatccaaggcatctgacactgatacccatcgtaaactcccacctggtaacaaacctgtggcaatttcttgacatgattcccgcagctttgtgaaggtgatgaaggtttccagatacggtcgtttgttctaaattgttagcttgagctgactttgcacacagtttgggatgaatatcttattcattgatacaaatttgtcgatgacctaataataccattaagcgttcattagtgccatctgagatgtatttctattgctgaagtgcggggagaaaaaaaagaattaaaaaagcatgatgattttgcccccccccaaaaaaaaaaatgaaacatggtgattgatttgttttgtattctttaatgtatgcatagcgtatgaatgctagaaactggaggaaagatttgacatggagctaattgactccctgtgagttccataatcaagc

SEQ ID NO: 3208 - DNA, 487 bp, Glycine max
ggcaatttcttgacaagattcccgctgctttctgaaggtgatgaaggtttccagatacgttcatctattctaaattgacagtttctcccgtctttgcctgggaatgagctgttcggagattctcttagaagagccagcttgacctgactttgcatgcagtttgggatgaatatcttattcattgatacagatttgtcaatgacctaataatgccattatgcgttaatttgtgccatctgagatgtatttctattgctcaagtgcggggagaaaaaaagaataaaaaaaaaatgatgattttacccctcaaaaatgaaacatgatgattgatttgttttgtattctttcatataagctccataatcaagcctcctcctgatttgaatctataatgccattcagtcatacatcaaattgtatgggcacgactatggtcgcccattttaccttctagtaagaatgcaatttccctctttaacacggtgtt

SEQ ID NO: 3209 - DNA, 420 bp, Glycine max
gctactttctttgtttcatttggttttcttccttctcacacttcccccaattcccaaaccaaactctgtcttttcttctctgtacggcactctctcttccggcgttctgggggtcgcatcgccggcgattccccactctgcttctctcttcacccttcaattcaaccctctcgtcttcgcttcactgattccctcttcgaaaatgcttccgatcgcttgctagggttttccttctcccaaatctccgtctccgaaagaaccctgtaccttttcttcctccgattaatcaacttcctagttatggctattcgtgtaactttttccttttcgggctacgtcgcccagagcctcgcctcctccgccggcgtgcgcgtcgccaattcgcgatgtgtccaggaatgctggatccgcacgcgcctc

SEQ ID NO: 3210 - DNA, 279 bp, Glycine max
ggattgtggctaaggctggggacactgttgaggtgcgtgatgggaaactactggtaaatggtgctgctgaagaacggcaatttgtagtagagcctctagcttatgagatggatccaatggttgtgccagaaggatatgtgtttgtaatgggagacaatcggaacaacagctttgattctcataactggtgatgaaggtttccagatacgttcatctattctaaattgacagtttctcccgtctttgcctgggaatgagctgttcggagattctcttaga

SEQ ID NO: 3211 - DNA, 673 bp, Glycine max
cctactcgtccgcggacgcgtgggctggtgggagggagaaaggaaggaatgaatgaaggaaagtcttatatttaataattgctaattagtaattaattaattaattaatgaaacaaacaaactaatctgtcatttctgttgtcggagaagaatgaatcctgagaacaagacactcacaagaacaagaagaagcatttagaatcgaaattggaagagaagcataaggagggtatgaatgattacaaaggaagagaaggagaaagtagtgttgttgttcggaagcgattcaaggagaagcagcaacaacaacaacaacaaccctttccttccacaagggccatcatcaaccaacaacaccgtcgctgtgcctccctccccaacaacactcaatacgaggaatctgaaacagatgtccaaagtgtctgatgttagcgtttcagaaggggatgacacatcttggatttcatggttttgcaatttgagaggaaatgaattcttttgcgaagtggatgatgatttcgtgcaagatgatttcaacctttgtggattaagtagtcaagtgccttactatgattatgcacttgatttgattttggatgttgagtcctcccacggagacacgttcacagaggaccaaaatgagttaattgaatctgcagcagaaatgctttat

SEQ ID NO: 3212 - DNA, 513 bp, Glycine max
tagacaccagaaagagggtcccaccggaacaatgttggagcaagcacgcaggagacacgtagacgcagagagagggagttactaaaaatgaggtttggtttggagggagttgcatcggcgacaaatactgttgttgttgttgttggagaagaatgaattctgagaacaagagactcacaagaagaagcatttagaatcgaaattggaagagaagagggtatgaatgattacaaaggaagagaaggagaaagtagcgttgttgttgttcggaagcgattcaaggaaaagcaacaaccctgtccttccacaaggcccatcatcaaccaacaacaccgtcgctctgcttccctccctaacactcaatacgaggaatctgaaacagatgtcgaagtatctgatgttagtgtttcagaaggggatgacacatcttggatctcatggttttgcaatttgagaagaaatgaattcttttgcgaagttgatgatgatttcgtgcaagatgatttcaacctc

SEQ ID NO: 3213 - DNA, 579 bp, Glycine max
ttttccgtttcttcgtcccaccttagtaccttgaatcattatcattcgggtaatggacacatcactagtgtttactgtgaggaggagtgaggcagagctgatagctccggcgaagcccacccctcgtgaagtgaagctactctcagacatagatgaccaagatgggttacgtttccaaattccggtgatacagttctatcgccacgacccatcaatggcagggaaagaccctgtcgatgtgataagaaaggctgtggccaaaacgcttgtgttttactatccttttgcaggtaggcttagggaaggacttggtcggaaactgatggtggattgtactggggaaggtgttttgttcattgaggctgatgcagatgtcactcttaagcaatttggtgatgctcttcaacctcctttcccgtgctgggaggaactcctttatgatgtacctggttctcaaggagtgcttaacactccccttctgcttattcaggtaacgcggctcaagtgcgggggtttcatattagctgtccggctgaaccacacgatgagcgacgcagccggtctggttcagttcatgag

SEQ ID NO: 3214 - DNA, 382 bp, Glycine max
gttaattaacttgttctcgttcattactactaaaaaatggcttccaagatacaaatattaccaatcctaggcgtgtgggccatgttacttctgatctcctcggaggtgttagccactggattacatggtgttggtgttggtattggtggtggattacctggtgttggtgttagcgctggattacctggtgttggtgctggattacatggtgttggtggcgctggattacctggtgttggtgctggattacatggtgttggtggcgctggattacctggtgttggcgctggattatctgccaacgctggattatctggtgctggtggcgctggattacctggtgttggcgctggtgctggtggcggccgtcgtggtcgtgctg

SEQ ID NO: 3215 - DNA, 691 bp, Glycine max
agacacaccaataatttgccaagaaaccgaacccaacccaaccgcaacaacaatggcgttccaggatttcgacatgatcaccgaccggcggagaaacgagcagaggctcaagatgaagaagaagatcctcatcagcgtcctctccgccgtcctcgtcgcgtgcgtcgtaggcgccgcggcattcgtcgttgtccaaagaacaggcactaatgcaaagcacgctaccccaatgccacagaacaccgccacgccgcacgtggatcagaactccaggatggtgaaaatgatctgtggatccgcagaatacaaagaaaaatgcgaaagcacgctcgaagaagccctaaagaaggaccccaaattggctcaacccaaggatcttatcatggtgtcaatgattcttgcggagaaggaggttaccaatgccttcgatggaactgcaaagatgatgggcaatgcgtccgaggaagagaagggtgcgtacgaggattgcaagggtttgttcaaggacgccaaggaagagcttgagctgtcgatcaccgaggttggcgacaacgacgcggacaagctctccacaaagggtgctgaactgaacaactggctcagtgcggttatgtcttaccaacaaacctgcattgatggtttccccgaagggaagatcaaggatgatttcaccagcatgtttactaactct

SEQ ID NO: 3216 - DNA, 908 bp, Glycine max
acctcacgacaccaaaacaatgatggctggtgttagtggcagtagcactactcccttattgtgctctttgttctttatttcttccttactttttgcttcctgcacccatgcctcctcccaggcacctcctccaattgtggatggactttcatgggatttctataggacgagctgtcccatgcttgaagggatagtgagcaagcatctccagaaggtgttcaagaaggacaatggtcaagctcctgccttactcaggatcttcttccatgactgctttgttcagggttgcgatgggtcgatattgttggatggaagtccaaatgaaaaggatcaaccggcaaacatagggataaggccagaggctttgcagaccattgaaaatcttcgatctcttgttcacaagcagtgtggaagggtcgtctcttgcgctgacctcgttgttctagccgcacgcgatgctgtttctctgtcaggggggccaatatttcccgtgccactgggaagaaaagatggtctaactttcagcatagacggcacaggaaaccttccgggaccgtcttcccgaaccggccagctcctcgacagatttgccggcagaaacttcgacgccaccgacgtggccgcgctctccggcgctcacaccttcggacgggcccactgcgccacatcttcagccgcatcaaccagacggacccacccatcgaccctaccttgaacaacaacctcatcaaaacttgtccctcttcccagtcccccaacacggccgtgcttgacgtgagaacccccaacgtgttcgacaacaagtactacgttaacctcgccaaccgacagggtctgtttacctcggaccaggacctgttcggtgatgcccggactaagggaatagttaactcctttgctgaaaacca

SEQ ID NO: 3217 - DNA, 361 bp, Glycine max
gtaaaacacaaacacaacctccatgtgcaccttaaccacaacaaacacaattcgtgtcttattacttattttcctctaaatctaacccaactcaacccgtgctcatccctaattatgggaaactgcgtgttcaaaggtttacaccacggcgtttctgaaaacatgatggtgaaagtggttacctcacacggaggcatcatggaactcctctctcccataaccgtggagtgcataaacagcgaattccccggccacggcatcgtccgaagccgccgcgacatgttttccgaaccgctccccaaaaaccgagcaactcccccgcggagaagtctactacttcctccctctaaacccttcttct

SEQ ID NO: 3218 - DNA, 893 bp, Glycine max
gtttaagatgtgaaaaaccacgaccatttgagcctctatatataggtgtctcgtatgctcaaacatgacaagccagtgatagttgctttcagataactgatagttgtgtgcaattatttgaattcaagaatgtctcaacccgactcgttggtggctgagattgaggtgaaaacctctgctgatcacttttacgacaccttgaagggtaagaaacagcatcgtattcatgatgttgcccctcatcatatccataaggtggaagttcatgaaggtgagtgggataaatctggcaatatcaaggtgcttacattcgctgatggggacactgttgagaccttaaaggagagagttgattttgatgatgaaaacaagaagataacctacaccatattggagggtgtcatgttgaagtactataagagctacaaggttatcgttcatgttttaccaaaaggtgatgagcacagccttgtgaagtggactttcttgtatgagaaggtggatcacactgcccctgagccaaccaagtacaaagatttggtggttaaactccaccaagaacgtggaggctcatcttgttgaggctcgttaaaatgatccctaagtggttcacgctaaataaagttgtgatgtgtgtggtgtgttgcatgtggccccttggttaattatcagccattatgtttgctttaaattgccgtgcgtaatatgttgttggttaacttgttaaaaatattggttctcaaccataagttgtgtaatgtgttgttggtttattcaaaatattggccggggatcacagggagggctacatgcctttgtatgtctgtgatttgtaatcttcgaccagctattgattaattgatgttaagggggatttatccttgtttgtctcc

SEQ ID NO: 3219 - DNA, 481 bp, Glycine max
acacattcaagtcatttaacttccagcggagcagttgggcatatgttttcatcttctcctggatattcaactgatcttcatcactcatccttttcatctcatgaaaaacaacctagaaatactcattttatttcacagtcattaagtaacatggcttcattgccattatcttattcttcaaatagtgaaccgataccttctacaacatcaaccccttattccaatggaaacagtgtttcctggcatacagattccttgcctagctttctcgatttccctgccaatacctccattggtaatagtcaagtagaaagcagtgactgcaatatcatggcaactgaagagtattctaagcgaaatgattggcaggagtgggctgaccaattaatcagtgatgttgatcctttgacttctaattggaatgatcttcttgctgacaacattcaagatcttgaaccaaaggtcgcataatcatcttctc

SEQ ID NO: 3220 - DNA, 533 bp, Glycine max
acaaaacatggcacttttgcaacaaaaactaggcttctcatatctactaatcctttgcttagccactcttgtttcttcacacaggccttatacaactccaagtgtcacacgcttgactgattcttttcctcgtgtccaagttgatagtgctttttctaagacctttggggccaaaaatatccagtttcttagtaatgggtccacggtcacactggctcttgacaaaatctcaggctcaggcttggtatcacaaagcagatactcctatggattcttcagtgctgcaatcaaactaccttctggtttgtcacctggagttgttgttgcattttatttgtctaattcagataaatttcctcacaaccatgatgagatagacattgaactgcttggtcatgataagagaaatgactgggttattcaaacaaatatctatgccaatggaagtgtcagcacagggagagaagagaaattctatttctggttcgacccaacacagcagtaccattattacagcatcttgtggaacagtt

SEQ ID NO: 3221 - DNA, 912 bp, Glycine max
cccacgcgtccgcccacgcgttcgcccacgcgtccgctgattttctgatgtggcagaggaagtgaaggcaaaatatcctaaaattacatatgcagatctcttccagcttgcgggtgttgttgctgttgaggttactgggggtccaacaattgatttcgttcctggtagaagagattcaaaagtatctcctaatgaagggcggcttcctgatgctaaaaaaggtgttccacatctccgtgatatcttttatcgaatgggcttgactgaccgagatattgttgcactatctggaggacatacactggggagagcacatccagagagatcagggtttgatggcccttggacggaggaccctctgaagtttgataactcatactttgtggaacttttgaaagaagattctgctgggctgcttaaacttccaacagacaaggctttattggaggatgctgaatttcgctgttatgttgagctatatgcaaaggatgaggatgcattttttcgagattatgctgaatcacataagaaactttcagagctaggctttgtgccaagttcaaagccgatttctattaaggatgggaccatactggcacaaggtgctgtaggagttgtagttactgccgcagtggtgatcatcagttacttgtatgaagttcgcaaaagagggaagtaaactggacttgttcatttcacttggctgttacgtttgcgtgaccctgaccctgacccatagtgtgcaaaacagggttcatttttgcagcttcagtttctgtttacttagtaccaataaagaataatgctacagacattcagacttttatatgaatagactaaaaacatccctgagtactcaaattgagagcaacttcattatacgtaaatacaaattttaacattcccagttaa

SEQ ID NO: 3222 - DNA, 740 bp, Glycine max
acggaagacgacagaagggggaagcttgtgagccaattaagtaacgtgacgtggcaagagagaagtgggaaggcatgggaatagaataagcgatgggattgggaaatgggaacaccacccatacaatacaacacagttatccattcacatttcacagttagcacttagcagactctgctgcagtgaggtgaggggaggtttgtttgttgtttcgtttttcctttcctttccgccagaatccgttgagaatggcgttgccggtagtcgtcgatgcagagtacctcaaggaggtcgacaaggctcgccgcgatctccgcgcactcatcgctaacaggaactgcgctcctctcatgctccgattagcctggcacgatgccggaacttacgatgctaagaccaagactggtggacctaacggttcgatccgtaacgaggaagagtattctcacggcgccaacaatggcttgaagaaggctattgatttctgtgaggaagtgaaggaaaaacatcctaaaattacatatgcagatctctaccagcttgcgggtgttgttgcagttgaggttaccgggggtcccacaattgatttcgctccctggtagaagggattcaaaaatatctcctaatgaagggcggcttcctgatgctaaaaacaggtgttcacatctccatgatatcttttaatcgaatggcttgacttgaccgagatatgttgcactatctggagacatacacctggg

SEQ ID NO: 3223 - DNA, 599 bp, Glycine max
cgcgttcgcccacgcgtccgcacaaggcacattggtaataggaagaaagaaagaaagaagattaagatagtgcatctcccgaaacagttgaccttgtgagatacagacacagcaccttcaattcttcatttctcaaatcgcaattcgtaaaaccataacaacacaaagtgtctcaaattcacattaaattctccctccccgaaaaggatgtcgttcgaggtggaggaggaggaggcgttcgagcacacgctcctggtggtgcgcgaggtgtcggtgtacaagatcccgccgcgaagcacctccggcggctacaagtgcggcgagtggctccagtccgacaagatctggtcggggcggatccgcgtcgtgtcccggcgcgaccgctgcgagattcgcctcgaggatccgagctccggtgagctcttcgccgcctgcttcgtctacgccggccagcgcgagaccgccgtcgagcccgtcctcgactcgtcgcgctacttcgtcctcaagatcgaggatggccaaggcaagcacgccttcattggcctagggttcaatgagcgcaacgaggccttcgatttcaatgtcgcgctctccgatca

SEQ ID NO: 3224 - DNA, 481 bp, Glycine max
gcaaaaaaagaaagaaagaagatttggatagtgcatctcccgcaacagttgaccttgcgagacacagacacggcaccttcaattcttcattcctcaaatcgcaattcacaaagcgtctcaaattcacattaaattttcccaaaactcaaactcaaactcaaactcaagtaattctaattttccctccccgaaaacgatgtcgttcgaggtggaggaggaggaggcgttcgagcacacgctcctggtggtgcgcgaggtgtcggtgtacaagatcccgccgcgaagcacctccggcggctacaagtgcggcgagtggctccagtccgacaagatctggtcggggcggatccgcgtcgtgtcccggcgcgaccgctgcgagattcgcctcgaggatccgagctccggtgagctcttcgccgcctgcttcgtctacgccggccagcgcgagaccgccgtcgagcccgtcctcgactcgtcgcgc

SEQ ID NO: 3225 - DNA, 917 bp, Glycine max
gttcattccaagaactaaagggggacttctgcggcaatatccaagttgaattgagaaatggctcgcaaaataggccatgcttgtctttattaaattttacaagcagcactcgatcagtgaggatggcataaagaaatgtttaccatctgttctgtttattcatctacaattcagcttcgaaaaccctgagaaatattttcactgtgatcatagtcaagatcttctccggaagatccctatgttgattctgcggtctgatcaatactatgtccatctatgttcatgaacccatttttcaacttggagattgccaacatgttcccagagagagacattattttccaccatttgggtcgctacctgtttcacccttccaacgatgcatgggaactaatcagcagttactatcaggcacacttggccagtgcaagtgaacggataggcttacagataagagtatttaatgctgctactactccaaagcaagcaatcatgaatctagttttaagctgcacattacagcaaaagatactgccagaagtggatttgaaaacttcagtgtcttctgctggaaaaaacatgactactgcaaaagcagttcttgtggcatctttacatagggagtacggggataatttacggagtatgtatctgaagaaaccaacagttagtggggaagtcatagaagtttatcagccaagtcatgaagggaagcaaaagtttaatgataatgggcataacctaaaagcatggacggatatgtatctgttaagtttatcagacgtgttggtgactacctctctctcaacatttggctacgttgctcaaggattgggaaatttaaagccatggcttctctacaggctagtcggtaaccatagcggctattttccacgctgcgaacgggatttatcaac

SEQ ID NO: 3226 - DNA, 467 bp, Glycine max
gacttcatctatattgatagatcctcaaaattatttcatgcaaggctgttgcaatgaagcttgtacgttcataaggaaggtaaaaaatcccatcatagaaaaattacagggccgtaatctatctacacagcgcatgacagcaaaatagatttgctgctgcacaaagtagggcatgatatctgagcaagtgcaagtgatattaattagtagacttcgacattccattgctctgccttcttcaattgcctcttgtactcaatccaatcaataccatcttttgcagccaatgaaaccattatgtcatctatacccttttccattcccttcagtccacacatatagacaaaagtgttatctttcttcagtaattcccataactcttctgcatattgagccattcgtgtttggatgtacattttctctcctttttcgtttgtttgctctctgctcacagcaaagtcaagcct

SEQ ID NO: 3227 - DNA, 1914 bp, Glycine max
gaacacgcaactgggtgttttgtccttccttgaattaaataaatactatgaaattgtagtttaaggaaggagatactctcactcgttcattccaagcctactcttattcttcttctccaatctcacacccatcatggaccggtttccgatcctctttctcgtcggcacccttcatcaccctcgcctccggtgcccgccacgatattctccggttaccctccgaagcttccaggttcttcaaagcacctgctaatgccgatcaaaacgatgagggcaccaggtgggccgttttagttgccggttccaatggctactggaattacaggcacccagtctgatgtttgccatgcgtatcaactactgaggaaaggtggtctcaaagaagaaaatattgttgtatttatgtatgatgacattgctttcaacgaagagaacccgcgacctggagtcattattaacagtccacatggaaatgatgtttacaagggagtccctaaggattacattggtgaagatgtaactgttggcaacttttttgctgctatacttggaaataagtcagctcttactggtggcagtgggaaggttgtggatagtggccccaatgatcatatatttatatactactctgatcatggcggtccgggagtgctagggatgcctactaatccatacatgtatgcatccgatctgattgaagtcttgaagaagaagcatgcttctggaacttataaaagcctagtattttatctagaggcatgtgaatctgggagtatctttgaaggtcttcttccagaaggtctgaatatctatgcaacaacagcttcaaatgctgaagaaagcagttggggaacatattgtcctggggagtatcctagtcctccccctgaatatgaaacctgcctgggtgacctgtacagtgttgcttggatggaagatagtgacatacacaatttgcgaacagaaactttacatcaacaatacgacttggtcaaagaaaggactatgaatggaaattcaatctatggttcccacgtgatgcagtatggtgacatagggcttagcaagaacaatcttgtcttatatttgggtacaaatcctgctaatgataattttacttttgtgcttaaacactcattggtgccaccttcaaaagcagtcaaccaacgtgatgcagatctcatccatttctgggataagttccgcaaagctcctgtgggttcttctaggaaagctgcagctgagaaagaaattctggaagcaatgtctcacagaatgcatatagatgacaacatgaaacttattggaaagctcttatttggcattgaaaagggtccagaactgcttagcagtgttagacctgctgggcaaccacttgttgatgactgggactgccttaaaacattggttaggacttttgagacacattgtggatccctgtctcagtatgggatgaaacatatgaggtcctttgcaaacttctgcaacgctggaatacgaaaagagcaaatggctgaggcctcagcacaagcatgtgtcaatatcccctgtagttccctgagttctatgcaacaggggtttcagtgcataattcctagaatgcgctccattgaagaccgagtatagtcgttgtaacattattctttacgagtgttatggactgtactctctgctcatgatttcttataccaaccctgtaaatacaaatgggacgctggggaaacctctttacattatagtttcctgcaaaatagatgctgtaacaaagacattttacttttacttggggagaggcagtggaaccataaggacccttggaacttctaattaatacgacagggcacaataccgtgtttgtaagccaacgctttgctccaatttaatggtaacccctttctgtggataattcttaat

SEQ ID NO: 3228 - DNA, 1945 bp, Glycine max
gtccgggccactcttcttcttcccacgctcctccttctcatacccttcgccaccctcgtctccgcccgccctcacctcggcgggagcatttctccgactgccctccgaaaccgataacgatgacaacgtccagggcacccgctgggccgtcctcctcgccggttccaatggctactggaattacagacatcaggccgatgtttgtcacgcctatcaaatactaacgaaaggtggcctgaaagaagaaaatattattgtttttatgtatgatgacattgcattcaatggggaaaacccaaggcctggagtcatcattaacaaaccagatggaggtgatgtttatgaaggagttccaaaggattacaccggcgaagatgttactgttggtaacttttttgctgctttacttggaaacaagtcggcacttactggtggcagtgggaaggttgtggacagtggacctgatgatcatatactctgtatactatactgaccatggaggtccaggggtgctcgggatgcctgctcggtccttacttatatgcggatgatctgattgaagtcttgaagaaaaaacatgcttctggaacgtataaaaacctagtattttatctggaggcatgtgaatctgggagtatctttgaaggtcttcttcccgaagatatcaatatttatgcaaccacagcttccaatgcagaagaaagtagttggggaacatattgccctggggagtatcctagtcctcccccagaatattcaacctgcttgggtgatctgtacagtgttgcttggatggaagacagtgacagacacaatttacgaacagaaactctgcatcaacaatataaattggttaaagagaggactatatctggagattcatactatggctctcacgtgatgcagtatggtgatgtacggcttagcagtgatgttctcttccattatttgggtccagaacctgctcacgataattttcactttttgtggactaaaactccttatggtcaccttcaaaaccagtcaaccaacgtgatgctgatctcatccatttttgggataagttccgcaaagctcctgagggttctctcaggaaaaatgcagctcagaaacaagttttggaagcaatgtctcatagaatgcatgttgacaacagtgtaaaacttattgggaagcttttatttggtattgaaaagggtccagaagtactcaacgctgttagaccggcaggatcggcacttgttgatgattggcactgccttaaaaccatggtgaggactttttgagacacattgtggatccttgtctcagtatggcatgaaacatatgaggtcctttgcaaacatctgcaatgtagggacaaagaatgagcaaatggctgaggcctctgcacaagcttgtgtctctattccttccaatccttggagttctctgcaaaggggtttcagtgcataataattcctgtaatgtgcaccagtaaagaccaaagtatgattattgttacatctatgctatatgattgtacttgtacacacatatttttgtccccgcctttgtaaatacaattgggccactacctaggattgggaagaagggtctttacatttttagtttggcaaatagatattgcaactacctttgtataaaacttatttctgaagaagctattacaactttcaagggatgatagcattttgtggcataaggattaaggaggcataaaggaccaacttgctttggaatattcactcatgacaaggcacaaggtcatgcgtgtatgccaacacatagtaatgatgtgtgtttttattcagtaggcaactggcagatcgggttttcccttgtcacttttgtataattattttggaagaatttatgatgtcaaagttattgtttaatattaatggcgacattgtatttattatttgtaaaatattcggactca

SEQ ID NO: 3229 - DNA, 1365 bp, Glycine max
tgtcgccctttttttttttttttggaaatgacatagtgaacttggattcatctattaatggcattcattccttcaaaaattagtactagtaaaactggcaatgaagttgttcatgaacagtataaaaatcgtctaagaaaaattacagggtcgtcatatatctaccaccacgcaggagggttgatatacctggtgcaacacaaagtaggagatgatatttgtgcaagtgaacagaaattaactagacttcgacattccattgctctgatttcttcaattgcctcttgtactcagtccaatcaatgccatctttggcagccaatgacaccataatgtcatcaatacccttttccattccttttagtccacacatgtacacaaaagtgttatccttcttcagtaattcccacagctcttctgcatattgagccattcgggtttggatgtacatcttctctccgttctcgtttgtttgctctcggctcacagcgaagtcaagcctgaagttgtcaggatatttctcttgcatcttctcaaattcctccttatatagcaatgagctgcttgtagggacacccaaaaagagccatgccaaaccattgaacttgtaatcttcgtgtttctcaaagaacattttccataaaaatgagcgaaatggggcaatcccggttccggttcccaacatgatgatggtggcattaggatcttttggcataagcatttctttcccaacaggtccagttattgttacttcagctcctggcttcaggtcacacaagaaatttgagcagactcccttgacaatttctccaccttcatttgtgtacactagccgtttcacgcatagagaaacagtcttggaatctccaaaatcaccaatggcactgctagcaatagaatacaatctcagtttatgaggtttgccattcttgtcaacaccatcaggaattaccccaattgattgtccttctctgtaaggaatctctccctcggtgctgaagaccatgtgccaagtttctcctggagcatcatccccagtgatctttgtgttgagcaggcatctaccaacgtacaggggtcttgggtttgaacttgttctcaaaccacactttcatcctgtttcttggactcctttttcaaccttggctggtgcctcagtggtgacttgagctctgatggagaactacccttccactgctacaaacatctcgtgtattgcaatgaagccttcttgaatacaactctctctggggtaatgatggaggtcctgcttgggagagaggtagacttggtggatggagaagcagactgcagcactgaaccgcagcagccattggtaaaaactagctaagggagcggctcgag

SEQ ID NO: 3230 - DNA, 1928 bp, Glycine max
ggctttccaaaatgcccactttttttcttccatacgctcttgctccttgtcatagcctgcgccgcctctgtctccggccgccgtgacctcgtcggagactttctccggctgccctaccgaaactgataacgacgacaacttcaagggcacccggtggggccgtcctcctcgccggttccaatggttactggaattacagacatcaggctgatgtttgacacgcctatcaaatattgaggaaaggtggtctgaaagaagaaaatattattgtttttatgtatgatgacagtgcattcaatggggaaaacccaaggcctggagtcatcattaacaaaccagatggaggtgatgtttataaaggagttccaaagggattacaccggcgaaaatgttactggtgataacttttttggtggtttacttggaaataagtcagcactgactggtggcagtgggaaggttgtggacagtggtcctgatgatcatatatttgtatactatactgaccatggaggtcctggggtgctcgggatgcctgctggtccttacttatacgcggatgatctgattgaagtcttgaagaaaaagcatgcttctggaacatataaaaacctagtattttatctggaggcatgtgaatctgggagtatctttgaaggtcttgttcctgaagatattaatatttatgcaaccactgcttccaatgcagaagaaagtagttggggaacatattgccccggggagtatcctagtcctcccccagaatatacaacctgttttgggtgacttgtacagtgttgcttggatggaagacagtgacagacacaatttgcgaacagaaactctgcaccaacaatataaattggttaaagagaggactatatctggagattcatactatggctctcacgtgatgcagtatggtgatgtagggcttagcagagatgttctcttccattatttgggtaccagatcctgctaatgataatttcacttttgtggatgaaaactccttatggtcaccttcaaaaccagtcaaccaacgtgatgctgatctcatccatttttgggataagttccgcaaagctcctgatggttctctcaggaaaaatacagctcagaaacaagttttcggaagcaatgtctcacagaatgcatgtagacaacagtgtaaaactgattgggaagcttttatttggcattgaaaagggtccagaagtactcaacgctgttagaccggctggatcggcacttgttgatgactggcactgcctgaaaaccatggtgaggacttttgagacacattgtggatccttgtctcaatacgggatgaaacacatgaggtcctttgcaaacatctgcaatgtagggataaagaatgaacaaatggctgaggcttccagcacgagcttgtgtcagtattccttcccaatccctggagttctctgcaaaggggtttcagtgcataataactccctgtaatgtgcactagtaaagaccaaagtatgattattgctacattatgttacatggatgcacttgtatatacatatcttgtcccacctttgtaaatacaattgggacactactaggattgggaagaagggtctttacatttatagtttggcaaatagatattgcaactacctttgtataattctatttctgaagaagcaattacaatttgcaagggatggtgccatttccggcataaggattaaggagggataaagggaccaattgctttggaatatccactcattccaatgcatgtatggccacacaatagtaatatgatgtgtgtttttattcagtgggcaactggcagatcgggttttccctggtcacttttcccataattattccggaagaatttatgatgccaaaaatattgtttaatattaatgacaacttgaaattatttttgt

SEQ ID NO: 3231 - DNA, 828 bp, Glycine max
atataataatcacttggaaacaaccgcgctaaggttggaacttggaggaacttgtgtctgtgtgtccttttttccagagtcatggctatggctttgagtctctcccaattccctgttcgtgggtctgtttctttgcccaaaagaagactacccagaagaagcttttgcattaggggcatgtcagaaacctcttccacttcttctgtgagcacccaacaagaacaaccaacttctgataatgcttcttcagtgacaattgctcctccccctaacttcaagccccctgagcctaaacgctttgcaattaggcctgataagaccagtgaagtgtttggagctttgcttcctttgatctttcgttttgccactggagttttcgtttctgggtattctttttcaattgtttctaaggatgaaattcctacagacgaatatgctttggaacttaatggcgttaccataaaagaaacagcaaaattaggccctcgcccagagaagcctattgaaatatatgaatttgagagctgtccattttgccgaaaggttagagaaattgttgccattttggatcttgatgttcttttctatccttgtccaagaaatggcccaaatttccgtcaaaaggttctagagatgggtggcaaactgcagttcccctacatggttgacccaaacacaggcgcttcaatgtatgaatcagatgacataattcggtatttgggtgacaaatatggcgatggaaacgttcctttatcgttatcacttggctttttaacgacactaacggctggtcttggtatgcttagtcttatttcaaaggggactact

SEQ ID NO: 3232 - DNA, 500 bp, Glycine max
tgcaaatgctcgtataggagctggtacaaggctcaaacattgtatcatccttgatgacgttgaaatcaaggaaaatgctcttgttggtcatgcaattgttggatggaaatcatctattggtcgatgggcctgtgttgaggctagtggagattacaatgcaaagctcggggtcacaatacttggtgaatctgtgactgttgaggatgaggtagtggtttttaatagcattattttgccacataagaccctaaatgtgggtgttcaggatgagattcttttatagaacctccacagctcccattgttggctttctattttccttttgattgtatttgcagtgacttatgttttaatatctagtttggaggccccaaaacagtggatataatcgatttttgtctcaaaattgactgttttcggagcaaaatattcattgttgtacttgtacacacacatcaacattgctattttaataaagaaatgaaagtatatcaagtatt

SEQ ID NO: 3233 - DNA, 606 bp, Glycine max
  unsure (1)..(606): unsure at all n locations
ggactatnnttttattaattaattaataattattataatcctattctctcacgtaatggcgtcttcagctcaagtgcctaacctcttcggcggcgccacctcagctccgccgccaactccggcggcgcaccatgacaacatcatgtcctcatccgacgccgccgatgcgctctcgcgcctcctccagcgcctcccgcccacgctctccctccccacgcgcctcccctcgccttcctccgcagccgccacgtgtcctccctgcctctcccttaacgacgtcctctcctgcgtttccaaactcggttacgcgcaactcaccgatcactcagtcccctccgaactcgccaactcggccgagtcagaagcgctggccctcttcgacctttccaaagaacagaagaactccttcttccccaaaaactggcctctcggatacggcggcgacgacgacgaagacgaagacgagctcgccgagtcgttccgcttcgactcggcgtgttcgaccgagtcgaacgagttggcactcttttccctgcgcaagtttgcgcgcgaactggagatgctgggtttaaagatcgttgatgggttaacaaaggacttggggtg

SEQ ID NO: 3234 - DNA, 617 bp, Glycine max
tcccacgcgtccggtcgaagcgtgagtcctaagcgacccatgagtaagagtatgagtattagtccaaaaaggagattgagcaagagcccaagtgttactccaaaaaggagattgagcaaaagtccaagtgttagaagccctcctccatcacagaggagtttgagcagaagtcccgccagaagcatcagcaggagtccaagcagaagcatcagtagaagcccagtgagaggcaggaatgggagaagtgtcagtagaagccctgtgagaggcaggaatgggagaagtgtcagtagaagccctgtgagagtcaggaatgggagaagtgtcagtagaagctcagtaagagtcaggaatgggagaagtgtcagtagaagcccagtaagagtcaggaatgggagaagtgtcagtagaagcccagtgagaggcaggaattggagaagtgtcagtagaagcccagtgagaggcaggaatggtagaagtgtcagtagaagccctgcgagaactcgttctcttagaagtgtcagcaagagccctgtaagatcccattctcgaagtcaccggagcaggagttctcctagagcaccatcaggaataattatcagcaaaagccctgtaag

SEQ ID NO: 3235 - DNA, 890 bp, Glycine max
atagtgattctgagtcagatgatgtggcatcgtcttacataagttcttccagtgatgacaggcgaaggaagagaaagagatctaagaaagataaatatagacggggaaagagaagagataaacgtcgtgacaagaggcgaaggaaaaaggacaagagatcaaagcgtaaatcaaaaagggaatcgggcagtgactcagatagtgagagtaacagtgacaatagctctgaaggtgaaaatattggtgctcaacataaagggcttaagcgtaaagataattctcagaaaaatgctgaaacaaagtctcccttggttgctgagaaagatttgcctcctgcgcatcatgaaaaggaggaagtgggtatgctagaaaatgaggaaaaattctcaaaggaaaacggagagcaacgcagcaatggcattggaggagctgactatggatctgacagaagtgaagagaggcagcctgacgttatggatgatcattcaggcaaaactaggagtcgaagtgtgagtcctaagcgacccatcagtaagagtatgagtattagtcccaggaggagtgcgagattgagcaagagcccaagtgttactccaaaaaggagattgagcaagagcccaagtgttactccaaaaaggagattgagcaaaagtccaagtgttagaagccctcctccatcacagaggagtttgagcagaagtcccgccagaagcatcagcaggagtccaagcagaagcatcagtagaagcccagtgagaggcaggaatgggagaagtgtcagtagaagccctgtgagaggcaggaatgggagaagtgtcagttgaagccctgtgagagtcaggaatgggagaagtgttattagaagcttattatgagtcacgaatgggaga

SEQ ID NO: 3236 - DNA, 596 bp, Glycine max
actgcccacgcgtccggaaacttcaccgtttctgcatgttactgaggtgacacgagattataggaaaaggatatgaaagcaaagcgcgaggcaaaaggggaatcgagcagggactcacatagagagagaaacaacgacaataactatcaaggtgaaaatattggagctcaacataaagggcttaagcgtaaagataattctcagaaaaatgctgaaacaaagtctgccttggttgcggagaaagattcgcctcctgcgcatcatgaaaaggaggaaatgggtatgctagagaatgaggaaaaattgtcaaaggaaaacggagagcgacgtaacaatggcattggaggagctgactatggatctgacagaagtgaagagaggcagcctgacgttatggatgatcattcaggctgaactaggagtcgaagcgtgagtcctaagcgacccatgagtaagagtatgagtattagtcccaggaggagtgcgagcaagagcccaagtgttactccaaaaaggagattgagcaaagtcacagtgttagataccatcctccatcacagaggagtttgagcagaagtcctgccagaagcatcagc

SEQ ID NO: 3237 - DNA, 679 bp, Glycine max
gaagaatcagaagatgagtcaaccaataagaaagataagcttctcatgggaaaagaagcctggtgtctccaaagtaacaactactactcatggtgaaaatctgatcccaaaagaggaagagtttttggccaagttgccaccaccaccttgcacaccagaagaatcaagtgctactcatcatcacaaaaaccaccaccctcttcttgattttcaaattccacttcctccttgtgcttttcagcctcccttttatagaacttcctccaagaggggcctttgggttcaagacaaagaccctttcctagcagctttcaaagagtgcaccaagaatcatcagaaaactagtgctaaggtgaacaaaaagttgatcaaagatggaattgaggcaagggtgagaaagagcatgtcctttttctcatgtactcgatcatgcaccgttcatgacactaatttggtcaggatctctcatctagacaaagattgatgatatgtttttaactttcttaatttatgttatgttctatttgagagattcctgtacaagtcaaaatctatataatagatgtgtgaagaataatctaagtgagaatgattattctgctatgtacgctttctgttcatgatggagtgaaacaaatgatggttagcttattcttatgctaccgatagccattgttga

SEQ ID NO: 3238 - DNA, 526 bp, Glycine max
atcaaattgcaagagacagaaaagaatcgtaagctgaatgatcttcttgatgctctggatttcaaccaagtagttatttttgtcaaaagtgtcagcagagctgccgagttgaacaagttgcttgtggagtgtaacttcccatctatctgcatacattctgcaatgtcacaggaagagagattgaaacggtacaagggcttcaaagaagggaagcaaaggattctcgtggcaacagatttagttggaagggggattgacatagaacgtgttaatatagttattaactatgacatgcctgattctgctgatacttacttgcacagggtgggaagagctggcagatttggcacgaagggacttgcaattactttcgtgtcctctactgctgactctgaggttcttaatcaggtgcaatctaggtttgaggttgacataaagggacttgcaattactttcgtgtcctctactgctgactctgaggttcttaatcaggtgcaatctaggtttgaggttgacataaaagagc

SEQ ID NO: 3239 - DNA, 383 bp, Glycine max
aagacgacagaagggggcttcaaagaagggaagcaaaggattctcgtggcaacagatttagttggaagggggattgacatagaacgtgttaatatagttattaactatgacatgcctgattctgctgatacttacttgcacagggtgggaagagctggtagatttggcacgaagggtcttgcaattacttttgtgtcttctactgctgactctgaggttcttaatcaggtgcaatctaggtttgaggttgacataaaggagcttcctgaacaaattgacacttcgacatatatgccaaactgatgacgttttggaactattaggaggcagatctcgaaggatctttgcggattggggaatggtgtggttggcaactcatcaat

SEQ ID NO: 3240 - DNA, 924 bp, Glycine max
gacttcacgcgacacatacatcataaaaaaacacacacgacacactcccatacacacacgttgtctcgcacacattccttcattccgcagcagcaaacatctttaccttaaacgacaacaatggccgatgccgaggatattcaacccctcgtttgcgataatggaaccggaatggtcaaggctggttttgccggagatgatgcgccgagggcggtgttccccagcattgtggggcgtccacgtcacacgggagtgatggttgggatggggcagaaggatgcgtatgttggggacgaggctcaatccaagaggggtattttgactctcaaatacccaattgagcatggaattgtgagcaattgggacgacatggagaagatctggcatcacactttctacaacgagcttcgtgtggctcctgaagaacaccctgtgcttctcaccgaggcacctcttaatcctaaggctaatcgtgagaaaatgactcagatcatgtttgagaccttcaacacccctgctatgtatgttgctatccaagccgtgctttccctttatgctagtggccgtacaactggtattgttctggactctggagatggtgtcagtcacacggttcctatctacgaaggttatgccctcccacatgcaatcctgcgtttggaccttgcagggcgtgatctcactgatgccctcatgaaaatcttgactgagcgtggttacactttcaccacatctgcggaacgggaaattgtgagggacatgaaggagaactgcctacttgctctggttatgagcagaggtgaaactgccaagacagttcagtgtgaaagactatgagctactgagggcagtgatcacgatgccgtgacgattccatgcctgagtctgttcagcatctgatggatgatctctgatcatgaaacc

SEQ ID NO: 3241 - DNA, 936 bp, Glycine max
agatggtgtcagtcacacggtgcctatctatgaaggttatgccctcccacatgcaatcctgcgtttagaccttgcagggcgtgatctcactgatgccctgatgaaaatcttgactgagcgtggttactctttcaccacatctgcggagcgggaaattgtgagggacatgaaggagaaactggcctacattgctcttgattatgagcaggagttggaaactgccaagaccagctcagcagttgagaagagctatgagctacctgatgggcaggtgatcacgatcggtgctgaacgattccgagtgccctgaagttctcttccagccatccatgattgggatggaatctcctggtatccatgagacaacatataactctatcatgaagtgtgatgtcgacatcaggaaggatctctatggtaacattgtcttgagtggtggttccacaatgttccctggcattgctgataggatgagcaaggagattacagcattggcaccaagtagcatgaaaattaaggttgtagcaccaccagagaggaagtacagtgtctggattggaggctccatcttggcctccctcagcaccttccaacagatgtggattgcgcaggcagagtatgatgactctggccccatcaatcgtccacaggaaatgcttctaatgatgcagagagtccaggaatttttaatatatactccgcactacagaaataccataaagtggttgaggaagttttattttctattctttaccattttttaaccatgttttcgtgtttcctttattaatatgttgggataagagcatgaaggctaagcatgatatgtaagattcatttttttttttcaccgttttggtgtagaagagatgtgtattgttaccgatttggtttggttgaatcaaattctcttaagcattttgattaaaaaaaaaa

SEQ ID NO: 3242 - DNA, 673 bp, Glycine max
cacgttctctcttccctctttcatccccccgataagaacaagcacccaccgtttaacgctaatttttgagtgtttttgttttttgcagcaacaaacaaacatcttttaccttaaacaacaatggccgatgccgaggatattcaacccctcgtttgcgataatggaaccggaatggtcaaggctggttttgctggagatgatgcaccgagggctgtgttccctagcattgtggggcgtccacgtcacactggggtgatggttgggatggggcagaaggatgcgtatgttggggacgaggctcaatccaagaggggtattttgactctcaaatacccaattgagcatggcatagttaacaactgggatgacatggagaagatctggcatcacactttctataacgagctgcgtgtggccccggaagagcaccctgttctcctcacagaagcaccacttaatcccaaggcccaccgtgagaaaaatgacacagatatgtttgagaccttcaacacttccgctattgatgtgccatcccaagcaggcttccctttaatgctagaggcgcaccactgggattgtctgggacttcgggaatgtgcagacacaccgttccattatgtaggtattgactgcacatgcatttctggtttgaccttgtgagctgactcacgat

SEQ ID NO: 3243 - DNA, 587 bp, Glycine max
gataggatgagcaaggagattacagcattggcaccaagtagcaatgccagggtccattgtggaaccaccactcaagacaatgttccctggcattgctgataggatgagcaaggagattacagcattggcaccaagtagcatgaaaattaaggttgtagcaccaccagagaggaagtacagtgtctggattggaggctccatcttggcttccctcagcaccttccaacagatgtggattgcgaaggcagagtatgatgaatctggaccatcaatcgtacacaggaaatgcttctaagttataacaatggagtatgaaagatggaccagggaaattactatttatacgaacactacaaaaataccatcaagtggttgaggaactttcattttcctaccctttaccattccttttatctatcttgtttttgtgttttcctttctttgatatgttgagataagagcatgaaggctagcaagatatgtaagattcatttttttttatccccgttttgttgtagaagagatgtgaattgttacctatttggtttggttgaattaacaaattcttttcatgaagtattctgatt

SEQ ID NO: 3244 - DNA, 294 bp, Glycine max
ttcgttaaaaatagaaagcacaacacataagctacgcacacgtagcttccttcatttcggaaattctaagcaatcattaaaagatggcagatggtgaggatatacaacctcttgtttgtgataatggaactggaatggtcaaggctggatttgctggagatgatgctccaagggctgtgttccctagcattgtgggtcgtccacgccacactggtgtgatggttggaatggggcaaaaggacgcatatgttggtgatgaggctcaatccaagaggggtattttaacactgaaat

SEQ ID NO: 3245 - DNA, 770 bp, Glycine max
  unsure (1)..(770): unsure at all n locations
tattgttactgtgccaacgcattgtgaggccacaagtacctaacacccagctaagcttttggaacttagagttaagcagttaccttcctccaactataatatctcaaccaatcaaaatcctttttctcaattctctctctctctctctctgactctctccacaataagtgttgattttttcctaaataagtgaaagtgtagttacacctttttttagtgttttaccacttttgtgtgccacagagttctgagtttcataggagaaaaaaaatgacagaagaacaaaccaaaacggttgagtcagaatcagtaacaccaccacctgctgctgctgctccttcacaggttcctcctgctgctgaggctgaacatgttcctgaggctccaaaggatgtgactgaggagaaatctgtaattccagtgccttcttctgatgacaagcctgatgaatccaaggctcttgtcttggttgagagtaagatatttttatgttgattctggttggttatgttgtcatgttcccaaagctgggattatatatatatggttggtgaggataaagaaaagaaaaagaaattgaaatctatctgcaattttttgttggagtctctctgcatatgttctatactttatttatcttctttntttaaaatccatttggttaattaactaattctttgaagaacttaatttgtgctttctttattgcaaagggtgttttacttttactatcttataactgtttgagagaaaaagaaagagattttttt

SEQ ID NO: 3246 - DNA, 635 bp, Glycine max
ggtagttacacctttttttgtgtgtttacgagcgtgttgagtgccacagagttctgagtttcataggagaaaaaaaatgacagaagaacaaaccaaaacggttgagtcagaatcagtaacaccaccacctgctgctgctgctccttcacaggttcctcctgctgctgaggctgaacatgttcctgaggctccaaaggatgtgactgaggagaaatctgtaattccagtgccttcttctgatgacaagcctgatgaatccaaggctcttgtcttggttgagaagactcaagaagttgctgaagtgaaaccaactgagggctctatcaaccgagatgcggtgcttgcaagagttgcaactgagaagaggttgtcattaatcaaagcatgggaagaaagtgaaaaatcaaaagctgaaaacaaggctcacaaaaagctttcatccgtttctgcatgggaaaacagcaagaaagctgctgtggaggctgacctgaaaaagattgaagaagaactggacatgaaatacgcagacgctgcaggaaagatcagaagcataattgctgcaatccacaacgtagctgaagatagaagagcaataattgacgcacagaaaggggaagatcttcttaaggcagagg

SEQ ID NO: 3247 - DNA, 1247 bp, Glycine max
atcagtaaggcgctttaacaaggtagaattttcacctcttaattgagaaacctgtgtttctaggtcagttaaatgagcctgctttcttcttctagagcgacgggctgactccctattggatagcatcctccttactcgttttacatcagcagggtctgtgttgtcattcatagatgtctctccctcaatgtcccctttttctgatggtggatcacagccgactaatccttctctagttggatctcagactacttctaaaggatctattccttctggaaatgatcaatctaagttacaagataaagatatcaatgcaccagttgggattccttccatacctgccatacaaaagaaacctgctgttgcaattaggccatctacaagtggatcatcaagagaacagtcagatgatgaggacattgagggagagacatctatgaatgacaacacagaccctgctgatgtaaaacgagtaaggaggatgctatccaatagggagtcagcccgtcgctctagaagaagaaagcaggctcatttaactgacctagaaacacaggtttctcaattaagaggtgaaaattctaccttgttaaagcgccttactgatgttagtcagaaatacagcgactctgctgttgacaacagagttttaaaagctgatgttgaaacattaagagcaaaggtgaagatggctgaagagaccgtcaaaagaattactgggttgaacccaatgcctcatgccatgtctgatatatcatcattgggcctgccatcatttgatggaagaagcccttcagacacttcagctgatgcatctgttcctgtgcaagatgatccacatcatcacttctatcaacccacattgaataatcctattcccagtcatgatccgatagtcaacaatggtttggggggcatttcttcaattgaaaatgtgcagcagcagaacgctgcagcagtggtaggtgggaacaagataggtcaaacagcatccctgcagcgggtggctagcttggaacatcttcagaagcggattcgtggtggacctccatctgagcagtaactaagtagccagatcttaaggttgctttgccaaaaaattattctaaaacagttatttctgttgcctattcttctggaatacattgtaaatcatttgatggagcacatgatgctggattcaattagtgcaccccgttttttttttttttttttttataaaaataatataaaatgaactttacctt

SEQ ID NO: 3248 - DNA, 733 bp, Glycine max
aaattatgactatgtttagcatcgaaaacataaatgcttcttgtcttgaggagttgattgtactatcatgtgctgatatataaccaaatgtttggcctaccagataaactgattataatattaaattttgaaagtgaaataatgcgtgacttacactaatattttcataaactgtgcacaaacttttgatgtagacttgaattcttttatgtcaaactcgtatgcaatttcatcattactattatgaaggaaaggttgcacaagtattataatttttgtgttattggttgagctagctaaatgaatctggattttattgtttcttcctaaacagattctttctttattttcctttattagaaggcattcattttgttcagttcaggtactggtacaaattctgccttgtttaatttaaagcctaacaatttgtctttcaggatgctttctaatagggagtcagccagacgctcaagaagaagaaagcaggctcatttaactgagctggagacacaggtctcccaattaagaagcgaaaattcttcattgttaaagcgcttcacggatgtgagccagaaatacagtaatggctgcagttgacaacagagtactgaaagctgatgttgaaacattaagagcaaaggtgaagccttgcctttagtatataggccttaagtagaacctgttacataggagacctactgactcttgctaagcagttccctaggtttgg

SEQ ID NO: 3249 - DNA, 561 bp, Glycine max
gtccgagaatggaaacagacctaaacagagggtaacaaaacaagcaaacaccatggtgattaagtctgtgttgttcagcttcattttccccccgccaccttctctggtggtttgggggttgactgtgacaagcttcctgatactggctaatgctttcttgtcagaaattagagggaagcatttgaactattcaaagttttggaatgctaatccctctgcagaaaagcaggtcaagttgtctagcaaagctggcatgcttttgctgtacactcctgcttttcttgctggccttgcatccttctggatctttcctcatcaaggcctcagatccaccctccttcagtctgcagttaccctgcatttcttcaagagggtctttgaggttgtgtttattcacaaatatagtggtgccatgcttcttgattctgcaatccccatcactctgagttatttcctatcaactgcaactatgatctatgctcaacacttaacacaagggcttccagaaccaccaatcgatcctgttgtatcctggcattgttttgtttgtggtgggcatca

SEQ ID NO: 3250 - DNA, 1474 bp, Glycine max
cccacgcgtccgcccacgcgtccgtccacgcgtacgcccacgcgtacgctctctcacaataaccactaattctcccaactcaatttttctctcaaccggcccaatttagcataagcccagcatggccaccgcaacagcagcagccacctcgtccttcatggggacgcgcctcctggaggcccactccggggcggggcgggtgcaggcccggttcgggtttggcaagaagaaagccgccgccccgaagaaagtttccagggggtcgggctctagctccgataggcccctgtggtatccgggcgccaaggcgcccgagtacctggatgggagccttgtcggagactacgggttcgacccatttgggctagggaagcccgccgagtacctgcagttcgagttggactcgctggaccagaaccttgcgaagaacgtggctggggacatcattgggaccaggaccgagctcgcggacgtgaagtccacgccgtttcagccctacagcgaggtgtttgggctccagaggttccgtgagtgcgaactcatccatggaaggtgggccatgctcgccactctcggagctctcactgttgagtggctcactggtgttacatggcaagacgccggaaaggtggagctagtagaagggtcatcataccttgggcaaccacttccattctcaatcaccacactgatctggatcgaggttctcgtaattggctacatagagttccagaggaacgcagagctggacccagaaaagaggctgtacccaggtggcagttacttcgacccactgggcctggcctcagatccagagaagaaagccacccttcaattggcggagatcaagcacgcccgtctcgccatggtgggcttcttgggctttgcagtccaagctgccgccactggcaagggcccgctcaacaactgggccacccacttgagtgacccactccacacaaccatcattgacaccttctcatcctcctcttaagaagaagcaaaagaagaagaatagtctttcttgtgcctggtcattctagttatattgtaaaagtctttttcttcttcttcggctttgggttgtaattaaacattttctacatagctggattagtagtacttgtgaaaaacttgtaacgtgaaattggagaggctaagcagaaatgcttctgcttgatgttaagtgttctcctgtgaatgttaattatgcacgaaatcgagagggaaggacgacggtaaaaaatactgatgaggttgagatcactatgaaaggtaatggcaggaaattggattgaggccattggagattttaatttattcattttattaagtttgattctacataaacgctgatttgctgcagtacagaaaatagcgctggtttaccgaagttggtgaccaatggttaactaatggccaagttagactatatttcctacatctaatgctacattttgtttacatgagttaa

SEQ ID NO: 3251 - DNA, 1045 bp, Glycine max
  unsure (1)..(1045): unsure at all n locations
agcatatggggttctctgtttcttgctattgtcttgtttgttcctctttgggcttgttttgcaaactgtgctctactttgtttgcaagtcctatcaccatgagaatattgacaaatcggctttggcagatcatcttgaagggtatcgtggagagtatgtgccattgacggctaaggatgttcagctggagcagtaccaagtttgatttataatatagcttaattagataaattaaattaatcatcatcatgtgtctagattgatgatgcggttaattatatctgctttggtttcttgatgtctttagaaatatcttttgtgtgtgaaattaaggcaggtgtgaagtgaatttcattactctctatatgattggttatatgtatttaattttctgtttaaaaataggactcttttgcaaaggtgtattaattaatgctatgagatgactttatttcacatcaaanaaaaaaaaaaaaaactcgagctcgtgccgaattcggcacgagtggcctcagacccagagaagaaagccacccttcaattggcggagatcaagcacgcccgtcttgccatggtgggcttcttgggctttgcagtccaagccgccgccaccggcaagggcccgctcaacaactgggccacccacttgagtgacccactccacacaaccatcattgacaccttctcatcctcctcttaagaagaagagtctttcttgtgcctcgtcactattactagcatattgtaaaagtcttttcttcttcggcttttggttgtaattagaacattttcacttagttggattagtagtacttgtgaaaaacttgtaacgtgaaattggagaggctaagcagaaatgcttctgcttgatgttaagtgttctcctgtaaatgtttattatgcacggaatcgagagggaatgacgagggttaaaaaaatactgataatattgagataactacgaaaggtaatggcagganatcgcattagggccattgaaggttttattaaaaaaaaaaaaaacgaacgcgtggacgaacgcgtg

SEQ ID NO: 3252 - DNA, 506 bp, Glycine max
gtttccattaaggttttgttcaaagtgatggtggttgatggatggagggtgagttctgtggacaaaacagcatatggggttctctgtttcttgctcttgtcttgtttgttcctctttgggcttgttcttcaaactgtgctctactttgtttgcaagtcctatcaccatgagaatattgacaaatcggctttggcagatcatcttgaagggtatagaggagagtatgttccattgacagctaaggatgttcagctggagcaataccaagtttgattaataatttataatatagcttggataaattatattggtgatgtggttaattatatctgctatggtttcttgatgtcatgagaaatatcttttgtgtgtgaaattaaggcaggtatgatgatgtgaatttgattactccatctctatatgattatgtatttaatttactgtttgaaaataggaatcttttgcaaccccattaattaatgctatgagatgagtttaatattccc

SEQ ID NO: 3253 - DNA, 656 bp, Glycine max
  unsure (1)..(656): unsure at all n locations
tcgtaattggctacatagagttccagaggaatgcagagctcgacccagagaagaggttgtacccaggtggcagttacttcgacccattgggcctggcctcagacccagagaagaaagccaccctgatctggatcgaggtactcgtaattggctacatagagttccagaggaatgcagagctcgacccagagaagaggttgtacccaggtggcagttacttcgacccattgggcctggcctcagacccagagaagaaagccacccttcaattggcggagatcaagcacgcccgtcttgccatggtgggcttcttgggctttgcagtccaagccgccgccaccggcaagggcccgctcaacatctgggccacccacttgagtgacccactccacacaaccatcattgacaccttctcatcctcctcttaagaagaagagtctttcttgtgcctcgtcactattactagcatattgtaaaagtcttttcttcttcggcttttggttgtaattagaacattttcacttagttggattagtagtacttgtgaaaaacttgtaacgcgaaattcgagaggctaagcagaaatgcttatgcttgatggccaaaaaaaaaaaaaaaaaaaaaaaanccncgcggccgctctagaggatccnagc

SEQ ID NO: 3254 - DNA, 385 bp, Glycine max
caacccgtcggctaactacaggcgcacgttagcacaaactatcatggccacggcaacagcagctgccacctcgtcctttatggggacgcgtctcctggaggctcactccggagcggggcgagtgcacgcccgattcggcttcggcaagaaaaaggctcccgccccaaagaaagcctccaggggatcgggccgacacaccgacagaccccttatggtatccgggcgccagagcgcccgcatacctcgatgggagtcttgtcggagactacgggttcgatccgtttgggctagggaagcccgcggagtacctgcagttcgagctggactcgctggaccagaaccttggcgaagaacgtggcctgggacatcattggaaccaggaccg

SEQ ID NO: 3255 - DNA, 1910 bp, Glycine max
ggatgcatctcgtttctctctcttagttcaaatttcgaattcggaagcagcaaaactaaagcccaaaaacccataccaagatgctcctccgaagccactgttgctacctcggcataatcgccgggctagcagtgttcctcgcaacgacgtcgttcgccgacgcgcaatcctgcaacggcatcctcgtctcatacgcctacaccggcggcctgcggttgccgcccaacgtctccgactcggctaagcagccgtaccggttcgagtcgacggtgacggttctcaacaacggcctcgacgagctcaagtcgtggaaggtcttcgttgggttcgaccacgacgagttgttggtctccgcctccaatgctgtgctcgccgacggcaccaccctccccgccgccgtcggaaacggcaccgtcttcgccggtttccccatgactgatctcaagaccgccgtcgaaaccgccggcgacttgacccagatgcaggctcagatcgaactcgtcggcaccgtgttcggggtggcgccgcccagtgttccgatgccgaaatccatcaacctcgccaatgatggtttcctctgtcgcaaatccaccgctcaagggaagaatgcgagtagtgtgtgttgcacgagagatcccaagttcaaaactaacattactacggatgaagagtttctgccacgtcagagtggtgatcttaccattatgtatgatgtgatcagaacttatgattcaaattactgggctgaggttaccgttgcaaaccataacccacttgggaggcttgataactggaggttgagctgggactggatgaatgatgagtttatatattcaatgaaaggggcttatccttcggttgtggatgcttctgattgtctctttggtaagcaaggaactttctatagggatcttgactttgcccttgtgttgaattgtgagagaaggccaaccataattgatctccctcccaccaagttcaatgattccgaccttgggaagattcccttttgttgccggaatggtactattttgcctccgtccatggatcctagcatgtctgcttcgagattccaaatgcaggtcttcaagatgccgccggcgcttaaccgatcccagctttcgccaccgcagaactggaagataagtggcacactcaaccctgactatgaatgtggccctccagtaagagtgagtcctaccgaaaatcctgacccgtccggcttaccttcaaacaaaactgtgatggccagttggcaggttgtgtgcaacataacaacagccaagagaacatcaagtaaatgctgtgtctcgttttcatcttattacaatgattcagttattccatgcaaaacatgtgcttgtggatgccccaagaacacagagagaacatgtagtactagtgctccagctatgtggcttccaccagaggcacttcttgttccctttgtgaaccgaactgccaaggctgttgcttgggcaagtctgaaacatctccgggtgccaaacccattgccgtgtagcgataactgtggtgtgagcatcaattggcatttgtacacagactacactaaaggatggagtgcaagggtgacactttttaactggggtgacactaattttgcagactggtttgccgcagtacaaatggacaaagcagcttcgggttttgagaaaatgtattcattcaatgcaactcttctagatggtgtaaacaatacaataatcatgcaaggtttgccaggattgaactaccttgtagcagaagcagatggagctgaccctttgagagatcctagggtgcctggtaaacaacaatcagttatctcatttacaaagaaaactactcctggaatcaacgtagctcgtggagatgggtttcccactaaggtatttttcaatggcgaagaa

SEQ ID NO: 3256 - DNA, 2218 bp, Glycine max
atttgcaacccaaccttacacgaagcccctcaacggttctggaataggtggaattttctagaaccccaaccactctccataaaagcccaaaccctaatcttcttcactctgttgttgttttcagtgtagtggaagaatcactcccttatccatttccacaccacaccatggcctcaaccaacgctctctcttcagcctccattctacgctctcccaaccgccagtctctgacccgaagagcgaaccataatggaagagtaaattaccggaaaccgaataaccgtttctccgtgaaagcctccgccaaagagattgcctttgaccagcattcccgctctgctatgcaggccggcattgacaagctcgccgacgctgttgggctcactcttgggcccagagggaggaatgttgtgttggatgagtttggaagtcctaaagtggtcaacgatggtgtcaccattgctcgcgcaatcgagcttcccgatcctatggagaatgctggtgcagctcttatcagagaggttgctagcaagactaacgactctgcgggtgatgggactaccacggcttcggttcttgctcgcgagataattaagctggggcttcttagtgtgacttctggggctaatcctgtgtctcttaagagagggattgataaaactgtgcagggtttggtggaggagttggagaagaaggccaggcctgtgaaaggtggagatgatatcaaagctgttgcttccatttctgctgggaatgatgagttgattgggcaaatgattgcggaagcaattgataaggttggacctgatggtgttttgtccattgagtcttcatcatcgtttgagaccacagttgaagtggaagaaggaatggagattgacagagggtatatctcgcctcaatttgttacaaaccctgagaagttgattgttgaatttgagaatgcgagagtgttgattacagatcagaagatttcagcaataaaagacattataccactgttggagaaaaccactcagttgagagctcctttgcttatcattgccgaggatgtcactggtgaggctttggccacccttgtcgtgaataagctgcgtggtatccttaacgttgctgccattaaagctcctggctttggtgagcggcgaaaggccctgcttcaagacattgctatattgactggtgctgagttccaagctagtgatctgggtctgcttgttgaaaacacctcagtggagcagcttggtttggctaggaaaattaccatctccaaggattctaccactgtcattgctgatgctgcgacaaaggatgagttgcaagccagggttgctcagttaaagaaggagctgtctcagacagactcagtatatgatactgagaaactggctgagaggatagctaaactgtctggtggagttgcagtcatcaaggttggtgctgccacagagaccgagcttgaggatcgtaagctccgaattgaggatgccaagaatgcaacttttgctgccattgaggaaggtattgtacctggtggaggtactgcactggttcatctctccactcatgtcccagcactcaaggacaagcttgatgatgcagatgagaggctaggagccgacattgtgcaaaaggcactgatagctcctgcagcattgattgctcaaaatgctggaatagaaggtgaagttgttgtggagaaaataaagagtggtgaatgggaggtcggttacaatgccatggcagacaggtatgagaatttagtggaggctggagttatcgaccctgccaaggtaactaggtgtgctttgcagaatgctgcttcagttgctggaatggtgttgaccacgcaggccattgtggtggagaaacctaagcccaaggcacctgtagctggtgccccacaaggccttaccgtttgatttttaggctgtagggctacggcgaagaacagttttgtgcagaaaattgaaagtgcgtatgtgttcgaattctgttcaatcggaaaaaaaaatgtatttgtaaacagttttagatttgttgggcttgatgagagaaaagagattataatattggattctagtcatggcatgtttaatgattggaaataaggtagtcatttgatatttttcttcaagttttaatgttgtaagcataagtagttttaggctcttaattttggttcccctttaagattggaacaacgtactcatttgat

SEQ ID NO: 3257 - DNA, 537 bp, Glycine max
ggagccgacattgtgcaaaaggcactgatagctcctgcagcattgattgctcaaaatgctggaatagaaggtgaagttgttgtggagaaaataaagagtggtgaatgggaggtcggttacaatgctatggtagacaggtatgagaatttagtggaggctggagttatcgaccctgccaaggtaacaaggtgtgcattgcagaatgctgcttcagttgctggaatggtgttgaccacacaggccattgtggtggaaaaacctaagcccaaggcacctgtagctggtgccccacaaggccttaccgtttaatttttaggttattagggctacggcaaagaacagttttgtgcagaaaattgaaagagcggagagaaatataccgatgatttcgttcgtttctgtgccaagaaagtaatacaccatgaattgctccagcattttcaacatcagtcaatctacatgcaagcagacgatgtgaatcctccctccatcagatttgagaaaataatgggtactcgttgaagttgtttatcttct

SEQ ID NO: 3258 - DNA, 415 bp, Glycine max
actcgagccgaatcggctcgaggaagaaccaccactaccttatccatttccactcctcaccaagccacaccatggcctcaagcaacgccctctcttcagcttccattctacgctctcccaaccgccagtctctgaccagaagagcgaaccacaacggaagagtaaattaccgtcaaccgaatagccgtttctccgtcaaagcctccgccaaagagattgcctttgaccagcattcccgctctgctatgcaggccggcattgacaagctcgccgacgccgtccgggctcactcttgggcccacggggaggaatgttgtgttggatgagattggaagtcctaaagcgtgtaaccatctgtgcaccattgcttgcgccatctagcttacagagcctatggaaaatgcccgtgcacctc

SEQ ID NO: 3259 - DNA, 321 bp, Glycine max
ggggaacaaccgcttccttatccaaatgcatttcacaccaaggcctcaaccaacgggccctggttaaagtccatgcggacgctctactaaccgggagtctctgacccgaagagcgaaccacaacggaagagtaaattaccggcaaccgaatagccgtttctccgtcaaagcctccgccacagagagtgcctgtgacctgcattcccgctctgcgatgcaggccggcattgacaagcgcgccgacgccgtcgggctcactcttggcccaggggataatgcgtgtcgatgatatcgagtcctaagtggttacgcggtgtcaca

SEQ ID NO: 3260 - DNA, 819 bp, Glycine max
aaccggtaccaatagtcgaataccataacgcaaattgaagacgaagcaggaaccacaatctgggttgatctatgagtaccggcaccactagaatgctagtgaaggagatgttgcaactctcttcttccacacttcacttctcttctgcgtttcgcgccctttctcctcctttgccattctcgattcaattgcgacgctcgcgccgccctgcaattcgatgcgcttcctcagactccgacaaagtatcgtctcggctgtcgcaggttcagcaccttcttcaacaggccgaacaccgtgctctctccgccgaccagggcccacctcctaaaatcaccttagatcatgttacggtgagctttgccagaagtggaggacctgggggtcagaatgtcaataaagtgaacactaaggtggacatgcgcttcaacgttaagaatgcatattggttgagtgacagggtcagggacaagattttgcaaacggagaaaaaccgtattaacaaggatggggagcttgtgatttcttcaaccaagactagaacgcagaagggtaacattgaggatgctttggcaaagcttcagataaacaaaccggtggaagaatgcagcttaggatggtgacttggtggtagacatatctcttcctcatttctgtattcttgtattgtactcagacattataattcaaatttgaagatttctgttgttggctatttttttttattttcttatgagttagagtagcatcttaatggaaaatggaatatatcttggaggagtttgtacagtggttccttattgtcttctccgctactcattg

SEQ ID NO: 3261 - DNA, 1048 bp, Glycine max
agtatgtattaatggaaacttacagcaatggcttcatggagctatgcgtcaccatggataccttacgtgggaagcacgtatcaagattctccttggcacagccaaagcgctagcgtatttgcatgaagcaattgaaccaaaggtggtgcaccgtgatgtaaagtcaagcaacatattaattgatgatgatttcaatgccaaggtttctgattttggcctggccaaattattgggtgctgggaagagttatgtcacaacaagagttatgggaacttttggatatgtggctcctgaatatgcaaatactggccttctaaatgagaagagtgatgtttatagctttggtgttttgctattggaaggaattactggtagagatccagttgactatggtcgaccagcaaatgaagtgaaccttgttgattggctgaaaatgatggttggaaacaggagatcagaagaagtggtggaccccaacattgaggtgaagccatccaccagagctttaaaacgggctctcttaactgctttaagatgtgtagatccagattctgagaaaaggcccaagatgggccaagttgtacgaatgttggagtcagaggaataccctttaccaagagaggaccgaagacaccgaagaagaaatcgagagggtagtggagaaattgagtcccagaaggaatattctgacacagacaggagtgagattcaggattcaagagaagaaagaagagggtgaacaacagacatgaccccaagaattcggtgggttggtgggatttataaattggtagctttttttttcctccatagctttttagattcttggatttttgcctacctcagatgggcatggcaaaggggctggcacagctggagatatttttattttttatttttttcccatgcattggttcttggtgtccttttgtttgtatataggatagatattgtttgtgtatgaaggtggatggtatttctaagataagaacccataatattggggtgtgtacagaatttgatatcttaattccaaaatatgttccat

SEQ ID NO: 3262 - DNA, 982 bp, Glycine max
  unsure (1)..(982): unsure at all n locations
aatgctatatctttatgttaaaacttcaaaatataaaatgcaataatatctttatttatagtagctaagaagatatttatgaaaatgttattgtgtatgctaaaagagtgagtgttgtacttaaccggctcccacaatagcaaacattgacacggaacactcagaagtgttctggcattcggtaaaataaaaatctctcgaaacataggcctataaaatgccaaagattgggccattttggtaatttcatgttacaagatatgttttctgagttcctcttttgcctatataaatgctagtatgtagagtgagcaagccactaactcaattagaattctccaaacactctagaatttgcatgcactgttcttcatacaatggcattacgcgagcttcttatgatggggatattgctgctggtatgtcttgctaaggtttcatctgatgttaacatgcaaaaggaagaagatgaagaacttcgctttcctaatcaccctcttatcgtgagagacgggaacagaaggctaatgcaagacatagattgcggaggattgtgcaagacaaggtgcagtgcccattcgaggccaaacgtgtgcaacagggcttgtggcacgtgttgtgtgaggtgcaagtgtgttcccccaggaacttcaggcaacagggagctctgtgggacctgctatactgatatgaccacccatggtaacaagaccaagtgcccgtaaagcccatagaaggtgagccctatccaattgggcccttcacacaccaagcaaagctagcatagtttagtaaataataaatgtgttatctacacttttgtagatttggatttgtcatctttaagatgtgttctagtttttatctttgttataaaggtatggtacaatatgaatcaagtatataaactttgcgcttagattacttcatatatgnaaaagtatcgaattcctttttaatttgngttaaaaaaaaaaaaaaa

SEQ ID NO: 3263 - DNA, 384 bp, Glycine max
gaattctccaaacactctagaatttgcatgcactgttcttcatacaatggcattacgcgagcttcttatgatggggatattgctgctggtatgtcttgctaaggtttcatctgatgttaacatgcaaaaggaagaagatgaagaacttcgctttcctaatcaccctcttatcgtgagagacgggaacagaaggctaatgcaagacataggtaagcaaaacaaagtattttggatgctttattaggttaactttgatcctgtgcttccggttttaacttttagattcttactaactagtctccttagtgacattttttaaaaaaaaatttaaaaattatcataaaaatcacatgaaagcctaaaaaaacacaagcaatgttattt

SEQ ID NO: 3264 - DNA, 291 bp, Glycine max
tacaggtttcatctgatgttaacatgcaaaaggaagaagatgaagaacttcgctttcctaatcaccctgtatgttattttttttccttggcaagatattagtgaaaatgtttctttacttttgtgattttcttatgtgcttgatgtaaccgtatatattataatatccttactggaaatatcaaattctcttcagcttatcgtgagagacgggaacagaaggctaatgcaagacataggtaagcaaaacaaagtattttggatgctttattaggttaactttgatctcgtg

SEQ ID NO: 3265 - DNA, 300 bp, Glycine max
ggccaaacgtgtgcaacagggcttgtggcacgtgttgagtgaggtgcaagtgtgttcccccaggaacttcaggcaacagggagctctgtgggacctgctatactgatatgatcactcacggcaacaagaccaagtgtccgtagagcccggcccattgaaggtcagccctatccaattgggcccttcacacaccgagttgattacaccaagcaaagttagtcttgtttagtaaataataaatctgggttatgtacacttttatggatttggattttgcatcttaagatcgtgttctagttt

SEQ ID NO: 3266 - DNA, 435 bp, Glycine max
gaacgtaactaaactaaaaatggatcgagaatggggatcgaagccggggagcggaggtgcggcgtcggcgcagaacgaagccatagaccggcgagagcgtctccggcgattggctctggagaccatagacctggcgaaggatccctatttcatgcgcaaccacctcggaagctacgaatgcaaactctgtctcactctccacaacaacgagggtcaactacttggcccacactcagggcaagcgccaccaaaccaacttggccaaacgtgccgctcgcgaggccaaggacgcccccgcccagccccaaccccacaagcgcaaagtcactcttcgaaaaacagtgaagattggacgccctgggtaccgtgtgaccaagcagtatgacccggagactaaacaaagatctctcctattccagattgaatatccggaga

SEQ ID NO: 3267 - DNA, 433 bp, Glycine max
catttctgaacagtttttggtttgggttgcgtggcgtcgcgttgcggcgagggactcaccttcttcttcttcttcctcttctcgttattctctcgtccattctatggagcttcagaggcgtccagatcagtgcctcccggagaggaaagggcagaagaggaagctcgaggaggaattcgatgacgacccacagatctcccctcctcccaccggcgacgctcgcgacgccctcctctccgacgttaaggaacaggtttccctcctcgattccactttctcctggaacgaacccgatcgtgccgccgccaagcgcgccacgcacgccctcgccgatctcgccaaaaacgaggaagtcgttaacgtgattgttgaaggaggcgccattccggcgttggttaagcatctccaagcgcctcctctggctgaaagcgac

SEQ ID NO: 3268 - DNA, 402 bp, Glycine max
ggggttgcgttgcgtcgagggactcagcttcttcttcttcttcttcttcttcttcttcttcttcttcttcctcttctcgttcttctctcatccattccatggagcttcagaggcgtccagatcagtgcctcccggtgaggaaagggctgaagaggaagctagaggaggagttcgatgacgacccacagatctccgctcctcccaccggtgacgctcgcgacgccctcctctctgacgttaaggaacaggtttccctcctcgattccaatttctcctggaacgaacacgatcgtgccgtcgccaagcgcgccacgcacgccctcgccgatctcgccaaaaacgaggaagtcgtgaacgtgattgttgaaggaggcgccattccggcgttggttaagcatctcc

SEQ ID NO: 3269 - DNA, 1168 bp, Glycine max
acgagagagagagagagagagagagagagagagagagactggtgccgaattcggcacgaggcatacttggatggtcttgaggcatctgagttaaatgacctctctagagttacaagtgttgcctctttcttcgtcagtagagtggacaccctcattgacaaggcccttgagaaaattggcaccccagtggcccttaatctacgtgggaaggcagcggtagcccaagcagcattggcttaccagctctaccaaaggaaattttctggtccaaggtgggaagctctagttaaaaagggggccaagaagcaaaggctcctttgggcctcaaccagtgtaaagaaccctgcctattctgacaccttatatgttgctcctcttattggacccgacactgtatcaaccatgccagaccaagcccttcaagcatttattgatcatggtaccgtatccaggacaatagactcaaatgcatctgaagctgaaggaatatacaatgctctccagaaattgggtattgactggagctttgttggttcccagcttgaacttgaaggagtggactcgtttaagaagagctttgacagcctcctggattctctgcaagagaaggcaaactctcttaagttggtcagccactgaagtttgaacgtcatggttagtaatgcagtgctgtgtatgatggcatctatggattaataaaaggcagcggctgtgcattttgtgctgctgcaaatgtgcttcatggagtcatttatttagacgatagtgatacaatgtaaatgggaaaaattgtccgcttcaagtcaagcgttttgttttttccccactatacaatggttgtgcgtttatgtttaaaagtcttacattttagttcgaatttttaattaaaattttgttgtgatcaataacacaactcatgcatgtttaactaataataaattgagggcagttccccaagtcgcttcccttaggccagagacagcgaaaaccccccaaggtcgtaagggaaattgggatttgggaaagctatctcctttcagcaattgcttcctgcacctccagacttggttcttgcacccggatctagaatgtaatttacattccggattagtcattgctgaatgtaaaattttacattctggattacattctgaatgagggtttctgg

SEQ ID NO: 3270 - DNA, 1337 bp, Glycine max
tataaaccgaaccaaacgcaccctacgcacctactccatcctccgcttcgtgacttgcagcaattcccaatggcttccattttcaagctctcaacgccatctccagctgcttccttatcagaagcgcttcgccccagagattctcgcttcctctccttcaatccttcttccaacgctattaattacaaaattaacctctccgcttccctccgatccattcactccctccctcttaaaacctccttgcggatcaaatgctcccaaacagatgggaatggaagtcctgcaaagaggacagtgcttcatgatctttatgagaaagaagggcagagtccatggtatgataatctctgcagacctgttacagaccttcttcctcttatagcaagtggtgtcagaggcgtcactagcaaccctgcgatttttcagaaagctatctcatcatcgaatgcttacaatgatcagttcagggaacttgtgcaagcagggaaagacattgaaagtgcatattgggaacttgtagtgaaggatatccaagatgcttgcaaattatttgaaccaatctatgatcaaacagatggtggtgatggctatgtttctgttgaagtatctcccaggctcgctgatgacactgagggaaccatagaagctgcaaaatggcttcataaagtggttgatcgccccaatgtgtatattaagattcctgctacagaggcatgtgtgccttcaattaaggaagttattgctaatgggataagtgtgaatgtgacgctgatattctctcttgcaagatatgaagctgtaatagatgcttacttggatggtcttgaggcatctgggttaaatgacctctctagagttacaagtgttgcctctttctttgtcagtagagtggacactctcattgacaaggcccttgagaaaattggcaccccagaggctcttaatctacgtgggaaggcagcagtagcccaagcagcattggcttaccagctctaccaaaggaaattttctggtccaaggtgggaagctctagttaaaaagggggccaagaagcaaaggctcctttgggcctcaaccagtgtaaagaaccctgcctattctgacaccttatatgttgctcctcttattggacccgacactgtatcaaccatgccagaccaagcccttcaagcatttattgatcatggtaccgtatccaggacaatagactcaaatgtgcttcatggagtcatttatttagacgatagtgatacaatgtacttgggaaaaattgtccgcttcaagtcaagcgttttgttttttccccactatacaatggttgtgcgtttatgttt

SEQ ID NO: 3271 - DNA, 478 bp, Glycine max
ttattttcaagctctcaacgccatctccagctgcttccttatcagaagcgcttcgccccagagattctcgcttcctctccttcaatccttcttccaacgctattaattacaaaattaacctctccgcttccctccgatccattcactccctccctcttaaaacctccttgcgcgatcgatcgccatcgtaactatcgaagtgtcttgttagggcgtgtttggtaggatgcgacccgagtataggaaagttggtagctgctacaagatcaaatgctcccaaacagatgggaatggaagtcctgcaaagaggacagtgcttcatgatctttatgagaaagaagggcagagtccatggtatgataatctctgcagacctgttacagaccttcttcctcttatagcaagtggtgtcagaggcgtcactagcaaccctgcgatttttcagaaagctatctcatcatcgaatgcttacaatgat

SEQ ID NO: 3272 - DNA, 676 bp, Glycine max
  unsure (1)..(676): unsure at all n locations
cgtcctagcccgcgtaggcaagctaggaattcagctcgagctcgagccccacgcgtccgttgttccttctccttgtgatcttcttcaaccttcagagtgagaaaacacattcagaaaccacgtttctctcttcttcttcttcttcttctttttcttctctcgaggtcattattaagtattcaccatggaggcaccatctcccaccaaacccaacgacccaacaaaaccttccaacacttccaccacccttagtctggaggccggcccggcccaagcgagcccactccgaaaaatgtttgccgtggcgtccatcgccgccggcatacagttcgggtgggctctccagctctctcttctaaccccctacgttcagcttttaggagtcccccacgcggcggcctccttcatctggctctgcgggcccatctccgggctcgtggtacagcccattgtgggctactacagcgaccactgtacctcccgctttggtcgcaggcgcccctttattctcgggggcgccttagccgtcgccgtcgccgtgttcctcattggttacgcagccgatataggatacgcggcgggcgacgacatatcgaaaacgacccgaccccgagcggtcggggtcttcgtcataggattttggatcctagacgtggccaacataatgaataangaa

SEQ ID NO: 3273 - DNA, 515 bp, Glycine max
tatggttcctgctcctcgaacccttgagagcgagaaaccacgtttctctcttgaggttaattattattattattgagtattgagcatggaggcgccatctctcaccaaacccaacgacccaacaaaaccttccaacacttccagcacccttagtctggagggggggccgggcgaacgagcccactccgaaaaatgtttgcggtggcgtccatcgccgccggcatacagttcgggtgggctctgcagctgtctctcttaaccccctacgttcagctcttaggagtcccccacgcggcggcctccttcatctggctctgtgggcccatctcggggctggtggtgcagcccattgtgggctactacagcgaccactgcacctctcgcttcggccgaaggcgccccttcatcctcggaggcgccttagccgtcgccatcgccgtgttcctcatcggctacgcggccgacataggacactccgctggcgacgacataactaaaaaaacccgaccccgtgc

SEQ ID NO: 3274 - DNA, 454 bp, Glycine max
cccacgcgtccgcccacgcgtccgccctttctccccacgctataaaatccccccactccttcttgcttcacacagcatatctttctcttgttccttctccttgtgatcttcttcaaccttcagagtgagaaaacacattcagaaaccacgtttctctcttcttcttcttcttcttctttttcttctctcgaggtcattattaagtattcaccatggaggcaccatctcccaccaaacccaacgacccaacaaaaccttccaacacttccaccacccttagtctggaggccggcccggcccaagcgagcccactccgaaaaatgtttgccgtggcgtccatcgtccgccggcatacagttcgggtgggctcttcagctcccagctctctcttctaaccccctacgttcagcttttaggagtcccccacgcggcggcctccttcatctggctctgc

SEQ ID NO: 3275 - DNA, 725 bp, Glycine max
caattttgaacctgcaggggcaaaccctttaacctttactgttaaatctgcagctctgaaggaagctattgaggatcttgaatggcctggatcaagcatcaagattactctagagccagatcctccttctgtttcattaagagctgaaggacatggagacttgcagatagacttcatgtattatgtgaattccgaactcctggtggcatttcagtgtgatcatcaagcttctttcaagtacaaatataagttcctcagagcaacaacttctaatatgcctagcagtgttattaaagaaaatagaggaagtaagttaagcattgggagaggtggaatgttaaaagtccagcatctggtttcaattgccaaaccatctgtgtcacacccatatgctgattcggttggctatcagcaaccaagtagaatagctcatattgaattctttgtgaaaccagaggaaagtgaggactgagtgaatgattattagttactataaagactccgtcaagttttgctatgcaaaccattaacttcgcaaaagaattacaaaatggtttgtattcagaatgttgatcaaagaggtattttgcagaaaaatcctcgtttaatctgagttttagacggaacaagcttggtaaggccactgaaacttaaaacagaatcgtagcaatgttgctcagatcctgaaatttttgatgcatagttcaggattaaaatatcccaat

SEQ ID NO: 3276 - DNA, 1111 bp, Glycine max
gaaagaagggcgggaccacaccttcgtccgggctgcaaaaagacaccaaaaggggcccgggttgtgaagctacttcaccactccaaacccaccacaccaccattattcatatctcattctctaacctttcactctgccttactcactctctactttgctcatcatcgtagatgaaccaacacttctagtctctcttactttataaccatgtaaaaatgagtcacctaatgaaaaattagtagcttcttgttgtgctttttattttgtttgtgttgagataaatttgtttgtttgtttggtattgttttgtgttttatgaattatttgatgggtgaagaaggagaagtggtgagaaagcaaggacaaaggggtgttggtggagataagtggtacttgtatagctgcttacaagactgtaaatattggtgctgtttaatacacgagactagttctctttcgatggtcccttttgagtgaaaaaccttgtcttctcagctttctttcgagagatcttaaagacattgactaacaacaataaagtggatcaatcaaaagacttacttcttcttctaacaacaataagatcacatctttcccactcatgaagagacttagcagctcagattcttccagtgccctcatgacaatttgtccatcaacagaggaacatagtccgaggaacagccaacacatgtatggtagggagttccaatcgatgttggacggactcgacgaggaagggtgtgttgaagaaccggggtatcaatctgagaagaagcgtcgtctaagtgtggatcaagtgaaggctttggagaagaactttgaggttgaaaacaagcttgaacctgagaggaaggtgaagcttgcccaagaacttgggttgcaacctagacaggtagccgtatggttccaaaaccgccgagccagatggaaaaccaaacaattggagagagattatggtgtcctcaaagccaattatgatgctcttaagcttaactttgacaccctcgatcaggacaacgaagccttacgaaagcaggtagaataatactccttccaaaatataaacaaatttcaattatttatctgtcttattcaatgatattttctc

SEQ ID NO: 3277 - DNA, 1231 bp, Glycine max
  unsure (1)..(1231): unsure at all n locations
gctcgcgtccgcccacgcgtccgaaactactcatcactcactccaaacccaccacaccaccattattcatatctcattctctaacctttcactattccctctcattcactctctagctagtttcctcatcatcgtagaagaaccaatacttgtactctctcttactttttaaccatgtagaatgattcacctaaggaaaaattagtagcttcttgttgtgctttttattttgttttgttttgtgtagagataaatctgtttggtattgttttgtgttttatgaattatttgatgggtgaagagggagaagaagtggtgagaaagcaaggacaaaggggtgttgatggagataaatggtacttgtatagctgcttacaagactgtaaatattggtgctgtaatttaatacacgagactagcagttctttttcgatggttccttttgagtgaaaaaaaccttgtcttctcatcagctttctttggagagatcttaaagacgacattgactgctaacaacaataaagtggatcaatcattaaaggcttacttcttcttcttcttctcttcttcttcttcttcttctaacaacaataagatcccatctttcccactcatgaagagacttaacagctcagattcttccactgccctcatgacaatttttccatcatcatcaacagaggaacatagtccgaggaacagccaccacatgtatggcagggagttccgatcgatgttggacggactcgacgaggaagggtgtgttgaagaaccggggcatcaatctgagaagaagcgtcgtctaagtgtggatcaagtgaaggctttggagaagaactttgaggttgaaaacatgcttgaacctgagaggaaggtgaagcttgcccaagaacttgggttgcaacctagacaggtagccgtatggttccaaaaccgtcgagccagatggaaaaccaaacaattggagagagattatggtgtactcaaagccaattatgatgctcttaagcttaactttgacaccctcgatcaggacaacgaagccttacgaaagcaggttaaggaattgaaatcgaggctgctgcaagaagagaacacaggaggaagcggtgtttcggtgaaggaagagataataacgaggcctgcagactcagaagacaaaacgatggaacaaagtaagagtgacccatcttctgaaacctcanatattaatcctagttcggagtcggag

SEQ ID NO: 3278 - DNA, 409 bp, Glycine max
gagtaactcaatgaagcctcaatagaagcagacacacaggaaccttccttgaagctcttggacttctttctctccaaagttggagtttttatggagcttctggggatcacaatcttttcataacttgagttaagtccattgttgtcattgcctctctttgtggcaggaagcctaggggactttgactttggagaaactgggggtgtcaatgaggtcttgctaggaagtggtggtgatggtggagaaagtgactttgctggtgcctttgagtgaaaaaaaccttgtcttctcatcagctttctttggagagatcttaaagacgacattgactgctaacaacaataaagtggatcaatcattaaaggcttacttcttcttcttcttcttcttcttcttattgttgttagaa

SEQ ID NO: 3279 - DNA, 1102 bp, Glycine max
  unsure (1)..(1102): unsure at all n locations
atgcnttgtggtgaaatacactcaaaacacaggccgaattatccttgtttctcattttgtcatgataatcaagctcgcggttgtcttgtggcgacataatattccaacttacttttacttcgcttgcagatcagcaaccttgctagcatatggttcatctccctctttctgtccatctttgctactggaatcctggagatgaggtggagtggtgtcggaatcgacgagtggtggaggaatgaacagttttgggtcatcggtggtgtctcggcgcatctctttgctgttttccaaggcttgctcaaagtgcttgctggaattgacaccaacttcactgtcacctccaaggcctcggatgaagacggagactttgccgaactatacatgttcaaatggaccacccttcttattcctccaacaacccttctcataataaacttggtgggggtggttgctggcatctcctatgccatcaacagtggctaccaatcttggggacccctctttggtaagcttttctttgcattttgggtgatcatccatctataccctttcctcaaaggtctcatggggcgccaaaacagaacaccaaccattgtggtggtgtggtccgttctgcttgcatccattttctcactcttgtgggttagaattgatccattcaccacaagggtcactggtcctgatgttgaggagtgtggcattaactgctagaagaccaaaagacaagtgtagtgtattgtgttttgggttgtaattataattgttgttttgtagccgttatgtttaagttatgtgcagttgtttatagaagatgcataagaaaacaaactagaaccgaactttgtggtattgttttatttgtaatactaacgtgccttccagttttctggagtagctatgtattataagctattcggaggttcacattttgtatgtatacatctcagtgagtgtttcttgtgataagaacccccagggccttttgcatttatttacatcttggtacactatcaattcggaaatcttccccccccattaataataaggttggtttagcaatttaaattaaaagtttcgtaaaaaaaaaaaaaaagggcgg

SEQ ID NO: 3280 - DNA, 570 bp, Glycine max
acgagaacagtggctaccaatcatggggtcccctctttggtaagcttttctttgcattttgggtgatcatccatctctaccctttcctcaaaggtctcatgggtcgccagaacagaacaccaaccattgttgtagtctggtccattcttcttgcatccattttctctctgctgtgggtccgaatcgacccgtttacgacaagagtcactggtcctgatgttgagcagtgtggaatcaactgctagagaaataaaagctggcagattgaacaacagcttgccactcacctgtgtcaaccaacaacataagcctcctgggaatgttgtgtttgtcttccaattcttttgtttacagattttgatatttattcttgctgatttaagttatgtgcagtttatggtccatacagaagaagaaatcatgtttaagttatgtgcagttaatggtccatacagaagaaatcaaattagaatcaaattatttaaggttgtttattttttttgtaatactatgaacataccttccattctttctgaagaagctgtttgtcttatttaaactattcatcag

SEQ ID NO: 3281 - DNA, 1570 bp, Glycine max
gagaatatgaagaatttaaaattcgcgtcaatggacttgttgcgaaggcacaaaaggttcctgaagaaggatgggtgatgcaagatggtacgccatggcctggaaacaacactagagaccatccaggaatgatccaggttttcttgggccaaagtggaggacttgacactgagggtaatgaacttccacgtttagtctatgtttctcgtgaaaagcgtccagggttccaacatcacaagaaagctggtgccatgaatgcccttgttcgagtatctgcagtccttaccaatggacctttcttattgaatcttgattgtgatcactacataaacaacagtaaggccttgagggaagctatgtgctttatgatggatcccaaccttggtaaacatgtttgctatgtccagtttccacagaggtttgatggtattgataggaatgatcgatatgccaatcggtatacagttttctttgatataaacttgagaggtttggatggcattcaaggtcctgtttatgtgggtactggatgtgtcttcaataggacagctttatatggttatgaacctcctattaaacccaagcataaaaagcctgggttgctttcttcactctgtggtggtaaccgaaagaagagatcaaaatctagcaagaaaggatcagacaagaaaaaatctagcaagcatgttgacccaactgtgcccattttcaatttagaggatatagaagaaggagtagaaggtactggatttgatgatgagaaatcactacttatgtcacaaatgagccttgagaaaaggtttggtcagtctgctgtctttgttgcctctacgcttatggagaatggtggtgttcctcagtctgctactccagaaactcttcttaaggaggctattcatgttatcagctgtggttacgaggataaaactgattggggaagtgagataggatggatttatggttctgtcacagaagatattcttaccggatttaagatgcatgcccggggttggcggtctatatactgcatgcctaagcgcccagcgtttaaaggttctgctcccatcaatctttcggatcgtctaaaccaagtgcttcgatgggctttaggttccgtggaaattcttttcagccgacactgtcccatctggtatggttatagtggaaggctaaagtggctcgagaggttcgcatatgtgaacaccacaatctatccagtcacttccattccccttctcatgtattgtaccttgcctgctgtctgtctcctgactaacaagttcattattccacagatcagcaaccttgctagcatatggttcatctccctctttctgtccatctttgctactggtatcctggagatgaggtggagtggtgtcggaatcgacgagtggtggaggaatgaacagttttgggtcatcggtggtgtctcggcacatctctttgctggtttccaaggcttgctcaaagtgcttgctggaattgacaccaacttcactgtcacctccaaggcctcggatgaagacggagactttgcccgactatacatgttcaaatggaccaccct

SEQ ID NO: 3282 - DNA, 929 bp, Glycine max
  unsure (1)..(929): unsure at all n locations
accttccacacttaataggaacccaaaaaaaaaaaaaaaaagtaagcccagctttgttctgctctgctgagacaacaatggcgatggctttcaaaatggccactactgggatgtgggtgacggatgagtgcaagaactctttcatggaaatgaagtggaagaaggttcatagatacatagtcttcaagatcgatgagaagtcaaggcttgtcaccgttgataaggtgggtggtcccggcgagagctatggtgatctcgccgcctccttgcccgacgatgattgtagatatgccgtattcgactttgatttcgtcaccgtcgataactgccgcaagagcaagatcttcttcattgcatggtctccaacagcatcaaggataagagcaaagatgctctacgcaacatccaaggatggtctgagaagagctctggatggaatcagctatgaagttcaagccaccgatccagccgagatgggattcgatgtaattcaagacagagccaaatagatgccccctttttttaaagtgggaatccaactccttatttatgtgcctgagctaatcaattaatctgtcaatcttactctctctcttttatttgctatatataaattaagtaaccatatatagtccaatgactgtatgacatgtgctcttctcttctttcttgtttttatgctagtttaattgtgttcgatgtaagtggggcatctaatcttcaatccttaagtcataatattaagttatgtgtaatatatgactgtcgggtgtatgataagttaagggcaacaaactttggttgcaatctctttaatgatgaaaatttgtggaaaagaatggattagctcaacttttcccccggaaagttgatgcgttcccatatttataaatgatgctttcacnnnnnnnnnnnnnnnnnnnnnnnnn

SEQ ID NO: 3283 - DNA, 825 bp, Glycine max
gccgaccaaccattttacatttacagtaacagtagtgaaatttcggaaaaaatggcgatggctttcaagatggcgacgactggaatgtgggttacagatgagtgcaagaactcgttcatggatatgaaatggaagaaggagcacagatacattgttttcaagatcgacgaaggatcaaggctcgtcaccgttgataaactcggtggccccaccgagggctatgatgatctcaccgcctccttgcccaccgatgattgccgatacgcggtttttgacttcgacttcgtcaccgttgataactgccgcaagagcaagatcttcttcattgcatggtctccaacagcatcaaggattagagctaagattctatacgcaacttcgaaggatgggctgagaagagcgctggatggaatcagctatgaactccaggcctccgatccaacggagatgggattcgatgtaattagaggcatagccaaatagacaggcagagaatcaaattaaatacgagtgctaattaagttttaatccttttatctcttcagttcagatgtggttacacgtacgttgagttttaattcatgagcagctcccatgacatgtgctctccttttcttatcgttttgtatcatagctttatcctcatcatccactactttggctggcatcttcaatgtgatatatagtataagtgggccatgaaatcttaaatcataataatatattatatctaatgtggttaccccatgtatgccaatagctggctaaaaccaaaaaaaataaaactgttagtaaaaggatacgtagattagatcaactttttat

SEQ ID NO: 3284 - DNA, 697 bp, Glycine max
cccacgcgtccgcccacgcgtccgttatcatttcatttgttgtctgttacgttaacgtccctgcctccgattctttccacttcttactttctttctagtttctcttttccctctcacacaacacaagagaacacgaataaaacgcactgcacgtgaatcgcaattattagggtttacacaccctcgcagatggtttgagattgcgaattcgacgacgatgatggaaggagcgagcaatggagggatgctgtaccacgaggtgcaggagtcgaagctctgcgcggtgcattgcgtgaacacggtgctgcagggcccgttcttctcggagttcgatttggccgcgcttgcctccgatctcgaccgcaaggagcgtcaggtcatgctcccagcgctcgcgtcggcggatttcgagtcgcacaatgtctcgctcgacggggatttcagcatccaggttttacaaaaggctctggaagtttgggacctacaagttatccctcttgactctccaggtgctgagcctgcccagattgaccctgagctggaaaatgccttcatttgtcatttgcaagaccattggttttgtatccgtaaagtgaacagggagtggtataattttgacagtctctatgcagccccacagcacctttccaagttttacctctctgcctatcttgactctttgaaaggctttgggtgg

SEQ ID NO: 3285 - DNA, 622 bp, Glycine max
accgacgcgtgcgtgaaagccctaccctatatataacatccgtgctgattacacaaggtcaattcatttgggcactgtctctgttccaaaaccctaatccttcgtcttccaaggagatggctgattctcccctcgcaaggaactcaaggtcaccttccccatggaaagctcagtcgagatcgagatctaggtcaaggtcgagatctaggtcgaggtctaggcctagacaaaggccaagatcgcgttctagaagtcgtggcaggtcaaggtcaccaattcgtggaaggtcaaggtcaccaattcatggaaggtctgaacctacaaatcctggtgacacactttatgtaactggtctatcttcgagggtcaccgaaagagacctagaggagcatttctccaaggaaggaaaggtttcttcatgttttcttgtggtggagccccgtacacggatttctcgtggttttgcttttgttacaatggaatctgctgaagatgcggagcgctgtatcaagtatctcaatcaatcagttttagagggtcgttacatcactgttgagcgggtaatggatttttctatggtagtcgatgttaaaacaattgcactcgtcatttttttcttgac

SEQ ID NO: 3286 - DNA, 472 bp, Glycine max
aagatcaccaattcatggaaggtcaaggccacccattcatggaaggtccgagccttcatatgctggggacacactttatgcaaccggtctatcttcaagggtcactgaaagagacctagaggagcatttctccaaggaaggaaaggatgcctcatgctctcttgcggtggagccccgtacacggattactcgtggctatgcttctggtacactggaatctgctggagatgcgcagcgctgtatcaagtatctcaatctatcagctttagagggtcccatacatcactgctgagcggtcacgcaagaatacgtgcatgacctccaaccccagggcactatcttggactgaaaaacacaagggagtatggctatcgtggtgaccgaggtggtgaccggggaaggtatcgcgatggtcctgaccgtgacaattactcacgtcgtaggtctccgaggcgttcaccatacagaggtg

SEQ ID NO: 3287 - DNA, 399 bp, Glycine max
  unsure (1)..(399): unsure at all n locations
catccggacataccctttggtacatgaaaagcctgatgctgctcctacaatggacaggatccaaccaggtttggatgattctgaacgggatttgcaggccactagacacgcaagactgagtaaacatggtcatgaaaaagcactctctgttcaggaagatgctacagaagccgttgtattaaaacaaaagtctacaagacggaagcactcaaaatcaagatctactcacgatgatgccagtaatgaagatgctgaagttgtgagaaaaccaaggagtaggagacgagatgaacaaaaacgtggcctgcaaattttgtttgatgatgagcggcacaaaaacgatgaagaggaaagggtaatagatagattactgatccattatagcanaaaaccatccat

SEQ ID NO: 3288 - DNA, 487 bp, Glycine max
gttgaggagactgatattaacttggtttcttctgatacttctctgagttttcttgatgccgagaagccacaccagagcggaactggtagcatcttgatcgattccaccttacaaatgatgggttgtggcatgtcatcttcaacttcaccgcattggagtcaatctgtatcagggagcagttgtgattctgtgcgtcaagaagacacaggcatagggtggtggtggttcttccaatgattcacaaatccaaaaggattggagtccaaagaatttctcatctgatggtggcagcgagcaagtttccaccgttgatgctttcaagccaatgaaccaagaattttccttgaatcagcagagtctgaattctgttgttacaagcactgatggatcattatctggtggtaatttcccagttgtttcagcctcctacggttacccttcaacattgatacaaagcttatatgagcatcacacaaccacagaattc

SEQ ID NO: 3289 - DNA, 766 bp, Glycine max
aattgatcggtgtgtgcattaatttgtacaattgtgcaacagcctaacacatcccacgtggctcatacatttcctagattttcagcttgctattcccagcatcatgtgattaaacaggctctatggttttttaatatttggatccaccattcctctttttggtgtcatcattatcatcattgtaatctaaccaatactataatgctttgctttgttttgctacccctcctcctcctctcctgtcatagcctctccatcaaatgatcaatcacttaacagctgcctcccactgcccgtacatcttgtatctctcctttgtgggaattcactgtgagtagatgctactaacacatctttaaggagcatcattcatcattgttttttttttccttttgtgttcaatgtggataagtgctttaactaaacagctgtgaaggcttgtcactgaaataaagcactgcattaaggccaagccaccactctcctcttttccattggtggatctttttttctctcttttaataggaaatcattggtatgagtttcagctttgctgatccttctgcggctctgccaatctctattagtattattagacccttttgatatataaaaccttcaattacaatgctttacttccttatatcttttgtctcctttctcatcctttccaagtccttcaccagtcagcctttctcatcaggggcgagagggatcaaattagggtcaattgggttttgggggagcctttcaagttggttagttt

SEQ ID NO: 3290 - DNA, 419 bp, Glycine max
  unsure (1)..(419): unsure at all n locations
caaatgatcaatcacttaacagctgcctcccactgcccgtacatcttgtttctctcctttgtgggaattcactgtgtctagatgctactaacacatttttaaggagcatcattcatcattgtttttgtgttcaatgcggataagtgctttaactaaccagctgtgaaggcttgtcggttgtgtagtagtagtttacaactttacatacataagtgataagtccttcactgaaagatagcactgcattaaggccaagtcaccactctcctcttccattggtggatccttttttttttctctcttttaatagggaaaccattggtgtgtgtttcagctttgctgatccttctgttgtttctgccaatctctgttagtantttagaccttttgatatacgaagccttcaattacaatgcttt

SEQ ID NO: 3291 - DNA, 1916 bp, Glycine max
  unsure (1)..(1916): unsure at all n locations
ttgccgtttatgtccatgttcactgcacctttccgcactcttccgcacctttctcctaaaacatctcaatgggttcttcttctattacaacatcgcccgcaaccatgaccatggctgcgatcgtgctcctgttcacggtctttgccgtttcctccgccctagacatgtcgataatctcgtacgacagcgcccacgcggacaaggccgccacgttgcgcaccgaggaggagctgatgtccatgtacgagcagtggctcgtgaagcacgggaaggtgtacaacgcgctcggcgagaaggagaagcgcttccagatcttcaaggacaacctgcgattcatcgacgaccacaactccgcggaggaccgaacctacaagctcggactgaaccggttcgctgatctcaccaacgaggaatacagggccaagtacttgggaaccaagatcgatcccaaccggaggctcggcaagaccccgagcaaccgatacgcgccacgtgtcggcgacaaactacctgaatcggttgattggaggaaggaaggtgctgttcctccagtcaaagaccaaggaggctgtgggagctgttgggcattctcagcaatcggtgcagtggaaggaataaataagatagtgacaggtgaactgatttcgttatcagaacaagaattggtggattgtgatactggatataaccaaggatgcaatggaggacttatggactatgcatttgagttcataatcaacaatggcggcattgattctgatgaggattacccataccgtggtgttgatggtagatgcgacacatataggaaaaatgctaaagtcgtttctattgatgactacgaagatgttcctgcctatgatgagttagccttgaaaaaggccgttgcaaatcagcccgtgagcgttgctattgaaggagggggcagggaatttcaattatatgtatctggtgtattcacggggagatgtggcacagcactagatcatggtgtcgtggctgttgggtatggaacagctaaaggtcatgattattggatcgtaaggaattcatggggttctagctggggagaggatggctacatcagattagaaagaaatcttgctaacagcagatcaggcaagtgtggaattgcaattgagccatcttatccccttaagaatggtccaaatccacctaatcctggaccatcacccccttcacctgtgaagccaccaaatgtctgtgacaactactacagctgtgctgatagtgctacttgttgctgtattttcgagttcggaaatgcttgctttgagtggggttgctgtcctcttgagggtgctacctgctgtgatgaccactacagttgctgccctaacgactatcccatctgcaacacttatgctggaacttgtctcaagagcaagaacaacccattcggagtgaaggcattgaggcgtactccggctaaaccccattggacctttgggcgtaagaacaaggtcagcagtgcttaagcagataaaggaaatgtgaacgtgcaggaaggagccaatgatgaagtaaatgaaagacgaagaattaaaacaccagctgatacacttcccctttaccttcacataaatttctctgtgccattttattatgatacaaattgatactattctgtatcaaatttcagtcagatattggctgtgtacatagggttatattattgatgcactgtatttgtattcaaattccaattccaaatggcgaacatatttgattgctgttagtttcccaggttatgtagactatgtgacaatgcagcattatttggatttgcccgatattctggctatttcatttgcttataatgtggaattcaaaaaaaaaaaaaaactcaagactagctggtnnnnnnnnnnnnnnnnnnnnnnnnnnnnnnnnnn

SEQ ID NO: 3292 - DNA, 825 bp, Glycine max
  unsure (1)..(825): unsure at all n locations
ctgtgatgaccactacagctgctgccctaacgactatcccattactaaggggataagatggctcaattgcacctactcctggaccatcacccccttcacctgtgaagccgccaaatgtctgtgacaactactacagctgtgctgatagtgctacttgttgctgtatttttgagttcggaaatgcttgcttcgagtggggttgctgtcctcttgagggtgcttcctgctgtgatgaccactacagttgctgccctgcagactatcccatctgcaacacttacgctggaacttgtctcaggagcaagaacaacccctttggagtgaaggcattaaggcgtactccagcgaaaccccattggaccttcggacgtaagaacaaggtcagcagtgcttaagcagtttaaggaaatgtgaacgtgcagaaggagccaatgatgaagtaaaagggaagacgaaggactaaagcaccagctggatgcacttcccccttcttcacataatgctgcacgtaacataaagatctttaccattttattatgatacaaaatagataatgttctgtatcaaatttcagtcagacattggctctgtacatagggttatattatcgatgcactgtatttgtattcaaattccaaatggcgaacatatttgattgctgttagttttcaaggttctgtagattatgtgacaatgcagcagcaatatttggatttgtcccatattcacatgctattttaatttgcttacaatgtggaattcaatggacccctctcctttnnnnnnnnnnnnnnnnnnnnnnnnnnnnnnnnnnnnnnnnnnnnn

SEQ ID NO: 3293 - DNA, 367 bp, Glycine max
tttccccactcactctctcatctttctcctaaaacatctccagtgggttcttcttcttctattacaacaacgtcgtccaagaccatgaccatggccatggccacgatcctgctcctgttcacggtcttcgcggtttcatcggccctagacatgtcgataatctcgtacgacaacgcccacgccgccacgtcgcgcaggcgacgagcgagctgatgtccatgtacgagcagtggctagtaaagcacggcaaggtgtacaacgcgctcggagagaaggagaagaggttccagatcttcaaggacaacctgcgattcatcgacgaccacaactcccaagaggaccgaacctacaagctcggactgaaccg

SEQ ID NO: 3294 - DNA, 416 bp, Glycine max
  unsure (1)..(416): unsure at all n locations
gtttgagggggttttcaccacttaaacgtgagttcagagcagcagctaaattggattgtgcaaatgcatcaactcaaaatcaagttttgttctacaagcaagtttgatttgaaggtgtattcactgggagatgtggcacagcactagatcatggtgtcgtggctgttgggtatggtacagctaatggtcatgattattggtccctaaggacttcatggggtcctagctggggagaggatggctacatcaggttagaaagagttttcaaggttctgtagattatgtgacaatgcagcagcaatatttggatttgtcccatattcacatgctattttaatttgcttnnnnnnnnnnnnnnnnnnnnnnnnnnnnnnnnnnnnnnnnnnnnnnnnnnnnnnnnnnnnnnnnnnnnnnnn

SEQ ID NO: 3295 - DNA, 791 bp, Glycine max
  unsure (1)..(791): unsure at all n locations
gctaacttagcacagtttacttggttgcccggtttggcccaacccgtttacacttacctccatcaaatagaaaccctagacgcagccgctcttatacaactactctattctaccacatctgagtctctgtccgaagccacttgagagaaaatggcggtgcctctgctctcgaagaagatcgtgaagaagagggtgaagaagttcaagaggcctcagagtgacaggaaaatttctgtcaagacaaactggcgcagaccaaagggtatcgattcccgtgttaggagaaagttcaagggatgcactttgatgccaaacattggttatggttcagacaagaagacccgccactatctccctaatggtttcaagaaatttgttgttcacaatgtgaaggacttggaactgctcatgatgcacaacaggacttactgtgctgagattgcccacaatatatccacaagaaagagaaaagatatagttgagagagccgcgcagcttgatgttgttgtgacaaacaaaacggccagattacgcagccaggaggatgaatagtctaaatgactgaaaaagtcacttatctgtagtgattctgtagttcaatatcgaagttgcagtttaattttaaattgaattttgcttcagtgtattttgcttcagtgtattttgcttattgggaaccaggtttttgatgtgcctctttcatgtaagtcgtatcttgatttgtttttaggaacacaaatatacgaaaccttaatctttggcttgtgtgatnnnnnnnnnnnnnnnnnnnn

SEQ ID NO: 3296 - DNA, 555 bp, Glycine max
tacgcattaactcaactctgaattcggctctagaaaatggcggtgcctctactctcgaagaagatcgtgaagaaaagggtgaagaagttcaagaggcctcagagtgacaggaaaatttctgtcaagacaaactggcgcagaccaaagggcatcgattcccgtgttaggagaaagttcaagggatgcactttgatgccaaacattggttatggttcagacaagaagacccgccactatctccctaatggtttcaagaaatttgttgttcacaatgtgaaggacttggagctgctcatgatgcacaacaggacttactgtgctgagattgcccacaatatatccacaagaaagaggaaagatatagttgagagagccgcgcagcttgatgttgttgtgacaaacaaaacggccagattacgcacacaggaggatgaatagtcactcattggtagtgaatcctgatgacacttgttgcgacattgattggattttgatctttttttatgcttctataaattgcagcatgatatacatttaacatggtcttttacccct

SEQ ID NO: 3297 - DNA, 609 bp, Glycine max
  unsure (1)..(609): unsure at all n locations
gatctcagtctctacctcaaaccactccagaaaaaatggcagtgcctcttctctcgaagaagatcgtgaagaagaggctgaagaagttcaagaggcctcaaagtgacaggaagatttctgtgaagacaaactggcgcagaccaaagggtatcgattcccgtgttaggagaaagttcaagggatgcactttgatgccgaacattggttatgcttcagacaagaagacccgccactatctcccgaatggtttcaagaaatttgttgttcacaatgtgaaggacttggagctgctcatgatgcacaacaggacttactgtgctgagattgcccacaatatatccacaggaaagaggaaagatatagttgagagagccgcgcagcttgatgttgttgtgacaaacaaaacagccagattacgcagccaggaggatgaatagtctaaatgactaaaaaagtcacttatctgtagtgattcagtagttcaatatcaaatttgcagtttaattttaaattgaattctgcttcaatgtattttgcttattgagaaccaagtttgattttgttgagtctcttgcacaataaaaaggtngaaccaaaaagggcggccgc

SEQ ID NO: 3298 - DNA, 650 bp, Glycine max
gttggaaaaaccaccgaaagggatcttaagccactttagagaaaaatggcggacccttggtttcggaaaaaaatctggaaaaaaagggggaaaaattcaaaaaggcctaaaatggccaggaaattttccgccaaaacaaactggcgttaacaaaagggttttaattcccgtggtaaggagaaagttcaagggatgcactttgatgccaaacatcggtaatgggtctgacaagaagacccgccactatttccctaatggttttaagaaatttgttgtcacaatgtgaaagacttggaactgctcatgatgcacaacaggacttactgtgctgagattgcccacaatatatccacaagaaagagaaaagatatagtcgagagagccgcgcagcttgatgttgttgtgacaaataaaacggccagattacgtagccaggaggatgaatagtctaaatgactgaaatttacttatttgtagtgaacctggtgacactagttgtgacattgtattttgatcatcttttattctcgtataaattgtaggactgaaatttacttgtttgtagtgaacctggtgacactagttgtgacattgtattttgatcatcttttattctcgtattaatcgtataaaaaattgcattttgatca

SEQ ID NO: 3299 - DNA, 339 bp, Glycine max
cccacgcgtccgcccacgcgtccgcccacgcgtccggtgaaggacttggaactgctcatgatgcacaacaggacttactgtgctgagattgcccacaatatatccacaagaaagaggaaagatatagttgagagagccgcgcagcttgatgttgttgtgacaaacaaaacagccagattacgcagccaggaggatgaatagtctaaatgactaaaaaagtcacttatctgtagtgattcagtagttcaatatcaaatttgcagtttaattttaaattgaattctgcttcaatgtattttgcttattgagatccaagtttgattttgttgtgtctcttgc

SEQ ID NO: 3300 - DNA, 1056 bp, Glycine max
gaaagacagacagatctgaagtgtgtgtagagttaacaagaccagagagagagacgaagccgaacgaaacataaataaaaccttgctcttttttcacgccctagctcattttcttctccgttctcttctctctgttcctcactcactcgcatttattcaccatgactaagcaacaagctaattggtctccatacgataacaacggaggatcatgtgttgcaattgctggagcagattactgcgtcatcgccgcggatacgaggatgtccaccggttacaatatcctcactcgcgattactccaaaatctcccaactggcggagaagtgtgttatggcttcttctggttttcaagctgatgtcaaagctttgcagaaggttttgtctgctaggcatttgatttatcagcatcaacacaacaaacaaatgagctgccctgcgatggctcagttgctctcaaacactctttattacaaacggttctttccttattatgctttcaatgttttgggtggccttgacaatgaaggaaagggatgtgtcttcacatatgatgctgttggttcctatgagagggttggatatagctctcagggttctggatccacacttattatgccatttcttgataaccagctgaagtctcctagcccactcctgttacctgcgcaggatgctgttactccattgtctgaagcagaagcagttgatctggtcaaaactgtttttgcatctgcaactgagagagatatatacactggagataaggttgaaatcgtcgtcctaaatgccagtggtattcgtcgtgaatacatggacctaaggaaagattaatgctttacaggaatttactgttggagataccagacttggattgagaatgtttgaaatgcttctaaaattttaaatgacgtagtgggtttttcccatgaggcgaaattaagaatagcatttccagtgaaattgctttgaacaagtactagtctgctcacattataactagactgctttcacttaaatttgcattggatttttgtctgagtctatttatagcgtt

SEQ ID NO: 3301 - DNA, 446 bp, Glycine max
atttcgtgttagcgaagacagacagatctgaagtgtgtagagttaaagactgagagagacgaagccagagaaaaccaaaaaccttactctttttcacgcgacgccctagttcatttttcttctccgttctcttctctctctgttcttcactcactctcattcattcaccatgacgaaacaacatgccaattggtctccttacgataacaacggaggatcatgtgttgcgattgctggagcagattactgcgttatcgccgcagatacgagaatgtccaccggttacaacatcctcactcgcgattactccaaaatctcccaactggctgagaagtgtgtgatggcttcatctggctttcaagctgatgtcaaagctttgcagaaggttttgtctgctaggcatttgatttatcagcatcaacacaacaagcaaatgagttgccctg

SEQ ID NO: 3302 - DNA, 952 bp, Glycine max
ggtcgcagaccctctgcaacaacttctggggaagttgatgatgactcctctgttaattcgcaaacttttgattcttcaagcaactatggcactaacactactacttctgcaacaacaccaacaacaagaagctccaatactactgcagaagtagtggaccggcgagggaaacgacccatgcaaggtggttaggtgcagcatcatgattagtttttgaagaaagaaattgatgagggcacttattgttttattttatggtgtcatcaattttttttttttagggagaacccaatattaaagtagatataactatgtgtaactcatacagagaaataacaacgcaacacaatttaaagctatccaatacaaatctctcatacaagaggagaggggcatataagtggagccctcatcaccctcgatcttattcttaatattaataatgctactcatatactagtgagtagtttccggtttcctgcgtccatgactttctcttcaaaccttgatggtagcgcagttggtggaggtgctgatcttgtaggggatggagactccgcatttgccggggagcgaggcggcgttgttggctttgaagccggagatttggctggcggccgacttgaggcagttgcacgccgtctggcggtcggcggtggtcttggcggcggcattgaggctcttcactccgttgcagcatcccgacggcggcgttcctccgttctggaggtaaccgatgcaattgatcaggctattcgtcacctgcccgcacgtgatagctgcatgtgccatgggtgcactcaccacaaccatgcagagcactgcagccaaaaatgcaaccttgaggctagccatggaaactgaatcaaatgggtgtgtgttagggtttggttgtatagggcttgggctatattggttcacttggtgcgtccccgtcttcggatctagaaca

SEQ ID NO: 3303 - DNA, 546 bp, Glycine max
gctatccaatacaaatctctcatacaagaggagaggggcatataagtggagccctcatcaccctcgatcttatcttgagttgtgcacattgggtcccccaggtattagatactcgtggacatctactgactgcggtggggtatggattgtggccttttatggttcttctatcagaaattgtgcaaactttcattctggcagatttttgctactactacgtcaagagtcttgttgggggacaacttgttcttcgacttccttcaggagtggtgtaacttaacattcaagtaggacgttcctttaacatgcagcactcaaggaagtcagagtagctagttaatcttttgatatgttatgtatctatctgcggtcattgagtgaacagttctcaactgcggtctaacttcctaaaattttaatttatcttttgatcagttcgggttagtattggtagttagcagatatcaaaatatcaaatgatcctttggatacgagcaaatgccagttgacaattgatgttaaaagaaatcaattataacaaaaaaa

SEQ ID NO: 3304 - DNA, 893 bp, Glycine max
acgagagacaagacaatcaattgattattttctgtaagaaaatgaagggaagcaagaggcccatccacgccgtcaccacatgggttcggcgccaaccgcccaagatgaaggcctttctcgcggtgctgtccggcctggcagccctgctcttcctcagaatcttcgttcacgaccacgacagcctcttcgtcgccgccgagcttgtccatgcgttaggaatctccgtcctcatttacaaactcaccagggaaaaaacctgtgccgggctttcgcttaagtcgcaggagctgacggctatgtttctaggtgttagactttattgcagttttgtgatggagtatgatatacacaccctactcgatatggcaaccttggccaccaccctctgggttatttatatgatacgcttcaaattgaaatctagttatatggatgataaggacaaccttgcaatatactatgtggtaataccttgtgctgtgctgtccttgttaattcatccaacaacccggcatcatccacttaataggattctctgggcattttgtgtttatcttgaagctgtttctgttctccctcagctgcgggtcatgcagaacactaagattgttgaaccattcacagcacactatgtttttgctcttggagttgcaaggttcttgagttgtgcacattgggtcctccaggtattagatactcgtggacgtctactgactgcattgggttatggattgtggccttctatggttcttctatcagaaattgtccaaactttcattctggcagatttttgctactactacgtcaagagtcttgttgggggacaacttgttcttcgacttccttcaggagtggtctaacttaaacattcaagtaggacgttcctttagcat

SEQ ID NO: 3305 - DNA, 940 bp, Glycine max
gaagacgacagaagggggcggaagaccgacaagaaggaaacgttatcacaaattggattgttcctccgaacagtgaaccctcacctaacaatcagaacccaggatttggtgaaacgatgaacagtgataggaaaattggggttgccttggacttttccaaaggaagcaaaatcgctctgaaatgggctattgacaatcttatcagcaacggtgacactctctacatcgtccacaccaagccttccggaggaagtgaatcaggaaatcttctctggtccaccactggttcacctctgattccattgtcggagtttcgtgaaaaggaggtgatgcgtcactatgaggtggatactgatgctgaggtgttggacttgcttgacaccgcttctaggcagaaacaggtgaatgtggtggcaaagctatactggggggatgcaagagagaaaattgtggaagccgttggggatttgaagcttgactctttggtcatgggtagcagaggcttgggtgccatacaaagggtattactggggagtgtgactaattatgtcaccgcaaatgcgagttgccctataacgattgtgaaagactctgccccttctactatctgataagctactgaatttggttggcctttgcaatcggttgtttttatcttcatcagtgaccagagtgtgtttccctccgttcttacttcttacacatgcttaattgggtttatgaacacacatgatgattaaggattcggcaagcataatgtatattttcggagtctcttttaagtgcttggttataatcacaaaattgtgcttataaataagctttgtgctggatctatttcaaacttactagtgcacatgatgtggtggtgtgaaatgtttgatacttaaacatgatgcgtcacataattatcaatctgatgctttctggatattttatg

SEQ ID NO: 3306 - DNA, 444 bp, Glycine max
ttgggaagtgtgactaattatgtcaccacaaatgcgagttgccctataacgattgtgaaagactctgccccttctactaactgatatgctactgaatttggttggcctttgtaatcggttgtttttatcttcatcagagaccagactgcttttccctccgttcttacttcttacagatgcttaattgggtttatgaacacacatgatgattaaggattcggcaagcataatgtatattttcggagtctcttttaagtgcttggttataatcacaaaattgtgcttataaataagctttgtgctggatctatttcaaacttactagtgcacatgatgtggtggtgtgaaatgtttgatactttgattctcagtctttactgcgtcatatactcttatcaatcttttgctttcgggctattctatgacttgtttgtgtggatgttt

SEQ ID NO: 3307 - DNA, 495 bp, Glycine max
ggactcttagtgtcttactccgatcagtgaaccctcacctaacaatcaaccctaccattccaaagctcgaaggtgaacagtgagtgagtgagttattcagaacccaggatttggcgaaagtgaagcgatgagcagtgataggaatattggggttgccttggacttttccaaaggaagcaaaatcgctctcaaatgggctattgacaatcttctccgcaacggtgacatactctacatcgtccacatcaagccttccggaggaagtgaattccgaaatcttctctggtccaccactggttcacctctgattccgttgtcggagtttcgtgagaaggaggtgatgcatcactatgaggtggatactgatgctgaggtgttggacttgcttgacaccgcttctagggagaaacaggtgactgtggtggcaaagctatactggggggatgcatgagagaaaattgtggaagctgttggggagttaaagcttgactcttt

SEQ ID NO: 3308 - DNA, 1308 bp, Glycine max
ctaaaataagatttttggatccgattcatgcttgccacaccattccggttccggagattacttttttgcggcggtgctggtggcggagactccgcgccggaatataccttcccacgcctcctcctccatctccctcaccttcttcttcttcttcgctgtagcgttcaaaacaacgtgatctctcttgcattctctggttcggttcttctcgtcgttttatcgatccggcttctagaacttccctttctcattgcttctcctctctctcgccgaagccagaaatttcttagatgatttggtgcgattcgtcttttccttgttcgcttcaatttttcaggtgattgcagttttgtggtggaaggaagattgatatgctgtgggaaaatgtcgttgaaaagcatagtaagggagctaaaggagatgagggatgggattggtagcatgtcaaggcgaggtgtcgagagcaggcgttggaacggtcggacaaagtcacatgttgctcctgatgtcactctaacttcacttgaacctattcagcaagggcagtgggcaaatttaccgcctgaattgcttctggacataataaggagggtggaagatagtgagactacctggccagcacgagccgttgtggtttattgtggttcagtttgtaaatcatggagggctgttacgaaagagattgttaagactcctgaacaatgtggaaggctcacatttcctatttcgttgaagcagcctggtcctcgtgattctccaatacagtgctttatcaggaggaacagagaaacttcaacatatctattgtacattggcctggtaccatcggagaatgagactgataagttgttattagctgccaaaaaggtaagaagggcaacaggcacagacttcgtcatatctttggttgcagatgatttttttcgctccagcaacaaatatgttggtaaactaaggtctaattttttgggtaccaagttcaccgtatatgacagccaacccccacaaggagctgcaattcaaccagataatagatctagtaggagatttcattctaagcaggtatctcctagagttccagcatgtaactatgttgtaagcaccattgcctatgagttgaatgttctccgtgcaagagggccaaggagaatgcactgcaccatgaactccatatctgtctcagctgttcaggaagggggcaatgctccaactcctacatcttttcctcaaatcattgacgagcctttttctccctcaccagcactgaaaggaaaaggtccaattagagatctagacaatgcaagcctc

SEQ ID NO: 3309 - DNA, 682 bp, Glycine max
gtgtttgaacagtacagatctccccgcagtagagatttcctccaaaaatcatacttcactttttccaccaaaaaataattaagaaaaaaataaaaagatggaaagataatgtggatctgattcaaaccacacgattccacgaccttattttggagccgcggtggcggtagcggtggccggcgattgtagcggcgtaggagcaagaaatggttttatgttgtgaggaagattgttaagctgtgggaatatgtcattgagaagcatagtccgtgaactcaaggagatgagagatggaataggaagcacatcaaagcggggtgcagaaagcaagcatcggctcagtcggacaaagtcacatgtagctccagatgttcttgcaactccatttgaacctattcaacagggacaatgggcaaatctaccatcagaattgcttttggacataatccagagggtcgaagagagtgagacatcttggcctgcccgtgctgttgttgtcttttgtgcttcagtatgtaaatcatggaggtccattacaagagagattgtcaagactcctgaacaatgtggaaggatcacatttcccatttcattgaagcagccgggtccgcgtgattctccaatacagtgctttatcaggaggaacaaagaaacttctacatatctattgtactttggtctg

SEQ ID NO: 3310 - DNA, 753 bp, Glycine max
ctcgagccgctcgaactgcagggaaattccatcaacggtacgattccttgggacgttggacactgccagaagttgattttactgaatctgagtcgaaactcactcaccggtatcattccctgggaaatctcagctctcccttccatcaccgacgttgatctctctcacaattcactcaccggaaccattccttcgaacttcaacaactgctcaacgctcgagaatttcaacgtcagcttcaactccctcaccggtccaattccgtcgaccggcattttcccgaacctacatccttcctcctactccggcaaccagggcctatgcggcggcgtgttggccaaaccctgcgcagccgacgccctctccgccgccgacaaccaggtcgacgtcaggcgacagcagccgaagcgaactgccggtgcaattgtgtggatcgtcgcggcggcgttcggaatcggcctcttcgtgctcgtcgccggcacgcgctgctttcacgcgaactacaaccacaggttcggcgacgaggtagggccgtggaagttaacggcgttccagcgtttgaatttcacggcagaggacgtgctggagtgtttgtcgttgtccgataagatactggggatgggatccacgggaacggtttacagagcagaaatgccaggtggcgagatcatagcggttaagaagctgtgggggaagcagaaggagaattatatcagacggaggagaggggttctggctgaggtggaggtgttg

SEQ ID NO: 3311 - DNA, 856 bp, Glycine max
accggtccggaattcccggtccgacccacccgtccgccggtggagagaggggcactgactcacacccacaatagtcgggggcagcttcaaagtacctccacattgtctcctactcttactgttctcttctcttctcatcatttttattttttccaatcaaaccaaacaaaacataagcaccgctcttttctctccgaaatccccatctcccttcacttctgagctctggacgagatcccagatctcaccatctttcacgcactcttccatcagattcaccctttcgtttaacgcaaactcataacttgaaggttaatggctgctccaccggcaagggctcgtgccgattacgattatctcataaagcttctcttgatcggtgacagcggtgttgggaaaagttgcctccttctgcgtttctccgatggttctttcaccactagtttcatcacaactataggcattgattttaagataagaaccattgagcttgatggcaaacggatcaagctccaaatttgggatactgcagggcaggagcggtttcggacaattacaactgcttactaccgtggtgctatgggcatattgctagtctatgatgttacagatgaagcatcatttaacaatatcaggaattggattcgcaatattgagcaacatgcttcagacaatgttaacaaaatactggtggggaacaaagctgatatggatgaaagcaaaagggtaagcaaactttgtttgcgtttcatgaaaactcacttttatatttttcctcacatctttcaaacacaaatttgacttgaacaacagagttgcagagataagatcaaaggggcttaaaaaaccaaccatt

SEQ ID NO: 3312 - DNA, 747 bp, Glycine max
ccctcgagccgctcgagccgctcgagccgtgctactctatgatgtcacagatgaagcatcaactaacaatatcaggaattcgattcgcaatattgagcaacatgcttcagacaatgttaacaaaatactggtggggaacaaagctgatatggatgaaagcaaaagggccgtgcctacgtccaagggccaagcactggctgatgagtatgggatcaaattctttgaaactagtgcaaagacaaatctaaacgtggaggaagttttcttctcaatagcaagagatataaaacaaaggctggctgacactgacaccaaggcagagccatcaacaatcaaaatcaaccaagaccagtcaggaggggctggacaggctgcacaaaaatcggcttgttgtggttgaggacaaatgttacaaattggaggcaacattcttgtacaagaacaagaagaaagaagaaattacgtgtataatgatcatgatgctgactttgtgcttaaccttgtcattctttataaatttgtgtgataagtagtgtctctgacttttttaacaagttacattaaatccaaaactaaatgtgattgtggtgattgcatgtctaactgcccctcactttctttggttggggaacgtgagatccattgaatgttgattttttattttcctttgactgtataaatgcgatggtgctggattggtacccattttccccctttgttctgaatgggctacgaagtgaagagtct

SEQ ID NO: 3313 - DNA, 600 bp, Glycine max
cccacgcgtccgaaaaaaactccaagttatataaaatattaaataaaaactacaagcttagacatcgctcctctctctctaaaaatctccggcggttcttcagttgaaccttgaatctccggcggtccttcagtccattttcctttccatttcggatctgataggaatagatttcgtcagtgttgaaatcacgagaaattcatggctgctccaccggcaagagctcgtgcggattacgattatctcataaaacttctcttgattggcgatagtggtgtcggaaagagttgccttcttctacgattctctgatggttctttcacaactagtttcatcacaactataggcattgattttaagataagaaccattgagcaggatggaaaacggatcaagctccaaatttgggatactgcaggtcaggagcggttccgaacaattacaaccgcttactatcgtggtgctatgggcatattgctagtctatgacgttacagacgaatcttcatttaacaatatcaggaattggattcgtaacattgagcagcatgcttcagacaatgttaacaaagtactggtggggaacaaagctgacatggat

SEQ ID NO: 3314 - DNA, 555 bp, Glycine max
tagcggggacagcttcaaagtgcaaggttgcaagcacctccaccttcttactgttgttctcttctcctcattcatattttccatttttatttttctaataaaacaaaacaacataagcaccgttcttttctctctgaaattcccatattcatcacttctgagctctggacgagatccctctctctcccattccagatctcgccatcagattcaccctttcattttaagcaaagtcataacttgaagaaggttcatggctgctccaccggcaagggctcgtgccgattacgattatctcataaagcttctcttgatcggtgacagcggtgttggaaaaagttgcctcctcctgcgtttctccgatgggtctttcaccactagtttcatcacaactataggcattgattttaagataagaaccattgagcttgatggaaaacggatcaagctccaaatttgggatactgcggggcaggagcggcttcggacaattacaactgcttactatcgcggtgctatgggcatattgctagtctatgatgttacagatgaagc

SEQ ID NO: 3315 - DNA, 1398 bp, Glycine max
cgacccacgggtgggctctcgttcgctatggccactgttctcagaacccccaccttccggccaccgcctccgcctccgccgcgcgccgcaaagtcgccgaaaccatcgcgcttcgccgtcgtgtccttcagacagagcaccacctgcgggagaaaaccctcctcgcttctctcctccctgccgttccctaatgttccctctctacggttcgtcaggttcgttcccttcgctttcgacggcgacaccgaggccccgcaagttcaggagccggaggttcaggttctggacccttcagatggtgctgttggtgtaaacgacagtgcaagtgataatgaggttagtgatgctgatgaaacatttgcttcacctttcttactgttacttcaatcctacaaagaagcattggctaataatgacgaagtcaaaattgctgagttggaatcgtcattaaaatccattgaagatgagaaaatagaacttgaagggaaaatagcttctttatcagaggagttatcaatagaaaaggatcggattctaaggattagtgcagacttcgacaattttcggaagaggaccgagagagatcgcctttcactggtcacaaatgctcagggtgaagttgtggagagtttgttgcctgtattggataatttcgacagagcaaaaacccagattaaggtggagacagagggagaggagaaaataaacaacagctatcagagcatatataaacagttcattgaaattctaacttcacttggagttgaaccagtggagacagttggaacaccctttgatccattgctacacgaagcgattatgcgtgaggattctgatgaatttgaagatggcatcataattcaagaattcagaaagggttttaaacttggtgaccgtctcttgcgtccatcaatggtaaaggtatcagctggtcctggacctgcaaagcctgaacaagaagcaccgcaagaagagcaagtcaacactgaaatttctgaggccagtaaagaaaatgagggcagcccagaaacagagtcttcttgagaggtcataactttttgcctgatttcagttttgcaataatatattaattttaatctccaggaacataatgttggctgtaagagtctcccaggagatattcctcccaaatttcccttaaaaataaagttagtattatgtgattttgaattatatttttagatttttatgtccttgcatggctttcatagagatgactgagttttcagaggtaccattttcctgaaaggaagagtaagttgcaatgttcaagtgctcggcacctggaatcagaagtattgtagtgtgagcattttaattatttgattaaaggttttatgatgacaaattatttttcatcttaatgcataatgtatc

SEQ ID NO: 3316 - DNA, 544 bp, Glycine max
gaaggctacagtttctgctaccgatgaagattccattgctgatgtgatggaacagcatgacgaatttcttagttcaatgctggctcgttcagctaagttacagatggtcttcagatgttgggaaagaaatgatgttaaggaggtcattggcataatggcaaggatggatgatcatgctgtgattgctgatgttgttagcattataatggaaaaaattgatatcattacacttgagatatgtgctggtcttctgccacttctaactgatcttctacaaagtgaaatggaaagacatctaggaatatccttggaaatgctattgaaactggtcagaatatttggttcagtaatctattcaaccgtatcagctacacaacctgttggtgtcgatatcgaggcagagaacaggctagagcgttgcaacctctgcttcacagagcttgaaaaagtcaaacgttttttgccttctctctcaagatgaggaggatcaattgcaaaatctgcacaagagttgaatctggctttgcaggatgtttcgtgatct

SEQ ID NO: 3317 - DNA, 1544 bp, Glycine max
aaagaagtgcaagtgcaaaagggtaaggaggaaagtagttcagatgattcttcatccgaatctgaagatgagaaacccgcagcaaaagttgctgttcctccacaaaatcaatctgccaccaatggtactctaagtactccagctgagaaaggcaagccagctgccagttcaagctcatctgaatcatctgatgatgactctgatgaggatgaagctccaaaatccaaggtggcccctgcagcaggcaagaatgtacctgcttctacaaagataactcagccaagtgaaagctctgagtctgattctgatagcagctctgatgaggacaaaaataagaaaaaacctgcaactgctaagctgcctgcattgtcagttgctccagctttgaaagtggaaagctcagatgatgaatcaagtgaaagctctgatgaagacaatgatgcataacccgccgtaactgatgtgtcaaagccttctgctcttgcaaagaagaaggttgacagctctgattctgatgatagcagctctgatgaagataaggggaagatggatattgatgatgatagttctgatgaaagtgaagagccacaaaagaaaaagactgtgaaaaatccaaaagaaagcagtgatagttccgaagaagacagtgaggatgaaagtgaggaggaaccctccaaaactcctcagaaaagagacagggatgtggagatggttgatgctgcctcgtctggaaagaaagcgcctaagaccccagttacacccaaagaagaaactggcgcttcaaagacactatttgttgggaacttgccatttagtgttgagcgggctgacgtggaagggttcttcaaggatgccggagaagttgttgatgttcgttttgctacagatgatactgggaagtttaaaggatttggacatgttgagtttgcaacagcagaggctgcccaaaatgctcttgggttgaatggacaacaattgtttaatcgtgaactccggcttgatttagctcgggaaaggggtgcatatacccccaacagcagcaactggaacaactcatcccagaaaagtgaaagaggccagtctcaaacagtatttgtaaggggtttcgatacatcccttggagaagatgagatacgagggagtttgcaagaacattttggatcttgtggggacattaccagggtgtcgattcctaaagattatgagtctggtgctgtcaaggggtttgcttacgtagacttcagtgacgttgatagcatgggcaaagctctagaactccatgaaactgaacttggaggttataccttaacagtggatgaagccaaacctagagataatcagggttctggtggtagaggtgccggtggaaggagtggtggcggtcgatttggtggtaggagtggtggtggtggtggtggtcgatttggtggaagaggtggtggcggtcgatttggtggaaagtggtggtggtggtcgatttggttggaagtggtggtggtggtcgatttggtggaagacgtggcggtggaaggggtcgtggaaat

SEQ ID NO: 3318 - DNA, 584 bp, Glycine max
aattgtcatcttcttttacaatttatgtgttagcattatggctgcaattgtagctatatttactgagacaaatgcaggcgcttggaaaataggagtggatacagcattggcttccatagtttgctctggaatttttggttcattcgtgaacaatgtagttcacacatgggtactgcgtataaaggggcctgtctatgtagcaatgttcaagccactctcaattgccatagctgttgccttgggagtcatgttcctgggtgatacactccaccttggaagtatagttggagccacaattatatcgattggattttatactgtaatgtggggaaaagcaaccgaagagaatgtgggggaagatgtccctggccagcaatcaccaaccacagaaaacgttcctctcttgcaaagctgtaaaactgatacagctgagaagaaaatgcatggaagtgtataaatgacaaacaaaactgttcataaatcttaacattattgaaattacacgaaatagcaaagaaaagcatggttttgttatcccccaagctgaccatgcaacgccaatagcaaagtaggtacccactcct

SEQ ID NO: 3319 - DNA, 494 bp, Glycine max
ctcctattgctgctgttatagtttttcatgataagatgaatggggtgaagataatttctatgcttttggctctatggggttttgcctcttatatttatcagaattatcttgatgattcaaagacaagacatgcacaagctgctactaagtcccaaaatgattcttcatgttgagaatattcaatttggtcatacctttgtcgaagtttccttttttctttttagatttaaatccttcagtaccccatttgccagctttagattttatttttccttcagtctcactgaacttgtgaggtagtatagttatgaagttattggtcattctagattattgttctctcatttaagaaatgaaaagtttattggtgtctcggactggttggaacttggaagtctccgatcttcgtattccaaatgtatttttatggcttttgtgaattgtaataagttgaataatctctgtatgattagtggaagtcttaagattgatat

SEQ ID NO: 3320 - DNA, 908 bp, Glycine max
  unsure (1)..(908): unsure at all n locations
tctcgagccgattcggctcgagtttaactagggtttttggaatttcgaataaagggaaagagggtgcaaagtgcatcttctttttgttgttctctcaaactttaacaatctcataaataaataatcagaacgaagaagaagaagaattgaattcgaaaaatcgtagcgtacgttggttgcgattgaaacggtacgatgggaagaggaaaattcaagagcaagcccaccggtcgccgccagttctccaccccggaagatatgcttgctggaacctctaaccgtcctcgaacttttagacagaaagaagctgagcatgaagaggagcctgaggaagtatctggggatgaatctggagaagaatcagaagaggaaacttctaagaaaaaaggaacacaaggagttattgagattgaaaatcctaacttggtaaagccaaagagcttgaaagctagagatgttgatgttggaaaaacaacagaactttcaaggcgtgaaagagaggagatagagaaacagagagcccatgagcgctatatgaggctgcaagagcaaggaaaaacagaacaagcaaagaaggatttagaacgtttagctcttatacgtcagcaaagggaagatgctgctaaaaagcgagaagaagagaaagctgcgaaagagcagaagaaggctgaggcgcgcaagtgagtttcctggaaaatgtcatgccaccaaaaatttgctccaattagtaaggtggaacggttgctcctactacacttaaaacattatgtccatttggctttatattatggtattaccacaccaagctggtaacatgtaatgcaattatattttcatattctgtggtttgaaaaaaaaaaaaaaaaaacaaaaaaaaaagcgcccgctctagaggatccnngcttacg

SEQ ID NO: 3321 - DNA, 494 bp, Glycine max
cccacgcgtccgcccacgcgtccgcccacgcgtccgtccacgcgtccgtcagaaggggggggaaaagagggtgcaaggtgcatcttctttttgttgttctctcaaactttaataatctcataaattagcagaacgaagaggaacaaaaacaagaagaagaattggattcgaaaatcgtagcgtagcgttggtgcgattgaacgatacgatgggaagaggaaaattcaagagcaagcccactggtcgccgccagttctccaccccggaagatatgcttgctggaacctctaaccgtcctcgaacttttagacagaaagaagctgagcatgaagaggaagaacccgaggaagtatctggagatgaatctggagaagaatctgaagaagaaacttctgttagtatcttgcagtaattactaatatagatggatttcatttttttgcttttaagaaaggatttgtttctttctatggtctgaccctgtcaatatgaaa

SEQ ID NO: 3322 - DNA, 491 bp, Glycine max
cgctcgaccacgctccgacagaacagcaaagaagatttagacgtttagctcttatacgtcagcaaagggaggatgctgctaaaaagcgagaagaagagaaagctacgaaagagcagaagaaggctgaggcgcgcaagtgagtttcctggaaaatgtcatgccaccaaaaatttgctccaattagtaaggtggaacggttgctcctactacacttaaaacattatgtccatttggctttatattatggtattaccacaccaagctggtaacatgtaatgcaattatattttcatattctgtggtttaaaatcgtgattatatataaacgtttttaaaaattcccctctagggtatgatagaatacaagttataaaataataacttaaatcaaactgtgggaagtggaaaaatacaataatgattgataaaggagcggggcctttttaaagttccaaatttagacacccgtgcatgtaaaagaaaaatttttt

SEQ ID NO: 3323 - DNA, 446 bp, Glycine max
ggaatttgtgtggagtttaactaggggttttggaatttcgaataaaacggaaaagagggtgcaaggtgcatcttctttttgttgttctctcaaactttaataatctcataaattagcagaacgaagaggaacaaaaacaagaagaagaattggattcgaaaatcgtagcgtagcgttggtgcgattgaacgatacgatgggaagaggaaaattcaagagcaagcccactggtcgccgccagttctccaccccggaagatatgcttgctggaacctctaaccgtcctcgaacttttagacagaaagaagctgagcatgaagaggaagaacccgaggaagtatctggagatgaatctggagaagaatctgaagaaagaaacttctaagaaaaaaggaacacaaggggttattgagattgaaaatcccaacttagtaaagccaaagacc

SEQ ID NO: 3324 - DNA, 366 bp, Glycine max
cttcaacattatgtccatttagctttatataattgcattacatgttaccagcttggtatagcaataccataatataaagctaaatggacataatgttgaagtgtagtaagagtacatatcctcctactaatatggagtaaatttggcaacatgacattttccaggacattcacttgcgcgcttcagccttatattatggtattgctataccaagctggtaacatgtaatgcaattattttcatattctgtggtttaaaatcgtgattatatataaacgtttttaaaaattacacattaggatatgctcttttttctgaaatgaaggttgatatttctatccaaaaaaaaaaaaaaaagggggggcc

SEQ ID NO: 3325 - DNA, 1002 bp, Glycine max
cagaacatccacaccgcatcgctcgtggttccatcctttgtgtctgtctctctcttcggacacaaagcaacactttccatgtccatgtctctgtctcttcttcgtatcttctcttcgccccacctttccacctctctcttctttccaactccaactctttcttccctctgcccttctttcctttccaaattaccaaatgccccctctcccctcattgttttatgccacagggacgcctcagcttcgaagcaaggtcacctcggagtccctgaaggtgcagaacgtgacagtgggagcgaagaagatgatgatgctgttgaacaacccatgagggccagttacgacgacgacgaagacgaagaagaaggagctcttagctccttagtttttcctgaaagatgggatgtattgggtctcggtcaagccatggtagacttctctggcatggttgatgataatttcctgaagaatttgggattagagaagggaacacggaaagtagtaaatcatgaggaaagaggtagagttttgcaggccatggatgggtgcggctataaagctgcagctggtggatctctttctaataccttagttgccctcgcaaggcttggaagtcgctccgaaaaagttcctgctataaatgtggcaatgaccggtagtgtagggagtgatctattagggggcttctacagggaaaaattacgccgagcaaacgtgcaatttctttctgcaccaatcaaggatgggactactggaacagttatagttctcacaactccagatgcccagcgcacaatgcttgcatatcagggcacatcttcaactgttaactatgatgcatccttagctaatgcagtttccaagacaaacatacttgtcgtcgaagggtatctatttgaacttcctgataccattaaaacaataaccaaagcatgtgagaaagcacggtcgaacggtgccttggttgcaataacagcttcagatgtctcctgcattgagaga

SEQ ID NO: 3326 - DNA, 557 bp, Glycine max
cccacgcgtccgcccacgcgtccgatcgctcgttcctcgtggttccttcctttgtgtctctctctcttcggacacaaagcaacgctttccatttccatgtctctgtctcttcttcgtatctactcttccccccaccttctttcctcctctctcttctttccaaccccacctctctcttctttccttcccaaattaccaaatgccccccgcactccccacattgttttatgccaccgtagggacgcctcctcagcttcgaagcagcgagtcccagaagatacagaatacgaacaacccatgaggaccagttacgacgacgacgaagaagaagaagaggaatttcttggctccttagttttgcctgaaagatgggatgtactgggtctcggtcaagccattgtagattgggagaaattacgccgagcaaatgtgcaatttctttctgcaccaatgaaggatgggacaactggaacagttatagtcctcacaactccagatgcccagcgcacaatgcttgcatatcagggcacatcttcaactgttaactatgatgcatc

SEQ ID NO: 3327 - DNA, 704 bp, Glycine max
aaaaaacttgatataactccttgttaaacgaagaagacaaaactatatattgatgtattagtccatagttttagtgtatcgagaactagaagcgtaacagcaatggagctgtcttccagtgcatttgtggtaatattgttggcagtcgcagctacagcagtactctcaaatgggttggatctatctttcttgcccagcgatttcctctttggcattgcttcttcctcttaccagtatgaaggagcttacaagagtgacggcaaaggactgagcaactgggataactacactcacggaccaggtagaagtgtaataatggatggaagcaatggggatatcgcgattgatcattatcatcgctacctggaggatatagatttaatggaaactttgggagtaaacagctaccggctatccctgtcatgggcaagaattctaccaaagggtagattcggagagcccaaccatgctggtatcgagttctataacagactaattgatgttctactactcaaagggatccaaccctttgtaactcttagtcactatgacattccccaagagcttgaagacagatacgggagttggctaagtccccagttacaggaagattttgctttttatgcggacctatgttttaaaacctttggtgacagagttaagtactgggtcacattcaatgagccgaatttcctagtgtcact

SEQ ID NO: 3328 - DNA, 396 bp, Glycine max
gggataactacactcacggaccaggtagaagtgtaataatggatggaagcaatggggatatcgcgattgatcattatcatcgctacctggaggatatagatttaatggaaactttgggagtaaacagctaccggctatccctgtcatgggcaagaattctaccaaagggtagattcggagagcccaaccatgctggtatcgagttctataacagactaattgatgttctactactcaaagggatccaaccctttgtaactcttagtcactatgacattccccaagagcttgaagacagatacgggagttggctaagtccccagttacagtaagcaaccagttttctagtttacatgaagaggtttcaataccacattgatcatacgagctcctaaa

SEQ ID NO: 3329 - DNA, 1923 bp, Glycine max
gagagagagatagagagagatctatctatctatcaagtccactctctttctctagtcctgttatttctcagcgcgtaaagcatggctttgttggtggagaaaaccacgagtggtcgcgagtacaaggtcaaggacctttcccaggccgacttcggccgcctcgagatcgagctggccgaggttgagatgcccggcctcatggcctgtcggaccgagttcggcccctcccagcccttcaagggggcccgcatcaccggctccctccacatgaccatccagaccgccgttctcattgagaccctcaccgcccttggcgccgaggtccgctggtgctcctgcaacatcttctccacccaggaccacgccgccgccgctattgcccgcgacagtgccgccgtcttcgcctggaagggtgagaccctccaggagtactggtggtgcaccgagcgcgccctcgactggggccccggtggtggacccgacctcatcgtcgacgacggtggtgacgctacccttctcatccacgaaggcgtcaaggccgaggagctctatgagaagaccggcgaactccccgaccccaactccaccgacaacgccgagtttcagatcgtgcttaccatcatcagagatgggttgaagaccgatcccaccaggtaccgcaagatgaaggagcgtctcgttggggtttctgaggaaaccaccactggtgttaagaggctctatcagatgcaggcgaatgggactcttctcttccctgctattaatgtcaatgactctgtcaccaagagcaagtttgacaacttgtatgggtgccgtcactctctccctgatggtctcatgagggctaccgatgttatgattgctggaaaggtggctgttgtggctggatatggtgatgttggcaagggttgtgctgctgcaatgaagcaggctggtgctcgtgtcatcgtgaccgagattgatcccatctgtgcccttcaggctctcatggaaggccttcaggttctgaccttggaggatgttgtttctgaggctgatatctttgtcaccaccaccggtaacaaggacatcatcatggttgaccacatgaggaaaatgaagaacaatgccattgtttgcaacattggtcactttgacaatgagatcgacatgcttgggctggagaactaccccggcgtgaagcgcatcaccatcaagccccaaactgacagatgggtcttccctgagaccaacaccggtatcattgtcttggctgagggtcgattgatgaacttgggatgcgccactggacaccccagttttgtgatgtcctgctccttcaccaaccaggtcattgctcagcttgagttgtggaaggagaagagtaccggcaagtacgagaagaaggtttacgttttgcccaagcaccttgatgagaaggtggctgcacttcacctgggcaaacttggagctaagctgacccagcttagcaagtcccaggctgattacatcagtgtgcctgttgagggtccatacaagcctgctcactacaggtactaagtgattgagatgatcaactgaaaagtgagtgagggaaagacaaaaatcggttttatcaatcggatttgattgtttaattttcctttttttgaatttttggtgttagacttttcagatttgtggtagaagaagtttagctttttttatttctgtagaacttttgttcgagtgggtgggaccagtaaggaggaaggcggcatcctgttggtttctgtgatatgaaaccaatttgggttgaataaggcttgttttgtttgggggatgtgtgcattttgctttattaaatactaaaatttgtgtttctttctgccttttcaatatatcaaagaaaataaaaaaattcctacccaaaaaaaaaaaaaaaaaaaaaaaaagggcggccgc

SEQ ID NO: 3330 - DNA, 646 bp, Glycine max
gagagagagagagagagagagagagatctatctatctatcaagatggcgttgttggttgagaaaacaagcagtggaagggagtacaaggtgaaggacatgacgcaagccgatttcggaagattggaaatcgagctggcggaggttgaaatgcccggcctcatgtcctcccgcaccgagttcggcccctctcaacccttcaagggcgctaggatcaccggctccctccacatgaccatccaaaccgccgtcctcatcgagaccctcaccgccctcggcgcctaggtccgctggtgctcctgcaacatcgtctccacccaggaccatgccggcgccgccattacccgcgacagcgcctacgtcttcgcctggaagggtgagacccttcaggaatactggtggtgcaccgagcgcaccctcgactggtgtcccggcaaaggtcccgatctcatcttcgaccacggctgcaacaccactcttataattcacgagggcgtcaaggacgcagcgaactcagcgaagacctggcagttcccggaaccacgttcctgcgccactgcggctacccagagatagctcagcacaactaggggagcattggataccgatcccaagaagtgccacaagatgcaggccactatcaggggc

SEQ ID NO: 3331 - DNA, 405 bp, Glycine max
caggtcattgctcagcttgaattgtggaaagagaagggttctgggaagtatgagaagaaggtgtatgtgttgcccaagcaccttgacgagaaagtggcttctctccaccttggccagcttggagctaggctcaccaagctttccaaagaccaagctgattacatcagtgtgcctgttgagggtccatacaagcctgctcactacaggtactgatccatcctattgggggagaataaacctaaactatcctatcaattcccgaggcgtcattgttacactttcctttttggatttttcccattacaatttacatttgtggtagcataggagcttcttttttctttttttagtaggatcacaatgccattgggctgaaggttaagaccaaaattactcattgctttc

SEQ ID NO: 3332 - DNA, 330 bp, Glycine max
cgttttcattcaaaattggttttgcaaacattgatccaaaccgagtcttttgtgacgggttgtttattgattagggtattgaaatttgacaacttgtatgggtgccgtcactctctccctgatggtctcatgagggctaccgatgttatgattgctggaaaggtggctgctgtggctggatatggtgatgttggcaacgggttgcgctgctcgcaatcaagcacgctgatgctcgccccaccgtgacccagagtcacattcatcgctggcgcagcactctctcacggccggcccctaggtgcctacctcattcagtaggagtgtactctt

SEQ ID NO: 3333 - DNA, 528 bp, Glycine max
ggagaagagtaccggcaagtacgagaagaaggtttacgttttgcccaagcaccttgatgagaaggtggctgcacttcacctgggcaaacttggagctaagctgacccagcttagcaagtcccaggctgattacatcagtgtgcctgttgagggtccatacaagcctgctcactacaggtactaagtgattgagatgatcaactgaaaagtgagtgagggaaagacaaacaccgcgccccacccaccccacctgactgtttaattccccgggccttgatttttggtgttagacttttcagatttgtggtagaaggatttgtagccatttttaattctgtagaaggtttgttcgagtgggtgggacccgttaggaggaaggcggcatcctgttggtttctgtgatatgaaaccaatttgggttgaataaggcttgttttgtttgggggatgtgtgcattttgctttattaaatactaaaatttgtgttaaaaaaaaaaaaaaaaaagggcggccgctcgcgatctagaac

SEQ ID NO: 3334 - DNA, 287 bp, Glycine max
tggtaggaggtaaggctgggtcgacccagatctagttgagctcaccaactcccgctcccatttccttatttatagacagagtctgattgtttcctcaccactccctccactctctttctctagtcctgttatttctcagcgcgtaaagcatggctttgttggtggagaaaaccacgagtggtcgcgagtacaaggtcaaggacctttcccaggccgacttcggccgcctcgagatcgagctggccgaggttgagatgcccggcctcatggcctgtcggaccgagttc

SEQ ID NO: 3335 - DNA, 532 bp, Glycine max
  unsure (1)..(532): unsure at all n locations
cggaatcggctcgagagcagttggagcaagggatggctgtgcaaagcaatgttcaagtgcatcatcaattacagatgctgcaacagcctcaggttccttcaatgcagacgtattaccanacccagcagcaacagttttcacatgagcagcagcaagttgaatatactcaacagccagggaattctctatcacagcagcaacaagatgcagcaatgtcgttacatgagtatttcaagtctccagaggcaattcagtctttattgagtgatcgggacaaactttgccaacttttggagcagcatcccgacattaatgcagatgcttcaggaaaaattgggcccactgtagccgcatgatgatgaccaagtagaactgtttcatgtctgtaaatgtccattcattatccaaatgatgagttgcgctgatgcttatgcctcagggcattgaaattttgttaatatgtactttctgggttcatttttttatttttatttttaaatttcaatgagcacaatattgatgcccaatatat

SEQ ID NO: 3336 - DNA, 255 bp, Glycine max
gcagttggagcaagggatgggtttgcaaagcaatgttcaagtgcatcaattacagatgctgcagcagtctcaggttccttcaatgcagactaattaccaaacccagcagcagcaagttgaatatactcaacagccagggaattgtcaatcacagcagcaacaagatgcagcaatgtcattacacgagtatttcaagtctccagaggccattcagtctttattgagtgatcgggacaaactttgccaacttttgga

SEQ ID NO: 3337 - DNA, 503 bp, Glycine max
gctattggcaacgagaacgagaggaggggttcgggtgtgagagcgagaatcagaagatgaagaaggaagacacagtgaagctgatcagtgccgaaggttttgaatttgtggtcgacaaagaagctgcaatggtttcacagaccatacataacatgcttacttctccagggagtttcgctgagaggcagcacggcgaagttacctttcctgagatcagcaccaccattctcgagaagatttgccagtacttttattggcatctccaattcgccagtgggaaggagacggaatttcccattgaacctgaattaactctggagctaatgatggctgccaattacctccatacataagcattttgacttccccaagggtgatagttcttcggccacataatggaactattgcctagttgggcattcaaagggaaatcagcgtattagtgttgccactgaaactatgtccttgctggaactaagtatatatgtaatttgtataattta

SEQ ID NO: 3338 - DNA, 1327 bp, Glycine max
gagaacatctttctccccagctttgcttacagttcctgtattaattttttttctccattagattaccaagctctgcaactttgcttctcaacatggagtatcgtctcctacccatttttactttactcaatattgcactggtggcaacccatgctgctttaccccctgaagtttactggaagtcggtgcttcctactacgccaatgccaaaagccatcactgatatcctttactctgattgggtggaagagaaaagcagctcagtgcatgttggaggtggaggcgtgaacgtgcatacaggaaaaggaggtggcagtggcaccactgtcaacgttggtggaaaaggaggcggaggcgtaaacgtgcatgcaggccacaagggaaagccagtgcatgtttcagttggctcaaagtctccatttgattacgtctacgccgccacggaaactcaattacacgatgaccccaacgtggcactcttcttcttggaaaaggacttgcattctggaacaaagttggacttgcacttcaccaggagtacatctaatcaagccacgttcttgtcacgccaagttgcggattcgatacccttttcatccaacaaggtggactttatattcaacaagttttctgtcaaacccgggtcagaggaggctcagatcatgaagaatactattagtgagtgtgaagagggtggaatcaaaggagaggaaaagtactgtgccacttcgcttgaatccatgattgatttcagcacttccaagcttggaaaaaatgttgaggttgtgtccacggaagtagtggaggacaaggaaacgggattgcagaaatacaccgtagcaccgggagtgaacaagttatcaggggacaaggctgttgtgtgccacaagcagaactacccttatgctgttttttactgtcacaaaactgagaccacaagagcttactctgtgcctttggagggtgctaatggggttagggttaaagcggtagcagtgtgccacactcacacgtcggaatggaaccctaaacatttggcctttcaagtgctcaaagttaagccaggaaccgttcctgtctgccacttcctacctgaggatcatgttgtttgggttcccaagtagatttgctttaatttcaagtccttctttcctgttcttgaataacttagcttcagtagcactacagaactctatatatatgcatgtatttgcactgtgtagttctctagatattaataattttttgctgtttatttagatgctatgcgtggcttcttatgtataaactatgatgcattatatgacttattgtgtgtttgaatagt

SEQ ID NO: 3339 - DNA, 450 bp, Glycine max
ttatgctgttttttactgtcacaaaaccgagaccaccagagcttactctgtgcctttggagggtactaatggggttagggttaaagcggtagcagtgtgccacactgacacatcagaatggaaccctaaacatttggcctttcaggtgctcaaagttaagccaggaactattcctgtctgccacttccttcttgaggatcatgttgtttgggttcccaagtagatttgcattcaagtcctttttccatatatgtccttgaataactagcttcaatagcatcagctacagaactcgatgcatgtatttgctcgtactatatagttctctagatatgtatacttttttgctgtttatttagatgctatgtgtggcttcctatgtataacccatgatgctttttttatttgcgaataaagtgttagaatagtataaaaaaaaaaaaaaagaaa

SEQ ID NO: 3340 - DNA, 932 bp, Glycine max
  unsure (1)..(932): unsure at all n locations
tgtttccctgagttaacagctacatttgcaaaacgatgttcctgtcaaatttgcctatatattcagaaatcacgagcctggctgctctagaacacaaagatttggtttttattctacctaacaccacatggatacgttgccggaggattgtgtttccaaaattctgtcttacacatctccaccagacgcatgtagattctctatggtctcttcaaccctacgctcttccgctgactctgaccttctctggcgaactttctttccttctgattactctgacattgtctcaagggctctcaaccccctctcccttaattcctcttcttcatacaaacaccttttctatgctctttgtcatccactcctcctagatggaggcaacatgagcttcaaattagacaagtcttcgggtaagaaatcttatatcctatctgcaaggcagctttctataacgtggagcaatgaccctttgtattggagctggagaccagttcctgaatcaaggttcaaagaggtggccgagctgagaacggtgagctggttagaaatccaaggcaaaattgggacgaggattctaacgccaaacacgtcatatgtggtttatctgataatgaagacatcccaccgagaatacgggcttatcgttgaaggcgttgaaatcagaccaaaaattattgtttgactaaaaacagggacaactaaactgtcataattgacaaatatacctcgtctacacgccaatgccacgggttgcatgcacaacttcagtccattntggtctgtttcttttttaaatgtctctatgtattttttttttttttacaaatcctcaatgaatattttctgaccaacttttattgctccaagagtataaaaaaatacaaataagctgttggtccaataatactaaatntatctctttcttagatttt

SEQ ID NO: 3341 - DNA, 561 bp, Glycine max
accaaaccacccaaggcacttaaaactccccaccagaaaaaaaaatgaattattctcttgccctagccctaggcctaatcctcatttcttgttctcctttgctagcaaacgctagaggccaccatcatgcaggtggccatcatctagggttggtagggcaaatctgcacggaactcatccaaaaccagacgacttgcacggaccttgtaaaggcagcagatcctaaaattgcacaggcaaagacattccaagagcttgcacaggcagtgctagaatttgccgtgaacaagggaatagagggccaaaccttcctcaagggcttggcactgattgagcaatcaccagccattaaggaatgtgcaaactttttctatgatggggtggttggatccttccgtagtgccttacgtgagttgaaagaagatgctcagaccgctagctatgatgccaaagcggcttatgatggccctgacggttgcaatagagccttggccgctgaaaatatcaataaccctgctattactgctcttaacagcgaaatagcgttgcttagccaaattg

SEQ ID NO: 3342 - DNA, 1535 bp, Glycine max
cccacgcgtccgcccacgcgtccgtgctctcatccgggagactgttcctgattggatagcaattgtaggaagtggttatattggccttgaattcagtgatgtatatacggcccttggaagtgaggttacttttattgaagctttagaccagctcatgcctggatttgatcctgaaattagcaagttggctcagagggttctcataaatccccggaatattgactatcatactggagtttttgcatccaagatcactcctgcaagagacggaaaacctgtcacaattgagctcattgatgcaaagaccaaggaacagaaggacactttagaggtggatgctgcactaatagcaacaggaagggctccattcacacaaggtcttggattggagaatattgatgtggtaacgcagcgtggttttgttcctgtcgatgagcgcatgagagtacttgatgcaaatggaaacctggttcctcatttgtattgtattggtgatgcaaatggcaagatgatgcttgctcatgctgccagcgcacaaggaatttcaggtaagaagcaggtaatgtaattttgctactaatttttgagtcatttgcttccatttacttaatgaaaagattgttggatagtggttgaacaagtcactggaagagatctcgtgctcaatcatttaagcatcccagctgcttgtttcactcatcctgaaatcagcatggttggattgacagagcctcaagcaagggagaaagctgaaaaggaggggtttgaagtaagtgttgccaaaacaagttttaaagctaacacaaaggccttagctgaaaacgaaggggagggtcttgccaagttgatatacaggcctgacactggagagatactgggagttcatatatttgggttgcatgctgctgatctcatccacgaggcatccaatgcaatagcattaggaacacgtattcaggatataaaatttgcagtacatgctcatccaactttgtctgaggtgcttgatgagctatttaagtcagcaaaggttaaagcagaagcttctgagccaataaaggaagcttgttgcagtttaatcttccttaagtatctgctttacaagagagtttcctgtacaatggagtttcaatgcatttcacatcttctggcggaatacttcaacacattcagtatcctacaaaagaagggaactgttgaaggagtctcgccaatggtatcagaatgggatgagtatcgatatattattttcttggcatatagttagtgtccagcaaatatcatattcgttatttttgcactttagaaactcgtttcctccaagttgtggtctagatgcttcttgttcgaaggcctgtgagactgtagtcaatttcttagtgtttcggttttgattgaacctgtacatgaactgtcaatttttctcgtgtaaggtttctcatgaggtaaccctgttgacacaataacgcagttatttgcatcgatctttccaatcattgtatggcaagaagaagctcaagggacacgagatctaa

SEQ ID NO: 3343 - DNA, 421 bp, Glycine max
gggtctgtctctttcatccttcaattgtggttagtttattcttaattgcagagttgaatcaagtttttattttttttatatgggtttgtgttattttattgggaaaggaagacttattctggtattgacttggcctttgggattcccactactgtggttgttaggtgcttgttttgtgttgtgttgtgtgtgttgtttcctcctctgtaccatcttgatttcattggtaacagtaaaaggaaaaggttctttcttgtggaaattagaaaagggtcccttgctttaggacagtgagagagaaaagtatttcttcctggtgatgtcttttgattcgtctctggaatcttatgcaaacccttccttcccttttgcttgcttgcttgggagatagaggaaataataggtaaaagtatgtgtgttg

SEQ ID NO: 3344 - DNA, 1167 bp, Glycine max
ttcatgcgtccgaacggaaactggtgacagacaagggtgagagagagagagaaacaaagcagcacccatttggatcctctcttctcttctttgatctccgttaccctttttgttttctcaacagagagagagagagagaatctttcgaagttcgtttgcgtgtgttgtgtggtcagtcaccgatggcagcaccacctgcgagggcacgtgccgattacgattacctcatcaagcttcttcttattggcgatagcggtgtgggaaagagttgtctgcttttgcgattttctgatggttccttcacaaccagttttatcaccaccattggcattgattttaagataagaaccattgaacttgatggcaaacgcattaagttacaaatctgggatacagctggtcaggagcgatttcgaactattaccacagcttattaccgtggagccatgggtatcttgctcgtttatgatgttactgatgaagcatctttcaacaatattaggaattggattcgcaacattgaacaacatgcttctgacaatgtaaacaagatacttgtgggtaacaaggctgatatggatgaaagtaaaagggctgtgcctacctccaaaggtcaagcccttgctgatgagtatggtatcaagttttttgaaaccagtgcaaagacaaacatgaatgtggaggaggttttcttttcaatagcaagagatatcaagcaaaggcttgcagacacagattctaaggctgaacctcagactatcaagattaaccaacccgaccaggcagccacagggggtcttgcggctcaaaaatcggcttgctgtggttcatgaaataaataacaagtcagaatctgcagttagagggtgcagattcaacactcgccctcatatgggtgctatagttattttgatgacatttaaaagtgggagcatgtatttgtccttgtatttcccaactgcaaagattatgttttgaagatagtgttttaaatttttcgtttacttagctgtcggatttgttgtgattagttcgtttgctccactctctcctctttcatttgtacaccgactcttgaaagaaaatctttcgattggattcagattgattattagaaaagcttttatctgttgcaaataatattccaagaaatcgtacgtttactaa

SEQ ID NO: 3345 - DNA, 1279 bp, Glycine max
  unsure (1)..(1279): unsure at all n locations
agtaccggttaggtaaacccagccctacgtacgggtaccagaagaccacagaaaggggaaatgtggtgtggcaaaacgtaacgccattgcaatgatatgataggcgcagagcagagagagagaaaacgcaaaggcattatttggtcttggatccctttcgatccgacgacttcgttcgttccttctccttccaagttctaaccatttcccactgtcttcgattttagggcattaaatctgccatggcagcagcacccgctagagctcgtgccgattacgattacctcatcaagcttcttcttatcggcgacagcggtgtggggaagagttgtctacttttgaggttttctgatggctcattcacaaccagttttatcaccaccattggtatcgattttaagataagaaccattgaactagacagcaaacggattaagttacaaatctgggatactgctggtcaggagcggttccgaactattaccacagcttattaccgtggagccatgggtatcttgctggtttatgatgttactgatgaagcatctttcaataatattaggaattggatccgcaatattgaacaacatgcttctgacaatgtaaacaagatacttgttggcgcacaaggctgatatggatgaaagtaaaagggctgtacctacctccaaagggcaagcacttgctgatgagtatggtatcaggtgctttgaaactagtgcaaaaaccaacatgaacgtggaagaggtcttcttttcaatagcaagagatattaagcaaaggcttgcagacacagattcaagagctgagcctcagactatcaagattaaccaacctgaccaggcaaccagtggtggtcaacctgcgcaaaagtcggcttgctgtggttcatgaaaagaatcagtatctgtagaaagaggtgcacaggtttctgcaatagcactcatctgggtgctaatgttattctgatgacattataagtgggagcatgtatttgtccctctgtatctcccaactgcagatgtcttattttaaagttaatattttaaattctttgctcactgacttggtggaatttgttgtgactagtaatttgcttcaatttcctattttcatttgtagtgtgactcttaaaaggtatcttgattagatgcggatagattatcacaacagcttgatcatttgcaggnnaaaaaaannaaaaaaaaaaaaaaaaaaaaagaatnnntttataaggaacaaatttaaaaacagaagcatgcaacagcatataataaaa

SEQ ID NO: 3346 - DNA, 595 bp, Glycine max
agtgtgcgcaggagtatggaagaagaagtgtggtggcaatgatatgataggcgcagagcagagagagagagaaggcaaaggcatttggatccgacgacctcgttggttttcctttgtaagttgtaagcatttggcaccagcaagccctgtcttcttcttcgatcagattagggcatttcatttctgcgatggccgcagcacccgctagagctcgtgccgattacgattacctcatcaagcttcttcttatcggcgacagcggtgtcgggaagagttgtctgcttttgagattttctgatggctcattcacaaccagttttatcaccaccattggtatcgattttaagataagaaccattgaactagacggcaaacggattaagttacaaatctgggatactgctggtcaggaacggtttcgaactattaccacagcttattaccgtggagccatgggtatcttgctggtttatgatgttactgatgaagcttccttcattagtaatctcctttccttggttttgttggaagtttaaagatatttcagtgaatgacattcttttgatgtatttttatgcactaattgtctgagaat

SEQ ID NO: 3347 - DNA, 1993 bp, Glycine max
aacacaacaaaacacacataataaacatattacaacttcttcttcttcttccattgaccattgttgttgttgttgcttttgttcgttctcgccatgccaatgttgtcttcgagaggcttcatcgcttatctcgtatctgctttctcttgtgctgttctgtctgcgctttttctcaccaaccacatccatcatgatgataacaagccaattactttgttagcctctcgtgtgtctgaaactcttaaagtttggccagacttggagccaagttggagacttgtgttggcaacggttattgggtttcttggttcagcatgtggaaccgttggtggggttggaggctggaggcattttcgttcccatgctcaatctgcttcttggctttgatactaagtctgctgctgctctttctaaatgtatgataatgggggcatcagcatcatcggtttggtataatgtgagagtgccgcatccaacgaaagaggtgcccatattagactatgatctggctcttctgttccagcctatgctcatgcttggaatcactgttggtgttgctctcagtgttgtcttcccttactggcttatcactgttctcatcatcattctcttcatagggacttcttcaaggtcattctttaaaggaattgagatgtggagggaagagactattttcaagagagaaaagaccaagcaacgggcgacgttggttgattctcatggtgaagataagacagttagaatcgacacaaaatatgaaccgctgattcctaaagaagagaagtcaactatacaaattttatgtctcaaccttaggtggaagaggattctggtactgattgtggtgtgggttgctttccttctagttcaagtcatcaagaatgatgtagaggcatgcagtccatggtattgggtgctttttggcttgcagtttccaattgcacttttggtgtttgggtatgaagcagtgaagttgtacaaggagcacaaaaggagaatgagcacaaggaacctagaatgcatctgtgaggcttctatagaatggactgctatgaaccttgcattttgttcattgtgtggcattgtagggggaattgttggaggcctacttggttctggaggtgggtttgttttgggacctcttcttctagagattggtgtcattcctcaggttgctagtgctacagcaacatttgtgatgatgttttcatcatctctgtcagtggttgaattctaccttctcaagaggttccccattccttatgcattatacctcacctcagtgtctgttttggctggcttctggggacaattctttgtaagaagattgattgcatgccttgggagggcatcaatcattgtattcatcctctcaggtgtcatttttgctagcgccctcaccatgggtgtcgttggcattgagaacagcattcaaatgataaacaaccatgagttcatgggattcttaggcttctgttccagtcagtgatatattttattctagagtgcattgcattgggcatagaaaacaaaaaaggataatacaaagttggtgtgaagaagacttgtaaaattaagtgtgtaggacaatggcactaccaaatgttggtcaatgcctagttgaccaacaaggaagatcagtgccaaattataaggttttcttgccttcctatcagtgagaataaatttgtgaatgtgtgttagctcctcgctaacacatatcttatagtggtttaatttatatggatgagtgttagctcctcactaacacatcttgtagtggtttaataaatctgtggatgagtgttagctcctcgctaacacatcttatagtggtttcagatgtattgaatttgtgtcagaaaaaaaagaataatggaaatgatatcagattgttttatatgtttggatgtgcaaaaagatcaagatacctctgcccccaaaaagttcagatattctcatataaaatgagtggagctcaagaagcttcccc

SEQ ID NO: 3348 - DNA, 526 bp, Glycine max
ccgaatccgaagtgggaaggcacacgcttgtttacgcaacgcaagcgattgttagttgtattcgatggactacgatttcagaagcaggtcgggcccacaacctccgatgtaccgtccgccaccgccaccgtcaccgatgtaccgtccatcaccgtatcaacagaatcctactccttcttcaggacttggcgttagggttggtataaagccggaatataggatcacaccgccgcctcatttatcatcacttgctggagataatccacggagcaacttccaatttgattttggattggagagaaaaattttagctgaagcagagaaggataacccaaattggagcaaatttggatcagaaaatattccaactaaagtttctgattcatcaacagcaaaggttactgctttggatcccattgtgagcaaatttatggccatggggcttagccaagaggctgttcccattgccgttgaaaattatggtgataatccaaccaaagttcaggaattcgtcaatggctacacc

SEQ ID NO: 3349 - DNA, 364 bp, Glycine max
ttacactttcagccccacacacttgcaaataataattcttttttttttcttcgtccttccatgatccatcatcgtattttctcactatccgttacggtgttaccttacactgctgtatacattttcccggacagttcataattttcctggaaaaaatattctgatttaattcgggcccagttttccttccccttatacgagaatactcatttcatattttctgcgaaatctataaataaacaaacaatgcagaaatacctaatttgcttctgaattccgatggggcaagggcaatccaaagacgagttgctctaccagcaagtcagttatgggaacgccgaaggaatcaaaacccttcacagag

SEQ ID NO: 3350 - DNA, 1530 bp, Glycine max
acattggtcaatatatgcttatacatgttagtcgaattttatcactggattaataattagcacatagttttttggaagagttgtgaaaatgggacttgtggagctttttggagtggcatctatgcccgtgatcaaagtactaataatcactgcagttggcttgcttcttgcactggataacgtaaatttgttgggaaaagatgcaaggatacaagtgaatcatcttgtgcattatgtgttcaatcctgcactggtgggtggcaatttggcggacacgattacttttgagaatgttgttttattgtggttcatgcccgtcaatatcctccttacgtttataataggctctgccttaggatggatccttatcaaattaacaagggctcccaaacacttggaagggctaataatgggtgtctgttctgcaggaaatttaggaaacttgcctataatcattatcccggctatatgtaaagacaaaggtagtccttttggagactccaatgtctgctatcaatatggaatggcttatgcttcactttctatggcggttggagctgtttatatatggacttatgtctataacataatgagagtttccgcaagtgtagtaccaaaagatgcttatagaactagctccttcagactggaggcttcaggagagttcctagaattcttaccagaggaagaatcctcagaacctgaaaatccatcaaaggacaacatggatgattacacacttctgctttcttcaattgaatctgaggagaatgtgaagttaccaatctcagctaaaatcaaacaacaatttggaaaccttttagtcaactccaatttcagagccatattttcaccagcaactcttggagcggagtggttccccagatacgtaaattgatgattggcggcgatgcttcacttcatgtgattcaagactctgttaccatggttggtgaagccgccgttccaattataacccttataatgggagcaaacctccttaaaggcttgaagggagcaaatacttctatttggacagttataggaattatagtagttcgatatattttcctgccaattttgggtattctagttattaaaggagcaacacaattgggtttggtgcaaccagatcccttgtatcagtttgtgcttctccttcaatatgcacttccacctgcaatggctataggcaccatcgcgcagttgtttggagctggtgaaggtgaatgttctgttatcatgctatggacatatgttttggcctcagttgcagtcactttttggacaacttacttcatgtggcttgtggcttaattttgtattcattgctatcgatggttatttatttatttatttttaaattttgccttataagtatctcttttcagccaggggtaggaactgcctacactatctgtagttttatacaaacttcctcaaatggatgaaatagaatatatgtggttactcaaacattaattactttttcaataaatgatataaatggtttactatgtgtatgaatag

SEQ ID NO: 3351 - DNA, 768 bp, Glycine max
ctgttctatagttatgtttcttttgtctacatgatatatataatcattgtattcatatagttctgtctcaatagttatcatatactattaaatataataagtggttttgttcttcttcacttccacgttccatgggaggaatatgctcttcttatagtactaggatggatctgcagtttgtgttgttcaagatctgtgtggtttatttcattgttgtttgcttaagatatatttgtttactttactaaagtaatttttctctttgtgcgtaggattaataattagctcatagtttttttggaagagttgtgaaaatgggacttgtggagctttttggggtggcatctatgcccgtgatcaaagtactactaatcactgctgttggcttgcttcttgcactggacaacgtaaatttgttgggaaaagatgcaaggatacaagtgaatcatcttgtgcattatgtgttcaatcctgcactggtgggtggcaatttggccgacacgattacttttgagaatgttgttttattgtggttcatgcccgtcaatatcctcctgacgtttataataggctctgccttaggatggatccttatcaaattaacaagggctcccaaacacttggaagggctaatattgggtgtctgttctgcaggtagaattttctcttcaaaattaatgaatcctggaagcctaacatgttatctgtgttatgttttcactgtttatttcccctgaattttattggtgaatttttaatatcaaagac

SEQ ID NO: 3352 - DNA, 491 bp, Glycine max
cttcaggagagttcctagaattcttaccagaggaagaatcctcagaacctgaaaatccatcaaaggacaacatggatgattacacacttctgctttcttcaattgaatctgaggagaatgtgaagttaccagtctcagctaaaatcaaacaccaaattggaaagcttttagtcaactccaatttcagagccatattttcaccagcaactcttggagcgattgttggctttattgttggagtagttccccagatacgtaaattgatgattggcggcgatgcttcacttcatgtgattcaagactcagttaccatggttggtgaagcagccgtcccagttataacccttataatgggagcaaacctccttaaaggtttcaagggagccaatacttcgttttggacaattcttggaattatagtagctcgatattttttcctgccaattttgtggtactctagttattaaaggagcaactcacttatgttttaa

SEQ ID NO: 3353 - DNA, 860 bp, Glycine max
gacagtagttggagtacaactaactgcaccatcaccagataaaacttgggtggtgccttttttctttttctttctctctatcgattctcgtaacaaaccctacccttttgagtcttccaagttttcaccatcgtaatgggttccgaaggatccagcgtcgtggttcctaggaatttcagattattggaagagcttgagagaggtgagaagggaattggggatggaactgttagctatggaatggatgatgctgatgacatatacatgcaatcttggactgggactatcatcggtccccctagtactgttcatgaagggcgtatctaccagttgaaattgttttgcagcagggattatccagacaatcctccatctgttagatttcaaacaaggattaacatgacatgtgtcaatcaagaaactggagtggttgagccacatttgtttcctatgcttgctaattggaaacgtgagcgtacaatggaagacattttgattcaattgaagagagaaatgatgtctccccaaaataggaagctaactcagcctcctgaaggcaatgaagaatccagggttgatcaaaagggcctggtggtgagatgttgtattgtgtaattccgtggagaatccaagaataataataatgtaaataactatattcaatagaccacttcctccctggagcaatccaagatatagtagttactatcatgtcttgtgaaatttttattgtactgaggctgtttttacagcgggattctaatttcgaattttaagatcctttttaactatccttttgtgtgaacccatgtcatgtgtatacttgtgtctgaaaattgtgggataacatttgacttgtc

SEQ ID NO: 3354 - DNA, 406 bp, Glycine max
cttttgcgaacagctgttagacttgagttgagtcacagtcatcgtctgttcaggatcatattcacgccccctctctctctctctctctctctctctctcttactttgtgtctttctatctctctcttcaattccaaaaccctacccccatccaattccaattcaccctcaatcatgggttctgaaggttccactgtcgtcgttcctaggaacttcagattattggaagagcttgagagaggtgagaagggaattggagatggaactgttagctatggaatggatgatgctgatgatatctacatgcagtcctggactgggactattattggcccccctggtactgttcatgaagggcgtatataccagctgaaattattttgtggcaaggattatccagacaatcc

SEQ ID NO: 3355 - DNA, 428 bp, Glycine max
cgtgcctaagctaggaattcagctcgagagcccatttatgtcttcaatgtagaaacttgatttggacaagctcaagagcattccatcagtgtcttgagctccaaatggagaacacctggatcctgacttttcaccttctcctcctcctgctccatccaaatgcagcaaaaggggccattggtgttggtgttggtgttggtggcagaggtggcataggtgttggcattggcattgggggcagtgttaacaccccagggccctctggatcaaacctcaagagtgccttcacagcactccaggcatggaaatctgccatgaccgatgacccattgaagattctggatacttgggttggtcccaatgtgtgttcctacagaggtgtcttctgtgcaaactctcaggatgataatggaattgtcacaacagca

SEQ ID NO: 3356 - DNA, 922 bp, Glycine max
  unsure (1)..(922): unsure at all n locations
caacatacataggcactgtctctgcttctatttctcactctctgaactctgaacaccgaaaatccgccatggattgtcgcatctatggcgtcacgatccttctcttcctcttcccaaccctcacattctcaatctcacagggtcagataaactcaaactcaatccttgtcgctctgttggactcccattacaccgaactcgctgagcttgtggaaaaagccatgcttttgcagactctggagaacactgtcatgaacaacagcaacaacatcacaatcttcgctcccagaaacgaagccctcgaacgcgatctcgaccccgatttcaagcgtttcctcctcgaaccccgcaatctccattccctccaaaccctcctgttgtcccacatcgtccccaaaagaatcaccaaacccgaattcaaaaccgggtcgacccgacacagaactttagcgtctcaccaccacctcactctccaagccctgaatttgactcactggaatgttgagtcttcccgggttattaacccgaattcggtaacccgacccgacggagtgatccacggcatcgacactctcctcatccctcgctcagtccaagacgaattcaaccgtcgccggaatctgatctccatcgccgcggtgaaacccgaaccctccccggaggtcgacccgcgaacccaccggttaaagaaaccggcgccggcatcgccggcgggttctccgccggcgctcccgatctacgacgcgatggcgccggggccctcgctagctccggcgccagcgccggggcctggggggccccgncaccacttcattgggagaagcaagtaaaagacttcatccacacgcttctccattacggcggttacaacgagatggcggatattctggtaaacttaacgtcactggcgacggagatggga

SEQ ID NO: 3357 - DNA, 393 bp, Glycine max
gcgtcttccctatcgcgcaggagaatgtgttggcttcttctccccgacgaactgtggaggcgaattctggagatcggaatcgagagcaacggtttcagttacaaggatctctgctgcgtctcaatctcatgccgccgccttcatcgcctctcctcggaagaacctctttggaaccgtcttctcttctctgactatccccaatcccaatctcacccttcttcttcttcttcttcttcttcttctaaatctctttacagattaaggtttgagagagacaaaccaattcattcgattctgcattttcaaattaaagttttttgtgtgattttcttgttcagatttttatcatttattggcttaattatatatttggtcacttgattataattaaag

SEQ ID NO: 3358 - DNA, 569 bp, Glycine max
ggttgccttctgttgtgttgtgtgtgcataaacaaaacaaaaacaaagagcgtttcaattgctatctcccacaaacatctatagttaagatctgcgttaaccactaagatctctgaagcagagggcattgtctactgtcacaggcatgggtgaagaaaagaaagacgaaggaaacaaagaagaagccaaagaggaaaagaaggaagaagagaagaaggaggagccaccaccggagatagtgctcaaagttgatatgcattgtgaggcctgtgcaaggaaagttgcaaaagcattgaaaggattccaaggagtggaagaggtgagtgcggatagcaggacaagcaaagtggtagtgaaaggaaaggcagctgaccccataaaggtgtgtgagaggctacaaaagaaaagtggtaagaaagtggagctaatttcacccttgccaaaacctccagaggagaaagaagaaccacccaaagaagaaccaccaaaagaggagaaaaaatatgagcctcctcctgtggtaacagttgtcctaaaagttcgaatgcattgtgaagcatgtgctcaag

SEQ ID NO: 3359 - DNA, 557 bp, Glycine max
gacagagtgcaaagataagagagagagagaaacagaaaacttcagaagaagagcatcaattgctagctccaatatattaccacaccactgcaaaattttctgaagcagagatcattgtccattatcacagaaatgggtgaaaggaagaagaaaagaaagaagagaccacagaggaaaagaaggaaaaagagcctccagagatagtgctcaaggttgatatgcactgtgaagcttgtgcaaggaaagttgcaaaagcattgaaaggatttgaaggagtggaggaggtgactgcagatagcaaggcaagcaaagtggtagtgaaaggaaaggcagcagaccccataaaggtgtgtgagagactacaaaagaaaagtggcaagaaagtagagctcatttcacctttgcctaaacctccagaggagaaaaaagaagaagaaatcaaagaagaaccgcagccagaggagaaaaaggaggagccccctcctgtggtaacagtagttctcaaagttcgaatgcattgtgaagcatgtgctcaagttatacaaaagcgaatccgc

SEQ ID NO: 3360 - DNA, 275 bp, Glycine max
tacggcagacgacagaagggggatggacagaaaggcagggagagagagagagagagagtgcgtgttgggttgtgttgtgagtgcataaataaataaataaaaacaattgtttcaacattcaaattggcatcattaagatctgtgttaaccactaaaatctctgaagcagagggcattgtctactgtcacaggcatgggtgaagaaaagaaagacgaaggatacaaagaagaagccaaagaggaaaagaaggaagaagagaagaaagaggagccac

SEQ ID NO: 3361 - DNA, 246 bp, Glycine max
agaaaagaaagagaaataagagagagaaagttcagaagaggcatcaattgctagctccaatatattacaccactgcaaaattttctgaagcagagatcattgttcattatcacagaaatgggtgaagagaacaaggaagaagaaaggaaagaagagaccacagaggaaaagaaggaagaagagaaaaaggatgaagagcccccagagatagtactcaaggttgatatgcactgtgaagcttgtgca

SEQ ID NO: 3362 - DNA, 387 bp, Glycine max
ttctgactccttcacttttccagtttttgttgcatgaaagtataccataattgaattagtttgcttatttatgcacagtgctcagcggttccagaattggttcaactgtgtgagaatgaaaacctaaacctacgagcaagtgctgtaaagttgttttcttgcttggtagagagttgtgacgaaggcatcatacaggagcatgtgaatcagaaatgcattaatactctactccagatcataaaatctccatctgatgaagaggaaatactttctgccatgggaataatatgctatcttcccgaagttgaccagataactcaatggcttttggatgctggtgcactgccaatcattaaaacttacgtccaaaatggggaaaacagagat

SEQ ID NO: 3363 - DNA, 460 bp, Glycine max
cgaaagacaataagtacgtgtgatgtggtgagtggaacttggacatctagcccctcctcccaccattataactctttccttctttggcccatttgcttctagttctagccccttcctttgttaactcttttgtttattcagaagaatggcatcctggttattgggaaggtcgagtaggatcttgattcatcaacatcaccaccttcacaaaaagtacttgcctttcttgttaggaccatttcttaaccataataatagctcttgttcctcttttccatcaactgaaccatttaggtgccgtgatgcatttccgggtaagaactcatcacccaccctcttccgattctcgcgtcatgaatcaaccaaagctgaggcacaattggaattggagcaagatgttgccaccgaggatgagcctaatcaggtcattgattttcctggagggaaagtgggatttact

SEQ ID NO: 3364 - DNA, 1297 bp, Glycine max
gtccattcctagaaaattggtcacacgcacacacaacactttaagaaaatcatatatttgaaagtaatatacagtggatttttgtagtaaggttattttatgttaatgttaggctaacaacatgtgtttgatgggaaattgattagctattgctctgttaggcatctgaagctgtatattttgatttacaaaattttctgttcaacctcagctagctatttggttatgttactcaaaggatttacatattaatcttctgctgacttctgctgagtacaaaattgaaagcaaacaagttttggcttccaaaagtacaagactacgagttgataagaacatattcatctactgccaaaggcctgaagttgaaccatggattgttcagctgcaagaaaaacacaaaaggctgaccgtgaaaagttaaggagggatcgactcaatgaacaattcgtagaactgggtaacattttagaccctgataggcccaaaaatgacaaagcatccattctgtgtgatacaattcaattgctgaaggacctaatttctcaagttagtaaactcaaagatgaatatgctatgctaaatgaagaatctcgtgagttgactctagagaaaactgatctcagggaagagaaggcttctcttaaatcagatattgacaacttgaataatcagtatcagcagcagctcaggaccatgtttccatggactgcaatggagcattcagttatgatggctccatcatcgtatccatatccagtgccaatggcagtacctcctggtccaattcccatgcagccataccccttctttgctaatcaacatcctgcagtcatctccaacccctgttcaacttatgttccttatttagcccccaataccattgttgaacaacaatccaccctgtacgtatcccctccacttcatccaggtgctcggcccaatgtgtcaggaaaacaagagtccaagagcaagtcatccagggagagcatggctgaaaagaatgaggaatctaatgatgtcactacagaccttgagttgaagactcctgggtcttctgcagatcaggatttatcatctggacaaagaaaatctagcaagttgtcaaggagggaaagcagctgcactgaatggagttcattaggtatgtgttcttcttgtagcgttcaggacagctcatcaagcagtgtggtggcgagcagaaaggataacgaatgataaagtagacaagttagtcaagttcttgtgccttgaagctgctgaagtttttcattgtgcatctgctgcaactctggag

SEQ ID NO: 3365 - DNA, 320 bp, Glycine max
ggaccttcatttgtcattgggaattgattcctaaaattcgacgaaaagagattacagggaaagtgggaaacagtagatgatcccaatgggaattggcaaaattggagatcatcgaccatagatatcaaggtctgaagttgaaccaatggattgtacagctgcaaggaaaacacaaaaggctgaccgagaaaagctaaggagggatcgattcaatgtacagtttgtagaactgggtaacattttagaccctgataggcccaaaaatgacatagcaaccattctaggtgatacaattcaattgctaaaggaccttacttctg

SEQ ID NO: 3366 - DNA, 425 bp, Glycine max
aatacgacagcacgaatccgtcgtttcttcaaccgaaacgacaaggcgataaattaccgtttcgctttcccttctttctttgagaaggcgtcgtaacagaacacgacgactcctgaaggaagtgggcaaaaattgaagataaggatcagtggcagagagagataacgaacaagctagctattggttatgttactcaaaggatttacatattaatcttctgctgacttctgctgagtacaaaattgaaagcaaacaagttttggcttccaaaagtaccagactacgagttgataagaccctgataggcccaaaaatgaccaagcaaccattataggtgatacaattcaattgctaaaggacctaacttctcaagttagtaaactccaagatggatatgctacgctaaatgaagaatctcgtgagtt

SEQ ID NO: 3367 - DNA, 1338 bp, Glycine max
tctgttctcgcgttgggccacgcgcccgggttttttcagcatatgtctcaaaggcccacggttcctcactcctcttccatagcctgcggccttcactctcatctcctggtctccagtgagatgaaccctagctccaattggtccctttaatcaattacctcttaattagtaattacttaatctcaattagcctttcactctcccacacaacaacatcatgggcgtcaaaggttttgtcgaaggaggcatcgcttccatcattgcaggatgttccacacacccacttgatctcatcaaggtccgcatgcagcttcagggcgaaaacaatttgcccaaaccggttcaaaatctccgacccgcactcgccttccaaaccggttcgaccgtccacgtggcagcggctattccgcagacccgcgtgggtcccatcgcggttggggttcgcctcgtccagcaagaaggccttgcggccttgttctccggcgtctccgccactgtcctccgccagacgctctactccaccacccgtatgggcctctacgacgtcctcaagaccaagtggaccgactccgtcaccggcaccatgccgctcagccgcaagatcgaggccggtctcatcgccggtggcatcggcgccgccgtggggaaccccgccgacgtggccatggtccgaatgcaggcagacgggcgcctccctccggcacagcggcgcaactacaagtccgtcgtggacgccatcacgcgaatggcgaagcaagaaggcgtcactagcctgtggagaggctcatcgcttacggtgaaccgcgccatgctcgtgacggcgtcgcagctggcttcctacgaccagttcaaagaaatgattctcgagaacggcatgatgcgcgacggcctcgggacccatgtcacggcgagcttcgcggcggggttcgtggcggcggtggcgtcgaaccccgtcgacgtgatcaagacgagggtgatgaacatgagggtggagcccggggcgacgccgccctacgccggcgcgttagattgtgctctgaagactgtgcgcgcggagggtcccatggcgctttataaggggtttattcctacgatctcaaggcagggaccgttcactgtggtgctgttcgtgactctggaacaggttcgcaagttgcttaaggatttctgatgaggatgatgacgagaagatgtatgctactttccttttcaataagatgctttttctgtttgtgttatgttttaatagtactagtgatgtagttctaggatggcaattttgttattctattaatcaatgagaagtgctgtttattctccgaaaaaaaaaaaaaaaaa

SEQ ID NO: 3368 - DNA, 519 bp, Glycine max
ccctcgagccgcgtttattcagcatatgtctcaaaggcccacgattcctcactcttcttccatagcctgcggccttcactctcatctcctggtctccagtgagatgaaccctagctccaattggtcccattagttacctctttcctgcatctcatatatcccattctttctcattcacacagcatcatgggcgtcaaaggttttgttgaaggaggcatcgcttccatcatcgcaggatgttccacacacccacttgatctcatcaaggtccgcatgcagctccagggtgaaaacaatttgcccaaaccggttcaaaatctccgacccgcactcgccttccaaaccggttcgaccctacacgtggcagctgcagttccgccgccccgcgtgggccccatctcggttggggttcgcctcgtccagcaagagggcctcgccgccttgttctccggcgtctccgccaccgtcctccgccagacgctctactccaccacccgcatgggcctctacgacgtgctc

SEQ ID NO: 3369 - DNA, 466 bp, Glycine max
ctttctcttctctgaatccatttactttgtgttgaattcaatatgagtcttaagggatttttcgagggtggtgtcgcttccatcgtcgcaggctgcaccactcacccactcgacctcatcaaagttcgaatgcaacttcaagaaacccacactctccgcccagcctttgcctttcacgctcccactccaatgcctcctccgccgccctccggccccatctccgtcggcctccgcatcgttcagtcggagggactcgccgctcttttctccggcgtctccgccaccgtcctccgccagacgctctactccaccacccgcatgggcctctacgacgtcctcaagcgccactggaccgaccccgaccgcggaaccatgcccctcacaagaaaaatcacggccgggctcgtcgccggcgggatcggagccgccgtgggcaaccccgccgacgtggcgatggtgcgaatgc

SEQ ID NO: 3370 - DNA, 314 bp, Glycine max
gccacgcgtccgctcaaaggcccacgaggcctcactcttcttccatagcctgcggccttcagtgctcatctcctggtctccagtgagacgaaccctagctccaattggtcccattaggtacctcggtcctgcatctcatatatcccattctttctcattcacacagcatcatgggcgtcaaaggttttgttgaaggaggcatcgcttccatcatcgcaggatgttccaccacccgcatgggcctctacgacgtgctcaagaccaagtgggccggctccgtcaccggcaccatgccactcggaaaaaagatcgag

SEQ ID NO: 3371 - DNA, 447 bp, Glycine max
gggttaacaataaatgaataagagagagagagagaataatgtgtatgtgtatgtagtgtggccactctggaagagaagagaaccaactcaactcaaaactcaaattatttggtttctgctctgtaaattccctctgctgcttaacaacatccatcttctccaaaacaaaaacaaagaaatatctaaaatctggaacttacgctgatccataatttgttgcttttcttccttcgtacaatgtcagaactttagcatcacctttttgcctttccttcttactaactcagataactaccgccaccatgacttcaaaatctagacccaatctatctgaaaattccaacaaaggatcgatggcaactcctagagccagtaaagctagcaaagttgtatccaaatcagaatctgagtcaccatcaccactgcaaaattcgcgactttctgtgg

SEQ ID NO: 3372 - DNA, 428 bp, Glycine max
taccacgcgtccgcccacgcgtccgcccacgcgtccgcatgattttccttggttctcttctctcgatcgggtgtgtacgtaattaacataacatgtttcgataaccacacaccccttgtgtcatggcatgatgatgatgatgatgagaccagtaacgtggccctgataaagttttcaaagtctaagcatcttcttccttgttgtcatgcatgcctgatggaatcgacgacgcaaaagaacaaaagcaaaaagtcatcgctgttgatgcgtctcaaacccgttatgggcttcgacgactctattatgcccaatcgcaatggggatgacccagttttgtcgtatctcgcgatcgctaacaagaacggcgctgttttgccggccatgttgtcgtcgatgttcggaggggcggaggacctgggagaaaaatg

SEQ ID NO: 3373 - DNA, 1844 bp, Glycine max
gattgcttgcacattgtgttttgtgcagttagaagaaaacttccttcaacatgttcattctttaattcaaaattcagattccgatttttggagaaatggaaggtttctggttcattctggcagtcggtttgtttcacacaaagatgggaagattcgcatatgcaaaccatggagaacatggaagtctccagagttgatatctgtgtcccctttggcaattgtgagtggacaggaaacctctatttcattgaagggtagaaacctgtcaactccaggcacaaagattcactgtacaggtaccggctcttacgcatcggcagaagtcataggttctgcacattctggtgtgatgtatgataagataaagttgagtgcttttaaagttcaggatgtatcgcctggtgttctgggtcgctgttttattgaggttgaaaatggtttcaagggcaacagttttccagtgataatagctgatgagaccatttgcaaggaattgagaccacttgagtctgaatttgatgaggaggaaaaaatatgtgatgccatttcagaggagcatgaacatcattttggaaggccgagatcaagggaggaggctttgcacttcttgaatgagcttggctggctgttccaaagagaaagattctcttatgtgcatgaggttccatgttattcgcttgacaggttcaaatttgtactcacatttgctgtggtaacaaactgttgcatgctagtcaaaacccttctggatgtgctggttggtaaacacttgcaaggggaatggttgtcaacggggtcagtggagatgttgaatgcaatccaactcttaaatagagcagtgaaaggaaagtacgttggcatggttgatttgctcatccactattctataccaagcaaaaatggtacatccaggaaatatgtatttccaccgaatcttgagggtcctggtggtattacacccttgcacttggcagcatgcacatctggttctgagagtgtcgttgactctttaacaagtgacccacaggagattgggttgaagtgttgggaatcccttgtggatgcaaacggacagactccacatgcctatgccatgatgaggaataatgactcttataatgcgctggtcgcccgtaaacttgctgacagacaaaggggtgaaatttcggtaacaattgcaaatgcaatagagcaacagtcactgagagtggagcttaagcaaaagcaaagttacttagtcaaacgaggtcagagttcttgtgccaagtgtgcgaatgcagaaattcgctacaacagaagagttccaggttcacatggtttgcttcaccgcccctttatttattcaatgctagctgttgcagctgtttgtgtatgtgtttgtgtgttcttccgtggtcgccctttcgtaggctcagttgctcccttcagttgggaaaatctggattatggcacaatgtaatgctgctggtgggatacccaattgttcgtttttttcccctcatatggaaaaactgcttctgtgggaaaatggggaattttgtgtcaagagcccaatgtaaacatatcatgtggtgatgtagagttgtggagagatgttaggcagatccgggagaaacaacaaagtatggctgccttgtgtatagagattctgacttgaatgctgcatattttctttaatgcctgagtttaaggatataacaagctatgacctgaatgtttatcgattggtgttggaagttctgagtaggggaaatcttcagcttttttggcctgattaaacttgacattccaaatttaagttggaatggaatgtggaattgtggccacaaggcacaaacaattat

SEQ ID NO: 3374 - DNA, 480 bp, Glycine max
atttccaccaaatcttgagggtctctgttgttattacacccttgcacttggcggcatgcacatctggttctgagagtgtagttgactctctaacaagtgacccacaggaggtaagttttttctccctattctagtactatatgccttatggaagaaatgacacgtcagttgttgtcctaagtaacagaaggaaaaaaaaaaattgggttacacagacacaggttcctgtggtagttattgtgggtaaatatcacttgttcttttccttgatggcagtggtactggggattttctattttggacctcaagtaaatgcatatttctctagctgtgatgtgtctctactagtcctggccatgtatttgtgttgttttcttgtttttaaggaaagggggcaaggggagatggcatattgaaaactaaaatatataatagttgaattactgtgttgtttgcactttagcatactttttaccctca

SEQ ID NO: 3375 - DNA, 340 bp, Glycine max
gttgtttttgtatgtgtttgcgtgttcttccgtggacgcccttttgttggctcagttgctcccttcagttgggaaaatctggattatggcacaatgtaatactattggattaggagagattcgcattttggataaagataatggaaggcattaaccaggcgggaaacccaattgttgcttgttttaccattacatggcaaaactgcttctgtgggaaaatggggcattttgtcacaagagccctatgtaaacatatcatgtggtgatatagagttgtggagatgtttggcagaccctggggaaacaacaaagtatggctgccttgcgtatagagattctg

SEQ ID NO: 3376 - DNA, 544 bp, Glycine max
gcatttgagattctttcgatcagctatgaagtaaagagaagggcaaggagagatagagagggaagaaaaatgagtgtatcattgactgtgatgaccttcaatctccatgatgatgagccacaagacagtcctaattcgtgggagaagagaagggatatgtgcataagcgttattaccagttactcacccatcatcctctgtacccaacaaggagtgaaagcacaattggattttctccagcagggtttgccaggttatgatcaatttgggatatcacggatagggccccaagacactactgaccagcattgcactatcttctatgataaggaaaaggtcgagcttctagaaggtggaaccttttggttgtctgagtctccctctgtacctggaagcatgtcatggggttctgaagttccttgcattgcaacatgggctatttcaactgaaaggtgttgagcctcctggattctcatttcagatagtaaacacaaatatggatgagtttagtcctcgtgcccgtagcgaagtgctttacttacat

SEQ ID NO: 3377 - DNA, 591 bp, Glycine max
atcaagttgacaatgacattctatctttgcttgattgtttctttgaagatgatgacacattggctgtgaaagaaaacaacagaattgagaacattgatgatcctgatcaggcaaacaatgccgatggtgcactgtgttcagatccaaatgctatttttgaggagttaggagaccttaacagcttggttggattgggtgaaggcagtttttcctgtggccagaaaaatgaatatactacaagcgaaatgctttatactgttgatatattcgggtcttgtgaccatgacttcttggagttgcttgacctagtgacaccgcagctctggctgaataaacatggaagtggtagccaagataagtaaggctaaaaaattgagggaagtatcacagcagattgattgaactatagccccaactacctatccttgatgagagtaaacaaaggattctcttcctgttcttcatttaaaaaccatcatggcaccagttacttcgcatcatatcaactgacaagaatgttgattaaaatctagtgatgttctttgattgtgttatgtttgattaaaatctaattatgctggaagttgttcc

SEQ ID NO: 3378 - DNA, 1092 bp, Glycine max
  unsure (1)..(1092): unsure at all n locations
ggcacaaaacaaaaaccaccacactcttattgttttcttcatatttcttccttgtcactgcccgtgtgtcgccgccatggccaccgtcaccacccaagcctccgccgcaattttccggccatgtacctcgaaatcgaggtttttgaccggctcttccggtaaacttaaccgggaagtgactatgcggccaatggggtgccctccttctgcctctttcaaggttgaagccaagaagggagagtggttacctggcttggcctccccaacttacctcaatggcactcttcctggtgacaatggatttgaccctctggggctagctgaggacccagagaacttgaggtggtacgttcaagccgagcttgtgaatggacgttgggccatgttgggtgttgcaggaatgttgcttcctgaggttttcaccaagtttggaatcatcaatgcccctcaatggtatgatgctgggaaatcagagtactttgcatcttcctcaaccctcttcgtgatcgagttcatcttgttccactacgtcgagatccggagatggcaggacatcaagaaccctggctctgtcaaccaagaccccatcttcaagcaatacagcttgcccccacatgagtgtggataccctggtagtgtgtttaaccccttgaactttgcacctactttggaggccaaggagaaggaacttgccaatgggagattggctatgttggcattcttgggattcatagttcaacacaacgtgacaggcaaaggaccatttgagaacctcttgcagcacctctctgacccgtggcacaacaccatcatcaatacaattcgtggctactaagtttgtatccaatgacatggataagcctgtgtccttctcgtgtaatcctgaatggatgaattttgagagtgatttgggcatgattgttatgatccgtctattttcatgtacagaggaactacgatggttttacattgttatttagactgtccatcaatcagtaatcaagcatgatactttctaaaaatttcatcaaaaattgcttccgttttatnnnnnnnnnnnnnnnnnnnnnnnnnnnnnnnnnnnnnnnnnnn

SEQ ID NO: 3379 - DNA, 1587 bp, Glycine max
cctcgagccgattcggctcgagacagatctagctgttagcatagaggcgaacagtctggaagacaagatcagctccctctgcacactgtgcttctaccactctttcttcgaagcttattggtggagagaacagaattttttgcacccatggttgtggatgctgtaatttcaattggacatgacgacacgttgaacatgattggcctaaagaaggttcctggtggtaccatgcgggactcatttctagtaaatggtgttgccttcaaaaagacattttcatatgctgggtttgagcaacaacccaagaagtttctcaatccaaaaatactattactaaatgttgagttggagctaaaatctgagaaagaaaatgctgaaataaggttatcagatcctgcgcaatatcagtcaatagttgatgcagaatggaatattatttatgacaagttggataaatgtgtcagcagtggtgccaaagttgttctttcacgactggctattggtgatctagctacacagtattttgcagatcgagatattttctgtgctggtcgtgtagctgaagaagatctgaaaagggttgctgctgcgactggtggaaccgtacaaacatctgtgaataacattattgatgaggtccttggaacttgtgaagtttttgaggaaaggcaggttggaaatgagaggttcaatattttcagtggatgttcatctggccaaacagccaccatagttcttcgtggtggagctgatcagttcatagaggaagcagagcgaagtttgcatgatgcaatcatgattgttaggagggctttgaagaattcaacagtggttgctgggggaggtgcaatagatatggagataagccggtatctgaggcagcatgcacgtacaatagctggaaagtctcagcttttcattaactcctatgcaaaagctcttgaggttatacctagacaattatgtgacaatgccggatttgatgcaactgatgttctgaataaactaaggcagaaacatgcgcttccctttctggtgaggggggaccatatggggtggacatagccactggtggaattgctgactcatttgctaactttgtctgggagcctgcagttgtgaagatcaatgctataaatgctgcaacagaggctgcctgccttatcttaagtgtggatgaaacaattaaaaatcccaagtctgagagtgcacaaggagatgctgctgcaagtgccatgggcagaggtcgtggaggtggattccgtggtcgtggacgaggaatgcgaagatgatgatgagaagtgtattctacgggttgagtgtctgttcattgtctgtctaattcgtgaggccaatgcatgcttgtgtcttctacttggtgttgctggaagcatgccgatttttggacctacaaatcatgaaatgaaaatgtaatggagattctgggaacatcatctgatcaacctaagatttgcagatagcaattttcaagcattgtctttctgacgatcgtttcgtacatttggaggggttaaaactatcgcatggctgtggaggacttgagcttcgtgtgaaattttgcatctt

SEQ ID NO: 3380 - DNA, 1129 bp, Glycine max
ggatcggaagagttgctccactaaaaataccttgattaaatatttatatagtgaatagcagcaaagtggcaggagcttgcgtctgcaaattctatgttgtttgatttgcgtgagtgaattgggaagatgctgtgtctgggtcgattcggcggggtctcttacggttggagttggaatcggaggagggacaacaccattaacaggcccagatggcgtttgatggcccaggaatcaccctctctcgactcagacaaaaccgccactgctggattctgcatcattgaaggccccgaaactgtacaggattttgccaagatggagcttcaagaaattcaggacaacattcgaagtcggaggaacaaaatcttcttacacatggaagaggttcgcaggcttaggatacaacaaagaattaaaaacgctgaacttggaattttaagcgaagagcaagagaatgaacttcctaacttcccatcattcattccattcttgcctccattgacttctgcaaacctcaagcaatattatgcaacctgtttttctcttattgccgggataattctttttggtggcctccttgcacctagcttggagcttaagcttggactagggggcacatcttatgcagattttattgaaagtgtgcatctgcctatgcagctgagtcaggttgatcccatagtggcatcattctctggaggagcagttggagtaatctcggcattaatggtggttgagataaacaatgtaaaacagcaggagcagaaaagatgcaaatactgtcttggcactggatatcttgcatgtgctcgctgttcaagcacaggagcacttgttctgattgaaccagtatccccagtcaaaggtggagataagcctctttcccccccaaaaactgagagatgttcaaattgctctggatctggcaaggttatgtgtccaacatgtctctgcactggaatggccatggcaagcgaacatgatccccgaattgatccttttgattagaggttcaataattatagttatcccgagcagttataagaaaaactagtattttttttgttgaagtggtatttgtttccgagcaggttcaataatttgaaagtgatatttgtttccgtggcgg

SEQ ID NO: 3381 - DNA, 495 bp, Glycine max
ttatatatccgattaaatattcgtatctggtctgcaacctaaaattctatgtgagtgaattgggaggatgctgtgtctgggtcgattcggcggggtctctcactacccaatcaaatccggttggagtcggagggactacaccaataacaggcccagatggtgtttgatggccgcccaggaatccgactcttcttttgcaccctctcttgactccgacaaaaccgcctctgctggattctgcatcattgaaggcccagaaacggtacaggattttgccaagatggaacttcaagaaattcaggacaacattcgaagtcggaggaacaaaatcttcttacacatggaagaggttcgtaggcttaggatacagcaaagaattaaaagtgccgaacttggaattttaaacgaagagcaagagaatgaactccctaacttcccatcattcattcctttcttgcctcctttgacttcagcaaatctcaagcaatattatgc

SEQ ID NO: 3382 - DNA, 513 bp, Glycine max
gaattgggaggatgctgtgtctgggtcgattcggcggggtctctcactacccaatcaaatccggttggagtcggagggactacaccaataacaggcccagatggtgtttgatggccgcccaggaatccgactcttcttttgcaccctctcttgactccgacaaaaccgcctctgctgggtcccttttctattctctctctctctctctctcttttttcctttcttcattcttccattctattctatccgcagattctgcatcattgaaggcccagaaacggtacaggattttgccaagatggaacttcaagaaattcaggacaacattcgaagtcggaggaacaaaatcttcttacacatggaagaggttcgtaggcttaggatacagcaaagaattaaaagtgccgaacttggaattttaaacgaagagcaagagaatgaactccctaacttcccatcattcattcctttcttgcctcctttgacttcagcaaatctcaagcaatattatgc

SEQ ID NO: 3383 - DNA, 715 bp, Glycine max
  unsure (1)..(715): unsure at all n locations
cccacgcgtccggatctttcttcagtcatctgttttgcactcccagccaaaatcaacggtaggaacccctgcctatattgcaccagaggttttgtcaagaagagaatatgatgggaaggtcgcggatgtttggtcttgtggggtgaccttatatgtgatgttggttggagcatatccttttgaagacccagaagacccaagaaacttcagaaaaacacttcagcgaattcttagtgtccactattcaattccagactatgtacgaatcagtaaagagtgtaggcaccttttgtctagaatatttgtggccaacccggaaaagagaattaccataccagagattaaaatgcacccttggttcctaaagaatttgccactagaatttatggacgagggcgaaggggtgttgcagaatgatgatcatgtgaatgaagagtcatctgaaatcactcaaagcattgaagaaatactggccatagttcaagaggctaggaaaccgggtgagggcccaaaagttggtgagcaatttgttgggggcagcatggacctcgatgatattgatgcggatgctgacatcgatgacattgagacaagcggtgattttgtctgtgcattgtgaatgatgatgcttgcactttgcacactatttctccctcaaaagcagtttaagataagatgttgttccttgacgagatagatanggaagaatcaaaca

SEQ ID NO: 3384 - DNA, 1993 bp, Glycine max
ccctcttgtccgcccacgcgtccgcccacgcgtgcgcccacgcgtccgagaaacagtaagagccaaggagaaaagaaaaaaaaaaagaactggactccttcaattagtgcattgtttcttttcttcaaatggtagcaagaagacattgttaatttgagagatggcgagttacgaggctattaagaactttgatgatgatgatgatgatgatgatgatgtggagatggcactcccccatagccagatctctgaatcaagatctgccactgtttcttcccccattggccaaactaccccgcttcacattcacaacattattgaggaacaacgcattatctccaggcaccaacctcaacccaaatctccgcgtctggtttctcttgatgtttttcgtggtctcaccgtcgcgctgatgatacttgttgatgatgctggcggactcattcctgcgctcaaccattccccatggaatggtttaacactagctgattatgtcatgccatttttcctatttattgttggtgtttcgcttgcactcacatacaagaaactgtcttgcggagttgatgcatctaggaaagcaagtttacgggctctaaaacttcttgtgttaggccttttccttcaaggaggttatttccattcgcgtgaatgatctgacatttggagtggatttgaaacagataagatggatgggaatactacagagaattgcagtagcatatttggttgtcgcactgtgtgaaatttggctcaagagtgatgatactgttaattcaggaccatccctgttaaggaagtatcggtaccagtgggctgtggctttgattctttctttcctttatctttgcttgctatatggattgtacgttccagattgggtgtatcaaattcaaacagaaccttctgcagagccaaagacattttcagttaaatgtggagtaaggggtaacactggtccagcctgcaatgtggttggaatgattgatcgaatgatattgggtatacaacacctgtacaagagaccaatatatgcgcggatgcctgaatgcagtattaattctcccaactatggaccattacctcctgatgctcctgcttggtgtcaggccccttttgatcctgaaggactcctaagttcagtgatggctattgtcacctgcttgattgggttgcactatggacatattattgtccattttaaggaccacagagtgagaatcatatactggatgatcccaacctcttgtcttttagtttttggccttgcgttggacttatttggaatgcatataaataaggttctctactcgctcagttacacatgtgtcactgctggtgctgcaggcgtcctctttgtcggaatatacttgatggttgatgtctgtggatgtcgtcgcatgactttggttatggaatggatgggcatgcatgcattaatgatttatatccttgctgcttgcaatgttttcccaattttccttcaaggattttattggggaagtcctcacaataacattctcaagttaattggagttggcacttgaagaaaggcacataaacatgctattggataaaagattatatgcagtaagactgtgaacatgttttactgtaaaagaaatggctacccgagtttttggagctaatcttttgatcaagaacaagaacgggtgtagcatattcttctaatctcttgatgacgtcacctgcatggatgatggatatagtttagagttcactacatctcttgatggcattaccttttctatatatggagcagcgtttgtttataatagcaccactgcgatataatttgtacttttactttatatccttgaaatgatagatttcaagagagtaagcatcattggacacgatacgatattaatgtaaaatttagttttatattttatttattgttactattagcctagaaatgtcaatttcttctgcatgagctggttctctattattggatctagtaaaactt

SEQ ID NO: 3385 - DNA, 646 bp, Glycine max
caggcatcctctttgttggaatatacttgatggttgatgtatgtgggtgtcgtcgcatgaccttggttctggagtggatgggcatgcatgcattaatgatttatatccttgcggcttgcaatgtttttccaattttccttcaaggattttattggggaagtcctcacaataacattctcaagttaattggagttggtacttgaagagaggcacatacacatgctcgtggataaagattatatgcagtaagacagtgagacatgttttactgtaaaagaaattggctaccacgcggtgtttattgattattacccgagttttggagctaatcttttgatcaagaacaagaacgggtgtatcatattcctctaatctcttgatgacgtcacctgcatggatgatggatatagtttagagttcgctatatctcttgatggcataacctttctatatatggaaagcagcttttgtttataatagcaccactgcaatataatgtgtacttttacttcatatccttgaaatgatttcaagagagtaaccattggacacgatattgatgtaaaatttagccttagattttttaatttattgttaaaattagaaaagaaatgtcaaaaaaaaaaaaaaaaagggcggccgccga

SEQ ID NO: 3386 - DNA, 457 bp, Glycine max
tcacgcgttctggaaaaaagactccttcaactagtactgcattctttcttttcttcaaatggtagcaagaggcatcaagagcaaaagacattgttaatttcggagatggcgagttacgaggctattaagaactttgatgatgatgatgatgaagatgtggagatggcactcctccataaccagatctctgaatcaagatctgccactgtttctcccaccattgcccaaactaccccgcttcaccttcacatcaacaacattattgaggaacaacacataatcgcaaggcaccaacctcaaccccaacccaaatctccccgtctagtttctcttgatgtttttcgtggtctcaccgtcgcgcttatgatacttgttgatgatgctggcggactcattcctgcactcaatcattcaccatggaatggtttaacgctagctgattatgtcatgccatttt

SEQ ID NO: 3387 - DNA, 435 bp, Glycine max
gcatgcaggaccacagagtgagaatcatatactggatgatcccaacctcttgacttttagtttttggccttgcgttggacttattgggtatgcattctttttaactgtttcctgcccaggaccattgttccactggcatttatattgcttgttgagattgacatggttgttcttgtaggaatgcatataaataaggttctctactcgctcagttacacatgtgtcactgctggtgctgcaggcgtcctctttgtcggaatatactcgatggttagatcctaatttctcccttgtagaagagctttctaactatatagacaaaaagttattgctctatgtactggcatcgacttaaatgttacatgatttccttcttttgataattatacaatttttagttctcatgaaatttacttcagcatagcatcattcttg

SEQ ID NO: 3388 - DNA, 520 bp, Glycine max
catttggtccacccaactgcaaataacaacaaaagcatctgtcatgtcctcagaaaaattattcagagttgaacaagttagaaggctaacgttctcaaaccagcatcctccattcatttacgaataagattgattgccctcatggatgcaggactcaagaatgtcctctccaaataaccactagcattatatccaaaaagcaacattaacttccaagaacaataaacaattcatggtccaccagccactgaatgagaataataagcacagtgaattttgactatgaagttatgtgcattttcctggaaggatttggatcattcaggtcaagaacagagattcattcgaactattttgactatgaatagaaatattattataaataaaaaattatcagacaaaagtaaagctgtgtttagattaagtaccttcccaagctcataaagcctttccacatattctaagagacgagccagtggcaaggctttatgagctgtgtttagattaagtaccttcccaa

SEQ ID NO: 3389 - DNA, 1220 bp, Glycine max
  unsure (1)..(1220): unsure at all n locations
gcgtccgccttttttttgtggttnctagtttaggcttgctctcattccatccccngggatttcttcagtttgggccaatcttagtttgttttctttagtttcaaaggcccattttttgttggattacttcagccggtcctctgagattgggaagcattggtggctagctaagcgaagctaaaaccaaactcttcagcagtttgtttttgcttagcttcttcttctgcttttgctttctccaccaccacaaccaccatgtattctgccactgcctccaacactttcttccttctctcttgtttccttctcttctgtctcctctcagctccttcctgtgtttccatgttctctggtattgagacaggagatttagaaaaaagagatgatttgtttccacagattctaagagacgaggcagtggcaaggctttatgagcttgggaaggtgagtgatgctagcggttatttggagaggacattcttgagtcctgcatccatgagggcaatcaatcttattcgtaaatggatggaggatgctggtttgagaacttgggtggaccaaatgggaaatgtacatggtcgcgttgatggtgctaatgcaaatgctgaagctttattgattggatctcacatggacactgttgttgatgctgggatgtttgatggatcactaggaattgtctctgcaatatctgccgtgaaggctatgcatgtcaatggaaagctgcaaaagctaaagcgccccgttgaggtgattgcatttagtgatgaagagggtgtcagatttcaaactactttcttgggcagtggtgctatagctggtattttgcctggcacaacattggagatatctgataagagggaggtgatgattaaagattttcttaaggagaactcaatagacattacagaagaaagtcttttaaagctcaagtatgacccaaagtctggttggggttatgttgaggttcacattgagcagggtcctgtgctagaacacgttggtttcccacattgagtgtggttaaaggcatagctgggcagacacgattgaaggttacagtcagagggtcacaaggtcatgctggaactgttccactgtccatgcgccaggatcctatggcgtgctgctgcggaacaaattgtagtcttggaaagcctctgtaaacaccctgaagtatacctttcttatgatggtcattgcagtgattcaacagtgaa

SEQ ID NO: 3390 - DNA, 465 bp, Glycine max
gggccaatcttagttagtttatctttagtttcaaaggcccattttttgttgtattaatgcaggcgtttaacatttataagtttggaaagtaccatatcatctaaaagtctagacttattagactcaagcattctcaacctaaatacattttaagcccctggtcattttttcatttttcttttttcgtggttaggcttgatctcaagccatttttttgtatttcttcagtttgggccaatcttagtttgtttttctttagtttcaaaggcccattttttgttggattaatacaggcgtttaacatttttaagtttggaaagtaccatatcatctaaaagtctagacttaaaaaagtctagacttattagactcaagcattcccaagcccctggtcattttttcttttctcttttttcgtggttaggcttgatctcaagccatttttttgtatttcttcagtttggg

SEQ ID NO: 3391 - DNA, 762 bp, Glycine max
catattctaagagacgagccagtggcatggctttatgagcttgggaacttgggtgggccagatgggaaatgtacatggtcgtgttgatggagctaaagctttattgattggatctcacatggtacatgcataggctaaaatcaaaagatctctcaatatgccacaatatgatcctactgggatcttgtataatgaagccgaatgctacaaactgaaatgatgcttgcgctgtgacatggcccaactttaccgatgtatacccttttgcaccgattgaccaaaactaaaggttatcagcatatctggtattaggaaatgttcaacaatttgagtgaactgttgctggacaaattctccttacatagccgactggtggttattcgtgcacattatttaatttgccaattgtagatatcctcatttgtgccatttagtggagtttcaagctgaagctcttgaccgattgacaagtgatgatcctggaggaaaggtatttcaagtttatatgttgtgcattaaaatgaaagaatgcacgtcagaaggaaaaaaaaaactagatttattttattctattattcttatgggaaacaagatcaaattaattaggacccaaacctaagtttactgcatcttagactactaggaaaataatttataattttctgcaaatccttgtggattgtttaagcaagaatatgatttaattattcttactaatgtatgtaatgttaggccaatatatgtaaaaatagggttctccag

SEQ ID NO: 3392 - DNA, 506 bp, Glycine max
gtcacgggctcgttggtgagccgccaccacacttccaccacaaattcatattcattccctgtgcttcattcagtcccttgagattgggaaccattggtggctagctaagcgaagctaaaaccaaactgcttcagcagtttgtctttgcttagcttcttcttctgcttttgctttctccaccaccacaaccaccatgtattctgccactgcctccaacactttcttccttctctcttgcttccttctcttctgtctcctctcagctccttcctgtgtttccatgttctctggtaattgattgtctctcttcttatttattgctggcctggttcttcttttttctctttcattgttgtctgtctcagaaacataaaagaaaagcaaaggtttttgagtttttgggtggcgtgcaaagacacccttttaaagattcagattcctttttcatgatgttagcacaagatctcctttttttcttctctctctcagatttcgatgcaacagca

SEQ ID NO: 3393 - DNA, 791 bp, Glycine max
  unsure (1)..(791): unsure at all n locations
cggacgggaaccgaatatgctcccagctcaactcttgtcccgattctcgaggcaacttttcccttctgtgctaaatcaacggccacatttcatcttctaatccaacggctgcggttcgtcctcttcctccccaaaattagggtttctctttcagtctcttcttctgtcaatactttctcgtattttcccctcttctttctctctctcgtgttatccgcttcagttttctcgggaaaatcatggtgaaaggtccaggcctctactctgacattggcaagagagctcgcgatcttctgttcaaggattatcagaatgaccacaagttcaccatcaccacttacacttccaccggagtggaaatcacttcaactggagtcaggaaaggtgagatatatttggccgatgtcagcactaaggtgaagaacaagaacatcacaactgatgtcaaagtggacactaactcaaatctgcgtacaatcattactgtggatgaacctgcccctggactcaagacaatttttagctttaattttccagatcagaaatctggcaaggtagaactccagtaccagcatgagtatgctggaatcagcaccagcattggattgacagcaaatcctgttgttaacttctctggtgtggttggaaataatttggttgccgttgggacagatctttcatttgatactgcctctgggcactttaccanatacaatgcanggctgaacattactcatgctgaccttattgcatctctaactctgaatgataaggtgacnnaccttactgct

SEQ ID NO: 3394 - DNA, 1425 bp, Glycine max
ctcgagccgaatcggctcgagcaaaagttatgaagcaacttagtcgcctttttccaaacaaagtgaccatacagttgcctcaggacgaggctttactctctgactggaagcagcagttagattgtgacattgaaactatgaaagctcagtccaatgttgtcagcattcgcttagatcttggcagaattggattggattggcctgaccttgagactctctgcatcaaagaccacaccctaacgactgagagtgtggagaagatcattggatgggctataaggtaccaatttatgcattcatctgaagcttcaatcagagattctaagcttgtaatatctgcagaaagcattaagtatggacataaaattctacagggcattcaaaatgagaacaagaacatgaaaaaatcacttaaggacgtggttactgagaatgaatttgagaaaaaactacttgctgatgttattccgccaaccgatattggggtcacatttgatgatattggagctttagaaaatgtgaaggacaccttgaaggaattggttatgcttcctcttcagaggcctgagttgttttgcaaaggacagctgaccaagccttgcaagggaatattgctttttgggccccctggcacaggaaaaacaatgcttgcaaaggctgtggcaactgaagctggagcaaatttcattaacatttcaatgtccagcattacatccaagtggtttggtgaaggagaaaaatatgtcaaagcagtcttttctctggccagcaaaattgctccaagtgttatttttgttgatgaggttgatagtatgttaggaagacgtgaaaatcctggtgaacatgaggctatgcgaaaaatgaaaaatgagtttatggtaaattgggatggtttgcgaacaaaagataaagagcgtatacttgttcttgctgctacaaatagaccttttgatcttgatgaggctgttattaggagacttccacgaagattgatggttaatttgccagatgctccaaacagagaaaaaattgttagtgtcattttagcaaaagaagaattggcacctgatgttgatttcgaagcaatagcaaatatgactgatggatattctgggagtgacctaaagaatctgtgtgtcacagcagctcactgtccaatacgagagatcttggagaaggaaaagaaggagagaagcttagcattgactgagaaccaaccattacctcagttgtgtagcagtaccgacattcgtcccttaaagatggaagattttatatatgcacatgagcaggtttgtgttagtgtatcatcggagtcaacaaacatgaatgaactactccaatggaacgacctttacggagaaggtggatcaagaaaaatgagatctttgagctatttcatgtaaagcttcctgcatagcattt

SEQ ID NO: 3395 - DNA, 422 bp, Glycine max
gttcttaaagcagctatggccataaatgctcaaactctatcagaaatggagatccctgaaagctatattgaatccctacccaagaatggaagatcaagtcttggggacttgatctacaggagcattacagatgattttttcgatcctgatcagctcctatcagccatggacatgtcatcagaacataaaatcgtagatctcaaggacagaattgaggcatccattgtgatttggagacggaagatgaaccaaaaagatagcagcaaatcagcttggggttctgctgtgagtatggagaaaagagaaatctttgaagacagggccgaaaccatcttacttctcctaaagcatcgttttcccgggactccccaatctgcattggatataagtaaaatccaattcaatcgggatgttgggcacgc

SEQ ID NO: 3396 - DNA, 1171 bp, Glycine max
atcagagcctcttagattatctcccacttcacagccactcacacataaaatctctccaagtgctgcatttgcgaattgaacctcaaaatcagtctctaatatttttctcactgtcttgtctctccagagaactgtatagagagagatggcagctgcaacatctggtgctgtgttaaatgggttgggatcttccttcttgagtggaggaaacaggagccaaacccttctggccactgctattggaggcaaagttggtgctgctgctgttactgttagtcctagaagactcattgtggtagctgctgctgcaccaaagaagtcatggctccctggtgtcagaggtggtggcaacctcgtcgacccagaatggcttgatggatcgctaccaggtgactatggctttgacccactaggccttgggaaggacccagcattcctcaaatggtacagagaagctgagctgattcatgggagatgggcaatggctgcagttctaggaatctttgtgggccaggcatggagtggagttccatggtttgaagctggagctgacccaaatgcaattgctcctttctcctttggtactcttctgggaacccagttgatcctcatggggtgggttgagagcaagagatgggtggacttcttcaacccagactcacagtcagtggaatgggccactccatggtcaagaacagctgagaactttgccaatgccactggtgagcaaggctacccaggaggcaaattctttgaccctttgagctttgccggcactatcaaggatggagtttacattccggataccgagaagctcgaaagattgaaattggctgagataaagcatgccaggattgctatgttggccatgctgattttctactttgaggctggtcaagggaagaccccccttggtgctcttggcttgtaaattaaacatttcatgtagataattgaattgagaggctagacagttgcaaatcaacctttgtcccgtttgtgttacttcatgacaaattcaaattctatgctctattattggatgcattcactttatgtctgtactctaatgtagccatcgtataaatacttgcatttttacttttctttcccaaaccaggagtagttgaagtcatatggtagacttgaaaaatattattatctgtgtgcc

SEQ ID NO: 3397 - DNA, 990 bp, Glycine max
tctgcggcttctgcaaactcaagtaggctatactaaggtgaaaaaggagagatggcagctgcaacatctagtgctgtgttaaacgggtttggatctcacttcttgtgtggaggaaagaggagccatgcccttcttgctgctagcattggagggaaagttggtgcttctgttagtcctaaaagagttattgtggcagttgctgctgcaccaaagaagtcatggatccccgctgtaaaaggtggtgggagtttcatagacccagaatggcttgatggctcgctaccaggtgactatggttttgacccactaggactaggaaaggacccggcattcctgaaatggtatagagaagctgaactcattcatgggaggtgggcaatggctgcagttgtaggcatcttcattgggcaggcatggagtggagttccatggtttgaggctggagcagatcctaatgcaattgctcctttctcatttggctctctcggaggtacccagttgctcctaatggggtgggttgagagcaagagatgggtggacttcttcaacccagattctcagtcagtggagtgggccactccatggtcaaaaactgctgagaactttggcaactctactggtgaacaaggctaccctggaggaaaattctttgaccctttgggatttgctggagctatcaaggatggcgtttacattccggatgccgacaagctagagagactgaaattggctgagattaagcatgctaggattgctatgttggctatgctgattttctactttgaggctggccagggcaagacaccccttggtgctcttggcttgtaagcaaaataatgtacactagggagacaacttgaatcattgtcctgtacagccagatttctcccttgagaagtttcaaattttatgctctaatcttggatgcattccccttgtatctgcattatacatttataatatcgccaactcgtataaatacttgcatct

SEQ ID NO: 3398 - DNA, 1139 bp, Glycine max
atgaagccagcgttagtatctctcgtgtcttctttaaccctcaatcagcaacgtgcgccctcctcgggtcaagctcagtcagcactgcaccgcaaatttttctttgcccctttcgatgagtaacgccacagactccgccggcgagatcccaccggagacgaggtccgccgagagtgacggtggtgggccccggcccacgattaagatcaatgttacgcacggttcctctcaccacgatttacacctcccggcccaatcaacttttggggatgttaagaaactccttgtcaataaaactggtttagagcctgcagagcaacgacttttcttcagagggatagaaaagggtgataaccagcgtttgcaggctgaaggtgtaaaggataagtcaaaactttttcttttggagggcattggtagcaaagagaggaaacttgaggaaaccagaaaacaaaacgtaatgtctaaagcttttgaggctattgctggtgttagagctgaggtggacaagctctcaaatagggtgacttccatagaagtagctattaatggggggaacaaagcatccgagaaagagtttcttgtgctgacagagctgcttatgagtcaattgctgaaactggatggtattgaggctgaaggtgaagcaaagttgcagagaaaagctgaggtgaatcgtgtgcagaaccttgtggataaattagattctctaaaggcaaggaacgccaacccttttagcaacagtagcaatgctgtcaaagtaacaacccaatgggaaacctttgactctggaatggaaagcttggatgctccatccgataacccgtcttccacaaaagtaactcaagaatgggagcggtttgattagctcggaaaccgtttttggaacatctaagttataaatgttgtacaacatcatattactggcccttcatcatattagaggtcttggcacaacgatgttgccttgtgatatggtaggctgaaattttaattgcagaaatgttctctccgctgaggtaaagttgcatatgtttgatctatctcgtgcacttatttttaggcaaaatatgtaaaccaaattgtattcttgttacttgaatatattattgcatcttccgatcaaaaaaaaaaaaaaa

SEQ ID NO: 3399 - DNA, 1461 bp, Glycine max
  unsure (1)..(1461): unsure at all n locations
gagctccagaacttatatttggggcaactgaatacacaactgctattgatatgtggtctgttggttgtgttttagctgagcttctcctaggacagccattgtttcctggagagagtgggattgatcagttagtagagatcattaagattttgggaacacccaccagagaagaaataaggtgcatgaatccaaactacaatgaatttaagtttcctcagatcaaagctcacccatggcacaaggtttttcacaagagaatgccacctgaagccgtggatcttgtatcaaggctgcttcaatattcaccaaatctacgttgcactgctttggctgcatgtgctcatcccttctttgacgatctgcgggacccaaatgcatgcttgccgaacggccgaccactacctcctttgttcaacttcacatctcaagaactggcgaatgcacctgaagagttgcggcaacgcctcattcctgagtatgcaaggagttgaatcaattccaaagttgaaacatctctagggcattgtaaatgggttttgaattattggacaccctctcggtcatcgcccctgaccagcctgttctgttctgttcttcagcctcttctctgcacaagtcacaactgtgactatacaaagtgagaaacctcgacaccttggaaagttctatcaagtaacttgtaaagatctgcaggtgactcaaatggataaagtggtactacctggtgatacagggttgcaagcctttttttttttgaagtagtttataaatttggtgcctcagttgtgaaagataatgagttctaagttctaacaatcttgtaagcatgttttcatatagttcaagttcgtttattaattattactttattccttgaagtggaccaagtggaatcctcaattgaataggcttcgcttcttcacaaaanaaaaaaaaaaaaaaactcgaggcaaaatcccaccggagacgaggcccgccgagagcgacagtggtggtgatagtgggccccggcccacgatcaagatcaatgttatgcacggatcctctcaacacgagttccacctcccggcccaatcaacttttggggatgttaagaaactccttgtcaataaaactggtttagagcctgtagagcaacgacttttcttcagagggatagaaaaggtgataacctacatttgcaccttgaagtgtaaaggatagtcaaagcttttgcttttgaaggcactgctagcaaagagaggaaacttgaggaaccagaaaacaaacgaatgtcttaagctttgaggctattgctgtgttagagctgagtggacagctctcaaataggtgactcccctagagtagctataatgggngacaaagctccccaaagaattcttggctgcagactggttatagaattgctgaaatggatggatagagctgagggaacaaaatgcaaaaaaaactaggtgatgg

SEQ ID NO: 3400 - DNA, 514 bp, Glycine max
ttatatggattattgctgtgacggactgacacaagcttttccaccattgaataggtgaatcgtgtgcagaaccttgtggataaattagattctctaaaggcaaggaacgccaacccttttaagcaccagtagcaatgctgtcaaagtaccaacccaatgggaaacctttgactctggaatggaaagcttggatgctccatccgataacccgtcttccacaaaagtaactcaagaatgggagcggtttgattagctcggaaaccgtttttggaacatctaagttataaatgttgttcaacatcatattactggcccttcatcatattagaggtcctggcaccacgatgctgccttgtgatatggtaggctgaaattttaattgcagcaatgttctctccgctgaggtaaagttgcatatgtttgatctatctcgcgcacttatttttaggcaaaatatgtagaccaaattgtcccccggtctcgtgtatttcggctataccctccaaaaaataaa

SEQ ID NO: 3401 - DNA, 509 bp, Glycine max
atgcatgcttgcctaatgggcgacctctacctcctttgttcaacttcacatctcaagaactggctaatgcacctgaagagttgcgccaacgcctcattcctgagcatgcaaggagttgaatcaatttgaaagttgaaacatctctagggcattgtaaatgggttttgaatgaatagacaccctctccggcatcgccacccgcatgtccaggtctgttcttcagcctcttctgcacaagtcacagctgtgactatacaaagtgagaaacaccttataaagttctatcaaagaacttaaaaagacctgcaggtgactcaaatggataaagtggtactacctggtgatagggttgcaagccttttttaagtagtttataaacttggtgcctcagttgtgaacgatattctaacgatcgtgtaagcatgttttcatatagatcaagttcgtttattaattattactttattccttgaaatggactaagtggaatcctcaattgaataggcttt

SEQ ID NO: 3402 - DNA, 609 bp, Glycine max
ggctcccattatatctgacgaatcaccgccaaaaggtgtgtagtttaagtgtgaatccctttccctctctactcttctttcactttccatttccatttccattttttctggttcactttctcgatggcctccgagaaccccaccgccgacgacgccgtcaacggcttcaatcggccggaaatgttctcggaaaacctcgccggcaccgtcgacgcctacgaccgccacgtgttcctctgctacaagagtcacctgtcctggcccccgcgcatcgaggcctccgacgccgatcccttccccaagcgcgtcgccgccaccttcaaagcccgcaagaacgacttgcccctcaagacgaaaatcaccgtgtgcgaggtgcgtgaggaggctggcttcctcgacggtgacgtgttgattttccccgacatgatcaaatacaggggtttggaggaatcaaatgttgatagctttttcgaagatgttttggtgaatggtaaaccatggactgctggagttccggaggtgtttagtggttcacatgtttatgtgtgtgctcatggaagtcgtgacgtgagatgtggtgtttgtgggccagttctcatcaagaagctg

SEQ ID NO: 3403 - DNA, 437 bp, Glycine max
cggacgcgtgggaaacactaggcgcattgcgcaccctctccgctcccataatatctgacgaagcaccgccaaaaggtgtgttaagtgtgaatccctttccctctctactcttcactttccatttccatttttttctggttttctttctccatggcctccgccgccgccgtcgccgccgaagacgacgctgtcaacggcttcactcggtcggagatgtactcggaaaacctcgccggcactgtcgacgcctacgaccgacacgtgttcctctgctacaagagctacgtgtcctggccggcacgcatcgaggcatccgacgccgatcccttccccaagcgcgtcgccgccaccttcaaagcccgcaagaacgacttgccccgcatgacgaatatcgcggtgtgcgaggcgcgcgaggaagctggcttctccgacggtga

SEQ ID NO: 3404 - DNA, 450 bp, Glycine max
ctcacgctctctactcttccggcactttccataaacatggccataagagtctggcgcactggatcgatggccatacgaggaacctacatccgtcatactgacgctcgacgaacggacttcaatcagatacggaaatgtttcatcggaaaaccatcgccaagcactcgtcgacacctacgactcggcacgcgtacctctgctacaagagtcacctgtcctgtccccctcgcatctaggcctccgacgccgatcccttccccaagcgcgtcgccgacaccttcaaagcccgcaagaacgacttgcccctcaagacgaaaatcaccgtgtgcgaggtgcgtgaggaggctggcttcctcgacggtgacgtgttgattctccccgacatgatcaaatacaggggtttggaggaatcaaatgttgatagctgtttcgaagatgttgtggtgaatg

SEQ ID NO: 3405 - DNA, 438 bp, Glycine max
gtcaaattctcatcacataatggcttgcaaaccttcttctttccttgcacttcttctcatcgccactatccttcttgccactacatggcaagcggtcgctagacgccacattggtccaaaacactcaaacaatggggacaagaaagagcctcaatttttgttccctccggaaggtaattcccattttcctggctttgggggagtagggctgccacctttctttgggtttacacctcaaagcccaaacactggtggtagtggactagggtcaggaccagcgaggtcgtggttatgttccaggtggtgatgacaccctttgtcccaaaccctggttttgagtttccaaaccctggcagtggtggtggagtttcagttaatccgtgagtcctcccagttatgagctatcatgcattatgcatgattgcaccttttgacaaa

SEQ ID NO: 3406 - DNA, 390 bp, Glycine max
caacggcacagcaggtggtggaagcatcattgccaatgacaagaaagcagtgtacaggcacattgtgaagtcagaagtgaatctcaatgctattattagtgggaaagcaggcttttcttccaacacgccttcttcaattaatccagacatatcatgtgaaagtaagactccacaagtagaggatatacacgatggttctagtgtgcttcacctggcatgcataattagtgattctgcaatggtagagctgctccgacagtagggtgcagacgtgaatgctattgattctagagggaggacacctctacattacagcactatgagagggaagaatgcaactgcaagagtgcttattacaaggggggccaatccacttgccgtagacaaaga

SEQ ID NO: 3407 - DNA, 686 bp, Glycine max
caaagtttgaaacgtgtcaaaattaaaaagcgagagagattaaagaatagagttgttggtgtaacaggcgagggcagagggaagggttagggaacaattggagtgcacgaaagcgatgccaaaaaaaccaaacaatcattaacaacagccctaacccccccgacgtctttcaaaactgattcggagcaattaatgtaaaatctatggacatcaacgaggaatcttcattctctctccgtttttgtttgcatcattaatagacccaaatggacccgaacccgacagcctcgctggactccgacccggacccgcttcgcgtgaagaggaagaccctcgaggccgtgctcttgcagtgtcagagagctctcgaatcgattaacgctacttctgctactgcttcttcttctgcttctacttacgtggacgaagaggattacgacggtgaaggtgaagccactgcatcagctgatcccgatgccgacgagttatgtgatctgctgaaatctagagttgaatgtccggcctttcttcaacagttggagtgtgctcgggcttcagtttcacagaatatagatgaagaaggtaattcctgggatatggttagcgaaaatgatctctgggaaggtgaacgtgttgactcagaacaagaagattatgtccttgttagacaagaagatatagtggag

SEQ ID NO: 3408 - DNA, 548 bp, Glycine max
aaaaagggaaagataagaaaatagtactgatagtaataggcaaaggcagaggaaagggaacaattggagtgcacgaaaatcattagccacagccctaacccccccgacgccttccatcgcatcgcctcctaaaacaccacacatcaaaacgaccgtgtttcggagcaatcaatgtaaaatctatggacaataacgacgaatctttattctctctccgtcgttgtttgttgcatcattaatagtagatgccaatggatccgaatccgcaagcctccgtggagtccgacccggacccgcttcgcgtgaagaggaagacccttgaggccgtgctcttgcagtgtcagagagctctcgaattgattaacgctacttcttctactgctgctgacgtggacgaagaggattgcgagattgaaggtgaagccactgcttcagctgatcccgatgccgacgagttatgtgatctgctgaaatctagagttgaatgcccggcctttcttcaacagttggagtgtgctcaagcttcagtttcacagaatatagatgaa

SEQ ID NO: 3409 - DNA, 1037 bp, Glycine max
cccacgcgtccgctcttccaaatccaaaatcatctttgccacataacacattgaaactaaactccaagttcctaccatagtgctaggaaagtgagtgagagaaagagatcacatagcagaatggcttctactcaatgtttcttgcaccaccatgctcttaccacccctgccagatccccatcacaacgcatcatggttagcaccaagcctaaccagcttgtttgcaaggcacagaagcaagaggatattgatgtcagcccaatctctcgccggttagctctaaccgtgctcattggtgctgctgctgttggctccaaagtccaacctgctgatgcagcttatggggaagctgccaatgtgtttggaaagccaaagacagacacagatttcctgccatacaatggagatggattcaaactatcgattccctcaaagtggaacccaagcaaagaggttgagtacacaggtcaggttgttagatatgaggataactttgattcaaccaccaacgtggttgtcaccatcactccgactgataagaagtctatcactgactatggttcacccgaagagttcctctctaaggtggattatttactaggaaaacaggccttcttcggcgaaacacaagctgagggtggttttgatccaaatgcggtggccacggctaacatcttagagactgcaacacctgtgattgatgggaagccgtactattttttgtctgtgttgacaaggactgctgatggagatgaaggtggcaagcaccacataattagagcaactgtaaaagatggaaaactgttcatttgcaaggctcaagctggagacaagaggtggtttaagggagcaagaagatttgtggagagtgcagcaagttctttcagtgttgcttaaaaatcttcaataatagctggttatatatatctgctatgtgtaaatctaccttaagtgctatctatgtttgaagttgtctaacctcccttttgtccacgagtttcataattttaagggacttggttggattaagtatctaa

SEQ ID NO: 3410 - DNA, 1134 bp, Glycine max
ccaccccacatctaaagccacttcctagtccacacacactttgcctactctagtgtctgattcataggcccaagagcaaagaaactaagaagattttgagcacaatggcatccacacaatgcttcttgcaccaccatgccctcaccactccaaccagagcttcatcacagcgcttagttgtgagcaccaaaccaaaccacattgtttgcaaggcacaaaagcaggttgtccaagagggtgaggacactactaacattgtctctcgcaggttggccctcactgttctcattggtgctgctgctgttggctctaaggttgcacctgctgatgctgcctatggagaagctgccaatgtgtttggaaagccaaagacaaacactgacttccttccatacaatggggatggattcaaactctcaattccctcaaagtggaacccaagcaaagaggttgagtacccaggtcaggttcttagatatgaggacaattttgattcaaccagcaatgttgctgtcatggtcactgcaactgacaagaagtccatcactgactatggttcacctgaggagttcctatctcaggtggattacttgcttggaaaacaagccttctttggccaaactgatgctgagggtggttttgattccaatgctgtggcaactgcaaatatcttggagagttcaacgcctgtcgttgatgggaaacagtactacagtttgactgtgttgacaaggacagctgatggagatgaaggtggcaagcaccagctgattacagcaacagtgaaagatggcaaactatacatttgcaaggctcaagctggagacaagagatggtttaagggagcaagaagatttgtggagagcacagcaagttctttcagtgttgcctaagaacttatcagtggagtgctattctgcatgtgaatcatcttgaaggggtgtgtatgtgttgaattatgtggccactttttgtccacaagtttcagtttttgaggctgttggttggagtaagcactttgattcttaatttttcatgtcttctaaggacttaccctcctctcttgcccccccttttctctctttaattaagcattttaagttgctataagcccttaagaagcattatgtttat

SEQ ID NO: 3411 - DNA, 507 bp, Glycine max
atcacccaccccacatctaaagccacttttaagtccaccacacacaacactttgcctacttacctgctacttactactatagtgtctgactcacaggccagagggcaaagattttgagcacaatggcctcgacacaatgctttttgcaccaccacgccctcaccactccagctagagcttcaacacagcgcctagttgtgagcaccaaaccaaaccacattgtttgcaaggcagcacagaagcaggttactgtccaagagggtgaggacactactactggccttgtctctcgcaggttggccctcactgtgctcattggtgctgctgctgttggctctaaggtggcacctgctgatgcagcctatggagaagctgccaatgtgtttggaaaaccaaagacaaacacagacttcctttcatacaatgggaatggattcaaactctcaattccctcaaagtggaacccaagcaaagaggttgagtacccaggtcaggttcttagatatg

SEQ ID NO: 3412 - DNA, 436 bp, Glycine max
gccggcccaacgcgtcagccacgccttcggcggtggcaaaaagacaaccacacggggaaactaaaccccaacaggttcctaccatagtctgaggaaagtgagtgagagatagagatcgcagacacagagcagaatggcttctacccaatgtttcttgcaccaccatgctcttaccacccctgccagtgccagatccccatcactacgcatcttggttagcaccaagcctaaccagcttgtttgcaaggcacagaaacaacaaacaccacaagaggatattgatgtcagcccaatctctcgccgtttagctctaactgtgctcattggtgctgctgctgttggctccaaagtccaacctgctgatgcagcctatggtgaagctgccaatggtgttgggaaagccaaagacagacgcagatttcctgccatacaatgg

SEQ ID NO: 3413 - DNA, 935 bp, Glycine max
tcttcacgcgttcgcggtcgcgtgagagacaattcaacttaagagatcaatatggccaccaccactacccagcctccctctaatatctgttttttccttctgttgttgcttctagcacactttcatttgggcataagccaacttgagctgaattactactctaaaagctgcccaaaagctgaagagatcatcaaggaacaagtcacacaactatataacaagcatggaaacactgccgtttcgtgggtcagaaatctcttccacgattgcgtggttaagtcatgcgatgcatcattactgttagcgacggtgagcgatgtagtgtcggagcagacatcggatagaagttttgggatgagaaacttcaagtacgtaaacactatcaaagcagcggttgagaaagaatgccccttcacagtgtcatgcgctgacattgttgctctttctgccagagatgccattgctttgttgggaggaccaagcattgaaatgaagacagggagaaaggacagcaaagaaagctatgcaatggaggtggaagacttgattccaaaccacaatgattccatgtcctcagtgctgtctcgttttcaagccattggcattgacgttgaagccacagtcgctcttttaggtatataaaacatgctctgtgtgacacataaatttgaagtctttctcattatagttaacatttatttcccaaagtcaaaacataaatctaagtatcttttattacttaaacgaaactaatactcccttaagcaatatatggacagatgcctaaccattaggcagaaacccagacacgatatcaaattgttgcagctgtcaagatcaagttcatactaggccactaatataaaacttattcgtataatttatactttttttgctaattaaattaatatactggctttattatataatatata

SEQ ID NO: 3414 - DNA, 465 bp, Glycine max
acagtcagactgcatatatcgatatggccaccgccactacccagcctccctcgaatatctggtttctccttctgttggtgcttctagcacactttcatttgggcataagccaacttgagctgaattactactctaaaagctgcccaaaagctgaagagatcatcaaggaacaagtcacacaactatataacaagcatggaaacactgccgtttcgtgggtcagaaatctcttccacgattgcgtggttaaggtgccagatttcttgtttcaaattcatatataaaccaagatatatgcatcataattagttaacaacaatgcatgaaacagttaaaataattgatttgatgattctcatgcagtcatgcgatgcatcattactgttagcgacggtgagcgatgtagtgtcggagcagacatcggatagaagttttgggatgagaaacttcaagtacgtaaacact

SEQ ID NO: 3415 - DNA, 1549 bp, Glycine max
  unsure (1)..(1549): unsure at all n locations
attaaaaataaaacattgtaaaaaatattatcaataccctttgagtgaccctgacctcggatccaagattcccagttaaatttcatagatgaaaataaaagatattttattaaagatgatctgacaaaaattaatcatctatatggggatgatgaaaaaatatcattaatacattttgtgataattttttattaatttcttttatttattagtttattaatttcgtgttgttaatacctaaaggacaaattaacttttcttagagaaataatttgaaaaaatgaggtttaatgtggagtatggaatatggatgttggtgcgagcagttgggaggaccaagcattgaaaatgaagacagggagaaaggacagcanagaaagctatgcaatggaaggtggaagacttgattccaaaccacaatgattccatgtcctcagtgctgtctcgttttcaagccattggcagtgacgttgaagccacagtcgctcttttaggagctcactcagtgggaagagttcactgcaagaatctggtgcacagattataccccaccatagattcaacactggaccctgcacatgctgagtacctaagacgtcggtgcccaacacccaatcccgatccaaaagctgttctgtattcaaggaatgaccttaaaacgcccatgatcattgacaacaactactacaagaacatcttgcaacacaagggtcttctcactgtggatgaagagcttgccactgacccaagaaccgcatcttatgtccaaaagatggccaacgacaatgattatttcaaccaacaattctcaagggccattcttttgttgtcagagaccaatcctttaacaggagatgaaggtgaaatcagaaaggattgtcgctacctcaatgccaattaaatatataacataaggttgccctttgtgcatgataatatgtataattagcatagattataatgcacgagtgcgccaaaataaacgggtgggacgtactgggcctaggttaccatattcagtgcaatacgccattgggcctagccttatgtatacgcttatgtttgggcttttacttcctgcacgctccctatttgcgggaagtaattcccttctgtttgctttgttcatagacatgtcatatgttactactacagctgacaaagcctccaacatcttaaaggtttatgaagtactttgttcttcgctgtcgatctataatggaaaatgtttgatcaacatttcatatgttatcctacattcctacctctagagagaaagaaaaaagaaaagaaaaagtctaataggatttatactgtaaaagaaagagagatataaaaaaaaaaatgagagatgtttgtgaaatgttttcaatgaaaagtgatttatggattattactctttagtaaaaaaaaaaaaaaagggcggccgccctttttttttttttttttaagttacgaaatagcgaatctaattaagtttcctacaagcatagagaactgcaagaaaatgacagttcagacacacttgcatttcagtgcaatgaaatta

SEQ ID NO: 3416 - DNA, 494 bp, Glycine max
atttcaaccaacagttctcaagggccataattttgttatcggagacaaatcctttaacaggagatgaaggagaaatcagaaaggattgtcgctacctcaatgccaattagatatataatataagcttgcatttgtgcatgataatatgtataattagcataagattataatgcacgagtgtgtcaaaataaagagggtgtggaacgtactgggcctgggttaccatacatattcagtgcaaaaagctattgggcctagccttatatatacccttgtgtttgctttgttcatagatgtgaatgttacttgacttcagctgacaaagcctcaaacatcttaaaggtttatgaagtactttgttcttcgctgtcgatctataatggaaaatgtttgatcaacatttcatatgttatcctacattcctacctctagagagaaagaaaaaagaaaagaaaaagtataataggatttataatgtaaaagaaagagagata

SEQ ID NO: 3417 - DNA, 1124 bp, Glycine max
gtggagagtaagcagtggctctgtgagtgagtgaggattatataatttgctttcaccaccaaccaaccacaaattcacacacacatattctttgttgcaatatcacaaacacctcgtccctcacaatgcagctagcaatggcggccaacgctgtcgtttcaccgtcgccgttccgacctcagccctttctccggtcatccttctccggcgtctccgtcaagctcactccccaatccataacgctttcacgctccaagcccctcaccgtcttcgccgccaccaagaaggccgtcgccgtcctcaaggggacctccgccgtcgaaggcgtcgccactctcatccaagaagacgatggcccgacgacagtttctgttcgcatcactggccttactccggggcttcatggttttcacctacatgagtatggtgatacgacaaatgggtgtatttctacgggagcacattttaatcctaataaattgacacatggtgctcctgaggatgaagtccgtcatgcgggtgacctgggaaacatagttgctaatgcagagggggttgcagaggctacaattgtggataatcagataccactctctggccccaattcagtagttggaagagccttggtggtccatgagcttgaggatgaccttggaaagggtgggcatgaactcagtttgacaactggaaatgctggtggaagattagcatgtggtgtggttggtttgactccagcataatcagtgcagcgaattttttgtagcagtcgtgttatgttatcagatattatgttctctgtgaagcatgatgactcactgtttcttcttcagttaccaatgtaaactgtaaagcataatgtccttctaaagatgagtgtgcaaatgaatcatgaaaacatgttgttagtcctttactggagattcatcgtgcagtcgggtctgtactccccaataaaattcatcatgcagtcagatgtttattccccaatgaaattgattgctgtagtccttgtcgcctgcttgagaaagtacctatgctcatattctatattaatggtgcaagtgcaacaactgcatactagagtctaacaagaatgtataaagggcggccggcaactactgagc

SEQ ID NO: 3418 - DNA, 1241 bp, Glycine max
tgatgatgcaagatagaaacaaagagaaggctaatatcaggagctagtgctaggtgcgagtactggagcaaaacgcgggtgtgtgtgactttcgttggagagagatgcagttccattcagaaactccaaacaaacatccctcgcgacaaccttaggaatctcgatcgccgaaaaaacctatgcagccccgaacacacacactctgcattccaacttgtttaaatcatgcctctcgattcacccttctctctcaataaatcttttggcctatgaaatcagattcttcgccaccgccacagtcataataaagttttatttttccaaataaagggaatggcgactcctgttgagcctcctaacgggatcagaactgaagggaagcattattattccatgtggcaaaccctgtttgagtttgattcaaaatacgtgcccatcaagccaattggccgcggagcatatgggattgtgtgctcttctgtgaatagagagacaaatgagaaggttgccatcaagaagatacagaatgcctttgaaaaccgggttgatgccctgaggactttgcgcgaactcaagcttcttcgccaccttcaccatgagaatgtgattgctttgaaggacatcatgatgcctgttcacaggaatagtttcaaggatgtctatctggtttatgaactcatggacacggatttgcatcagattattaagtcttctcaagctttgtctaatgatcactgccagtatttcctctttcagttgctccgtggcttgaaatatcttcactcagctaacatccttcatcgtgacttgaaacctgggaatcttctaattaatgcaaattgtgacctaaaaatatgcgattttgggttagcacgtactaactgcagcaagaaccagttcatgaccgagtatgttgtcactcggtggtatagggcaccagagctcctactctgctgtgacaactatgggacatctattgatgtttggtcagttggatgtatctttgcagagcttcttggccgaaaaccgattttccctggttcagagtgtctcaaccagctgaagttgattatcaatatccttggtagtcaaagggaggaggatattgaattcattgataacccaaaggcaaagaagtatatcaaatcacttccttattctcctggaacccccctttcgcaactttatcctaatgcgcatccattggcaattgatcttctggcaaagatgcttgttttcca

SEQ ID NO: 3419 - DNA, 495 bp, Glycine max
gatcacgcaaaaggatggatgatggaagaaacaaagagaagggaaatatcaggaggtgcgagtaccggagccaaacgcgggtgtgtgtgtgtgtgagggagagagagatgcagttccattcagaaactccaaactaaacatccctggcgacaaccttaggaatctcgatcgctgaaaaaacctatgcagccccgaacacactctctgcattccaacttgtttaagtcatgcctttcgattcacccttctctcaataaatttttaatcagattcttggccaccgccacactcataataaagttttgtttttccaaataaagggaatggcgactcctgttgagcctccaaatgggatcagaactgaagggaaagccccaattattattccatgtggcaaaccctggttgagatcgactcaaaatacgttcccatcaagccgattggtcgcggagcatatggaattgtgtgctcttctgtgaatagagagataaatga

SEQ ID NO: 3420 - DNA, 606 bp, Glycine max
aacccgggtctcgacacacgcgtgcgcccacgcgtccgtgaaattcgaacaatgattttttcattttctttttaatacttttttggtttagactccctaagaatctgtcgatatttccaattaaatcttcttgttcctgtgaaggtcctataaaaaaaagggctatgccctttctttactcagaagggccttattccaagttccaccaaacaagtttttattcatttgaaacatctttttttccgaatacaagaaaaaattcatttcaatttcaattatttctataagataaaatcgatatagatagattttatcttatagaaataattgaaaaatacattcaattatgtcttcgcgtatcaaatattttcttttcatatcgatgcgtacgatatttttccagcaattaatgtatgtgagacagaaactttcacttacagttttttctttttaatattgtatttcattttttttaataattaataaaataataataataatgaataaaaaaatcaaataataattaataaaaagaaaaaagtgtaaatcaaatagaaatttataaaatctatgatcctagagtagttccctagacaaaatagaagt

SEQ ID NO: 3421 - DNA, 1831 bp, Glycine max
  unsure (1)..(1831): unsure at all n locations
tcttctactaaatgagtgaaagacataatgaacctaaagagcttaagcatcacaactgattcattctaaatgtgggaaagtaattctagaaaaaacaacagcttaatgctctacattcgacaaatctctctgatatatagatttttaaatggtgcacaaccaatgatcttacccttagacgtggagataactggagggcagtctctttaaggatcccagcgacagcaactccaaagagaaccgnaagaggaacaaagactagcttcttttcatgtgcacagtaggacatttcactgagggaggtaactgcgaatacaggattttatcttatagaaataattgaaaaatacattcaattatgtcttcgcgtatcaaatatggtcttttcatatcgatgcggacgatatttttccagcaattaatgtatgtgagacagaaactttcacttacagttttttctttaactcacaagctcacagagcaagaacactgttccaatacggaatctaaggcaaagcaaaccaaacatcttgaatcatgggttcaacaggtgagactcagattactccaacccatgtatctgatgaagaggcaaaccttttcgccatgcaactagccagtgcctcagtactccctatggttctcaaatcagctcttgagcttgatctgttggaaatcatagccaaggctggccctggtgttcacctttccccctccgacattgcttctcggctcccaacacacaaccctgatgcacccgttatgttggaccgtatattgcgcctcttggcttgctacaatatcctctctttttctcttcgcactctccctcatggcaaggttgagaggctctatggtctcgcccctgttgctaagtacttggtcaggaacgaagatggtgtctccattgctgctctcaacctcatgaaccaggacaaaatcctcatggaaagctggtactatttgaaagatgcagtccttgaagggggtattccatttaacaaagcatatggaatgacagcctttgaataccatggaacggatccaaggtttaacaaggttttcaacaaggggatggctgatcactctaccattacaatgaagaaaattcttgagacctacacaggctttgagggacttaaatccctggttgatgttggtggaggaactggagctgtagtcaacatgattgtctcaaagtatcccactattaagggcattaattttgatttgccccatgtcattgaagatgccccatcttatccaggagtggaacatgtaggtggagatatgtttgtcagtgttccaaaagctgatgctatttttatgaagtggatttgccacgattggagtgatgagcactgcttgaagtttttgaagaactgctacgaggcactaccagacaatgggaaggtgattgtggcagaatgcattcttccagtggctccagactctagcttggccacaaaaggtgtggttcacatcgatgtgatcatgttggcacataatccaggtgggaaagagagaacagagaaagagtttgaggctctggccaaagggtctggattccaaggtttccgagtcctgtgctgtgctttcaatacctacgtcatggaatttctcaaaaaggtttaagttctttggcgtggattcatatcaagttgcatttgggttttgactttgagactctgcttggggtgctacttacgaatgttttcccggaaaaacgtaaatttcttctaatgctttatgaaaagaataacgaacaagttcaatgtataccgcctttataaaataataacaagtttcatattgtggtttatacaagaat

SEQ ID NO: 3422 - DNA, 386 bp, Glycine max
gaagagcctgacgtgcactgcacgcgtacgctagctattcggctcgaggtgatcatgttggcacataatccaggtgggaaagagagaacagagaaagagtttgaggctctggccaaagggtctggattccaaggtttccgagtcctgtgctgtgctttcaatacctacgtcatggagtttctcaaaaaggtttaagttctttggcgtggattcatgtcaagctgcatttgggttttgactttcaggctctgcttgtggtgctactttccaaagctttcccggaaaaacgtaaatttctcctaattctttaggaaaagaataatgaacaagttcaatgtaccctgcctttttcgtatagcaaattacattttaaggattatatatat

SEQ ID NO: 3423 - DNA, 407 bp, Glycine max
gaaagattaacaaaaagtaagtggacctaacccattgaattatacctatatttactattctgatattcaaattggataaagatgaaattcgaacaatgattttttcattttctttttaatacttttttggtttagactccctaagaatctgtcgatatttccaattaaatcttcttgttcctgtgaaggtcctataaaaaaaagggctatgccctttctttactcagaagggccttattccaagttccaccaaacaagtttttattcatttgaaacatctttttttccgaatacaagaaaaaattcatttcaatttcaattatgtcttcgcgtatcaaatattttcttttcatatcgatgcgtacgatatttttccagcaattaatgtatgtgagacagaaactttc

SEQ ID NO: 3424 - DNA, 473 bp, Glycine max
cacaaacaaacctctctccctctcgattttaacaaccaactgccaaataattaataatacaataacctaaataaaccgaactctggttaatcattgtgacacgttattttaatttttggtagaaagtaaacaacaaaaaattaaatttgattgttgcttattaaagagagggggagggagacaagatacaccaaagtcgtcgctcatggaagacttactcggccttttaaggattcacatcaagcgcggtgtcaacctcgccgttcgtgatgtcaatactagcgatccatacgtcgtcgttaagatgggcaagcagaagctgaagactcgtgtgattaaaaaggatgttaatcctgagtggaaggaagatcttacgctttctgttacagatccaattcatccatttatactgacagtgtatgactatgacactttcagcaaggatgacaaaatgggagatgcagaatgtgaca

SEQ ID NO: 3425 - DNA, 605 bp, Glycine max
aagctttcttcaaggactttgctgatgccatggagaaactttctgtgtttagagtcaaaactggcgacaaaggagaggtgaggaacaggtgtgaccaattcaacagtattcctgcctaaatgaccgaagttactgaggttgaaattactagataattcgaaactatttcctatgcttgcatttatatatgacacgtgcatacttaaaagtattgacaattgatgatatatatatacatgtcatatatcaagattaattaagatcgtatagtctcggaggatctgataatttctagagattttgtgtacctagagagtcactatggatatacattgtcatttgtgtccttgtcaaaagaaaattgtgagaaacttattacctatatacatttgaattttttgtttgtttccatttgatattttttgttttgtgaaagaggcgaaaaacataagacttgtgatggagaagatccagttttacccatctgatcatatttgttctctggtgttgctactctatatgatttgatataatggataaattatatatgataataattgtattgattactggaaagttcaattcatattgtttttagataaaaa

SEQ ID NO: 3426 - DNA, 406 bp, Glycine max
cgtggcttatgatagggtgcgggaagaaataattagagtgctgggacccagggttaagaaggggtacgtgtacggtggagtggcggacatgtgtttcgatgggaatgcggtggagatcggacggctgttaggggacgtggccttcgagttcgagaaaggcgtggagatcgtggttccgaaggagagggtgctcgctgacgtgggcggtggggtccactgcgtgggaatcgggaggtccgagagattgggtgcggccagcaacatcataggcaacttccaccagcagaatctatgggtggagtttgatctcgcgaatcgaagaatcggattcggtgtggccgattgtagcagatcataggtaaacgataggatgtggtggtggtgcatgtcgctatcatgtgtagta

SEQ ID NO: 3427 - DNA, 987 bp, Glycine max
gtggaatacaagagggagtggaggccagtagaacccccttgtttattcggcatacacatcgtcgggggctagccaccgagtgcagtgcaaccatcggaaaataatggcagagacagattcgtcgtcctcttcagatggagaaccctcgcaatcgctggcgtcgattgcggagaatcttcagcgttctgccattcaatctgctcgaactgtgcaacatagctcttcaactcatttccgtgcctttcagaattttttaccagaagcagtatcacagtatagaacatatgaagatgcttttgtcaataaagttaaagatggactgatgattgcaaaggagaatccagctgtaagtgctggtgtagctatttctgctgcccttctggctatgcgagctccaagaaggtttctgtttcgccatacattgggtcgattccaaagtgaggaggcgcgatatgctagaattgagaagaatgtaaaggacttgaacctttcagtggatttactgaagaaggagaatgcaaaattgcttcaaaggacaactcttgctgagaaggaaatgaaatatgggcatacggaactagtgagtgccggaacccaatttcaacagctggcaaaatcagcatacaaggttgaaacccgagctgctgatttgcttgacaagctgcggtatatacctagtcgtgaagctctggcacttcgagctgaggttgcttccatggcttcaaatttgaagcgtcagagatcttcgctgaacaaacggataatgaagatcaacgagttaggggttcctgtgtgattgatttaatggacaagttgtggcccttctcttgatgcacccccagttttactgaataaatcctccggttaaagtagatggttctacgtataatgcagacccatgtcccggggcatctttttttgttttcaaatgatcagtctctttcatgcaatatatatataactttcaggcaatatactatttttaac

SEQ ID NO: 3428 - DNA, 1628 bp, Glycine max
tgttggtgaagcttgccagaaatatggcagcatctttatgcatcctcagggtctttatataagtttgaaagagaagggaaagatccgtgaagtactaaggaattggcctgagaagaacattcaagtcatagttgtaactgatggagaacggatcctgggtcttggggatcttggttgtcaggggatgggaataccagtgggaaaactttctttatatacagcacttggaggagtccgcccttcagcttgtttacccattacaattgatgtgggcacaaacaatgagaagctgctgaatgatgaattatacattgggctaaagcaaagacgagcaactgggcaggaatatgctgaacttatgcacgaatttatgacagcagtcaagcaaacttatggggaaaaagttctaattcagtttgacgactttgcacaccacaatgcttttgatctgcttgagaaatatagatctacacatctggtctttaatgatgatattcagggaacagcatccgtggttcttgctggactagttgcatctctgaagttggttgggggtaacttagctgatcacagattcttattccttggtgctggagaggctggcactggcatagcagaactcatagcacttgaaacatcaaaacagacaaatgctccactggaggaagtgcgcaagaatatttggctggtggactcaaagggattgattgtcagttctcgcaaagattcgctccaacattttaagaagccctgggctcatgagcatgaacctgttaaaaatcttctagatgctgttaataaaattaagccaacagtgttgattggaacatcgggacaaggaagaacttttactaaagaagtgattgaggcaatggcttctattaacaagagacctattattctttctctttccaaccctacgtcacagtcagaatgcactgctgaagaagcttacaagtggagccagggacgtgccatttttgcaagtgggagcccatttcctcctgttgagtatgaggggaaagtgtttgtgcctggccaggccaataatgcatacatatttcctggatttggtcttggtttaataatgtctgggaccattcgagtgcatgatgacctgcttctggctgcctctgaggctttggctgcacaagtgagccaagagaactttgataagggactcatatacccaccattcaccaacataagaaagatttcagcacacatagctgccaatgttgctgctaaggcttatgagcttggcttggccactcgccttcctcaacctaaagatttggtgaagtttgcagagagctgtatgtataccccatcctaccgaagctaccggtgaaaagcgataataaatagcctatttttctttttccttttcgttttatcattttattgtcaattatttaatttttttaccttctttatgttgctgttctgttcttgtaagttatttgttgggttagtaggttaggacggtggtagttggactaaaaaggtagcttgaaaatttgtgttctgctataaatgttatgtgacagtaatctaaattagaaaaggaagcatttctaaagtccgcatacataaattcttgaaagtgattgaatgatctatctttt

SEQ ID NO: 3429 - DNA, 568 bp, Glycine max
gaatctttgcgggaactgacaatcaatccctttgagtccaccaaccaaatattcgctccaacattttaagaagccctgggctcatgagcatgaacctgttagaaatcttgtagatgctgttaataaaattaagccaacagtgttggctggaacaccgcggcagggaagaacatttactaaagaggtgattgaggcaatggcttctattaacgagagacctattattctttctctttccaaccctacgtcacagtcagaatgcactgctgaagaagcttacaagtggagccaggggcgtgccatttttgcaagtgggagcccatttcctcccgttgagtatgaggggaaagtgtttgtgcctggccaggccaataatgcatacatatttcctggatttggtcttggtttaataatgtctgggaccattcgagtgcatgatgacctgcttctggctgcctctgaggctttggctgcacaagtgagccaagagaactttgataagggactcatatacccaccattcaccaacataagaaagatttcagcacacatagctgccaatgttgct

SEQ ID NO: 3430 - DNA, 392 bp, Glycine max
gccaataatgcatacatattccctggatttggtctcggtttaataatgtctgggaccattcgagtgcatgatgacctgcttctggctgcctgtaagtgctcaagacacttgcgaacattaatttcaaacttatgtttgggacaggtgaaaataggatcatggtaggaatgaaatatacatttggaattaatacaatgtcatattatttgattttgatggaacagctgaggctttggctgcacaagtgagccaagagaactttgataagggactcatatacccaccattcaccaacatcagaaagatttcagcacacatagctgccaatgttgctgctaaggcttatgaacttggcttggccactcgccttcctcaacctaaagatttagtga

SEQ ID NO: 3431 - DNA, 262 bp, Glycine max
aataataaataggcgcttttttcttttacatttatcatgatatccattccatggccaattttttaattttttaccctcctttaggtcccggttaggttttttggaaggtatttggattgggtggggtagtagggttggacgggggtggtagtgaaggggtacttggaccaaaaggtagcttgaaaatttgtgtttcgctataaatgttgtgacagtaatctccattagaaaaggaagcatttctaaagtccgcatacataaa

SEQ ID NO: 3432 - DNA, 710 bp, Glycine max
accagaacgcatcccataaaccctgtttctattgaccatgcattcccatattgagagaattctatggagcgaggaccaaatttctcgccgtgttttcgagctcgccgccgaaatctctgacgacttcggcggccattctccggcgcccgtggtcgtcggcgtggccactggcgcgttcctcttcttggctgaccttgttcgcaaaatagatctctccatcgccgttgatttcgtccgagtcgaatcctacggttccggaaccgtgtccaatggcgcacccaccatttccttcgatttgaaggtcgacgtcaacgcccgccacgtcatcgtggtcgaagacattgtagatactggacataccttatcaaaagtcattgagcacttgaaatcaaagggagtatcctctgtttctgtatgcactttccttgataaacctgcaaggagaaaagttcattttcagctgctgggtgaagggaaatactaccggggatttgagtgtccagactatttcgttgtaggttatggactggatttcgccgaactctatagaaatttgccttacattggtgtcttgaagcctgaactttacaagtgatcttatatttcctagtgaaacctgtcacacgtggaatcttaaagcattaaacatggttctacaagtttgtctgccacacattcttccaagagtagcatatagaaactagaagaaa

SEQ ID NO: 3433 - DNA, 872 bp, Glycine max
cttgcgttgcgtgtggtttgtggcggcttgtttcagtttgtggcgaaaggagagaacgtgtgtgcctcgccgtgtaagagtttatgggtgctgcgaaaggagagaacgtgtgtgcctcgccgtcgccggaaatctcgaaggaagtggaccccagccatgcctccgagaccttgcgcatcgttaacgttatgggggctgccacccccattcccgctaactgcaacgcgcgtggcttctacgacgctttcctccgaagcttcatcaaggtcgatcacatccaacgtggaagaatttcatgcactgttgttgccaaaccacccatctgtaatcgctatggaactctgcatggaggttctgttgggtccttggttgagattttatcgaatgcttgatgcgacaaactgtagttgccaaggacaaggaactttttcttggggaaatcagcatttcttacctctctgccactccagcaaatgaagaagtgctagctaatgcctctgtggtgaagactgggagaaatttgactgttgttgcagttgaatttaaactgaagaaagctgggaatttgctctatattactcattctaccttctataacatgccagttgccagtttatgaatatttagctgtctggtggacgttgttctgcagttcggttttaatgttttccatgacaaaattcttcaaaataggccgattcatatcaacaatagatttatagtttgcaataatcatatatttattggaaaagaacaggaatgtaatgttattttttttctttttcttttttcactttggttttgagcttgaattgcaggagatagaactactttcacttgttgcaaagcgaatgaccaacaaatgcaaaaaa

SEQ ID NO: 3434 - DNA, 334 bp, Glycine max
gcatttcttacctctttgccactccagcaaatgaagaattgctagctaatgcctctgtggtgaagactggaagaaatttgactgtggttgcagttgagtttaaactgaagaaaactgggaatttgctctatattactcatgctaccttctataacatgccagtttccagtttatgaatatttagctttctggtggacattgttcagcagtttatgaatatttttaaaaaataaataaagatagaggcacaaattgtccctttttcaactagtatcaataatagatttatagtttgtagtaatcatgtatttattggaaaacagcaggaatgtaa

SEQ ID NO: 3435 - DNA, 1702 bp, Glycine max
  unsure (1)..(1702): unsure at all n locations
tttttccgactaattcaattcccaacttttctggatccgccatcttcctttttcttgctttgaccttttaccggttgttgcgttggcgcaaatggcattcttcagaagcgtttctgcactttctcgacttcgctctcgcgtgggccaacaatctaatctggcgaattcagttagatggctccaaactccgagctccagtaacactgatctttattctgagttgaaggaactggttccagagtatcaggaacgtgttaagaagctgaagaaagatcatggaagtgttgaattaggaaaaatcactgttgatatggtacttggtggaatgagaggaatgacagctttagtatggctaggctcagctgttgacccggatgagggaattcgctttaggggcatgtcaattcctgaatgccagaaaaagcttccaggtgcttttcctggtggggagcctttacctgaggctgtactgtggcttctattgacaggaaagataccaagcaaagcgcaagttgactcattatccaaggaattgcgaagtcgtgcaactatcccagattatgcttataaggcaattgatgcattgcctgtttctgctcatccaatgactcaattcacaactggtgtcatggcccttcaggtgcagagtgagtttcagaaggcatatgagggtgggatagctaaggcaaggtattgggagccaacttatgaggatacaatgaatctaattgctcgtttgccagccattgctgcttatatttatcgacggaaatacaaggatggaaaaatcataccgttggatgattctttggattatggtgcaaactatgctcacatgttagggtttgatgatccggaaatgctggagtttatgaggctgtatatttccatccacagtgatcacgaaggtggcaatgttagttcacacacagcccacctagttgctagtccgctatcagatccttatcttgcatttgcagctgctttccctcggttagctgggcccctgcatggtttggccaatcaggaggttctacgatggatcagatcaatagttgcagagtttggaactcctaacataagtactgaacaattggctgactacattaataaaactttgagtaggggccaggttgtgcctggatatggacatggggttttacgccagacagatccaagatacacatgtcagagggagtttgctttgaagcatttgcctaatgatccatatttccagttggtgtctaagataaaagaggttgtgcctcccattcttaccaagttaggcaaggttaaaaatccatggcctaatgttgatgctcacagtggagtgctactgaactattatggtctaactgaggaaaactattatactgttctctttggtgtatcaaggagctttggagttggccctcagttgatatgggacagggctcttggaatgccactcgaaaggccgaaaagtgtaacactggagaagctcgagcaattggtctatatatcattctttaatttaatgtatttaattctgtttatattttctaatattcctacttctgtannnnnnnnnnnnnnnnnnnnnnnnnnnnnnnnnnnnnnnnnnnnnnnnnnnnnnnnnnnnnnnnnnnnnnnnnnnnnnnnnnnnnnnnnnnnnnnnnnnnnnnnnnnnnnnnnnnnnnnnnnnnnnnnnnnnnnnnnnnnn

SEQ ID NO: 3436 - DNA, 355 bp, Glycine max
gggaatggggttgacaacactgttttgcacgatgtgacagatacaggcgatgacggcccacctgaggaaaactattatactgttctctttggtgtatcaaggagctttggagttggccctcagttgatatgggacagggctcttggaatgccactcgaaaggccgaaaagtgtaacactggagaagctcgagcaattagtcgccaaatcatcctgaaatttaaggcaccatttctgttaataatttctagaatacacactgcggtagatgtgtggtggtgttgagttgaaaatttggtaccattgtactgaggaatatccactaccctcccccatggtgtctatgtcagaagatt

SEQ ID NO: 3437 - DNA, 590 bp, Glycine max
gattcgcatattccatagcatgccttacaagctcacgcatcatttcattgacttacggggctataaaaaagatcactttataagtttatatcaacatcattcattaattcctgaagtgccaaagttcatattaagagagaaagagagagagagatagaagggaaaaaagcatcaaagatcatgaaacccaacttttcctttttatctaagcttttgatactgcaatatctatcagttttatgcatttctcaggaatttgatttcttctactttgttcagcagtggccaggagcatactgtgacacaaagcagagctgctgctatcctaagactgggaaacctgctgctgatttcagcattcatggactctggcctaacttcaaggatggctcatggccctcaaactgtgaccctgacagtgtctttgataaatctcagatctcagacctcattagcaacatggagaaggattggccatccctgagctgcccaagtagcaatggcatgaggttctggtcacacgaatgggaaaaacatggtacttgtgcagaatctgagcttgatcagcgtgagtactttgaaacaactct

SEQ ID NO: 3438 - DNA, 882 bp, Glycine max
cgggtcgggaaggaacgggtggaccgacgcatgcgtctctcttagtttatgaccacaccaagagacagcacaaagacccttcgtttcaatcccacaacacactcattcctcattcttccactcccgcacaaaaatggcgtctttgcagcaccccacagcttccctccaatccaaacacgtcctaatcccccgaaacactcttacccagaaacccatcctcaacctctcctccctcccgggcaccaccttcacccccctcaagctcaaattcttcagcggcggcgccgtccgccgctccaccggcgcctcgggagccagaatgtcagccaccgcagcctccagctacgcggctgccctggccgacgtggctgccgcgaacaacacgctcgacgcgacaaccgcggacatcgagaaaatcgacgagatattctcggaggcgcaggtgtcggactacttcgccaaccccaccttggccgtggagaagaagcggaagctgatagatgagattgcggaatcttcggggttccagccccacacgagaaacttcctctacatcctcgtggacgcgcagaggatcgacctcatcaacgagatcgcaaaagagttcgaattggtttacaattccttgaccgacacggagctggcggtggtgacgtcggtggtgaagctggagtcgcagcacctggcgcagatcgcgaagcaggttcagaagctcactgggacgaagaacgtgaggattaagacgctacttgaccctagtttggtcgcgggtttcactgtcaggtattccggctccaaattgattgacatgagtgtgagaaagcagcttgaggatattgctgctcagcttgagttgggtgatatctctctcgccgtatgagc

SEQ ID NO: 3439 - DNA, 554 bp, Glycine max
actgaacgtgcaatgcttgcgggccacttcctagtatatactgaatcaaaacaagatactactacacattgattcaatccaactcatttcttatctccttttctctttggtagaattttcaataaacttagtccaacactaaaatataaaaatccaaatcagaaaaccaaaaaaaaacccttcttccacacataggcgtccacgtatccaaagtttattatcttatccgcgagataaggcaacggtgatcctctcgatccttcgtatcacattcacagcctctcttggttgatgacaccaagagacagcacaaagacccttcgtttcaatcccacaacacactcattcctcattcttccactcccgcacaaaaatggcgtctttgcagcaccccacagcttccctccaagggaaacacgtcctaatcccccgaaacactcttacccagaaacccatcctaaactttctcctccgggcccacttacccccctagctaatctcaggggggccgcccgtcacggctgggcagatgagcacgaccgtccgtgctgccg

SEQ ID NO: 3440 - DNA, 405 bp, Glycine max
gaaaagaaaaagagacaccacaacacaagactcattcttcctcattccgaaaaatggcgtctttgcagcaccccacagcttccctccaatccaaacacatcctaatcccccgaaataccctctcccagaaacccatcctcaacctctccctccatggtaccaccttcacccccctcaagctcaaattcggcgttaccaccaccaccaccgccgccgccgccacccgccgctccaccggcgccacgggagccagaatgtcagctaccgcagcctccagctacgccgcggccctcgccgacgtggcggccgcgaacaacaccctcgacgcgacaaccgcggacatcgagaaaatcgacgaaatcttctcggacccgcaggtgtcggactacttcgcggaccccaccc

SEQ ID NO: 3441 - DNA, 1067 bp, Glycine max
gctatcatcactgtcttgtccgttttctaaatctcattcttcacctgcaactatttggattgctgatttttgttaataccatatttactgatattggcgcatttctttgagaaagttactaattcctagatagaggcaaaaatgttgggaattttcaaggagaagttggttaaagcacccaaagagctgaacagtccagcttcgttgaattcatgcactaagcctaagctaagtcacgaaatccttcaggatttcatgtcctgcaattcctccaatgctttctcaatgtgctttgggaatgaagctttgctagcctattccccttcaaacaagccctccattcatcaaaggttgtttagtggtttggataacatatactgtgtcttcctgggtggcctgcacaaccttagcatgctcaacaagcagtatgggctatcaaagggaacaaatgaggccatgtttatcactgaagcatatcgaactcttcgtgacaggggtccataccccgctgatcaagtcctcaaagaacttgaaggcagttttggatttgtgatctatgacaacaaggatggaacagtttttgttgcatctggttctaatggccagattgggctctactggggtgttgcagctgatggttccatagttatttctgaaaatctggagcttataaaagcaagctgtgctaaatcatttgcaccatttccgaatgggtgtatgtttcatagtgagcatggtctcatgagcattgaacatccaacaaagaagatgaaagcaatgcctcggattgacagcgagggggttatgtgcggggccaacttcaatgttgactctcagtcaaagatccaggtgatgccacgtgttggaagtgaagctaattgggcaacttggggctaacaagcttagctgattcttagtccagcatttttctttctaagtggttaaaagtgtaacctaatatgatgagtgtgtgactctttgcttttagcccgtttggatatctgcttttctcgtttggttccattgttgtgtacatattcatccttcaatattgaacatgactatgg

SEQ ID NO: 3442 - DNA, 532 bp, Glycine max
  unsure (1)..(532): unsure at all n locations
tctcggntcgccggttggacgcacggttttcaaaggctatcactaaatctcattcttcatctgcagctatttggattgctgattattgttaactgatattggtgcttttctttgagaaagtgtgtacactttttggataagagaaaacaagagaggtgacattggaagctaactcagagagaggcaaagatgttgggaattttcaagcagaagttggttaatgcacccaaggagctgaacagtccagcttctttgaattcatgcattaagcctaagctaagtcatgaaatcctgaaggatttcatgtcctgcaattcctccaatgctttctcaatgtgctttgggaatgatgctttgctagcctattccacttcatacaagccctccattaatcataggttattctctggattggataacatatactgtgttttcctgggtggcctgcacaaccttagcatgctcaacaagcagtatggactatcaaagggaacaaatgaggccatgtttatcattgaagcatatcgtacac

SEQ ID NO: 3443 - DNA, 534 bp, Glycine max
gttatttctgaaaatctggagcttataaaagcaagctgtgctaaatcatttgcaccatttccgaatgggtgtatgtttcatagtgagcatggtctcatgagcattgaacatccaacaaagaagatgaaagcaatgcctaggattgacagcgagggatttatgtgtggggctaacttcaatgttgactctcagacaaagatccaagtgatgcctcgtgttggaagtgaagctaattgggccacatggagctaacaaacttgactgatttaatcatagcccaacttttttttaaaacccttttctaagtggttaagagtacacaacttaatatgatggtgctgactctgcttttaggcttcagctcttttgggttatgtagtttttctcgtttggttccattgttctgtacatattcatgcttcaatgttgaacatgactatggtaatttctaatatcaataataagaagtttcagttttttgcttttaaaaaaaaaggtcccaaaaacccaaaatggtgggcgtgcgccgtgtgt

SEQ ID NO: 3444 - DNA, 1011 bp, Glycine max
cctcgaccgctatcccacacgcttcctactcctccctttcaccacttttctgctcccccttgagaaagaatttgaatcatcaaaattaaaaactcgcaccaacaatggccccaagagacagccgagccaccgcgttcgccggaccaggcccaggcccatcaccggcccacaaagagatccgctaccgaggcgtccggaaacgcccctggggccgctacgccgccgagatccgcgaccccggcaagaaaacgcgcgtctggctcggcaccttcgacacagccgaggaagccgctcgagcgtacgacaccgcagcgcgtgagtttcgcggtgccaaggccaagaccaattttccgacaccctcggaactcatccttaacaacaacataaacgctcgtagtcccagccagaccagcaccctcgactcatcctctcccccgccaccgccaccgctagaccttaccctcacccctctctcctccgctgtcttcccggtggcgcgtcctgttctattcttcgacgcattcgcgcgtgcggacaccatggtcgccgtctcgcgccgcgagacctgcggcttcgaacgccccgccgccgatttccgccgcggcgactccgactctgattataaccgccgcatactcctggatcttgacctgaacgtacctcctctcccggaggttgcctgattcatgcagggagttctgtttttttcgcaattattgtttttttggttttttaagcatctgggaggtactactacgcatcttttttgacgaaagtgccctcgagggagcagcaaagtgagtagtggatcacatgatgctcggatttgttgaccattttgtgatgatgaagatatataaccggcccgttatgtaaatacacgttataaccgaaagcaaacgtgcttttgcttggttgcttttttttttttgcaactgaggactcttattcagagtatctcatggttccctctgcaatttctcaaaatatataaatattaaaatttccatc

SEQ ID NO: 3445 - DNA, 1007 bp, Glycine max
cgtaactgcgtgcactctctctctctctacaacaagaattcatctattcatttcagcccatcagcatggcgaaggagaagaaaaacttgtccaacaagaacaagaagccaagcaatgcagacgaggttcacttccgcggagtccggaagcgcccctggggccgctatgccgccgagatccgcgaccctggaaagaagacccgcgtctggctcggcaccttcgacaccgccgaggatgccgcccgcgcctacgacgtcgccgcccgaaacttccgtggccccaaagccaaaaccaacttccccttcctccccgacaacaacaccaacgttaacctcaacaagaagaacaacaacgttaacgttaaatctgacagtcccagccagagcagcaccgtggagtcctccaccccggagcgtgaattcacgcgccgcgccgcccccgccgcaatggatcgctttccgttcctacccatccagcagcaaatcctcgtgacccaccccgtcgcacccatgcgcccggtttactttctcgaccgggcccacttcatgacccagtctttcccgctccggttcgaacccggtccggtccagagcgactccgactcctcctccgtcgtcgtcgattgtcagcccaaaagagagctcaatctcgatcttaacttggctccgcctaatgaatattaacccttttttttatctctttattttttcataaaaaaagatagcagaaagaaaggactaaggagattttttttctctctttttttttttggaagattaatcttccattaagaagttaattagtacatcctttgatgtaaataggttgattttctcttcttttttgttttttaggtccttgatagtattatcagaggacatgatctgaaattgtctagatctgatataatttttcatgtaacatctgaatatctgatgtaattctggctaatatcaattaatcttctcttattaaaaaaaaaaaaaaaaaactcgagacctcgtgcc

SEQ ID NO: 3446 - DNA, 727 bp, Glycine max
  unsure (1)..(727): unsure at all n locations
ccttcccttccttccatgctttctcaatgtgcttagtgaatgaagctttgctaacctattccccttcaaacaagccctccattcatcaaaggttgtttggtggtttggataacatagngcctttctgctcggcctgctctgcctttcctttctttactatctctattttcttttcttatatacacatcaatccatgtctttttcataaccatatcatacctctccttacatgcctccattcataccccgctgatcaagtcctcaaagaacttgaaggcagttttggatttgtgatctatgacaacaaggatggaacagtttttgttgcatctggttctaatggccatattgggctctactggggtattgcaggtgatggttctgttataatttctgaaaatctggagcttataaaagcaagttgtgctaaatcatttgcaccatttccagctggtatgtaaacttggtttctctctacctttgcaaaatcagattttgtaactttagagtttggaaaaattacaattaataaaggatttcataatgtgcaatcaaatattgtagcattgattctaaaccaccgttcggattacatgtcaaagtaatacaattataagacattgatattggaagagtaactacatttcaaagagtgatttgtgtctagattctagaatttaacgcatgaccgggttgaaattgcagggtgtatgtttcatagtgaaca

SEQ ID NO: 3447 - DNA, 378 bp, Glycine max
cagcccaaaaaagagctcaatctcgatcttaacttggctccacctaatgaatattaacctttttttttaatcttttaatttttcataaaaaagccagccgaaagaaaggaaaggactaagcagatttttttttctcttgttttttttttggaagattaatcttccattaaattgtcctgtagattagataagatgttgttaattacatcctttgatgtaaataggttaatttttctgtttttttaggtccttgatagtattaacaaaggacatgatctgaaattgtctagatctggtataattttcatgtgacatctggatatatctgatgtaattctggctaatgttaattttctcttattccaataatttctgctt

SEQ ID NO: 3448 - DNA, 547 bp, Glycine max
cactatctcatttctttctattcatttcttcattccaccatcaccatggtcaaggagaagaagaacgtggtggtcaagaacaagaagccaaacaacaatgccgacgagcttcacttccgcggcgtccggaagcgaccatggggccgctacgccgccgagatccgtgaccccggcaagaagacccgcgtctggctcggcaccttcgacaccgccgaggacgccgcccgcgcctatgacgccgccgcccgcaacttccgcggccccaaagccaaaaccaacttccccgtgccccccgacgacaacaacaacaacaacgttaacgtgaacaaaaacaagagtgttaacgttaaatctcacagtcccagccagagcagcaccgtggagtccgccaccccggagcgtgaagccacgcgccgatccacctccgccggaatcgaccgtttgccgttcctacccattcagcagcaaatgctcatgacccaccccgtggcagcacccatgcgcccggatttatttctcgaccgggcccacttcatgacccagtctt

SEQ ID NO: 3449 - DNA, 288 bp, Glycine max
tatgtaagatcgtaattcggatctcggctcgaggtccgttttctaaatctcattcttcacctgcaactatttggattgctgatttttggtacattctccactttttagagtttttttccttccaatttgttcatatggatgatcattaattattgtccaaaagttgatatttttttcatgttctttctgcagttaataccatatttactgatattggcgcatttctttgagaaagttactaattcctagatagaggcaaaaatgttgggaattttcaaggagaagttg

SEQ ID NO: 3450 - DNA, 284 bp, Glycine max
tcgagcaatcccacacgcttcttactcctctcataacttttctgctccccgttgagaaagatttgaatccaaaggaaaaataacgctaatggctccaagagacagccgagccaccgcgctcattgggcccggcccaagcctatcaccggcccacaaagagatccgctacagaggcgtcaggaaacgcccctggggccgctacgccgccgagatccgcgatcccggcaagaaaacccgcgtctggctcggcactttcgacaccgccgaggaaagccgccgcgcct

SEQ ID NO: 3451 - DNA, 510 bp, Glycine max
  unsure (1)..(510): unsure at all n locations
cttccgttggctttgtcacagtccactgtgcccccaagaaagttccttaacctcaaaccccttatggcaagttgctaacttctcttacttttatctttgaagccaccctcttctaacttctccatttcacaaggaagaagatcagagaacatttagaacaaaaaagagagtttgagaaatggggaggggtaagattgagatcaagaggatagagaactcaagcaacaggcaagttacatactcaaagagaaagaatgggatcctaaagaaggccaaggaaatcactgttctatgtgatgctcaagtttcgcttatcatctttgctgcatctggaaagatgcatgactacatcagccctttctaccacgttgattgacatattggagaggtaccacaagacctcacggaagaggctttnggacgccaagcatgagaacctaaacggcgaaattgagagactcaagaaagagaatgacagcatgcaaatttagctcaggcactttaagggtg

SEQ ID NO: 3452 - DNA, 1833 bp, Glycine max
  unsure (1)..(1833): unsure at all n locations
gttccaacatattcctcaccaaagacaacaacattcggcttggtgactttggtcttgcaaagcgacttaatgcagaagaccttgcttcctcggttgttggaaccccaaattacatgtgtcctgagctcctcgctgatataccttatgggtataaatctgatatgtggtctcttggttgctgcatgtttgagattgctgcacatcaaccagcttttcgtgctccagacatggctggacttatcaataaaataaacagatcctccatttctccactgccaattgtttattcttccacactgaaacaacttatcaagagcatgcttaggaaaaacccagaacataggccaaccgcagctgaattgttaaggcatccgcttttacaaccttatgttctacgctgtcataatgcatcatctaatgttcttcctgtatatcccctagttaatccaaaggataaagcaagaagacctaataaatctagtggtggcaaggaccataaggacaaagaagcaggtttagtaaattgtttgggaacggattcatccaattgagggaaatgctgatatacagataagcaatcttcctaatgatgtggtaacaatttcaaccagtgcagaagacaatcttgagaccaggatggctgatcttaccagctacatagtggaatcttctactagtattagtggctcaaaagatgggtcaacaacatctgaatcaactatttgcagtgtgtgcaaggaggactttaaaagtagacctgcaagggaaacggctaacaatgagatctcttctaagagtacacaaaattctatgcatgaaaaacanagatttgctgctaaacattttcataaattagaagaagacaacataaatgtggcgaccgcagaagttgaagatgcttcttgcaatggaggtttggatagtgctgaagcacagagggaagattcaaaccttgaggactctggtaaatcaacaatgtccagtgaaggcagtagcagcactgataaagataagtccatcaatgaggaaaggtcatcacttattgtacatcctattagggttgaaaatgacactgaatctggaaaccgcttgaagaaaagtgaaaaccctgatgtatatacagaggtccctcatatgaactgcttaatgtctgttagtaatgatgcacttccagttaaggatgatgacatagcaaacggacacattctttgctccacgcataaagatgataatgtagtggaggttgatcaggcaccgagtggcatttcattgagtgtaataactgaagtagatggtgatgaaacaatcaagactccgttggatagtccctgccagcaaagagctgatgctctggaatctctgctcgaattatgtgctcagctactcaagcaagataaactcgaagagcttgctggggtgctaagaccatttgggaaagaagctgtctcatcaagagaaacagcaatatggctagcaaaaagcctcatatcttcccaaaagtttaatcctgaaacctaaggtctggtcataaatctatacattgttgtaagaaatgtgcatttcaaatgtcacatgagtttgttcctttcgagatttgttgcttggttgaagattggagactggaagatagcatgccacatgttctttcttggtgtgttaaatggttatagtaaatgaattaaattattcttgttaggttggatagtcatttgtgcttgttttccagcagtgtatgggtcattgattgtgtaaatttttttgcttccccttttacgaactaaaaaacacccatgcacttggagctcgatgttttatatatttggtttatttgtt

SEQ ID NO: 3453 - DNA, 499 bp, Glycine max
acccttacttaaccccggaattcggtccgagcttagctcaaacctcacctcaataatcttgcgtgctagctagcttaatcatattccaattcctacagaaccaaattattctgctagctagctagtacgtcaaataaaataaaataatcaaatatggcattcagcgggacccaacagaaatgcaaggcttgcgacaaaactgttcactttgtcgaaggtttatctgccgatggagctgcttatcacaagaactgcttcagatgcagccattgcaatggccttcttgcgataagcaattactcatccaccgaaggagttttgtactgcaaggtgcactttgagcagcttttcaaggaaactggaacctaccccaagaaatcccagtcgtctggaaagcctccactcgagctgaatagagcaccaagcaagctttctgccttcttctctgggactcaagagaaatgttcaaaatgcaagaaaaccgtatatccattggaaa

SEQ ID NO: 3454 - DNA, 1612 bp, Glycine max
  unsure (1)..(1612): unsure at all n locations
ggcatctatggattctgcttcattttttcgggacaaaagccttggtgcagactcccctatttctggtttaattgcattactagcagctgttgatgcactttctcatttggatggtcttggtgaccttagtaaacagcttgtttttgcagttttcactggagaggcatggggttaccttggaagtaggagatttttggtagaacttgacatgcactcagatgctgttcatggccttaatcagacattaattgaaacggtcattgaaattggttctgttggaaagggtctcagtcaaggtgttaaaaacttttttgctcatacaaaaggggattcttctgccacaaatcagacagtggctgccttgaaacgtgcacaggagtcactgatatctgaaaacataaagatagcatctgcaagtgcctcaaatcctgggatacctccatcctctttaatgtcctttttggaaaagaatcctgcaatctctggtgttgtcctagaagattttgactctgtctttgtcaacaagttctaccatagtcatcttgatgatttatcaaatgtaaattcgtcagctgtagttgctgctgcttctctcattgcccgaaccctttacatgctcgctagtgaaactgaagatgtacaaaattcaactttggctgctataaatgttaatgtctcacttgttgaacaacttttgggttgcttgttagactgtgatcctggtctttcttgtgaattggtgaagaaatatatttcacccatgtcaacatgtccaagccattatgtaggtgttatcttggacgaacctttatctgcaccatatgcaggatacatcaatgacgttcccaggttcatctggaattttctggccgacagaacttctatcccaagggagaataatatctcagattgtcaacatggttgcaatggtagagatgaagtttgtgtcaaagcagagacagatggcaagggagtttgtgttctctctacaacgagattaatgtatactcgttttgcatcctccaaagaggtggtgtcatcacttgtctcatcgtgttctacaatctataccatatttagactntacctcacgaattggcgccttgtatgttccagcatattcaacacggctaaaatttgaatcaggagtgtggaatgttttgccccctaattcctctgacaaaatgggggttgtggaccctgtctggacagagagcaactggaatacaataggtatgcgggtctacacagtacaaaatgctgcttatgatcgtcttgttctgtttgggggcatcactctgaccgtctttgcataccttgcaatagcaaccgcaagagcttttttcaacaaagcaatgaagagggattgacattttacttccagaatctgactagtaaattttgtgaaactagtaaattctataggattagggtcatttgataggcaaaataacagtttctgaagaatttccaaggatgtgcagtatttggggccgcattcttgtgctcattaattctatttcagaaatttctctataacacgatcatttttgtcacttgtaggtcagtctaaggaaatataatgaaattagttaaaattagcttgtgctat

SEQ ID NO: 3455 - DNA, 589 bp, Glycine max
  unsure (1)..(589): unsure at all n locations
aaagaacataaatagtatatacgagtcctagtttcatataatagttccatataacaaacattatggaagaagattatccacccgggtttcgtttcttcccaacagaagaagagcttgttggcttctacctacacaacaagctagaaggccaaagaaatgccatagccatagccatagacagagttatcccagttattgacatcaatggagttgagccttggaaccttccaacacttgctggggagctttgtcgtggggacacggagcaatggtttttcttttcgcccggtcaagagagggaaaccaggggaggcagacccagcagaaccacagcttgtgggtattggaaggctacaggttccccttgctatgtttactcttctcacaacaaagtcattggggtgaagaaatccatggtcttctacaaaggaaaagcacctatgggaacaaaaaccaaatggaagatgaatgaatacagagccatccatgtcccttcccaatccacccctgccacccttcatttgacatgtgaattcagcttgtgtcgggtatatgtcatatcggngagctttcgagcatttgatcgacg

SEQ ID NO: 3456 - DNA, 733 bp, Glycine max
cctgtgttctttttgacaaatggtggtcgtgaaatctatgaagatgtgaggaggaactcattggaggaggccatgaagctctgtttggagaatggattggaaggaattgtctcagagatcaagggaatattcagaaatcctggtgcagtaaccaagatcaaagagtccaagctttctctactttcttatggaaaattaaacaatgttccagaggcagtttacatgcaacatctaatgggaatcgatggggtaattgtggatttggttcaagaaataactgaggcagttgcggatatgataaagccaacaaagggtggtgaaggagagggtttggttgagggttgtgggaaggtgcagggaaactcaaagcctcaattttcacagcaggagttgtctttccttttgaagctcattccacagttgatacaaatttgaatagcagaagagaagacatttcttgaggctttttaattaatttcacaatatgtactgtgtggcccttcacaaaatcagtggacccccttggagggggtccataaaaagcttaacctttgtacatatatttcttcttttcactttgtagatataaaggaaagaatgattcatgtgtcaacttactggtttggtggtcgccatccaaatatacttgtcagataatgcttttcattgtttcaaaattgttacactggcatttgtctaccactgcaatgagaacatacggaaacttggcctc

SEQ ID NO: 3457 - DNA, 802 bp, Glycine max
tacaagacgacagaagggggtggcagttgtgtgacacagaaattaagctagagcttcatagtttcttcttcttttctcaccttccttctctcccttcagacaaagggacaaaaaatcagtgtgtgagagagagagagagaaattccaaaaccatgtcccacagtcatctaagtttcgcctttgggattctaggtaacattgcctccttcgtgtgctttctggcaccactaccaacattttatagagtttgtaagaagaaatcaaccgaagggttccaatcaattccatatgtggctgcactcttcagtgcaatgctttggatcttttatgcctatgtgaagaccggagaaacgcttcttatcaccatcaatgcattcggttgcgtgattgagacaatttaccttgccgtatttatcacttactgcccgaagaaagctaggatgtcgacattgaggatgattgttttgttaaattttgggggattttgcacaattgtcctcttaacccacctactagcaaaaggagaagaagcccgtgtcaagcttctaggatggatttgcgtagtctttgccactagtgtttttgcagcacctttaagcattattagggtggtaattcggacgaaaagcgtagagttccttcctttccctctttcacttctccttctgataagcgcaattatgtggctcttatacggtatttccctgaaggatatctatgttacactcccgaacgttgtggggttaacatttggagtcattcaaatcggtctctatgcaatgtacagaaacaacaaacccat

SEQ ID NO: 3458 - DNA, 316 bp, Glycine max
aattttctaattctagataattttggtgcttgggagtccctaatgattaaatgaaccaagattttaccatgactgcaattttagagagacgcgagagcgaaagcctatggggtcgcttctgtaactggataaccagcaccgaaaatcgtctttacattggatggtttggtgttttgatgattcctactttattgaccgcaacttctgtatttattatcgcttttattgctgcccctccagtagatattgatggtattcgtgagcctgtttctggatctctactttatggaaacaatatcatttctggtgccattat

SEQ ID NO: 3459 - DNA, 851 bp, Glycine max
  unsure (1)..(851): unsure at all n locations
ctcatatacaactcttatcaacactataaatagcctcctcatgctgcttctcattccacgcacttagcaatcaatcaaaacattcccaataacaataatatacacatcttcaattaagctccttctcctatagccatggctctttctaagcttataattgcttcccttcttgcgtcgcttctccttcttcatttcgttgatgctgatcaatcggcacatgcacaaacgcaggggtctcttcttcagcagatagattgtaacggagcatgtgctgcgaggtgccgtttatcatctcgtccacgcctctgccaaagagcttgtggaacttgttgtagacgctgtaactgcgtgccacctggcactgctggaaaccaagaagtgtgtccctgctatgcaagtttgactactcatggtggcaaacgcaagtgcccttagacttaattggaccactatcctatgcatgcctttgatttatattataaaataaaaataatactatatataacatgttaattgcttaatatgtgctttaagagtaaagaataacatcgtgaaatcaaattacccctttttcaatacgtgttgaatcatcgatcttggtttgtaatttggttgtatattcacaaaattaataagtatattgtgatgtgattaattcccttctctgttatggtgtacttgccttccctgtattgtccatctccatcgtctgtctattaataagaattcttatgtgatattttcatttcaaaaaaggggcgcgaaaaaaaaaagcgggcgctctnnnnnnnnnnnnnnnnnnnnnnnnnnnnnnnnnnnnnnnnnnnnnnnnnnnnnnnnnnnnnnnnnnn

SEQ ID NO: 3460 - DNA, 621 bp, Glycine max
  unsure (1)..(621): unsure at all n locations
cccacgcgaacgaagtgatccctatcaatctgcacatgcacaaacgcaggggtctcttcttcagcagatagattgtaacggagcatgtgctgcgaggtgccgtttatcatctcgtccacgcctctgccaaagagcttgtggaacttgttgtagacgctgtaactgcgtgccacctggcactgctggaaaccaagaagtgtgtccctgctatgcaagtttgactactcatggtggcaaacgcaagtgcccttagacttaattggaccactatcctatgcatgcctttgatttatattataaaataaaaataatactatatataacatgttaattgcttaatatgtgctttaagagtaaagaataacatcgtgaaatcaaattacccctttttcaatacgtgttgaatcatcgatcttggtttgtaatttggttgtatattcacaaaattaataagtatattgtgatgtgattaattcccttctctgttatggtgtacttgccttccctgtattgtccatctccatcgtctgtctattaataagaattcttatgtgatattttcatttcncaaaaaaaaaaataaaaaaacaaataaagatagaatcaaaaaatttaaagata

SEQ ID NO: 3461 - DNA, 802 bp, Glycine max
aggacgcacttagcaatcaatcaacacttccaattacaatatacacatcttcaattaagccatgactctctctaagcttatagttgcttcccttcttgcctcgcttctccttcttcatcttgttgatgctgatcaatcggcacatgtacaaacgcaggggtctcttctgcagaagatagattgtaatggagcatgtgctgcgaggtgtcgtttatcatctcggccacgtctctgcaaaagagcctgtggaacttgttgtagacgctgcaactgcgtgccacctggcactgctggaaaccaagaagtgtgtccctgctatgctagtttgactactcatggtggcaaacgcaagtgcccttagacttaaaagttgtgtttggattgctagctgctgatatatcctccgtttatgtttaacctcagtttgaaggaagtatcatattccttatttctgtctcaaacgttgtgctgcagcaaatttactggagatccaaacatggatttaattggactaggatctatccataccactatcccatgcatggctttgatattatattgtaaaataatactatatataacatgttgcttaatatgtgctctgaagagtaaagaataacgtcatggaatcatacccctttttcaatacttgttgaatcatcgagtgtcttggtttgtaatttggaatttggatgtatattcacaaaattaataagtatattgtgatgtgattaattcccttctctgttatggtgcgttccttgtactgtccatcgtctattaataagtatattgtgatgcc

SEQ ID NO: 3462 - DNA, 822 bp, Glycine max
caattttcccatattattcacagaaaggctaaaagggccctataaaactaaacgctccccttctcgaagaggccgctcgctctctagggtttttctttttctcttctcactgcatcgcttcaggttcttctgaaaagatgtctcgcgtgtatgttggtaacttggattcacgagtcaccgagagagatctcgaagacgaattccgcgttttcggagttattcggagtgtttgggttgcacgtagaccacctggttatgcttttattgactttgatgaccgcagagacgcacaggatgctatccgtgaattggatggcaagaatggttggagggttgagctttctgttttcctcaactagctagttaagtcttctttttggcctatggggcaagcagatgctgctctctctttcttctacttctgccttggcctgcagtaatggttttttcttggttgtgtcttcgtcaaagtctgctgctttgtacagtttgactacttctactactactgcatgtaaagagaattaagaatgtgaacacaggggatttgcactgctatcgcgagctacacttctgttgcataatgggtttgttttatgagatatgtgcttctacacttaacctatggggaccatgtgcgtgctgtctctgtgctggatatgttccctgtgggcaaatttgcgcgctccaataagctgttagcgacccatgaacttttgaaaatattatggtaacacaatcattgctttactgaatgaacaactattgcctggatatgcctttatgatgatactgcatgcccgtgaatagtgctgtatttta

SEQ ID NO: 3463 - DNA, 606 bp, Glycine max
agaaaaaagggccctataaaactaaacgctccccttctcgaagaggccgctcgctctctagggtttttctttttctcttctcactgcatcgcttcaggttcttctgaaaagatgtctcgcgtgtatgttggtaacttggattcacgagtcactgagagagatctcgaagacgaattccgcgttttcggagttattcggagtgtttgggttgcacgtagaccacctggttatgcttttattgactttgatgaccgcagagacgcacaggatgctatccgtgaattggatggcaagaatggttggagggttgagctttctcacaactctagaggtggaggtggtggtcgtggtggtcgctctggtggttctgatttgaaatgttacgagtgtggtgaacctggtcattttgctcgtgaatgccgcatgcgtggtggttcaggaagacgccgtagccgtagtccgcccagattccgtaggagcccaagttatgggcgaaggagttacagtcctcgtgggcggtcccctagcgccgtagtttgtcacctcgtggacgtagctacaccggctctccttcgggcgtaggagtcatatctatgaatgcctagg

SEQ ID NO: 3464 - DNA, 679 bp, Glycine max
tgtgttcaaggaaagaatactgttttttactttgaagtgccaaaagggcatcatcttgctttggatcccctgttcatatgtgacactgtactttgtgtgatatatttaaaatgtctctgtagcaaaggacggaagaatattaggcatgatgagtgatgactggagtaggtaggatctgaattgttttttctttttcttttaaaggcatcctacatgccacatcatttcctttttgcttgagtttacaagttattagttctgctatcaatattcatttttgcgtgtttgtactgacatgtgatgctcttctaaaaatatgcatccttatgctaatggaaatggccttagggaacgacgcagaagcagaagttgattttgagacttggtatctgtgattgttaagagaatagtgagattttgttaatctatagtggtgcttagactgaagtatgagtctattttgttgggcaaggccctgagtttctactcttggattgtattcgttagtttctttatgtcaaagcttgtgtttaatttatttgcagaatacttgtagtttcattgcaggtaatgatcttgttaaggttgttgctactagtatgttaaatagagttccagatctttgcagaatacttgtagtttcattgcagactgaagtatatgcttttcttatcttttg

SEQ ID NO: 3465 - DNA, 455 bp, Glycine max
agggtttttatttctctcttctctctgcatcgcttcaggttcttctgaaaagatgtctcgcgtgtatgttggtaacttggattcacgagtcaccgagagagatctcgaagacgaattccgtgttttcggagttattcggagtgtttgggttgcacgtagaccacctggttatgcttttattgactttgatgaccgcagagatgcacaggatgctatccgtgaattggatggtatgtttagaagaattatgttgttggaatgtaatagaattaaaatcaaaattaaaatgtgcatatatatgtatatttgctacattcttcttatctgctaatgtgttattgtttttcccccatgttttttccggttgatatgttgaagggttttcctcaactagctagttaagtcttctttttggcctatggggcaagcagatgctgctctctctttcttctact

SEQ ID NO: 3466 - DNA, 660 bp, Glycine max
aatggtcggagggttgagctttctcacaactctagaggtggaggtggtggtcgtggtggtggctctggtggttctgagttgaaatgttacgagtgaggtgaacctggtcattttgctcgtgaatgccgcatgcgcggtggttcaggaagacgccgtagccgtagtccccccagattccgtaggagcccaagttatgggcgaaggagttacagtcctcgtgggcggtcccctaggcgccgtagtttgtcacctcgtggacgtagctacagcaggtcacctccttatcgtgggcgtgaggaggtcccatatgctaatggaaatggccttagggaacgacgcagaagcagaagttgattttgagacttggtatctgtgattgttaagagaatagtgagattttgttaatctatagtggtgcttagactgaagtatgagtctattttgttgggcaaggccctgagtttctactcttggattgtattcgttagtttctttatgtcaaagcttgtgtttaatttatttgcagaatacttgtagtttcattgcaggtaatgatcttgttaaggttgttgctactagtatgttaaatagagttccagatctttgcagaatacttgtagtttcattgcagactgaagtatatgcttttcttctcttttg

SEQ ID NO: 3467 - DNA, 881 bp, Glycine max
gggtcgtgtaacaggaattgacggaggcattcgaaatcggcggagatggttgccatgaggtttcaccagtaccaggtggtgggaagggctcttcctaccgaatccgatgagcatcctaagatctaccgcatgaaactctgggccaccaacgaggtccgtgccaaatccaagttctggtattttttgagaaaattgaagaaggttaagaaaagcaatggacaagtgctagccatcaatgagatttttgagaagaatcctaccaagattaagaattatggaatttggctgcgttatcagagccgcactggttatcacaatatgtacaaggaataccgagatacaactctgaatggtgcagttgagcatatgtacactgaaatggcatctcgtcatagggtgaggcatccatgcatccagataattaagactgccaccatcccagctaagctgtgcaaaagggagagcaccaagcagtttcacaattctaaaatcaagttcccattggtgttcaagaagattaggcctccaactaggaagctgaagacaacatacaaggcatccaggccaaacctatttatgtgattcagttaatggaatttccctgctttttgattcattaagtataaaaaggaagagcttagaggtgatccatgtagtgacaaacttcgttgcctgcaaccatagtttgcattcttttaagctctgaaaattttgtttttgaaagagggtgttttatttaattttatatttttgcagagtcgtctattttactcattctgatgtattcgatcaagttgcttttgaatttagcgattacttttttgtctcggttctgggtttatcacctgttagttgatatgtgctctctgatttttggtaat

SEQ ID NO: 3468 - DNA, 411 bp, Glycine max
  unsure (1)..(411): unsure at all n locations
gaaaaacactgcaactgatagaacactaagcagttgctaccatggtcaccttcaggtttcaccagtaccaggttgttgggagggctcttcccactgaaactgatgtgcatcctaagatctacaggatgaagctgtgggccaccaatgaggtccgtgccaaatccaagttctggtatttcttgagaaagctaaagaaggtcaagaaaagcaatggccaaatgctagccatcaatgagatttttgagaaaaatcctaccaagatcaagaattatggaatttggctgcgatatcagagccgaactggttatcacaacatgtacaaggaatatcgcgatactactctaaacggcgctgttgaacacatgtacaacgaaatggcatctcgtcatanagtcaggtctccatgcatcc

SEQ ID NO: 3469 - DNA, 740 bp, Glycine max
gaagacgacagaaggggattgcaaggttatttgaagaatctgaaaggtactagctagctagctagtacttctacactgtgaggtagcatcatgaggaagcgccaagtagttgtgagaagagaggagcctcaaaggagtgcgctaggacggtgaaatacggcgagtgccagaagaatcacgccgcgaatgtgggagggtatgctgttgatggctgcagggagttcatggcgagtggcgccaccggagaaggaacaagtgctgctctcacttgtgccgcctgtggttgccacaggaacttccacaagagacaggaaaccgaagtggtgagtgagtgctcctcgcctacctccaatggaacttaatcagagctagcttcgtcataatgtttatacctcaacaattatgctgctacactccatatcatatcccttgtaatatattttgtggaatttgcttttgcttgttattaattaagaattggggttttaattaattaagcatactactgaactagtatgaatgaatattctagaattgttatatatagtaattctagagtggtaatgtatggtgatgattttgaggttgatgtgtgtaaagagataaagggcaatcacaagttgtttttgtgatgatgagtgtgcagagttttgaccatcttctcttcttacatgtttggtttaattaacttgttttgaagacataattgcttgtttttgttgtaagaagaaaggattaat

SEQ ID NO: 3470 - DNA, 298 bp, Glycine max
caaggtttgaagaataatttgaaaggttactagctagtagagctagtacttctactactgtgagagtaacatcatcatgaggaagcgccaagtggttgtgagaagagaggagcctcagaggagtggcgttagggcggtgaaatacggcgagtgccagaagaatcacgccgcgaatgtgggagggtatgctgttgatggctgcagggagttcatggcaagtggcagtggcagcggcggcggcagcggcggcggagaaggaacaagtgctgctctcactgtgccgcgtgtggctgccaca

SEQ ID NO: 3471 - DNA, 253 bp, Glycine max
ggttattggaagaatctgaaaggtactagctagctagctagtacctctacactgtgaggtagcatcatcatgaggaagcgccaagtagttgtgagaagagaggagcctcaaaggagcgctaggacggtgacgtacggcgagtgccagaagaatcacgccgcgaatgtgggagggtatgctgttgatggctgcagggagttcatggcgagtggcgccaccggagaaggaacaagtgctgctctcacttgtgccg

SEQ ID NO: 3472 - DNA, 443 bp, Glycine max
ccccccggccacgtcagtagactcacacctgaaactctcaatggctgaaactcccacaatccgtttcggcgtcatcggctgcgccgacatcgcgcgcaaggtctcgcgcgccatctccctcgcccccaacgccgccctttacgccgtcggcagccgctccctcgacaaggcgcgtgccttcgccgccgccaacggcttccccgccgccgccaaggtgcacggctcctacgaggcggtcctcgacgatcccgacgtcgacgccgtgtacgtaccgctccccactagcctccacgtgcgctgggccgtgctcgccgcgcagaagaagaagcacgtcttgctcgagaagcccgtcgcgctccacgcggcggagttcgacgagatcgtcgaggcgtgcgaatccaatggggtgcagctcatggacggtacgatgtggatgcaccacc

SEQ ID NO: 3473 - DNA, 855 bp, Glycine max
cgcgtacgtaaactcggaaatcggctcgaaggcccagtgggagaggcagaaagaagagaaaaaaggggaatggcatggttgcagttgcagagaatcgtcaccaataccaagggaggtgctaatttgatctcaccgctcccactttcacgattcttctcgaaatcttcttccccctatgttgtgaaagttggaattccagagtttctaaacgggattgggaagggggttgagtcccacgttcctaagcttgaatccgaaatcggtgatttccagaagcttctcctcattcgcacccttaaactcaagaagcttggcattccttgcaaacacaggaagttaatattgaaatacacacacaagtacaggctgggattatggaggccacgtgttgagtccatcaatgcctgattggtttctaattagtaagtagtcgctgtttgttagaccatattgcaaatgtttagccgcagcagaatgacaatgctctacttgaaaagatcaagtcgcactgtctttggagaccacccatcttttccatcacattcatctcttgcggacaaagcttggtctttgcaccggttatgtaatgtacaatggacttgtcttaattgacagtgtgtgtttgctatttcataattcatatcccgcgacatcattgcatattatgtaatgtatcacttgcttttagccatacgagtattgcgggcttaggagtccgcgatgctttcatttacttcatggcagctgcggttcaatccaaagatgctgttgcagtttttttgcatcccttattagttgttccatgattgaccggatactctgttgtgcatgataaaactagacattatttatctt

SEQ ID NO: 3474 - DNA, 336 bp, Glycine max
cgctgtttgttagaccatattgcatatgtttagccgcagcagaatgaaaagttcagctcactgtcttttaaggccacccatctttttcatcacattcatctctagtggacaaagtttggtttttgcaccggttatgtacaatggatttgtcttaattgacagtttgtgttagttatttcataattcatatcccgtgacatcattgcatattatgtaatgtatcagttgtttttagcgataagagtattgagggcttaggagtccgcaatgctttcatttatttcattgtagctgcgtttaaatccaaagatgctattgcagttttttgcatccctt

SEQ ID NO: 3475 - DNA, 1660 bp, Glycine max
aaaacagattcagttcctaattactcaactcaacagttacagtgatacatcttacagcgtcgtgtatcttccaaaaaaagaagataagatggttagaattagaacgccgtgtttgcgaaaaagtgggcgtttcgcggaaggctcgcactcactctcactcgttctgtccctaaaattaaaattcaccctatatgcactccaaataaatccaaaactcgaatatctccttattctctctcttcccaatctcaatcccagtgagtgctttctttctgtaactaaccccaatcatcaactcagtcagcgaatgaatctgtggacggacgagaactcctcggtgatggaggccttcatgccatcctccgatctctcctccatctggccccctcccgctcctccgcagccgcaatccacggcggtcttcaatcaggacaccctccagcaccgcctccaggccttaatcgagggcgcccgagagacctggacctacgccatcttctggcagtcctcttacgactattccggctccactctcctcggttggggcgacggttactacaaaggcgacgacgacaaagccaaagccaaggccaaggccaaggccaaggtcaaggtcacttccgccgccgagcaggaccaccgcaaaaaagttctccgcgaactcaactccctgatctccggctcctcctcctcctccgccgcctccgacgacgtcgacgaggaggtcaccgacaccgagtggttcttcctcggtctccatgacgcagtccttcgtcaacggcggaggacttcccggacaggccttcttcaactccgctccggtgtgggtcaccgggggcgaccgtctctctgcctcggcctgcgagagggcgaggcagggacacgtgttcgggctgcaaaccctggtttgcataccgtccgcgaacggcgtcgttgagctggggtccaccgagttaattttccagaacccggatctgatgaacaaggtgaaggttctgttcaatttcagcaacaacaacttcgacatgggttcttcttggcccgccaccagcgccgatcagggcgaaaacgacccttcctcgctctggctcagcgatcccgaagttagggattccgttaacactgctgctgctaccccttcggtcatggttcctgcacagactcaggggatttcgatttcaaagaccatgcagttggaaagttctattcaaacccctggttccagtactttaaccgaaacccctagttctattcacgcgattccgcagaaccagagcgtcttctccagagaattgaacttttctgagtatggtttcgacccaaagactgggaacaatcagaatcaccattctctgaagccggaatccggcgagattctcagcttcggcgagagcaagagaacctcctacggcggcgtcaatgggaattccaattccaattcccattttttctccggtcagtcgccgtttgttgctgctgcggatgagaacaccaacaaaaataacatcaacaacaatgggaagacaaagtcaccgaattcgcgcggtagcaacgacgacggaatgctttccttcacctccggcgtgattcttccggcctcgaatttgaagtccggtggcggcggcgattccgaccactcggatctggaggcttcggtggt

SEQ ID NO: 3476 - DNA, 705 bp, Glycine max
ctttcacttattctcagtgttatctccagacctaaaattaaaattcacactaaatgcactccaaataaattcgaaacgcaaatgcaccttctcttgttctctctctcccaaactcaatccctgtgagtgctttctttctgtaactaacttgttccctcgttaaccctaatcatcaactcaagcagtgaatgaatctgtggacggacgagaactcctcggtgatggaggccttcatgtcgtcctccgatctctcctcaatctggccctcgccggcgccgccgcaatccacggcggtcttcaatcaggacaccctccagcatcgcctgcaggccttgatcgaaggcgcccgagagacctggacctacgccatcttctggcagtcctcttatgactattctggctccactctcctcggctggggcgacggttactacaaaggcgacgacgacaaagccaaggcaaaggccaagtccaaagccacctccgccgccgagcaggaccaccgcaaaaaggttctccgggaacttaactccctcatctccggctcctcctccgcttccgcctccgacgacgtcgacgaggaagtcaccgacaccgagtggttcttcctcgtctccatgacgcagtccttcgtcaacggcggaggactgcccggcaggccttcttcaactcgacccccgtttgggtcaccgggagtgaccgtct

SEQ ID NO: 3477 - DNA, 462 bp, Glycine max
cttttctcttcaatctcaggtctcccagtcacactttcactgtcaaaccaacatgaatctgttactcgccgctgtaactctcctcgtcttttatgcggcgaaatttttttactcaaatttctgggtcccatggagaacagagcggcacttcaagaggcaagggatagggggccctggctaccgtccgatcttcggaaatacatcagagatccgacggctctacgcagaagccaagtcagaggcaagtgcatcccctcctccgttccaccacgacatcatgggacgcgtggctccattctacgaccggtggtctcgcgcgtatgggaaaactttcttgtactggttcggttcgacgccgcggttggcggtaaccgaaccggacatgattaaggaggtgctcatgaacacgcgcggggagtatgtgaaagttccgttcaaccctcagtccaagttgctctttgg

SEQ ID NO: 3478 - DNA, 2805 bp, Glycine max
atttaattataaattaagatgtgatttaaggggagataaggccatgtgaggggtcctctctgagattttgctccaaaaccttccccttcatctgatttgcagagactaacccaagaaaggaccaaccaaaaccaagtgctttcttggagcttggtagagagagaaagtcccactttctctctcttctcttttttctttctgtgtgtgttgtgtgcgtgcgtgcgtctgagggtacatgcaaaacagtgagtttgagatagagaaagaaggagttcaagattgttgttcaattttgcaaaaactgcccatcaagtacttttgttgttttttttttcgattttgcttcttatccaacccgttcttgatttggaaggtgattccgggaaggaattgttagggtgctgctgaggctgttcatcacctatctttgtggtgttgaatttgccacttctgataaagacagaagaaagcaccggattgaaggttgagttgttgttgttgcttgttgctgcttctgtctcttgttgtggagactatgttggagggtcgttcctgcgtggttccgaggttgtttcccagttcttgccaggcagataacaagtggtctttcatgacatacctgccggacttggacataaagaatggcaagcgccctttagacactgatggggaggaagaaccccagccaaggaaggtgaataggagagtggattctcgccatcatggcgagaccactcggttcttgtttcaaaaacaatcgtgtcatgctgatgattctgttgttccacaaatggatcaggatcggaggaaggattgcgtgttgttgagtaattggcaaagagttgagaaggctgatgccttttctgcccagcttttggatgaacgagagcagcatcgcgctggggattcattggtggtgtccactgaccttcaatctaataaaaaggaggaggatcagttagaggattcatcagattctggtgttcagcaatctgatgaacagaagatggagcaggaggtggaaggggatttgctggatgctggtgaccagcagccacctgatgatcaggaagagcatcatggtggggattcatcagattctggttctcttttgccccgaatgaatcgggacagctcaatcgcttgtctcagccgctgctccaggtccgactatggctctctggcctcgctgaataggagctttcggaacacaatccgaagtggtgagttgtataggtggaggagacttaatgggataatagaacactggatttatttttcctgtgccctccttgaatgggaggcctatgatccaattcgcgaacggtggatgcatttaccaaggatggcttctaatgaatgcttcatgtgttcagataaggagtctttagctgtaggaactgaacttcttgtgtttggaagggagatgaggtcccatgttatttacagatacagtcttttgactaactcatggacatctggaatgaggatgaatgctccaagatgcttgtttggatctgctagtttgggggagattgctattttagctggcgggtgcgatttggacggtcatatccttgactctgctgaactgtacaattctgagaatcaaacctgggaactactccctagcatgaacaagccgaggaagatgtgctctggggtatttatggatggaaagttttatgttattggtggaattggtggaaaagattctaagcttcttacatgtggtgaggagtacaatatacaaactagaacatggacagaaattcctaacatgtcccctggacgcagtgctaggggagctgaaatgcctgcaacagctgaggcaccacctctggttgccgttgtaaatgatgaattatatgctgctgattatgctgacatggaggtaaaaaaatacgacaaggagcgaagagtgtgggttaccattgggagactacctgagcgagcagtgtcgatgaatggttggggtcttgcattcagggcgtgcggagatatgcttattgtcatcggtggaccaaggactcatggtgagggttttattgaactcaattcatgggttcccagtgaaggacctccacagtggaatctactcgccagaaaacggtctggcaactttgtctataattgtgctgtgatgggatgttgaagaattgaattgtgaaaggtatcacacattttgatgcttcaaatccaatgagttgcacaacattgattcatccattgacacaggattcttgctaattggtactttcccccttctttttcgatgatattttcctttcaaaggcgggggaggatggggaggagattcagatatttctcaagattggctgaaaagttttccaagaaggaggctcttcggtcttttatttttatgttcaaaatttcagtttccattttgttccattgaaattggtatcttcccccatttacatttacatgaaaattttcaaagcttgctatcatgtagcacaggaataggttaaataattgaagtctcaacactaatgtaggttattggtgttgtttattttaagtttttctttttttcaagaacacacaactagatatttgattttcatgatcataaattttcttagcttgaaggatgggaataatttccgatagttgtttattaattttggattatttagcaatccaattttcatttcaattcaattcttggactatgtattttgagctttccctagcatggagaaagtagtatatagcctgataaacattccatttatcacttcttgcaaatctaacttggcaccataaaatattttctac

SEQ ID NO: 3479 - DNA, 468 bp, Glycine max
ctttgtattttgctccaaaaccttccccttcatctgatttgcagagactaacccaagaaaggaccaaccaaaaccaagtgctttcttggagcttggtagagagagaaagtcccactttctctctcttctcttttttctttctgtgtgtgttgtgtgcgtgcgtgcgtctgagggtacatgcaaaacagtgagtttgagatagagaaagaaggagttcaagattgttgttcaattttgcaaaaactgcccatcaagtacttttgttgttttttttttcgattttgcttcttatccaacccgtaagtttcttgaatcattgctctctctctctctctctctctctctatatatatatatatatatatatatatatatatatatatatatatatatattattttctagctctcttatgaatgagctgttttgtttgctattgttgttaagattgtagatttatggagatct

SEQ ID NO: 3480 - DNA, 1486 bp, Glycine max
gttggtactaaagagtaaatcccacaggatgcatatcgtctcattccgtgacagattctgtgtacgatactgtcgtagagctaaaaagcaaaatatatgaatttttttttctccttttctggagaatatatataggagcacaatacaatctgagtcagaatcagataagtgttggtttgtttttttgttgagaagagagaatggctgtggcgtcgtcatcatcccttatcacgttgaaggtgaaaccttgcattttcgggtctcctcggagatccgcggtggttcggaattgtgcgaagtcaacggcggggacaatatcgacgagttggagcctggacagctggagggcgaagaaggcgcttcagcttccggagtacccagatgcgaatgaattggacctagtcctccaaaccctctcttcttttcccccaatcgtcttcgccggcgaggcgaggaatctggaggagaagctcgctcaggctgccatggggaacgcttttctccttcagggcggtgattgcgccgagagcttcaaggaattcactgccaacaacatccgtgacaccttccgtgtcatccttcaaatgggtgtggtcctcatgttcggtggccaaatgcccgttatcaaggtggggagaatggcaggtcaatttgcaaagccgagatccgattcatttgaggagaagaatggagtgacgctcccgagttacaggggtgataatgtgaatggcgatgcatttgacgcggcatctagaatccccgatccacagaggatgataagagcctactgccaatctgtgtctactctgaaccttttgcgggcatttgccacgggaggttatgctgccatgcaaagggttaatcaatggaatcttgatttcatggagcatagtgaacagggagacaggtaccgtgaattagcccatagagtggatgaggctcttggcttcatgaatgttgctgggctcacagccgaccatcccatcatgagtacaacagacttttggacctcccatgagtgtttgcttctcccttatgagcaagcacttactagggaggattctactactgggcttcattatgattgctcagctcacatgctatgggttggggaacgtacccgccaacttgatggtgctcatgttgaattcttgagaggagttgctaatccacttggcatcaaggtgagtgataagatggttcccgatgaacttgttaagctgatagatattctgaaccctaaaaacaagcctggaagaattacagtcattgttagaatgggagctgagaatatgcgagtgaagcttccacatcttatcagggcagttcgcagagcaggtcaaattgtcacttgggttagtgaccccatgcatgggaacaccattaaagctccatctggacttaaaacccgctctttttattcaataaagtcttaacttcagttctatttcttttgtttttgcatttttcatataatagaagctta

SEQ ID NO: 3481 - DNA, 772 bp, Glycine max
gttcccgatgaacttgttaagctgatagatattctgaaccctaaaaacaagcctggaagaattacagtcattgttagaatgggagctgagaatatgcgagtgaagcttccacatcttatcagggctgttcgcagagcaggtcaaattgtcacttgggcgagtgaccccatgcatgggaacaccattaaagctccatctggacttaaaacccgctcttttgatgcaataagggctgagctgagggcattctttgatgtgcatgatcaagaaggaagctacccaggaggggttcatttagagatgacagggcagaacgtgacagaatgtgttggaggctcaaggactattacttatgatgacttgagctcacgctaccacacacattgtgatccaaggcttaatgcttctcaatctctcgagcttgcatttaatattgcggacaggttgcgcaagagaaggctcaattcaactcgatcacttggaatttagacaagagggggtctgtcttcctttgtacctggatcacaatactggtcaaacatgtgttgagttttcttgagcacagtgaacaaatactctactgggagccactctaccgagtttcataagaacttaaaatagtcggcacaattaatagttgtgctgtatgagtgttacaagacagttcaaaacactgcaggtgtatgtacttgcagtgttttgaactgtcttggccaattgccatttcaatccttagtttctttattaaacgtttccatcatacacagatccc

SEQ ID NO: 3482 - DNA, 755 bp, Glycine max
aacaaagcgtcgttcggtggcaaggggacaacagacgggggagaacatcgacaaaaagataaagggtgaataattagcagctccttctagttccggtgtcggtgtgggtgtttgaatctggtgaaggatgtcaattgttccaatcaaccagggtgatgccaacggctccaaccccttcgcttcgtggggtcaattcgtggattttcctctccctccttccatctccggcttcttccccggcttggaattcggattcggattcggatcatccgtgaacacacgtgtggactggagggagactcccagagcgcacgtgtggaagctggtgcttcccggcttctccaacgaggacgtgctggttgagctccaagacgagagggtgctccaagtcagcgtggagagcggcaacttcgtcacgaggtttaaggtccccgacaacggtaacctagaacaactcaaagccaacatgcgtcacggggttctcgttgtcactgttcccaagtttcatcaacccactactactgcccctgccaataggaatgtcagggaagttgaaattgaaggcaccgactgaacccagtgaccaaaacgctgtctttaatcatgtcttgttcgatggaactgtgttttcttatatgttatgcgtgcgataccctaccctgctctgttttaagtcagttaaaccaattaatgtatattactagtatgtagagtatctcgcatctctgttttaaaattgatggtttagttttgcc

SEQ ID NO: 3483 - DNA, 553 bp, Glycine max
gacgtcagacgcacgcgtacgtaaactcggaaatcggctcgaggaagattgagaaaggtaaaggtccttgttgttccggtgtgctgctagagaatctggtgaaggatgtcaattgttccaatcaaccaaggtcactcccaggactcttgggatcaattcatcgattttcctctccctccttccatctccagcttcttccccggcttcgaattcggattcggctcatcggtggttaacacacgtgtggactggagggagactcccagagcccacgtgtggaaggtcgtgcttcctggcttcacaaacgaggacgtgctggttgagctacaagaccagagggtgctccaggtcagcgtggagagtggtaacttcctgacgaggtttaagatccccgacaacggtaacctcgaacaactcaaaaccaacatgcgtcacgggattctccttgtcactgttcccaagtttcatcaacccacttctaataggaatgtcagggtcgttgagattgaaggcaccgactgaacccagttagcaaactctgtctcttccaagt

SEQ ID NO: 3484 - DNA, 533 bp, Glycine max
caaagaaccaagaaaccaagcaaatcattgttctctctgtcctgtgttttgtgatttcccccttcaagccaccaccaatggccaacaacgagatgcaagttgagaggggtttggacttggaaaggtacatggggcgttggtatgagatagcctctttcccttcaaggaaccagcccaaggatggcgtgaacaccagagccacatacactcttaggaatgatggcactgtgcaagtgctcaacgagacttggagtaatggcaagagagggcacatagagggaactgcttttaagtctaaccgcacaagtgatgaggccaagttcaaggtcaagttttatgtccctccctttttgcctatcattcctgtaacaggggactactgggttttgttcattgatggtgattaccagtacgctttgattggccaaccaagcaggaattgcctttggatattaagcaggaaaccccatctggatgatgagatctacaacaagcttgttcagagagctaaggatgtacgatatgatgtgagc

SEQ ID NO: 3485 - DNA, 472 bp, Glycine max
cgcatgcacgcgcgggattcggctcgcgattgatacgcattcaagccctagatttcaatctagggtttctttgcacgctaattccatcttcaaattctgccttcattcgattcaggggggaattaaattgtttctatatttttttcgaatttaccacaaattagaaatcgataaagaaaaatggtgagggtgttgagaagctgcattcaatcgattttgaagctggtgaactcggtgattgggatggcggggctagccatgattctgtactccgcatggatgattagggtttggcagaggaagatgggcgaacttccctttggtcacgattctgattacccacctccgtggttcatttacatgtttcttggccttggagttgctttctgtgtaatcacttgtttaggtcatgttgctgctgaaactgctaatggcttgtgcctgtatttgtatataagatttggtggtttgc

SEQ ID NO: 3486 - DNA, 1347 bp, Glycine max
  unsure (1)..(1347): unsure at all n locations
agaagagctangacgncgcatgcacgcgtaccgtagcttcgaaattcggttcggggctactcatttcttctcatcttctttttcttccctttaaaattattattccgtgcaaacacaacaacaacttcatcaccaacacgaagaacaagattagcgttatgggtctcttcctttctaggaatttggcttgcaaattcatatacccttttcttttttccaataaggtttcaaaggatttgttccccaagcagttggagaacatgatgtctctggtctctcctcgtactggcaggcatttgcagcgctatgacaaaggctgtcgccaagttgtgggatgcattccttacagatacaagaacaatggaacacaggataaggaattagaggttcttgtgattagtgctcagaagggtcatggaatgcagttcccaaagggtggttgggaaactgatgaatccatggaacaagctgctttaagggaaaccatagaagaagctggggttgttggcagtgttgaaggtaaactgggaaaatggtattacaagagcaaacgccaacccataatgcatgagggatacatgttccctttgcttgttaagaaggaattggataactggccagaaatgaacacaagaaaacgaagatgggtaagtgtgtaacaaaaaattattcacttgtcaaattcactttcgcgattgcaataatcttaatttggtatgttcaatttgttagtgccctaatgtttcattgatgtgcatcatcatgcagatgactgtggatgaggcaaaagtaatatgcccttatgcttggatgaaggaggctttggatgaattggtcagaagacaaactcaactgcactccaaaaaggatggggatatgagtaggttgtaaatttgtaatagcgtgtttggttccacatcacagatttgttttttcacgcttagtcagaaactaatgcttacagctttttcacatcccaaacgtgatttctcacttctcaaaaaaattccaaacatgcacttggtctcttgcttttggaatctacaaagtggtagaacagaagcactcacgcggtgttgttagggcagagaaattaggacaagtcatgaagaggagggaaagtgcagttcaaggggtgtgctcacaatttgttcctctcttcaaattggctatagtttgaaagttctgcagcagatctagtcatagaaatcagttgtagattgtagaaatcaattcattctttcattcatttgattcttttgtactgtaatgtaatgtatgtaggccatgtgtagaatacattattcttcgggtacccaaaaaatcataaaaaaatcttccattttg

SEQ ID NO: 3487 - DNA, 609 bp, Glycine max
cgtacgcgtggtgtatggtttaggtgggttttgagcacttggcacagaagacttagcagagaggaagaaagatgatcatccctgttcgttgtttcacctgcggaaaggtcattggaaacaaatgggatacctatttagaccttctgcagtcagattacagtgaaggagatgccctggatgctttgggactggttcgatattgctgtaggcgcatgcttatgacccatgtcgatctcattgagaagttattgaattacaacactctggacaagtctgatcccagttaagaaggccttagggagcaaaggatgaccaagatgtttcagttgaattccatgctatctggccaatgaacaatcttttttccttttctgaattgttttgctacaagctggtcatggttgtgtgctggttcatgcgaattatggttatccgttcgttaaaggggctatatgacaaggcccaacttatgttaattactctttttttagtctttctgatgcaaagttgtcttttgatattaatatctcatacacaattatatgtctgcccaaacattaggagaccgactcccagatttgattatttaagaatgtccaaattgatccc

SEQ ID NO: 3488 - DNA, 587 bp, Glycine max
agagtgagttcggttatcttctttctatttcgtcattttcttcgcttctttcttcttctctgttaattcttttcttacatcttaaaaaacaatataaagaagggcgtggttttgttgtgagtactgagctgagaagagggagaagatgatcatccccgttcgttgttttacctgtggaaaggtaattggaaacaaatgggatacctatttggaccttctccaggcagattacagtgaaggagatgcactggatgcattgggactggttcggtattgttgtaggcgcatgcttatgacccacgttgatctcattgagaagttgctcaattacaatactttggacaagtctgatctcaattaagaagaaggcttgaggaataacagatgaccaagatgcttctgttgtattccatgccctatggcaatgcatcaatttttcttttcttttatgaattgctttggtacaagcaggtcatgtttgtgtgctggatcaggtcaagtgtgtttgttatcagttctgacgagctatgacaagacacagcttatgttaatatctcatatgatgatattacatgacagaccaaact

SEQ ID NO: 3489 - DNA, 432 bp, Glycine max
acatcccaaacgtgatttctcacttctcaaaaaaattccaaacatgcacttagtgtcttgcttttggaatctacaaagtggtagaacaaaagcactcataagctgttgttagggcaagagaaattaagtctagtcattaagaggagggaaagtgcagttcaaggtgtgcccacaatttgttcctcccttgagtttgtttgttcctctcttccaattggctatagtctgaaagttctgcagcagattacggatttgtaggggcgtagttgggatctagccatagagatcagttgtagattgtacaaaatcaattcattctttgcattcatttgattcttttgtaatccaatgtatgtaggccatgtgtagaatacattattcttcctgtcctcataaaattattaaaataaataaaatcttccattgagactg

SEQ ID NO: 3490 - DNA, 375 bp, Glycine max
aagctgctttaagggaaaccatagaagaagctggggttgttggcagtgttgaaggtaaattgggaaaatggtattacaagagcaaacgccaacccataatgcatgagggatacatgttccctttgcttgttaagaaggaattggataactggccagaaatgaacacaagaaaacgaagatggatgactgtggatgaggcaaaagtaatatgcccttatgcttggatgaaggaggctttggatgaattggtcagaagacaaactcaactgcactccaaaaaggatggggatatgagtaggttgtaaatttgtaatagcgtgtttggttccacatcacagatttgttttttcacgcttagtcagaaactaatgctta

SEQ ID NO: 3491 - DNA, 278 bp, Glycine max
gggacactgatgaatccatggtacaagctgctttaagggagaccatagaagaagctggagttgttggcagtgttgatgtaagtgtgtgcaaacactttcttagtttttttcttcaccccatctaattgttgtgccttcgattcttacctgatgtgttgtctttagttttcttgcagagtaaactgggaaaatggtattacaagagctaacgtcaacccataatgcatgagggatacatgttccctttgcttgttaagaaggaattggataactggcca

SEQ ID NO: 3492 - DNA, 544 bp, Glycine max
ggagactgtcgattctgggaatgattcttaaggagcaggtggagggtttggtgggtgttaatatttgacttgtgcattccacacgctgcttccgattgaaggcatctaaggagagaaaaatgcacgatttctgcttcacgatcccctacggattgatgttagtgggtggtggactgttcgcctacataagcaaagggagcatcgcttctctcgccggaggcgccggctccggtttgcttctcatcgtcgccggctatctcagtctcaatgctttcggcaaacgaaaaaactcttacctcgctctctttctcgagaccgtttgtgcagccatactaacttgggtcatggggcagcgatatttggaaacatccaagattatgcctgctggtcttgttgctggaatcagtgctctcatgactctgttttatctctacaaattagcaactggtggcaaccatctccccaccaaggctgagtgatgatataatgatatatcatatatttgcttactataatacagatattgtggctgatctgcatgcct

SEQ ID NO: 3493 - DNA, 1093 bp, Glycine max
ggcatacatgcaagggtatgacaaagaaggccaccctgtgtgctacaatgcctatggggtgttcaaggacaaggaaatgtatgaaagggtctttggtgatgaggagaagctgaagaagttcctaaggtggagggttcaggttcttgagagaggcatcaaggtgcttcatttcaagcctggtggggtcaattccctcattcaggtcacagacctcaaggacatgccaaagagggagcttagggtggcgtccaaccagatcctctccctgttccaggacaactacccggaaatggtggctcgcaagattttcatcaacgtgccatggtacttcagcatgttgtattcaatgttcagcccgtttctgactcagagaaccaagagcaagtttgtgatctctaaggaaggaaatgctgccgagacactctacaaatttatgagacctgaagacattcctgttcagtatggaggactgaatcggcccagtgatttgcagaatggtcccccaaaacctgcatctgagttcacaatcaaaggaggagagaaagtgaacatacaaatagaaggaattgaggctggtgcaactatcacatgggacattgtagtgggaggctgggacttggaatacagtgctgagtttgtgccaaatgctgagggaagctacaccatagcagtggagaagccaaggaaaatgggggcatcggaggaagcaatccacaactcattcacatcaaaagaatctggcaaaatggtgctctcagttgacaacactgcctcaaggaggaaaaaggttgctgcttatcgctatgttgtacgcaaaagcagcaccatttgagaatggccattattatctaggacctttttattaatatatatatatatatcttgtttgtgatttctacctttttttggttaaatttttagagggtcttatttatgcttctgaactaattaaaagcctgtgtcacaggtattaactagtaatagtggtggtactaatgtgatgtacaaaaagagaaaactggtggtggtataggcttggtatagaaggaaagcaattaagtgtgcttatatagcattaccaaattactatttg

SEQ ID NO: 3494 - DNA, 432 bp, Glycine max
ctcgtaagcctcaactttcaatccaacaacgacaccgtatcataccgtaacatgttcacagcaccttttcctacatccactgttactctctccggtgaaagcgtaacctcaccgccgcgccacgtcagattccggtcagtagtatcgttcgccaccgccactttcacggaggagcaacaacataaggcagctccgtatctgagacctcatcacgggatggctttgagcgcgacgctgtacgacattctggggatccgcgccacggcgtccggcgaggaaatcagggcggcgtaccggcgactggcgagggtgtgccaccctgacgtggcgccggtggagcgaaaggaatcctctgcgggcgagttcatgaagatccatgctgcgtactgcacgctctcggattccgataagcgccacagctacgatagaagc

SEQ ID NO: 3495 - DNA, 491 bp, Glycine max
cgctcgagccgaatcggctcgagcggctcgagtaaagattaggattaggtgttgcgcagtcgcaggcatggccatggctttggtgagcctcaacaccattcatacatcgccttcttctttttcgttttcatctcccaaaccttattcttcctccaactatgcaccacctctcaccctccttccacgatttcggaggcacctcgttcgtatggctcccgacgaggagaagatgactcgccgttcccctctcgatttccccatcgtatggtttccctaatcaaattcattctaagcttattttttgtaattttactttcagtaagtgctgcgaatttggattcggattcgccgtcaccctgctatgtttattgcctgattacctcaattctttgttgaaggataattgatttactgttattacatttccttgcttctaactaaaatcaaccaatcaatattggctccggtttagatgcaatgctagtttctgg

SEQ ID NO: 3496 - DNA, 669 bp, Glycine max
cccacgcgtccgcaaaaaaagagattaggatttggtgttgcgcagccgcaggcagatatggccatggctttggtgagcctcagcaccattctcacaccgccttcttcttcttcttcttcgttttcttctccaaaaccttcttcttcctccatcgttcggtttcgccctctcactccccttcctcgctttcggaggcacctcgttcgtatggctcccgatgaggagaagatgactcgtcgctcccctctcgatttccccatcgagtgggaaaggcctaaacctggacgaaggccggatatattccctcaatttagtcctatgaagacacctttgccgcctccgttgcccgcagatcctccagaagaggatgaagaggaggaagaaaagaaagaggaagaggaagaacctgaaaaggaggagccagataagccagacaagccagaaaagcaatagtgtgtagtaaatgactggtcttgattccctccagttatccttgatatgccgagccagactgctgattgctaaagtgaatgtaagggtatcacatgaatacctatagcatcagattttttagctttcttcttgttctagcaccatgtggccttatatgagttagctcatgcaagaaggaaaaaaaaacaattttgtgctacggacatatttgtaggc

SEQ ID NO: 3497 - DNA, 339 bp, Glycine max
gagagagaagggaaataaagattgggattaggtgttgcgcagtcgcaggcatggccatggctttggtgagcctcaacaccattcatacatcgccttcttctttttcgttttcatctcccaaaccttattcttcctccaactatgcaccacctctcaccctccttccacgatttcggaggcacctcgttcgtatggctcccgacgaggagaagatgactcgccgttcccctctcgatttccccatcgagtgggaaaggcctaagcctggacgaagaccggatatattccctcaatttagtccaatgaagacacctttgccgcctccgttgcctgcagatc

SEQ ID NO: 3498 - DNA, 799 bp, Glycine max
gactctcaacagatacgacacattaccagtcttcataaaaccccaaaacactctctctcgtgactcaatcacttcgttttctccgctttcatcttctcatcttcttctcttttccctgctaatcatggcaaccttgtcaactgtgaaggtttccccccattgcatgtttcaaacagcaagcaaaaatccatccactgttgccaccacaatgaagtgcccttcttcttttgggtctgtgaagagcatttccagatcttttggcttgaagtcatcctcttcatttagagtcactgccatggcttcttacaaggttaagctgattggcccagatggaacagagaacgagtttgaagccactgacgatacttacatcttagatgcagcagagagtgctggagttgaacttccttactcttgccgagccggagcatgctctacctgtgctgggaagattgttgctggttctgtggaccagtctgatggctcattcctcgatgacaaccaactgaaggaaggctttgtgcttacttgtgtctcctatccaactgcagactgtgtaattgaaactcacaaggaaggagatctctattgagcaatgctggccttaaagttgggaattgcggaatttaaggtagactctgcaacttgtttgcttgttctgctttagagtcaaattttcttttgggattattagtgatttggtgtaatgattttttgtttgtgcaagcaagcactgtgatattaagacgataaacacccgtcgtttggcttttaaatgggatagttgatgtttctttat

SEQ ID NO: 3499 - DNA, 1005 bp, Glycine max
gttcttctctctctctctctctctctctcgtgaatcatcacttcgttttccccgctttcaacaccgctcatcttctcttctctttgctctgctaatcatggcaaccttgtctactaatcattgcacattacaaactgcaagcaaaaatccatccattgttgccaccatagtgaagtgtccttcttctttaaggtctgtgaagagcgtttccagatctttcggcttgaagtcggcctcttcatttagagtcactgccatggcttcttacaaggttaagctgattggcctgtagaaacgtgaaccagaaccagaatggatcttcaacaacgaccactgaaacttcactttattccttacctgtcaccggggcatgtgatccctctctgcggcattgcaacactcttcgcctcacgcgggcagcacgtgacggtgatcaccactccctactacgcccaaatcctccgcaagtcaagcccctccctccaactccacgtcgttgactttcccgccaaagatgtgggccttcccgacggcgtcgaaatcaagtccgctgtcaccgacctcgctgacactgcaaagttctaccaagccgccatgctcctccgcagacccatctcccatttcatggaccagcacccacctgattgcatcgtcgccgacaccatgtattcctgggcggatgacgtggccaacaacctccgcatcccacgacttgccttcaacggataccccctcttctccggcgccgccatgaagtgcgtcatatcacaccccgaactccattccgacacgggccctttcgtcatccccgattttcctcaccgcgtcaccatgccctccagaccacccaagatggccaccgccttcatggatcatctcctcaaaatagagctcaagagccacggcctcatcgtgaacagcttcgccgagctggacggagaagagtgcatccagcactacgagaaaagcacgggtcacaaggcttggcatcttgggccagcttgt

SEQ ID NO: 3500 - DNA, 378 bp, Glycine max
attctctgaatttttcatctagaggcagagcagtacctggctgcaaaaaccaaagtggttctgatgaggaaagtggatggacatcttacttagaagatttctcaaaaggcatagagccaagttattgttccagtttggatggctcctctttgctctcagatgctgcttcttgtgctgcatggaaattttctcatcagaattttaaggtcagcactgcaccaaatctacccaaaaaactaagcttcaagaaagcaagagccaaacagatatcagaggatgaccctttggaagacacttgctagctctccagtcaatagcccccaaggttagagacttgaatccagctgaaatgagttctaggaaggttgatgatcaact

SEQ ID NO: 3501 - DNA, 539 bp, Glycine max
cggggcccaccactgatcttccggttaaaaaccttcgggtgggtggcacacttcttccctacaggcagcgtcagctaagaattaagccaaaataattaattaattcttggcaaaatcacatggccgccgccgcagatgggctcttccggccgatctacgagggctgcatctccgcctacgacaacgacgtcgagcgccgcccctaccacaagaactgcggctgcgctctgcacagcaagtcgaggaggaacagcagagcgtgcacgcacaagttgccgaaatgcaacaacgtgtcctaccccatgaggagggcttggagtgaagggagcttgtcaatggcttcggcaacaacttccgcgcattcctctccttcttcttctcccgccgctgggttcaggcctcaacacgacgaagagggaaatagtaacaaattaggagttttatttgagatgtgatcaggaaattgagaataattaataattaattaagtaattaagcaatactaccatgatctttttgataaaactcctattttgttt

SEQ ID NO: 3502 - DNA, 371 bp, Glycine max
ggcccaccattgttcttccacagccttaacctctcgggttataaaaccttcgtggggggggggggcacacacatcttcgggcagcgtcagcttagaattattattagtgtgaaattattaattaattcttggctagacaacaacatggcctccgccgcagccgcagacggactcttccggccgatctacgagggctgcatctccgcctacgacaacgacgtggagcgccgcccctaccacaagaactgcggctgcgctctgcacagcaagtcgaggaggaacagcagcagagcgtgcaggcacaagttgccaaaatgcaacaacgtgtcctaccctatgaggagggcttggagtgaagggaatttgtcaat

SEQ ID NO: 3503 - DNA, 439 bp, Glycine max
ttttcacccccagcacctaaaacagtgatatgtacgacctaacagctagctagctgcatgaactgaagaaactgagaagttaccccagagtgccataactcaaactgatacagagaaaggctgaacaagaagggttagtttcagagtcatcatcaaagaaaaaagagggaaagaagagtttctgattaactttcagtaacatggaatggattattggactttggactctaatgggttttcttttatgttggtggtttctgtgtgtgagaaaggagaatcagaatagtaaggtgaagaagaagaagggtacagttccaaaaggaaacactggttggcctctacttggagagacccttgagttcattgcttgtggctacacctccaaccctgtcagcttcatggaaaagcgcaagtctctgtatggtagtgtatttaagac

SEQ ID NO: 3504 - DNA, 1537 bp, Glycine max
tcgctttcgcgtccgcccacgcgtccgcccacgcgtccgcccacgcgtccggattatactagatgggccaatacgaagttttgatgaagagtctgtctcagcatccatgaagtgttgtactttcagatctcagcttgctgcttttgataaagcttggtgctcatacttgaattgttttgtggtatggaaggttaaggatgctcgatcactggaggaagatttggttagagcagcttgccagcttgaagcttctatgattcaaacttgcaagttaactccagaaggagctggtggtaagcttagtcatgatatgaaagctattcagcatcaggtcttttgaagatcaaaaacttttgagagaaaaggtgctgcacctgagtggagatgctggaattgagcgtatggaatctgcattatctgaaacaagatctagatactttggagtgaaggatgacggaagtccagtggggtctccaatgattccatctatgcccgcaagcccaactccactttctactgctgccagctcaagtgaaagaaatatttctgatgagagtaatgatagggcaagccgagtagttcgctccctctttaaggaaacaaacacttcccctggagagtctagcttctctgcacccagaaccagttcagatagtcagcttggcacatcctctgagaagttgctagcagagaatgaggttcttgtaaatgaatttcttcacgagcatcactatagtgttactgatgaatttgatgtctctgatcacattcaaaacagtgttgaggggaaaataaagcagacaatggagaaggccttttgggatggtatcatggaatctgtggaggtggaccatcccaactatgaccgaattgttcaacttatgggagaggttagggatgaaatttgtgagatggctccaaaaagctggaaggaggatatttttgctgcaatcgatttagaaattcttttgcaggtgctgaaatcaggtaacctggacattgattaccttgcaaaaattctcgagttttcactcgtcagtttgcagaagctctcagctccagcgaatgaggagatgatgaaggccgctcacaagaaactatttcatgaattgagtgaaatttgtcattcaagggatgagtcaaacaattcatgtgttgtagccttggtgaagggcttgcaatttgtcttcggacagattcagattcttaagaaagagataagcaaagcacgaataagattaatggagtctttggtgaaggggtctgctggtctggactaccttaggaatgcctttgctaacaaatatggatctccatctgatgccaatacctctctgccttcaacattgagatggatttcatctgtttggaattgcaaagatcaggaatgggaagaacatgtgagttcctcatcagcattggcttctaattcatcccaagaatggcttccttcaactactctcagaactgggggaagtattctgctcaaaacaactggcagtccgatggccttttctcctgatagtgcaaatgctaa

SEQ ID NO: 3505 - DNA, 432 bp, Glycine max
aagtgaaagaaatatttctgatgagagtaatgatgtgccaagctgactatctgaactggttctgggtgcagagatgctagactctccaggggaagttgctagcagagaatgaggttcttgtaaatgaatttcttcacgagcatcactatagtgttactgatgaatttgatgtctctgatcacattcaaaacagtgttgaggggaaaatcaagcagacaatcgagaaggccttttgggatggtatcatggaaactgtggagggggaccagcccaactatgactggattgttcaacttatgggggaggttagggatgaaatttgtgagatggctccaaaaagctggaaggaggatatttttgctgccatcgatttagaaattctttcacaggtgctgaaatcagtttgcagaagctctcagctccagcgaatga

SEQ ID NO: 3506 - DNA, 662 bp, Glycine max
ggttctctcccctcaaacacagacacaacacaacaaggttgcaaagtgaagaaggattaagccatgaaagctctaattttaatcctcacgctatgcatcattgctgtcaccttctcatcacaagcagcaacctccatagtcactcaaccccaacccaacgaatttttcaagctcaaccaaaccaagccacagaatgatggtagttcctgtagttacacggtgagcataaaaacaagctgcagttctccctcctacaccagagattacatcggtcttgcatttggtgatgcttatggctatcaggtttatgttccaagactggatgatcctggttcaggtacattcgagcggtgctctacggatacatttgagatatacggtccatgtacgtaccagacatgttatctgtatctataccggagtggatacgacggttggatgccagagaaagtgaccgtatacagctattactaccaacctgttacattttactacaacacttacatacctaatgatatttggtatggctttgactattgtcgcggttatttaccctccggtactgccgcacccccgaggctagagtagtgtgtacccttctcagttctcatcacaaattactacaataaaacaagtacaagtccaaatatgaaccctgctat

SEQ ID NO: 3507 - DNA, 476 bp, Glycine max
tttaaagtcccttcatttattgattccacaaaatcaaatctcccactaccaacaacactgccaccactaaagcactgacaacgctccttcactccaccactcctcactcttctcattcagatctacccaacacacacacaccaaaaaataaaataaaaatgcaactccaacccactctctccactctctacctctcccttttgttaacaataacgttaacatctccaaccttggcagcacaaagcaagccgcaggatctggtccggtcctcgtgcgtgcacgcgcggtacccgcgtctgtgcctgcgcaccctctcgaactacccgggtcccgccaacacgccgttagacgtggccagggcagctttgagggtaagcctggcccacacgcgccgggcctccaaattcctccatgcactttctcatggaggcgctgccgccatgagcaagcgccagcgctccgcgctgcgcgactgt

SEQ ID NO: 3508 - DNA, 599 bp, Glycine max
caaagtcccttcatttattgatttcacaaaatcaaatctcgcagtaccaacaatactgccacccctaaagcactgacaactcttcttcttcacacttctctttcagatctacacaacacacaccaaaaaataaataaaatgcaactccaactcacactctccagtctcttcctctcccttttgttaacaataacattaacatctccaaccttggcagcacaaagcaagccgcaggatctggtccggtcctcgtgcgtgcacgcgcggtacccgcgtctgtgcctgcacaccctctccaactatccgggctccgccaacacgccattagacgtggcccggacagcgctgaaggtgagcctagcgcacacacgccgggcctccaagttcctgcacgcgctttctcatgacgattcaatcatcatgagaaagcgtgagcgctccgcgctgcgagactgcacggagcagatctcggactctattgatcagcttcggcggagtctcgacgagctgcagcatctccgctcggagacattccggtggcagatgagcaacgccctgacgtgggtcagcgccgccctcaccgatggcgacacctgcct

SEQ ID NO: 3509 - DNA, 671 bp, Glycine max
aataaaataaaaataacagagcaattatgaaatagcttttgtgtttggtgaggttatgcgccatttctcccttgctaccaacaacagagtttccatcctctatatttcttcaatcttctctcccttctacttctagggtttcgcttctgcaacggacgaccttcttcaactcatcaaagttgactttgtgagccaattcaatcaggcttgagaaggtatcctagtgttgtttgttcaccttcatctccatgatggaatactgtaaagatgtcctcagctgtcttgattcggatacgtctcttaagatattcatgtgtctggatgatctggctgatcttgttcgggttacttgtgtctcgcgatcttggagacactttgtgatagcaaatggtctttgcaagcagctgtgcttgagaatgtttcctcagttatctagagttgcttttgttgtgtgaactgaatcaaaatggagcgaaggaacatgcagaggttggatctagctattctatggaatggctatctctactgagagaacatagagtctttgcttatttaggtagagctctcatgtcatctgttgcaatgaattgcattgctaagacagttggtgcttctagcactgataactttcctcaggagagcattgataatactctagagcccagagatca

SEQ ID NO: 3510 - DNA, 598 bp, Glycine max
gactgacagagtcaatgtttctggttgtgtgcacttattagattcaaaccttattggcgtcgtagcagaactcaaaagttaacatccttaatctcttcaaacacggttgttcatagcatatggaaacgaggatgttgcggctttcgattcaacgagtgaggaagttgaactttctgaggcctcagatctctgctttgggaaggtcccatttgtcaactgctgctgaaccatcttccagtaagagcaatccacctagggttccaaatcttattgggggcagttttgttgactcaaaagcatcaactgtcattgatgttataaacccggcaacccaagaagttgtttcacaagttcctttgtcgacgcatgaagagtttaaggcagctgtatctgcagcaaaggaagcatttccatcatggcgtaacactccaattacaacacgccaacgtgttatgttgaagcttcaagagcttatacgcagagatatggataaacttgctttgaatgtgaccactggacacggaaagacattgaaggatgcccaaagagatgtatttcgtggtttagaagctggtgaacatgcttgtgggatggcaac

SEQ ID NO: 3511 - DNA, 445 bp, Glycine max
cccacgcgtccgctgaaacgcaatatgctatacgatcactgacagagtcagtgtttctggttgtttgcactttagattcaaacctgataggcgtcgttgtaaaaggaaaaaaaaagttcagtgtttttgtggtctcgtatcagaactcagaagttatcatccttaatatcttcaaacaaggtttttcacagcacatcgatacgaggatgttgcggctgtcgattcaacgagtgaggaagttgaactttctcagtccccagatctctgctttgggaaggtcccatttgtcaactgctgctgaaccatcttccagtaagagcaatccaccgagggttccaaatcttattggaggcaagtttggttgactcaaaagcatcaactgtcattgatgttataaacccagcaacccaagaaagttgttcacaagttcctttgtctactgatg

SEQ ID NO: 3512 - DNA, 677 bp, Glycine max
ggttggcttctggtgaaaccgggaatgtggattactatgctgtgattggtgtccgacgaggatgttcccggtcggagttggagagggcacacttgttgctttccttgcggcacaagcctgataaggcaactgggttcatcgaaaggtgcgagcttgcggatgagcgtgatgttgagtctgttaaagagagggtgaagatgtcgtcgttgttgttatatagattggttcagaagggttacactaatgtcatgggtaacattatggatgaggaagctgctgagaagcagagaaagaaggctgctttgcaagctcttcaagcacagaaagagaaagccaatgaagctgctgctgagctgaataaggtcgttgagagtaatacgagcagcgtggagaatactaatactaataatactcaaaataggtctatggtgtcttcttctactgtgaatccggcggtgtttcagggtgttttctgccgcgatcttacggtggtggggaacttgctttctcaggcggggtttaaccggtccatgccggtgaagtatgaagcgttgagctgttgattgaatcgaaattggtcggaaatggaaatgtttggttggggggctgttggagatggtaccggcagagggaatctctggttcgttcgttcacttttgtttgtacaaaattatgca

SEQ ID NO: 3513 - DNA, 458 bp, Glycine max
gaagagagtagcattcctattgctaattcctagtgtatactactccacagtacacagcacccttttagtactagccaccattcaactttctctcttcccacactcccttcactttttacaccttcctttcttactctgctcatcttcttggccatcctaggtagttagtagtttttggaggatgaggttgttgtgtttgtgtttaacgttgttgctgtttctggctagtgtggcaatggcagaagaagattcagatcataataagcactccctaaaagccacgtcacacgcgcagatccagtgcacaatgtgttcctcttgtaacaacccttgcaaccaagttccatctccgccaccaccttcaccaccaccaccatctccttccacaaacaactgtcctccaccaccctctcctccttcctccggcggcggcggcggcggcggaggagctccgtact

SEQ ID NO: 3514 - DNA, 891 bp, Glycine max
tcgccctctcgtgcgcaaaaccaaaaggtggagggcgtgggcgagggatatctatcttcattttcgtcgtcgttcatttttttattttttttttctgttttccattcgcttcttctctcagaaaagctcgccaatcgatcttgctctcttctacgcttttcgaattccttccattccattatggacgcagattagattcacgttcacattcacttctcttcgtttgcttcaaccactctgctctgctctgctctactctgagatccgatcgcattttcattcagaaaggaaactcgtgtgactgatttatgcgctaattgcaattgcactgcgagcgtccctgtgccgaatcggaagatgggattagtgtttaccaaattgttttcctctcttttcggtaacaaggaagctcgaatcctcgttctcggcctcgacaatgccggcaaaaccactattctctatcggcttcagatgggcgaagttgtctccaccattccaacaattgggtttaatgtcgaaacagtgcagtataacaacattaaatttcaagtctgggatttaggtgggcaaacaagtatcaggccatattggaggtgttactttccaaatacccaagcaataatctatgttgttgattcaagtgacgttgataggcttgtgatagctaaggaggagttccatgcaattttggaggaggaagaactaaaaggtgcagttgttctcattttcgcaaacaagcaggaccttcctggtgcacttgatgatgctgcagtgaccgaggctctagagttacacaagatcaaaaatcgccaatgggctatttttaaaacttctgccataaaaggagaaggactttttgagggccttgactggttgagcaatacactcaaa

SEQ ID NO: 3515 - DNA, 575 bp, Glycine max
gggagggcgtgggcgagggaatcaaacaaaccttgtactactatttatcttcatcctcatttttgtcgtcgtcgttcttcctttttccgtttttcatctggttcttctctcagaaaaagctcgccaatcgatcttgctctcttctacgcttttcgaattgctttcattccattatggacgcagattagattcgcactcacattcccttctcctcgatttgttcaaactctctgctctgagatctgatcgcattttcattcagaaaggaaactcgtgtgactgatttatgcgctaattgcaattgcactgcgagcgtcactctgccgaatcggaagatgggaatagtgttcaccaaattgttttcctctcttttcggtaacaaggaagctcgaatcctcgttctcggcctcgacaatgccggcaaaaccactattctctatcggcttcagatgggcgaagttgtctccaccattccaacaattgggtttaatgtcgaaacagtgcagtataacaacattaaatttcaagtctgggatttaggtgggcaaacaagtatcaggccatattggaggtgt

SEQ ID NO: 3516 - DNA, 1432 bp, Glycine max
gaaaaaggaaaagagagagaggaatgataatataagcgttgaagcgttcatctccgtttagattctccagttgctgtttccgattctatctctcgtcttgtgcgcgtgcatagtgaatactcgtgcttgaacgagaaattaattgttaatttccaagtatgaccagtgtggttggtgggagagcgatgccacgatctagttccgccatgcaccaccaccgtcagagctccgataacttcatgttcgacgctcacggaaggtggttacactctgcggcttacgcgcaggagctcgggactcgatcttcgagcttgaggagaaacgacgatgatcgcgttctaaccagtggcttgcttgatctgcattcgtgcgataccgagcttttacctgagggacaaaggtttgatggctacgagtcgattctctctggcaacaaacttgtaccaaggtctcggggcttgcctgagagccatctccttaaaagtgtctcagcagataaagagagagcaaacaatgttgccaagatcaaagttgtggttcggaagagaccactaaataagaaggaaatagcaaagaaagaggaagacattatttacatagattcaaattttctcacagtgcactgtgagaaaactcaaggttgacttaacagaatatattgagaaacatgagtttgtttttgatgctgtgctgaatgaagatgtttcaaatgatgaagtgtatgctgagactgtggagccgattgttccactgattttccaacgaacaacagcaacgtgctttgcatatggtcaacctgggagtgggaagacatataccatgcaaccattgcctctcaaagcatcccacgatcttttaagattaatgcaccacacataccggaacctcggtttccaactgtttgttagtttcttcgaaatatatggggggaaactttttgatctcctcaatgaacgaaaaaaaactttgcatgagggaggatgggaaacagcaggtttgcattgttggcttgcaagaatatagagtatctaaagttgagacaatcaaggaatttattgagagaggtaattccacaagaagtactggtacaactggagcaaatgaggaatcctctcgatcgcatgctatacttcagctttgtatcaagagatcagctgatgggactgaatcaaagcctacccgacttgtgggcaaactatcttttatagatctggctggaagtgaacgtggtgcagatacgacagataatgataagcagactaggattgaaggggcagaaataaataaaagtttacttgctctgaaagaatgcattagagccctagacaatgaccaagggcatatccctttcagaggaagtaaattgactgaagttctgcgagattcttttgttggtgattcacgcactgtaatgatatcatgcatttcacct

SEQ ID NO: 3517 - DNA, 397 bp, Glycine max
cagcgtgcatcattgcacttactgatcagggccttaatgctatcaatttgggagacagtgggtttatggtggtccgggatgggtgcaccatattccggtccccagtgcagcaacatgatttcaatttcacctatcagctggaatgtggtagtaatggtgatttacctagttctggtcaggtttttaccattcccgttgcacccggtgatgtcatagttgctggtacagatgggctatttgataacttgtacaataatgagattacagcagtggtggttcatgccatgagaaccggattaagccctcaggtgacagcccagaagatagctgcattggcacgtcaacgggcactggataaagacaggcagactcctttttcaaccgctgctcaagatgc

SEQ ID NO: 3518 - DNA, 633 bp, Glycine max
gccagcgcctctctctctatctttttcttttccttctcctagccctcttccctataggagaaggaataacaaaaacaaaaatacacaatggctttcactttcaccagaatcctaattctctttgtctccctctcctctctcatcctcgacacccacgcagcccgtgcgccccgcaccatccagacccgcctctacagcctctgcaagcccaccaccaacatggacctgtgctacaagaccatccttccggaggtggtgggcctgtcccgcttcagcaactacaaggccctcgaggtggagatccttgccacccagaaacaggtggagacaacctcgaagctcataacctcgctcctggcgaagcctgacaactcgaaagacctgacagaatcgctccagatttgcaaagagcagtacggcaacatcctggactcgatcgaggagtcaaaaaatcaagtggctcagcgcaacgtgatagaggcgcgcttcaagttcagcgccgcgatttcgctccaggtaagttgcaatgactcgttcaccgccgggacatcgccgatagtgaaggaggcgcaggacgtgttcgacctcgccggcaactgcttggacatcatgaaagccattgaagatagagag

SEQ ID NO: 3519 - DNA, 513 bp, Glycine max
cggctcgagctcgagcgaatcggctcgacggctcgaggtgaaggcgtgaagctagcccagctcagcattgttcagttcttgaaggaaagcagagcagagaagagaagagagtttcaagaatggggagcgaagaggagaagggtgaattctacttgcgatactacgtgggccacaagggcaagttcgggcacgagtttctggagttcgagttcagacccgatggcaagctccgctacgcgaacaactccaactacaaaaacgacaccatcatccgcaaggaggtttacctcaaccctgccgttttgcgtgagtgccgccgtatcatcgccgagagcgaaatcatgaaggaagacgacaacaactggcccgaaccggaccgagttggacggcaggagctggagattgtgatggggaacgagcacatttccttcaccacttccaagattggatctctcgtcgatgttcagagcagtgcagattccgacgggctacgcatattttactatcttgttc

SEQ ID NO: 3520 - DNA, 480 bp, Glycine max
gaaaaaggcacttaatgaacttgttattcttccaatgagaaggccagagcttttctctcgtggggatctgttacggccctgtaaaggaatattactttttggtcctcctggcactgggaaaacccttctggccaaggcacttgcaaccgaagctggtgcaaattttatcagcataactggttcgacccttacttcaaagtggtttggagatgctgaaaaactaaccaaagcgcttttctcatttgccagcaagcttgctcctgtcattgtaattgtcgatgaagttgacagtctgcttggagctcgaggtggtgcttttgagcatgaggccactagaagaatgaggaacgagttcatggcagcttgggatggattgaggtcaaaagaaaaccaaagaatccttattctgggtgcaactaaccggccatttgaccttgatgatgctgttattcgtcgcttaccaagaaggatatatgttga

SEQ ID NO: 3521 - DNA, 695 bp, Glycine max
cctcgaggactcatccttcattaccaagcatatctcatttgaatacattccttgtagtttatactgaaagatgggtttgaagatggcgttactgatcctaggcctttccctcatgctccttttggtctcctctgaggtggcatccacgaatacaaaagaggaggcaaatggagtggatgatgccaaatatcccggtggaagctatggagggggttacccaggtcatggcggtggcggttatcctggccatggcggtggcggttatcctggccatggcggtggtggtggctatcctggtcatggtggtggccaccctggtcatggtggcggctaccctggccgtggtggtggatactgtaggcatggctgttgcggtggccggacatacaacggaggttgcagaaggtgctgctataacgctggcgaagctgttgctgcacaaactcaagataagactcacgattaagacgatgcagttctacttaattagtacttttgatattttaatttcatgaaataaaacagcttgtgactggagaggcatggattctcatcatgcatgagtccatgatctttcataccactagagatatttcgcaagtagaaattaagagtgttgttgaatgtataataatacacgtcttcgtgcctgtgtgatgagtttaagagaaaattaaaataaattggtgaatccc

SEQ ID NO: 3522 - DNA, 551 bp, Glycine max
acgcccacgcgtccgcacccgaggtattataagacgaaactgtgctatggatacattatttttcggtgagatagactaattaatctactctatctaacatatatcccttgtgtagtcattaatacgaattaggaggcattattataagtattagaagcagctattcttatttatatagatatattgtacccaggtcatggcggtggcggttatcctggccatggcggtggcggttatcctggccatggcggtggtggtggcctatcctggtcgcggtggtggccaccctggtcgtggtggcggctaccctggccgtggtggagggtactgtcgccatggctgttgcggtggccggacatacaatggaggttgtagaaggtgctgctactacgccggtgaagctgttgctgcacaaactcaggataagactcacaattgagacaatgcagttctacgtaatgcttaagatgtttcatgaataaaatctcgtgtcacgagaggcatggattccccgtgatctttcttaccactagatctatttcgaatgtaga

SEQ ID NO: 3523 - DNA, 1048 bp, Glycine max
ctcttggatttgttcgccagtcatttgatgtcattgtagatggcattgtgatcaccattgttcaggcacatgataatctccgcccaggatcaatatttgtcaataagggagagctcttagatgctggtgtaaatcgcagtcctagtgcttatctcaccaatcctgctgcagagtgaagccaatttaagtatgatgttgataaagaaatgactctgttaaagtttgttgatcggctcgggggtcctttgggaagtttcaattggtttgccactcatggtccttcaatgagccgaacaaactcattaattagcggggataataagggtgcagctgcacgatttatggaagactggtttgagcgaaaggggtctgtaagaatggattcggttagatttgaaaatgatggagtcccccgaagaatttcaaacataattcccagtcttcatgataattaccatgaattactggaacttgctgcctcattccgatctcctcttggtaaacctgcaaccaaaacttcaagcattgctagacgtgttagaggtgtccttaggcaggttgacaagcctagatttgtttctgcattttgtcaaacaaattgcggtgatgttagtccaaatgtacttggagctttttgtatagacactgaactaccttgtgacttcaatcatagtacatgtggaggaaagaatgaattatgctatggccgaggacctggttatccagatgaatttgaaagcacacgtattataggggagagacaatttaaaaaagcagtggagctattcaacggagcatctgaacagattaaagggaaggttgattttcgacatgctttcatagatttctcccagcttgaggtaaatccttctaaagtaggagcttctgaggttgtaaagacatgccctgctgcaatgggatttgcatttgctgctggaacaacagatggacctggagcttttgactttaagcaaggtgatgatcaggtaaccactgattagaccttatgcttacctattatcctggccttgtattcttaaatatcttt

SEQ ID NO: 3524 - DNA, 533 bp, Glycine max
cttgatttttttgcatagacactggattaccttgtgacttcaatcatagtacatgtggagggaagaatgaattatgctatagccgaggacctggctacccagatgaatttgaaagtacccgcattataggagaaagactgggtagaaaagcagtggatcttttcaatgctgcagatgaagagattgaaggggatgttgattttcgacatgcatatatagatttttcccaacttgaggtaactatttctgatcaaggatattcagaggttgtaaagacatgcgctgctgcaatggggtttgcatttgcagctggaacaacagatggaccaggagcttttgattttcagcaaggggatgataagggcaatcctttctggaagctggtccgtgacatgcttaagacgccaggcagggaacaagtagactgtcaccacccaaagcccattttgcttgatactggcgaaatgaagctaccatatgattgggctccttcaatacttccaattcagatcctccgaattgggcagcttatc

SEQ ID NO: 3525 - DNA, 1902 bp, Glycine max
  unsure (1)..(1902): unsure at all n locations
ctggagctccaccgcggtggcggccgttctagaactagtggatcccccgggctgcagcctgaagattccacaacagtgggagggagatccaaaaagagagagtggaaaagatggcgcggttgatcacagtggtgtggtgcgcggtggcggtgctattatgcgccgcggccggtgcgtcgtgggtggaggaggcggcgaacccgatacgaatggtgtctggcgtggaggcggaggtggttcgggtgataggggagtgccggcgcgcgctgaagtttgctaggttcatgagcaggttcgggaagagttaccgaagcgaggaagagatgagggagaggtacgagatattctcgcaaaacctcaggttcatccgctcccacaacaagaaccgcttgccctacactctctctgttaatcattttgctgattggacttgggaggagttcaaaagacacagactaggcgctgcccaaaattgctctgccactcttaacggcaaccacaagctcactgatgctgttcttcctcccacgaaagactggaggaaagaaggaatagtgagtgatgttaaagatcaaggcagctgcggatcatgctggacattcagcacaactggggctttagaagcagcctatgcacaagcatttgggaagagtatctctctttctgagcagcagctagtggattgtgctggccgtttcaacaactttggctgtaatggtgggttgccatcacaagcctttgagtacatcaaatacaatggaggacttgagacagaggaagcatacccctacactggaaaagatggtgtatgcaaattctcagctgaaaatgttgccgttcaagtcattgactcggtcaatatcaccttgggtgctgagaatgaattaaaacatgcagttgcatttgttcggccggttagtgtggcctttcaggtggtgaatgggttccatttctacgagaatggagtttacactagtgacatttgcggtagcacttcccaggatgtgaaccatgccgtccttgctgtggggtatggagttgaaaatggcgtcccatattggctcataaaaaattcatggggagaaagttggggtgagaatggctacttcaaaatggaattggggaagaacatgtgtggtgttgcaacttgtgcgtcttatccagttgtggcataaattgcataagaatatggtccctggtgactaccaccttgtcatgcttcagagtttaaagataagtgtcattgtataatgaaaattgctcctagttgggttggtatgatgtattaaataagttagaagttgctgtaaatcacgtaagaatatcatggcctgaattgtgtgtatcacagacataaataacgatcatatattgatagttcatagttacatattgtattgtattgtattgatgcgccccgctttaattatcagttataagaattaagatagcatgtctttgctactttgcactagaggggggccggtacgcaattcgcctataggagcgattacgccgcttactggcgtcgttacacgtgtgactgaaaacctggtacccactaatcgcttgagacatctctttcgcaggtgcgtaatacgaagccgacgatcgcttccacagtggcagctgatatggatgacccctgtccgcataatctccgggggttgtgttgcagacgtcttcagcctaccccgtcttcttttcctcttttccgtggcgtttcctagcttaaagggctcttttgtcgatagttgccaccaaacactatgggggagggcctctaaagtttcctcgtggacttttaggcttcacagcaactcntcctctctttnncttanngnnngcgnccctgtcgagaatngaaaccnaacancacccncgnntcggggccccctgttt

SEQ ID NO: 3526 - DNA, 1202 bp, Glycine max
accaagcgttcggacagtcagagggtaaagctactctcaacatctatgctatgaatcaatgcgtagggtagcagcacgtgtcggtctggtgttccagagacctgctatacactggcttgaagacatggtgaggccgatcagagaatgtgaatgcagcacacgatgcacttcttttccgtaccaagtgcaactcgctcgcacacttcactaagtacaccattcagggtgaatctcaggaagcctacaaggtattggaccacaaaagctactcctactcagatgtttataatgaatcttatccatgtgatgattcgctaacacacccagaaccgattgctgtagactgtctatgaaattcattatgatgattggacttaagacgagttcaaaagacacagactaggcgctgtccaaaattgctctgccactcttaacggctaccacaagcccactgatgctgttcttcctcccacgaaagactggaggaaagaaggaatagtgagtgatgttaaagatcaaggcagctgcggatcatgctggacattcagcacaactggggctttagaagcagcctatgcacaagcattttggaaagagtatcttctctttctgagcagcagcctagtgggatttgtgcctgggccgttttcaacaaactttgggctgttaatggtggggttgcccattcacaagccctttgaggtaccatctaaatacaaatgggagggaccttgaggaccagaggtaagccataaccccctacaccttggaaaaagatgggtggtattgcaaaatttctcagcctgaaaaatgttggccgtttcaagttcattgaacttgggtccaatattcaccttggggtgcctgagaaatgaatttaaaacattgccagttgccatttgattccggcccgtttagatgtgggcctttcaagggggtggaaatgggttccattttcttacgagaaatggaatttacactaagcgacattttgcggtaagcacttacccagatgtgaaccatgccgtccttgctttgggggtatggagttgaaaaatgcgttccatattgtctcattaaaaattcaaggggagaaagatgctgtgagaatgcctcctcaaaatgcctctgcgcaataactgtgtgtggtgcactttggactctaaccaatatgcattcatgcatcagaatagaccattgtg

SEQ ID NO: 3527 - DNA, 1040 bp, Glycine max
  unsure (1)..(1040): unsure at all n locations
cggacgcgtgggcggacgcgtgggcggacgcgtgggcggacgcgtggggaaggaatagtgagtgatgttaaagatcaaggcagctgcggatcatgctggacattcagcacaactggggctttagaagcagcctatgcacaagcatttgggaagagtatctctctttctgagcagcagctagtggattgtgctggccgtttcaacaactttggctgtaatggtgggttgccatcacaagcctttgagtacatcaaatacaatggaggacttgagacagaggaagcatacccctacactggaaaagatggtgtatgcaaaatctcagctgaaaatgttgcccgtcaagtcattgactctgtgaatatcaccttgggtgctgaagatgaactaaaacatgcagttgcatttgttcggccagttagtgtggcctttcaggtggtgaatgggttccatttctacgagaatggagttttcactagtgacacttgtggtagcacttcccaggatgtgaaccatgccgttcttgctgttggatatggagttgaaaatggtgtcccatattggctcataaaaaattcatggggagaaagctggggtgaaaatggctacttcaagatggaattggggaagaacatgtgtggtgttgcaacttgtgcatcttatccaattgtggcataaattgcataacaatatggtccctggtgactaccaccttgtcatgcttcagagtttagagcgtattgctgatgccagtattgatgaatgatgattaaagataagtgtaattgtatgatgaaaattgctcctagttgggttggcatgatgtataaaataagctagaagttgttgtaaatcacataagtatattatggccttaattgtgtgtatcacagacataataacgatcatatattgatagttcatagttacatattgtattgtattgatgctcccgcttcaaatatcagttataagatagcattgtctttgctactttgaaaaaaaaaaaaaaaaagggcggcnnnnnnnnnnnnnnnnnn

SEQ ID NO: 3528 - DNA, 565 bp, Glycine max
aattcaagcattccacaacagtgggagggagatccaaaattgctctgccactcttaacggcaaccacaagctcaccgatgctgttcttcctccaacgaaagactggagaaaagaaggtatagtgagttcagttaaagatcaaggcagctgcggatcatgctggacattcagcacaactggggctttagaagcagcctatgcacaagcatttgggaagagtatctctctttctgagcagcagctagtggactgtgctggccctttcaacaactttggctgccatggtgggttgccatcacaagcccttgagtacatttaaatacaatggtggactagagacagaggaagcatatccctacacaggaaaagatggtgtctgcaaattctcagctgaaaatgttgctgttcaagtccttgactctgtgaatatcaccttggtactgaattatctgatttctactctaaatgagttgcggttttctgctttatgtattcatagttttttttgttaccatgatattggtgtggagtatccaccgatttcgttgatgattaattttcgctg

SEQ ID NO: 3529 - DNA, 478 bp, Glycine max
atccagcactactacgacctgttagttgccatcaagactttgatgtttccacgagcatcaagcccatcaagctgattcactgaagattccgcaacagagagtagaaaagatggcgcggttgatcacagtggtgtggtgcgcggtggcggtgctactgtgcgccgcggcgggcgcgtcgtgggtggaggaggcggcgaacccgatacgaatggtggcgggggtggaggcggaggtggttcgggtgatagggcagtgccggcgcgcgctgatctttgctagggtcatgagcaggttccgggagagttaccgttgcgtggtagagatcagggagaggtacgagatattctcgcaatacctcaggttcatccgctcccacaacaagaaccgcttgccctacactctctctgtggatcatttggctgatgggacttgggcggatgtcaactttcagtgagtatgcgctgctcaaaattgctct

SEQ ID NO: 3530 - DNA, 1302 bp, Glycine max
gatcgacagtgccgttttgcccccattggccaattcggccactcttctctgaaaaagcctccagcctccttcttcatccatcttccctctccaccaaaatcctccgcggttcgttccgttattcatcgaaccgttctctcaagtctcgtacttggcttagttcacaactcgaaacttcaccgaacgcattccattcaccaattcgtccaagtctcgtatcaatcagtcaatccgtctcgtggaggttggagagatcggaggggaaaggatccatggcgcatcgagtggaccacgagtatgactatctgttcaagatcgttttgatcggagactcaggtgtaggaaaatctaacatcctctccaggttcactcgaaacgagttctgtttggagtccaaatccactatcggagttgagttcgccaccagaactcttcaggtagagggtaaaactgtgaaagcacagatctgggacacagcaggtcaagagcggtaccgtgccattaccagtgcttattacagaggagctgttggtgctctacttgtatatgacataaccaagaggcaaacctttgacaatgtccaaaggtggttgcgtgaactgagggaccatgcggattctaatatagttatcatgatggctggaaataaatctgatttgagccatcttagagcagtttcggaggatgatggtcaagcattggcagagagggaaggtctctcgtttcttgagacatctgcactggaagcaaccaacattgagaaggcattccaaaccattttgacagagatttatcatattgttagcaaaaaggcgctcgctgctcaggaagcagctgttggtaccatacttcctggtcaaggtaccaccatcaatgttggggatgcatctgggaatacaaagagaggctgctgctccgcttaatgcgacatgtgaggaaaaagcgatggtagcagatagccagatagtattttttccccccaattctgttttgcccctttctcttttcatcttttttttttcctcctttctttatatgggtgagagagacacatgtagagtacatttacttcatctagttgcaaaaacgaagtctgtgaaattttataaaacaatagtcttgctagttcctttgaatttatctcttccgtgatgtgatagtttcgcatgaattaatgtaatattggaacgaacagatattgatgatatagtgtcgtggttaatggggaatctaacatttcagagaggtcaggttatgtaagatacgtaccttctgatttttgtcgattcaaaaaaaaaaaaa

SEQ ID NO: 3531 - DNA, 516 bp, Glycine max
gatagacatttccgtggtgtgccattggccaattcggccactctcctctgagaaagcctccagcctctcctccaaagtcccctgcggttcgttcggttattcttcgaaccgttgtctgaagtttacaactcaaaacttcaccgaacgcatttcattcaccaattcgtccaagtctcgtatcaatcaatcagcctatccgtcttgcggttggagagatcggaggggagagcagccatggcgcatcgagtagaccacgagtatgactatctgttcaagatcgttttgatcggagactcaggtgtaggcaaatccaacatcctctccaggttcactcgaaacgagttctgtttggagtccaaatccactatcggagttgagttcgccaccagaactcttcaggtagagggtaaaactgtgaaagcacagatctgggacacagcaggtcaagagcggtaccgtgccattaccagtgcttattacagaggagctgttggtgctctacttgtatatgacata

SEQ ID NO: 3532 - DNA, 535 bp, Glycine max
aagtgacacgagcagtcatattcatcactgtgccacgttttactgattgcattggtagtaggtatctgttaatgtcattgccaaatgaccaattcctatcaataattgaaggcttatgtttgtatatatgttctgtcgctctgacgtgtcgacattcaggtggtgcaaaattagagatgtgacaaccaggtttgtctttaactatatatgctgatcaaggtcttctgtgtttacacatgctttgaaagggtcctgttcattagagaagtaatgtatctatcgtaatgtttattgatacataatgtttattttagaactgagttataggtgaggggcataatctataaacaattatctttgtttcaaaactctatggcaagtggcatgatctatctataatgatgcttattttaaaatcctttgacagagaagattagcataatctatcgatgactatgtttgttttaaaactatgtgataaaatcaggaaatcgttgtggtttgagtgatagtaaactcaagtttaagtcttata

SEQ ID NO: 3533 - DNA, 340 bp, Glycine max
cactctttacatctctctctctctctctctctccaaagcagacagaaacagcgacaatcacatgactcgtgccttgagatatttaggcgagcgaaactcggccacggactccgccgtcgtcgattccgacttcgtcgtcatcttcgccgccctcctctgcgctctcatctgcatcctcggcctcgtcgccgtcacccgctgcggctgtctccgccgcctccgcctctcctcctccaacgctactccccagcctcctcccgcctccgccaacaaaggcgtcaagaagaaggtcctccgctccctccccaaggtcatcgactccgccgaatccgctgtcaag

SEQ ID NO: 3534 - DNA, 1697 bp, Glycine max
tcgcgattatgtctcttgctccttcccctgccttgcaatcagtctgttttgctgtgccgcaggcgtgaccatgcctcttcaagctccaattcctcatagctgagagctgactctagctagaggataataagattacaagagagaggaattgtttttgattggatccacaaaattcaagatgactccagttaatttggcaggccagtttggtgacacgacatacactaaggtgtttgttggaggcttggcctgggagactcaaaaggagacaatgaagaagtattttgagcaatttggtgagatcttggaggccgttgtcatcactgacaaagctactggaagatctaaaggctacggatttgttacttttcgtgaaccagaagctgccatgagagcttgtgtggatcctgctcctgtaatcgacggcaggagagctaactgcaaccttgcttctttgggtgtccagagatctaagccttcaaccccaaagcatggaggagcagggaggaactttagagtaatgggttctttccagacaggatttggagggggagtgggatcgtcttttccttcagcagcaaccttccctcattatgccatccagcaagggataccttataatgtttatgggtactctccttactcgccggattacacttaccctacgagctactatggtgtgtatggaggagcaacagcacagtacccggtttatggaagtggagctgctgctgcagcgttctacccatatctgcagtacggagaagggagtggcggtggcggaactagcggcggctacagttccggacagggttatggtgtgaactaccctcctcaggctcacctctttcagtattctcccattgcttccactgcagccgccacagctggctatgcccagcactatggaacaccagctatgtctcttgctccttcccctgccttgcaatcagtgtgtttcgctgtgccgcaggcgtgaccatgcctcctcttcaagctccaattcctcatcgctagagactcatctcaaactagctatgtcaaaacttcccagtctctcatcactcatcaacctttgccctaaccatggtgctctctctcacacacacccactctttcactaacaccaaaatgaaagtccatcaatggcatttgggcttttccagcataagaagcctcccgtaggggctcaaatgtttctccatgtttggagagtcatgcattccttttgtctcaaaaaaatatctgtttcatcttcaatggaagaagagaaccaaaccaacacaaaagctatcggatatagctgacttgttggaaaaaaattaagaacagcaaagcttggccctggaaaggccaagctcaaaagaaccatcttcttaacttgggcccaagacgggctaggtaaaagtacagaatggtttcaaaatttgtaaatggcagatcacagatcgataactagctcatcaactagaaattttaagttgcttctgcaaaaataggtattccctccaagctatgctaatcacctctggatgaagaggaacttttagcaatcaatatcatggacattggatgtcccagcttttttgtatggtaacatctagctagtcttaggctttagtgttaggatcagtcatgtcttcataaatatgtttttgtcaattttcagaaaaaaaggggtttaaccaaccaaccaa

SEQ ID NO: 3535 - DNA, 780 bp, Glycine max
gaacttttagcaatcaatatcatggacattggatgtcccagcttttttgtatggtaacatctagctagtcttaggctttagtgttaggatcagtcatgtcttcataaatatgtttttgtcaattttcagaaaaaaaggggtttaaccagccaaccaaccaattaacaatcttccctttgggtaaggggaggcaacatctaactgctgtttttttatcctgtaaattcaaagaggctaaactatgggagtttaagcccaatccactaatctttaggagggatagtgttttaatttcccgcttagcataagtagtacatttcatcatcatcttgaggactacgtcaatggatgtggaactcaaaacacttgcatggaaccctgggagatattttggttcccttgggtacttcacttactcaccaaccatggttaggacataggtgaatctcatcactctctatctctcttctccctgctttctgtctgccaacttttacatcgagatggaccttgatactctattaattatatgtttaattaagcctatatggtttggattgtaattaggaatactaaagtaggaggatttcattctctgtccatgctggatgagaatggatttgctactcattctactatgcctttaatttgatattatgcttgcttctattcaacctatgtcaagataagcaaatcaagttaatgcttcgagtaatgttcaacttctttgttatatttcaatcaaggatattttatttatggcaaggtctggtttgtgct

SEQ ID NO: 3536 - DNA, 728 bp, Glycine max
  unsure (1)..(728): unsure at all n locations
ggaacttttagcaatcatggacattggatgtcccagcttttttgtatggtaacatctagctagtcttaggctttagtgttaggatcagtcatgtcttcataaatatgtttttatttttattttttattttatcaattttcacaaaaaggggtttaaccagccaaccaattaacaatcttccctttgggtaaggggaggcaatatctaactactgtttttttatcctgtaaattcaaagaggctaaactatgggagtttaagcccaatccactaatctttaggagggatagtgttttaatttcccgcttagcataagtagtacatttcatcatcatcttgaggactacgtcaatggatgtggaactcaaaacacttgcatggaaccctgggagatattttggttcccttgggtacttcccttactctaccaaccatggttaggacataggtgaatctcatcactctctttctctcttcgccctgctttctgtctgccaacttttacatcgagatggaccttgatactctattaatgatatgtttaagcctatatggtttggattgtaattaggaaaacttacagtaggaggatttcattctctatccatgctggatgagaacgggtaagcagctccagtatgcaaggttttgttaagccagatcggccgccaactttggcaattggttnnnnnnnnnnnnnnnnnnnnnnnnnnnnnnnnnnnnnnnnn

SEQ ID NO: 3537 - DNA, 589 bp, Glycine max
tgtctctcttctcttttgttctcgtcaatatcaccactcatctccacccacaacctagattacatctctctaaattaatttctcatcttctcctctgcccccatcaccttgatctgtctgtctatacactcattgtttgacaaaaaacaaaatataacactgggaagttttgtcatagctgagagctgactctagctagaggataataagattacaagagagaggaattgtttttgattggatccacaaaattcaagatgactccggttaatttggcaggccagtttggtgacacgacatacactaaggtgtttgttggaggcttggcctgggagactcaaaaggagacaatgaagaagtattttgagcaatttggtgagatcttggaggccgttgtcatcactgacaaagctactggaagatctaaaggctacggatttgttacttttcgtgaaccagaagctgccatgagagcttgtgtggatcctgctcctgtaatcgacggcaggagagctaactgcaaccttgcttctttgggtgtccagagatctaagccttcaaccccaaagcatggaggagcagggaggaa

SEQ ID NO: 3538 - DNA, 671 bp, Glycine max
ccctcgcggcgaatcggctcgagcggctcgagttttgctttctcttccctctcaattttctctttctctctctttttatttttttgatctctgacctaattgtctctcttctcttctcttctcatattaccactcatctccagccacaacctagagaacaccccccaaaattcagtgggtatttctcatcttcttctgcccccatcacctagatctgtctgtctatacactcattgtttgacaaaaaagaaaataacactgggaagtttagtcatagctgaaagctgactctagctagaggataataataagattaagatcatccatccaacaagaaagaggaagtgtgtttttgattggatccacaaaattcaagatgactccagttaatttggctggccagtttggtgacacaacatacactaaggtgtttgttggaggcttggcctgggagactcaaaaggagacaatgaagaagtattttgagcaatttggtgagatcttggaggctgttgtcatcactgacaaagccactggaagatctaaaggctatggatttgttacttttcgtgaaccagaagctgccatgagagcttgtgtggatcctgctcctgtaatcgacggtacgagagctaactgcaaccttgcttctttgggtgtccagagatcta

SEQ ID NO: 3539 - DNA, 502 bp, Glycine max
cacgcatacgcggactcgcggattcagctcaagcccccatcaacaagatctgactgtctatacactcattgattgacaaaaaacttcccagttgctcctgctccttgaagtctctcttccactcatcatcctataccctaaccatggtgctctctctctctcacacacccacccactctttcactaacacttaaacaaagtccatcaatggcatttggactttttccagcataagaagccccccgtaggggctcaaatgtttctcctcgtttggagagtcatgcattcctttttctcaacataaagaagactctgttgcatcttcaatgaaattaaggttccttggaagaagagaaccaagccaacacaaagctatcggatatagctgacttgttggaaaaaaaaataattaagaacagcaaagcttggcccttggaaaggccaagcccaaacgaaccatcttcttaacttgggcccaagacgggctaagtaaaagtacaga

SEQ ID NO: 3540 - DNA, 398 bp, Glycine max
ctttagagtaatgggttctttccagacaggatttggagggggagtgggatcagcttttccttcagcagcaaccttccctcattacgccatccagcaagggataccttataatgtttatgggtactctccttactcgccggattacacttaccctacgagctactatggtgtgtatggaggagcaacagcacagtacccagtttatggaagtggacctgctgcagctgcaggagggatgatgagcggtggtgcagcgttctacccatatctgcagtacggaggagaagggagtggcggcggcggtacttccggacagggttatggtgtgaactaccctcctcaggctcatctttttcagtattctcccattgcttccaccgctggctatgcccagcact

SEQ ID NO: 3541 - DNA, 593 bp, Glycine max
cggcgatccaaagcagaacaaagagccattgaactttgactataatattcagagttcagattactcactctaatcttctaagttttcattttggggtttaagtttctgagagaaaaaaaaaatatgataaagtttgttctatttttgttctgctttgcctctgcactgaccctttcagtatcggagtccaaatcagcttcagtgcaacctcatgctgctgaatctttctctgttggatatattcagatgaagactgcagcgaactgttcttacctggtagttatatctacgagttgttcatcgcctaagttcacaacggataagatcggtatcacgtttggggatgctaatggcaaccaggtatatgaaccaagactggatgatccaatttcaaggacatttgagcagtgttcttcagatacatttcagatagatggtgcttgtgcatctccaatttgctatgtgtacctatatagatctggggcagaggaaggttgggagcctgggagtgtgaaaatctatggctacaactcagagcctgttactttcgatgtcaacacctacatcccaaatggcacgtggaatgggtataa

SEQ ID NO: 3542 - DNA, 1199 bp, Glycine max
ctcgagccgcactaaccaacttctttctttgttccgttctactttcccttcccaacaacaacaagaagatgccttctgcagaagcttcctccgaaaccatttgtgtcaccggcgctggtggcttcatcgcctcttggatggtcaaactcctcttggaaaaaggctacactgtccgaggaaccctcagaaatccagatgatcccaagaacgggcacttgaaggagtttgaaggagcctccgagaggttaactctgcataaggttgacctccttcatcttgactccgttagatcagttattaacggttgccatggtgtctttcacactgcttctcccgtcaccgataaccccgaagaaatggtggagccagcggtgagtggagctaagaatgtgatcatagcagctgcagaggctaaagttagacgcgtggtgttcacctcatccattggtgccgtctatatggaccccaataggagcatcgatttggtggttgacgagtcctgttggagtgatttggaatattgcaagaacaccaagaattggtattgctatgggaaggctgtggctgaacaagcagcatgggacacagcaaaagagaaaggggtggacatggttgtagtgaacccagttttggtacttggaccattactgcaacccagcataaatgctagtacaattcacatcctcaagtacctcactggctctgctaagacctatgcaaatgccacacaggcgtatgttcatgttagggacgtggcattggcccacatacttgtttatgagaagccttctgcctctggtagatacatatgtgccgaaagctctctccaccgtggagaattagttgaaattctcgccaagtatttccccgactacccagttcccaccaagtgttcagatgaaaagaatccgagagcaaaaccctacactttttcaaatcaaaaactgaaagatttgggattggaattcaccccagtgagtcagtgtttatatgaagccgtcaagaacctgcaggagaaagggcaccttcctgttcctgcaaggcagcaggaagattcaactactgtgaaaccttaaacgagctatccctttttatctaatttgtcaacaaacaagaagctgcagcttttggcaatctgggctcatcttatattattatagagaatcctacattagaagatttctgtatttggatttcgt

SEQ ID NO: 3543 - DNA, 411 bp, Glycine max
agtatttcccggagtacccagttcccaccaagtgttcagatgaaaagaatccgagagcaaaaccctacactttttcaaatcaaaagctgaaagatttgggattggaattcactccagtgagtcagtgtctatatgaaacagtgaagagcctgcaggagaaaggcccccttccagttcctgcaaagcagcaggaagaagattcaactcccgtgaaatcctaaatgagcagctagttgtcccctaaggcaagaagctgcagcttgtggcaatctgggctcatcttatatattataatagagaatcctacattagaagactgctgtatttggattttgttaaaaagacatcaactaaattgttgccgtgtatgaacttataatattaatgaaatttattcccctcgttgagttg

SEQ ID NO: 3544 - DNA, 450 bp, Glycine max
ggccacactcatcatattccataagcatcttcttccatcaccgcattattcatcttttctcttctcattcaccaattcacaattcattttatttcttaagatgccaactgacacgtcatcagtttccggcgaaatcgtgtgtgtgaccggtgccggcggtttcatagcctcttggcttgtcaaacttctcttagagaaaggctacactgtgagaggaaccgtgagaaatccagatgatccgaagaatggtcatttgaaagagttggaaggaggcaaggagaggctaactctgcataaagttgatctcttcgatattgcctccattaaagcagctcttcacggttgccacggtgtcttccacaccgcttctccggtcaccgacaaccctgaagagatggtggagccagcagtgaaaggaacgaagaatgtgatcatagcagcagcagaagc

SEQ ID NO: 3545 - DNA, 409 bp, Glycine max
tcggctcgagcatctctgatctcactcaccattcaccaacctgcttctctgttctcttctttcccttcccaagaagaagaagaagaagatgccttcttcagaatcatcaacaggcttctccgaaaccatttgtgtgaccggcgctggtggcttcatcgcctcttggatggtcaaactcctcttggagaaaggctacactgtccgaggaaccctcagaaacccagatgatcccaagaacgggcacttaaaagagtttgaaggagcttcccagagactaactctgcataaggttgacctccttcatcttgactccgttagatctgttattaacggctgtcatggtgtctttcacactgcttctcccgtcaccgataaccccgaagaaatggtggagcctgcggtgaatgga

SEQ ID NO: 3546 - DNA, 524 bp, Glycine max
caccatattccataagcagctagctactagcatcttcttccatcaccacattcatcttaattaatattctctagtggtgcttcccaatcaatatcctttaattttgtctcaattcctttctttctcattcaccaatccatacttcattttgttaatttcttaatccaacaccaccaagatgccaactgacacatcatcagtttccggcggcgaaatcgtgtgtgtgaccggtgccggcggtttcatagcctcttggcttgtcaaacatctcttagagaaaggctacactgtgagaggaaccgtgagaaacccagatgatccgaagaatggtcatttgaaagagttggaaggaggcaaggagaggctaactctgcataaagttgatctcttcgatattgactccattaaagaagctcttaacggttgccacggtgtctttcacaccgcttcttcagtcaccgacaaccctgaagagatggttgagccagcagtgaatggaacgaagaatgtgatcacagcagcag

SEQ ID NO: 3547 - DNA, 457 bp, Glycine max
ctcgagccgctctgatctcactcaccattcaccaacctgcttctctgttctcttctttcccttcccaagaagaagaagaagaagatgccttcttcagaatcatcaacaggcttctccgaaaccatttgtgtgaccggcgctggtggcttcatcgcctcttggatggtcaaactcctcttggagaaaggctacactgtccgaggaaccctcagaaacccaggcatgcctatctatttaagttatatgacgtgtagcggggacatgcatgcatgaattttattattttggtttggttttcagatgatcccaagaacgggcacttaaaagagtttgaaggagcttcccagagactaactctgcataaggttgacctccttcatcttgactccgttagatctgttattaacggctgtcatggtgtctttcacactgcttctcccgtcaccgataaccccga

SEQ ID NO: 3548 - DNA, 461 bp, Glycine max
gtttctcagtcatctttgtcatattccaaaattaagcttgcattattcaccagaatggctaattcatatgaaaacaacttcccccctcagaagcaagacactcagcctggcaaagagtacctcatgaatccaccaccccaatacaacagctcccaatacaagccatcaaataaacttcagggaaagatagctgtagtaaccgggggtgattctggaattggacgagccgtgtgcaacttgttttcattagaaggtgctactgtgatcttcacctacgtgaaggggcaagaggacagggacgcgagtgacacgcttgagattataaaaaaagctaagactgaagatgctaaagatccattggctatacctgttgacgtgggttatgaagagaattgcaagaaagtggtggaccaggttatcaacgcttatggccgcattgacattctggtcaacaatgcagc

SEQ ID NO: 3549 - DNA, 476 bp, Glycine max
gacaataactatcttcttccaaatataaaaaaaaaaaagaaaaaggaaggagataggaaagggttaattgaatccaaaaaaaagaagagaaaaacaaaatgggcagggtttggacttcgatgatagcattgttgctttgcctgatgacatcatcggttcggggcgaggacccttacatttactacacatggaacgtgacctacggcaccattgccccattgggtgtcccccaacagggtatcctcatcaatggtcagtttcccggccccgaaatcaactccaccagcaacaacaacgtggtcatcaatgtcttcaacaacctcgatgagcctctcttgttcacatggcatggtgtccaacagaggaagaactcttggcaagatggcacattgggtgcccagtgccctatcgccccaggcaccaactacacctaccgctttcagggtaaggatcaaattggaacttacttttactac

SEQ ID NO: 3550 - DNA, 423 bp, Glycine max
gagatgagagagagatcaaaatcaaatcgaaacaaaacaaaacacagtgctcagtaccctctctcacatttactactattttgctcttctctctaggcctgccctctctccctagggtttgtttcacttatgccttcccaactcctcagcctcagtctttcagaagttgaatgtagatgatacggaaggagagaagttgccctgtcctgtcggtggctctgatctctgtaaatgctcaatgctctccatcttgcatttttgtttggtagtaaggtgataaagcatggagtttttgaaaatcaaaaagttcagaaaatctcagaaagcaaatggagaaaaggatttggcagacaaggcagtgcctgagcctgaggaaccaaagctgaacaccgatggtcctgatcagtgtaaatcagaaaacgc

SEQ ID NO: 3551 - DNA, 305 bp, Glycine max
ctttcacttctgccttccctcacagtcacattgctcttcccaactcctcagaacttgaatgtagtttggtgatacggagagacgttgccctgtcctgtcggtggctctgatctatgtatgacatttccacgatgctatatgctcgcttcgccatttcatcactagtgtcttcttgtcttggaagttgctatggaatctaggggttcaacaagctaaataaaggtagggtgataaagcatggagtttttgaaaatcaagaagttcagaaaatctcagaaagcagatggagaaaaggatttggcaga

SEQ ID NO: 3552 - DNA, 855 bp, Glycine max
ctcgagcgtgcagaatttatttggagagagcttttgaagaaggatggttttctggtgaatgcgggcttcccaacagctgatgctcctgatctcacactgaagagtgccaataaatatttgcaggactcaattgttttgatgaggaagttgcttcagaagcaactttcgggctcaaagaaaggtaataagaaaggtcctccagctgcatcagtgacagaaaacaaggtgacaggcttgatatatgtaaatgaacagtttgatggtttggaagccgattgcctgagtatccttcagaacaaatttaacagagatacgcgaacttttgctccagactcagagatattgcaggctttacaacagagttctgtaggtcaatcttctaattataaacaaatccaaaagcgttgtatgcctttcttgaggtttaagaaagaggaagcaattgcacttgggcctcaagccctggatttgagattgccgtttggtgaaattgaggttcttaaggaaaacttggacttgatcaagagacagataggtctagaagatgtggaaattttatctgcagcagatgtttattccttggccagagctggaccactagcttctttactaaatcaaaatcctccatctccgggaaaaccaactgctatctttttaactcagtagctactgggtgagtttctggaaacttttcttttcttaaactagttcccaattcctacttcattttttggtcatctaaacacgaatgtaatttatttttatttgttatatatgtagacatggatgagtttctgaaccttagtgttaaattctttttggcttaatttgaggtttaaatctttttttttttcc

SEQ ID NO: 3553 - DNA, 505 bp, Glycine max
ggattcgtcagttcattgacttgcccacagtgagaatgaagatgttgcgaacgacaatactgcaattcgctgcgttgcaggttttgtttattctgttgggtgttggtgccgattacataccgccttcgagatttgatggcttcgtctacgggaaggggaacttgaatttgttggatacggttttgatagaagcgttttatgacccagtgtgcccagatagcagggattcctggcctccactcaaacaagctcttcatcactacgcttctcgggtttcgctccttcttcacctcctccctctaccttaccatgacaatgcttttgttacgtctcgtgctctgcacattgtgaacaatttgaacgcatctgcaacgttccccttgctggagtggttcttcaggtatcaggagaatttctatggggctcaaacacggaacttatctagggcttctattgtagaggaggtagtgaagtctgcaacacaagtagttgggagctcttatta

SEQ ID NO: 3554 - DNA, 270 bp, Glycine max
gagaatgaaaatgttgcaggtggcaatagtgcaattggctgcgttgcaggtccttgttattcttctgagtggtggtgctgattacataccgccttcaaggctggatgggttcgtctaccaaaatgggtacttagatctggatactgttttgatagaagcgttttatgatccggtgtgcccatacagcagggattcatggcctccactcaaacaagctcttcatcactattcttctcggttaccatgacaatgctttcgtcgcgacccgtg

SEQ ID NO: 3555 - DNA, 2206 bp, Glycine max
cccatgcgtccgcctacgcgtccgcgaacaactgcacaacgaaccactctgaagccgctcacgttatccacaacactctcaaccctccttaaaccctaaccaatccaaccatggcttcttcttccaccttcactgcaatgtccgcctgcaagctctcctcctccgccgccatctcctccttcccctcccgccgccgctccaacgccgtcgttctgtcgaggcgcagccgcgccgccagggtctccgccatggccaaggagttgcacttcaacaaagacggcaccgcaattaagaagctccagagcggtgtgaacaagctcgcggatctggttggggtcacgcttggtcccaagggaagaaatgttgttctcgagagcaagtatggctcgccgaaaatcgttaacgacggtgtcactgtcgctaaagaggttgagttggaggatcccgttgagaatattggtgccaagttggtgagacaagcggctgccaagacaaacgacttggctggtgatggaaccacgacctcggttgttcttgctcagggtcttatagcggaaggtgtcaaggttgttgcagctggggccaaccctgtgctcatcacacgtggcattgagaagacagcgaaagctcttgtatctgagcttaaacagatgtcaaaagaggttgaagatagtgagttggcagatgtggcagcagtcagtgcagggaacaattatgaagtaggaaatatgattgctgaagcattgagcagagttggtagaaagggtgtcgtgacccttgaggagggaaagagtgctgataacagtctgtatgttgttgaggggatgcaattcgaccgtggttatatttctccatacttcgttactgacagtgagaaaatggctgttgagtatgagaactgtaagttgctgttagttgacaaaaagataaccaatgcacgggatcttatcaacatactggaggatgctattagaagtggacaccctatattgattattgctgaggatattgaacaagaggctttagcaactcttgtggtgaacaaacttagaggatcactgaagattgcagcactgaaggcccctgggtttggagagcgcaagagccagtaccttgatgatattgccatcttgactggaggtactgtaatcagagaagaggttggccttactttggacaaagctgggaaagaggttctcggatatgcctccaaggtggtgctcaccaaggatacaaccacaattgttggtgatggaagtacccaggaagcagtgaacaagagagttgcacaaattaggaacctaattgaggctgctgagcaagagtatgagaaagaaaagctgaatgagagaattgctaaattgtctggtggtgtggctgtgatacaggttggcgcacaaactgagacagagctcaaggaaaagaaattgagagttgaagacgctcttaatgctacaaaggcagctgtagaggaaggtattgttgttggtggtggttgcactcttctgagacttgcatcaaaggtggatgcaatcaaggatagccttgataatgatgaagaaaaagttggagctgatattgtgaaaagagctcttagttaccctttgaaattaattgccaagaatgctggtgtcaatggtagtgttgtcagtgagaaggtattgtccagtgacaatccaagatatggatataatgctgccactggtaaatatgaagatttgatgtctgctgggatcattgatccaacaaaggtggtcagatgttgcctggagcatgcagcctctgtagccaaaaccttcttaatgtcagattgcgtggttgttgagataaaggaacctgaggccatacctgctggaaaccccatggacaattcaggatatggactctagagcaacgagcaacggctgcttcagtgagaagagtattttgttctccctcggatgaaatgcaaaatttggtggccatttagcaatgagtccaaatgtattgttagtgtggtgaactagatagtgatgcaccctttcctcccttatttttttcaagttaataataatttttttttgcttattacttccatatttatttattttataataattgttttttgctcttttgtccagttccaactgttgtgggaagaaaatgtctttttttgctcgttacatcatttagttttaaatatattcgttgtaagttatgtttaatc

SEQ ID NO: 3556 - DNA, 558 bp, Glycine max
cccacgcgtccgcccacgcatcccatttgaaatcaaaatcaaaaacaccaaattctcaaattcaagttcgcaccaaattttcctcacaaaatgtctggtcgtggaaagggtggaaagggtttgggaaagggaggtgccaagaggcacaggaaggttcttcgtgacaacattcaaggcatcacgaaacctgcgattcgtaggttagcgagaagaggtggcgtgaagaggatcagtggtttgatctacgaggaaaccagaggagttctgaagatattcttggagaacgtgattcgcgatgctgtgacctacactgagcacgctaggaggaagacggttactgctatggatgttgtttatgctctcaagaggcagggaaggaccctctatggttttggaggctaaagaattcttttttttgttgtcccatgtgctcattttcttggatgctgaagatgtttaggttcattttgtaacataggatgcttgttcagcttaatgctggatgtaaaatgttgaaccatgattgcaattatatggattaattttttgttggtgggg

SEQ ID NO: 3557 - DNA, 532 bp, Glycine max
aattcgccgctcgacccactcaataacggtgccgaaagaccaccagaaggggatccaaattcaatttgcaccaaattttcctcccaaaatgtcaggccgtggaaaaggtgggaagggtttgggaaagggaggagctaagaggcacagaaaggttcttcgtgacaacattcaaggaatcacgaaacctgcgattcgtaggttagcgagaagaggtggcgtgaagaggatcagtggtttgatttacgaggaaaccagaggagttctgaagatattcttggagaacgtgattcgcgatgctgtaacctacactgagcacgctaggaggaaaactgttactgctatggatgtcgtttatgcgctcaagaggcagggaaggaccctctatggtttcggaggctgaagaattgattcttagtattattaaattatgttgcaggatataatattatgcctgttcttctgaaattcggtgtgatgtttagtttagattcgttctgtaacatatgaatcttcaaggttctgttcggcacag

SEQ ID NO: 3558 - DNA, 586 bp, Glycine max
cggttggaaaagaccaccaaagggggttcacttttaaaatcaaaccaacaaattttcagactcaacaagcttcgaaccaaatcttattgagaaaatgtctggtcgtggaaagggtggaaagggtttgggaaagggaggtgccaagaggcacaggaaggttcttcgtgacaacatccagggcatcacgaaacctgcgattcgtaggttagcgagaagaggtggcgtgaagaggatcagtggtttgatctacgaggaaaccagaggagttctgaagatattcttggagaacgtgattcgcgatgctgtgacctacactgagcacgctaggaggaagacggttactgctatggatgttgtttatgctcttaagaggcagggaaggaccctctatggttttggaggctaaaaagttcttagtgttattggattctattgcagcgaaaaaatacctgttcttttgaatcggtgtgatgttttgggttagggttgttctgtaagatatgaagtttattctgttctgttctgcataaaaaaaggccaaccttaatttaaattaaaccaaggagccacgtttttgggcttttca

SEQ ID NO: 3559 - DNA, 947 bp, Glycine max
gatcatcaaatcaaaaaccctaattcccaaattctctcatttttcaagtttcaaccaagaaaagcagcaacaatgtcgggtcgcggaaagggtgggaagggtttaggaaagggaggagcaaagaggcatcgcaaggtgctccgcgacaatatccagggaatcacgaagcccgcgattcggagactggcgagaagaggtggcgtgaagagaatcagtggtttgatctacgaagagaccaggggcgtgctcaagatctttctcgagaacgtgattcgcgatgccgtgacgtacacggagcacgctaggagaaagacagtgacggccatggatgtcgtttacgctctcaagaggcagggaaggactctctatggtttcggaggctgagggtttggccttctttggtggctttggtttgtgtaaatggaaggaatttgtgttttgtagtgattatatatgtacttggattatcttctgctcggtacatgctcaaggttcttctgtttttttttttaattctactagtaattgcatcctaattgttttgaattgaagtaaatttagtgaatgatgaatgttggatgttctatttctcacatttattattgttagtagtggtgtgggagagataacttttaagtgggttgttaatgctaatattaatttgttccttttttgctttcttacaactgggattgatgtggagaagtttgatagttgattcttgtggtgttattttgaaacattgtttcgtgttctttatcagcgaagaattgatagtttagttctgaagtgggtgtgttgagaatttgaactttttgctgaatttaacttattcaaacgcactttgttgttgttcaatgacgagaatggggcctggcttaagtgcagtcgtgttagttgaaaagtaatgtttttttcccatgggaattaacttgaagttcaatcta

SEQ ID NO: 3560 - DNA, 604 bp, Glycine max
  unsure (1)..(604): unsure at all n locations
tactttgacccgtccgaacttatatttcctaccaatttctctcgagttaaatcttcctcccaaaatgtcaggccgtggaaaaggtgggaagggtttgggaaagggaggagctaagaggcacagaaaggttcttcgtgacaacattcaaggaatcacgaaacctgcgattcgtaggttagcgagaagaggtggcgtgaagaggatcagtggtttgatttacgaggaaaccagaggagttctgaagatattcttggagaacgtgattcgcgatgctgtaacctacactgagcacgctaggaggaaaactgttactgctatggatgtcgtttatgctctcaagagacagggaaggaccctctatggctttggaggctaaagaatagaatctttaggtttaatgactgtgttgcaggataaaacattggttcttttgaatttgcgtgaagtttagtttaggttttggtttgttctgtaacatacgaagctatgtttgctcagaaaatgtaaaacttcaattgaaatctaaatgaaggagtgttgttttcgtggcgcnnnnnnnnnnnnnnnnnnnnnnnnnnnnnnnnnnnnnnnnnnnnnnnnnnnn

SEQ ID NO: 3561 - DNA, 446 bp, Glycine max
cccacgcgtccgcccacgcgtccgagaaaacctaatttctcaaatttgatttcgcacgaaattttcctcgcgaaaatgtctggtcgtggaaagggtggcaagggttggggaaagggaggtgccaagaggcacaggaaggttctgcgcgacaacatccagggcatcacgaaacctgcgattcgtaggttagcgagaagaggtggcgtgaagaggatcagtggtttgatctacgaggaaaccacaggagttctgaagatattcttggagaacgtgattcgcgatgctgtgacctacactgagcacgctaggaggaagaccgtgactgctatggacgtggtttatgctcttaagaggcagggaaggaccctctacggttttggagggctgaacagttcttgggttattggattctattgcagcgaaaaaatacctgttcttttaatccg

SEQ ID NO: 3562 - DNA, 505 bp, Glycine max
actcaacaagcttcgaaccaaatcttattgagaaaatgtctggtcgtggaaagggtggaaagggtttgggaaagggaggtgccaagaggcacaggaaggttcttcgtgacaacatccagggcatcacgaaacctgcgattcgtaggttagccggaagaggtggcgtgaagaggatcagtggtttgatctacgaggaaaccaggggggttctgaagattttcttggagaacgtgattcgcgatgctgtgacctacaccgagcacgctaggaggaagacggtgactgccatggatgtggtttatgcgctcaagaggcagggaaggaccctctacggttttggaggctaaagaatttaacccttcttttctgggttgcaggataagacattggttcttttgaatttgcgtggtgttttagtttaggtttgttatgtatcatacgaatctctggtttgcatagaaaatatttcatttgaaatttaaatggagtatcggttctgttaggc

SEQ ID NO: 3563 - DNA, 426 bp, Glycine max
acaaaatccaaattcgcgtgtcacagtggcgctgggtgtaagaatgggaaatcgacgcttgactcaggtcgcaaccagcgaagatgaggacgaagcaccgccgcctcctcctcctcccaagcagcaatcgtcggtcagtgcccccgaagagaaccgttcgaagcagcagcagcgcaagaggaagagaatgaagcttcaagaagaagaggaagaggaagaggagaaagaggaagagaagaagaagaagaagagaaagatcaaagacaagcaagaagagagatcgaacgaagaagaggaaccgccgcaggaagacgcaaagcccattggcgaaccggttaggttatccggaaagggaaggggccgcaaaaagcattacgaatccttcgagtacgacggaaaccaatacatgctggaggaccctatact

SEQ ID NO: 3564 - DNA, 2056 bp, Glycine max
ggggagtatcaacaagaatactcataataatatagtggctagcatagagctagtaataatattaatattgttaagctagctctaagccatggctaatgaacgtgatctgttctcggcggagattgtgaaccgtggaattgaatcgtcaggaccaaacgctgggtcgttgacgttttcggtgagggtgagaaggcgcttaccggattttcttcaatcggtgaaccttaagtacgtgaaattgggttaccattatctgataaaccatggcatatacttgttcaccataccggttcttctcgtggtgtttagtgctgaggttggaagcctcagcaaagaggacctatggaagaagctttgggaagacgcgcgttacgaccttgctacggttcttgcttcctttggggtcttcgttttcaccttgtctgtctacttcatgtcgaggccacgtcccatttacctcattgattttgcatgttataaacccgatgatgaactcaaggtgtcaagggagcagttgatggaggtggcaaggaaatcaggcaagttcgacgaagcaagtctagagttccagaagaggatgctaatgtcctccggaatcggcgatgaaacctatataccgaaggccgtcatcgcctccaccgagaacaccgcaacgatgaaagagggtcgggccgaggcctccatggtaatgttcggagccctcgacgagctcttcgagaaaacccgcgtccgaccaaaggacgtgggtgtcctagtagtaaactgcagcatcttcaacccgacaccatcgctctcagcaatgatcataaaccactacaagatgagagggaacattctgagctacaacctcggcggaatggggtgcagcgcggggatcattggtgtggacttggccaaggatattctccaggcgaaccctaataactacgcggtggtggtgagcacggagatggtggggtacaactggtaccaggggaaggacaggtctatgcttatcccgaatagcttcttccgcatggggtgttccgctgttctgctttccaaccgtcgaagggactatagccgcgcaaagtaccgccttgaacacattgttcgcacgcataagggtgccgatgaccgcagcttcaggtgtgtgtaccaagaggaagatgagcaaaaactaaagggactaaagatcagcaaagacttaattgaaattggtggtgatgctctaaaaaccaacatcaccacactaggacccttggtgctacccttttctgagcagcttctcttctttagcacccttgtgtggaggcacttatttggcagcaaaaatggtgggaattcaccctcaatgaagaagccttacattcctgactacaaactagcttttgagcacttttgtgtgcatgctgcaagcaagaccattcttgatgagcttcaaaggaacttggaactgagtgacaagaacatcgaagcgtctagaatgacgctgcatcgctttggcaacacctctagcagcagcatttggtatgagttggcttacatggaagcaaaagagagtgttagaagaggagaccgtgtttggcaactcgcatttggctctggcttcaagtgcaacagtgtggtttggcgcgccatgcgccgagtcaccaagccttctaggaacccttggcttgattgcatcaacagatatcctgcacctctcaacaactgaagcagaatttgacggcactagtgttatgaatctatcagtgaggtcatgtgaaagctatggttaggatcaataagggtagttctaagttggtctttaaaatgttacagctgctttctgtttctttctcattttattattcctggcttgaaattctatacttttaattcctcattaggcatatggttgcctccttgtttaatttctctgtctcttcataggatgattgatatcaaagttgatggatggctattacctatagtcaatgctacactacatgtctcataatttatttagtttagttgctctgcctcaactgcttaggtgggcttatattatactatgaactatgaattatagatg

SEQ ID NO: 3565 - DNA, 402 bp, Glycine max
agggacacattgtgagtatcaacaagaatactcataatataggtagcatatagagctatagttatattgatattgctatttgttaagctcttatttcctcggccatggctaataatgaacgtgatctcttctcggcggagattgtgaatcgtggaattgaaccgtcgggacccaacgctggctcgttgacattctctgtgagggtgaggaggcgcttaccggattttctgcaatcggtgaaccttaagtacgtgaaattgggttaccattatctcataaaccatggcatatacttgttcaccatacccgttcttctcgtggtgtttagtgctgaggttgggagcctcagcaaagaggacctatggaagaagctttgggaagacgcgcgttacgaccttgcta

SEQ ID NO: 3566 - DNA, 1405 bp, Glycine max
attatctccaaatacatggatttctctgaagtctttccaatttattccctgcacgagcttctttatatagtaggattgtgtcttccttcatcacactaaacaagttaaaagaagagcatcactgaactaacaaagcaaccctatgtcgaaggtggtttgtgtcaccggagccagcggcgccatcggatcatgggtggtcctactcctcctccagcgtggttacaccgtccatgccaccgtccaagatatcaaggatgaaaatgagacgaaacatttggaggaaatggaaggagcaaagagtcatctccatttttttgaaatggatcttcttgacatcgactccattgccgctgccataaagggttgttccggcgtaatccaccttgcatgtcctaacatcattggtcaagtcgaagatcccgagaaacagatattggaaccggcgataaaaggaacggttaatgtgttgaaggcggcgaaggaagcaggggtggagcgcgtggtggcgacttcatcgatttcgtcgattatgccaagtcctaattggccagctgataagattaagggagaagagtgttggacggaccttgaatactgcaagcaaaaggggttgtattatcccattgcaaagactctagcagagaaagcgggttgggactttgcgaaggagacaggttttgatgttgtcatgataaaccctggtacagcattgggccctctgcttcctccaagaatcaattcaagcatggctgtgcttgttagtgttctcaaagggggcaaagagacctacgaggacttctttatgggaacggctcacttcaaagacatagcattggcacatattttggcacttgagaacaagaaagcagcaggaaggcacttgtgtgtggaatctattcgtcactttagtgatcttgtggacaaggttgctgagttataccctgaatacgatgtggctaagttgccaaaggatacccaaccagggttgttgagagcaagtggaaaggatgcatcaaagaagctgattgatttaggtctagaattcactcctgttgagcaaatcatcaaggatgcagtggagagtttgaagagcaggggctatgtctaatttctctgctactgcagaggaactgagtgcactgttacaagtggtggtggcgttaatattattgttctgccattgctttgactcattgttcatgccatttatgtttttacctatggtcttgtgttgtgcacttgtgcgtgtaactgtattctaaaataagggtcacttggatcagtggttgtaacgatatcaatgttttgcgagagttttaatttactcttgcagttattagtgaaagattgagcggtctcatcttcattgctcagtttaatcatcaaaagcatctccttcaatacc

SEQ ID NO: 3567 - DNA, 423 bp, Glycine max
gggtacgagaggaggattttctcgcacccaaaaccagcatgtgaaatcgaaaagggctcttcgttgaatttgttctgcgctgttcataaaacccttctccgacaacttgtagctgctgctgctgtttctctttcattttttttttgctaaggactcaaggaatacaacatcctgatatttggaggacagattaaagagaaacatcgtggaggaaacaatggcagcaaggtattggtgtcacatgtgctctcaaatggtcaatcccatcatggatatggaaatcagatgcccgttttgccaaagtggatttgttgaagaaatgggtaacacccccagtagcagcagcattcccaatacatcagaatctgattttgaatctgatcgggctctctcccttgggcgcccatcttgctaggcatgatg

SEQ ID NO: 3568 - DNA, 338 bp, Glycine max
aaaagtattttaattaaatttatttttaaccatgcatctatacaattgaagtgtacttctcttacatctcttgcgctttcactactacatcatgtatggtccaaatgaaatgagtgtataaagattttgttgcttacattaattaatgctgagagggtgagaggaaatacagaagcagatactggagccggcgataaaaggcacagttaatgtgttgaaggcggcgaaggaagcgggggtggagcgcgtggtggcgacttcgtcgatctcatccattatgccaagccctaactggccagctgataagattaaggcagaagagtgttggacagaccttg

SEQ ID NO: 3569 - DNA, 392 bp, Glycine max
cggtcgcgtggggttcttcttcggtacgagaggaggattttctcgcacccaaaaccagcatgtgaaatcgaaaagggctcttcgttgaatctgattgcgtgtcaaatatgttatatgatcatgccgctttgcagtttctgcgctgttcataaaacccttctccgacaacttgtagctgctgctgctgcttctctttcattttttgtttgctaaggactcaaggaatacaacatcctgatatttggcggacagattaaagagaaacatcgtggaggaaacaatggcagcaaggtattggtgtcacatgtgctctcaaatggccaatcccatcatggatatggaaatcagatgcctcgtttgccaaagtggttctgttgaagaaatgggtaaca

SEQ ID NO: 3570 - DNA, 511 bp, Glycine max
accggtccggaattaccgggtcgacccaagcgttcgacgaagacgacagaaggggacactaaacaagttaaaagaagagcatcactgaactaacaaagcaaccctatgtcgaaggtggtttgtgtcaccggagccagcggcgccatcggatcatgggtggtcctcctcctcctccagcgtggttacaccgtccatgccaccgtgccaagatatcaaggatgaaaatgagacgaagcatttggaggaaatggaaggagcagagagtcatctccatttgtttgaaatggatcttcttgacatcgactccattgccgctgccataaagggttgttccggcgtaatccaccttgcatgtcctaacatcattggtcaagtcgaagatcccgagaaacagatattggaaccggcgataaaaggaacggttaatgtgttgaaggcggcgaaggaagtcaggggtgtggaaggcccggtccggtttttggggggggtttttgggggggggggccccccc

SEQ ID NO: 3571 - DNA, 439 bp, Glycine max
ctcgtgccgatgaagagggtgcataactgaacaaacaaagcaaccctatgtcgaaggtggctttgtgtcaccggagccagtggcgcccttggatcctgggtggccctcctcctcccccagcgtggttatacggtccatgccaccgtcccaagacatcaaggatgaaaatgagacgacacatttggaggatatggcaggagcaaagagtcgtctccatttttttgatatggatcttcttgacatcgactccattgccgctgccataaagggttgctccggcgtaatccacctcgcatgtcctaacatcatcggtcatgtcgaagatcctgaggttaaaaaattaaaaatcacttaacacactccaatacatccataaatggtctaattactagtgtagttcatatatctacacaatctttatatcttaatcctttcactt

SEQ ID NO: 3572 - DNA, 362 bp, Glycine max
tttagtgatcttgtggccaaggtttctgagttataccctgaatacgatgtggtcaagttgccaaaggatacccagccagggttgttgagggcaagtacaaaggatgcatcaacaaagctgattgatttaggtctagagttcactcctgtagaccaaatcatcaaggatgcagtggagagtctgcagagcaagggctatgtctgatttccatgctgctgcagagggactgagtgcactgttacaagtggtgatggcgttaatattattcttctgccattgcttcgactcattgttcatgccatttatgtacccaagtgattgatgccttaaaagcaaacctctcaattccaatttactctatt

SEQ ID NO: 3573 - DNA, 604 bp, Glycine max
  unsure (1)..(604): unsure at all n locations
attcaaacaacatccaatccttgttcctgtcctggctaacgttaccgactactttcatatttcgtgtaacgagataaccaccaaaactcgattttttttagtttttaatcaacgaacacatagcctattcctggttgcttctgtttttgtttttcatttcagaataggaaccaatggctcatttgctgacaccaactcctaccactgctgcaacagctctctccgccagagcccggagaagagccccctctattcgttgaaaaatgtttactttccaacttcaagagtgtgctgcgttggtcaccaatatcaacaatctcacccctcttccctctctgatcttgatcaagtccctcctcccggtggcaatcactctctgcgtcgcaggacattgatggggttgagtggtgcggcaacgttggggttgagtttgagtgatgagcaaagtgcaaggggtgcagcaaggcgtccgccaccttcaccaccgacggagaagaaggacccgaatgtgagtggtgttcaggctaaagtgttggctagcaagaggagaaaagaagccatgaaagaagaagtggccaggcttanagagagagggaagccccgt

SEQ ID NO: 3574 - DNA, 583 bp, Glycine max
  unsure (1)..(583): unsure at all n locations
gccaaaaatccagacacagagatacagtagctagagaaatggaagagtggagcgagcatcctaaactatcattgagtgaagggaaaagagtaaataattaaataaataaaaaacattagccttgtctcagcacaaacgtgaaagagcatganatgtgatttcaattactacaaccatgtcagcggcactctcccgagagattattcatatgacgaaactgccatcgctccccacaacgtcaatccctaactaactaccaacacccgtttcgtttcgaagacctgcaaccactatggtcggcggcggtgggaaccgaccggaggcggagcggtggctctacaccgccaacaagctcctgagcgcgcgtgacctgcacggcgcgcgctccttcgccatccgcgcgcgtgagtcggacccgacctacgaggcctcggagcacctcctgacggtcatcgacacgctcctcgccggcgagtcgcggatcaacgaccaccaccgcgactggtacgggatcctccagattctccgctacgccaccaacatggaccacatcgccgcccagtatcgccgcctcgcgctcctt

SEQ ID NO: 3575 - DNA, 535 bp, Glycine max
atttttgttgaaggatatgattagagaatccctgttgtatagaaaacttttgtgtggattggaactgaaacacctatgatctctaattcagaaaaaaataaaatcaaaacataggcgatgcctcagcacaaacgtgaaacagcatgaaatgaactgtgactaccatgtcatgtcagcagcactctcccgagagattattcatatgaccaaactgccctcgttcccctaatccgttttcgagagttacaaccaccatggacggcgggaaccgaccggaggcggagcgctggctatacaccgccaacaagctcctgagcgcgcgtgacctgcacggtgcgcgctccttcgccatccgcgcgcgtgagtcggacccgacctacgatgcctcggagcacctcctgacggtcatcgacacgctcctcgccggcgagtcgcggatcaacgaccaccaccgcgactggtacgggatcctccagattctccgctacgccaccaacatggaccacatcgccgcccagtatcgccgcctcgcgct

SEQ ID NO: 3576 - DNA, 382 bp, Glycine max
atttcctagcctcccaacaaggaggccccctatgctcaacagcagaaaataaataaagggcattggggtgcaatggccattgcaaagagtgcttccattcttattattttgtgctttgcattggcctgcaatgcggataatgctggaaaaccagacccagttgctggtcctgacatgttcagcaataaaaatgtggctaaggatgtgctccttcccggggagcaaatagttaacgtccaggattttggagccaaaggtgatggcaagttcgactgcaccgagtctttcatgcaagcatgggcaaagacctgccatcaatcctctgggccagccaggctttacgttcctgctggcagattcgtggtttcatcaatgtatttta

SEQ ID NO: 3577 - DNA, 536 bp, Glycine max
atcgaacatggtgatggcctccagtctaattccctaacatttggagctgcttgtttcacaacttgcccattctctagaactaaaacctgctgcattcactttcttgccattccaaatgcaaactccagagccactttttctctcggtcccactctgtccaagaggatgagcttaggtattctttctagtcccatcgagacaactcccacacatctcattacaccaatttcagctcttaattcaggtttggtagcatcaattacagattcgaacgatatttcagccatcttagcaaatgccagaatagtagtagattctgaagatgaaaataagatagagctaagagtggacttgactggcgatcagacacagaaggtattcgacaggatcctaacagacttaggccgtactgccccaccaggttcctggatttcgcatgctaaaaggaggaaaatcactcatggatggcaatggacatccttgtacagatgcttggggaagaacgtgtcaccaagttttcaatacaagaatatact

SEQ ID NO: 3578 - DNA, 499 bp, Glycine max
gcagtataccctagctagcccaagcagaaaactttactttgttacgccgccccctctcctctgttgtcttacgacgttagccatggaagtctcaaaaaaagaagctcgagtccgttgttcatcctcgtctgcatcctcatcgactccaccttcttcatcatccagcccactctctcccgcatgggcccatccgaggcggcccacacattcctccctcgaaccgggcttgcccgcttcagcggcacaaggcctcgcacgggccgcgttccggtcgggatcggcggcaggaggcagcgaatcgtcgtcaccggcggcgcgggcttcgtcgggagccacctcgtcgacaaactcatcgctcgcggtgacgacgtcatcgtgatcgacaatttcttcaccggaagaaaagagaacctggtgcatctgttcgggaaccctaggttcgagctcattcgccacgacgtcgttgagccgattctgctggaggtggatcagatctatc

SEQ ID NO: 3579 - DNA, 1600 bp, Glycine max
  unsure (1)..(1600): unsure at all n locations
agaaaaagtggcatccatggcgggtttcgagtttccttcaattccaggctttgtgtggaatttggttataacaatcaaaccaccctcacacacagtgcatctgacatggctgttaccgacaataacaacattgggtgaatcggtggtaaggtaacaaaaaacaaaaggcgcggttgtgttgtgtgttcctttttaatttaacctcgaaaggatgaaacagctccacaagcaaacgagtctgaatcaccggagggaggaagagatgctggggagcagcgagacctcaccatactcccccaaatccatcaagcacaccagatccctccccagatccatcaactacctcctccgcgagcagcgcctcttgttcatcctcgtcggcatcctcatcggctccaccttcttcatcatccagcccactctctcccgcatgggcccacccgagccggcccacacattcctccctcgaaccgggcttgcccgcttcagcggcacaaggccccgcacgggccgcgttcctgtcgggatcggcgggagcaggcaccgcgtcgccggtgcactacaaatacaaccccgtcaagaccatcaagacgaatgtgatgggcacgcttaacatgcttggccttgcgaagagaattggggctaggtttctgcttactagtactagtgaggtttacggtgatccgttggagcatcctcagaaagagacttactggggaaatgtgaatccaattggtgagaggagctgttacgatgaagggaaaaggactgcggagacgttggccatggattatcatcggggtgctggtgttgaggttcgtattgctcgaattttcaacacatatggaccccgcatgtgtttggatgatgggcgtgttgttagcaattttgttgcacaggctattcgtaaacaaccattgactgtatatggtgatgggaagcaaacaagaagtttccaatatgtctctgatttggttaatgggctggtggctttgatggaaagcgaacatgtgggacctttcaacctgggtaacccaggggagtttaccatgttagagcttgctcaggttgtcaaagaaacaattgattcaagtgctacaatagaatacaaacccaaatactgctgatgatccacacatgaggaagccagatattagcaaagccaaggaactgctgaactgggagccaaaaatccctctgagagaagggttgcctcttatggttaatgatttccgaaatcggattctgaatgaaaacgaaggaaaagggatgaaataagcataatagcaaaccctgtatgtatatggagatgagcctgtctccttcatttttttgttcttatttgcggtcagcatcaacagaaaaattctggcaacacgtcacttttgtagaagatatacctactgctggccttttacatttaatcatttatgcttgcttagcacacaattgatggatttgttaaattttgaaagaattcttttcagtagtttttcttgtctattgtatcgataaaagttgtaggatttgacatttggattctggtatcatgagaatatatttttttagaatnnnnnnnnnnnnnnnnnnnnnnnnnnnn

SEQ ID NO: 3580 - DNA, 565 bp, Glycine max
atccaaggacgcgtggggtgccccgcgcgcggtatccaattaccgacaataacaacattgggtggtaacaaaaacataatccgcggctgtgcgtttttaaccttaattaataacaacaggatcatgaaacagctccacaagcaaacgagtctgaatcaccggagggaggaagagatgttggggagcagcgagagctcaccctactcccccaaatccatcaagcacaccagatctctccccagatccatcaactacctcctccgcgagcagcgcctcttgttcatcctcgtcggcatcctcatcggctccaccttcttcatcatccagcccactctctcccgcatgggcccacccgagccggcccacacattcctccctcgaaccgggcttgcccgcttcagcggcacaaggcctcgcacgggccgcgttccggtcgggatcggcggcaggaggcagcgaatcgtcgtcaccggcggcgcgggcttcgtctggagccacctcgtcgacaaactcatcgctcgcggtgacgacgtcatcgtgattgagaatttctcacgggaagaaa

SEQ ID NO: 3581 - DNA, 2050 bp, Glycine max
ttctcgagccgaatcgagagggaagacgaacactatcatggcttcttcactcagaatttcaagactcatctctcgctccttttcttctacctctttcttttcacgaggtgggaatggtttccttggttcaagacactgcaaatacagcacttcttctgccattgaagaagaacccgttaaaccatcagtgcaagtagaacacacccaactcttaattgatggaaaatttgtagatgctgcttctggtaaaacttttccaactttagatcctaggacaggtgaagtgattgctcatgttgctgagggtcactctgaagatgttgatcgagcagttgcagctgcacgaaaagcatttgatcatggaccatggcctaagatgacagcttatgaacggcaaaggatcttgttgcgcgctgctgatctgtttgagaagcataatgatgagcttgctgcacttgagacttgggataatgggaagccttatgaacaagctgctcaaatcgaaattccaatgctggttcgcctatttcgatactatgctggttgggcagataagattcatggtctcacagttccagctgatgggccatatcatgtgcaaacattgcatgaacccattggtgttgccggtcagatcattccttggaacttccctcttctcatgtttgcctggaaggttggaccggcattggcctgtggcaacaccattgttctcaaaacagctgagcagacaccgttatctgctttatatgcagcaaaactatttcatgaggctggacttcctgctggtgttttgaatgtagtatctggctttggtccaactgctggtgctgctcttgctagtcacatggaagttgataagcttgcttttactggttccactgatactgggaaagttgtccttgaactggcagctaaaagcaatcttaagcctgttactttggagcttggtgggaaatccccctttattgtatgcgaagatgctgatgtagatgaggctgttgagctagcacactttgcattattctttaatcagggacaatgctgctgtgctgggtctagaacatttgtacacgaacgtgtgtacgatgaatttattgagaaagcaaaggcacgtgctttgaagcgtgctgttggtgatccattcaaggggggaatagagcaaggtcctcagattgattcagaacaatttcagaaaatactgaagtatattagatccggtgttgaaagtggagctactcttgaaaccggaggagatagatttggcaactcgggcttctatattcagcctactgtcttctcaaatgttaaggatgacatgctgattgcgaaggaagagatctttggcccagtgcaaagcatattaaaattcaaggaccttgatgatgtgattcaaagagcaaataacacacactatggccttgcagcaggggtgttcacaaaaaacattaacacagctaatactttgactagagcattgagagctggaacagtgtgggtgaactgctttgatacatttgatgcagcaattccctttggagggtacaaaatgagtggtcaaggaagagaaaaaggagaatacagtctcaagaactacttgcaagtgaaggctgttgttacatccttgaagaacccagcttggctttgaacatcattagctttagatttatttgatgaaaaagattaataaataggctccaataataaagataattaaattgggtttattccattcaaagtatctgataatgatgaatatgatctattttctttttctgtttttgcccctgcattttatgggtagcgcgaaatatactatggagtctatgggataaaattcatcgtagaggtgaatttctggttgggacgggaatcaaatttgcataatgatggatgtaaacttcatattacttgttctcagaggacattgttcgtttttagtaaatggcagtcctatgattgaactgtgattcaactaacaacgattcagtatcatattctaagagttatttttggtagttatttcattcaaaaacacattgtatatatt

SEQ ID NO: 3582 - DNA, 536 bp, Glycine max
atataacactcgtaacaatttcacaaagttcataaaactttactataaacagtagtggagagagggagaaaaaccaaagaagattgaccatggcttcttcattgaggatctcaaggctcctctctcgttcttttctttctgcttccactactactcctttgttttctagaggcggaagtggtgctcttggtgcagggctcagtaaattcagcactgctgctgccattgaagaaccaattaaaccaccacttaaagttgaacacacccagctcttaattgatggaaaatttgttgatgctgctactggcaaaacttttccaacgttggaccccaggacaggagatgtgatttctcatgttgctgagggtgaccatgaagatgttgatcgagcagttgcagctgctcgcaaagccttcgaccgcggaccttggccaaagatgacagcctatgaaagacaaaggatattgctgcgtgctgctgatctgtttgaaaagcacaatgatgagcttgctgctcttgagacttgggataatggg

SEQ ID NO: 3583 - DNA, 361 bp, Glycine max
agtgttcacaaagaacatggacactgcaaacactttgacgcgggcactcagagttggaacagtttggataaactgctatgacacatttgatgctgcaattccctttggagggtacaaaatgagtggtcaaggcagagaaaaaggagagtatagtctcaaaaactacttgcaagtgaaggctgtcgttaatcccttgaagaacccagcatggctttgagaaacactatgtgccttccttggatgatcaactatcagtgcctcaatgataatgatgataaaaacaaaatccttttttttttttgttacacgagttgagttatgacattgtaaacataatagtaaagaatcttgtcaatgaagt

SEQ ID NO: 3584 - DNA, 498 bp, Glycine max
attggtgtttttaggccttggttttgctttggggctttcattaatggtcttatttatttttaataaattggccccttttttcttcttctgatattcaggtggaagtggtgctcttggtgcagggctcagtaaattcagcactgctgctgccattgaagaagaacccgtcaaaccaccagtgcaagtggaacacacccagctcttaatcgatggaaaatttgtagatgctgcttctggaacggcaaaggatcttgttgcgcgcagctgatctgcttgagaagcataatgatgagcttgcagcacttgagacttgggataatggaaagccttatgaacaagctgctaagattgaagttccaatgcttgttcgcctgattcgatactatgctggttgggcagataagatccatggtctaacagttccagctgatggaccatatcatgtgcaaacattacatgaaccaattggtgttgccggtcagatcattccttggaact

SEQ ID NO: 3585 - DNA, 448 bp, Glycine max
gtactagtgttgggaaggaggaaaggaaacaagaagaggaggggtttttgttttggtgattgaattggggatttagggattgtgtacggtaacaatgaatttcaagatggattccgatagcgcgaagctgttcgtaggaggcatttctcgcgacactaccgaacacgttctcaaactccacttcgccaagtacggcgtcgtttcggactccacaatctccgtagaccgcaccacccgaagccctagaggttttggcttcgtcaccttctccgacctctccgcagctgataaagccctccaagacacccacgtcatcctcggaagaacggtagaagtgaaaaaagcaattcccaggagtgaacaacatcaacaccaaaacccattacagagtagaaggggtggttattattataataataataataataataatgatgataataataat

SEQ ID NO: 3586 - DNA, 784 bp, Glycine max
caaaatggtttcagttgagagaataaagcagttctccagccttccctcagaagctccatggaaaattgctgacaaaactcctcctcagaattggcccagtcaaggcattattgagttaaccaatttgcaggttcggtatcgaccaaatactcctctggttctcaagggaatctctctcaccattgaagcaggaggaaccagtggtgttgttggccgtacaggaagtgggaaatcaaccctcattcaggtgttatttaggttgattgagccttcagctgggaaaataactgttgatggaatcaacatttgcaccctgggccttcatgatctgaggtctagatttggaattattcctcaagagcctgtcctctttcaaggaacagtacgaagcaacattgacccccttggactgtattcagaggaagaaatttggaagagtcttgagcgctgccaactgaaagatgtggtggctgcaaagccagagaaacttgaggctccagtggttgatggtggagacaattggagtgtggggcaaaggcagcttctttgcttgggaaggatcatgctaaaacgcagcaaaatactgttcatggatgaggcaacagcatccgttgattcacaaactgatgctgtaatacaaaagatcatccgtgaggacttcgcagatcgtacaattataagcattgctcacagaataccaacagttatggactgtgacagagttttagtcattgatgcaggctatgcaaaggaatatgacaaaccatcacggttgctagaaagg

SEQ ID NO: 3587 - DNA, 396 bp, Glycine max
tcatgtcaagaactatgaaactgcaatcaagggcattgagggtttgcaattataaaatgatgagaaggcacattattgattcctcaccttttcatgttgtaaatataagctttggttgacgggcactacaatagttgcatgttgccaaggtgagtcgcgaagggacgtgaatttgaactcagaagtctgggcttgtgttgtttaacccttgtgctcatgctgatcaagcatggaagctgaaaaaatttgagctaaatcagggattgttcttgcttcgaagctcagggtttacgctggcactagtcttctggcgggaaccctaaattttgtaaccttttcctgtgagttattattgatttaccagatgtctaaagtgtcatgtggatcacattgttc

SEQ ID NO: 3588 - DNA, 989 bp, Glycine max
ctgaggatataaaggaaactggatacacctatattatgccaaagagttcacatatatatcttcgtgtgaaccatatatatgtgaactctgaggatataaaggaaactggatacacctatattatgccaaagaacattttgaaaaagtttatatgcatagcagatcttcgaacacaaatttctgggtacatgtatggcgtaagtcctccagataatcctcaggttaaagaaattcgctgcattgtgatgccaccacaatgggggacacatcaacaagttcatctgccatcagctcttccagagcatgatttcttgaatgatttggagcctttaggatggatgcatactcaaccaaatgaacttcctcagttgtcgcctcaggatctcacttcacatgccaagatcctagagaacaataagcaatgggatggggagaaatgtattatcttgacttgcagctttactcctggttcttgttctttaactgcatataagctcactccatctggttacgaatgggggcgtgttaataaggatacgggaagcaatccacatggttaccttcccacccattatgagaaggttcagatgctccttagtgatcgcttccttggtttctacatggttcctgataatggtccatggaattacaacttcatgggggtgagacacgcatcagggatgaaatatggagtgaagctcgggactcctagggaatattaccacgaggaccatagaccaacccatttcttagagttcagcaatatggaggaagtggagacagctgctgagggagatcgagaggatacattctcttgagagataaaaatatttttgtttgagatatataagtggcaagtcctttaattttttaaacttgtcataatatgttgtatcatctactgtttgttcatcctagggattttgcaacaacggtatcatagctctgtacataattacgatctgcttctgtatttctaccgagctgag

SEQ ID NO: 3589 - DNA, 662 bp, Glycine max
aaaaatgttgcttaagcccgataaaactatcatcacggaacctcatcacatctggccttctctaagtgatgatcaatggatgaaggtggaggttgcattaagagatcttatactatcagattatgcaaagaaaaacaatgtgaatacttcagctttgactcagtctgagattcgtgatattatacttggagctgagattactccaccttctcaacagcggcaacagattgcagagattgagaaacaggcccatgaagcaaatcaggtgacagctgtgacaacaaagactacaaatgttcacggtgaagaacttatagtaaccaccactagtccttatgagcaagctgcttttggttccaagactgactggcgtgtccgagcaatatcagccacaaatttataccttcgcgtgaaccatatatatgtgaactctgaggatataaaggaaacgggatacacctatattatgccaaagaacattttgaaaaagtttatatgcgtagcagatcttcgaacgcaaatttctgggtacatgtatggcataagtcctccagataatcctcaggttaaagaaattcgctgcattgtgatgccaccccaatgggggacacatcaacaagttcatctgccatcagctcttccagagcatgatttcttggatg

SEQ ID NO: 3590 - DNA, 1714 bp, Glycine max
aagaaatctccatttcataggaaatcttttcccagtgcttccttttccaggagtggggatggtattaagggaggttttagagatgatgacgaaaactttttaaggtgcaaaaagttttgcacgaagccaaaggcttttaggtctccacgacgcattgcacaccgaagaatcaggaatttgatgtcttccaagatactggaagacagctccaaagttgaaggactctgaactttctagatctgatctaggagtacctcgttatcataagaggaagacttgttacggttttgaaagatctcagcacaatgccattgttaaaaagaggaaattcgttgaccgggtttcaggagtaacttctgatggaggattcagtagtgagagtgtgtccaattcaccacagaaagggatggatggagacaagcctagctcatctgcaaaattgcatgtacctaaggctaaggattctcatgtaaagtttagcataaagtctataaggataccagagctttatattgaggttcctgaaacttcaactgttggttcactaaagaggactatcatggaggcagtgatggctatacttggaggtggtgcacatgttggtgttcttcttcaggggaaaaaagttagagatgacaatagaacacttgtgcagactggtatatcttgcaatgaaaatttggataccctgagtttcatgttggagcccacttcactacaagcttctccaactgtttgtgttggtgatccttcttctcaatgtgaaacatcccagcctacctggcccacagaaactcctgtcttagattcaggaattactgataccttgcacgactcacccttgctgacatatccgggcaacctaattgaaagtaaccatgagtctacttcttcacttgcggacactacacttgacaaactaacacctgattccagagcgatagttgttgttccagctaccacagaaacattagctgtggttcctgtgagtcagaaaaccaagcgctctgagtttgtacagcgtcgaaccaggagaccattctctgtgactgaggtagaagcacttgttcacgcagttgaggaacttggaactgggaggtggcgtgatgttaagttgcgagcttttgagaatgcagaccataggacttatgtagacttaaaggataaatggaaaacattagtgcacaccgcaacaatctcccctcaacaaaggaggggagagccagtacctcaggagctcttggacagggttttggctgctcatgctttctggtctcagcaccaagccaagcaacatggcaagcatcaagctggaccaggaaccttgaagattacagaagcctcagctgaaagaccttgtgtgtgttgaaggtgagaaggtgtccacttgtgatatgatgatggtgtagaaaggagtggtggtgttgacaggaaaagaggaagacaaaaacttgtacattttgatttgattcaatttcatgtaatattctcacaccaaattctttgccggccattaattgcatgcagggttggcatttgtaaatgatttgatgcaataagattgttctaacaggaacttatgatgttctttgattcttttttcttgatttcttttgcttttatgaatgttggagaaaatgaaaaagaaccttagacctgacgacccaaaagaaaaggtgaaaatgttcttggtattatctttcatttcatttat

SEQ ID NO: 3591 - DNA, 717 bp, Glycine max
ggtatcaagcaaatcaacaataattcagaaatgttactgcaaacattagctatccctacaatactccttgtgatattcatatgggtggtacaaccaaagcaacgtcatgggaagattgcaccaggtcccaaggcgttgccaattattggtaacctccacatgctagggaaactcccgcaccgcacccttcaaacctttgcaagaaaatatggacccataatgtccttgaagctagggcaagtccaagccatagtggtttcctcccctgaaaccgctgaactattcctcaagacccatgacactgtttttgcaagcaggccaaagattcaagcctctgaatatctctctcatggcaccaagggcttggtgttttccgagtatagcgcctactggcgcaaagtgaggaaagtgtgcacccttcaacttctcagtgcttcaaaagttgacatgtttgctcctttgaggagacaagaattgggagtgttagtgaagtcactgagaaattcagcggcatcacgtgaagttgtggacctcagtgaggtgttgggggagcttatggagaacatagtgtataaaatggtattggggcgtgctagggatcatagattcgaattgaaaggacttgttcaccaggtgatgaacttggttggagctttcaatcttgcagattacatgccttggcttggtgcgtttgatcctcagggaataacaagacga

SEQ ID NO: 3592 - DNA, 559 bp, Glycine max
cgtacgtaagctcggaattcggctcgaggccctctatgtatgattatcaccgcagcattgggttcccttgtcttagccgaacaagttcatctaggaagtatatttggggccattctcattgtgtgcggactttacactgtggtgtggggcaaaagcaaagaccgtaagagcacaacagaaatagagaaaggcgaaagccaagaattgccaataaagaacggtacaaaatcagcgtcagacatatttgatggcattgaaatcaatgttccttctgaggtgttgaagaaaggaggagggaaaaatgtcccaccagcaacaacaacaacaacaacatcatgaaggtccttttataggactagcactataaattttcctattagcttaagctagattgaggtcaagaaagattttgtgcaatgtgaaaatctttatctacctcactagcttcattttcattgcgcctttcttggtttcctttaactttattccgtgtttgagaaagtataatgtcactcaatcaaataatgcaataattaatgccattgtctctgttttttgt

SEQ ID NO: 3593 - DNA, 408 bp, Glycine max
gctaaacaccttcttcttcttcttctttatctttagttccgccactgcatttcattccaattccaataccataatcataatcatcatcggcaccattcccattttccatggcaaaccctaaaaccaaaagtcaccattcctctgggcggcgaggacgatcccgactcgaccgaatcgcggtgggtcttccagcgaggacgaggaggatccctccgagatcgaggacttcgacgccgccgatttgcgccaccaggccatgttcgattccgacgacgaggacaatgccgagcagagactcgtccgcaccggtccccgtatcgattccttcgacgtcgaagccctcgaggttcccggcgctcacagaaacgactacgaggatgttagtgtgggaaaaggaattgtcttagc

SEQ ID NO: 3594 - DNA, 501 bp, Glycine max
gcaagtaaaattaaggagaaagctagggtagttgcaatggacttgagaggtcatgggaaatcattgacagaagatgatcttgacttatctgttgagactatgtgcaatgatgtattggctgttataaaggaattatatagcgactctcctccagccatcattcttgttggtcacagcatgggaggatcaattgctgtgcatgttgctgcaaggagatcattgtctgccttggcggggttggttgttgtggatgttgtagagggaacagcaatggcttcactaattcatatgcagaaaatcctatcaagcaggatgcaacatttttcaagcattgaaaaagctattgaatggagtgtcaggggtggctctttaagaaatattgattctgctcgtgtatcaatccctgccacattaaagtatgaccattcaaagaaatgttatctttaccgaactgagctggaaaagactgaacaatattgggaaggctggtatgaaggcctc

SEQ ID NO: 3595 - DNA, 724 bp, Glycine max
  unsure (1)..(724): unsure at all n locations
cctctatatgatggttccaaatgtctccagatgaaagcaaagcagaattgtattgccaatggaaggcctgatttggggtaccttttctggaggtggaaaccaagtgaatgccatctgccaaggtttgaccctaacacttttctccaactcataagcaacaagcacatagcttttattggagactctctggccaggaaccacctagagtccctcctttgctttttagccactactgaaaaactacaaggattcacccaattccaagaaggttatactcggtggctctttcgttctcacaaggcaaccgtgtccttctattggtccccttttcttgtagatggtgttccaagaaaaaatccgggactcccttataacaaaattcatttggatcgtgctaatatgaagtgggaaaaggatttggatcaaatagacatcatagtgttgtccttagggcattggtttttagttccttcggtattctattggcgtgacaaagttataggatgtgtgagccatcctgtttctaattgcaccaaagacattggtgtttatgttccaataagaagggccttaaggactgctcttaatagcataattaagaggaaggtgaaaagaggaaatggaattgatgtaattgtgagaacatactcaccttctcattttgaaggtggatgggataagggtggtacttgtngcaagtctaagccttatggagtgggggaga

SEQ ID NO: 3596 - DNA, 1004 bp, Glycine max
cgttgggcccatgtattgggggacccgctttcaacttcagaattcattaactcttggggccttagtattgaaatatatgggcctaccacagctttttaacatcccatgatccatcccaacacccagaccacccggaccagaaaaggatccaggttcagcaaaacgggtcgacccggtgggggatcattggatcccagcccacaacaaaaaaatggacacattctccttccacctaactaagctcccaggtgaactactttgcaagcacaaatttggggtccaagtcttgaccaaacccctctttttgaatccctatgtgccatgatttggcgttgcatggcccgggttcgatcaggatccgaacccaaaaccgtgaccgtgtgtagaaccgacccgtataagaggtcaaatgatatcattggtaataaccaagtgatatgcaaggttgaggctgaaagtgaatgctcaattgtagacactgatttgacaatcttagctagcatgcttgtggatcaaggagtggatgagaggaagcaaattgaggaagcagttgagagagaccaaggtgtgagtgatttcttcgtctatggtgtcaacttgacatttctagacttacaagaaaccaatgtgtatgacttgcaattgaagggacacacaccaaagtttgtttactacacccttcaaggtgttggagatgaaggggttgttttggtgtatccgtggcccaaaggttctatcgagaatggtgttgatgggaagtttctgaccatgatttttccggaggatgaaatggtgaagcttaaatctgagctcaagataattggtcttctgcttgaggataattaagttttaatgagattaagtgcttatcaacgaataaatttcttttttattaagtatatttgtgagcaagggaaacttttagtttgtagtacatagtgtattactttaaagtcatgtgtgtctcacgttaaacgtaaatgtgacatggtgtgattcttctt

SEQ ID NO: 3597 - DNA, 474 bp, Glycine max
atgacttgcaattgaagggacacacaccaaagtttgtttactacacccttcaaggtgttggagatgaaggggttgttttggtgaatccattgcccaaaggttctatggagaatggtgttgatgggaagtttctgaccatgatttttccggaggatgaaatggtgaagcttaaatctgagctcaagataattggtcttttgcttgagaataattaagttttaatgagattaaaagcatgtttgactttccgttcatcttgttagcacgaatttcaattttaaattcaatggtcaaccgtatattaacccaaaaggaatgatggacatgcttttgcaaacttcatttttccccaatgttggttcgtcgaatacccaaacacgcattaaaaatttgttaatgaataaatttcttttttatttgagggatctgtgagcaaggaaaactttcagtttgtaatacataatttattgtttt

SEQ ID NO: 3598 - DNA, 496 bp, Glycine max
ggggatgcaagcagagattttttcttacgcaggcagtggacacagacaccatgtcacttcttaaccagctctttaacagaggcgttttcggcactcgatgcaaaacatgcctgaacctggcaatttcacgcattaagctgctgcaaaacaagagagatatgcaactgaaacaaatgtgcaaggagattagccaattcttgcaggctggccaagaggcaattgctagaatcagggtggagcatatcatacgggaacaaaatacatgggctgcatatgaaattttggagttgttctgtgaatttgttcttgcacgtgtacctataattgagaatcagagggagtgccccacggaattgcgagaagccattgcaagtataatttttgctgctcctagatgttcagatgtaccagacttattgcacatcaagaacttgtttaccactaaatatgggaaagaatttgtctctgcagtatctgaacttcgtcctgattcggg

SEQ ID NO: 3599 - DNA, 760 bp, Glycine max
aaaccctagagccgattcggctcgagatttcattccccatcaaatctcttccttctctctcctcatttccaaagttcccaactttcctaacccgagatctggtgaattgaattgaaattgaaattgttgtcgtggttgctgctgctgcagctgcaaggaatgccgctgatattagcgaaaagcgattcgatccagattcgcgaggtgtggaacgataacctggaagaggagttcgcgttgattcgcgaaattgtggacaactacccttacatcgccatggacacggagtttccggggatcgttctccgaccagtggggaatttcaaaaacagctacgattaccattaccaaaccctaaaggacaacgtcgacatgctcaaactcatccaattgggcctcaccttctccgacgagcacggcaaccttcccatgtgcggcggcgacgacgaagaatccgacacgtgctgctgcatctggcaattcaacttccgcgaattcaacgtcaacgaggacgtctttgccaacgactccatcgagctcttgcgccaaagcggcatcgatttcaagaggaacaacgaaaacggcatcgacgcccaccgtttcggggagcttctcatgtcctccgggatcgtcttgaatgacaacgttcattgggttactttccacagcggttacgatttcgggtacttgttgaagctcttgacgtgttaggatttgtccgatacacattgtgtgattttccaatttgatatacatgtat

SEQ ID NO: 3600 - DNA, 576 bp, Glycine max
cccacgcgtccgcccacgcgtccggctcctcctctttcgcccccttctccctctctctattttttttttctttcccgctttttcatagcaaaacgaaaaagaaaaccctagaacgggagagatttcattccccaaaaaatctcttccttctctctcctcatttctgagttcccaactttcctcacctgagatctggtgtgacgtgcatcacaattgaatcgaattgaaatttgttgtcgtggttgcagcaaggaatgccgctggtattagcgaaaagcgattcgatccagattcgcgaggtatggaacgataacctggaagaggagttcgcgttgattcgcgaaattgtggacgattacccttacatcgccatggacacggagtttccagggatcgttctccgacctgtggggaatttcaagaacagctacgattaccattaccaaaccctaaaggacaacgtcgacatgctcaaactcatccaattgggcctcactttctccgacgagcacggcaaccttcccacgtgcggcgacgaatccggcacgtgctgcatctggcaattcaactttcgcg

SEQ ID NO: 3601 - DNA, 400 bp, Glycine max
cccacgcgtccgcccacgcgtccggaaaaccctagaacgggagagatttcattccccatcaaatctcttccttctctctcctcatttccaaagttcccaactttcctaacccgagctgcaaggaatgccgctgatattagcgaaaagcgattcgatccagattcgcgaggtgtggaacgataacctggaagaggagttcgcgttgattcgcgaaattgtggacaactacccttacatcgccatggacacggagtttccggggatcgttctccgaccagtggggaatttcaaaaacagctacgattaccattaccaaaccctaaaggacaacgtcgacatgctcaaactcatccaattgggcctcactttctccgacgagcacggcaaccttcccacgtgc

SEQ ID NO: 3602 - DNA, 480 bp, Glycine max
ctaatttctaacaaaatattttaatttgctcctcctctttcgcccccttctccctctctctattttttttttctttcccgctttttcatagcaaaacgaaaaagaaaaccctagaacgggagagatttcattccccaaaaaatctcttccttctctctcctcatttctgagttcccaactttcctcacctgaggtcagaatcatacaataattcctttctgttttcagtttcttattacaattcaattggatgatgattattgagtctaataattttgaacagatctggtgtgacgtgcatcacaattgaatcgaattgaaatttgttgtcgtggttccagcaaggaatgccgctggtattagcgaaaagcgattcgatccagattcgcgaggtatggaacgataacctggaagaggagttcgcgttgattcgcgaaattgtggacgattacccttacatcgccatggacacggagtttc

SEQ ID NO: 3603 - DNA, 1043 bp, Glycine max
ccgtaagctcggaattcggttcgagaaaaaggggaacttgttgggaggaagcacagaccacaggggcatatctcaaatttttttacaaagtggataatataatataaattgaataactgagggtttggtacttaagtttaatttagttaaagttgtttgtgtctggaattggtgtttgaaaatggctctctttgctgcattttccatttgtaaagttgccaaggatgcagctggagttgcaggaaatgtctttgcttttgggttgtttgtgtctcccatacccacatttaggaggattatcagaaatgggtcaacagagatgttctcagggttgccatatatttattcccttctaaactgcttgatctgcatgtggtatggcacacctctgatatctgctgataatttgttggttacaactgttaattcaattggagcagtctttcagtttgtgtacacaatcatcttcctgatgtatgctgagaaagcaaagaaggtgagaatggttggattattgctggcagttcttggcatgtttgcaatcgtattggttgggagcttgcagatagatgacgttataatgcgtcggttctttgtggggttcttgagctgcgcgtctctcatttcaatgtttgcctctccattgtttataattaaattggtcattcagacaaagagtgttgaattcatgccgttttatctctcactttccaccttcctaatgagcacctctttcttactttatggattattcaacgatgatgcctttatttatgtgccaaatgggataggaaccatattgggattgatacagttgatattatacttctacttcgagggtaaatctagagtgagctccagagaacctctgatagtgtcatatgcatgatcagttctgctgaaaaggctggagaatcagagtcaggaacgaccttttgctgctggatgtggtctgaaactggagttggcaacatccctgtctgtttgattcaatttataggagagcaataccgttgcatctttgagagagaccagaagttgtg

SEQ ID NO: 3604 - DNA, 427 bp, Glycine max
gggaggttagcataaatcatattttgattttaaagggagggacaaaaggggaacttggtgggagagagcacagaccacaggggcatgtctcaaaatttgttgcaaagtgtatagttgagggtttggtactttggtttcatttagttaaatttgtttgtgtctggaattgccgcttgtttgaaaatgtctctctttgctgcattttccatttgtaaagttgccaaggatgcagctggagttgcaggaaatgtgtttgcttttgggttgtttgtgtctcccatacccacatttaggaggattatcagaaatgggtcaacagagatgttctcagggttgccatatatttattcccttctgaactgcttgatctgcatgtggtatggcacacctctgatatctgctgataattggttggttacaactgtta

SEQ ID NO: 3605 - DNA, 1050 bp, Glycine max
  unsure (1)..(1050): unsure at all n locations
catcagatgttgtcacaagatgggtatgtgagttctaattctaaagttgcaagtgtttatcaacaaggacatttcctggtgaagaactccaagttcttggtgcctgcacaggaccttctcatcgagttttgtagccttggcgcaaagcaaagcgacttgggaaagccaacaaaatcgttgaataagaagcagtgggaagatcaggaaaataacggtgtcggttcctcgaagaagcattctctgacctctctagagttcgtggagttgcagaagagaaagacaaagctgctttcgatgctggaagaggttgacagaaggtacaagcactaccggaatcagatgaagagtgtggtgtcatcgtttgaagcggtggcggggaatggtgctgcgacagtgtactcagctctggcgttgaaggccatgtcgagacgatttcaggtgtttgacagatgggattttgtcgcatattcaggcaacaagagnagccagnggattgtgagacccaggtgcaccaggcacaacaaggggcgaaaggccaagacttaaagtcattgaccaaacactgagacaacaaagggcgtttcagcaaatgagcatgatggaaacacatccttggagaccccaacgtggccttccagagcgtgccgtttcagttcttcgggcttggctctttgaacattttctccatccgtacccaagcgatgttgataagcatattttagcacgccaaaccggtctctcgagaggccaggtttcgaattggtttattaatgcaagggtgagactatggaagccaatggtggaggaaatgtacttggaggaagtgaaggaccctgaaaacaacatagcttcctcagaaggggctactgatcaagacaatgatataaacccaaataatgttgaataccctccacctccttcttcatcacgatcagaggatcagaagccatctctggttcgaattgactccgagtgtgcatcctccatcatcaacaaccacagtaccccagataacaaaaacgacccaaagggccacgaacagtgctttgg

SEQ ID NO: 3606 - DNA, 646 bp, Glycine max
gtaactggtgagaaagcaatttgatcaattagaagaagaactttagcaggttgaagagctttattctataattaatttgatggctcgacaagtgtgtgatgacaaattatcaactggattctgctactctgatgtatcatcgggaaatccaacgatgttggtgaaccagatccaaggctttgtgtcagacccggagatgtacaacctcaccacgggcatggaaatgatagggtttccaaagagtgacaccaacgctgtcatgtggagaagtttcatccccgaaccgggtccttcttcttccaaaaccatcaacgattcttccaccactttctaccaccacgactacaacaacaagaatgcagatttcacaccagcagggaatatttctgaaacaagtgccgagaatctaatcgtgggaaatcacgattcagccccgtggcaagacaacaacaacaacaggtttgacgattcttctctaaggtgtgtgtttccttgtgaaaccaacgaaaggcctagccaaggtctttcactctctcttagttcaaccaacccttcctctatcgggttgcaatcttttgagctaagacaaacaggccatcatcctgattttgtttcgtcgagttccagagaagggttctttggaaaa

SEQ ID NO: 3607 - DNA, 848 bp, Glycine max
  unsure (1)..(848): unsure at all n locations
aaaccctaatcgtctgtcctcgaccgcgcaccacactgagaggaagagggagtgagagagagtgttctttgtttgctaccttctctcggaaaaatggttacgttcaggtttcaccagtaccaggtggttgggagggctcttcccacggaagcagatcagcaccccaagatctaccgaatgaagctctgggccaccaacgaggttcgcgccaagtccaagttctggtattttctgaggaaactgaaaaaggtgaagaagagcaatggccaagtgcttgccatcaacgagatttttgagaagaacccaaccaaaattaagaactatgggaatatggttgcggtatcagagtaggactggttaccacaacatgtacaaggagtaccgtgacaccactctaaacggtgcagttgaggcaatgtacaatgaaatggcttctcgtcacagggtcaggagcccttgcatccaaattatcaagactgcgaccatcccagctaagctttgcaagagggagagcaccaagcaatttcacaattccaaaatcaagttcccattggtctacaagaaagttagaccacctaccagaaagctgaagaccacatacaaggccaaaaagcccaacttgtttatgtaacgtggttgatgaatgagttacaaatacttggtgtctatcaggcgtttttagtagagacgtacccgttggttttttactgccagattttgtttgaggttcttttagactattttcattgggtttatctttatgtttctgttggatattatcttttgatcattttgataattgagtagaattgaacaaaatttatatatatggctgttaaccnnnnnnn

SEQ ID NO: 3608 - DNA, 461 bp, Glycine max
gcctgatagccctcatattttttatacctgtggtgaatatggattactgcagcgttttgatctgagaactggggctgcaacagaactttttacatgccagccaatcaaggataggtggagttacatgccagtcatccatcttaatgcaattgcaattgatccaaggaaccctaatctctttgcggttgctggctctgatgagtatgctcgacgttatgatattcgcaggtataaatgggacggatcaactgattttggccaaccaaccgacttcttttgccctccacacttgattggcgatcagcaagttggaataacaggcttggccttttctgaactaagagagctgcttgtgtcatacaatgatgagcttatttacctttttacccaagatatgggtttgggaccaaatccccctgatcctgggtcccctaaatctatgaacagtgatgcaagtgaaa

SEQ ID NO: 3609 - DNA, 550 bp, Glycine max
catatattgatgtttcaacgttgtacatgctaactcatctccttccccttttcccttcgtataatgtatatcatggtaatatgatttcagatttggtttgtttttacctgtatacctggttgatatgcaggaccccatagatgaaggatcaccagtggatgtggctacagttgtagatgcgcacacgccctccatgggcatcaccttccatagaccagactaaacctcactcaccatctggaattcagctatttagtgaagaaacaccatatctatttggcaacaattctacaccaccctccaagttgaaaagggattctgctgctactggttcatggagtattcaggatgaaatacgaagagtaagatccagggcaacagaggaattgcttagatcacttccatcctcaaaaattgactggtctgcatttgccatggagaataaaaataatgtaaactcttcagctattgaaaatattggagctagtttgggagagagagtacataattcaacaaatttagttgatgcatctgtgaacttggccagagg

SEQ ID NO: 3610 - DNA, 683 bp, Glycine max
tttccccctttctctgcactctgcaactccctccaatttagtttgagccttagaggcattgttctttggttggatagatctctgatctgaagatgagtgcatcgaggttcattaagtgcgtcaccgtcggcgacggcgctgtcggcaaaacctgcttgttgatttcctacaccagcaacacttttcccacggactacgtgcccacggtttttgacaatttcagtgctaatgttgtggtggatggaagcaccgtaaacctggggttgtgggatactgctggtcaggaggattataataggcttagacccttgagttatcgaggagctgatgtatttatacttgccttttctctcataagcaaggctagctatgaaaatattgcaaagaagtggatccctgaactaaggcattatgcccctggtgttccaataattctcgttggaacaaagttagatcttcgagaagataagcaattttttatggaccaccctggtgcagtaccaattactacagcacagggagaagaattaagaaaactgattggtgctcctgcctacatcgagtgtagttcaaaaacacagcagaatgttaaagctgtctttgacgctgccatcaaagtggttcttcaaccaccaaagcaaaagaaaaagaagagataagcacagaaagcttgctcaatattg

SEQ ID NO: 3611 - DNA, 453 bp, Glycine max
cattcttctttctttctttcttttgaatttgattcggcaaagttgatttcaattcaatttgatttccccctttttcttctccacgtttgtgcctgcaacctcaaataccgattagggttcatgctacactgaacttggtttcggtgttccaagttagttagaggcattgttgcttgcatagatctctgatctgaaaatgagtgcgtcgaggttcattaagtgcgtcaccgtcggcgacggtgctgtcggcaaaacctgcttgttgatttcctacaccagcaacacttttcccacggactatgtgcccaccgtttttgacaatttcagtgctaatgtggtggtggatggaagcaccgtaaacctaggattgtgggatacagctggtcaggaggattacaatagattaagacccttgagctatcgaggagctgatgtcttcatacttgccttttc

SEQ ID NO: 3612 - DNA, 637 bp, Glycine max
acgaggctgcttctacagcagaggcttctcgagataatcttgcttcactttatcgccctccatttcatctaatgttcaatggtgcttttgataaggcgaaagatgctgcttccatgcagaacaaatggttgttggtgaacatacaatctaccaaggaattcagctcacacatgcttaaccgggatacatgggccaatgaagccgtttctcagactattagtacaaactgcatattctggcaggtatatgatgatacaactgaaggcagaaaagtctgcacttattacagactggattcaattcctgttgtacttgttattgatcccatcactggccaaaagatgcgctcttggattggaatggttcaacctgaaagcttattggaaggtctactagcattccttgatgcagggcctaaggatcatcatattaccatgtctcacaagcgtcctagaggaagttctagcccaccaaaatctaaagccttggtagaatcagatgagaataaagaggagtatgaggaagttcaaagagctctggcagcttctatggagagcatgaaagaatcaactgctatggctggaagagacaataaagatgcagatgttgcagtcaatgggcaagaaacaccatggct

SEQ ID NO: 3613 - DNA, 909 bp, Glycine max
ctcgagccgctcgagccgatttatcaactctttcaaaagggagaagaaaaggaaaggaaagaaaactctcaaaaaactattatagcaatggcagaacaaaaccaaaaccaaacaactgaagctggaaggcaccaagaggttggtcacaagagccttctccagagtgatgctctttaccagtatattctggagacaagtgtctacccaagagaacctgaatccatgaaagaactgagagagttgacagcaaaacacccatggaacatcatgacaacctctgcagacgaagggcagttcttgaacatgctccttaagctcatcaatgccaagaacaccatggaaattggtgtctacactgggtattcacttcttgccaccgctctcgctcttcctgaagatggaaagatcttggccatggacattaacagggagaattatgaattgggtttgcctgtaattaaaaaagctggtgttgaccacaaaattgaattcagagaaggtcctgctctaccagttcttgatgaaatgattaaagatgagaagaaccatggaagctatgacttcatctttgttgatgcggacaaggacaactacctcaactaccacaagaggttgatagagcttgtaaaagttgggggcgtgatcgggtacgacaacaccctatggaacggatctgtggtggcaccccctgatgctcctcttaggaagtatgttaggtactacagggacttcgtgctggagctcaacaaagccctcgctgtggaccccaggatcgagatttgcatgctcccggttggtgatggaatcactatctgccgtcggatcaagtgatttctgatcatcataatcgtggaccaccgttgcttcttgaccaccgtgcttcttctgcaccctagtgatgattggtca

SEQ ID NO: 3614 - DNA, 583 bp, Glycine max
agttcttgatgaaatgattaaagatgagaagaaccatggaagctatgacttcatctttgttgatgcggacaaggacaactacctcaactaccacaagaggttgatagagcttgtaaaagttgggggcgtgatcgggtacgacaacaccctatggaacggatctgtggtggcaccccctgatgctcctcttaggaagtatgttaggtactacagggacttcgtgctggagctcaacaaagccctcgctgtggaccccaggatcgagatttgcatgctcccggttggtgatggaatcactatctgccgtcggatcaagtgatttctgatcatcataatcgtggaccaccgttgcttcttctgcacaccctatagtgatgactggtcatcattgagtggcacctgctaatgcatttaaaagcaatcaatacttttctttcaaaaaaaaatatgtgtctgtacttttctctattactcgtgtggaaaactgtggacaattaaacgttctatatgcaagtgacttttttcttatgtgatttacttccacaactcttggttaattagaaagaggatatatgtgtgcttt

SEQ ID NO: 3615 - DNA, 558 bp, Glycine max
caactacctcaacttttacaagctctatcaacctcttgtggtagttgaggtagtaaaagttggtggcgtgatcgggtacgacaacaccctatggaacggctctgtggtggcaccccctgatgctcctctcaggaagtacgttagatactacagggacttcgtgctcgagctcaacaaggcactcgctgtggaccccaggatcgagatttgcatgctcccggttggtgatggaatcactatatgccgtcggatcaagtgattctgattttctgataatcacacaatcgtggaccaagaccaccgttgcttcttctgcaccctagtgatgattggtcatcattgagtggcacctgctaatgcatttaaaagcaatcgatattttccttttatttttttttcttcaaaatatttgtgtttgtacttttcttttctctattattcatgtggaaaacggtggacaattaattatatgcaaatgactttttttcttataaaaaaaaaaaaaaagggcgcgccgccgactaagtgagcgtcgtcgagcccgggaaattaattccg

SEQ ID NO: 3616 - DNA, 252 bp, Glycine max
caagaggttggtcacaagagccttctccagagtgatgctctttaccaggtaccaccccaattgcattcctttgataaaaagaaaaagaaaaaaaatctttttctcttttgggtttttgataaaatggttatgttgataaaaaaatctattttttgggggtttttgataaaatggttatgctgtgtttagtatattctggagacaagtgtctacccaagagaacctgaatccatgaaagaactgagagagttg

SEQ ID NO: 3617 - DNA, 479 bp, Glycine max
gttacctagttaagagttaaagagcaaatgttgcaaagatgttagttgagtggttggccggattcaggtatatatatatatggctctccttccaaaaccctagattcgtaactgtaccacgtcctcgtcccaatcaagtgaaagctcgatggctgaaatggaccagaacacgggcggtgagcatgaggcggaggaaacgattgagattgaggcggaagtgcacggtggtgaagaggcggttgttgcggagaagaagtggccggggtggcccggggagagtgtgtttcggatgttagttcctgcgcagaaggttgggggtatcattggacgcaaaggagagttcatcaagaaaattgtcgaggagacacgagctcgagttaaaattcttgatggtcctccgggaactgtgcaaagggctgtaatgatatcagctaaagaggaacctggttcctctgttcctcctgctgtggatggcttat

SEQ ID NO: 3618 - DNA, 1038 bp, Glycine max
tccatcccctcccctctaagttcgtaatcgaagcatcggaagcccttgccctggcggagtccgccgccgtgaccctcccggaactcctccccaccctggtccccgccgcccagcccctcgcccgaccccccatctccaagttctccgtggccgccgtgggcctggccccctccggccgcatcttcgtcggcgtcaacctggagttccctgggctccccctccaccactccgtccacgccgaacagttcctcatcaccaacctctccctgaatgcggagccccacctggtgtccctggccgtctccgccgccccctgcgggcactgccgccaattcctccaagaactccgcgccgccgccgacgtgaaaatcctggtaacctcggaggccacagcagaattcagggcactctctgacttcctccctcacaggttcggtccccacgaccttctcccccttgaagctccccttctcttggaaccccaccacaacaccctaaccctccaacactatctcaacgcccacgtgcccaatcacaagttgaaaattgcggctctcgaggccgccaacaaatcccatgcaccctacagtgggtccccctccggcgtcgcccttctcgactgccatggtaatgtttttaaaggctcctacatggaatccgccgcgtttaatcccagcttgggccccgtccaggccgccctcgtcgccttcgtcgccggcggcggcggcgactacgaccggattgtgggtgctgctttggtggagatggacggtgccgtcgttaaacaagagcacacggcgaggctgttgattcactccatttcccccaattgccaattcgacacattcctttgccacaacaacaacaataatgaatattgaatcccttgttacgtctttggaagtggttcgaataattaattcaataatgaagtactagtgcattttaatcaaatcctttacatatttaattggactgcaccagcttcaagtaattaatatatctggaaggctgaggatatgcttcaatttggctttg

SEQ ID NO: 3619 - DNA, 371 bp, Glycine max
tgcgattgcaatattacaacttttccattgcatggtccctcaagttcgaaagccagaattctggggtgtcccattcatgccgtggataccctctatatcaatctttctgaatgtgtttctgttgggatcactggatgggccatcctatgttcgatttggattcttttcggctgttgcggtgcttttctatgtcttctacagtgttcatgccagctttgatgctgaaggagatgattctttgactgcaaataagaatggggaaatccacgtggaatcaaaagaaattgaagaccaaagtttcgaagtgtagatctccttcagctggatcttctgggtggtgactttcattggtgctgcacttgcagcactct

SEQ ID NO: 3620 - DNA, 386 bp, Glycine max
atcattgccaaggacagtaagggtcagcaagcaaagaaaaacgaggctgctgtgagaccaaataaatcagttatcgctgattctggccctagcagaccacctaaatcaaccatgcagaagaaaggcaacattgaaccaaagatgcaacaaaatatcgtgaagagtgctatcccaagaaatcctcacattcatcagctagataaacccaagtgttcagacgatgctgctgtgcacgtaaagttagaagccactaagagaaaacttcaggagcgttatcaacaagctgaaaaggctaagaggcagcggacggtacaggttatggagttgcatgacctcccaaagcaagggattggccatcgaaatccacatgtgaaacccggaaatca

SEQ ID NO: 3621 - DNA, 1548 bp, Glycine max
aagagatgtcggcaaggcaatgtaatctttataatgtgtagtgttaaatcagcggcccggatgcatttatacttacaccgaatcacgaggcgacaacatcgacatggagggtctcatcaacggcttcatcaacgttgctctcggagctgatggtggcgatcgggaagaacaacaacacgggagagacgaccgtagtagaagctcctgggctgaagtcgtctcccaggatcaacaagatcaccctcttcctcatcaccaacacaaggaacaatatcgtcctcagtacgaggagccccaatctcaaagttcctacaaaccccagaaggtggatgaaggtgaagatggatggcagactgttggtagaaagccttcaaggcatccacataaggttcaaaaggacaactggaacagctataaacgacctgctgatgagcaagaatactctaatgaggttgaagttggtgctgatgtggagccctcagaagatgaacttgctgatctgtcaagagcttgtgaaaaactctgggctcttgatttaaatcgtttggtacctggcttacactatgaaattgactgtggagaagggaaaaaggtataccaaaaggaagatatggcacaggggagcttgtttacttgggttagcgatgatgtattcagaaagcctacatttgcccgttttctttcacttttagataattacaatccacatcaaggatgtaaggaagtagtcacatctgaagagagacaagagcaagcttctttcatagaagaaatcagtagaacagcaccaattaagtatcttcacaagtatcttgcatccaagcaaattgtatcagggaattaccaagatttcaaaagaatgattaccagtctgtggtttgacctttatggccgtggtggcacttctggttcctcttctgcttttgaacatgtttttgttggagaaaccaaacaatgtggtgaagtttctggctttcataactggctgcagttttaccttgaagaagcaaaggggagagttgattatcaaggatatatttttccccgtcgacggggagaaactcctgactctgaagctcagcttctgactattcagtttgaatggaatggtgtcctaaaatctgtatccagcactttggttggagtgagccctgaatttgaaattgctttgtataccctgtgtttctatgttggtagggaggataaccacattcagcttggtccatatggggttaatatcaagtgctatcgattgggtgatcgaattggatctgttttccccattgcagattcttgaattttcagtttccagcattggtagtagttgttccctatgaaatcgtttgttatgcatacttgagaacttgtaactcatgggtgtaaaggcaacaataccaattagatcaagtagtacaaggtagcacaatatttactgaattacatacatttggtggttcttttgtcttgtatgaagacagaaattcttgtggaactagtttacttaatttcttcattaagtccttaatgatatgctagtatgttgttatt

SEQ ID NO: 3622 - DNA, 450 bp, Glycine max
cttaaatcagcggcccggatgcatttatacttacaccgaatcacgaggcgacaacatcgacatggagggtctcatcaacggcttcatcaaccttgctctcggagctgatggtggcgatcgggaagaacaacaacacgggagacacgaccgtactagaagctcctgggctgaagtcgtctcccaggatcaacaagtaccattccaactcccatgtcttttaatatttgcttcatcacccaatctcatttcttcattcttcatttttgcacgatcaccctcttcctcatcaccaacacaaggtctcatttcttcatctctattattctcaatccccccaaaacaaacatgtgtaatcttatcatctttttcattataggaggaacagtgccaagattatagttacagacacagggcccataagctcaatctcattcacttcgcctctaactc

SEQ ID NO: 3623 - DNA, 532 bp, Glycine max
catcaacggcttcatcaacgttgctctcggagctgatggtggcgatcgggaagaacaacaacacgggagagacgaccgtagtagaagctcctgggctgaagtcgtctcccaggatcaacaagatcaccctcttcctcatcaccaacacaaggaacaatatcgtcctcagtacgaggagccccaatctcaaagttcctacaaaccccagaaggtggatgaaggtgaagatggatggcagactgttggtagaaagccttcaaggcatccacataaggtttatcttttaattttaataatcaatatgtcaaatgaaaaaactaatgtggctttttcagtgttttgtatcattttaaacagattgtatttttatgtttaatattgctgttacaggtatatcttctttgaaatctactatatgttaactttgttactgaatttgtgatctaatcagttctgaatgttttatgcttcatccctgtctgaatttgaatgatgaatcttatcaacttgatgtatgttcaaaaggacaact

SEQ ID NO: 3624 - DNA, 367 bp, Glycine max
ttgtgaagttccattttgcaaaagcagtccaggttcaggaggttcttgcactttggatcctacaaacttcggctaccctaatttgaaggaaatccatctgtatggttttcctttgaaggttgttggggacactaactcttttgactctacttcagagctaactgtgaatcaaagtttcgattactacactaaaaatgacagcagtaaggagtacaatggtccctatgacttaactatcaaagttactgaaaaaggtataccaaaaggaagatatggcacaggggagcttgtttacttgggttagcgatgatgtattcagaaagcctacatttgcccgttttctttcacttttagataattacaatcc

SEQ ID NO: 3625 - DNA, 1235 bp, Glycine max
gtttttcattttgatctgatatcatatcattcgagctctgaatgcttctctctccataataacaaaaccaacaccctctttctctttctctcttcttcatttccaatgctgcagcaatctgcaagcttcataggcactacgacagacccaattgaattcccgagaaagaattgaagagaaaaaaccgtaaagttaggatcttttgtgtgatttcgatgggtgcgtacagagcggacgatgattacgactacttgttcaaggtggtgttgatcggagactcaggcgttgggaaatcgaacctcttgtctcgtttcacgaagaacgaattcagcttggaatccaaatccaccattggcgtcgaattcgccacccgcagcatccacgtcgatgacaagatcgtcaaggctcaaatttgggacacggcaggccaagaaagatatcgcgcaatcacaagtgcatattatcgaggggctgttggtgcactgcttgtgtatgatgttaccagacatgtgacttttgaaaacgtggagagatggttaaaggagcttcgtgatcacacagatgccaacattgtaatcatgcttgtggggaacaaggcggatcttcgtcacttgcgtgctgtctccacagacgatgccaaggcatttgccgagagagaaaatacgtttttcatggaaacatctgctcttgagtccttgaatgtcgataatgccttcaccgaagtgctcactcagatataccgcgttgttagtaggaagactcttgagattggggatgaccctgcagccttgcccaaggggcagaccatcaatgttggcagtagggatgatgtctcagctgttaaaaagtctggatgctgctctgcttagtttcacaagccttttgcagcagaatagaataatatctatatgtgcatgattcaaccaattctcaacattttggagtccaagtgaaatcttttaatacctacacttctctttttatgtagtttttcccacatatcttggcaagtttattgttttctctctttttccttttcttttcttttcatgtaagcattgtttggtcataggaatgatgtcttgtcgtccttagatatacaaaatatactgtttgtattgagtgaaagtgatatttggttcttagattgatcagaagttacaatctcatcattcttcctcaaattttccaaaaaaaaaaaaaaaaaagggcggcagaccgctagtaggctagtc

SEQ ID NO: 3626 - DNA, 387 bp, Glycine max
atggcaatgctgactcagctgaagatttcttcgacaagtctctccgcgagaagtattgtgatggtactgctggtctatcatatgcggaattcctacataagatagggaactatccaatggcaaaggaggtttaccgaaatgtcgtacaaggggctattgaagtaaaaaatgctggcagaccatacttaggagctggtaacatgagcgtggacgaattaattgtagggtccatgtttgctttaggacagctggaattacttatgggtaactactctaatgcagagtgccatttgacacaggcattaagtagggcagaggaagcctatggagactctaaacatcctacggtgggggttgccttaacaagcattgctcttttgtatcggc

SEQ ID NO: 3627 - DNA, 646 bp, Glycine max
gaagagcttgacgtcgcatggacgccttccttaacttgggatcgggtaaaagtgttgtcccaaagaaagacaatctttctcctttctttcatcaccgttggaagagactgagatgggttcaaaaaccaagacttttacctttgaggaggtggctaagcacaatcacaggaaggattgctggattatagtcaaagggaaggtgtatgatgtcaccccatttttggatgatcatccaggaggtgatgaagttttagtgactgcaacagagaaggatgccaccactgattttgaagatattgggcacagtgattcagcaacagagatgatggaaaaatactttgttggtgaggttgacaccaacactcttccagcacaagttaccagcagcagcagtgtacgcccaccaacacaagcacctgcctataacaatcaatcttctggatttgttgtgaagatcttgcagtacatagtgccattgctgatattggcctttgcatttggcctgcagtactatggcaaaaaaagcaagtcagaaaattgaacttgagttgtgaccattgttttagtacttctattattcataagtctctaacaacagtgtcctagtggcaatagactggtgccattgttgtttcttttctttttg

SEQ ID NO: 3628 - DNA, 569 bp, Glycine max
cttcttctcatcctcacaaatacaattatacaaacacatattcattctcctcacataccaaaaataaattatttttcttgttattttccctttgctaacggaaagccatgaaattcgggaagagcctgagcagccagatcgagaaaaccctgccagagtggcgcgacaagttcctctcctacaaggagctcaagaagaagctcaagcaattcgaccctcccgcccccgcctccgccgccgatgaacgccccggcaagcgcctcaagaccgacgccggcaacgccgacgccgacgccgtttccgacgcctccgacatgtcgaaggaggagagcgacttccggaacctgctggagaatgaactcgacaaattcaacaccttcttcgttgagaaggaggaagagtacattatcagactcaaggagttacaagatagtgtggcccaagttaagggttcgcgggaagagatgatgaaaatccacaaggaaattgtggatttccatggagagatggtcttgctggaaaactacagtgccctcaactatacagggctagtgaaaatacttaaaaag

SEQ ID NO: 3629 - DNA, 428 bp, Glycine max
ccctcgcgtccgctcaaataaatctattttctttttttcatatttttcttctaattttccctttgcataatttctcgcgtaacggaaagccatgaaattcggaaagagcctgagcagccagatcgagaaaaccctgccggagtggcgtgacaagttcctctcctacaaggagctcaagaagaagctcaagcaattcgaccctcccgccgccgccgatgagcgccccggcaaacgcctcaagtccgacgccgttcccgacgccgccgacatgtcgaaggaggagagcgacttccggaacctgctggagaatgaactcgacaaattcaacaccttcttcgtcgagaaggaggaagagtacattatcagactcaaggagttacaagatagggttgccaaagctaaggattcaagtgaagagatgatgaaaa

SEQ ID NO: 3630 - DNA, 771 bp, Glycine max
ggggtctgtccattgaaaccactctccaaaatttctctctctctccatccatccatctattgcacacttccatcatcatggccatcgcaacagagactcaacctcaacctcagcaacacaaggattcttcggaggtttcgggttcagctgcggagcaacgaaggtggacgcttaacgatttcgatatcggaaagcctctcggaaggggaaaattcggtcacgtctatttggccagggagaagactagtaatcatattgttgctttgaaagtactcttcaagagccaattgcaacaatcccaagttgtgcatcaacttcgacgtgaagttgaaatacaaagtcatctccgacatccccacatcttgcgcctctatggatacttttatgaccagaaacgagtttatttgattttagagtctgcacccaaaggtgaactttacaaggaattgcaaaaatgcaaatatttcagtgaaaggcgtgcagctacttatgttgcatcattggcccgagcccttatatattgccatggaaagcatgtaatacatagggacattaaaccagagaacctgcttattggtgcacagggtgagttgaaaatagcagactttgggtggtcagtgcacacattcaatcgcaggcggaccatgtgtggcacactggattaccttcctcctgagatggtggagagtgtagaacatgatgcgagtgtggatatatggagccttggtgtcttgtgctatgagtttctttatggagtccctccttttgagg

SEQ ID NO: 3631 - DNA, 1450 bp, Glycine max
gttgtaaacgacacctcccgtgtagttgttgctaaccaaaacgaccccacgccccatccccagtacaaatcaggtctcaacccctcgcccccaatttcctgtcgcctcccccttcttcgctccccccccgctcgttgacctcctattctcccctcatcggagctcaaatctccgatcccttcatccatatcgcttcaccgcaactttctcttcatccatcgcaagatctagttgaatctcaaccgcgctcctccgattcgaagctctactcactcaaatcctcttcagatctggggggtttgattgcgattctcactctgctgctcggatttgttcgtctgagatgtcgattttaccgaaaggcgattcggttcaaatcagggaggtttggaacgataacctcgaggaggagttcgcgttgatccgcgaaatcgtcgacgagtataactacgtggcgatggataccgagttccctggcgtggttctccgtccggtggggaatttcaagaacatcaacgactacaactaccaaaccttgaaggacaacgtggacatgttgaagctgatccaattaggtctcaccttctccgacgaaaacgggaaccttcccacctgcggcacggagagcccctgcatctggcaattcaacttccgcgagttcaacgtcagcgaagacatcttcgcgagcgactcgatcgagctgttgcgccagtgcggaatcgacttcaagaagaacagcgagaatggaatcgacgtgaaccggttcggggagctcctcatgtcctccgggatcgtgttgaacgactccgtgcgctgggttaccttccacagcggctacgatttcggctacctcctgaagctgttgacatgccggagcttgccggacacgcaggccgggttcttcgatctgatcaagatgtattttccgatggtatatgatatcaagcacctgatgaagttctgcaacagcctccatggagggttgaacaagctcgcggagttgttggaggtggagagggttggcgtctgccatcaggctgggtctgatagtttactcacttcttgtacatttagaaagttgagggatacgttcttcagtggctccacggagaaatatgctggtgtcttgtatggtttaggggttgagagtggacagactaattgaaattgaaagagaaaaagaaaaaaggaaagaagaatataattggatgtagagtacgttttaagtgtgagtctctttttacttcgtgtacacttctgccaaaagaatggttgttgtttacttgtaacattttcatcatcatcatcatccttgcttgaactgtaacttgaaaccgtagctggttttgttagcttgagttctttgtaaatcatcaccttcagtttagtgtcttcaaatttcaaataataatttatgatgattcctttagtttgctttgctgctgcagct

SEQ ID NO: 3632 - DNA, 497 bp, Glycine max
gttgaatctcgaccggttcgaagctctactcactcaaatcctcttcaggtatcgcggctcgttgattttgtttagatttgtttctcgtttgttcagatatcatcgatgttcgttccggatttgttaggttctgagatctgaaccgtttccgcgtgtttttgttacagatctggggggtttgattgcaattctcactctgctgctcggatttgttcgtttgaaatgtcgattttaccgaaaggcgattcggttcaaatcagggaggtttggaacgataacctcgaggaggagttcgcgttgatccgcgaaatcgtcgacgagtataactacgtggcgatggataccgagttccctggcgtggttctccgtccggtggggaatttcaagaacatcaacgactacaactaccaaaccttgaaggacaacgtggacatgttgaagctgatccaattaggtctcaccttctccgacgaaaacgggaaccttcccacctgcgg

SEQ ID NO: 3633 - DNA, 358 bp, Glycine max
gaccgacgcgtccgagaagaagacagaagggggcctcccccttcttcgctcccacccttcgttgacctcctattctcccctcatcggagctcaaatctccgatcccttcatccatatcgcttcaccgcaactttctcttcatccatcgcaaggttagattcctcactcctctactacttccatttctagggttcctacttcaaccctagttcactcctaatttctcagaatcactccttcttcttcgatggatctaatacgcctgtgtttgtttcagatctagttgaatctcaaccgcgctcctccgagtcgaagctccacccactcaaatcctcttcagatctggggggtttgattg

SEQ ID NO: 3634 - DNA, 506 bp, Glycine max
tagcatttcgtttccgttccgttcaaacagttccttttttctcacacacttcctttgttcgtcaccgcagtttcaatctcagatccaacattgttcaatccaaattcaacgcattccatggcgaatcctgcatccgcaagattctccgctcttcttcttctcgtttctttgctagtcaacatcgccgccgaatcgccggctccggctccgactccgaagccggatttgcctccgtcgtcttctcctccttctcctacttctgctcctgcttcgaacccttccccggccaattcgccgccatctccaactccggcgccttctcatcactcgccgccggctccttcgcccggtaccaatccttctccgtctccggctcctgctccggcggatgatgcacatgacggagttagccacgccggcgtggacggcagcgacggaaaatcgtcctcctccggcggaatgagttccggcaagaaagcgggaatagcgttgggagttatcatcgg

SEQ ID NO: 3635 - DNA, 846 bp, Glycine max
ccccacctgttcccaaaacttgggattttgtgacattaatgtccacaacaatgggggttcttcaagcacagttgcaatcagaaaagatggttttggattgggaagagctggtcaggatcatcatgaaacacttgaaatgggttggaaccctgctaattctatattatcaaatggaccagggatgtttccccacactttgtctcagtttccaactgattctggattcattgagagagctgcaagattctcatgcttcagtggagggaattttagtgatatgggaaactcatatgggattgctcaatccatggggctgtatggagcaagagatgctattgcaggccatgggatgaaatcagtaactggagggcaatctcagggaggtgatatgaatgtagttgaagctacaaaggatgtgtctccatctgttgaacatcttgttgctgctaaaggaagccctctcaagagtgatagaagaagtgaaggccatgttatatcccaagatgaagggaagcaatctcttgttaggcccgctaatgagtctgatagagctgaatctagtgatgatggtggtggtcaggatgactccccaatgttggaaggtactagtggggaaccttctagcaaaggactaaacacaaagaaaaggaaaagaagtggacaggatggtgataatgataaagccaatggagctcaagaactacctagtgcaggtgcagaggacaactatgagaatcaacagaagggagaccaccaaccaacttcaacagccaaggcttctgggaagaatgccaaactggggtctcaagcttctgatccacccaaggaggaatacatacatgttag

SEQ ID NO: 3636 - DNA, 527 bp, Glycine max
gtgtgaagtgatacgaagaattgtttcagcctaagcaacatcgggaaacgatattgtgggatgtggcgatggagcgaagggacaagaagcttatcgagcaagccttctccctccaattaacatcgtaagcctctccttagggtttctacgaatattttctcgtgattgtgaattttagatccggggaagacttgtttaattttagaggtttttgcgacattgcttggatggtttggttcatctgattttaagagtgtgctttagacttttagaggataaaatatggaattatggttgttagttttaaagttcatggttgagattttaatagttccatgatttgttatgtgtgtgtgtgcatattattctattacgatttttaatgtggttataacttcgctctttaagtggatttcatacttttggttatatttggattggtggtagatgatggaatggaatggcattatgtttcattgtttggattagtaaaatgcgtatggagtgtaatggaaactagtggagaa

SEQ ID NO: 3637 - DNA, 797 bp, Glycine max
gaaaagagtgaagagaagagagagagagagagagttggaagaagaagaagggaagatgaacttgagatggatggaagcggtgctgccgctgggaatcatagcgggaatgctctgcgtcatgggaaacgctcagtattacattcacaaatccgcgcatggcagacctaagcacatcgggaacgatatgtgggacgtggccatggaacgaagggacaagaagcttgtcgagcaagcctctccctccaattaacatcgttgttttgccaatgacattgtgaagaaaataaactgctcacctggatttacgactgtgttctagggaagcagggttaatcacaagaatcaaattccgtctgttttcttgtatgcaattcaacataagatttataaatatacctatgctccaatcacaattactttcgctaagcttggcttgttgaaaactaagcagttctgaggtatttgttgccttctataatgtgaccattttgtgcttgactagtgacaacaaatcttgctagttgacgtcaatgtttggtgaataattatgtaaagtggcgtaagccgccacaacatttgaagagaaagctgaaaacagaaaaaggctatcatggcaccttgtattagttatttcgtatataataaatgccacgatgttatgcataataaaaaaaaaaaaaaaaaaagggtgttaataaaaaaaaaaaaaaaatgctgggaaatgggaaaaaaacttaaagaaatttttaaattcggaaaattcccattaattataagggggggggccgttttaaaga

SEQ ID NO: 3638 - DNA, 626 bp, Glycine max
aaaaaagcaagagagaaaggaagattaagatcgtgtctattttgcaatcaaaatcccttctaacttctccgttgatgtatgtatattttgttcacagagcaaaccccacaatccacatgataatgataatgatggcgatgtctttctctctctcttttcctctcacactcttcccatctattccctcatggtttcttctctcttccttcccaataaaaattacccacttctaatcagacaaaaagtagagtggttataagtccatttgtttcttcagtttccacacaactttcaccagaagaaactaacaccttccgttactggctttttctgtgtccttggcaaccctttgctgattttcactgccacaatcacaaccaattgaagaagaagtttctgggttatggttcacgggtgccgtatagttatataatctgagctgggccccattccatacgcaacttttcctccttcattctccttttttttttattgtcttaagaagtgatggacatggaagaaatttcagagttgaatttggatggtttttcttcttctcacgaggttttggaatcagaacagaagaacatgggtacccagagaatcttggtttcagatcacacaaa

SEQ ID NO: 3639 - DNA, 373 bp, Glycine max
aacactgcgacacatactcgctgctgattgttctctctttctctcgctcacacatggcttgtttacagcctccatggttctcttcattgcgcgtcgtgtccccggcaaaactcgcagcaggcccgccgccttcaacaacgtacaagcccgccaagctgctcttttgggccgtgggcccagacaatgctgaatcttctgagcccgcctcccccgacgctccagagcccgccgcacccgttgatcccgtggagttggcgtttagcaaggccaacgcgtataaagctgattataataatgatgaaaattcggctgaagaaagaaacgttggtgatgaaaccccaaatgatttgccagattctgtgaagattgcaat

SEQ ID NO: 3640 - DNA, 1112 bp, Glycine max
gtcaatgataaacaatagttttgtttgcatttgagattattaaaagggaaggaaaaagattatagtcaatatttgagaaatatgttctgataatagcagtgtgtccctggaattaagttgatttgaccatgaatctggtttctacagtgtgacaggtattttttgaactgaaaaatgaaatcattgtcacgtcatatttttttacacctgatccttgatgactcttccagcaagaagtttagactgattaatgtttattttcatcaatatatggcaggaatgaaagtctatgtgactgacgaaaaggagttgattatggaaccatcagtgaagtgggctgggaatcctaacattatagttgcaattaaagcatttgggcttcgagccacagtccaggttgttgatctgcaagtatttgctgctccgcgtataactctgaagcctttggttccaagttttccatgttttgccaatatttacatgtctctcatggagaagccgcatgttgattttggactaaaactgcttggagctgatgcaatgtctattcctggcctttataggattgtccaggaaatcattaaagaccaagtcgcaaacatgtatctgtggccaaaggccttagaggtgcaaataatggatccaacaaaggccatgaaagttccagttggaatccttcatgtgaaagttgtgagggcagagaagcttaaaaagaaagatctactgggggcgtcagacccttatgtgaaactcaaactcacagaagagaaacttccttcaaagaaaacaactgtgaaatacaagaatttgaatccggaatggaatgaggaatttaatgtagtcgtcaaagatccagaatctcaagtcttagagcttactgtttatgactgggagcagattggcaagcatgacaagatgggtatgaatgtcattccactgaaagagattacacctgatgaacctaaagcggtgactcttaatttactcaagaccatggaccctaatgatcctgagaatgcgaagtcgcgcgggcagctaactgttgaagttctgtacaaaccttttaaggaggatgagttacctcagagtacagaagattccaatgcaataga

SEQ ID NO: 3641 - DNA, 1270 bp, Glycine max
gttgttgtggtgtattccttgctttggcatggaagagagtagtggggcatgccgaggaaaaggacggtggcatccgaacgaaagcggtagcaaaatccgtttaagttaattcttttgacgcatacaaaggaaaacattttcttattcaaatactcaccaataccaaatccaacacccacacccacaccaataacaagcttggttggtacttatctacaatctgcatcatggaaggtgttattctgagaagggtcattccttcggataacagttgcctcttcaatgcagttggatatgttatggatcatgacaaaaagaaagctgctgagttgagacaggttatagcagcaacagtagcaagtgatccacagaaatattgtgaagcatttcttgggaagccaaacacagagtattgtaactggattcttgactcagagaagtggggaggtgcaattgaactttcaatattagcagattattatggacgtgaaattgcagcatatgatatccaaacaactcgatgtgatttgtatggtcaggaaagtaactattctgaaagagtgatgctgatttatgatggtctccactacgatgcattagtgatgtctccctttgaggaagctcctgaggagtttgatcagaccatatttgctgtacagagaaacagaagcattggacctgttgaggggcttgctctaacttttgtgaaggaccagcagaggaaacggagttacactgacacatccaacttcactctccgctgtggggtatgccaaattggagtaattggtgagaaggaggcagtggagcatgcacaagcaactggtcatgttaacttccaagagtacagataatgcactccgttgatttgaatgggatacaaattcatgtgtaatctccgttgatttgaatgagcatcatcgatggaaggtagttgctttgttgcagaccataaaaactgaataatttctgcatgagaattgctgtggcaacttgggttgtaatattagttccttggtctcgttccacaatgactgtgattataagaaactcacctctagtgactctagttgcagactagataaagaaattagtaatcaattatgttttttatattcctttcccgggaaagaattttatctaaaatatttcacttattttcccggtataatttttaagggaataacctcctaaactcgcgccactattttaacccttgcgatttgtgaaagcttttgatattatatattaaacccctgttatggtagtt

SEQ ID NO: 3642 - DNA, 633 bp, Glycine max
ataattcttcattgctctcaattatcaatggctccccaaaccatttccattctcaacctcttaccagaacctgatgtcttcattcacacttcccatggaacacgcattccagcccacgcacccattctggcttctatgtccccggttctggagaacttgatagatcgcccacgtaagcatcggagctccgagagaataatccaaatccacggcgtcccctgcgacgctgtcaccgccttcgtccgattcctctactcctccaggtgtacggaggaagagattgaccagtacgggatgcacctccttgcattgtcccacgtgtacatggtgcagcaactgaaacagaggtgcatcaagggtttgacccaccgtttgacgacggagagcgtcgtcgacgtgctgcaactcgcgcgtctctgcgacgcgccggatctccacctccgctgcatgaagctcctcgccaagaatttcaaggcggtggaagcaaccgagggatggaagttcctcgtgaaacacgacccctggctcgaactcgacattctccgcttcatcgacgaacacgaaacaaggaaaaagaaatcgaggaggtataggatggaacaggggatatacgcggagctgagcgaggcgatg

SEQ ID NO: 3643 - DNA, 362 bp, Glycine max
tcatcattcatggctccccaaaccatttccattcactaccacaccacccgcttcttacctcaacccgatgtcttcattcgcacttcccacggaacacgcattccagcccacgccggcattctggcttccatgtcccctgtttttgacaactttatagatcgcccacgtaagcatcggagctccgagagaattatccaaatccacggcgtcccctgcgacgccgtcaccgccttcgtcggattcctctactcctccaggtgcacggaggaggagatggacaagtacgggatgcaccttcttgcattgtcgcacgtgtacatggtgccgcagctgaagcagaggtgcatcaagggtttgaccca

SEQ ID NO: 3644 - DNA, 432 bp, Glycine max
cgaaaccaaaacctccttcaaccacgctagttcaactcaaccaattacttcatattcatatatatggattcccctgcagtttcctctatccactttcacaacgcccatgtcttacccgaaccagacctttttatgcacactcccggtggtaaccgcattccagcgcacgcaaccattctggcttcggcatccccagttttagaaaacgtcattgcgtccaaccgagtcgtcaaaatccacggcgttcccgacggcgccgtcacggccttcgtagcgttcctctactcctccaggtgcacggaggaggacatggacaagtacggaatccaccttctagcattgtcgcacgtgtattcggtgccgcagctgaagcagaggtgcatcaagggactggcccagcgcttgagcacggagaacgtggtggacgtgttg

SEQ ID NO: 3645 - DNA, 1274 bp, Glycine max
ccacaatctaatttctgattcacagtcctatccttttgagataagagcacacgtttaacaaaattgcattctctatttctcttcccctctcatcattttaatcacgcgcacatcagcacaacacaacaattcactaagctaaacaatttcatcaagcctgccatggcttcctcgtgtgcttcctctgccattgcagctgttgccatctccacaccaagttcccagaagaatggatcactcttgggaagcacaaaagcttcttttcttagtgggaggaaactgaaggtgaacaactttacagcaccagttggagcacgatccagcactacagtgtgcgcagttgctgagcctgataggcctctgtggttcccaggcagcacccctcctccatggctagatggcagtttgccaggagattttggctttgatcctctaggtcttgcatctgatcctgagagcctgagatggaatgtccaagcagagcttgtgcactgcagatgggccatgttgggagctgctggcattttcatcccagaattcctcacaaagattggtatcctgaacaccccttcatggtacactgctggagagttggagtacttcacagacactaccacactcttcatagttgagctctttttcatcggttgggccgagggtagaaggtgggctgacatcatcaagccaggctgtgtcaacactgaccccatctttcccaacaacaagctcacaggaactgatgttgggtacccaggtgggctttggtttgatccacttggctggggaagtggttctcctgagaagatcaaggagttgagaacaaaggagatcaagaatgggaggttggccatgttggctgtgatgggggcatggttccagcacatttacactggcactggtcctattgacaacctctttgctcaccttgcagatcctggccatgctactatttttgctgctttcactcccaagtgagaagggttggaacaactctatgattgcaagccttggagaaacattgggaaacttgtttaactaagttgtaaggcttaaatgtctttaggggggagtttttatgttggtgaaagcttgtaaaatggtacttctattgtcatgcacagattgattattcaatgtacaaatacctatttaaggtttagatgcatttaatgtaaattcaggaagtaatcacagtttttgcatggatgaaagggctccccccatatctgatagtgcctagcacgggatattaaatggtcctgttacccccccgg

SEQ ID NO: 3646 - DNA, 1175 bp, Glycine max
agacgggaatcaaacatatacacaaaagagcactgaccaaaccattttattttatttttgaatcaagggtgagggccttccatggcttccgcttgtgcttcctctgcaattacagctgttgccatctctacgccgagttccgggcagaagaatggatcaggaggttgttttcttagtggaaggaaattgagggtgaaaaaggagagagcagcaattggaggacgatcgatgggcactacagtgtgcgcagttgctgagcctgacagacctctatggttcccaggcagcacccctcctccatggcttgatggcactctacctggagacttcggctttgaccctcttggtcttggatctgacccggagagtctgagatggaatgttcaggcagagctagtgcactgcagatgggcaatgttgggtgctgctggcattttcattccagaattcctaacaaagattggtgtcttgaacactccttcatggtactcagctggagagctggaatacttcacggacactactaccctcttcatagttgagctctttttcattggctgggccgagggtagaagatgggctgacataatcaagccaggctgtgtcaacactgaccccatctttcccaacaacaagctcaccggaaccgatgtgggttaccctggtggcctttggtttgacccccttggttggggaaccggttctcctcagaagatcaaggactttgagacctaaggagatcaagaatggcagactggccatgcttgctgtcatgggtgcatggttccagcacatctacactgccaccggtcctattgacaacctctttgcccaccttgcagatcctggccatgctaccatttttgctgctttcacccctaagtgaaaaggctaagatcaacaatcagattaccagctgtttgggatgagaggagtgtttatatatgtctgtagaaattaagcttgtaatatggctacttctatgtcatatatgcacataatatcataatccaacgtgccgacacctatttaagttttagatgccatgaatgtaagttcaggtaataatcccatttgtgcataagatcataacccaccttgagtatattaatttcatcattcacggcaaaattaatctgagaaaaaaaaaaagaaggacattttctttattattt

SEQ ID NO: 3647 - DNA, 728 bp, Glycine max
ctcgagccgctcgagccgctcgagccgttttttaaagcccttattacctggcgaaaatgcactggaccagcttgtatagattatcaagttgaacgctaggaataaatctgcagccgtagaatgctatacaagaatagaggtttgtctggaaggttactcaaatgaagcatgagcatgacaagaggcaagcatgcctcatagctgaacacaacgaacagctaaagcgttcccaactgcaagctgaaaatgaattgagagagaaaacaatgtttatgaggaatgatcatgaagctcagatcaaagcattgaggtgtgaacttgaagatgagtgtcggcagctggaagaggagttgcatcttcaaaaaaatccaaagaagacaggcaaagggctttgttgcagttgcagtggaaagtgatgagtgacaagcctaaagaggaccaagaagtgaattcaaaacaggttgacttgtgtttgaatctatttgtctgtgtctgtcttcaaatggatgccatatttgctcattttcatgttgggttacctttggtagtttggtttgacatattacatttatcatttggtaggcacagttggggaaatgagaagacatttgttgtatacctaaatgtgcttctttaatattctttcaacacaagcctgagaattgtggacttaaatacatagaagggtgatgccaatataggcccactggttccacaaaaaaaaagaa

SEQ ID NO: 3648 - DNA, 679 bp, Glycine max
  unsure (1)..(679): unsure at all n locations
ggttactcaaatgaagcaggagcatgacatgaggcaagcaagcctcatagctgaacacggcgaacagctaaagcgtacccaactgcaagctgaaaatgaattgagagagaaaacaatgtttatgaggaatgatcatgaagctcagatcaaagcattgaggtgtgaacttgaagatgagtgtcggaagctggaagaggagttgcatcttcaaaaaatacaaagaagacaggcaaagggctttgttgcatttgcagtggaaagtgatgagtgacaagcctaaagaggaccaagaagtgaattcaaaacaggccacgaggttgttacatatgaaagtccgcgaccgatgatggggattcatcgtttagtgtttgtgttatttcgtcaactgggtagggaaacagtgtatgcaccaggatggcgccagaatttcaacactagagaatttgctgaactctacaaccttggattgccagttgctgctgtctatttcaacattcagagggaatctggctctggtggaagaaggttataccattgagggttctagaaatatttctcccacactctttagtagtaaatgagtgcttttcaacttaatattaaactgagcatatagtgaaataaattgcttgctagatcagntggtagcaacaagtcctctacatatacacataaatga

SEQ ID NO: 3649 - DNA, 560 bp, Glycine max
cacgcgtcgaacgatgcgagacgacaaaaggggaaattctatttggggtttaggaaaaaggtgaagggcgaagacacgttcttctctcaagtgctgaaaaaaaggaaatagcagaaagttatatggataacaaatcaccgagcaataaggcatctgaggagctggcacgtgagttgcttattgctatctctgattctttaccagataaaactctggattccgattttgtgcccgaaagcaaggacgcagacagctttgcaagaccaaacggtgattgggatgacaagtttaggtctgaattgatttcaatctcctatgttgaatctcccgatgtcaaaatctgatatattacgagtctagactgttagtaacttatgctacccttctggtttgttatgtggatgaatttccgctgtgccaattgttgtgaattgattatactatgtgggctatcttgcaaccccacatgtagatactctcaccagtcacatgcttggttttgtattctaaaaatgactgataaatacttaattagtactctgttatatttttgttcatag

SEQ ID NO: 3650 - DNA, 827 bp, Glycine max
ggaccacataggattcatcattttccaaacgagcatcttcgtagtttcttaagtcaagagaagaagtgaagtgctgcttcaatggcttcaagtcaggaagaggtgatccttttgggggttattggaagcccatttctgcacagggtgcagattgctctcaaattgaagggagttgaatacaaatatttggaagatgatttgaacaacaagagtgatttgctcctcaagtataacccagtttataaaatgattccagtgtttgttcacaatgaaaagcccatatccgagtcccttgtgattgttgagtacatcgatgacacatggaaaaacaatcccatcttgccttctgatccttaccatagagccttggctcgtttctgggccaagttcattgatgacaagtgcgtggctctagcagcgaaatctgtttttattgttgatgagaaagagaaagagaaggcaaaagaagaattatttgaggctctgaattatcttgagaatgagttgaagggaaagttttttggtggagatgagtttggctttgtggatattgctgctgtgatcatacctataattcaagagatagcagggttgcaattgttcccaagtgagaaattcccaaagctctccaaatggagccaagacttttacaaccattcacttgttaaccaagttatgcctcctaaggaccaactttttgcctatttcaaggctcgggctcaaagcctcgctgctaaaagaaagaattaacaaagactcagaattcccaaggagattttaatattgtagaaagtgaaagctacttactatctatgtttagttttcgt

SEQ ID NO: 3651 - DNA, 1206 bp, Glycine max
cacacatgcgtggcaaataaatgggacaagggacgaggtagagggagaggcagacacaagagacagcagagcagagatctagcgtattctctcgctctttctttcactgtcacagagccacatccatgggcttcccagccaacggcgcctctgcggcccagcccctaaacttcctcatctacggccgcacgggctggattggcggcctcctcggctccctctgccgggcccagggcatctccttccattacggctcgggccgcctcgagaaccgggcctccctcgaaaccgacatagccctcctcaagccctcccacgtcttcaacgccgccggcgtcacgggccgccccaacgtcgactggtgcgagtcccacaaagtcgagaccatccgaaccaacgtcgtcggaaccctcactctcgccgacgtctgccgcgaccacggcctcattctcatcaactacgccaccggttgcattttcgagtacgactccgatcaccccctcggatccggtatcggcttcaaagaaaccgactctcccaatttcaccggttctttttactccaagaccaaggcaatggtagaggatctgctgaagaactatgataatgtgtgcacattgcgagtgaggatgcctatctcatccgatttattgaacccgcgcaattttatcactaagatcactcgatatgagaaggttgtggatattccgaattcgatgactatattggatgaactgcttccaatttcaattgagatggggaagaggaatctgactgggatctggaactttactaacccaggagtggttagtcacaatgaaatcttggagatgtacagagattatgttgacccgaacttcacctggaacaacttcactctcgaggaacaggccaaggtgattgttgctccgaggagcaacaatgagcttgacgctgccaaattgaagaaggaatttccagaactgttgtctattaaggattctcttattaagtatgtcttcgagccaaaccagaaggttaaagctcaagtctaaaggttcaagcttttctcatttttatcatcatcattattattattattattattgtcctcgtttgatttaagtttgtgtggattttgtgtagatgtcactctcccttatttttatttgtatgttgtatttttaccgctcgtgattgaataaatttcttgtcgtttttaagtgc

SEQ ID NO: 3652 - DNA, 1637 bp, Glycine max
cccacgcgtccgcttggagcaaccaaaaggtccaagcttcacaattaatgggcactgggtgaaatgggcaaactgggaatttcatctgagaccagacccaagagctgggatcataatttcacaagccaaggtgagggaccctgacacatcaaagctgagaagtgtaatgtacaaagggttcacctctgagctatttgtgccatacatggatcccacacaagattggtactttaagacatacatggatgctggtgagtatggatttgggttgcaggcaatgccactagaccccttgaatgattgccccaagaatgcttactacatggatggtgtctttgcctcttccgatggaacaccatatctccaacccaacatgatttgcatttttgagagttatgctggtgacattgcgtggccgacatgcagagtgccccatcactgacctcaaggttacagaagtgaggccaaaggtgacactagtggttaggatggcagcagcagtagcaaactatgactatatcgtggattgggaatttcaaactgatgggctaatcagagcaaaggttggactgagtggtatcttgatggtgaaaggaactacctatgagaatatggatcaagttcccaaccaagaatatctttatggaacccttttgagtgaaaacattataggtgtaatccatgaccactttatcacatattacctagatatggacgttgatggctctgacaattcatttgttgaggtaaacatccatgaagccagagacctctccaggagaatcacccagaaagagttatctaaaagctgttaaaaaagtggcaaagacagagaaagatgctcaaataagacttcaactttatgagccatctgaatttcatgtggtgaacccattgaagaagacaagggtagggaaccccgttgggtacaaattggttcccggtgccacagcagctagcctgctggatccagaagatccaccacagaaaagagcagcttttaccaacaaccaaatatgggttactccttacaacaaaagtgagcaatgggctggtggtttatttgcttaccagagcaaaggggatgatactcttcaagtctggtccaacagggatcgtccaattgagaataaagacattgttttgtggtacacaatagggttccatcatataccctgtcaagaggactatcctgtcatgcctactgtatcatcaagttttgatttgaagcctgctaatttctttgagagaaatccaatccttggagtccctcccaatttcgaagatgatttacctgtttgcaaggctcgtgattcagcttgagatcccatcagttggtttttagtctaattagatacatgctttatttatgcatgtagcaaatgatgatgcccaaactgaactttaaacctaacttaaagtaaagagggtctagttctgttgattaaacagaatgtataaatattgtaaaaccttttgataccatgtttaattcttatgtataagaaaaaatattggtatcaaaaggttttacaatatttaattcttatgtataagaaaaattatgatgttaaaaatctagaaagtgacttgaatcaatataaataaatttgtgaattcaatcacagtttgaatat

SEQ ID NO: 3653 - DNA, 1299 bp, Glycine max
tatcgttttcaaaacaaccaacctcttcagtgatctttgattagtactaagctaaaccatttcttattccctcaaaatcaaaacctttttctttctagctatttcccttttcaaatcatgccacctaacatcaccaccgttgttgccaatgtcaccaccgagcaattacccaaggctcgtggaggaagtgggcgtgccttcgtgacctttcttgctgggaacggtgattacgtaaagggtgtcgtgggtttggccaaaggactgagaaaggccaaaagcatgtaccctttggtggttgctgtgttaccagatgttcctgaagaacatcgtgagattctcaaatcccaaggttgcattgtcagggagattgaacctgtgtaccctcctgagaaccagacccagttcgccatggcctattatgtcatcaattactccaagctacgtatttgggagttcgtggagtacaagaagacgatatacctagacggtgacatccaagtatttggaaacatagaccacttgtttgatctgcctgataattatttctatgcggtgatggattgtttctgcgagaagacttggagccacacccctcagttccagattgggtactgccaacagtgccctgataaggttcaatggccctctcactttggttccaaacctcctctatatttcaatgctggcatgtttgtttatgagcctaatctcgacacctaccgtgatcttctccaaactgtccaactcaccaagcccacttcttttgctgagcaggactttctcaacatgtacttcaaggacaagtacaagccaataccgaacatgtacaaccttgtgctggccatgttgtggcgtcaccctgaaaatgttgaacttgataaagttcaagtggttcattactgtgctgctgggtctaagccttggaggttcactgggaaggaagagaacatggatagggaagatatcaagatgcttgtgaagaagtggtgggacatatatgaagatgagacactggactacaataacaactctgtcaacgtggaacgtttcacatcggcactattggatgctgggggctttcagtttgtgccagcaccttctgctgcctaatatgcttattatttacagctacaaattaatgttaattaacgacaaagtatatgtattgttatttgctttttttcgtttttgggtcttatatatgaaggaacaacgtctatggttttaatttggatgaccttcttgtatacaaagccacatgtgatctcatacagcttttgattattattaagaaattag

SEQ ID NO: 3654 - DNA, 784 bp, Glycine max
gattcactcactcacttcagtgtcattttttcttattctcttcctctctctctactctgagacacaaaggaaaattataagaaattatggctggttattcaaaagcttcagctctttggatcctttttcttctctttggcttctctgtagctaaggaaattttggttggaggtaagactgatgcatggaaggtttcagcctctgaatcagattcactcaaccaatgggcagaaaagtctcgtttccaagttggagactatcttgtttggaaatatgatggtggaaaagactcagtgttgcaagtgagcaaagagaactatgtgaattgcagcatctcaaaccccataaaggagtacaatgatgataccacaaaggttcagcttgagcatccagggccattctacttcatcagtggtgcaaagggtcactgtgagaagggtcagaagcttgttgtggtggttttgactccaaggagaggaacaaggttcactggttttgctgcaccttcaccagctccttctgcttctgctgagtttaaaggtcctgctgttgctcccactagcactgccaatgctttgaatgggggaattttgatggtggctatgggaatgattgctatgtgggttttttttatgtgaattggtgttagtgttgtttaacttggtgtatgagactgtcacagtgaggtgattgtctgtggtgttattttttgtaggaaaaaatatgatttgattcatttttataatatatattatctatgttctggcctttgccccgtttttcc

SEQ ID NO: 3655 - DNA, 588 bp, Glycine max
  unsure (1)..(588): unsure at all n locations
aaaccctagttacagattgtggtgcgcacgccttgttcggtgaagtgagtagtgagtgctgaatcgaatcgaatcgattctccgaacatggcggcgagcgatcgcacagtgttgcaattctcttcatcatcttcttcttcttcgcagatcttgtccgcgaaggtccaccctctggtcatcttcaacatctgcgattgctatgttcgacgccctgaccaagccgaccgcgtcatcggaaccctactcggctccgtccttcccgacggaaccgtcgatatccgcaattcctatgctgttcctcacaacgagtctatcgaacaggttgcattggatatagagtaccaccacaatatgttaatatcccaccaaaaagtgaatccaaaggaaatcatagtaggatggtattcaaccggtcttggagtaactggtggtagtgcattaatccacgagttttattctcgagaagtgcccaatcccatacacttgactgttgatacaggatttacaaatggagcgggtacgattaaagcatacgtgtctaacaatttatctcttggagaacggcaaattgctgcacagtntcaagaa

SEQ ID NO: 3656 - DNA, 631 bp, Glycine max
ccggagccaccagctccggttcactcctccgtactgagaacaccagagggcaccaaggacttccccacctactccatcttctggaaccagcgccaagttgttttcctggtggatgagacgccaataagggtgcacacgaacctggaacacaagggcattcccttcccgaaggaccaagccatgggcgtgtacagctctatctggaacgcggacgattgggccacgcagggtggtcgtgtgaagacagattggagccacgcacccttcgttgccacctacaaggacttccaaatcgacgcgtgcgcgtgccccgtgccggtgacgtcagcagatagtgctaagaactgtagcagcagcgaggataagaagtattggtgggacgaaccaacgttgtccgaactgaacttgcaccagagccaccagctcatgtgggttagggctaaccatatggtttatgattattgcgccgacactgctaggttccccgttatacctgctgagtgtgttcaccaccgtcaccactgaaagggagaagagaagaggaagagaacgaactacttttgtttaacataacatgggcttcatgtttcaccctgtaacatatttcggcttagctttatgtgaatctttt

SEQ ID NO: 3657 - DNA, 608 bp, Glycine max
cacagagaaagcattggggagtagaagtagaagcttcacttcactctgttcagttcttattgttgcatagataatttgtctctatttttgttattttctttctctctcctctttgtgcattttaatagcaactcttagtttccaatgtccaagatgttgggagtgtttgtgggacttttgctgttggtggggttggctgcctctgccaagtttgatgaactcttccagcccagttgggctatggaccatttcatccatgaaggagaacttctcaaactcaaacttgataactattctggtgctggatttggatctaagagcaaatatatgtttgggaaagtgaccatccagctcaagcttgtggagggtgactctgctggaactgtcactgctttctatatgtcatcagacggcccaactcacaacgaatttgatttcgagtttttgggcaacaccactggtgaaccttactcagtccaaaccaacgtgtatgtgaatggcgttggcaacagggagcaaagactcaacctctggttcgaccccaccaaggacttccacacctactccatcttctggaaccagcgccaagttgttttcctggtggatga

SEQ ID NO: 3658 - DNA, 611 bp, Glycine max
cgaggatataaacacacttaccgagcctcattcaatcttgtgtccggatgttgcgtgtttatctgtttagaattttggttgttttgctaactggagacatatgatttgtatccctagagtcaaggaaataatcttcaagccaggttgtagatttatagaatcagtttttgccggggtcttaccaactctggcagcaaactttgctcgggcatgcaatagctttatatgacagtttaagctgtgaggtgagtacatttcttagcaaggtatcaaagcctgtttgaactataactagtggtcaagttttcaactcttccactgcattcttcatacttgaatgaaagttgagtatttaactttgtcctatattttcaactctgatggcaccaaataccggaggggactactttatccaaagcttaattcttcccaggcgacttcggctgcacttttacctaacttcttcccaaacagattttagaccgccttcttcttaacaaaatcatttttttttttacaaaataaggtgagcttattatttacctttacttcaaggacaaaaggctttgctctagtgccgtgtttgcgatatatatcaaaataaattttgg

SEQ ID NO: 3659 - DNA, 580 bp, Glycine max
  unsure (1)..(580): unsure at all n locations
gaagaaggaagaggagaagaagaaagaggcaccaccccctccaccagacccagttttagagctggtcaaggcttatatggcttataatccccacatgaccacatactactatgttcaaagcatggaagagaatcctaatgcttgtgtcgtttgttaaataccaagctgtggaagaaaacatgaggaaaggaagacatatataaaaatatatatcaaactttctctatttgcaatggaatcaatcaggtcaatttctctttcatgaatcctgggagttcataatatcaagatagaaacaaacaaacaaactcctttgtatatattttggtggtggtgtctcctctagttttgttctgggacattagcaatgtgtagagagtaggaataaaattttgggagatttgttttgacaatgatcacaaatgtaatcatatactattatgttaatttcctttttttttttttaagttgctgcctgcatgtatacagtattagtggaatcagcaattagtaattttgtacgttgctgatgccaacaggaatttatgagaagaaaaaaagagattgaaaacgcctaanc

SEQ ID NO: 3660 - DNA, 834 bp, Glycine max
gacgcacattcacaacacaacacagaagcggaaaaaagaagaaggaagaaaagttagcagtagtttggcgtggtaattggtagagcgagaaacagagaaatggacgattacacgagggaaatgatggacctgaagacactggtcactcgcactctcgagaagaaaggcgtcctcgccaggatccgtgccgaactcagggcgagtgtgttcgaagccatcgaagaggaagatcgtgtgattgagaaggaacaaggtctacctcctgcattgctaggtagttgcaacgatcgagctaagcagcttcacgcttctcctccagggagacttcttacggcaatgatatgtgaataccttgactgggcgcagctcagtcatacgctaaaagtttatcttccggaatgtaatttggagaaagatttttggaagacagagcttaaggagtttagtaccaaaaatggatatgatctcaacagaaacagagatagtcctctactcttggatgtgcttgaaggattcttgaagctcgagaatttatcccaagcaagagctagcggtaggagatttgccacctcagaagctgagcctttacccaactccgaatcacggaatccccgaaggcattcttcctcatctgttgccggtggcttacctccacttggaagggccgttccttcatctcaggcatctgatagaagaggaggatcctccatgcctgcttataggaaggatgagtacaattggcgatatgacagggatgaacttcctgaggacataattcaagcttcaagtgctttggaaaatcttcaattggacagaaaagctcggaatctaaca

SEQ ID NO: 3661 - DNA, 447 bp, Glycine max
atttgcaatcgcgcacatccacaacacagaagagggaagaagaagaagaagaagaagaaaaagagaagaagtagtttggtgtgttaattgttcgagagagaaatggacgactacacgagggaaatgatggacctgaagacactggtcactcgcactctcgagaagaaaggcgtccttgccaggatccgtgccgaactcagagcgagtgtgttcgaggccatcgaagaggaagatcatgtgattgagaaggaacaagccctacctcctgcattgcttggtagctgcaacgatcgagctaaacagcttcacgcttctcctccagggagacttctttcggcgatgatatgtgaataccttgactgggcgcagctcagtcatacgctaaaagtttatcttccggaatgtaatttggagaaagatttttggaagacagagcttaaggagttt

SEQ ID NO: 3662 - DNA, 250 bp, Glycine max
acacacagaagcggaaaaagaagaaggaagaaaagttagcagtagtttggcgcggtaattggtagagcgagaaacagagaaatggacgattacacgagggacatgatggacctgaagacactggtcactcgcactctcgagaagaaaggcgtcctcgccaggatccgtgtacatacacaccttaggggttcctcttcccaattcctcaccgtagatccattcaattctcaacttagggttatttttccgt

SEQ ID NO: 3663 - DNA, 1452 bp, Glycine max
gcgtcctttctttcgcccacgcgtccgcccacgcgccccctttccctagtttagctacttacctcaatctttctcatgggaaagtttgccctagccaatatcctcttggtccttctcttgaacttgagcactttgctcaatgttcttgcttgtccctattgcccttacccatctcccaagcctccaaaaaagcctcccgttgtgaaaccaccggttcacaaaccaccaaaaccatgtccaccacccaagtcatctccaaaaccaccccatgtacaccctccctatgtcccaaaacctcctcactaccctaaaccaccagttcatccacatccaccccatgtcccaaaacctcatccaaagcctccagtgcatccccatccaccttatgtcccaaaaccaccagttgtgccagttacaccaccatatgttccaaaaccaccagttgtgaaccctccctatgtcccaaaaccgcctgttgtgccagttacaccaccttatatccctaaaccaccagttgtgacaccaccatatgtccctaaaccacctgtggtcccagttagaccaccatatatcccaaaaccaccagttgtgccagttacaccaccttatgtgccaaaaccacccattgtttatccacctgtagtaccaacaccaccaattgtgacaccacctattgtgtatccacctgtagtccctgtgccaccattaccacccattgtgactccaccaaaccctccaagtgaaacaccatgtccaccaccaccaccaccaccagtggtgccatatccaccaccagcacaaccaacatgccccattgacagcctaaaactgggggcatgtgtggatgtgctcggtggcctcatacacattggcataggcagcagtgccaagcagacatgttgtccagtgcttgcagggcttgtggacttggatgctgctgtgtgcctctgcacaaccattagggctaagattcttaacatcaatatcatcatccccattgctcttcagcttctcattgactgtggcaagaccccaccagatggattcaagtgtgcagatagttagttaatatataattaattattatggaattgcataactcatgcatgaataaaaacaagttgagaagatcgatgtagtgaaggaatggtctttcgtttctctttcatcaagttgttgtatacccaaaggccaaggacaacataattgtactatgactctatgagggccaatattggtatacttgttcaaactacataattttctgatctgccttgtatacaaagtcatgcaatattgccatagcatctttttaattattttctctgtttttctttgtctattgcatgtgtggttctgtgtgcatgtcagcctgtgtaagctttcccgtgagtacgttgggaaatgtacaagttagcgaagctttagatttttcttaaaaaataagacatt

SEQ ID NO: 3664 - DNA, 472 bp, Glycine max
caacatcaacatcatcatccctattgctcttcagcttctcattgactgtggcaagaccccacctgatggattcaagtgtgcagatagttagttaatatatatttaatcactaaggtccccaaggaccaaggaattgcataactcatgcatgaataaaaacaggttgagaagatcgatgtagtgaaggaattctctttcgtttctctttcatcaagttgttgctgtataccaaaggccaaggacaacataattgtactaagagggacaatgttggtttacttgttcagactggataattttctgacatgccttgtatacaaagtcatgcaatattgccatggcatttatttaattattttctctgttttttttgtctatttcatgtggttctgtgtgcatgtcagcctgtgtaagctcacccgtgagtacgctgggaaatgtacaagttagtgaagttttagatttttcttag

SEQ ID NO: 3665 - DNA, 598 bp, Glycine max
gttcacaaaccaccattaccatgtccaccacccacgtcatctccaactccaccccatgtacaccctccctatgtcccaaaaccgcctgttgtgccagttacaccaccttatatccctaaaccaccaattgtgacaccaccatatgtccctaaaccaccagtggtgccagttacaccacgatatgtccctaaaccacgactggtgccagttacaccaccttatgtgccaaaaccacccattgtgacaccaccaatctgtttacccaccagttgtgccaaaaccaccaattgttacaccaccttatgtgccaaaaccacccattgtgaaaccaccaattgtttatccaccagttgtgccaaaaccaccaattgttacaccaccttatgtgccaaaaccacccattgtgaaaccaccaattgtttatccaccagttgtgccaacaccacctattgtgtatccacctgttgtaccaactccaccggtggttactccacccgtggttacaccaccaagtcctccaagtgaaacaccatgtccaccaccaccaccaccagtggtgccatacccaccaccagcacaaccaacatgccccatcgac

SEQ ID NO: 3666 - DNA, 1285 bp, Glycine max
tcgcggtcgcgtgggcggacgcgtgactcagaaaagagaagaaacaaaacaaaaaagagcagagagagagaggaaccatcaccaaccctaatttcttagctaaaccctattcgtttagcatttcctctcttttctcccactcgtaaatcctctcccaaacttttcagatccaaataaatcatggttttctgggtttttggctacggttcactggtgtggaaccctggattcgattacaatgagaagattataggtttcattaaggactacagacgcgtgtttgatttagcgtgcattgatcaccggggaacacctgaaaacccagcaagaacttgcacgttggaggagaaggaaggggctatttgctggggagctgcttattgtgttcgaggaggccctgaaaaggaaaaactggctatgcagtatttggagcgacgggaatgtgaatatgacagaaagactcttgtaaacttcttcaaggaaggagattcactgcaccctactttaactgatgtaatagtattcacatctactccagacaaagtgaacaacaaatactacctgggacctgctccacttgaagacatggctaggcaaatagcaactgcatatggcccttgcggaaacaacagggattacattttccttctagaaaaggccatgtatgatattggccatgaggatgacttagtgatagagcttgccaatgaagtgaggaaagtacttggaatgggaaatgtagtaccaaaggagaagaaactggttggagcagcacaacttccacaccctcctcatgtaacaatccctacccttcaactgcacccactgccagaacctattgcaatggatatatagctgaggggggagatgaccaaaaactgacgctgagttcggctactaaactgatttcctgctaaccctcattcaaatttaaataacatcacatatctattcctcttcgcctacttttagcggctttccagccattcccttgagatattgcttaaattcagtgaggcgcaatattttgaattggaatgttcgcggatattttacttctgcagactgcagtgttattattgaaaaagtttcattttttttatttatttcgtttacggcgatcttacacagttttttttatatcagttctgcattcaatcttaccgagttaatagctagctagtacttcgaaatgaataatacttctgttttgagcaagttcttgtctatttgtgtttcgtgtattcgcgtttggttaaaatgtaattttttttcttattttttt

SEQ ID NO: 3667 - DNA, 1123 bp, Glycine max
  unsure (1)..(1123): unsure at all n locations
gaagccagagaaagagaaggaaccaacaacaaagagcagagagaaagagaggaccattccaaccctaatttctctgctaaaccctagttgtttggcatttcctctcttctccctcgtaaatcttctcccattccctccggtagctttccagatccaaataaatcatggttttctgggtttttggctacggttcactggtgtggaaccctggattcgattacgacgagaagattattggtttcatcaaggactacagacgcgtgtttgatttagcgtgcattgatcacccgggaacgcctgataacccagcgggaacttgcacattggaggagatagaaggggctatttgctggggagctgcttattgtgttcgaggaggccctgaaaaggaaaaattggctatgcagtatttggagcgacgggaatgtgaatatgacagaaagactcttgtaaacttcttcaaggaaggagattcactgcaccctactttaactgatgtaatagtattcacatctactccagacaaagtgaacaacaaatactacctgggacctgctccacttgaagacatggctaggcaaatagcaactgcatatggcccttgcggaaacaacagggattacattttccttctagaaaaggccatgtatgatattggtaagttatctccttaacttacacatacatatgcagtcaaaaattattctctgaatgtcactagcttcgcatttaaatttgcggggcattctgatgagtcaagaggtttgatgtgcaggccatgaggatgacttagtgatagagcttgccaatgaagtgaggaaagtacttggaatgggaaatgtagtaccaaaggagaagaaactggttggagcagcacaacttccacaccctcctcatgtaacaatccctacccttcaactgcacccactgccagaacctattgcaatggatatatagctgaggggggagatgaccaaaaactgacgctgagttcggctactaaactgatttcctgctaaccctcattcaaatttaaataacatcacatatctattcctcttcgcctacttttagcggctttccagccattcccttgagatattgcttanattcagtgaggcgc

SEQ ID NO: 3668 - DNA, 1271 bp, Glycine max
cccacgcgtccgacttatcatgaccactttcaaaacggtgggacggttaactttgatgtgtggggatggaaccaatgatgttggagctttgaaacaggcccatgtaggaattgctcttctgaatgcattgccttcaactcaaagtggaaactcctcttcagattcatctaaggaagaaggttcaaaatctggcaagcaaaagaaatctaagcctgctagtgaaggcacttcaaaagccaaagttgcttcaaaatcagattccactagtcactcatctggtaaccgtcatcaggcagctgttgagatgcaacggcagaagcttaaaaagatgatggacgagcttaatgaggagggagatggtcgtgcacccattgtcaagcttggggatgcctcaatggcatctccattcactgctaagcatgcatctgttgctcccaccactgatataattcgtcaaggtaggagtaccctagtgacaaccctccagatgtttaaaattctgggtctcaattgtcttgctactgcatatgtgttgagtgttatgtatctagatggtgtcaagctaggtgacatacaagccacaataagtggtgtcttcactgctgcatttttcctctttatctcacatgcacgccctcttcccactctttctgctgaacgtcctcaccccaacatcttctgtgcttatgttttcctttccctcctgggacaattttctattcacctgcttttcctgatctcgtctgtgaaagaagctgaaaaacacatgccagatgaatgcattgagcctgatgcagattttcatcccaacctggtgaatactgtttcctatatggtgagcatgatgcttcaggtggccacatttgctgtgaactatatgggccatcccttcaaccagagtatttcggaaaacaggccgttccggtatgcacttgttgctgctgttgttttctttactgtgatcacatcagatctcttcagggacttgaatgactggttgaagttagtgccattgccagcgggattaagggataaactattgctttgggcgtttctaatgtttttggtttgctattcgtgggagagactgttgaggtgggccttccctggcaagatcccagcttggaagaagcgacaacggcttgctgtatctaatttagaaaagaaacaggtctaagtagttgaagagatgtgatgaagaaaaacactgacgatgggcattgcaatgatgacttgttcagagacaagacatggtgaattttgttataggt

SEQ ID NO: 3669 - DNA, 730 bp, Glycine max
  unsure (1)..(730): unsure at all n locations
ctgcgtttcccacgtctaacaataatttatacaatatgattatatgcaccatgttaatattataatatatcgctgggacagtttttgtttgacagcacagcactcggaaatttctggcgatctctgcgttttcccctattttttctgaatcccacagaatggcatccaacaggggtcaaggtggaattcagcagttgttggctgctgaacaagaggcacaacggattgtgaatgctgcaaaaaatgaaaaattggctaggttgaagcaggccaaggaagaggctgaaaaggagattgctgaataccgagctcaactagaggctgagtttcaaaagaaagtgtcagacagtactggagattctggagctaatgtcaagcggcttgagcaagagaccgaagaaaaaatccatcacctgaaaacggaggctgcaagaatatcggatgatgttgtcgccatgctcctcaagtatgtgacaagtgtgaaaaattaggaccctttgatatatattggtgctgaggactcctaaattatgatgattattattctgagttgattttttactttagatattctggtgcgggtgagcttcttgttttggttacaacgcttagtaccttgctgcattgtactcagtccgaaatggcttcaaatttgttaaataatcacttcagaattaaaaggcgagtgtattttgtgttgctgttttnnnnnnnnnnnnnnnnnnnnnnn

SEQ ID NO: 3670 - DNA, 1404 bp, Glycine max
agatgagtggattgggttaagaagcaaaagaattcgctatcgctgggacagtttttgtttgacagcacagcactcggaaatttctggcgatctctgcgttttcccctattttttctgaatctaacaacaaacattcctctggcaacaatcatcactattaataagagttccttccttcactctcacccaagccaaagaaaggaacaagaacaagaacaacaaagtaacgtgaaagagagagagatggaggcgattgttccagtggtggatttccagaggctttcagaggaagaggagcgcaagaagctgagaaaaacatgtgagaaaccagggtgtttcagaatcatcaaccactcaattccactaacactcatggctgacatgaagtcagtggttaaatacttgcatgaccttcccacggaaatcaaaatgcgcaacaaaccctccgtccctgagagtggctatagggcggcaatgccaacaagtcctctatacgagggcatgggaatatatgacatgcatgcctcaccacaagcatttgaagatttctgctccaacttgaatgtgtcaccccgtcacaggcaaataataaaggaatatggtcaagcaattcatgacttggcatcaaatttatcacaaaaaatggctgagtctttgggtataatggataatgatttcaaggactggccattcattttgaggactattaaatatagttttaccccagatgttataggctccacgggagcacaattgcactcagatacaggatttatcactctacttcaagatgatgaacatgttagtggtcttgagatgatggatgattttggctcatttaaggcagttcctcccataccaggggccttcctttgcattgttggagatgttggacatgtttggagcaatggaaaattttggaatgccagacatcgtgtaatatgcaaggaaacgggtactcgttattcatttggtgcatttatgttatcaccaagggatggtaatgttgaggccccaaaaaaattggtggaagttgaccatgtacaacgctatcgaccatttaagtacgaagatttgagggatttcagaatcaccacaggaaagagggatggcgaagtccttgatcaatatcgcatttgttagtcattttatgcatcgaaatacatcgccaatagaactttattttgaaaaataagttggcgataaaataaatgttgcatccattctaaataatttaaatagtttggtgtccttgttcgttcatgaatcctaattcgtcgtgttttaatttggatcatgttattgtattttgttctagttgagttgtgttactattgatatgcttgctgtagaccaaggaaagtctatatatgcagcaggttatgtgaaaaaaaaaaaaaagaa

SEQ ID NO: 3671 - DNA, 1069 bp, Glycine max
gggtgtcgcgtccgctatatattctacccgaatttctgcattttccttcttccatcggcgcggcacacacccacacacacagttcgtcggaatgggaagggtgattcgcgctcagcgtaagggtgctgggtcggtgttcaagtctcacactcaccaccgcaagggtccggcgaggttccgcagcctcgacttcggcgagcgcaacggctacctcaagggcgtcgtcaccgacatcatccacgaccctggtcgcggcgcccctctcgccaaggtggcattccgccaccccttccgctacaagaagcagacggagctcttcgtcgccgccgagggcctctacaccgggcagttcatctactgcggcaagaaggccaccctcgtggtcggcaacgtgttgcccctccgatccatccccgaaggtgccgtcatctgcaacgtcgagcaccacgtcggcgaccgcggcgttttcgccagagcctccggtgactatgccattgttatcagccacaaccctgataacgacacctctaggatcaagctcccttctggttcaaagaagattgtgccaagtgggtgcagggcgatgattgggcaggttgcaggtggagggaggactgagaagcctcttctgaaggctggtaatgcttaccataagttcagagtgaagaggaattgctggcctaaggtgcgtggtgttgcgatgaacccagttgagcatcctcacggaggaggtaatcaccagcatattggtcatgcaagtactgtcaggcgtgatgctcctcctggacagaaggttggtctcattgctgctaggaggactggtcgtcttagaggacaagctgctgcaactgctgccaaggctgataaggcttaaagagaacgttgttagggttattatatttgattgcaagtttttcagttttgtttttcttttttctgatagtttgtttgttaaactatttgggcaccttcttcagaaccattttcttcccaacatatggagttttcaatagacggtcttctatatttgtttggttgcatgttcaatgctgcagattattgctatttt

SEQ ID NO: 3672 - DNA, 607 bp, Glycine max
cccacgcgtccgaaccccagttcaaaggcaaggtaggttaaacactcttcttcatcgtcgtcgcaatgggacgtgtgatccgtgcgcacgtaagggagcaggctcggtcttcaagtcccacacgcaccaccgcaagggccctgcccgcttccggagcctggatttcggagagcgcaacggctacctgaagggtgtcgtcactgacgtcatccacgatcctggccgtggcgcgcctctcgctaaggtcgccttccgccacccgttccgctacaagaagcagaacgagctcttcatcgccgccgagggtctctacaccggccagttcatctactgcggcaagaaggccaccctcgttgtcggcaatgtgttgcctcttcgatccattcctgaaggagctgtcatctgcaacgtcgagcaccatgtcggcgaccgcggcgtcttcgctagggcgtctggagactacgccattgttatcagtcacaaccctgataatgacacctctaggattaagctcccatctggttcaaagaagattgttccaagtgactgtagggccatgattggtcaagctgcaggtagagggagaactgagaagcctcttctcagg

SEQ ID NO: 3673 - DNA, 507 bp, Glycine max
  unsure (1)..(507): unsure at all n locations
gaattgaatcagttattagtagtggtggtagttttatttgattggttttagatccaggttaaaaggattaaactcccatctggttcaaaaaagattgttcctagtgactgtagggccatgattgggcaagttgcaggtggagggagaactgagaagcctcttctcaaggctggaaatgcttaccacaagtttagagtgaagaggaactgctggcccaaggttcgtggtgttgctatgaaccctgttgagcatccccacggaggaggtaaccaccagcatatcggtcatgctagtactgtcaggcgtgatgctcctcctggacagaaggttggtctcattgccgcaaggaggactggtcgtcttaagggacaagctgctgcaactgctgctaaggctgataaggcttaaataagaacgttgntagggttattttatttgattgcattgttttcaagtttggttttattttttctgaatagttgttggtaaactatttgggcacccttt

SEQ ID NO: 3674 - DNA, 840 bp, Glycine max
  unsure (1)..(840): unsure at all n locations
gcatgcagcgcgtacgtnaagctcggaanttcggcttcgagagggccaagtgtaggttatatctactctttcttcatcnnngtcgtcgcatatgggggagcgtgtgtatctcgtgtcgccagctgtggagggtatgcaggcttctgtgtcttcaatgtctccacaacgcactcactcgcatagggcctctgtcccgcttcccggagctctggatttctggagaggcgcaacggctaccttgaagggttgtcgtcacttgacgttcatccaacgatctctggctcgtggctgcgccttctcgctaagtgtcgcctntccgcccacccgttcctgctacaatggagcatgaccgatgctcttcctcccccgccgagggtctctacaccccccagttcatctactgcggcaagaaggccaccctcgttgtcggcaatgtgttgcctcttcgatccattcctgaaggagctgtcatctgcaacgtcgagcaccatgtcggcgaccgcggcgtcttcgctagggcgtctggagactacgccattgttatcagtcacaaccctgataatgacacctctaggattaagctcccatctggttcaaagaagattgttccaactgctgccaaggctgataaggcttaaagagaacgttgttagggttattatatttgattgcaagtttttcagttttgtttttcttttttctgatagtttgtttgttaaactatttgggcaccttcttcagaaccattttcttcccaacatatggagttttcaatagacggtcttctatatttgtttggttgcatgttcaatgctgcagattattgctatttaaaaaaaa

SEQ ID NO: 3675 - DNA, 583 bp, Glycine max
aattgaatcagttattaggggtggtggaagttttattttattgattttaaaaaaaaagaaaccaagctttagttcatgtcctcaactgaaacccattttgctagtgactgtaaggccatgattgggcaagttgcacgtggagggagaacttagaagcctcttctcaacgctggaaatgcttactacaagtttagagtgaagagtcattcatggcctaaggtgcaaggtgtgccgatgaacccagttgagcatcctcacggaggaggtaatcatcagcatattgggcatgcgagtaccgtgaggcgtgatgctcctcctggccagaaggttggtctcattgctgctaggaggactggtcgtcttagggggcaagctgctgccactgctgctaaagcggataagactacttgagaagatttttagggtgttatttgttctcaaattttgtttctttcatagtttatgttgaactctttgggttctattttgaacagcatttccgccataaatatgaaaagctttgtaacagacggtgttttatattagtttgacatctattcaattctgctgtttgttaaccttt

SEQ ID NO: 3676 - DNA, 358 bp, Glycine max
aacccagttgagcatcctcatggaggaggtaatccccagcatattggtcatgccagtaccgtcaggcgtgatgctcctcctggccagaaggttggtctcattgctgctaggaggactggtcgtcttagggggcaagctgctgctactgctgctaaagcggataagaccacctgaagagattgttagagtttttttttttttttataagttctcaaattttgtttctctgatagtctatgctcatctgtttgggttctattttgatcaccatttctgccataaatatgaaagcttcgtcacaggcggtgttttacattggttttaagatctattcaatcctgcaactgtttgaatttgg

SEQ ID NO: 3677 - DNA, 277 bp, Glycine max
agttcaaaggtaaggtaggttaacactcttcttcatcgtcgtcgcaatgggacgtgtgatccgtgcgcacgtaagggagcaggctcggtcttcaagtcccacacgcaccaccgcaagggccctgcacgcttccggagcctggacttcggggagcgcaacggctacctcaagggcgtggtcaccgacgtcatccatgaccctggccgcggcgcgccgctcgccaaggtcgccttccgccaccctttcagatacaagaagcagaacgagctcttcattg

SEQ ID NO: 3678 - DNA, 292 bp, Glycine max
cacctccggctcgagctcgagcgaatcggctcgagcgagcgcggcacccacacacacagttcgtcggaatgggaacggtgattcgcgctcagcgtaagggtgcggggtcggtgttcaagtcccacacccaccaccgcaagggtccggcgaggttccgcagcctcgacttcggcgagcgcaacggctacctcaagggcgtcgtcaccgacatcatccacgaccccggtcgcggcgcccctctcgccaacgtggcgtgccgccaccccttccgctacaagaagcagatggagct

SEQ ID NO: 3679 - DNA, 417 bp, Glycine max
aggggagtgatgggaatgaatggtgttggaagaccggggattcttgtgggaggatcgtgcagtggggtctcagatcctgtggctgcaatcaaaatgcattattccaattctgacaagtatggcggtcagactgggagtattgcaagagaggatgaatcatggggagggaaaggggattgaccgaggcaggtagtagattgtgctgtgagcggcaaacacctctttttgccgcacccctgtattatagtttctgttatttgctcaatacagtgtagggcgatttaatggttctcaagcccgtctttttggtaaaatatttaggtgcttgtaatatggcagcagctttgtatttgttgtatttgatgaaaatacagaaataatctctgaaaaaattaggaggggcgattgccattgcca

SEQ ID NO: 3680 - DNA, 2192 bp, Glycine max
atttagttgtaatttggctaacacggtgttgtgttctgaagtgtagagaagagaggcttaaaaccccagcagagtcctcgcatttcactgctgcctcactctctcactctctcagcaggagtatataatctgagcgatgtcagatctcgaggctcccttgcgccctaagaggaagaaggtttgggtggactattttgttcagtttcgatggatccttgttatttttgtggtccttcccatctccttcaccatttatttccttacataccttggggatgtaagatccgagtggaagtcctataagacgcgtcagaaggaacatgatgagaatgtgaagaaggttatcaaacgtctcaaacagaggaatccatcaaaagatggtcttgtctgtactgctcgtaagccctggattgctgttgggatgcgaaatgttgactataagagagcccgtcatttcgaagttgatttgtctgctttccggaatgtacttgagatcgacaaagaacggatgattgcaagagttgagcccctagtcaacatgggtcagatcagcagggtgactgtacccatgaatctttcccttgctgtagttgcagagcttgatgatctaactgtcggtggtctcattaacggctatggtatagaaggaagctcccacaaatatggtttgttcgctgatactgttgtggcctatgaaattattttggctgatggcactcttgtgagagccaccaaggacaatgagtactctgatctatactatgccattccgtggtctcagggaacactcggccttcttgttgctgctgagatcaggcttatacccgttaaggagtacatgaagctaacctataaacctgttgttggcaccctgcaagatcttgctcaggcatattgtgattcttttgctcccagagatggagaccaggataatgaggagaaggttccagactttgttgaaggaatgatttatacaccaacagaaggtgtgatgatgacaggaagatatgcttcaaaggaagaggccaagaagaaggggaataagatcaatagtgtaggatggtggtttaaaccctggttctatcagcatgcacagacggcactgaagaaaggagagtttgtagaatacattcctaccagagaatattatcacaggcacacaagatgcttgtactgggagggaaagcttatcctcccatttgctgatcaattttggtttaggtatctgtttggctggttgatgccacccaaggtttctctcctcaaggcaactcaaggtgatgctataagaaactattaccatgaaatgcatgtcatccaggacatgcttgttcctttgtacaaggtgggagaggctttagaatgggttcaccgtgagatggaggtataccccatttggctctgcccacacaaattgttcaagctgcctgtcaaaactatgatttacccagagccagggttcgaactacatcgcaggcaaggagacacccaaactgctcaaatgtacacagatgttggagtttactatgcaccaggtcctgtttttaggggtgaggtatttgatggggcagaagcagtgcgtaaaatggagaactggttgattgaaaatcatggttttcagccacagtatgctgtgtcagagctgtccgagaaaaacttctggaggatgtttgatgctggtttatatgagcatactaggaggaagtatggagctgttgggacctttatgagtgtatactacaaatcaaagaagggcaggaaaactgagaaggaggtacaagaagcagagcaagcgcaccttgaaactgcatatgcagaagttgatcaaccagtagactgattttggattttgattcatctcatggtagtagaattttattgcatctcgtttcccacatatgcaggagttgatcaacgggtagactgattttgaattttgattcatcatatgatagaattttattgcatattcattccgtatttatcgttttgccttttgtaattttggatctctggcttcggatagcctcagttgctgatactcttttgccgtttccaatgtctttaatgaattaatgtggacttaacatgatgttttcaagtgctcaagactgaaatggctgtgtgctcgagtgtatctttaattcttaggtacaaataaaatgcatctgcagacgtgcaacgtcctaatc

SEQ ID NO: 3681 - DNA, 573 bp, Glycine max
ggaagaagaaaaaaaaaagcacgcttatgtggaagttagtaataagagaagagaaaaaaaaagtaacaagaagttacttataaatagaggccccccgtggacgacagaaggggacagcagcagagcaaaagaaagaaagaaagaaagtgcaacttcctctgttttgctcccctgtttaagccttatcataagcttagaatggcacacaaggaattttccattgccctagtgactctcattgttctctttgtcaacacgaacctccaaggtgccacggctgactatggtggtggttggcagagtgctcatgccactttctatggtgggggtgatgcttctggcacaatgggtggagcatgtgggtatggaaatttgtatagccagggatatggaactgacactgtggctctaagcactgctttgttcaacaatggcttaagctgtggatcttgctatgaaatgagatgtgatgatgacccaagatggtgcaaacctggctctattaccgtcactgctactaacttctgcccaccaaacccatctttgcctaacaacaatgggggttggtgcaac

SEQ ID NO: 3682 - DNA, 473 bp, Glycine max
gttttcccgttgggcatttctcccacatggtactggaaatgcaacgatcaaatcctttgtcagttcttcagtttacttgtaggtttctggaaaactggagcttgaacacgctctcattgagctcttcaccaatgcaacacttcaaaggaatccaagagtccaagactatgagaaatgaagtttaatattgtcacaacaaattttcattcagactcgatccatttattggattcatttaccctgcgatataagcacacccatatttacaaccccatttcacagtaatggtggtttgatatattattttaacagcattctgttatgatcaagcacaaagttcctagaattcgaggtctagggcctccagagcaacaaaagggagaagggaaatagtttgtattattttctgcttatctgttgaattacattcttctatttataagctatctatgatcattctagaatttaattct

SEQ ID NO: 3683 - DNA, 547 bp, Glycine max
tgggcatttctcccacatggtactggaaatgcaacgatcaaatcctttgtcagttcttcagtttacttgtaggtttctggaaaactggagcttgaacacgctctcattgagctcttcaccaatgcaacacttcaagtacgcggtagagctgctaaggaagctttttgttggttgtcctcctgtggcgttgttgaaaacatttggagtttgctaaattttcacatttttgtctgcagaggaatccaagagtccaagactatgagaaatgaagtttaatattgtcacaacaaattttcattcagactcgatccatttattggattcatttaccctgcgatataagcacacccatatttacaaccccatttcacagtaatggtggtttgatatattattttaacagcattctgttatgatcaagcacaaagttcctagaattcgaggtctagggcctccagagcaacaaaagggagaagggaaatagtttattttgccttcttctgagccttggaggaattgagaaattgagaaatgcactgcgtgattg

SEQ ID NO: 3684 - DNA, 972 bp, Glycine max
cggttgcgtgggaaacattattctcgaattagggttttccactgatctccgagcacacaccactactctgttcctcagattcaacaccaccttgcgtggcgccaatgggaaaagccttcgacatcggagccgttccgttcaacgccgacgggtggggtccgccggacaacgcgacctcaggcagcaacaacaacaacctccctctgaacgtccccttcgcccccttctcccgctccgacaaattgggccgcatcgccgactggacccgcaacttcaacaatccgacccgctccaagaaccccgccgatgccgtcttcgacttcgccaacgacgactccttccccgcctccgccgacgacgacgcctccttccgcctcgtcgacggaaagcccccgccgcgccccaaattcggccccaagtggcgcttccagcagcagcgccagctccctcagcggcgcgacgaggaagtcgaggccaagaagcgcgagcaggagaaggaacgagcccgcagagaccgtctctaccacatgaaccgctcaaaccctaaccaacagcgccgcgaagccgccgtcttcaaatcctccgtggatatccaacccgaatggaacatgcacgaccagatccccttcagcaccttctccaagctctccttcaccgttcccgaacccgaagacctcctcctctgcggcgccctcgagtattacgaccgcacctacgatcggatcactcccaaaaacgaacgccgcctcgaacgcttcaagaatcggaacttcttcaaagtcaccaccaccgacgaccccgtcattcgcagactcgccaacgaggacaaggccaccgttttcgccaccgacacgattctctccactctcatgtgtgctcccaggtctgtttattcctgggacattgtcgttcagcgtgtggggaataagctcttcttcgataagcgcgatgggtcgcaacttgatttgctct

SEQ ID NO: 3685 - DNA, 520 bp, Glycine max
cacttccatagaagtttaattatcagcttctgagctctaagctaagtctgcttttattcttttctctcccgttatatatatagtatttgcttatatatatatatactactcattaggaactgtgattgcagttcctaatgcagattttaacgcggcgccaaggagcatttttgtgcttctggttgtctgtgctttttgtggtagtagacttttgctatggtgaccatagtacagtcgaggtagtagggttgggagaatgcgcagattgcaaggagaaaaacattcaaactagccaggctttctcaggtttacgtgtgacagtagactgcaaggcagcaagtgggaactttggaaggtcaaggggccggtgagcttgatgaatatggaaacttcaaagtttcccttcctcatgacactgtaaaagacgataaactgatagaagaatgctatgctcagctacttagtgcatcagctgcaccttgtcctacccatgatggcccattgagccacaaaatagtga

SEQ ID NO: 3686 - DNA, 1922 bp, Glycine max
gcaaaggcatcgttttggaagaacaagggcatgtgagaaaaaacatactaatcaaattaaacagcgaagaagagtttcaaatttattgcttcgaatctccagcttcgtcagggaaggaaaacagcataacgtgtggtctcgggggaaccaaaaactgtgaaattctgaagccactaggccttttaaaaaccaaactaaggaagacggtttagacagagagtacttcaagctaagaaaatggaaagtggggttgtggctgtgaacaacaacatcaacaactatgaatccaaggcaacttccaccatcaccattaagggcattctcagccttctaatggaaagcattgatgatgagaattgtgatggtggtggaagcaagaagagagttatttctcttggtatgggtgacccaactctcaccacattgttccacacaccaaaggttgttgaagaggctgtcgctgatgctcttcaatctcgcaagtttcatggctatgctcccactgctggacttctccaggctagaattgcaattgctgaatatctatctcgtgaccttccttatcaattatcacgagatgatgtcttcatcacttgtggatgcacacaagccattgatgtttcggtggcgatgcttgctcgccctggtgcaaacatcttgcttccaaggccaggcttcccactctatgaacttagtgcttcatttagaggggttgaagtgaggcattatgatctgcttccagagaaaggttgggaggttgatctagatgctgttgaagctcttgctgatcagaacacagtggcgttggcgatcataaaccctgggaatccttgtgggaatgtgtacagttaccaccatttggagaagattgctgaaactgcaaaacgggttggaacaattgtgatctctgatgaagtttatggtcaccttgcatttgggagcaagccttttgtaccgatgggagtttttggctctactgttcctgttctgactcttggctcattttctaagagatggatagttcctggatggaggcttggttggtttgtgacaaatgatccatctggcacttttagaaatccaaaggtagatgagcgcattaaaaagtactttgatcttttgggaggtccagccaccttcatccaggcagctgtacctcagataattgcgcatactgaagaggttttcttcaagaaaaccattgataatttgaggcatgctgcagatatatgttgtaaagagttgaaggatattccatacattatttgcccttataaaccagaagggtccatggctatgatggtgaaactaaacctttcacttctggaggatattagcgatgatattgatttctgtttcaagcttgctaaggaggaatccgttatcattcttccaggaactgcggtagggctgaataattggattcgtattattttcgctacagatccatttgctcttgtagagggtttgaagagggtaaaatctttttgtgaaagacatgcaagaaagtggtcaatgactacagaataaaatccacaaattaaggcggctactattttgtattgaatacctagcttctcaaatatccaatttttacaaaattggatcgttttacgaataattgggttctcaaatatccatttttttgtgccagctctagtttatcactagcttttaaggaaggattctccaagtatctaggtgtttatcaattggtatttgtgtttattgttgtatctaaaaaattatatattttaaataattttgtgacgctaaaaaaaaaaaaaaaaaaaaataaaaaaaaaaaaaaaaaaaaaaaaaaaagaaaaaaaaaaaaacaaaggaaaaatcacaagaaaaaattaaaaaccgaaaaaaaataaaggggcgggccccaaaaaggggccctctcaacccgggaa

SEQ ID NO: 3687 - DNA, 525 bp, Glycine max
cttctcttcactctttttaaaaaaaatggttctcaccatttccaattagacacacataaaaccattcccaatagccgcctctgataattgattactatcaacccaacttcaagttgtgttcttttgtggtgtgtaaccgtattctgtatttgttttcatcaattggaaactgggttttctcgctttttgcagataagcatcaataggatactagatcatggattggtactatgggaacggcattaatgattatctggttcccagagatcaggatttattggacaggcatccttcaccagactattggtcaaactggggaataagtgcaactgaagggattctgtacctgaaggtcttccatgtgttgacgttgaaaacctagacaaatccatcaacatttctcctgaaaaccaatgcagcagtacacctggtatattgcagaaagatataccagcttcaaagtctgtttctagcaactcagaatcaaagaattgcctggatatagaggtgacaatttccttcttg

SEQ ID NO: 3688 - DNA, 709 bp, Glycine max
gctgctgtacctcagataattgcaaataccgaagaaattttcttcgagaaaaccattgataatttgaggcatacagcagatatatgttgtaaagagatagaggatattccctgcattttttgcccttacaaaccagaaggatccatggctatgatggtgaaattaaacctttcacttctggaagatattagtgatgatattgacttctgtttcaaacttgcaaaggaggaatctgtgatcattcttccaggaactgcagtaggcctaaaagattggcttcgtattactttcgctgctgatccatctgctcttggagagggtatgagaaggataaaatctttctatcaaaggcatgcaagaaaattgtaaagctatagtgaattcacttataagtaaaattactaaataaatggccctttactactagtatactacacaagcattgaagattttatttcaatatagcatacagtctctttaggaatggaccaattaactggacattgcaacataattaagaggcaatcctctttatattgaagcattatctttattcaaatactaaacggttcatgttcagtctttttaatctataaaaaagtatatagatggatcatcaataagccttgagctgaaagtggtgcaagagcctgtataattgtcaattggagggttatgatataattaaatttaccgattttccctccat

SEQ ID NO: 3689 - DNA, 415 bp, Glycine max
ccaccccagaaatagagagtaagcctgagatcatggaaaaagttggtgtggctgtaaatagcaaaaatcaagaatccaaagcaacttccaccattaccattaagggtttcatgagccttctaatgaaaagtgtagatgagaatggtgatggtagcaagagagttatttctctgggtatgggtgacccaactctcaccacttattttcccatctcaaatgtagctgaaaaagctgttgctgaagcacttcagtcacacaggtttcgtggctatgctcccactgcaggtcttccacaggccaggattgcaattgctgaatacctgtctcgtgaccttccttaccaattatcaagtgatgatgtttacatcacctgtggatgcacacaagccattgatgtttcagtggcgatgcttgc

SEQ ID NO: 3690 - DNA, 579 bp, Glycine max
ccactttcccaatagccgcctctgataattcattgctaatttgctatcaatccaactttacatattatcatccattttgatttcatcgataggaaactgggaaactgggttttctctcttttttgcagataagcatcaataggacactagatcatggattggtactatgggaacggcattaatgattatctggttcccagagatcaggatttattggacaggcatccttcaccagactattggtcaaactggggaataagtgcaactgaaggttttaattcacctaaaaatctttttatcatggatttctttgaagaaagattcaataatcaaattgagcttgaaccatctctgcatgataaagatcattctagcagttcaagtgtatgtgggggattgcctgagcaatcttttcaacagacagcattttcatgcgatcagcctaattaccagcttcaagatctaccgagattcgaaccgatgaatgacactttcttggattctgtacctgaaggtcttccatgtgttgacgttgaaaacctagacaaatccatcaacatttctcctgaaaaccaatgc

SEQ ID NO: 3691 - DNA, 389 bp, Glycine max
tagctatttcgcatcccaaagcttttgaagattccagaacaaaagcacatatagtgtctgaaagagtttttattattagctttgcggttctgcttttcaaggttcgtcctttctgcatcaatgctcgaatttctcgccgcaatttgcgtgctgtagtttctgcttgagtctgctttagaatcacgaggtttatttggagaggaatatattggtggagaggttgaagaggagcatttacgactctggccaactctatagagatatcttcccataccggaagaggcttaggtctttatatttccggttttcagatttgttcagaaagtatcttgtctcttgttctgcgccttcctattgattatggctaacatgtgattcaatgtgatagc

SEQ ID NO: 3692 - DNA, 546 bp, Glycine max
aatttccgtgttgaagtgcgattagaacttagaagcatcaattcaagctccaatcttcgacactgtcacttaatacattgaaagcagagtatgccgagtaggaatagtgccaaaactccaaagaaggatggaaacaactcaaattccagtctttcttctctagaaaataatttctatgaaggagaacgtctcaccaatttgctccaatcaatccgtagggggatccaatctgcaagacatttggatggaagttccttgccagagaagatatggttaaagcaacaattttctattggggtcaacgatgtaactcgtgtccttgagcgcatgaaaccatgcacggagttagaaagctctactgaactcatctctttgagaagcaaccatacagcatcttcagttaagcttcaggttgatttcctctgtttgtctaatgtagaatatgtaaatcttttgttaatcacttatttagtaccttcaccttttcttattaagtaaatcattcaataacaatcatttttattctcaaataatattagaaggttt

SEQ ID NO: 3693 - DNA, 652 bp, Glycine max
agttgaagtgcgattagaacttagaagcatcaattcaagctccaatcttcgacactgtttctatgaaggagaacgtctcaccaatttgctccaatcaatccgtagggggatccaatctgcaagacatttggatggaagttccttgccagagaagtatggttaaagcaacaattttctattggggtcaatgatgtaactcgtgtccttgagcgcatgaaaccttgcacggagttagaaagctctactgaactcatctctttgagaagcaaccatacagcatcttcagttaagcttcaggctgtgcttgtagcttctgactgtaacccacgttggctgacgaaacatctcctaagtttggcttcatcaaggaatgtgcccctggtatttgttagagatactaaacaaggttctttgagactaggtgaacttgtgcaattaaaaacggccattgctatcggaattaaggttaaaggaagcaccataaataaaattattcagcaagttattcaaggcgatggatttgaactttcacctgaagggtaaaattcagcaagaatatttgatgcgcaaagtaactttcaggaccctgactaaaaaatgctgtcaaatgtaatttaatcaatatattttgtttataaaattattgaccttg

SEQ ID NO: 3694 - DNA, 819 bp, Glycine max
  unsure (1)..(819): unsure at all n locations
gggagtctttgtgatgaaatgagtttgagtgatacgggtgatggtggaggtgctagagtgtgagccacgttcgaggagggccatagtttatggatgtgttgttgtacttggccttcttgcaactctagctggatgaagatggagccttctgggtctgcttttcagaattcgggcagttctagggccttgaacagttctggagtctcagataggaaccaaagggttcattgtcctcaaacgaaccccttcttgggtgaggcatcccaggattcggggttcagaaaggaaagggataggtttctgttggctcaaggtggtcagcctaagaacttgggcggtggtttttcggggttgtgtgaagacgaggtggaggttgacccctttttctgtgctgtacaatggggtgatattagcttgaggcaatggttggataaacctgaacgatcggtgggtgccttcgaatgcttgcacatatttaggcaaatagtacacatcgtcagtgtaccgcattctcaaggagttgtagttcacaatgtgaggccttcctgcttcgtcatgtcatctttcaaccatatctcgtttattgaatcagcatcttgttcagatactggatcggattctttaggagatggaatgaacaaccaaggcggtgaggttaaaactccaacatctctctgtccccatgatatgcatcagcagagtttgggaagtgaagattttatgcccatcaagacttcaaccacccctgctcggtcagattctagttgcatgctgtcgagtgccgtgtatgcagctcgtgcatcattgatagaaggnccc

SEQ ID NO: 3695 - DNA, 1163 bp, Glycine max
gcttatgctaggagcaatattccttatgccaataacattgatagccaaataggaatgccactgaatccagattcactcttaaccaaaggcacattaaggttggggaagtatttgtctaataatttctcttcagaaggcatgcttggaaattatgaaaataacagagatgctcagcaagaactttcgtcttcaatggtttcacagacatttggtgtccctgatatggccttcaattcaattgattccacaatagatgatagtagacttcttgaacagtggtccgtgggctccaccaccagcaccgccacctctgccaccagcacagtttcagcggatgaggacatataccaaggtatataaacgcggagctgtgggaaggtccatagacataacacgatattcaggttatgaggagcttaaacaggatctagctcgtaggtttggcatagagggacagctggaggatcggcaaaggataggttggaaacttgtctatgtagatcatgagagtgatgttcttctagtgggagatgatccttgggaggagtttgtgaactgtgtccgctgcattaaaatactttctcctcaagaagtgcagcagatgagcttggacggagattttggcaatggtggccttcaaaatcaagcctgtagcagctctgacggtggcaatacttaaatgaagttcagtaatacgctaactattcttccgtattgttaacttagattatttctgggagatgcattattgtcctaattccgaaaggcaattattatgccactgcggacttctgtgtccaccatcaggacttgaaaggagaagttttgtctatgttccggacatgcaaatttgaagagccaaatgagggcggagaagtgagctgctgctctggtttaacattgagcggtaattttgaatgtataaagtcttaggcagctagattttgcggaagctttcatgatcttccatccttggaggcaccttattattttttagccaatatgactgtgaagtagagaaacttcaaatgttgtaaggtcaagtgcatactgttgcattgtttgcttgaagcgtaagtactaaaaatgttggagttatttgactgtacaggagatcaattactagtatttgacacatgaatctaatgttcatcatcgacgcc

SEQ ID NO: 3696 - DNA, 803 bp, Glycine max
cgataatttcatttataaataagcatctgcagatattgatcaggatgcacgcatattagtctcatcgaaatgggagaacagaatgacattacgctgacatgggagaatttggaagctactgttacaaatggaaagaaccgaaaactaattcttcatgggcttacaggttatgcccagccagggagacttttggctataattggtccttctggcagtggcaaatccacacttcttgatgctttagcaggaagattgacatcaaacataaagcaaacagggaagattctaatcaatggccacaaacaagaactggcttatggaacatcaggctatgtaacacaagatgatgctatgctgtcatgtttaaccgctggggaaactttatactactcagctatgctccaatttccaaacaccatgtctgtagaagagaagaaggaacgagcagatatgacactgagagaaatgggtctacaagatgccatcaacacaagggttggagggtggaattgtaaaggcctcagtgggggacaaaggaggagacttagcatttgcattgagattctaacacacccaaaactcctcttccttgatgaaccaactagtggacttgatagtgcagcttcctattatgttatgagtggaattgcaaatctaattcaaagggatggaattcaaaggactattgttgcttccgtccatcaacctagcagtgaagttttccaacttttccatgacctttttcttctctcttccggagagacagtatattttggtcctgcctctgatgcaaatcagttttt

SEQ ID NO: 3697 - DNA, 990 bp, Glycine max
gtcggcttctgactccgtgccctagcttcttcttcctcctcctcctctgccattgcagcaaggcacacacctcaggctccaacccatttcacgagggatcggattcgctcgccatcatggggaagaagaagaagagagtttcctcgaaggtgtggtgttattactgcgatcgcgaattcgacgacgagaagatcttggtgcagcatcagaaagccaagcactttaagtgccatgtctgccacaagaagctctctaccgctggcggcatggccatccacgtcctccaggttcacaaggaatccgtcactaaggtgcccaatgcaaagcctggtagagagagtacggatattgaaatatatggaatgcaagggattccaccagatatcctggctgctcattatggtgaagaagaggatgatgttccatcaaaggcagccaaagtggatattccaccaactcagcttgtaggtggaatgattccacctcctttgggtacaggatatcctccgcgaccaaccttgcccacaatgccaccaatgtataatcctgctgtacctgtgcctccaaatgcttggatggttccacctcgacctcagccatggttttcacagcctccagctgtttcagttcctcctgctgccccatacacacagcagccattatttcctgtgcagaacgtgaggcctccactgccagctactgctcctgcgctccaaactcagattactcctcctggattgcctacatctgcacctgtcccagtttcacaacctttatttcctgttgttggaaataaccatacaactactcaaagttcaacattttctgctccacctctgccctcaagtgttccatcagttacttcagtgatgtctgcaaatgttcctgttgatacacatttgagcagcaattcttctgtaacaagtagttatcaggctatagggattccaggtggagcagctagtaactcacattcttatgcttctggtc

SEQ ID NO: 3698 - DNA, 283 bp, Glycine max
cccacgcgtccgctttctttccgcttctgaatccgtgccctagcttcttcctcctccgccattgcagcagggcacacaaccttcgtcacaaacccaattcgcgagggatcggattcgccatcatggggaagaagaagaagagagtttcctcgaaggtgtggtgttattactgcgatcgcgaattcgacgacgagaagatcttggtgcagcatcagaaagccaagcacttcaagtgccatgtctgccacaagaagctcttcaccgccggcggcatggccatcca

SEQ ID NO: 3699 - DNA, 1259 bp, Glycine max
cctgtatctgaatctgcgtgtgtttgtgaattgttgttgagatctgaatcaaaatcagaaacgataatggctacaccggaccacctcttcaacctccgcaacaacttctacctcggcgcttaccaagccgccatcaacagcagcgacgttgccaacctctcccaagaagataccctcgagcgcgacaccctcgtccaccgctgctacatcgccctcggccagctccagttcgtcatctccgagatccacgacgatgctcccacaccactccaagccgtcaaactcctcgccctctatttctcctctcccgacaccaaggattccgccatcgcgagtctcaaggagtggctcgccgatcccgctattggaaacaacgccacgctgaggctcgtcgccggtctcgtcttcctccacgagaatgatttcaatgaagccctcaaacacaccaacgccggtggaaccatggaactgcacgcgttgaatattcagatctttattaagatgcataggtcggattatgctgagaggcagcttcggatcatgcagcagattgatgaagatcacactctcactcaactcgccaatgcctggctcaatttggctgtgggtgggtcaaagatccaggaggcgtatctgatcttccaggatttgtcggagaggtatcagtccaccagcttgctcttgaatggcaaggctgtttgctgcatgcacatgggcaacttcgacgaagctgagacccttttggttgaagctcttaacaaggatgccagggatccagaaactctagccaatctagttgtatgctgtcttcatctcggcaaaccatctaacaaatcattcagccagctgaaactttctcacccagagcatgtattggtcaaacgggtatcatcagctgaagaaagttttgatagagcgctacaatcattttcctcatgagtgtcgatgattgaatttctttcaagagttgaatggtgtgaggtcttcccgtgcaatttttacaccttatcgtggctattgtattggttgcgtatcttagaacataatcaactgggtaatgtgtcatagtattcaaatttgttatgtttttggtttacttgagtcttgatgttgtaaaagctacatctgacattaatttttaaacatgttcatttacatcgtctattttactagaaaagggagaaataccaataggtattaagtaaacaagattacgattgtgtggatggatagggaaaactctattcaattttatccat

SEQ ID NO: 3700 - DNA, 432 bp, Glycine max
actcgagcgaattccgctcgagactgtatctgcgtgtgtttgcgaattgtgcaattttcaagatctgaatcagagaatagataataatggctacaccggaccacctgttcaacctccgcaacaacttgtatctcggggcgtaccaagccgccatcaacagcggcgacgtcaccaacctctcccaagaagactccctcgagcgcgacaccctcgtccaccgctgctacatcgccctcggccagcttcagttcgtcatctccgagatccatgacgacgctcccacacctctccaagccgtcaaactcctcgctctctatttctcctcccccgacaccaaggtcgcgccttcaatcctctctgcctaacaaattaacatttgtccaaatatataaattacatttgtcaaataaaaaaaaaaaaaaccctcaattt

SEQ ID NO: 3701 - DNA, 357 bp, Glycine max
gattcttcattgaatcctggaatgacacacaatattggtgaattgggtttccttgccccccattttctggagtttgcaggaagcccgttcggctcgtggtttgtgttgcgttttgtttgtttacaggcacgcgttgaatattcagatctttactaagatgcataggtcggattacgcagagaggcagctgcggatcatgcagcagattgatgaggatcacactctcactcaactcgccaatgcttggctcaatttggctgtggtattcagtaattaattaataattgttatacttagaaactagaaaaagtgatgaagaattttggtgtgtgtgtgtttgattgattgattggatga

SEQ ID NO: 3702 - DNA, 313 bp, Glycine max
caaacgggtatcatcagctgaagaaagttttgatagagcgctacaatacatgctcggggtgtgctggcttcagctggctgaatgatttgttagatggtttgccgagatgaagacagcatacaactagagcatgtattggtcaaacgggtatcatcagctgaagacagttttgatagagcgctacaatcattttcctcatgagtgtcgatgattgacatttctttcaagagttgaatggtgtgaggtcttcccgtgcaatttttacaccttatcgtggctattgtattggttgcgtatcttagaacataatcaa

SEQ ID NO: 3703 - DNA, 393 bp, Glycine max
gcctctagtggagagcggaaagaatcctcagaagtacatcaaatactcagcagaagatctagaccgattgttgggtgaattttttgaggtataataattgcttataaggttgtatttgggggctgaaaaggagtgttatcattttttgtcttttgggtactgccacaagtgtgataagatggtgaattactctgcttccgtacattttgtgcatagttcacttgatttgttgcgtgagatgtttagtcttcaaagcaaatgtagtctgctagtagaatctccgtttattggagcattgattttttgaaccacgtgtacaagtttttgtgattatatgtaaacacgggatttggtgtgtaatactctaccatcaaatttcaaacattattttgt

SEQ ID NO: 3704 - DNA, 994 bp, Glycine max
ctgttgaaagtggaaatcagaccgctggaaaagaaagcaaatgataaaacaggcaccagcaatacgaagcttcaccttcttcttctacagttgcttgcaagcaagcttgggtgtgaaccagatgacatatgtgattttgaattgcaagcttgcgatacacaaccaagtactattgctggagctgcaaaggaattcattttttcaggacggcttgataatctctgcatgtcattttgctcgctgaaggcattaatagatgctacatcttctgacagcagtcttgaggaagagtcaggtgttagaatggtggctttatttgaccatgaggaagttggatctaactctgcccaaggagctggctctcctgttatgctaaatgctgtgactagggttaccaattccttcagctccaatcccaaccttctggagaaagcagcacaattaagctaccttgtatctgccgacatggcacatgcactacacccaaattacatggacaagcatgaagcaaaccatcagcccaaactacatggaggacttgtcattaaaaccaatgcaagccaacgctatgcaaccaatgttgtcacatccttcatattcagggagatagcatcaaaacataaacttcccgttcaggactttgtggtgcgcaatgacatgtcatgtggttcaaccattggtcctattcttgctagtggcgtaggtattcgcactgttgatgtaggtgcaccgcagttgtcaatgcatagcatacgagaaatttgtgctgttgatgatgtgaagtattcatatgagcacttcaaggcattttaccaagaattctctcatgttgatggtaagatggtcgtggatatataggaatatctctaatcacgaaatcctcattaatcctttgctctagaagctgttgctgaaatggtcgtgtttcgtaatttaggaccattataatgccgacgttattatgatgaaattttcaataaaattagactccctg

SEQ ID NO: 3705 - DNA, 1705 bp, Glycine max
tcctctttcaatctccctctaaaacttcacctacccaactttcacatcattttcttttctccgaacaaatgaaaatgaaaataaggaaagccttcatctataaatatagccatcacacactctccccattcgttccactcgttctttagatctatccactcacctgcctcttcctcacccctttctccatctaacgagtaaggaaaaatggcgcgtaagaagatcagagagtatgactcaaagaggttgttgaaggagcactttaagagactctctggcaaggagttgccgatcaagtctgcacaaattaccgcatcaactgatttcactgagctacaagagaaggaaccctggctttcatcttctaaattggttgttaaacctgacatgttatttggaaagcgtggcaaaagtggtttggttgccttgaatttggattttgcacaagttgtttcatttgtgaaggagcgtcttggaaaagaggttgagatgagtggatgcaaaggacccataacaactttcattgttgaacctttcatcccacacaatgaagagttttaccttaacattgtctccgagagacttgggaacagtataagcttttctgaatgtggagggattgaaattgaagacaactgggataaggttaagactgcatttgttccaactggagtgtctcttacgtcagaaattgttgccccacttgttgcaacccttcccttggagatcaagggagaaattgaggagtttctcaaagtggttttcactctgtttcaagacctggattttactttcttagagatgaatcctttcacattggttgatggaaagccttatcctttggatatgagaggcgagctagatgacactgctgctttcaagaacttcaagaaatggggagacattgaatttccactgccatttggaagggttatgagtgccaccgagtctttcattcatggattagatgaaaagacaagtgcatccttaaaattcacagtgttgaacccaaagggccgaatttggacaatggtagctgggggaggtgctagtgtcatttatgctgatacggtaggagatcttggctttgcatctgagcttggaaactatgctgaatacagtggtgcacccaaagaagaggaggtcttgcagtatgccagagttgtaattgattgtgcaactgcaaaccctgatggccagaagagagctcttgtgataggaggaggcatagccaactttactgatgttgctgccacatttagtggtataattcgggcattgaaggagaaggagtcgaaattgaaagcagcaaggatgcacatctttgtgaggagagggggtcccaactaccagaagggtctagctttgatgcgagcacttggagaggagattggcatccccattgaggtttatggacccgaagccacaatgactggtatatgcaaagaggcaatacagttcattacagccgctgcttaaggtcaacaacaccttcatttatagtattttcatggtgagtctgaagtgaacgttgattcttaatttccttttccattcctggaatttggaaatttagttagagtatatgtttatgaaatcaagccatccaagaaagagtggccaggattgttgtcacattgtttttgtagaattctgatggcgctgtcttgacacaataaagagtgtttttcatttgactgttact

SEQ ID NO: 3706 - DNA, 393 bp, Glycine max
tatctcgagccgttcacacccaccattggatccaccaatctccaaccttcttctccactgttccgtttctctctccaacggagagtcttttgttttttgtggcgagtttgttgcacgtttaagaagcaatggcacgcaagaagatcagagagtatgactccaagaggttgttgaaggagcactttaagagaatctctggccaggagttgcccatcaagtctgcacaggttacagaatccaccaatttcagtgagctagcagagaaggaaccctggcttttatcttcaaaattggttgtgaaaccagacatgttatttggaaagcgtggcaaaagtggtttggttgccttgaatctagatttggcagaagttgattcttttgtgaaagggcgtc

SEQ ID NO: 3707 - DNA, 293 bp, Glycine max
  unsure (1)..(293): unsure at all n locations
cgggtcggcccacgcgtgcgncaaaaatgagggcactcggagagtaaattgtcattcctatcgaggtttatggacctgaggcaacaatgactggtatatgcaaacaggcaatccaatgcatcactgctgctgcttaattatccattcttaggccaatccctttttttacatgtatttttcatggctagtttgaagtgattgttgattcttggttccctttccaactctcagaattggtaactttggtgagttagagcattggatgactaaatgactgttttataacatcctat

SEQ ID NO: 3708 - DNA, 298 bp, Glycine max
cacccaccattggatccaccaatctccaaccttcttctccattgttccgtttctctctccaacgggaagaactttttttttagtgtgtgtttttggtggtgagttggtaagaagcaatggcacgcaagaagatcagagagtatgactccaagagattgttgaaggagcactttaagagactctctggccaggacttgcccatcaagtccgcacaagttacagaatccaccgatttcaatgagctaacagagaaggaaccctggcttttatcttcaaaattggttgtgaaacctgacat

SEQ ID NO: 3709 - DNA, 356 bp, Glycine max
ttcctctttcaatctccctcttacacttcaccaacccaacaaccccatcattttcttttcacctttttccttctccaaacaaattaaattataattaacataatcaaagccttcacctatatatacagccatcacacactttaaccattcgtccacccgttcgttagatctaacaaccacttatcccctttctccttctaacgagtgaggaaaaatggcgcgtaagaagatcagagagtatgactcaaagaggttgttgaaggagcattttaagagactctctggcaaggagttgccgatcaagtctgcacagattaccgcatcaactggtgtcactgagctacaagtctaggaac

SEQ ID NO: 3710 - DNA, 1082 bp, Glycine max
tgcaaaaacacatacagaacagaatctgagaaccagaccctctcaaaccggaaccgcaaatgaagcccaagagcattcgcatccgtaacttaccaacgcacctgctgctaatcgctgtttgtctgttcacctcttcgtccgcttccaagatcggagaaaattgtgggtcagacaacaaatgcgacgctggactcagctgccaaacatgtcctgccaatggaaatacccgaccaagatgttcgcggacacaacctttgagccccacctccaaggtgaaaggcttagcgtttaaccggtattcatggctgacgactcataactcttatgctctggcgggggcgagatcggccaccgggtctgtcattgtggcccctatgaaccaagaagacaaagttgatgaacaactcaaaaacggagttagaggatttatgttggatatgtatgattttcaaaacgacatctggttgtgccactccttccaaagcaaatgtttcaacttcactgcatttcaacctgccataaacgtgcttaaagacatgcggacatttctaggtggaaatccatcagaaattatcacgatcttcattgaggactatgtcacagctcctcagggcctaacaaaggtcttgagagattcagggctgagcaagtacatgttcccagtgtctcgcatgcccaagaatggtgaagattggccaaccgtcgatgacatggttcagaagaatcagcgcctagtcgtcttcacttccaaatcagccaaggaagcttctgagggcattgcctatcagtggacatacgtagtagaaaaccaatatggagatgatggcatgaaagctggttcttgtccaagccgtgcagaatcacccgcaatgaacacaaagtctagatcattggttctggtcaactactttcattctgctccaaatcgatctcaggcctgcgctgacaattcggctccactacttgacatgatgaagacttgtcacgaagcagccggcaaccgttgggccaatttcattgctgttgattattaccagaggagtgatggcgcaagagcaccactagccgatgattaagcaaat

SEQ ID NO: 3711 - DNA, 812 bp, Glycine max
ggtacttattaatgcacaaagcagcttaactcaaaagcagaagcagcaacaacaaacatgtccttaggatccgttctgcactcacagtagttaatgcctcattgtgtgtttcattattattccctaaccaactctcttgaccctgacttcttcacttgtgctttttttttttagatcaacaatttaaggtattaatcttggagcatcagtttggggctcttgtaattataaggatggggggtgggaagtttagtagtttttttgttgtttttgtgttgttggtggggtcagggagtgggattggtgtgaattgggggacacagtcaacacaccctttgtcaccgtcgaaggtggtgaagatgctgaaggacaatggcattcagaaggtgaagctttttgatgctgatgctggtatcttggatgctctcaagaagtctgggatacaggtcatggtggggattccgaatgacatgctttatactctggctaacagtgtggaagcggctgaaaaatgggtttccaagaatatctccaaacatgtctcttctggaggagtggacatcaggtacgttgcagtggggaatgaaccattcttgtcaacatacaacggttccttcgaagccacaactcttccagctctccaaaacatccaggcagctctcacaagatctggtttgagcaaccgtgtcaaagtcaccgtccccttaaatgccgacgtataccaaagctcatccgaaaagccatccgacggcggtttcagacccgacatcaacaatgtcatgctgcagattgtcaagttcttgaatgacaac

SEQ ID NO: 3712 - DNA, 781 bp, Glycine max
tgggataaggactagtagtggtcccgtggatgatgactgttacctttaagtgccactgccactcctccttttctgttacacttaactttataaatacccaccccacccgcggtgtttctacgcagtgaatacaagccaaaagaacaacatggacattgatctttctcctcagttgcccaagaaagtttacggtgccaatggtggctcctactacgcatggtccccctccgaccttcccatgctccaccaaggcaacattggtgccgctaagcttgctctcaacaaaaacgcctttgctcttcctcgttactctgactcttccaaagtcgcttatgttcttcaaggtagtggagtggctggaatagtgttgcctgaatcagaagagaaggttgttgcaataaagaagggtgatgccttggcactcccctttggtgttgtgacctggtggtataacaaggaagaaactgagttggttgttctgttccttggggacacttccaaggctcacaaggctggtgaattcactgacttttttctgactggttccaatggaatcttcactggcttttccaccgagtttgtgggcagggcttgggacttggaagagagtcatgtcaagacccttgttggaaaacaaccagccaaagggattgtgcagctggaaggaaacatcagccttcccgaccctaaaccggagcaccgaaatggcatggccttgaactgtgaagaggctccattggatgttgacatcaagggtggtggaagggttgtggtgttgaac

SEQ ID NO: 3713 - DNA, 1347 bp, Glycine max
cttttgtccaactttttgaaagtttttatactttgaagttccattaggaaatatagtaatttgagaatccaattaaggaattcctcagtcatgctaataataagtgtttaatgtaaaagtatgttaaagagttttacattctcaataaatcagcatttataatagttaagaattgtaaggtactagtagttcttattcttataaaaattaacagcataccatagatgacaattggtaagtggcctaaactattgtggaataatataaatgtggtaaaaacattataactgcatgatggctgctatttctttgtctacatcttttcaaaccttacaatgactttttttggttgaaattctacagtacactaacttgtacctgtttcccttttccttgtccaaaaattccttggtcaaatttggcaactttcgttgttccaatgtgtccatgtgatttagaagaataatagcactcctagatgggcttgtctgatactgtgctaaacttgtgacatgtaggacatgtaggagttactacaagtgtacacacccaggatgtccagtgaggaagcatgtggaaagagcttcacatgacctaagggctgtgatcacaacctatgaggggaagcacaaccatgatgttcctgcagctcgtggcagtggcagccattctgttaacagaccaatgccaaacaatgcttcaaaccctaccaacactgcagccactgccataagtcccttgcaagtgatccaacacagtgacaattcccatcagaaccaaagatctcaagcaccaccagaggggcaatcacccttcaccctagagatgctacaaagtccaggaagttttggattctcagggtttgggaatccaatgcaatcttacgtgaaccagcagcaactatctgacaatgttttctcctccaggaccaaggaggagcctagagatgacatgttccttgagtctctactatgctgaaggaattttttttttccctttttggtagctatggaaggttggaaattttggaagtgggggactaggatttattggacaaataaggttccattcgatttattgcattttttggtttgttttgttgtaaattttatacagccacaggattggtatagtatatactagtatttcataactgttgtatgcttttacacatggtgttggtgaaatttttttattactttggggtttctcttttagttgggaggagaacctcatattaatcttttgtaagattctgttgatttttttcctgtcttcacaattgttcactaccaaaatagtattgtttcataagaaatgtgattttttttgttaaaaaaaaaaaaa

SEQ ID NO: 3714 - DNA, 1683 bp, Glycine max
taaagctttccatttcttagtttcaaaaaattttcgttttctctccacagacccctctcatggcatcttcttctggtagtttagacacctctgcaagtgcaaactccttcaccaacttcaccttctccacacaccctttcatgaccacttctttctctgaccttcttgcttctcccacagacaacaacaaaccaccacatggtggtggtggtggtttgtctgagagaactggctctggtgtccccaaattcaagtccacaccaccaccttctctgcctctctctccccctcccatttctccttcttcctactttgctattcctcctggtttgagccctgctgagcttcttgactcacctgttctccttaactcttccaacattctgccatctccaacaactggagcatttgttgctcggagcttcaattggaagagcagttccggggggaaccagcgaattgtcaaagaagaagacaaaggcttctcaaatttctctttccaaacccgatcaggacctcctgcttcatccacagcaacataccagtcttcaaatgtcacagttcaaacacaacagccatggagttttcaggagaccacaaagcaggataatttttcttcaggaaagagcatgatgaaaactgaaaaatcttcatccatgcaaagtttttcccctgagattgctagtgtccaaaataatcatagcaatgggtttcaatcggattatggcaattaccccccacaatctcagaccttaagcagaaggtcagatgatgggtacaattggaggaaatatggccaaaaacaagtgaagggaagtgaaaatccaagaagttattacaaatgcacataccccaactgccctacaaagaagaaggttgagaggtctttagatggacaaattactgagatcgtttataagggtactcataaccatcctaagcctcaaaatactaggagaaactcatcaaattcctcttctcttgcaatccctcattcaaatcccatcagcgctgaaatcccagatcaatcctatgccacacatggaagtggacaaatggattcagctgccaccccagaaaactcatcaatatcaattggagatgatgattttgagcagagttctcaaaagtgtaaatcaggaggggatgaatatgatgaagatgaacctgatgccaaaagatggaaaattgaaggtgaaaatgagggtatgtctgcccctggaagtagaacagtaagagaacctagagttgtagttcagacaaccagtgacattgatatcctagatgatgggtatagatggagaaaatacgggcagaaagtagtgaagggcaatccaaatccaaggagttactacaagtgtacacacccaggatgtccagtgaggaagcatgtggaaagagcttcacatgacctaagggctgtgatcacaacctatgaggggaagcacaaccatgatgttcctgcagctcgtggcagtggcagccattctgttaacagaccaatgccaaacaatgcttcaaaccctaccaacactgcagccactgccataagtcccttgcaagtgatccaacacagtgacaattcccatcagaaccaaagatctcaagcaccaccagaggggcaatcacccttcaccctagagatgctacaaagtccaggaagttttggattctcagggtttg

SEQ ID NO: 3715 - DNA, 702 bp, Glycine max
gctggtcaaggcttcaactggaagagtagttatggggaaagccagcagcatgtcaaagaagaagacaagagcttctcaagtttctcctttcaaacacaaacacaccctcctcttccatcttcaaatggatttcaatcttcaaccggcatagttcaaaccggatggagttttccagaaactgctaaacaggatggttttgcctcaagaatgagtatgagcatggggaaaactgaaaccacttctgccatgcagagtttgacccctgagaataataaccacaggaatggttttcaatcagatcataaaaactaccaaccacaacaagttcagaccttgagcagaagatcagatgatgggtacaattggaggaaatatgggcaaaagcaagtgaaaggaagtgaaaatccaagaagctactacaagtgcacataccccaattgtccaacaaagaaaaaagttgagaaatccttagatggacatattaccgagatagtttacaaggccactcataaccattccaagcctcaagctgccaagaggaactcattgtctgcctcatcatcacttgcaattcctcattcaaatcatggcagcaatgaactaccacatcatcaaatggatttgggtgccacttctgaaaattcatcaatttcaatggatgatgatgattttgatcatactaaatcaggaggagatgagttt

SEQ ID NO: 3716 - DNA, 1463 bp, Glycine max
cttgtgatctctccgtaggacaataccatgcctcttggtcctttctctaatccaaatatctctccgttaatgctctcaccacaaacttcaatagactagccaaaagctaacaccaactataggccaaatcaccaataaatattatttcccgttcttttggcgtgttggccacccactgaacacatttgcactcacacatagaagcagagagaggccattggttggtttcagagatgggaagcatgcacatagaaaccccagaaacttttgctgatggtagcaaaaacttcgatgatgatggacgagctaaaagaactgggacttggattactgcaagtgctcatatcataacggctgtgattggttctggagtgctatctcttgcatgggcaattgcacagatgggttgggtagctggtcctgcagtgctctttgtcttctctttgataacatacttcacctccactcttctcgctgactgttaccgttcacctgaccctgtacatggcaagcgaaactacacatattctgaggttgtcaaagccaacctaggaggaagaaaatttcagctgtgtggattggctcagtatataaatcttgttggtgtaacaatcggctacactataactgcatcacttagtatgggggcggtgaagaagtcgaactgtttacacaaacatggccatcaagacgagtgcaaagttaaggacaacgcttttatgattgcttttgcctgcatccaaattcttctaagccaaataccaaacttccataagctctcttggctctctatcgtagcagctgttatgtcttttgcttattcttccattgggcttggcctttccatagccaaaatcataggtgggggacacgtgcgaacaaccttaacaggggtggaagtttcgggaacggaaaaggtttggaaaatgtttcaagctatcggtgacattgcctttgcttatgctttttctaatgtcctaattgagatccaggacacactgaaatcaagcccacctgagaacaaagtcatgaagagagcaagtttgattggcattatgactacaacattgttttatgtactatgtgggtgcttaggctatgctgcatttggaaatgatgcaccatctaatttcctcacaggattcggcttctatgagcccttttggctaatagactttgccaatgtctgcatagcagtgcacttagttggggcataccaggtctttgtccaacctatatttgggtttgtggaaaagtggagcaaagaaaattggacagaaagccaatttataaatggcgagcatactttgaacattcctctatgtggaagctacaatgtgaacttctttagggtagtgtggaggactgcatatgtgattatcacttgccgtgtaactatggtaacttcccatttttttcccttaaatgacctttttggccctttattggtagcactctttttt

SEQ ID NO: 3717 - DNA, 676 bp, Glycine max
ggggcataccaggtctttgtccaacctatatttgggtttgtggaaaagtggagcaaaggaaattggacagaaagccaatttataaatggcgagcatactttgaacattcctctatgtggaagctacaatgtgaacttctttagggtagtgtggaggactgcatatgtgattatcactgccgttgtagctatgttactcccattcttcaatgactttttggcccttattggtgcactctctttctggccattgacggtttacttccctatagagatgtacattaagaagtcaaatatgcaaagattttccttcacctggacttggctcaagatattgagttgggtttgcttgatcatttctattatctcacttgtgggttccatccaaggcctttcggttagtatcaagaaatacaagcccttccaagcagaacaatagaactttcatacttagtattccaacttgagccaagagtttctattgagggcgacaaaatttgtattactatgttttgaaatagttgttatattttcaattctcgaaatcgagacaacttgttatactaaagtaatataataaaatgtttagtttgctatgttacatggttttcttcttggtagctgtttttttttcttttttgttaggttatgtttagattgatggaagaggatggaat

SEQ ID NO: 3718 - DNA, 629 bp, Glycine max
ctcgagccgccggatattacgtccttgggggcacgcaatcattcgtgaatcccattattttccagatgctatcacaaccattggtaagggtatgcgttgggaatgtcgtaaagaagatactgacaatggcagtgacatgcagaagatattagtatgccagaaaaagctatggtactcatccaaccagggttcaagatgacaaactatggaacttaagccatgtaactggtaagatggtggtggttagagtagtagtatagtgaagtagaagcaaagggaagcgaattcagagatgctctgggcatatattgacccaaattctataatataatgcgccaagaatcagccaagttcaaatttgtcaaaagaacaaggggtaacccactaatctgattttgttaatttatagagaaaaaaaattcatatatacataatatatatatcgcattcccatgagtgctgccatttgaaggacagtgatatttttgtacagaattgttttacggagaatagctctgcacttgtattaatgctgagcatgatacagcaatagtctgatctttattgccaagtttcaatgattgtttttattgaattgggaaatgaccttttggtaaagtggagaattt

SEQ ID NO: 3719 - DNA, 397 bp, Glycine max
gacactattcctgattccgaatccgagaacgtggttgtgacaggatcattgagctcggcaagaatggaagaacacaggttgagcttgagaatgagcacgcttgtcttcactctttccattatcatcatcgtactctcttacccagcacaaccacttgcgttgaaccattctccgaaattcctaggaaaattcgcagcaacagcacgaacccattcaaattccgagccaccgccgcaattccactacgaaaaaagatacttccaacagcgcctcgaccacttcagcttctcggagctacccacgtttcctcaacgctaccttatcagcaccgaacactgggtgggcccacatcgcctgggcccaattttcttctactgcggcaacgaaggcgacatcg

SEQ ID NO: 3720 - DNA, 535 bp, Glycine max
tggttatgcagggtaaatccagtgattttgctaagcatgctcttccttccacacgcaaacaacgcatactggttaccttcacaaagtcccaaccaagaaagtcactatcaagtgatgctcaacagcttgcctcggcagtagcatcttctcattggggtccaccgccaagccgatctcccaatcatgttcgtcatcacgtaggccccaagcattacgctacacttccaacaactggggtactgccagctccacccattcgaccacaaatggcagctcccgttggcatgcaaccattgtttgttgctgctccagttgtacctcccatgccattttctgcacctgtgccaatcccagctggttctaccggatggacagctgcacctcctccaaggcatcctcctcctcgagtccctgctcctggaacaggagtcttcctacctccatcgggctcaggtaattcatctcaacagttaccagcaagtactttggctgaagtgaacccaagcacggaaactccaaccatgccggagaagga

SEQ ID NO: 3721 - DNA, 979 bp, Glycine max
gagaaggaaaatatgtgagctgagatgttccaagacaattaattcatggcactatggtaaatgtgagacagaaaatcctagctgatgcatcgggtgctttgtctcgagcagtttgcattgctacaagatatagtgctgttagaagacagtttggatcacataatggaggtctagaaacacaggtgattgattacaaaacacagcaggctaggctcttccctttgctggcttctgcttatgctttcagatttgtgggtgagtggctgaaatggctttatatggatgtgacgaaaagattgcaagctaatgatttttcaacattacctgaggctcatgcatgcactgctgggttgaaatccttgactacttcagcaactgctgatggaattgaggaatgccgcaaactatgtggtggccatggttacctttgcagcagtggtctccctgagttatttgcagtctacattcctacctgcacatatgaaggagacaacactgtgctgcttttacaggtggctaggcatctcatcaagactatttctcagttgggctccagaaataagcctgttggtactacagcttatatggctcgagtggaacaactgatgcaatatcactctgatgttcaaaaggctgaggattggttgaagcctaatgtagtgttggaagcatttgaagctagggctgctaagaaggtggttgcttgtgctcaaaatcttagcaagtttaccaatcccgaagaaggtttccaagaattctctgtcgatctagttgaggcagctgttgctcattgccagttaattgtggtttccaagggagcccggtcccgcaacaacttcgtaatgcactctaaaataacttataactgcactgttgatcctggagaaagttatgaattgctttcaatttaaagacggtaataaagttctacgaaagtgaaacgaagttgacatcaataaaattatgtcatggaagttat

SEQ ID NO: 3722 - DNA, 578 bp, Glycine max
ttttgcacgtatgaaggagacaatgttgtgcttctgttacaggtggcaaggcatctcatgaagactgtttctcagctgggctctggaaataagcccgttggtactacagcttatatggctcgagtggaacaactgatgcaatatcactctgatgttgaaaagggtatagtgaaattggagactatgccaactctaaccacataagtttcacgatatccaaatcaaatatggtgtcagttaatactgctagtactaaccatgcctgtgtcctttatgagttgtaatactatacttgtttttattccctgcagctgaggattggttgaagcctaatgtagtgttggaagcatttgaagctagggcttctaggatgtcagttgcttgtgctcaaaatcttagcaagtttgctaaccctgaagagggttttcaagaactagctgctgatttagttgatgccgcggttgctcattgccagttaattgttgtttccaaatttattgagaagttgcagcaagatatacctggaaagggaggaaaaagcaattagaagttctttgcagcatttatgctttgtttct

SEQ ID NO: 3723 - DNA, 1821 bp, Glycine max
cttttaaaacccccacttctccctcccctctctcctcataacatctcacggacgcgtgggctcttcttccccaccatcacaccaaccaaacctcactctccctgccatggtcatgggagcctttcgccacttcgaaccggtttccaaatgcagcaccgaaaaccggtttaaccaaaccgtggcctcggacttggacggcaccctcctggtgtcccctagcgcctttccttactacatgctcgtcgccatcgaagccggcagcttcctccgtggccttgtcctccttggatccgtccctttcgtgtacttcacgtacatattcttctccgagaccgcggccatcaagtccctgattttcattgccttcgcgggcctgaaggttaaggacattgagatggtcgcgtcctcggtgctgcccaagttctacaccgaggacgtgcaccccgagagctggagagtcttcaactccttcgggaagcgttacattgtcacggctagtcctagggtgatggtggagccgtttgttaaggcgtttctcggggctgacaaggtgcttgggactgaacttgaggccaccaaatcggggacgttcactgggtttgttaaggagcctggtgtgcttgttggggagcataagaaagtggctctggtgaaggagtttcagggtaatttacctgacttgggtctaggtgatagtaaaagtgattatgacttcatgtcaatttgcaaggaagggtacatggtgccaagaactaagtgtgaaccactaccaagaaacaagcttttaagtccaattatttttcatgagggtaggtttgctcaaaggccaactcctctagctgccctcttgaccttcctatggctgccaattggcatcatactctccatcttaagggtctaccttaacatccctttgcctgaaagaattgcttggtacaactacaagcttttaggaatcagagttattgtgaagggtacccctccacccccaccaaagaagggccaaagtggagtcctatttgtttgtaaccacaggacagttttagaccctgtggttacagctgttgcatttggaagaaaaattagctgtgtcacatatagcataagcaaattcactgaaataatttcaccaattaaagctgtggcactctcaagggaaagagagaaagatgctgccaatatcaagagactacttgaggaaggggacttggtgatttgccctgaaggcacaacttgtagagagcctttcctcttgaggttcagtgcactatttgctgaactcactgataggattgtcccagttgctattaacacaaagcaaagcgtgttctacggaaccacggttcgcggacacaagttgttggacccgtactttgtgttcatgaatccaatgccaacatatgagatcactttcttgaaccagcttcccaaggagctcacatgcagtggagggaaatcagctattgaagttgcaaactacattcaaagggttcttgcagggactttgggatttgagtgcacaaatttgactaggaagagcaaatatgccatgcttgcaggcacagatgggacagttccatctaaggagaaggcttgaaaagggagagataaattaagtcctcccttttgattattctgtattggtgcccaatgtgtttccaaaacacttagaattatgatagaaataaaatctgatcactggccggaaaaaaattacagtttatgtatattttgttgttctgatatatacaaatcataacgactgttattgggtcattcctgaaaaaaaaaaaaaaaaaaaaaaagggcggccgccgacta

SEQ ID NO: 3724 - DNA, 284 bp, Glycine max
caaccctcttcttccccaccatcacaccaatcaaacctcactctccctttctcccctgaccctctccctgccatggtcatgggagcctttggccacttcgaaccggtctccaaatgcagcaccgagaaccggtctaaccaaaccgtggcctcggacttggacggcaccctcctggtgtcccccagcgcatttccttactacatgctggtcgccatcgaagccggcagcttcctccgtggccttgtcctccttgcctccgtccctttcgtgtacttcacgtacat

SEQ ID NO: 3725 - DNA, 414 bp, Glycine max
atgacttatttaattccgattcttcagattcctttgtctccgcagattcttaatctattcctgacaaaggattgccaacctgaatgtgaataattttgcatgaactgggttggtttaccaagttgcttaagggctctgatcataaaattttacgaggacaataccatggcaaatatggagaggacagaatttgggataatcatcatagttcaatggatgatttgactgatattgagaaagaagacattgaccgtgcaattgcactttctctgtcagaggaggatcataaagggaaaaaagttgttgatgaggaactttgtaaaattgatgatgatgaggaggatgaacatcttgttaaagttcatctagatgaagatgaacgtcttgctaaaattcagcaagaagaagaagaac

SEQ ID NO: 3726 - DNA, 364 bp, Glycine max
tcgatttctttgtctccgcagattcttaatctattcctgcacctctctacacacaaatacacaaatgttggacatatttaatgagagcgtgagagcgtgagaggtgagacaaaggattgccaacctgaatgtgaataattttgcatgaaatgggttggtttaccaagttgcttaagggctctgatcataaaattttacgaggacaataccatggcaaatatggagaggacagaatttgggataatcatcatagttcaatggatgatttgactgatattgagaaagaagacattgaccgtgcaattgcactttctctgtcagaggaggatcataaagggaaaaaagttgttgatgaagaactttg

SEQ ID NO: 3727 - DNA, 2519 bp, Glycine max
ggagccgccgccgcactgtggttttgcgtttctgaaagtggagagaaccctagaaaccaaactgtgctgtgcttcctacagtcatggcggacgtcatgattatgaaggagatcgaggacacgtcgcttcgtctcggcgtcgatctctccactctcgatctcgacgccattcgcctccctaccggcgaagattgcggcatcgtcagtgatgacgaggaggtttaccaggaggagaatctcgagtttgagtctggatttggtaacatcattgtcgtggataacctccctgtcgttccgagggagaagttcgagaagctcgaaggagtggttcgcaaaatttatagtcaaattggtgttatcaaggaggatggcctctggatgccggttgatcctgaaaccgagaaaaccctaggttactgcttcattgagtacaatacccctcaggaagctgaacttgctaaagagaagactcatgggtacaaattggaccgggcacacatatttgccgtgagcatgtttgatgactttgacagattcatgaaggtgcctaatgagtgggctcctcctgaaactaagccatatgctccaggggaaaatcttcaacactggctcactgatgcaaaggccagggaccagtttgtgattcgtgctggttcggatactgaggttttgtggaacgatgccaggcatttaaagcctgatcctgtttataagcgtgcattttggacagagagttttgtgcaatggtctcctttggggacatacttggccactgttcacagacagggggcagcagtctggggaggtgctgcaagctttaatagacttatgcgatatgcacatcctcaggtaaaacttattgatttttcgcctggtgagaagtatttggtaacatatagcagccatgaaccaagcaatccccgagatgccaatagagttgtgataaatatatttgatgtgaggactggtaaagtgatgagggacttcaaagggagtgctgatgattttgcagttggaggtgctgggggtgtcactggagtttcatggcctgttttcaaatggagtggtggaagagatgatcaatactgtgcaaggatggggaaaaatatactctccgtttatgaggcagagaccttttctcttgttgacaagaaatctttaaaggttgaaaatataatggatttctgctggtctccaactgatccaattattgctctttttgttcctgagatgggaggcggtaaccagcctgccagggttagtctgattcaaatccccagcaaagaggaactcaggcagaagaaccttttcagtgtcagtgactgcaagatttactggcaaagcaatggagactaccttgctgttaatgtagagaggtacacgaaaacaaaaaaaagcacatacacaggctttgagcttttccgtataaaagaacgggatataccaattgaagttttggagcttgagaataagaatgataagatcattgcgtttgcttgggagccaaagggtcacagatttgcagttattcatggtgataaccctaagcctgatgttagcatttattccatgcgtactggtcagaacagccgagtttcaaaactcattactctgaagggcaagcaagcaaatgctctgttttggtcacctgccggtcgctacattgtactggctgggttgaaaggcttcaatggacagttggaattttacaacgttgatgaacttgaaaccatggctactgctgaacattttatggcaacagatattgaatgggatccaactggaagatatgttgcaactgcggtgacttcagttcatgaaatggagaatggtttcaatatatggtctttcaatggcaagcatctatatcggattctgaaggatcacttctttcagttcttatggagaccaaggccaccatctttcttgactccggagaaagaggaagagattgcaaagaacttgaagaaatacagcaagaaatacgaggcagaagatcaagatgtttccttgctgctgagtgaacaggagcgtgagaagcgcaggatgttgaaagaagagtgggacaagtgggttaatgaatggaagcagatccacgaagaagagagtttacagaggcaaaagctcagggatggagaggctagcgatgaagaggaggaatacgaggcaaaggacatcgaggtggaggaagtgatcgatgtaacaaaagaggtccttcaccttgagtatggtcaagagtgagttttttagctgggaggccttggattcgaacattttattcacttgtcgaggtatagttgttgggcagcttacttcgatttcatctttgtaagacccgattttgtaatctttcattagttttgtttttttcgtattgtcaaatttaacgtgaaagacatttttgctgcctccttgggcgggaagtgttcactcatattcctcgcttccttcgcgctaacaacatgcctgaagaaatgtggagttagattattattattattattatatgtgggtttgtgc

SEQ ID NO: 3728 - DNA, 483 bp, Glycine max
cagaatccttacacaccatgtgacacatcttttttgcgtttcagaaactggagaaaaccctagaaagcaaaccctctctcgcaccgccatctgcctccataacgataacactgtgcttgctacagtcatggcggacgtcatggtaatgaaggagatcgaggacacggcgctgcgtctcggcgtcgatctctccactctcgatctcgacgccattcgcctccctcccggcgaagattgcggcatcgtcagtgatgacgaggtggtttaccaggaggagaatctcgagtttgagtctggatttggtaacatcattgtcgcggataacctccccgtggttccgaggggagaagttcgagaagcttgaaggaatgggtcggaaaagttatagtcaaaatggggttatcaaagaagatggcctctggatgcccggtggtcctgaaaccgataaaaccctaggttactggttcattggatacaataccc

SEQ ID NO: 3729 - DNA, 483 bp, Glycine max
aatttctcttgccaaggagccaaaagcagaacgtttgtttcacatgtaaggcacatgctacggtggtcaagtgtgtaaacttgtgtatggtatacaaatttttttaaccctcagattactcttttggtacatcatactatcttgaacttctcacacaatatccttcctctatacaaaggaaaacgttcatgaacccatttagagaccttggattgcgggaaagccttcgtcggactcggaaagaactaccctctcgctttcgtccacaatctcaattctccgtcgcggaaaccaccgttgccgccatcaccggcgtcaccaccaccgaccgtgaccgcgccatcatcgggtttatgccaccatcgccgcctcattcctccgccaatatcttcttcgcctcccactcctgctccggcgtggcgccgacgccgtcgtgtctactgctcttctgtgacttgaacattgaccagaacgacctcgccg

SEQ ID NO: 3730 - DNA, 695 bp, Glycine max
gagaagaaagcataagatatggcaatgctcgagcggctcgagcgttcacataccacgtagaaacggttcaatcatggttggcactgagcagacttcacatactgatccacttagtggcagtgttgtcgctgtgttactaccgcataactcacttgttactggaacctccaacagcgccatggcttctgatgaccgtagcggagcttcttctctcggtgctctggttcttcaaccaagccttccggtggcggccggtgtcgcggagcgtcatgacggagaagctgccgagggatgagaagctgccggggcttgacatcttcgtgtgcacgctggatcccgagaaggagcccaccgtggaggtcattgacaccatcatctccgccgtgtccatggattacccctccgacaagctttccgtctatctctccgacgacggcgggtgcgacgtgactctctatgggatccgagaggctgctgagttcgccaaggagtgggttccgttctgtaaaaagtatggcgtgaagtcaaggtgtcccaaagtcttcttctctccctttggggatgaggatcaagagactcttcgggacgatcaattcagaacacagagagacctcgtcaaggctaaatacgagaaaatgcagaaaaatatcgagaaatttggttcagaccctaaaagtcgtcgtactgtgagtgac

SEQ ID NO: 3731 - DNA, 383 bp, Glycine max
ttcacttgtccgcccacgcgtccgccaacgtaagatatggcaatgttcacgtaccacgttgaaacggttcaatcatggttggcactgagcagacttcacatactgatccacttagtggcagtgttgtcgctgtgttactaccgcataactcacttgttactggaacctccaacagcgccatggcttctgatgaccgtagcggagcttcttctctcggtgctctggttcttcaaccaagccttccggtggcggccggtgtcgcggagcgtcatgacggagaagctgccgagggatgagaagctgccggggcttgacatcttcgtgtgcacgctggatcccgagaaggagcccaccgtggaggtcatggacaccatcatctccgc

SEQ ID NO: 3732 - DNA, 506 bp, Glycine max
atcaagagtacataaagtcatattcattatctgaatcaggtccatggagatcatttacagggctaggtgcttctgaaatttgcaaggttgaagaacttgagtatgcagagctaccaggctctggggatagctgttgtaaacttaaacttagatttctagatccttcttcgtgtgtgcatggcaaatcgtttaaattaactctacctgaattgattaacttcactgattttgttattgagaaaacatggtatgatactgccatgaagagaaattggtcgtcaagagataaatgcatgggctggtggggaaatgaagatgggaaaggtatcgggtccagtacaagactgatcccaccgagaatcatctgcaaaggccgtgggaactatatggttctgagatgctatgggagcatccccacattgatcatgagatcagagataagctgctttcctaattcaccaaattagaccgcagggagaggtttgatatccaagcactggaccaag

SEQ ID NO: 3733 - DNA, 1069 bp, Glycine max
ctcttccacatatttctctaaccagtaagttatcttctagtatttttcaagtaacttaaggtttcaaacctaggaagttggaagtcatggcagcaacattgatggcagcaacaacaagttctggtactcttaaagcaactcctttccttggccaaggcaagggtgccaatgccaatgctcttagggatgttgtctccatgggaactgggaagtacaccatgggcaatgatttgtggtatggaccagacagagtgaaatacttgggacccttctcagctcagaccccttcatacttgaaaggagaattccctggggattatggatgggacactgctggcttatctgctgacccagaagcatttgccaagaacagggctcttgaggtgatccatgggcgatgggccatgcttggagcactaggatgcatcaccccagaggtgctagagaagtggttgagagtggacttcaaggagccagtgtggttcaaagctggagcccaaatattctccgaaggtgggcttgactatttggggaacccaaaccttgtccatgcacaaagcatcctggcagtgctgggcttccaagttatcctaatgggccttgttgaagggtaccgcatcaatgggcttgatggggtgggagagggcaatgacctctaccctgggggccagtactttgacccactgggccttgctgatgacccagtcacttttgctgagctcaaagtcaaggagatcaagaatggaaggctggccatgttctctatgtttggattctttgttcaagctattgtcactggaaaaggcccattggagaacctcttggaccaccttgacaaccctgtggctaacaatgcttgggtctatgccactaagtttgccccaggatcttaaatgtatatgacttcttcttccctaatccctatgatcccatccctcgtgcttacctttgtgatttatgtgtagattatatgatcacaataattgttggattagtgtacttcttaaggactaaggttcaatttaaacctcggatgtctcttgtttgttaatatagttttgtctgaagc

SEQ ID NO: 3734 - DNA, 277 bp, Glycine max
ctatttttcaagtaacttaaggtttcaaacctaggaagttggaagtcatggcagcaacattgatggcagcaacaacaagttctggtactcttaaagcaactcctttccttggccaaggcaagggtgccaatgccaatgctcttagggatgttgtctccatgggaactgggaagtacaccatggtactcttcttcttcctgttttatgttttactatcacaaaagttttatggtgttgattacgtagtgtggttgatatgttatgtgggtctgtgttt

SEQ ID NO: 3735 - DNA, 883 bp, Glycine max
cgcgcgtacgtaagctcggaaggagaaggaaaggaaagggaagccaaagcgaaaccctaaccctaacggagagatggcggagcacttggcatcgatattcgggacggagaaggacagggtgaactgtccgttctacttcaagatcggcgcgtgcaggcacggcgaccggtgctcccggcttcacacgaagcccacaattagcccaacgttggttctgtcgaacatgtaccagaggcccgacatgaacatgaacatcatcaccaaccccgatcagccccagccccaatctctcgaccccgataaggtccaggatcacttcgacgacttctacgaagatctctttgaggagcttagcaagtacggccccattcagagcttgaatatttgcgacaacctcgccgatcatatggttggaaatgtgtacgttcagtttagggaggaagaccatgcagccaacgccctcatgaatctcactgggaggttttattcaggtcggcccatcattgttgatttctcgcccgtgacggatttccgagaagctacttgcaggcagtatgaggagaatacttgcaaccgtggtggttattgcaacttcatgcacttgaagagaattagcagggaattgaggcgtcagttgtttgggaagtcccatggaaggcacagcagaagcagaagcaggagtccttacaggcatcgaagccatgaggagcggtctcatcgaagtcatagcagaaagtatgatgacagggaccaccatcatgagagtcgcagcaggagacacaggagcacaagtcctagacataggagaggacgaagtcgcagccgaagtcctggagggaggaggcaccatagtccggttagagatggcagtgggagagacgtg

SEQ ID NO: 3736 - DNA, 827 bp, Glycine max
agacgtatgacgcaccctgcccgcatacgtaagctcggaatgagggtcgagccttcaccatcccggattctccctgccactacaaattcccaacttcgcaaaccctaggcagcagcagcagcagcaacaacaacagcaacgaagaattcgaagagaaatcaaatcgaatctcatttgatctgtgtgtggttgcggcggcggcaatggcggagcacttggcatcgatattcgggacggagaaggacagggtgaactgcccgttctacttcaagatcggcgcgtgcaggcacggcgaccggtgctcgcgtctccacacgaagccgagcataagccccactattctcctctccaacatgtaccagcgccctgacatgatcacccccggcgtcgacgcccacggccaccccatcgaccctcgcaaaatccaggaccacttcgaggagttctacgaagacctcttcgacgagctctccaagtacggtgatatcgaaagcctcaatgtctgcgacaacctcgccgaccacatggtggggaatgtgtacgttcagttcagagaggaggagcatgccgctaatgctgttaggaacctcactggaaggttttatgcaggtcggccaattattgttgatttttcgccggtgacggatttccgagaagctacttgcaggcagtatgaggagaatacttgcaaccgtggtggttattgcaacttcatgcacttgaagagaattagcagggaattgaggcgtcagttgtttgggaagtcccatggaaggcacagcagaagcagaagcaggagtccttacaggcatcgaagccatgaggag

SEQ ID NO: 3737 - DNA, 389 bp, Glycine max
tgccactacaaattcccaacttcgcaaaccctaggcagcagcagcagcagcaacaacaacagcaacgaagaattcgaagagacatcaaatcgaatctcatttgatctgtgtgtggttgcggcggcggcaatggcggagcacttggcaagagttcttgcaggttctatctttcaatattgttttctcttttgttttcattcattgctgtttatttcttcagaggtggtgtcagttcttcattcacttccccgccattcacagattacaaaataggcttacagcattatagctaatatagtccttacagcaatgtcccttttctcaaccggttaattattaacattccaacgtatgttgctcttgtatgcttgttactgtggttgatttgc

SEQ ID NO: 3738 - DNA, 1249 bp, Glycine max
  unsure (1)..(1249): unsure at all n locations
ggacgaaaccaaacgtatcaataacacaacattgctgaagaagttgaaaggtcgcatccttccttcattcgtttcgttgagttgaaaactctttttccacattcttttatttcttgtctcacccgcaccatgcaagtgtgccaactactgtgattggtatggcgacacgtgtcccttttgttttgtgcgcagcaccacttctcccaaccactgccttaaatactgcgtggtggcaccgtcacttcctctaccggtttcttcctcctcattaagccgccactttctctctctttccttttcgtcttctttttcttcttcgttgggtttgttgccacttagtaagaaagagggtgtgaagagagtggggagaagatttggtgttgtggccatggcggagtctaagagtactgtgcttgttacgggagcgggtggtcgcacaggacaaatagtttacaaaaaattaagagagaggccaaaccaatatgtggctagaggtctggttagaacagatgaaagcaaacagaacattggtgctgcagatgacgttattgttggggatataagagatgctgaaagtattgttcctgcaattcaaggtatagatgccctcataatcctcacaagtgcagttccacagataaagcctggttttgatccaaccaaaggacaaagaccagagttctattttgaggatggggcatatcctgaacaggttgactggattgggcagaaaaatcaaatagatgtcgccaaggctgctggagtgaagcacattgtgttagtagggtctatgggtggaacagaccttaaccatcctttgaacagcttgggtaatgggaatatattggtttggaaaaggaaggctgagcaatatctggctgattccggcatcccatatacaattataagggctggtggcttgcaagacaaagatggaggtcttcgggaactacttgtagggaaggatgatgagcttctccagactgaaaccagaaccataagtagatctgatgttgcagaagtctgcattcaggcactaaattttgaggaggctaaattcaaggcatttgacttggcatcaaaacctgagggagcaggttcagcaacaaaggatttcaaggctttattttcccagatcaccactcgcttttgatttttgaatgttgttgtcatggtcccaaaatccttgtggattgaaccatatgggtattagtgctatctgaaacaaaatttaattntagtaaaggat

SEQ ID NO: 3739 - DNA, 439 bp, Glycine max
atataatagcccaggaatagaaaattccaacagcaccgtcacttcctctaccgctttcttcctcctcattaaggcgcaactctctctctctctttctttttctttgttaggtttggtgacacttagttagaaagagcgtgcgaagagggtggggagaagatttagtgttgtggccatggcggagtctgagaagagtactgtgcttgttacgggagccggtggtcgcacaggacaaatagtttacaaaaaattaaaagagaggccaaaccaatatgtggctagaggtctggttagaacagatgaaagcaaacagaacattggtgctgcagatgacgtttttgttggggatataagacatgctgaaagtattgttcctgcaattcaaggtatagatgctctcataatcctcacaagtgctggtccacagataaaacctggg

SEQ ID NO: 3740 - DNA, 656 bp, Glycine max
cgcgattccattttcactcggtcccgttgtgtgtgcgcagaataaaatttctcatcgacgatggcgaataccttacaacgcgcccttcgcgccaccatggcccggccgttctccaccggcgcattggccgaaattaagcgaggcgagatcggaatggtttctggaattcctgaagaacaccttcgtaggagggttctaatttactctcctgctagaactgcatctcaacaaggatctggaaaggttggaagatggaagatcaacttcttatcaacccaaaagtgggaaaatccactgatgggctggacatccactggggacccctactctcatgttggtgattctgccttgacttttgatagcgaacaagcagcaaaagcatttgcagagaaacatggttgggagtattcggtcaagaagccccacacaccattgctgaaggttaaatcatacgcggacaattttaaatggaagggcccccccaaatctggtgaagagtgatttgttggtttgtattcatgttaatgcattccgtcttctggagtttaacgtgcagcagttttctctgcatcttttcttggaaaaaagaaagttttaatgtgaattactgattggaaataaaagggactgatctgccatttatttaagtttcttct

SEQ ID NO: 3741 - DNA, 3132 bp, Glycine max
tttttgttatcttaaaaagaaaatattgtgctggaccaataatacaattcggtgcatgatcaatttttttggttcttgatttccttcttttctcttggtttgtgttgtcgttgagaagtcgcacataatcttcttccttctcgattttcctctccttcgacgattcttagggtttcgcttcgttcaccaacgcgcgtggtttctcttctcttcacgattttggggtcgaaatttggagtttagtttgccggcatgtccatgagtgagcgcaagactattgacctagatcaaggatgggattttatgcagaagggcattttgaagctgaagaacattctagaagggcttcccgagcctcagttcagctcggaggactatatgatgctatacacgaccatatacaatatgtgcactcagaagcctcctcatgactattcccaacaactgtatgacaagtacagggaatcgtttgaagagtacatcgtatcaacggtattaccttctttgagagagaagcatgatgaatttatgttaagagaacttgtgaaaaggtgggcaaaccataaaattatggttaggtggctttctcgtttctttcactacttggaccgctactttattgcccggaggtcacttccgccacttaatgaagttgggttgacttgcttccgtgatttggtttacaaggaattaaacgggaaagtgagagatgcagtgatttcccttattgatcaagaacgtgaaggagagcagattgaccgagctttattgaagaatgtattagatatatttgttgaaattggaatggggcaaatggatcactatgagaatgattttgaagctgccatgctcaaagacacttctgcttattattctcgaaaggcttcaaattggatcctagaagattcttgtcctgattatatgctcaaggctgaggagtgcttaaaacgggagaaagatagggttgctcattacttgcactctagtagcgagccaaagttattagagaaagttcaacatgagttgttatctgtgtatgcaaaccaactccttgagaaagagcactctggatgtcatgctttacttagagatgacaaggttgaagacttgtcaagaatgttcaggctcttttctaaaataccccgaggtttagatcctgtttccagtatatttaaacagcatgtgaccgctgaaggcatggcattagtgaagttggctgaagatgcagtgagtaccaagaaggcggagaaaaaggatattgttggtttacaggagcaggtttttgttcggaaggtgattgagctgcatgacaagtacctggcatatgtgaatgattgtttccaaaatcatacacttttccacaaggctcttaaggaggcttttgagatcttttgcaacaagggtgttgctggaagctcaagtgcagaactgcttgccactttctgtgacaatattcttaagaaaggaggaagtgaaaaattgagtgatgaagcaattgaagaaactcttgaaaaggttgtcaagttgcttgcctatattagcgacaaagatttgtttgctgaattttataggaagaagcttgctcgaaggctcctttttgacaagagtgccaatgatgatcatgagagaagtattttgacaaaactgaagcaacaatgtggtggtcaatttacctcaaagatggaaggaatggttacagatttgacattggcaaaggagaaccaaacaagctttgaggagtatttaaccaataatcctaatgcagaccctggaatagacttgacggttacagttttgactactggcttctggcctagttacaaatcttttgatctcaatcttcctgcagaaatgattaggtgtgttgaagttttcaaagaattttatcaaactaaaactaagcacaggaaacttacatggatttattccttgggtacctgcaacattagtgggaaattcgatccaaaaactgtggagctgattgtaacaacttaccaggcttcggcattgcttctatttaattcctcagatagactgagttattcggagataatgactcagttaaacttatctgacgacgatgttattagactgctccactccttgtcatgtgccaagtacaagattcttaacaaggagccaaatacaaaaacaatatcttctaccgactattttgaatttaattcaaaatttactgacaaaatgaggagaatcaagattcctcttcctcctgttgatgagaagaaaaaagtaattgaggatgttgacaaggacagaagatatgctattgatgcctcaattgtgcgtattatgaagagtcgaaaggtgttaagttaccaacagttagtaatggagtgtgttgagcagttaggtcgcatgtttaagcctgatgtcaaggcaattaagaagcggattgaagatttgatctctcgagactacttggagagagacaaagataatgcaaatttgttccggtacttggcttgatgtggtcttgacgattttgcaaaagaagtggtggttactgcattcgatacaaacagcaaaacaagagcatcatatttgaacatgcaaaatatcagtttctccatagtttccttggaaggaggagctgcgagtgcttgtacattttgcctccatatccaggtatggattacttgtagatgtgtgctcctggagaagttgtaatgaattccataagtagggccagctcactggtaccttcacttccttttccttttgattgctgcagttccatatgatgacaacttagttgatgcctgtgttaattatttcacccaacccccataaaggaaatagaaatcgtgtaacactagtttcagttaaattgtagttttattgtcgtcttcaaaaccatcaagtgaatgggtatctcaaggatttcaagattgtgcctgtcgtcattgtcgccttttatatgttcttccggtgaatgctttctgtgataatgccgagggaatggatcttatactttcacatctcgggatatttggatgtgtcacactaaggcgtgacagaataatattatactttcaagttttttttttcctgcaaaactcaaaagtatactctccctttttgtgttgtggcaatggaaacttattttgggtg

SEQ ID NO: 3742 - DNA, 780 bp, Glycine max
acgagctcgtccactgattattttgaatttaattataaatttactgacaaaatgaggagaatcaagattcctcttcctcccgtggatgagaagaaaaaagtaattgaggatgttgacaaggacagaagatatgctattgatgcctcaattgtgcgtattatgaagagtcgtaaagttttgggctaccaacaattagtcatggagtgtgttgagcagttaggtcgcatgtttaagcctgacgtcaaggctattaaaaagcggattgaagatttgatttctcgtgactacttggaaagagacaaagataatgctaatatgttcaagtacttggcttgacatggtctgagtaattgtgcaaatgaagtggttactgcaaaatcaaaacaaaaggatcatgcttgaacttgtgcaaaagaaagaaggagtttttcctaaaaattttcttgaaggaggagctgtgagtgcttgtatattttgcctccatgtagatgtgtgatcatgttgggaaattgtaatcaaaattccataatcctgctcactgatactttcaccatctttttgggttctgattgctgcaattccttctcacaatgcccgttggttatatgattcccttccctccctccccccaaaattgtgtaagcgcttcaaggaaattgtattttgattatcagcttagaaatcatcaggtgattgggtatgccttttaaatctaaacccaactgctatggctcgacattaatttgcctacgataatatttcacaacgacatttctatta

SEQ ID NO: 3743 - DNA, 422 bp, Glycine max
gaatactttccttttcccatcatcaatgctccttcttttggaccctttcttttccctccttctccttcaccaaccatttttaggcttctctcttccccccgatcgctactctttttcttctggacaattattgcttccgtcctcctgattcaatttggaattctgcctttgactgcagatttcggtgggttttaggttagcaacatgtcaatgagtgagcggaagactattgacctagaacagggatgggatttcatgcagaagggcatcaccaagctcaagaacattctagaaggcttgcccgagcctcaattcagctccgaggactacatgatgctttacacgaccatctacaacatgtgcactcaaaagcctcctcatgactattcccaacaactttatgacaagtataaggagtcttt

SEQ ID NO: 3744 - DNA, 426 bp, Glycine max
ccttccttaagctcggaattcggttcgagtgacattgctgctgaagtggtggttactgcagttgccacaaccggcaaaccaggaccttcatatttgaccatgcaaattatcagttcctccatagtttccttggaaggagggtctgcgagtgcttgtacattttgcctccatatccaggtatggattactactgtagatgtgtgcccctggagaagttgtaatgaattccataagtaggaccagctcactggtaccttcacttccttttcattttgattgctgcagttccatatgatgacaacttagttgatgcctgtgttaattatttcacccaacccccataaaggaaatagaaatcgtgtaaccctagtttcagttaaattgtagtttgattgtcgtcttcaaaaccatcaagtgaatgggtat

SEQ ID NO: 3745 - DNA, 708 bp, Glycine max
gacgaacagcaacactcgtggtcgtggccgcgaaactcgtcgtcgtgttcttgccgcacaccacttcgttgcgccatcttctttcaacaatcagccacagctcttctcccactttccctaacttcgaggccaccaacttctcatatttcaagacaaaaggaatggtgggtttatctcttggagaaacgcatttcatccaaggtggcattgctcaagatcttcgttgtgatggtagaaagagattgacatatcgaccaatctctgttgaaactggagtgattccccagaccaatggttcagcaagagtcagaatgggtgccacagatgttattgccagcgttaacggctgaacttgggaagcgcaagcttgttgcaacctgacaaaggaaaagtctctatatatgttgattgcagttcaacagcagagccagcttttgagggtagagggggtgatgagttggcagcagaactgtcaaatgctcttcaacactgtctcttgggtggtaaaagtggagaaggtgctggaattgacctctcatcgcttattgttgtcgaaggaaaaatttgttgggatctttacatagatgggcttgttgttagttcagatggaaatttgttggatgctctaggcgctgccattaacgctgctttgagcaatacaggtattccaagagtcgaagttgctgctggaacgtcaaatgatgagca

SEQ ID NO: 3746 - DNA, 250 bp, Glycine max
aacctctcttctcatccattgtctgcttcaaagttcatagccactggcactgaagcaatcgtgatttaacattttagttaaaagtaaacctaatttttgtttccctcctccactccaccgcccaccctcgttccgactatactttcactttctaatttcaccaatccaggaatgctggctctctcccctggagaaaaacatttcattcaaggtggcattggtcaagatcttcgttgtgatggtagaaaga

SEQ ID NO: 3747 - DNA, 433 bp, Glycine max
aatggaggatatgagtcttggggaccactttttggaaaggttttctttgccttctgggtcattttccatctctatccattcctcaagggtctcatgggtcgccaaaaccgcaccccaaccattgttattctgtggtcagtgttgttggcttctgttttctctctggtttgggtcaagattaacccttttatcagcagacctgacagtgcaagcatttcccagacctgcatttctatagattgctaagtcatctgcctatataaaaagttttgaccatatgttaaaaatatggatgatgatgatgattgattgtgatttgagccgcagttgaaatgtgtaagcactttaaatgtaaggttgcaaacatggttgttacttcttttccatgcattggatgaaatttcctgtgtaaagatcaaacagttggatcatt

SEQ ID NO: 3748 - DNA, 377 bp, Glycine max
aaagctccttggaaagtacctgattatttgtcatttccatttggagacatcgttcccatgtttgctggtgaaacccttgaatgggaggcattgccttgttgatttgctgtgtctatttgaaagtttggtatccttcagcttaaattattgattgctgagatgagaatttatgcagcgttcaagaactagagtcaagcaattttgttctaattttatcagtcagttctgcatttattttgcagattgttctcatttctatttcctaggtcaggtgaatttaagtatgaaccagaacacccactgtgactaataaattatgggaatttatatagtattcagagctatggtaattttgtagttctaatttgatcaatcaa

SEQ ID NO: 3749 - DNA, 1862 bp, Glycine max
  unsure (1)..(1862): unsure at all n locations
cttgagtaaaaatggaaattgcataaagggcagtgtttttcttgagacgctttctttgtattaaagtcgtatattttaatgcatgctgtcgagcttttgttactttgtgacaaatggagggtccttagttctgtttctctttcttctctctgtgctttcaaccaagttctcaaatcactcttcttcttcacccttctgatctgctaattctcaaggtattcaaaattgggtggttttcgattgaactgtgatgtccaagccactgctaggcatagcggaagaggaaggtcaaagcaatgtcactttgttggtttcttcctcagccaccatggaaagtgtgtgcctgaatagctcaaaactgaaagagcgcaactacatggggttatctgattgttcatctgtggacagctccgcgccgtccttctcagatgagactaaaagcaatctgaacctcaaggctactgagctcagactggggcttccgggatcgcagtctcccgaacgagattcagatctttgcttgagaagttcaattcagtttgatgaaaaaccactgtttcctttgcatcctgctactgatgatcaccattcctcatcaaagcctgctgttttgggtaacaaaagagggttctcagatgtcatgagtggattcgccgaggagaaattgcttgttagttctgaggtcaacacaatattgtcaccaaggccttcttctaatgtggcattgaaaccaagctctatgcttgagaatgttggggctcagcaatccaagccaaagaactcgcaacagcgaaggttggtcacgagaggtctcatgttgtcaacgaaagcagaccaaatcttaatgattctactaataacaatagcagtgcaccagctaccaaggcacaggttgttggttggcctcctataagatcatttaggaaaaattcattggccactacttcaaagaatgttgaagaagttgatggaaaagcggggcctggtgcactgtttgtaaaggtcagtatggatggtgcaccttatttaagaaaagtagacttgaagaattactctacatatccagaattatcttctgctctagaaaagatgttcagctgttttactatgagtaagtgtggatctgttttatgtggaaaaacttgacctttcaattatttatgtatgaacagtctgcctggatccagttactgcttgttttggtatgatttcaggtaacatgtggatctcatggaattctgggcagggagatgctgaatgaaaccaagctgaaggaccttcttcatggatcagaatatgttcttacatatgaggacagagagggcgattggatgcttgtgggtgatgttccctgggagatgtttattgaaacatgcaagaggctgaggatcatgaagagttctgatgccattggtctagctcncagggctgttgaaaaaagtaagagcagggcctaggcagtacctgtgttcctctctatccatctaactgtctgcggggctaaaagcttctgggctatcagggccgaacaaatcagaacatggttgtcttggaagcaagaaatgaaggcattttggactggatagaatctcatcctatgctgccttaatcctttttttttttattatgtctgtcttatgttgtcgtggagtttatgttttagtaagcttcttttcaagatgatgttaaaacttaacaaaactccaagaacttgactatgggagtcccgatattttatgtatgcgagattgagaagagttaatgttgtggttgaaggatctgctcatgtgttaattttgcagcgtaccttcaacggggtgtcctatgtttgtgtgaaaaaaaaaacaagttgtatgtcagta

SEQ ID NO: 3750 - DNA, 1595 bp, Glycine max
tacgtaatctccgcgttcggctcctcggaatttcgctcgagaagtgctatctttactttatgccccatggaaggtccttagttttctctctcttcatctcaaagtttcactctcactcttcttcttcttcttcttcatcctttctgatctgtgctgttttttcagggtacaacaaaattgggtgctttcggttaaactgtgatgtctccgccagtgctgagcataggggaggaggagggtaaaagcaatgtcactttgttggtttcctcatcaaccaccatggaaagtgtgtgtctcaagagcttagaatttaaagagcgcaactacatgggattatctgattgttcttctgtggacagctcggttccgtccttctctgaagagactaaaagtaatctgaacctgaaagccactgaactcaggctcgggcttccaggatcacagtctcctgatagagattctgatctttgcttaagaagctcaactcaatttgatgaaaaaactttgtttccgttgcgtcctttgactgatcatcaccattcttcagccaagactgctgttttgggaaacaaaagagggttctctgatgccatgaacggcttctcctcagaggggaatttcctagttgattcggaggccgccaatccgatactgtctcccaggcctgcttctaacttgggattaaaacctggttctacacttgagaaggttggagttcagcaaaccaaaatgaaagaagtagcaacaacaaaggccaatgaagctagacccactattgatggttctgcaaataataataacagtgcaccagctaccaaggctcaggttgtgggatggcctcctataagatcattccggaaaaattcattggctaccacttcaaagaacaatgaagaagttgatggaaaagtgggggttggtgcactgtttgtcaaggtcagtatggatggtgctccctatttaaggaaagtagacttgaagaattactctacatatccagaattatcttctgctctagaaaagatgttcagctgttttactatgagtaaatgtggatctcatggaattctgggcagggagatgctgaatgaaaccaagctgaaggaccttcttcatggatcagaatatgttcttacatatgaggacagagagggcgattggatgcttgtgggtgatgttccctgggagatgtttattgaaacatgcaagaggctgaggatcatgaagagttctgatgccattggtctagctcccagggctgttgaaaaatgtaagagcagaacctaggcagtaccagtgttcctcttcgaacatggtgtattggaagcgagaactgaaggcatatgggactggatagaatctcatactaagctgccataatccttctattgtttattatgtgtccgttttatgttgtcatggcgtttatgatttagtaagcttcttttcaagattgttgtgataaaacttaacaaaactctaagacttgactgtgggagtagctatattttatgtacccgagttaatgttatggttgaaggatctttgatgtgttaattttgcagcgtctcaacggggtgtcccatgtttgtgtg

SEQ ID NO: 3751 - DNA, 428 bp, Glycine max
ttgtgtttcagtattggttgtttttttttcttttatgtcagtttgaactttgacggttccgtgacagatgttgttacttgttattgtttgataaggtattcaaaattgggtggttttcgtttgaactgggatgtccaagccacctgctaggcatagcggaggcggaaggtcaaagcaatgtcactttgttggtttcttcctcagccaccatggaaagtgtgtgcctgaatagctcaaaactgacagagcgcaactacatggggttatctgattgttcatctgtggacagctccgcgccgtccttctcagatgagactaagagcaatctgaacctcaaggctactgagctcagactggggcttccggggtcgcaatctcccgaacgagattcaaatctttgcttgagaagttcgattcagtttgatgaa

SEQ ID NO: 3752 - DNA, 821 bp, Glycine max
ctcgagccgcgttaccttacatattccatttgtctctgatcttccaacaccttattcctcagagaagagacaaaatggatcaccatttcacttcagaaacctctctcattattcttctcctcatcacatccctctcctcccttgccaccgccaccaacatcaatatcctccaccacgacctccaatccgacatcaccgaattctgcaagaaaaccaccaaccccgccctctgtgccgagaccatccatccccacttcctcaagaacagaatcgagcccttcaaggcgctcgacatagaagtggacgccaccctggcgaaggcaaaaaaaaccctagccaacattcaaaccctagaatccaaaacgggcaccaccaaatcgtccaaggactcgttcgacatttgcaaggaccagtacaagagcatgctcgacgccatcaaggaaaccaaagccgcgattgctaataaggacatcatcacggctaagttcaagttcagtgctgttttgtcgttccaagcggcgtgcaaggacgcgtttgaagatgggaaaatcccgttctttgaagactccgacgcggtttacaacctgggagggaattgcttggatattatcgctgatatggagaaagctcagggtcctcagaaaatgccaccggtgcaacaaagtgccccttctgcatttagcaacgtcatcggaaccgtctcataaatttttggtgacgaatccatttttttacgtgaatgatgatggaattgtcaagtgcagtattgtgtcattttctttttgttttcttttagtaaaacgaatgttttgggttagggg

SEQ ID NO: 3753 - DNA, 1244 bp, Glycine max
gacccaagcgtcagcccacgcgtccggccaaacgtttcctagccgaaaccctagctagctctttcttaatccataatctctcttctcttcttctctttctatctgcaaaacaaaaatgtctcacttcggacgttcgggtcccccagacatttccgacacttactctcttctcgttctcaacatcaccttccgtaccaccgccgacgacctattccctctcttcgacaagtacgggaaggtcgtcgacatcttcatccccaaggatcgaagaactggtgagtcaaggggttttgcattcgtgcgttacaagtatgctgatgaggctcagaaggccgttgagaggctcgacgggagaatggttgatggtcgcgaaataacggtccagtttgcgaaatatgggcctaatgctgaaaggattttttcaaattgcagtcacaaaggaaggattattgaaacatccccaagatcaaggcgatcaaggagccgtagcccaaggaaaaggcatcgtgatgattacagagacagagattataggagaagaagtcgcagcagaagttatgataggtatgaacgtgacaggcatcgtgggagagacaaagattatcgtcgcagaagtaggagccgtagtgccagtcttgattacaagggtcgtggtagaggacgctatgatgatgagcgtacatagtagaagccggagcagatcagttgatagccgctcccctgcacgacgcagtcctagtcctcgaaggagtccttcccctcagaggagcacttcccctcaaaggagtccttcccctaggaagagtccacggggtgaaagtcctgcaaatcgtagccgcgatgggcgttctcctacccctcgcagtgtctcaccacgcggtcgccctgatgcttctcgaagcccttcccctcgaaattcaaatggggatgaataagctatgttcatgaaaaattctggagacgccggactattgcacctgtagctgttttgctattgttggatcttttagtctatgtgaatgatcttatcggagtcattgaaggattttatgatctaagtgctgtttggtagggtcagacttcctgatgttttgaatggttttatattttgacttgctatgtcgtctacttcggtgtttggtaactattagaccttgcagttgacaggttaatctctcagtttgagggattttgccattttattttcggtttactgcttccattatttgttttttcaaacctac

SEQ ID NO: 3754 - DNA, 627 bp, Glycine max
ccctaatctctatttctctctctctctttttctctgcataacacaaatgtctcacttcggacgttcgggtcccccagacatttccgacacttactctcttctcgttctgaacatcaccttccgtaccaccgccgacgacctattccctctcttcgacacgtacgggaaggtcgtcgacatcttcatccccaaggatcgaagaactggtgagtcaaggggttttgcattcgtgcgttacaagtatgctgatgaggctcagaaggccgttgagaggctcgacgggagaatggttgatggtcgtgaaataaccgtccagtttgcgaaatatgggcctaatgctgagaggattcacaaaggaaggattattgaaacatccccgagatcaaggcgatcaaggagccgtagcccaaggaaaaggcatcgtgatgattacaaagatcgagattataggaggcgaagtcgcagcagaagttatgataggtatgaacgtgacaggcaccgtgggagagacaaagattatcgtcgcagaagcaggagccgtagtgccagtcttgattacaagggtcgtggtaggggacgctatgatgatgagcgtaatagtagaagccggagcagatcaattgatag

SEQ ID NO: 3755 - DNA, 1908 bp, Glycine max
ggaaggatggacttcccttggtgggatcatgctcagcataactgggacagaagctctttttggtgacctagcccattttccagtctcagctgtacagattgcatttactctgctagtgtttccttgccttcttttagcctactctggacaggctgcttaccttatgcataacttgacccattcacaagatgctttttatcgttcaattccagatagaatatattggccagtatttattgttgcaacattggcagccatagttgcaagccaggccacaatatccgcaaccttttcaattattaagcaagcccttgctcttggatgtttcccgagagttaaagttgtatatacatcaaagaaatttcttggccagatatatgttccagatattaattggatccttatgattctttgcattgctggtaccgctgggttcgaaaatcaaagccagattggaaatgcatatggtactgcagttgtgctagtcatgctggttacaacattgcttatgattttgatcatgatacttgtgtggcgctgccattggattctggtggtggtgttcaccggcttatcgttgattgtggaatgcacatacttctctgctgttctcttcaaagttgatcaaggtggatgggctccccttgcaattgctggagcatttcttctcattatgtatgtctggcattacggcacggtgaaacgctacgagtttgaaatgcatagtaaggtctcaatggcatggattctcggacttggaccgagtttaggacttgttcgtgtcccgggaatagggttagtatacacagagcttgcaagtggagtaccccacatcttttcacatttcatcacaaacctaccagccatccattctgttgttgtttttgtatgtgtgaagtatctccctgtctacactgtcccagaagacgaaagattccttgtaaagagaattggacccaagaacttccacatgtttcgttgcgtggcgcgatatggatacaaagatctgcacaagaaagatgaggattttgagaaaaagcttttccacaacctctttgtgtttgtcaagctagagtccatgatggaagggtgctcagattcagatgactacagcttatatgatgagcagactgagaggtcaacacaaggcctattgaacaataacacaaacacagctgcattgaatatggatccaacagtttcatcagtggattcaattgtgtcagtcgcatctccattgcatatgaatgctactattcaatcctctggtcatgttagcagccacactgaggttgatgaagttgagttcttaaacaactgcagggatgctggggtggttcacattctaggaaacacagttgtcagggcaaggagggattcaagattccacaagaaaatagctgttgattatatatatgcatttctcaggaagatatgcagggaaaatagtgtgatcttcaatgttcctcatgagagtctattaaatgttggtcaggttttctatgtatagcctctactcctcttctcttggtaattcttgcgtgaacattgagtttataggcacattcaatcaaaagcatgttaaaatagttaataataataaaatatgtattgaaatctatatgttaatattgttttaatattattcaagagcttctgattgattgagtttataaacatcttgatcacactaattgttccacttgagcccaagataagtaagatttatcatttgtgacagtcattttgtgtacagttgagcttagcgtagcatatgaacaactccttatggtgtgcagtgtgtactatccaaagggaatgtcttcagaagaatgactttgggtaatttctgttgaatcctgaaattcattattcatttgatgttccaaatgcatcactatgttgttc

SEQ ID NO: 3756 - DNA, 744 bp, Glycine max
  unsure (1)..(744): unsure at all n locations
agctncaccgaatcggctctaagcaccacaccactctccaatatccccaacatggctcaagtgggttctctatcttccgaaatggagacactgaatcatgtcctagccctagtggaggcattccgagcatttgacgcggacaacgatggccgaatcacgcaggcagagctaggaggaatcttggggtcactcgggtacaaccctagcgagcaagaagttagggcaatgattgaacacggcgacaagaacaaagacgggttgttgagcatccacgagttcttggagatgaacaccaaggatttggagggtggaaatctcgccaacaccctcagcaccgcgtttgaggctttggatgaagacgggaacgagattttaaccggggaagagcttcatgaggtcatgcaaaacttgggtttggacttgtctcttgagaattgtgtgcatcttgttacttctcttgatgcggatggagatggggctgtgagcttggatgaattcaggctcatagtcgattccctaatctaattgtatcttgtggtgtatatggtgtgtgatcaataatcatatcatatatatgtatacttatagttagggttggagaaattaatgtattttcatcaataattaaggaataagcacttgtgaggtgcatgttagtttaccaatagaatgcgtagtagcaaaagatgggataatgctattcattatatcattaattttataaattaagagaggggttctaat

SEQ ID NO: 3757 - DNA, 551 bp, Glycine max
ggcaacacaacctagtaagctcttttaaagttctggcccgaaccctttctttcgtcacaatcacaacttggtaaaggtactccgtgcaagaaagatgaagctcgagttcgcaaatgtgctacttctgtgccttgtccttagctcttctttcttggaaatctcaatggctggttctcctttctgtgactcaaagtgcgcgcagaggtgtgccaaagctggggttcaggacagatgcttgaggttttgcgggatctgctgcgagaagtgcaactgtgtcccatctgggacttacggaaacaaggacgagtgcccttgctacagggacatgaagaactccaagggcaaggacaaatgcccttgaagaatatctaatttcatcatcacactccattccaataaactaccttgtagtgtatcgtcagccttccgtttcagagtattgcattatgccacggatctatgtacctacccttcaacttaagtattccgtctagttaattagcatagctacccttcaacttatggtgttcgacctagtttattagcttaat

SEQ ID NO: 3758 - DNA, 816 bp, Glycine max
cgaagtgctaacaaaactccaccctttctcctcctgtcactgtttcttcgtctccacttcttctcaaaccagaacagctgacagcaccctcccaaccacctttgatctaggttgttgttttcttctctctgaatttaaatgaaatggctcagcagaaaagacccccaaatagcaggggctactacgttaagatgaaactccttcacaaacatggcagacctcatcatcatcatcagcagcagcaagaaaaaaactgcctctacagatactacaaatgggttctctggctttctctttccctctatttcttcacctcctacctcatcagcaacaacaacaacaacaaccaccactccaaacaaccatctcacgtctcgagagccctcatggaatcaaaccacaccacacctcctcaacaacaagctcttaactctctagggtctttgaagaactttgaaggggtttgtatatgatcttccctcagaagtacaacacggattggttatcgaacggagaggtgcagcaaaccatttggtcgcggccgaggttggcaatcacaagggcttgttgaaccagcgaggttccacgttggaccataccacgctgactttttctcggcccgggtaatgggctggcattacacaccgcaacggtttcccgcgatgggccgcgcgctcccttaaaggtgcgcttaaactcctgtcttctgacaccctttgagaaacagacaagcctcccaccctttttgctcccccaaaattgtggtgttcccccccccgagaggggggggtgtggtggcaaaaataaaaaaaaata

SEQ ID NO: 3759 - DNA, 923 bp, Glycine max
gtcactgtttcgtcgtctctacttcttctcaaaccagaacagacagcaccgtcccaagcacctttgatctaggttgttagttttttctctctgaatttaaatgaaatggctcagaaaagacccccaaatagcagggggtactacgttaagatgaaactccttcacaaacatggcagacctcatcagcatcatcaggagcagcaagagaggaactgcctctagagatacgacaagtgggttctctgggattctcgttcggtctatttctgtacgtcggagctcaagagcaacacgagggaggagaaccgccacgccaaagaacctgctcacgtctccagagccctcatggaatcaaaccacaccacacctcctcaacatcaagctcttaactctccagggtctttgaagaacttgaaggtgtttgtctacgaccttcctccggaagtacaacacggattggttgtcgaacgagaggtgcagcaaacatttgttcgcgtcggaggttgcaattcacagggctttgttgaccagcgaggttcgcacgtttgacccatacgacgctgactttttcttcgtccccgtttacgtgtcttgcaacttcagcaccgtgaatggcttccccgcgattggccacgcgcgctccctcatcgcgtccgcggtaaacctcgtctcctcggagtaccccttctggaaccgaagcagaggctccgaccacgtcttcgtcgcgtcgcacgatttcggctcgtgtttccacaccctggaggacgtggcgatggctgatggcgtgcagagattatgaggaactcgatcgtgttgcagacgtttggcgtagtgtatgatcacccgtgccagagtgtcgagcacgtggtgattccgccgtacgtttcgccggaaagtgtacgggacaccatggagaattttcc

SEQ ID NO: 3760 - DNA, 1019 bp, Glycine max
tgcacgcgtacgtaagctcggaattcggctcgtggctagaagcaataagatgaaaatgaaagtgcttgttttgtttgttgctacagttttggtagcatatgaatgccatggctcagactaccagaagttccctctccaaatgaaaactgggtttggtgggcaatacagcaatgaggtggcatgtgccagttggaggcttggcgtggaagcaaacaacgtagtcaagtggcaaactgttcctgcagcttgcggagagtacatagctgactacgttctaggagaccaatatagatcagattccaaaacagttaaccaacaagcttatttctatgctaaatccctcaaactcaccaacaaagatgtctttgtcttggacgttgacgacactactctctctaatctccagtattttgctaaccatggatttggtgtggaaccacacaatacgacggcgtttaagaactgggttcttgatggcgaggcattcgcactgccagagactcttaaaatgtacaacaaactgttggctctcggcatcaagattgtattcttatcagaaagaccactgagtctaggggatgtaacagccaagaacttaaaggaggttggattcaacacatgggagaagttaattctcagggatccatctgagtactctggtaagttatcatttgaatacaaatcagctgagagagagaagctggagaaggagggatacagaatcattggaaacgttggagaccaatggagtgacctcctgggaagcaacaaagggactaggacttttaagctgcctaatcccttgtactatgattaagctctcaaatcaagcctctaagttgctccttaatttctatgaaataagatcctgagtattattacttagtcatgtaggggcactgaacaatgttgttttcccttttcgaggctttcatgaattatgagctcttgttccattaagaaattgtccgttccaagtttggccagaaaagtaaaaatattaaaaaaaaaaaaaaaga

SEQ ID NO: 3761 - DNA, 482 bp, Glycine max
ggagacttcacagtgtggataagcttttcggttgtgccttgttttcattccaacacagtttgaaagcaatgcaggtcacctatgatttttgtccttcgtagaaggacactttctcatagccacgatctctctctctctctctctctctctctcttgcgttgcatttccatttccagtttccacccatggctgctctcacttctctctctttctcagcagtgactcattgctcagaaagaaaagtaaccctttcctccactcgttttctcgcttcctcttcagaactctttgggttccgaaccgatttctcgtaccactatgttggtgttcgagcttccaattctgcgtctaaaatggttgttcaatgcatgtcttctgccacagatgttcctcccagtgtatttgaaaaatcgtttgttagagtaaatattcttaagagaaaataagttatgcattgataagaaaaaaataattttactatt

SEQ ID NO: 3762 - DNA, 537 bp, Glycine max
ggataagctttttggttgtgccttgttttcattccaacacgtttgaaagcactgcagggtcacctatgaattttgtccttcaacgaaggacactttctcatagccacgagcattcagtttccacccatggctgctctcacttctctatctttctcagcagtgactcattgctcagaaagaaaagtgaccctttcctccactcgctttctggcttcctcctcagagatatttgggttccgaaccgatttctcgtaccactatgttggtgttcgagcttccaattctgcgtctaaaatggttgttcaatgcatgtcttctgccacagatgttcctcccactgtttctgagacaaagttaaatttcctcaaggcatataagcgaccaatccctagtatctacaatactgtgctgcaggagctaatagtgcagcaacatttaatgaaatacaagagatcataccgctatgaccctgtgtttgctcttggttttgtcactatatatgataaacttatggaaaggtatcctagtggtgaggac

SEQ ID NO: 3763 - DNA, 437 bp, Glycine max
gcaaaatgctgcagatgcatctctgcctctgaatatatataaatatattttcactgctatgccgaaaaacctttgatcccaccagccaccactctctctctccgatggccactgttacttcttctttctctttctccactctcactcaatcttcttcgccgaggaacctctccacactctcttccaattcaccaacttttcgcatccgcgttggtttctcctgtcactatgttggagttcgagcttccaattccgcttccaaactggtccgtcgttcctcctctgccgtcgcagaacctccaactgtttctgagacaaagttaaattttctcaaggcatataagcgaccaattcctagtatctacaacaccgtgctgcaggagctcattgtccagcaacatttaatgagatacaagagatcgtatcgctatgacgct

SEQ ID NO: 3764 - DNA, 691 bp, Glycine max
gaagcaaaggtgagttgggactacgagacaaggcgtaatttgtcgcatttagatgaaactcacaactttacttggcactattttttggtaaacaagatcaatattcgttaaagcagcatttctgcgccaaatctagttagtttccatcgccaatacaatacgacaccgcttaatgcaagtcctcgtcgtcgtttaacgctcacgttttctgttctctgagaaggtaaaaagcgttaaaacgcagcatctcaaacacgcgattccgaagcttttctgcgatcaatggagttcgacccgatcccaatcggttcgtgctccaaagaacaccagatgatctataaggagtggttcaattacgctgattcagatagcgatggccgcattacggggagtgatgccaccaagtttttcgccatgtccaatttgtcccgcgaagatcttaagcaggtgtgggctattgcagattcaaagcgacaaggatatcttggtttcactgaattgagcagtgctaggcggggagtgtcggtggggcaatctgggcagtggagagcagcggaatgggctgacggagggatgttaattttacaaatgggaaacctccctcaatggagggtttggacgtattactagttaagagggagcaggggcaaaaagaggttgatgcaaatgggagttctcaattgcagccatc

SEQ ID NO: 3765 - DNA, 797 bp, Glycine max
tgagcaatggactcataagagtagtaactaagaaaaaaaaaggtttctgatttatttagttcggcacttccgatcatttctccgcggcggcgcaaccgattcccccgccgcatatggccaaaggtcgaaaattaacgaccagccggagcgaacgttttttgggaacctacgcctatagccaaggctccgccgccttgaacccatcggagctccgggaagaagatgtctggggcgccggagatgacgccggcgatcgcgagtgggagccacacgccgccgccttaaacaacagtggcgtcagccggcgccggattccacgtgacacggaggagcaccggcgcgtgggtggactgtcactggcgtttgaagctccggctagtggctcgtcgccgaggatggtgcaccagtttcgggcgcgtgaggagatgacgtcgacgccgcgagggcgccacatggcgacgtcggcgccggtgaacgtgccggactggagcaagatactccgagtcgactcggtcgagtcgataaacgacgaggacggggacgaatcggaaatgatgccaccgcatgaatacttggcgcgtagccagacgatggtggctaactcggtgtttgaaggagtgggccgcacgttgaagggccgcgacttgagccgggttcgtgacgccgtgtggagccagaccgggttcgacggttaacaccgggctcaggtttgggctttcatgggtttactgtaataaaaattattataatatattcaatttaagttaatagaaatgcagacaaatgaatgaacacag

SEQ ID NO: 3766 - DNA, 432 bp, Glycine max
acaagcacaagagcaatggactcgtaagagtagtaactaagaaaataaaggtttctaatttatttcgttcaattctccggcggcaccgcaaccgattccgccaccgcatatggcaaaaggtcgaaaactaacgaccagccggagcgagcgcttcttgggaacctatgcttacagccaaggctccgccgccgtgaacccgtcggagcttcgggaagaggatgtatggggcgccggagatgacgccggcgaacgcgagtgggatccacacttcgccgccatgagcaacggcggcggaagccggcgccggattccgcgtgacacggatgtgcaccggcgcgtgggtgggctgtctctggcttttgaagctccggcgagtggcgcgtcgccgaggatcgtgcaccagtttcgcgcgcgtgaagagatggcgtcgac

SEQ ID NO: 3767 - DNA, 294 bp, Glycine max
ggaaactttccagcagggtcatcatgcttatgattcaaactttgatgatggcatggatttctggtatgacatattcaccaggaccaatgattcaatagaattgcgagagttctgaagttttcatgtgacacgttgaacgagggcattattgaatttggcagatagagtagtttaaatggcatggtatagcttgaatttgaccgttacaactaaagggtacgataatttctggtgtggggacagcattatcaccagctggacagatctagagggatcgattgacaaagaaaccag

SEQ ID NO: 3768 - DNA, 537 bp, Glycine max
agcagaacttggacataaccttgaggctctcgacgacgcctggaacgacctcgtgctcgagaccggagtactctccctcggtgttctcgcgaatgacgacgatgtcgacgttgtggtggcgggtgggcaagccgggcaagttgaagcaattgacgagggaagcgtagagatcgaggtcctttctgagctgaacgttgagggagctcacacccccacccaccggagtcctcaaaccacccttcaagcacaccttgttcttccgtatcgaatccagcacctcctccggcacacgcctcatgtccccgtgcacatcgtacttctcgaagtatatgggggcgtgcatcgcctccatcacctgctccaccgcatgagtcaccagaggcccaattccgtcccccggtatcagcgtcaccccccgcggcgcaccgtcccccggtcgaggcatgtacgtcacgctccttcttatttccttcatcccctgctgcaccactgacgctgacattcttaatttacttcttagccccatctctctctctc

SEQ ID NO: 3769 - DNA, 847 bp, Glycine max
gaacacagagataagaagacagaaagatccaacactcactcttccaacttccactctctctctttccgaccaaaatgtcgatcaacagcgaatctacgccgccaccggtgatcggaaaaatcgggccttacaccgtcttcatgacgccgccgtctacacccaaacccgccgacgacaaccccgttaccaccaccaagatcgcacctccgccgcctcagattcccaaagccgttccttcccccaaacccaaacctctctccgattccgacgattccgttttcggcttcttcagaaacgccgttgccaaggtccaaaccgcccactcaagtttggatgatcatttggcacgttggtttggattgaatcagtcaaagtatcaatgggctcttgatgattattatgagagcaagggagtggaaaaaggagacattaaagtgaaagaaatatcgagcaaagtacaaagtgtttgacttgcctagagttggtggattattcaaaagtgaggtgtgaagactcctgctttgagtatatttatacctttgtatttatgtggagtagaatgaatgcatctgatatgtcaaagttatttgatctacatccattgatatgattcaatggttattttccaactcctgccagttgagtctcactggacagtctctacctgtaatctaattaccaagttattttcaggggcaaatgttttgtttttgtattgtagtttgggtcaagtttttgggcttctcatgatggcagggttgtctcctaagtattttgtttgtaatcttgggggtaaagtctgcagaaaccctatgcaaattatttcaagcgatagtgattagttatt

SEQ ID NO: 3770 - DNA, 513 bp, Glycine max
gaatatctatatccatatttaccatagtatttgcagcccttgttgagatgaaaagattgaaaacagctcaagagtctggtgttgttgatgaacctaatgcaactgttccaatgagtatatggtggttgattccccaatatttcttgttcggagtctctgaagtttttaccatggttggtctgcaggaatttttctatgaccaggtcccaaatgaactaagaagcatgggctcttgctctctacttgagcatctttggtgttgggagctttataagtggctttctcatttctgtgatagagaaactgtctggcaaagatggacaagacagttggtttgccaataatctgaataaggcgcatgttgattacttttattggctacttgctggactcggtgtaatgggattggccttgttcatttgctctgctaaatcctacatttacaatcaccagggaatcagacgagaattgtgaattgtgcggttctgtcaattttagctttactgtatggga

SEQ ID NO: 3771 - DNA, 620 bp, Glycine max
gcgaaggggaaaaaaacacattgcttcaatcatatcacgcgttgcccccgaagaagcaagaacaattaggtatttaggatcaccaaagcaaaatcagagaaaatttcaagggccactctcttttccttcttcccattttgcccttgaattttctctagattttcctcatttccctccgaacatatcatatcacacacccatatagcccaaaagccacaacctgcgaaatcaaaaaagaaaaagaaaaagaaacaacaacaacaacaacaacaatatcgtattccattccataatgttgtgtaaactggttccggtgccgcgcaagaaaaaacccggtttgaacccggtttaccttaacgtctacgacctaaccccaattaacggttacgcttattggcttggcctcggagtttaccattctggtgttcaagttcatggggttgaatatggatttggagcacacgaacgcgacacgactgggatttttgaagtggagcctagacactgccctggattcaccttcaggaaatcaattttcattggggtcaacggataatggggccgaaaggatgttcgcgcgttcatggcgaagatgggtgaaaaagattcggggaaaacct

SEQ ID NO: 3772 - DNA, 547 bp, Glycine max
ccgacacgtcactaaatgtcgcactcaatggatccggaaaatgctataaatacctcagacacaagccagtagtactaagtcaccaacgttccagtagctgctcctcagtttctccaaacccaaactttcacgacagggacctgtcagatttagttaaggtttttgcatcatcactgtgtgaagataatatagatatggaaatctcccatgacatcaagatcaaggatgacaagctaggtgatgtaaaggaagagaagattaaggcagaagcggaactgaagcataaatcagttgagaaagagcatacaaaaagtaaggtagagaagattaaggtagaagcggaactgaagaataaatcagttgagaaagagcatacaaaaagtaaggaagagaagaaacataaagatgaagataaatcaaagaaaaagaagaaagagaaggtggaagaggaagatgaagagagagagaaaaaagaaaaagatttgaaagctaaaggggacgatggtgaagagaaaaaggagaaggacaataaaaatcaaattagaac

SEQ ID NO: 3773 - DNA, 466 bp, Glycine max
aacgttccagaagctgcttcttagtttctccaaacccaaactttcaccacagggacctgtcagatttagttaacgtttttacatcatcactgtgtgaagataatatagatatggaaatctcccatgacatcaagatcaaggatgacaagctaggtggtgtgaaggaagagaagattaaggtagaagttgaactgaagaataaatcagttgagaaagagcatacaaaaagtaaagaagagaagaaacataaagatgaagataaatcaaagaaaaaaaagaaagagaaaggggaagaggaagatgaagagggagagaagaaagaaaaagatgtaaaagataaaggggaggatggtgaagagaaagagaaaaaggagaaggataagaaggagaggaaaaaggaaaagaaggacaaggatgacaaaactgatgtagagaaggttaaggggaaagaacatgatggggagga

SEQ ID NO: 3774 - DNA, 1337 bp, Glycine max
caacaatgtttttatgtttttgtggttctttgtgtatcaattttccccatatatgctatggtgaaggtgagattcatcaattttgaaagaacaaaacttcctgaagaaattctaaagcataatctagaagaaaaaagaaaatatttttcagatataattcttgaagttgaaaggagtgatgccgaggttcaggctgagggagtatacaaccaaaggcttcagaatcttgctgtcactcttgataaggtaaggtatgttatgagatgtatttttggcgatccacggaaagcaccacctcctcttgagaagctcagtcctgaagcaactgtttcctttctctggaaaggagagggttcatttgttgaggagcttcttcagtgcataactcctcatgttgaagaaggcatcttgaatgatctcaagtttaaaattcatgctcatgatccttcaaattctggagatattcaaaaagagcttcgaaaatctctgttatggttgagggatgaggtccgaaatcttccttgtacatataaatgtcggcatgatgctgctgctgacttaatccatatttatgcttataccaagtacttctttagaatacgggattatcaaaccattacatcgccacctgtctatattagtccacttgacttaggtcccaagtacactaacaagttgggagcaggatttcaggagtatcgaaagatatatggtgaaaattattgtttagggcaactggttttttggcataatcagagtaatgcggagccagatcgtaccctggctagagccagccggggttgcttgtctttaccagacaccagttccttttatgccaaagctcagaagccttcacgacatcgtgtttatggtccaaggactgtcagatctatgctggcaagaatggagaagcagccccagaaaccttggcccaaagaccggatttggtcattcaaaaattctccgaaattttttggtagcccaatgttagacgctgtaattaataactctccacttgacagagagatggttcattggttgaagcacagacctgcaatattccaggccatgtgggaccagtgaagttttgcttgctgaatggtttggggaaaacccttgttagagattagagagtggttcatcattcagaactgcctgcctcttttagcgtggggagtctaattattaatccatagcataagttcttgtttcgctttgtccttcattcttgtgtatagttttcttgacctttgatttgtaattcatttggttgtagggcattgttttactcttgtctaatgtgaaaagaaatgaagggaaaataggtttaattcaaa

SEQ ID NO: 3775 - DNA, 1218 bp, Glycine max
agacgacagaaggggaggatagagatcaccaacaaaatatttgctttttgttttatttcattgcaaccatgtttggctatgcagcagcaataattgcagcaatcctcttcttccaatacttcttccataggagacgatgttgcaaacaccccattttgacagaataccctatcattggcatgctaccacaattactcttcaatttatggcgtgcccatgattattcaactcaggtgttgcaacgacatggtggcacaggtgagttcactggaccttggtttaccagcatggactatttggtcacttgtgaccccatcaacgtccaccacatgctgagcaagaatttccacaactacgtcaagggacccgagtttcgtcacatttttcaggccttcggagacgggattttcgccgctgattctgaagcatggaagtacagcagggatctcttccattctctctttaaacagaaaagcttcgaggtttttgtagcgaaaaccattcacaacaaggtgcataatggtcttcttccaatattggatcatgtacagcaacaaggaagagtggtggatcttcaagatgtcttcaatcgcttcaccttcgataacatatgttctatagttcttggaaatgaccctaattgtctttccattgatttttctgaagttgccattgagaaggcttttaatgaagtagaagagtccatattctacagacatgtactgcctaggtgtgtttggaagatccagagatggcttcaaattggtcaagagaagaagatgacagaagcttgtaaaacacttgatcaattcatacatgcacgcatagcatctaagagagaggagctaagcaagtacaacgaaaatgaaatgggtgaagctcatcatgttgacttgttaacagctttgatgagagaaggaaaagcacatgacgataaatttctaagggatgctgtgttcaatctatttgtggctggaagagataccataacttcagctctcacgtggttcttttggcttgttgctacaaacccctcagttgaagccaagattctcgaagagatgaaagagaagcttgggaccaaagaaaagtcgcttggggttttaagcgtggaggaagtgaaaaggctggtttatctgcatggtgctatatgtgaagcgttgcgtctctttcctcctataccctttgagcgcaagcaagcaataagctctgacatgc

SEQ ID NO: 3776 - DNA, 568 bp, Glycine max
gccttcaagcatgtagggatggccattggtacgatgttaagtatgtccccaatgccctcgttattcacattggcgaccaaatggagatactgagcaatggaaaatataaggcagtttttcacagaacaacagtgaacaaagatgagacaagaatgtcgtggcccgtgttcatagaacccaaaaaggaacaagaagttggtcctcacccaaagttggttaaccaagacaatccaccaaaatacaaaaccaagaaatacaaggattatgcttattgtaagctcaataagatccctcaatgaatgaagtgggcactacgagataattatagctcatggtttctctgttttgttatttaatttatggaatgaaagtgtgacttgtgggaagtagattaaataagatctgtgactaatgttggtttctctgttttgttatttaatttatggaatgaaagtgtgacttgtgggaagtagattaaataagatctgtgactaatgttggattaatcttatgcttttgaagtaaataaagatgacaagaaacagtttgtctgtactgttattataaa

SEQ ID NO: 3777 - DNA, 1029 bp, Glycine max
ggtagtaagtgagtttcccttataaaattcaatccccaaaacaagtctcacaaaattgcgtaaaatttaaagaaatcaacacacacaaacacaacaacatatggaggtgctaagggtgcaaaccatagcttccaaatccaaagatgctgccatcccagccatgtttgttagggcagagacagagcaaccaggcatcacaaccgttcaaggggtgaaccttgaggtgccaattattgattttagtgacccagatgaagggaaagtggtgcatgagattttggaggcaagtagggactggggcatgttccaaattgtgaaccatgacatacctagtgatgttataagaaagttgcaaagtgttgggaaaatgttctttgagttgccacaagaggaaaaagagttgattgctaagcctgctgggtctgattctattgaagggtatggcacaaagcttcagaaagaggtgaatggcaagaaagggtgggtggatcatttgttccacattgtgtggcctccttcctccatcaactacagtttctggccccaaaaccccccttcttacagggaagttaatgaggaatattgcaagcacctaagaggagtggtagacaaattgttcaaaagtatgtcggtagggttggggcttgaagagaatgagctaaaggagggtgcaaatgaagatgacatgcattatcttttaaaaatcaattattacccaccttgtccatgtcctgatctggtcttgggtgtgccaccacacacagacatgtcctacctcacaattctggtgcctaacgaggtgcagggccttcaagcatgtagggatggccattggtacgatgttaagtatgtccccaatgccctcgttattcacattggcgaccaaatggaggtacatatcttgcttagatgctatagttatatttggataaatttaaattgataaaagtatgaattaaaatcagctctcacattaagagagtttctataatttaacttatgtataaattaatttaaatttatgggaga

SEQ ID NO: 3778 - DNA, 1120 bp, Glycine max
  unsure (1)..(1120): unsure at all n locations
cctcgagccgaatcggctcgagttctctctctgcgatctgtttcgtgttgtagctagctcctcgaaaatgctggcacgcctcgccgcgagtcgcttcaacgagatccgtcagattttccgtcagccttctagggctttctcaaccgctctgaactaccaccttgacacaccggacaacaaccctaaacttccatgggaattcaccgaggccaatcaagcaaaggttaaggagattttgtctcactatccatccaactataagcaatctgctacaattcctcttttagatcttgcccagcagcagcatggaggttggctacctgtttctgcaatggatgcggtagctaagattgtagaggttcctcccatacgggtgtatgaggttgccacattttactccatgttcaatcgagctaaggttgggaagtaccatctgttggtttgtggaacaacaccttgtatgataagaggttcacgaggaattgaagaagccttattgaaacacttgggagtgaagcgcaatgaagtaacaccagatggtttgttttctgttggagaaatggaatgcatgggatgctgtgtgaatgctcctatgattacagtggctgattattcaaatggatcagagggatatacttataattactttgaagatataaccccagagaaagtagttgagatagtagaaaagctgagaaagggtgagaagccaccgcacggcacccaaaatccccgccgaattaagagtggacctgaaggagggaacactactttgttaagtgagcccaagcctcctccctgccgtgacctggattcctgctgaagtgtgatatactttttgccttcaataatgtgaggcttgcatgtgttggagcttgccttaattgaaacattgtcagattgttagatgctcaaccaatttttgtatcaaccgtcctggatggtttccatttcaaaaatttgttccataatcgccatcataaatttcttggcatgtttattacttaccagcgttatctatgcgtttctgtactctgtacattaatcaccatgaacgaaatttgaggttaccatgaaatacaatttagttaagaagtgnaatgcgtggcatgcattaccc

SEQ ID NO: 3779 - DNA, 1442 bp, Glycine max
cctacgctttcgataaactcgagggcagttcaacaaactacatcctctttacttccatttcacgcttgcttcgcatctaagccaacaaaatcaaataccctttcttctctctcttcaacgctcgcttagtacagcggaataacgaagcctcctcgttcttcttcttccgccctttctctctctagaaccgtacggtcgtttctttctctctcctcaaccggagacagcgtcgccttcttttctgaatctcgcggtgttgttagttctgcggcggttgtagttccggcggcgatgggacagcaatcgttgatctacagcttcgtcgctcgcggcaccgtgatcctagcggagtacaccgagttcaccggaaacttcaccagcgtggcggcgcagtgcctccagaaactcccttcctccaacaacaagttcacttacaactgcgatggccacaccttcaactacctcgttgataacggattcacttactgtgtggttgctgttgagtctgctggacggcagattccaattgctttcctcgaacgaatcaaggaggattttaccaagaagtatgctggaggaaaagctgcaacagcggctgctcatagcctcaacagagagtttggacctaagttgaaggaggagatgcagtactgtgttgatcacccagaggaaattagcaagcttgctaaagtgaaagctcaggtttcagaagtcaaaggagttatgatggaaaatattgagaaggttcttgaccgtggggagaaaattgagcttttggtggataaaacagagaaccttcgctctcaggctcaagatttcaggcagcagggaaccaagattaggagaaagatgtggttccaaaacatgaagataaagctaattgttctgggtatcataattgccttgattctcattattgttctttccgtttgtggtggcttcaactgtggtaaatgagtcttcccacatcctggcttcaactgtggtatttgtctcctcacttgataagattgttgctagcagattgccattgcctctactgtcaacatagtgcttttgactttttgggatttacattcttccgacttctccgatgatgaatattatatggcattgcttgtatagtgtgaattatttagcctttatcatcttgtctccatagcataatgctaatctgtcattctctatagtttaggtgggagtttcagcatttggtgtgaggattatgttttttaattatgcttacatattaagaaatcaaccttacgtaattgagctttttattaccaaaaaaaaacttaccatattttttgttggacttgtgataatccgtgcgtttgtgtgtgaacgttttatccatcttcgaggccttgcttatgttctaattctaaacgctagcggtttttgttttaacttgttaattattaaatcattcatttggt

SEQ ID NO: 3780 - DNA, 1576 bp, Glycine max
agtacttgtgttacttctccttggttgcaccatgtcttgctatttgtatcatcttgtgtaccttcttaagctttgagcaattcccttttacttttatttcactccatgatcatcactcacacatcaaacactactactagctccttgtatgagtgtcattccttctagctaaatctctctcttttggggtatggaattcaacaagttcagaatcagaagctatgaggggcaatctgatagggctcaagtggaagatcttgagagaagatgcgaggtagggccatcagaaagcgtgtttctcttcacagacactatgggtgaccccatttgtaggatccggaacagtcccatgtacatgatgctggtggcagagttggacaatgaattggttggtgtcattcaagggtctataaaagtggtcacagttcatggtcaccctccaaaggatttggcaaaggtggggtacgtccttggcctaagggtatcacctcagcacaggagaaaagggattggctcaagccttgtgagaacactagaagaatggttcacttcaaaagatgtggactatgcatacatggcaacagagaaagacaaccatgcctcagtgagtctcttcatggacaagtttggctacaccaagttcaggactccagctattcttgtcaaccctgtgaaccatcattgctttcaaatatcacccaacattgagatagcaaggttgaagattgaccaagctgagtacctctatagaagattcatggggtccacagagttcttccctaatgacatagggaatatacttaggaacaagctaagtttggggacatgggtggcatatttcaaaggagatattgcttggggtgattttgggtcagatggacaagtaccaaatagttgggctatgcttagtgtatggaatagtggggagatattcaagttaaggctagggaaagcacctttttcttgcttggtatgcactaagagttggtggttgattcataagatcttcccatgtttgaaattgccaaccatacctgatttcttcaacccatttgggttctatttcatgtatggggtgcaccatgaagggccattttcagggaagctagtgagggccttgtgccaatttgtgcacaacatgggtgctgagtccaaggatgagagtaattgcaggatcattgtgactgaagttggaggaagagatgagctcaaccaccatatcccacattggaaattgctctcatgcccggaggacttgtggtgcataaaggcgttgaaaaatgaagggacaaataacaagttccatgaattaacaaccaaaaccccaccaacaagagctctttttgtagacccaagagaggtttaaagcatgcatgatctcacaaaaaaaaaaaagaaaaaaaaagtaatgaaaggggacaagaaaaaagcttggaaaatatcttcaccttaattttttttttcctttccttagctttgtctcagagaaccaaagcccacctcatgtattgtgtgataagtccatccatctctcctggtgggggtttttctctagttcctttcacatcggtgacac

SEQ ID NO: 3781 - DNA, 1451 bp, Glycine max
attcatccctgtgtcacttcgcaatagaaaaattactgcatttataagtaaccatacaagtataagctctattgtagtatatatagagaagttgtgagcatagctttcttcatcacttcatagtaagcactatagaaaaaaaaggacattcattcatctatggctacccttattgctcccagcaaccactctccccaagaagatgctgaggctctcagaaaggcttttgaaggatgggggactgatgagaacactgtcatagtaatattgggtcatagaactgtgtatcagaggcagcaaatcagaagagtttatgaggaaatttaccaggaggatcttgtgaagcgcctagagtctgagatcaaaggagactttgagaaagccgtgtaccgatggatactggaacctgcagatcgtgatgctgttttggccaatgttgccatcaagaatggcaaaaactacaatgtcattgtggaaattgccactatcctctccccggaagagcttttggccgtgagacgcgcttatctcaaccgctacaagcactccttggaagaagatgttgcagctcatacctctggccatctacgccagcttttagtggggttggtgacctcatataggtatgttggtgatgagatcaatccaaaattggcacaaactgaggctgaaattcttcatgatgctgtaaaagagaagaagggtagctatgaagagaccattagggtcttgaccacaaggagcaggacccaacttgttgcaactttcaaccgctacagagagatccatggcacttccatctctaagaaattggtggatgaaggatctgatgagtttcagagggcattgtacactgccattcgtgccatcaatgatcctattaagtactacgaaaaggtggtgcggaatgcaatcaaaaaggttggaaccgatgaggatgcactcactcgcgtggttgtgagccgggccgagaaggacctgaagataatctcagaggtttactacaagagaaacagcgttcttcttgagcatgctattgccaaggaaatctcaggggactacaagaagttccttctcactctgttggggaaagaagactaaatattttttctctgagggcatttgtgattacgagtttaggacaccaagctatacttgtgtgtgtgtgatggttgatggtgttcatgtgtgttggttttccttgagtctgttttcaattttccttgatcatgagaacttggagttctatcttatagagtattaatatgatagctgtttggtggcttataaattattattaacaggctcaaaataaaagatatctcagtggccatttgaatttttaaaaaaactgattttgagctaaacaatgttgagatgtactatgtttaatttaatttaaagtacaaagctttacattggaacgtgaacggctcgagcgctcgattcga

SEQ ID NO: 3782 - DNA, 494 bp, Glycine max
cgcgcattcagctccaccgcctcgagccgtgatattttgagcagcttttagtggggttggtgaccgcattcaggcatgttggtgatgagatcaatccaaaattggcacaatctgaggctgaaattcttcatgatgctgtaaaagagaagaagggtagctatgaagagaccattagggtcttgactacaaggagcaggacccaacttgttgcaactttcaaccgctacagagagatccatggcacttccatctctaagaaattggtggatgaaggatctgatgagtttcagagggcattgtacactgccattcgtgccatcaatgatcctattaagtactatgaaaaggtttgaactcacatttttctcatagcactaaccaatctcattatattttcacatcttgaactttgggttgcattagaagaatagtccaatccatttcataaatttgaccctttagtgttgtgctcctaataagatttcttataatat

SEQ ID NO: 3783 - DNA, 1221 bp, Glycine max
caaaggtcattttaaaacgccacttcctcacgcatttcctcgttttcatttcctcgtttttttcttcccttttctctttctccggcgacgatctcagattccggccactcctctcgccggcgagcccttactcttccctcctccgtcgagccctctccgattcgaatcgttcccagcctcgcaccaccatgaatcccgaatacgattatttgttcaagcttttgctgattggagattctggtgtaggcaagtcatgtcttctcctgaggtttgctgatgattcataccttgacagctatatcagtaccattggagtggactttaaaatccgcactgtggagcaggatgggaagactattaaacttcaaatttgggacactgcgggtcaggaacgtttccgaacaatcactagcagctattatcgtggggctcatggcattattgttgtttatgatgtcactgaccaagagagcttcaacaatgttaagcagtggctgaatgaaattgaccgttatgcaagtgaaaatgttaacaagcttctagttggaaacaagtgtgatcttacggcaaataaagttgtgtcctatgagacagcaaaggcttttgcagatgaaattggaattcccttcatggaaactagtgctaaaaatgccaccaatgttgaacaggctttcatggccatggctgctgaaattaaaaacagaatggcaagccagccagtgaacaatgcgaggcctccaacagttcaaattcgaggacagccagtgaaccagaaggctggttgctgctcgacttagagagagacgaagtatttggggtcttagaagttcatgtgtctcagtggcatctaaaactagcttttcacattgctttcatatcaagattgttcgtcatgatttgttcctcttatcgttaagccgttgttaaaacttccattattttctatgtatttgattttaaaagaaaaaacatttgtacaaaattaggaatattggtgaatagcagtatttgccttgttctttgtccctcgaactttcatctcatttcaacagcttctacatctattctattgttctcgtgcgtctctgtggcgtagaatcttgttaaattgcaactcttgccctaagtctaagaaataacaataatagaaaactgaactttttatttaaaaaacaatacataggtcgtgccatacctgaaaaaaaaaaaaggggggccccc

SEQ ID NO: 3784 - DNA, 446 bp, Glycine max
gagaatccgaggcgaagagaagcgcatattaacatggcatggctcgttccgtcgacgatctcagattccggccactcctctcgccggcgagcccttactcctccctcctccgtcgagccctctccgattcgaatcgttcccagcctcgcgccaccatgaatcccgcatacgattatttgttcaagcttttgctgattcgagattctggtgtaggcaagtcatgtcttctcctgaggtttgctgatgattcataccttgacagctatatcagtaccattggagtggactttaaaatccgcactgtggagcaggatgggaagactattaaacttcaaattatttttctgcatttttttaccatatagtgggacactgcgggtcaggaacgtttccggacaatcactagcagctactatcgtggggctcatggcattattggtgttatg

SEQ ID NO: 3785 - DNA, 1071 bp, Glycine max
tctcgagccgattcggctgcatgttcaattctatacaatcgtaacccatgcttaagatgagaaaaagcaaccacttgatcggtctcttaaacttcctaacattcctgctgtcgattccgatcctaggaggcgggatatggctgagcagcagggcgaacaacaccgactgcctcaagttcctgcagtggccgctcatcatcatcggcgtcagcatcatggtcgtgtccctggcggggttcgccggcgcgtgttaccgcaacaccttcctcatgcggctctacctcgtcgtcatgttcctggtcattgccgttctgatcgggttcatcatattcgcctacgttgtcaccgacaaggggtccggtcggagggtgatgaaccgcgcttacttggagtattatcttgaggactattcggggtggttggaggagcgcgtggcgagtgatagctactgggggaagattgtttcgtgtgttagggattctaaagcatgtgggaggatggggataaccattaatgggatgcccgagactcctgatatgttctacatcagacatctcacccctattcagtctggttgctgcaagcccccaacagattgtggatatgtgtatcagaatgagacagtgtggatcccaggatcaggattgatgggaaccaacgcagattgcacaaggtggagcaatgaccaagagcagctttgctatgcctgtgattcttgcaaggctggtgtgctggcaagtctcaagaagagttggaggaaggtctcagtgatcaacattgttgttatgatcatccttgtgattgtttacataattgcttatgcagcatatagaaacaaccgcaagatggataacgatgagccctatggtgaagcaaggatgacaaaggcacaacctagtgcttttcatctttagtggcactatttggatgccaaaacgttaatttcagctacttgtcttatgattttggacctttttctcccttgtaactaggttgctctcatggttttgtatcaaacacccgtgacgtgttttactcttgaaaggctgaatgtatttaattattattatt

SEQ ID NO: 3786 - DNA, 398 bp, Glycine max
gaaaaaatgaaatttccccaaatctgaatgggaacatttgccctaacccatttccctctattcggctcctccagttacgacgaccacggttcccggatcctgcgctcatcggttctccggggaagcgtatgatggattgcggtgttggctccatcgtgtgggtgcgtcggagaaacgggtcgtggtggccgggtcaaatcctcggccccgacgacctctccgcctctcacctcacctcgccccgatccggaacccccgtcaagctcctcggcagagaagacgccagcgtggattggtacaatttggcgaaatccaagcgtgtgaaggcattccggtgtggcgagtttgatgattgtattgaaaacgctgaatccgctcagggagggccgttgaagaaa

SEQ ID NO: 3787 - DNA, 1000 bp, Glycine max
ccttcattctctctctgtatatctctatatatacatgtggttgtagttgtagttgtgttgcgtgtgtgcgtgacaaaagcaaaaggaaagaatatcaacaaggtaaagtagattccttactagacatggcgttgaaggacacattctacatatctcatggatcaccaactttgtccatagatgaatccattcaggccaggaagttccttcagtcatggaagaaggacgtgtttcctcaaagaccctcttcaattcttgtcatctctggtcattgggaaaccgcagttcccacggtcaacgtcgttgactccatcaacgacaccatctacgatttctatggcttccccaaacaaatgtaccagcttaaatatcctgcacctggagctccacaattggcaaggagggtgaaggaactactcaagaaatctggtttcagccatgttgatgaagatacaaagcgaggacttgaccatggtgcttgggttcctctctttttgatgtatccagaagctgacatccctgtttgtcagatatctattcaatctcagcaagatggaacttatcattataacttaggaaaggcattggcccctcttaaagatgaaggtgtattgatcatgggttctgggagtgctgttcacaacttgagagcacttgagcctcactccactgttgctccctgggctctagagtttgataattggttgaaagatgctcttcttgaaggaagatatgaagatgtaaatcattatgagcagaaagcaccacatgcaaaaaaggctcatccctggccggatcacttttatccgctgcacgttgctattggtgctgctggtgaagatgcaaaggccaaacttatccacagcagtattgaattgggcagtctctcttatgcctcttacagtttacatcagccgctagctgaatttcttaatacagaatagcttctgttcagttgcataccctggctcaaaacacagttatccaatatgtatgaaga

SEQ ID NO: 3788 - DNA, 1033 bp, Glycine max
ctcttctgatactactggtaccgagattgatgctgaaaatgatgcaaagtcagggtggctttatgatgtctcagacttctctgctcttccaggaaggggcatccagtgctttatagacgggaagcttattttggttggtaacaggaagctgctggaggaaaatggcatagatatttctacagaagtggaaaattttgtggtagagcttgaagaaagtgcaaagacagggatactagttgcatatgatgatatattaattggagtcttagggattgcagacccactaaagagagaagctgctgttgttatagagggcctacagaaaatgggagtcatacctgtgatggttacaggagataactggagaacagctcgagctgtagccaaagaggttggcattcaagatgttagggcagaagttatgcctgcaggaaaggctgatgttgttcgttcattccaaaaggatggaagtatagttgcaatggtgggtgatggcatcaatgactctccagcattagctgctgcagatgttggtatggcaattggggctgggacagatgttgcaatagaagctgctaactatgtgctgatgagagataacttggaagatgtgatcactgccattgatctttccaaaaagacctttttccgtattcgattgaattatgtatttgcgatggcttacaatgttgttgctataccagttgctgccggggttttctttccttggttggggatcaagctgccaccatgggttgctggtgcatgcatggctctgtcgtctgtaagcgtcgtatgctcttctttgcttttgagaagatatagaaaacccaaacttactacaatacttgaaatagttgtaatttaacgagaattgaaacagaataacttgagggtgcaaataaatttgacccttgtaattccaacttttgtgcatttttcctttagatccgctgcacccattggggtgcaattgtaattgtagctgccgattcattgtaaatgctcttgtaatttcatagttcttcctctt

SEQ ID NO: 3789 - DNA, 2010 bp, Glycine max
  unsure (1)..(2010): unsure at all n locations
ctcgagccgaatcggctcatggtccaatcatgctttctactctctttactctttagtttaattttattttttgtatatattaaggcggcacagacccaagtgggtgtaagtcagtcttgggagtgagtcactcttcttgcataacccagatctgtagacaatatgcgaagaactggcttgttacatttgttatgccttgtcattgctttagtaagtgtgcaagcagaagatgcgtataagtattacacatggacggtgacttatggaactatttctccattgggtagtccccagcaggttattcttatcaatggtcagtttcctgggcctagacttgacttggtgactaatgagaatgtaattctcaaccttatcaacaagctggacgagccatttttactcacttggaacggtattaaacaaaggaagaattcatggcaagatggagttttgggaaccaactgccccattcctccaaactcaaattacacatacaagtttcaggccaaggatcagattggcacatatacatactttccatcaactcaactgcataaagcagctggagggtttggagcactcaatgtttatcatagatctgtcatcccagttccttatccgtaccctgatggagatttcactttactcattggtgattggtacaagaccaaccacaaggtattaagagaatctttggattctggaaaatctcttgcctttcctgatggtctccttatcaatggccaagctcatacaaccttcactggtaaccaggggaaaacctatatgttcagaatctcaaatgtaggcttttcaacctcaattaacttcagaattcagggtcacaccctaaaattagttgaggttgaaggatcacacactgttcagaacctttacgattcacttgatgtccatgttggccaatcggttgctgtgttagtaaccttaaaccagcctccaaaggactactacattgttgcctcaacaagatttacagagacacctctcactacaactgctgtactacactatgcaaactctttttcctctgcattgggacccgtgcctgctccccctgttgataaatatgactttgactggtccatgaagcaagctagaacctacagatggaatctgacagcaaatgctgctaggcctaatccacaagggtcattccattatgggaagattactcctacaaaagtaattaagttggccaattcagcacctttgatcaatggaaagctccgttatgctgttaacagtgtctcctatgttaaccctgacacccctctcaagcttgctgattacttcaacattcccggaatcttcagtgtgaatttactccaaaactctccctcaaatggtccaggatacataggcacctcagtgttgcaaacttctctccatgattttattgaggttattttccagaacaacgaaaacaccatgcaatcttggcatcttgatggttatgatttttgggtcattggtcatggtttcggccagtggacagatgctagcagaaaaacatataatctagtggatgccctgactagacacactgcacaggtgtatccaaaatcctggactactatattggtgtctttggataaccaaggcatgtggaacttgaggtctgcaatatgggaaaggcaatatcttgggcaacagttctatcttagagtgtggaatgcacagaaaagccttgctaatgaatatgacattcccaataatgttctgctttgcggcaaagctgttgggcatcacccttagaacatatatcaactatcagcctcctatttatcggtgtattttctggtcatgagggcttgactacaactagaattccttttcctttttcttaaaaatgaaaaaggacaatgagaagctactttctccaaatttcggatagactcgagtatatttgagaaaaaaaaaagtatttttattaatttttcatttgctcgtttgagtattaacaattganttcatacttaatttatttat

SEQ ID NO: 3790 - DNA, 793 bp, Glycine max
ggtgtattaaatttttaatcaaggattaatttcataatcaatcccgaaactgagttccatagttaaagagtcaaacttgtgaagataacttaagattttacaggagaaccaaataccctaatcacgatgcttaaaagaaaaattaggtataataaattagtaaaattataactttagcctgaagcaacaccaacttatgaaaacgcgttaacaccgcataaaatggatgatgaatttgttaccttaacaccaaacatagtccaattttttaattatattttcttggcaatcgttcttcgtatatatatcacatgtaatatgaggttccagcagtgcagcctccaagacttggtgagtgtcactgctgaagagagaaccacgcagaactgacgcaatgggaagcacaagtttgcttcatctattacttggtgttgttttggctctgctgagtgtgtctcttgtggaaggagaagatgcatacaaatactacacgtggactgtgacatatggcattctttctccactaggtagtcctcagcaggtggttcttatcgatggtcagtttcctgggcctcaactagacttggtaactaatgaaaatgttgttctcaaccttgtaaacaagttagatgagccatttcttcttacttggaatggcatcaaacaaaggaaaaactcatggcaagatggggtattgggaaccaattgccccattcctccaaactcaaattacacatacaagtttcaggtcaaggatcagatggaacctacacatacttttcatcgacttcac

SEQ ID NO: 3791 - DNA, 352 bp, Glycine max
gtgcccagcattcttttttatcttctcttaaagtgatgtttggactgtgaaataataacagtgtgttttttctctggttatttcagtagacaatatgggaagcactggtttgctacatttgatatgccttgtcattgctttagtaagtgtgtcgcttgtgcaagcagaagatgcgtataagtatttcacatggacggtgacttatgggactctttatcccttggctagtccccagcaggttattcttatcaatggtcagtttcctgggcctagacttgacttggtaactaatgaaaatgtaattctcaaccttatcaacaagctggacgaaccatttttactcacttggaac

SEQ ID NO: 3792 - DNA, 364 bp, Glycine max
gaatcatgatttctactctcgttactcgtttggtttgtggttctgtatatatgaaggcggcacagcactggcctaagtgggtgtaagtgagtcttgggagtgagtcactcttcctgcagaacccagatctgtagacaatatgggaagcactggtttgctacatttgatatgccttgtcattgctttagtaagtgtgtcgcttgtgcaagcagaagatgcgtataagtatttcacatggacggtgacttatgggactctttatcccttggctagtccccagcaggttattcttatcaatggtcagtttcctgggcctagacttgacttggtaactaatgaaaatgtaactctcaaccttatcaac

SEQ ID NO: 3793 - DNA, 2060 bp, Glycine max
cccacgcgtccgcccacgcgtccgggcattgtcagcacaatgtccttgtgggcaatactgccattgttggtgttgttttatgtagcatatttatactatcagagcaccgctcgtgaagtaaagcgcttagactcaattagcagatctcccgtttacgcacagtttggagaagcactgaatggcttatcaacgattcgtgcttacaaagcgtatgatcgaatggcagatataaatgggaaatccatggacaacaacatccgattcactctggtgaacataagtggaaaccgatggcttgcaatccgattggaaactttgggaggcctcatgatatggttgactgcaacctttgccgtcatgcagaatggcagggcggagaaccagcaagaattcgcatccaccatggggttactacttagctatgctctgaacattactagtttgcttaccggtgtgctgaggctggcaagtttggctgagaatagtttaaacgcagttgaacggattggcacttacattgatttgccctcggaggctccctctatcatcgatgataatcgccctcctcctggctggccttcctcaggctcaatcagattcgaagatgttgttcttcgctacagagctgaacttcctcctgtgttgcatggcttgtctttcaccattttcccaagcgataaggttggcattgttgggaggacaggtgcaggaaaatccagcatgcttaatgctttgtttcgaattgtagaattggaacgtggaagaatattaattgatgattatgatgttgcacagtttgggcttgctgatttgcgtaaagatcttggcattataccacaatctcctgttctcttttcaggaactgtgagatttaatcttgatccatttaatgaacacaatgatgctgacctctgggaggctctggagagggcacatttgaaggatgtgatacggaggaattctctggggctggatgctgaggtatctgaggcaggcgagaacttcagtgttggacaaagacaactgttgagtctttctcgggctttattgcgtagatcaaagatattagtacttgacgaagcaaccgcagcagttgatgttagaacagatgcactcatacagaaaacaattcgagaggaattcaaatcttgtacaatgctcattatagctcatcgccttaacaccattattgattgtgatcggattcttttgcttgatggtggtaaggttcttgaatatgatacccctgaggagctgttgtcaaatgaaggtagtgctttctctaagatggtccaaagtacaggagcggcaaatgcccaatatttacgcagcttagcccttggaggggataagtcagaaagagaagagaacgagcatctagatggcaagagaaaatggcttgcttcttctcggtgggctgctgcagcgcaatttgctctcgctgttagtctcacctcatcccataatgaccttcaacgtttggaagtggaagatgagaacagtattctgaagaagacaaaggatgctctgataactttgcagggggttttggaaaggaagtatgataaagaaatcgaggaatctttgaaccagcgccaagtatccccagagggatggtggtcatcgctttataaaatgattgaaggtcttgctatgatgagcagattggccaagaacaggctccatcaatcagacttcggttttgaggacagatcaattaactttgatcaagttgatatgtagggaaaactgcactactttagataacagctcctgcctactgatgactgatgacttcgatcaagtcgatagacctaaggttttgctaactttattttggcgcgtagctctacaacggagctatgaaaatcaaccaagaactttttattgtttactttggtgagtagaaattcttttcatgtagtattgtaattttgattaccaaaagaattttcatcgatgctcatcttcattgagattgttcttttgtctatttagtttttaaaatattattatagataggaatggtttttagcaattattatattacacgaagactt

SEQ ID NO: 3794 - DNA, 338 bp, Glycine max
attaactttgatcaagttgatatgtagggaaaactgcactacttcagataactgccctgcctacacatgattgataacttcatgagtttatagccccaaggttttcctcactattttttggcacatagctctacggctgcgctagcgccatgagattctaggagatgcaataattgtattttgtagagtcttgtttcacattatcaaccaagagctttggggttttttggtcaatagaacgttttatcatttgttttggtgagtagaacttcgtgtcatctagtgttgtaatttttgattgccaaaaaggaatttctttaaatgcttctttcatgtcc

SEQ ID NO: 3795 - DNA, 1614 bp, Glycine max
tgacttgatcctgcgaagtgattctgtgtattatttccatgacatgatcgttcagatgcgtaagtggtgagttgcagagggaaagacgctttttggttttggatatgattttcgccacagcaacaggttgcaggaaacaatggatcggttggctgcaaagttagaatcaatttataatgctgcaggagggaagacaataaacattataactcattctatgggcggtcttttggtgaaatgtttcatgtgcctgcaaagcgatatttttgagaaatatgttaagaattgggttgcaatttgtgcgccattccagggtgcaccaggaaccatcaattctacctttttaaatggaatgtcatttgtggaaggatgggaacaaaacttttatatttccaaatggagcatgcaccagttgctgattgaatgcccatcaatatatgaacttatgggttgtcctaattctcattggaaacatattcctgctctggaattgtggcgtgagagacatgattctgatgggaaatcacatattgttctggagtcatatccaccatgtgatagcatcaaggttttggagcaagctcttgtaaataacacagttaattataatggcgaggatttgcccctgcctttcaactttgagatcctgaaatgggcaaacaaaacatgggagattctgtcttctgccaaacttccctcgcaagttaaattttacaacatttatgggaccagtcttgacacacctcatagtgtttgctttggaagtggggacaagcctgtcacagatctgcaacagttacgttatttccaggccaaatacgtatgtgttgatggagatggaacagttcctatagaatcagcgaaggctgatggtctcaatgcggaggcaagggttggtgtgcctggtgaacatcagcgtatccttcgcgagcctcacgtattccggcttctcaagcactggctgaaggctggagaacccgatcccttttacaacccggtcaatgattatgtgattctacctactgcttttgaaatggagaggcataaagagaagggtgtagaagtagcatcccttaaagaggaatgggaaattatttccaaagtccaagatgaccaaagcagcacagcagataaagtgtgttccatatcagtttcacaagaaggagccaatcaatcttattctgaggctcatgctactgtcattgttcacccagacagtgagggtaaacaacacgttcaactgaatgctttggctgtttcagttgatgcctcatgaataacattctgttgaagcctttctgcgtgtttggaaaaatgttgggttcgacgtaacccaccttttttttccaatccagctgtatataactgttccgtttgctgctatggaacacgtgaacggagtttggagctgtgcaaacggcaaaccaaacactcacatgtattgttgattatggatgacatctcttgtatataatgatattcgtttgatgttgctgtgccatatccctcccgatttatgtatgatatgtgaagcgtatgtatcagttatgaaaatgaataccatcgttctgaaattcttgtatataatgataatcgtaaaaaagttgttgtggc

SEQ ID NO: 3796 - DNA, 571 bp, Glycine max
tagaagtagcatcccttaaagaggaatgggaaattatttctaaagtccaagatgaccaaagctgcacagcagataaagtgtgctccatatcagtttcccaagaaggagccaatcaatcttattccgaggcgcatgctactgtcattgttcacccagacaatgagggtaaacaacacgttcaactgaatgctttggctgtttcagttgacgcctcatgaatcacattctgttgaagtattcgtaacgtggagggaatactttctgtctttggaaaaagctagggttcatggtaacccaccttttttccaatccagctgtatagttactttaacgtttgccaatttggaacacgtgaatggatgtctggagccgtaaagggcaaaccaaacactcactatattgttgattatggttgacatctcttgtatataatgatattcgtttgatgttgcggtgccatatccctcccgatttgtgtatgatatgcgaagcgtatgtatcagttatgaaaatgaataccatcgttctggcattcttgtatataatgatattcatttgatgttgctgtgcc

SEQ ID NO: 3797 - DNA, 790 bp, Glycine max
tgggaaagaaaagtcgcatatccattgtgcgcacccaaatactacaagcatttcatttatttttccattccttataaaacccgaaaacaaaaaccacgcaatggtcacgtccaacaccaacaacaccatcctcaaaatctccaaactcgcgatcctcctcgttttgttcgcttcagtctgcaacgtcgctatgtcggactccaccgccaaacccctcgaccagcacgccaccacgggctctgaccctactgcgccagcggttcacatcgtgtacaccgagagaccacagaacgaggagcctgaggcctaccacatcagaaccctcacttcagtccttggcagtgaggaggctgcaaaggaagctttgttgtatagttacaagtctgcagccagtgggttctcagctaagcttactccggagcaggttgaacagatttcaaagctaccaggtgttcttcaagttgttcctagcaggacatatcagctccatggaccaaataacctgcagtagagaatgttcacctaaagttgtatcggttaaaccgttatctatgccatgtataaactaaactagtgtggctctagacttgtgccaataagaacatggaattaatatataataatacattactaatatttgtgctatatgtttatcaatgtgtcatgtattcaaagtggcaccaatggaccctgtgttgtgcttgtgcatattatcctgtaaaaccattgagaacttgttttgatgctttgagatgtaaatcctagtcaccgaggttgtgaccattaactt

SEQ ID NO: 3798 - DNA, 379 bp, Glycine max
ctcgagccgaatcggctcgagtctttatagaaatctaatcgtttttagttcatacagttatcaaaagtgaccccacatcagaactaaaaacatgtgcttctgttagtcattaaaaatctattaagtttgtagggttaattaatagggagtgaaaccaaattttgagagtcaacattatctcttgtctctctctctctctctgttctgttgtgcatgatttgctattcctactgatttttctcattgagctccccgttggcccatataacctgcaaattttttactactttacaatgtgcagagctaccaggtgttcttcaagttgttcctagcaggacatatcagctccatggaccaaataacctgcagtagagaatgt

SEQ ID NO: 3799 - DNA, 841 bp, Glycine max
cccacgcgtccgggagctatggcagttgaggttgtgggatttgagatggttcaagggccagtggagaatggtgctaaagaagacatatctatttcagaaaaaactgaaaatgggaaattggaacaagacacaggagttgctgagccaacaaaatttgggtcacatggagatgaatctgctaaaccagaagcaaatgttgtttcagatgccaatgtccccaaagatgcagttgacgattggcctgcgccaaggcagatacattctttttattttgctaggttccggccttatgatgatcccaacattaaagcgaaacttgagaagtatgataaagagattagccaggaaaatccagcacgaattcaggtcactgatgctttaagggcaaaaaggacagaaccagcagggtgtatttctcagattaagtctctaaaaggtgacaataggcaatttcagagcattgttgatgaaaaaattaaagagattgaacctctgcagcaggcactgggcaagctgcgtactgcaaataatgctggtcggggtgttggattatgctcatctgaggaggagcttaacaatcttattaatagcttgcactaccgcatacaacatgaaagcattccgtttgctgaagaaaaacaaatccttcgagaaattaaacagctagaggggacaagggagaaggttattgctaatgctgccatgagagccaaagtacaagattctatggggcagaaagaagccattcaagatcaggttaagcttataggtggtgatttggatggagtcaaaaaggagaggcaagcaatccggtccaaaatcaagcaacttgaagatacag

SEQ ID NO: 3800 - DNA, 3015 bp, Glycine max
gagaaaagctggatattacaatgaagagacctaattttcttctacaagaaatctggattttgaactgggccagaaagtctttgttttaattgtattttaccatatgataaattttcttttgggattggcttcaagaagtagtagattaatagtcactaaagcaaagtgtcattacattgaaagttattatgttttggtatctcatgttcagactttggtaaatatacaaagtgtagtttcagcagataagattgatcgtcatagtccatttctaatcgaattagttttagttcaatgttatggaatgacaccattctagtataggtcttttagtttaaagaatctgttaatgtaggtgccattagattgagtgatgatttgatatcctagtcaaatggtcagttttgaatccaagatgatgttatattcatgtctatcgggaagtatcaagaagtaatagcaccttgtttaaatgtataattcaaatgatgcaattggggcaacctaataatttggttaatggtacattttgtgttgtcaacagtctgttctgcttatcagttttttgttttcttttcttactgttttacatttcttttatattgatttctatatagtcgagcaaataaagatttttgtgccatgaaagtattaacatctggggagggaaaaagtgtgatatacttcattttgaattataaattaatggatgcactacagagtcaacatattcaaaccctagatgaagattatacattggtgatttaaatctcagaatcatgcatagaatcaaaacattactttcttcttatcatgttgtgtaggaagggtagtatatagacttcactggtgtgtaaataaaaaggaaaatgttatacaagatttagtcaaagtcaatttttcccttttgtatcttgttcttttttaatgtctgagagggggaaaagaaagggcaaatataattaaatttaaaggaatgcataaaaattggttgaaaggaagtaattagaattccgaacaatataatccgtcaatcttatcaccttccttcttgctgttgtttatgcattcttgtgctcatacattcacaataggacaaagcttaagtggttcatatggactttattatacctagttttagttaaatagaatatttcttctactgctgaccatgtcttttatttttaactttatgtaaaaaagtgtatgttatcttgttatgaaaaaatgaaaaaaaaatagtcttgtttcttgcatccttttctaattagttcaatatgtttagtagttaacaccgtgtgaagaagatggctggtgttaagagaagattatgtagtgattcagatatccatgctcttcacaaagaattggatgaagtttcatgtcctatctgcatggaccatccacataatgctgttctcctcctttgcagctctcatgagaagggctgcagatcttacatttgtgatacaagttatagacattcaaattgcctggaccgttttaaaaaaatgagggacaattttaaggagaaccaaaatttacccagttctttagtaaacacaaacaattctggtaatagttttgatattaaccttactgtgcaatctgacatgcatgatgttaatgaactccatcaaaatgaaattaatgctctattgtctgttggacttgcacaaggatcaagacagggtgatgcccaagatccaaataggcatttagaccaacatgatgaagggattttagaaactgctgattctgagaccttgcaggacagggctgtgcttgaggatttagatgcagatgattcgtctgagtcaaaattaaacttgaaatgccctttatgtagaggctcagtattgaactgggaggtggttgaagaggctagaaattatctgaacatgaagaagagaagttgctcaagggactcgtgctcatttgttggtgattatctggaattgcgtaggcatgcaaggagagttcatcctacttctcgtccctctaatgttgatcctacaagagaaagagcctggcgacattttgagcgccaaagagaatatggtgatattgtgagtgctattcagtctgccgtgcctggagctgtgctagttggggactatgctcttgagaacggagacggtattggtaggttaccagacgaacgtgctgaaggcaacattggcaacgccaacggacccatggttagccaccactatcttgtttcagatgatggatagcaccgttgaaattgttagggaaccaagagcacattcgagtgcctggacaaggcaccgtcgttcagatgaacgtcggcgctatctgtggggtgagaatttattgggtcttcatgataatgacattgaggatgatctgcgtatatttagggatgcaggtgaagatgcatctcctgtgccaaggaggcgtcggcgtttgacccggacaaggtccaatgaagatcaaccttgatgactgccaccattttacctggtaatattcatagttcagttttttggcaggaaattacttgaattgttttggatttgtcatcggttaacccacttggtttcttcactagaattgtctgaacagcatgcagaacttgttcaaagttttgtactggaaacatgcattaatgtaccagctttggacccagtagagtatgctgaagcagcaagttcagaataaatcatggtcaaatccttaaacacaagtttaattgaaccaaggaaaattgctaggaggatgttttcaaagaaccctttaatgtaaagacatttagccttgggcacgctaaacatctgggtgatttggaaggttattgcacagttaatatttgtattattatgtataacttgtactgtaagtactttattgttgttcaatccttttctaatctcttctactaattttttttgttttaagcttgagaatattgtgtgattcttatgaggcacattgtatatctgtttgctggggtataatgaaaaatctagacaagtaccctcatctgaaaaa

SEQ ID NO: 3801 - DNA, 487 bp, Glycine max
atgataatgacattgaggatgatctgcgtatatttagggatgcgggtgaagatgcatctcctgtgccaagtaggcgtcggcgtttgacccggacaaggtccaatgaagatcaaccttgatgactgccataattttacctgaattgtctgaacagcatgcagaacttgttcaaagttttgtactggaaacatgcattaatgtaccagctttggacccagtagagtatgctgaagcagcaagttcagaataaatcatggtcaaatccttaaacacaagtttaattgaaacaaggaaaattgctaggaggatgttttcaaagacccctttaatgtaaagacatttagccttgggctcgctaaacatctgggtgatttggaaggttattgcacagttaatatttgtattattatgtataacttgtactgtaagtactttattgttgttcaatccttttcttatctctactaaattgtttgctttaagcttg

SEQ ID NO: 3802 - DNA, 415 bp, Glycine max
ctcgagccgaatcggctcgagtccgtgtcttgtttcttctctgcatcctttgggatctcttgcatagaccaaccccagaagaagaaggaaaaaaataaaaaaaaataaaaatcaaccctttttattttggggcttgttggtgattctgttgtacagaagtgttcgttagttatacatttgttcaagattgttgtatagattgattcattattttaacgtactttggagcattgcatgagtgattgccctctgattcttttgtgaagtcaactaaagtccctataattacaaactgagattcagaagcctccggtaggggtatagctagagcttattgccttgctctcatgagaagggctgcagatcttacatttgtgatacaagttatagacattcaaattgcctggaccgattt

SEQ ID NO: 3803 - DNA, 710 bp, Glycine max
  unsure (1)..(710): unsure at all n locations
ctgcatcctttgggatctcttgcatagaccaaccccagaagaagaaggaaaaaaataaaaaaaaataaaaatcaaccctttttattttggggcttgttggtgattctgttgtacagaagtgttcgttagttatacatttgttcaagattgttgtatagattgattcattattttaacgtactttggagcattgcatgagtgattgccctctgattcttttgtgaagtcaactaaagtccctataattacaaactgagattcagaagcctccggtaggggtatagctagagcttattgccttgttaacacagtgtgaagaagatggctggtattaagagaagattatgtagtgattcagatattcatgctcttcacaaagaattggatgaagtttcatgtcctatctgcatggaccatccacataatgctgttctcctcctttgcagctctcatgagaagggctgcagatcttacatttgtgatacaagttatagacattcaaattgcctggaccgttttaaaaaaatgagggacaattttaaggagaaccaaaatttacccagttctttagtaaacacaaacaattctggatcaagacagggtgatgcccaagatccaaataggcttttagaccaacatgatgaaggaattttagaaactgctgattctgagaacttgcaggacanggctgtgattgaggatttaaatgc

SEQ ID NO: 3804 - DNA, 1084 bp, Glycine max
tctcgagccgaatcggctcgagggagcgtcgtgggtggggggttatgatgcgaaaagggtgctggttggagcaggcgctcgtgcgcttttctatccaaccctgttttacaatgtcgttaggaataagattcaggccgagtttcgatggtgggataaggttgatgagttcatattgttaggtgctgttccatttcctattgatgttccccgcttaaaggagcttggtgtccgtggggtcatcacattgaatgaatcatatgagactttggttccaacgacattatattatgctcatggaattgatcatctggtgattcctactagagattactgttttgctccttctctgcatgacatttgccgtgctgtggacttcatacatgaaaatgcattgtcgggacgaactacatatgtccattgcaaagctggacgtggtcgcagcacgactattgttatttgttatctggtgcaccacaaaatgatgacacctgatgctgcatatgcttatgtgaaatcaattcgaccaagggtgcttctagcttcctctcagtggcaagctgtccaagaatactactaccatcttatggtgaggagggccgttggatgtgctcctacagccaatctatttgtaaaaacttctcaggtggcagcaggttcacgagatcttgtgatgtttgatgacaattctgtagtcatggtaacagagtcagatctagaaggttacaacccaagtagtcaatcaggagccatggcaagtgaaatatgggcagatttaagtgttgtataccgtgtacgagttgctggacaggcagcactggcgagaatatcatgcctttggctgcgatatggtactaccgaccagaagatttctacggagaaactgagcagcagggaaagcagttgctcaatcagggctaatcacttgggagaaattagtgttgatatccacgtgtactgaaaaagcacgttaagttgcctacaagtcgtgtttttcattttctgcccaataatcgtacatatttggcgtgcctgaatctataactcgttttcctctgtatattctgctgttttctcatttgagttc

SEQ ID NO: 3805 - DNA, 600 bp, Glycine max
gatccttttactttcgggtgcagagtttgttgagcaaaagagccattttcttctgattctaccaaatctagggttagggattcaatttcccaacttcctctctctctcccgattctctttcctttttcttttccttcctccgacaaattttccctctctctctttctctctcttgcagattacgataaccactcttcctcgatctacccttttccgaaagaaacatggttttattttcccgggaaaattctcctcccagttttctcggccaaccttctgtcctatatatcattccttcttcgatttgttgtagaattccaatttcctaggttttctcgatcgatctattgatccgccaatttcaatttgggttcatattgttaggtgctgttccatttcctattgatgttccccgcttaaaggagcttggtgtccgtggggtcatcacattgaatgaatcatatgagactttggttccaacgacattatattatgctcatggaattgatcatctggtgattcctactagagattactgttttgctccttcattgaatgacattttccgtgctgtggatttcatacatgaaaatgcattgt

SEQ ID NO: 3806 - DNA, 551 bp, Glycine max
ttgctcgagctcgagccgaatcggctcccggtttcttctgattctaccaaatcttgggttagggattccttttcccaacttcctctctctctcccgcttctctttcctttttcttttccttcctccgacaaattttccctctatttttctctctcttgcaaattacgataaccactcttcctcgatctacccttttccgaaagaaacatggttttattttcccgggaaaatactcctcacagttttctgggccaaccttccgtcctttatatcattccttcttcgattcgttgtagaattccaatttcctaggttgtctcgatcgatctattgatccgccaatttcaatttggggcaattagattttattttttgcttccccgtgtgctctaaatttttttcttgtgattgttttggtggttgtaaatcgtgatagattcgtggacaggatacgcgaggagttgtaatttgtaaaaaattgtaatttgtaaaagaaaagagcgtgggtcacaccataggtatttgttgattagggttttggtaattatcgg

SEQ ID NO: 3807 - DNA, 449 bp, Glycine max
ggtgaaaaatttagataattaatgcttggagaataatggcattcttccaagtgagtgtcaggcgttggattttaacctttgctatcctttacgtttgtgtatttgggaaaaactttggaaatgctgatgaggatgagtccgaggcacagacaggtggtggtgggtacggtggtgtgggaggtggttttggtggtgctggggccggagttgttggtggtggtggtggatttggagccggtggtggtggttttggagccggtggtggtggggttggtagtggtgaccctgctcaaattgtctccaaagccttgctctgtgtcaatgataagaatatttatcgcagctgcgaagagacgtgtagattgaacgagaatggaaacctgaatgtgcctgtagagaaaactgatacattctgccaaggaccatgtttgtcagagacaaacttggtc

SEQ ID NO: 3808 - DNA, 1404 bp, Glycine max
gggagcagagcagagaagagaaacaaaaggtggggtcagtggaaattatcatcatacaatttcacttaacccttcaagctcaagacagcacagcaatcacatcgcatgtcccttatatatatacttattcattgcctctgaaccttatcaaaacacctctcaatctctctctctccaatggccaaagacctcgaaacggagattcaaagtgggttgcctcacaaggactaccacgacccaccccccgccccattctacgaccccgccgagctccgaaagtggtccttcttccgagccctcatcgccgagttcgtcgccaccctcctcttcctctacgtcaccatcctcaccgtcatcggctacaaccaccagacagccaccgccgccgagccctgcagcggcgtcggcgtcctcggcatcgcttgggcctttggaggcatgatttttgtcctcgtctattgcaccgccggcatatcagggggacacataaacccggcggtgacgttcgggttgtttttggcgaggaaggtgtcgctgacaagagctgttgggtacatggtggctcaggtgttgggggccataagtggggtggggcttgtgaaggctttgcagaagagctactacaacaggtacaaaggtggcgtgaacatgctcgctgatggttacagcaaaggaaccggtttgggcgctgagattattggcacctttattcttgtctacaccgtcttctctgctaccgatcccaagagagtagcaagagactcccatgttcccgtgttggcaccacttccaattgggtttgcggtgttcatggttcacttggccaccatccctatcaccggcactggcatcaacccagctagaagccttgggcctgctgtcatattcaacaacgagaaggcttgggatgaccagtggatcttctgggttggacccttcatcggtgctgctcttgctgcattctaccaccagtccgtgttgagggcccaagcagcaaaggctctagggtctttcaggagctcctcaaacctgtaattctggccaagctatttgagctacgagagacatgcttcatttaattgtgttcttaattaatttgcttatacatggtggattggaataatctgtatatcctcgtcactatgtttatttaatttatgtttactatatttgtggtgacgtccatctcaacagacatgcccatgttaatttgtgtatgtatttttaagtgttacgtacatgtgcgttagtatcctgtggtcgtggttttcgcgttttcttgccaataccatgtcgttttattacttgatttctttgtcaattgttatcgtgcgatgttgagatatgataggatcacgtgtagtgaagagtttatgagagcaaaatggttgtgctatgtgtcta

SEQ ID NO: 3809 - DNA, 2816 bp, Glycine max
gcactgtttcacagttggatggtggggctattgcagagcatcctttgtatacagttgattcattgcagataaaaaatgatttgaggcatcctgctacgacttcaggagatggtgaagccatttcatcgagttgtgtagagaaaagtggtgatggtagatctcagataaatagctcccctacagatttcttacaaaatgctgaaggtccatgcttacggcctgaaatcaaagaggatacttctgaaactatattgccagataaaaaggagactaatgtagacctcggaggttctgactctaaattaaagtcatgcacttcctctattgatgatgatcagaaggttgatcacatgaatgagggaaccactgagaatgaggaattgttggttccaaaagctgttgcaagtgttaagtctgaaaatgaatcgggtgaaaagcatcctgagttatcctcaggtgtggataatgagaaccagattagtgcagagaaatcaacaggtactggtatactagtgcaaaaggcctctccagtttctgaaaactgtgagtctttgtatttaaaaaaggagtcacctacttctggtaatgctgtaatggtatccagggatgaaaatgctgatgacacgaagtcagttgtgattgagcctgatgaaagaagaacagggcaggatttatcagtttcagatgatgttaatgaacgtgctgatactatgggtagaaaagaggctattggtcagtgttctggctcatcagttcattcagatttaccaacagtgcctagggaagagaatgatgcatttaaagcatctgagcgaaagttggatacaaataaatctgaggttgcaggagagaggcatgcatgttctgctgctgggtctgatactgctgtaaaactcgacttcgatttaaacgaaggctttcctgttgatgatgtaagccaaggggagattgctagacaggaagatcctaccacatcatctgcagttcatgttccttgcctattgccttttcctatttcgtccatctctgggggcttccatgcttcaattacagtggcatctgctgcaaaggggcctgttgttccacctgaaaacccattgcggattaagggggagcttggttggaaagggtcagccgctaccagtgcatttcggccagctgaacctaggaaaaatgctgagacagcatccactactaatgatattgcttctgttgacgtcacttctatcaaacaaggtcgcgctcccttagattttgatttaaatgtggcagatgaaagatgttttgaggatgttggttcgtgtgcttctttagaagctgggccacttgatcgtagcactgggggatttgatttaaataaatttgatgagactcctgaaattggtactttcttgataagcaaactggatattccttctttaccaagtaagccttcgttgtccagtgggttatctaatggcggaagtgtctcaagagactttgacttaaataatggaccaggccttgatgaagttgggagtgaagtcccaacacgtagtcagccaatgaaaagtactgtaccatttccaactgctgttcatggcacgagagcaaacaatgctgaatttgggaattattctgcatggtttcctcctggcaatacttattctgcaattactgtcccaccacttctgtccggcagaggggagcagagttatgttgctggtgctggggcgcaacggataatgggtcctacaggtagtgctccttttggtcctgaaatctacaggggaccagtgcttccatcctctccagctgttgcttatccacctactacgccttttccctatccaggatttccatttgaaaccaattttccattatcttcaaactctttgtctgtttgttcaacagcatttatggattcgtcaactgtgggtggattatgctttcctaccatgccctcacagccagttgggtctggtggtgttgtttcatctacgtatccccgtccatatgttatgagtcttccaggtggtacaagtaatgtgattcctgacagcagaaaatggggaagtcaaagtctggatcttaattcgggccctggtggtatggatacagaacggagagatgatagattgccttcaggattgaggcaaatgtctgtccccaattcacaagcctcgatggaggaccacttgaagatgtttcagatggctggtgcattgaaaagaaaagaacctgatggtggttgggagggagccgagagattcggttacaaacaaacttcatggcagtagtgccatggctcttcagcgcaaatattcaagagctattttggaaaatgtcagaaaaattggggatattattttgagtgttgagccatggacaacaagcaaagatgctacccttgttgctgatgtgcctcttcagttctgacttgataaagcgatcagggcctctgatgcagttgttttgtatgaatctgctcccagattgtcgcttgcagataaatgtttttcctgtgtagatatctaactgaaaacagcaggtgtgataatgccgcctagaatcagagaaattggcatcaagtgtttgactgtgactgttctgcaacagcaccgagcccaatccattctcgagcatttggaaggagaggattggatgtctgaactggctaggcttgaggccagtttgtctttctttaaatcatttttttttcaacttttgttacatatatagttattgctgtagtcttgactctggaattttgtcacttatcacattctggctattggtatatgcacaggttggccaatgtgtcacttctctcccct

SEQ ID NO: 3810 - DNA, 1553 bp, Glycine max
agacgacagaagggggaactccaaaacacaaacaaaaactcccgttttctctctctgtttttccatggccatctgatcaaacttttcttgattctctctctcagtttttgctattctgagtgatgggtatgccctgccgctgttcccacacctcccacatcactgaaatcatcatcaccagcttcttccgccacaagtcttaaattacaacaatttccctcaattattcatcaaccaaccaccttaatagccttttccaatggttccttaaagatccaacttggtcggagtaaacatggcggctagtggaagttccttttccaacatcactagcttccttcgcaaccaacaaccctcttcccaacctctcgattcttctctcttcctctctgctccttcaatttttgtttcaggttcgagatccatggtgagttttgaagcagaaggagggaaggggtgtaacggctccttcttccgcgcgtttgacatggacgacaatggggacgagtgcatggatgagtactttcataaacccgagaagaagcgtcgtctctccatgaaccaggttcagtttctggagaagagtttcgaggaggagaacaagcttgaaccggagagaaagaccaagcttgccaaagaccttggtttgcggccacggcaagttgctatttggttccagaaccgtcgagctcgctggaagaccaagacgctggagaaggattacgaggctctgcatgcaagttttgagaatcttaagtccaactatgacagcctcctcaaggagaaagacaacttaaaagctgaggtggcgagcctcaatgagaaggtgcttgcaagagggaaacaagaggggcacatgaagcagcaggctgaaagtgaagaagaaacaaaaagattattgcatttgcaggaacaggaaccaccccagaggcttttactggaatcagtttcggagggagaaggatccaaagtctcttctgttgtcgggggttgtaaacaggaagatatcagttcagccaggagtgatattttggattcagatagtccacattacaccgatggagttaactccgcactgctagagcatggtgattcttcttatgtgtttgagcatgatcaatcggatatgtcacaagatgaagaagataacctcagcaaaagtctctacccttcgtacctctttcccaaacttgaagaagatgtggattactccgacccgcctgaaagttcttgtaattttggattttctgaggaagatcacgccctttggacctgggcatactaagttttcttccatgttcatgtgtgtgtttgtgtcatatgtttttttagtaattagtatttagtatttgcactttttgtccaggcttcaaaaatggctatagctttagctttatcaggaaagaaatgtttgttttctttttgcctcattttgttagtacttgtaatcaaactgttggttccaatgtaattaaataatgtcttctcgttgagaatgtaactatagatttcatttaaaaaaaaaaaaaaaaaaaagggcgaccgccgaccta

SEQ ID NO: 3811 - DNA, 377 bp, Glycine max
ctcatcaagagtctctacccttcgtacctctttcccaaacttgaagaagatgtggattactccgacccacctgaaagttcttgtaattttggatttcctgaggaagatcatgtcctttggacctgggcttactactaagtttttttctttcatgtgtgtgtttgtatcatgtgtttagtatttagtatttgcactttttttttcaaggctttaaaaatgagcaataagtcagagcaatggctatagctatagctttagctttattaggaaagaaatggtgggctttttttgcctcattttgttatttgtaatgaaactgttggttccgatgtaattaaataatgtcttaatattgacaatgtaaaaaaaaaaataaa

SEQ ID NO: 3812 - DNA, 338 bp, Glycine max
ctcgagccgactcgtacaaacatagtaaccgcttctctctctttctctctctctctctctctttttccatgtccatctgataaccctttcctgattctctttcgtggttgttgctattctgagtgatgggtatgccctgccgctgttcccacacctcccacatcactgaaatcatcatcaccagcttcttccgccacaagtcttagatcaacaatttccgtcaattattccaaaaccaccttaagagcctttttccaaatggccccttaaagatcgaacttgagtcggacgtaaacatgcgcgaggtacgtggaagtagccttattccaacatcacta

SEQ ID NO: 3813 - DNA, 780 bp, Glycine max
ttcccgaaccgcgcgcttcactcctcttataaaaaaccccaagctcgacaccttctactacctcgagctcctcgggatcagcgtcggcggctcgccggtgcgcggcctctccgcctcgctcttccgcctcgacgcagcgggaaacggcggcgtcatcatcgactcgggcacctccgtgacccggctcacccgacccgcctacattgccctccgagacgccttccgcgtcggggcctcgcatctgaagcgtgcagcggagttctcgctcttcgacacgtgtttcgacctgtccgggctcacggaggtgaaggtgcccacggtggtgctgcatttccgaggtgccgacgtgtcattgccggcgacgaattacttgattccggtggacaacagtgggagcttctgcttcgcgtttgccggaactatgagcggtttgtccataattggtaacatccagcaacaagggttccgggtctccttcgacctggcgggttctcgggtcgggtttgccccgagaggttgcgtttgagttttcttgggaaatgggagcaactctttccctgctgttctctaattatgaatatcaattattgttgccatctctttcttcttttgttttttaatattaaataacaaggttagattagagaaggagggggagatctcaatctagatctgaaggagaaaactaggattcaacaaaaggagaatgtttctgtttgtcgcttgttgtgtattttatttcccaatccaatccaatacaatacaaggggttattcgacg

SEQ ID NO: 3814 - DNA, 1229 bp, Glycine max
cccaccaattctgaatttgcgggttttggatttggacttggtcgtcaacacagtctaattaatatctttttgctccttcgcttatgaatcttcttcttcttcttcttcttgttcctgcaacgcactgaattcgatcaatcaatccatcttcaattgctttgtttcgatcggaggaaaatggccgatcagttatcgaagggagaggaattcgagaaaaaggctgagaagaagctcagcggttggggcttgtttggctccaagtatgaagatgccgccgatctcttcgataaagccgccaattgcttcaagctcgccaaatcatgggacaaggctggagcgacatacctgaagttggcaagttgtcatttgaagttggaaagcaagcatgaagctgcacaggcccatgtcgatgctgcacattgctacaaaaagactaatataaacgagtctgtatcttgcttagaccgagctgtaaatcttttctgtgacattggaagactctctatggctgctagatatttaaaggaaattgctgaattgtacgagggtgaacagaatattgagcaggctcttgtttactatgaaaaatcagctgatttttttcaaaatgaagaagtgacaacttctgcaaaccaatgcaaacaaaaagttgcccagtttgctgctcagctagaacaatatcagaagtcgattgacatttatgaagagatagctcgccaatccctcaacaataatttgctgaagtatggagttaaaggacaccttcttaatgctggcatctgccaactctgtaaagaggacgttgttgctataaccaatgcattagaacgatatcaggaactggatccaacattttcaggaacacgtgaatatagattgttggcggacattgctgctgcaattgatgaagaagatgttgcaaagtttactgatgttgtcaaggaatttgatagtatgacccctctggattcttggaagaccacacttctcttaagggtgaaggaaaagctgaaagccaaagaacttgaggaggatgatcttacttgaattgtacctttaatattcctggtggttggacctattgtttgatgatttacattgtactactatgtgtgtctgtccagttgttcgtcttacacatccacttacagagtgtacctgctttggttttaattgaattggtctgactgaattcaaaaaatgagtttttaatgaggttgctggagtct

SEQ ID NO: 3815 - DNA, 398 bp, Glycine max
cgcatttctgaaaaccccttacggcttacgctgctttcttttttcttcatttgcggttttgatttggatttggatttggatttggactttggtcgtcaacacagcttttggtccttcgcttcgtttacgaatcctcttcttgttgttcctgcaacgcactgcattcgatcaatccatccatcttcacttgcttggtttcgatcggagggaaatggccgatcagttatccaaaggagaggaattcgagaagaaagctgagaagaagctcagcggttggggcttgtttggctccaagtacgaagatgccgccgatctctttgataaagccgccaattgcttcaagctcgccaaatcatgggacaaagctggagcgacatacctgaagttggcaagttgtc

SEQ ID NO: 3816 - DNA, 1046 bp, Glycine max
cttactaatcctgaaaagtgaaaaaaacagtgagtgatatttttgctttgcgtgcttagcgggagagggaagctgaagagaatattttcgttttcgaaatccaccgatctctctcattcttcaatggccaccctttccgcatgcgcttcccctccatggccaaaccctaattctcccaattcaaatccagaccctaatttcctccccgatcaatcccaaaccctcgacttcgactccctcatgcctccgcaacccgaatctccaccgccccaccatcaccactcccccgacgcctctccaccggaatcctccccgtcgccgccgcctccgtcgatcctctacctctccttcaaccaggaccaggcctgcttcgccgccgccgccgacaacggcttccgcatctacaactgcgaccccttccgcgagctcttccggcgcgatttcgacggcggcggaatcggccacgtggagatgctcttcctctgcaacatcctcgccctcgtcggcggcgggcctaaccctcagtacccgcccaacaaggtcatgatctgggacgaccaccagggccactgcatcggcgagctctccttccgcgccgcctgtgcgcggcgtccgcctccgccgcgaccgcatcattgtcgtcgtcgaacagaagatctttgtctacaacttcgcggacctcaagctcgtgcaccagattgagaccgttccaaaccctaaggggctctgtgcggtttcgcagctgtccgattctctcgttctcgcgtgccccggtttgcacaagggtcagattcgcgtggaacactacgcgcagaagaagaccaagttcatctcagcgcatgattccagaatcgcttgcttcgctctcacgcttgatggacagttaatcgccaccgccagcaccaagggtacgctgattcggattttcgacactgatcatggcacgcttcttcaggaagtgagaagaggtgcgaatgctgctgagatctatagtttggcattctcttctactgctcagtggctagcagtctcaagtgacaagggta

SEQ ID NO: 3817 - DNA, 1493 bp, Glycine max
gtatttcctgagcacaagtatgagatcgtgaagcgcttgcaagctaggatacatatttgtggaatgactggggatggagtgaacgatgcacctgccctcaagaaggcagacattggtatagctgttgctgatgctactgatgcagctcgcagtgcatctgatattgttctaacagaacctggacttagtgttattattagtgctgttttgacaagccgagcaatcttccagagaatgaaaaattatacaatttatgcagtatcaattacaattcgtattgtgcttggttttatgttgctggctctcatttggaagtttgactttccaccctttatggtgcttattatcgctatcctaaatgatggtactattatgacaatttcaaaagatcgtgtaaaaccatcacctctgccagatagctggaagctagcagagatatttactactggagttgtgcttggaagttacttggcaatgatgacagttatattcttttgggcggcatacaaaacaaactttttcccgcgagtgtttggagtcccaagtcttgaaaaaactgctcatgatgattaccggaaacttgcctctgcaatctatcttcaagtgagcactattagtcaggctcttatatttgtaactcgatctcgaggttggtcttatgttgagcgtcctggtttattgctggtgtttgcttttgttgttgctcaactgattgccactttgattgcagtatatgccaactggagctttgctgccattgaaggcataggttggggatgggctggagtgatatggttatacaacataatattctatatcccacttgaccccatcaagtttttaattcgatatgctttgagtgggagggcttgggagcttgtcattgagcaaaggattgcattcacaaggcaaaaggactttggaaaggaacaacgggaacttcaatgggcacatgcacaaagaacattgcatggattacaaccacctgacaccaagatgttcaccgagcgcccacatgtcagcgaactcaaccaaatggctgaagaagctaaaaggagagctgaaattgcacggctgcgagagctgcatacactgaagggtcatgtagaatcagttttgagattgaagggtattgatgtagacacaattcagcaagcatacacagtctgaatatgcttttatatatatttgcatactgatacaatccaatggtgctaactatattgaagaggaatagaagaaatataatgttgtttactcactccagttgagttcaatgtcctctcaccgttttgagcacttaaaaggggagtgctttgtaaggtcgatgttactatagctgtcactttttttctctacagttccataatgcaacaacggggagagccgttcatcttctttgcctctaaacgcatttttccttgtacttcactctcaatcccttcagagttcaaactttcaagttatgaatataagaaaaacacgttatttta

SEQ ID NO: 3818 - DNA, 688 bp, Glycine max
gtgagttcttctcttctcgcaaagctctgtatcacattcgttgggggatcgagaatgaccagctcagcggttacggaacaatttgacaaatgcatgaagaagcaagtagaagcaattgcacgagttttgcatttatttcaatcctacaaagaggacaatattccgtgcaaaatcgacgagggtctctatttgggttcgattgccactgcagctaacaagcctgctttgaaagactgtaatattactcacattttgactgtggctggtagaataccacctgcacatcctaacgattttgtctataaaattatagacgttgttgacagagatgatgaagacttaaaacaatacttcaatgagtgttttgattttattgatgaagccaaaagactcggtggaggtgttttggttcattgttttgctggaagatcaaggagtgtgactatagttgtggcatatctgatgaagactcgaggaatgagtttttttgaagctctgaaacatgtgaagagtatacgaccagcagcaggtcccaatcagggtttcatttgtcagctggaggactttgaaaagtctcttcaaggtgccaataaattgcattagtcttatttacaattgcaacctagcttggtgcattattataaacgcatatcataagtcatctacataaaaatggtatatatttacg

SEQ ID NO: 3819 - DNA, 281 bp, Glycine max
ttcttctcttctcgcaaagctctgtatcacattcttccgctgttagcgtatgaccggctcagcggttgcggtacaatttgacagttgcatggagaagcaagtagaagcaattgcgcgagttttgcatttatttcaatcctacaaagaggacaatattccgtgcaaaatcgacgaggtgcaattctcacttcgattttgtacattctgtttttgttaaggcttttattccgttattggtttgcactatgcagggtctctatttgggttcgattgccactgca

SEQ ID NO: 3820 - DNA, 1033 bp, Glycine max
cccggtcccttgtgatttgctcacaaaaccagtgtcggtcacaccatctctcccttttctccacctgcaacgatgtcggttaaggagtgccaccaccaccacaagggaaagaagcacaagctctggagacgcatcttctggggaatagtgatcttcgccttcatcgtgttactgacagttcttataatctgggcaatcctaaagccttcaaaaccaaccttcatcctccaagacgtcaccgtttacggcttcaatgccaccatccccaacttcctcacctcaagttttcaggtcacgctttcctcgcgcaaccccaacgacaaaatcggaatctactacgaccgtctcaacacctacgtaacttaccggaaccagcaggtcacgtaccgaacctcaatcccaccctcgtaccaaggtcacaaggaagaggatgtgtggtccccgtttgtctacggcactaatgtccccgtcgcaccctacaacttcgttggcctcagtcaagaccagaccaacggcaacgtcctcgtcctcgttaagattgacggtaaggtacgatggaaagttggttccttcgtctctgctcactacaacctcaatgtaaggtgccctgctttcataacctttggcccccaaagcaacgggattgcccttggcaataacgccgttaagtatcaattggttcaacgctgcaccgtcggggtttgatgtcaacgccttccaagatatattgctctgcctcttggtatatttagtgtctatttatatacggtctttctcatttcttttttttcatatacgtattcttcctatcttcctctacgtatttcttctacggatcactttgttgttagacatacatatgtctgtcttcgttactgtattttgaattgtacattttgctatagaataaatttgtatttggagaaaattctcatgagatgaagcaaaattacaatttatagcaaagtcattttagataaattaaaacgttgtttcaatttggataaagaattcagtgtctcgtgattcatct

SEQ ID NO: 3821 - DNA, 449 bp, Glycine max
atgatcttaccatatcatttcaagaccttaaagtaccaaacttccaactcttctctcttctctcttcactcttcactcttgtcgtcatttcctcacaaaaccagtgtccgtaacatctccaccttaacgatgtcggtaaaggagtgtcaccaccacaagggaaagaagcacaaactctggagacgcatcttctggggcatagtgatcttcgccttcatcgtgttgctaacagttcttataatctgggcaatcctaaagccttcaaagccaaccttcatcctccaagacgtgaccgtctacggcttcaacgccaccatccccaacttcctcacctcaagctttcaggtcacgctttcctcgcgcaaccccaacgacaaaatcggagtctactacgaccgtctcgacacctacgtcacttaccggaaccagcaggtcacgtaccgaacctc

SEQ ID NO: 3822 - DNA, 738 bp, Glycine max
aaccattcaatcctgacatggtagctgatttaattcatctaaggaaagcttctatattacatgattcacaagttgctgagattctgaatgatatttcacgacgaattgtgcgagacacaggccctattgtgatggataaatcaggttatactgaaaaaggttttaagagaaaaatagctgttcaggccctttttggaaaggtcttctatctgtccgagctgccagagttttgttcaagagatacctccttagttgtcaaggaaatcttcggagttacagatgaagatgctgacaaactcagaatccacacaatctctgaagctggcagcctagatgcacttgagaagatggttgatagttcagattcagacgatgctagcgaggattcattcgaggcctcttaatgcaaatcatatttcagtgtttatcatttgaaaaggtcaaagaataaattgatgctgcaaattaactgtacaacaccatcatcggctcccatccggaagagaaaattttagaggaaggcagtgattcagtacttttactttacgtacaatttacagtgtaacttcttacatactttcgagatccatgatatttgcttgatatttttgttattacggtcttataagtcagtcttagcggcataacggcattgatgtttaaactggagaaattgatagtgatacgtttggatatagataaagaatcatatatgttcatttgggttcacactttgac

SEQ ID NO: 3823 - DNA, 1343 bp, Glycine max
ctactctcacacactgcaacaacgaaaaccaaagaagaaaaaagagtttcttctttccgaaatccaagcagtagggttagggttttttccgatctcaatggcggaggaaccggagagcaccgtcaccaccggcgcccccgacgaatcgctgctcgataagatcaccgagaagcttcacggccacgattcttcctcttcttcctcttcggattccgattccgaaaaaaccgttacttcgtccgttaaggatagggtttttcgcctcttcggaagggagagacccgttcactccgttttcggcgccggaaaacctgctgatgtgttattgtggaggaacaagaaaatatctgctggcgtgcttggcggagcactgctgtttgggtcctttttgagttgcttgagtatcaccttcttactctggtgtgtcacattctgatactgttgctcgcagttctgttcttgtggtccaatgcccatactttcatccacaaatctccacctcgcattccggaatttcatcttccagaggagccattcctgcaagttgcgtctgcattgagaattgaagtcaaccggggatttgctgttttgcatagtattggctctggaagggacttgaagaaattcctagtggttattgctagcgtatggattctgtcaattgtggggaactggtgcaatttcttgaccctgttctacataacttttgtgcttgtcgcacacggttcctgtgctctatgagaagtacgaggataagatagatccacttgcagagaaggcagttattgagattaaaaagcaatatgtcgtgtttgatgctaaggtcttgagtaagatcccattgggtccattgaaagccaagttatcttagttgttaatctttgtaacatctgaaagaaagagctccacttgtttgctcaaggaagttgccagggccagtgtcttttatcgaatgtcgatcttcgccatgtttgggttggttttaggctgggtatggtgtcaatggcaatcagtttggattatcttcaaatagtaatttctcagtagtttctaactgtgcaagcatatgggttttactggtttcttttgaaggtttgtatgagttcaatcaaattgttcttgtaagataaaaatacttgcatgcttctttttatttttatttatttattttttttatttttaagtagcattcgttaccgtctgtgttttggtgttgggttcattatgtagaacaatgttcaaaatatcggtttggctatggtattttgccgaaaaactcggttcctgtggttggtccgtttaccaaaaaaaaaaaaaaaaaaaaaaaaaagcggccgcccgct

SEQ ID NO: 3824 - DNA, 433 bp, Glycine max
ggtcccaaccctactctcaacacactgcagcgagaaccaaagaaaaaaaaagcttcttccattttccgaaatcgaagcattagggttagggttttttccgatctgagaaattcgcggcccaatggcggaggaaccggagagcaccgtcaccaccggcgccgccgacgaatcgctgctcgataagatcaccgagaagcttcacggccacgattcttcgtcctcttcatctcccgactccgactccgactccgaaaaaaccgttacttcctccgttaaggataaggtttttcgcctcttcggaagggagagacccgttcactccgttttcggcgccggaaaacctgctgatgtgttattgtggacgaacaagaaaatttctgctggcatgcttggcggagccactgctgtttgggttctttttgacttgcttgag

SEQ ID NO: 3825 - DNA, 1037 bp, Glycine max
atttccacttgttcttcagcaaactcacaaccacaacccaaccaacccacctgaactactgaacaacaacctcttcttcttctctctctctctttagcataatcattcatcaccacacaagagaaaaaagaaaaagaacaaagaacaaataaacctttttttttttataaaaaaagaaagaaaaggaaataaagttttttgttttttcgatgaaccagaagttcatcggaaagccgccggcgacggtggacctggatcggatgccggagcgtgggtcccaccaccggcgttcccactccgacacctccttccgcttcgccgcgaacttcgacgaccttctcctcttcgacccctccgacttcgacatctccggcctcccgtcgccgctccctctgccatctccggtctccgccggcttggttccgatgtccgtcgactccgacgagtccggcaaacagccgaggccggccggggcgtccgccggcgggcacctgcggagtctgtcggtggattctgacttcttcgacgggctcgggttcggcggcgacgagagaggcgccgggaaaggaggcggcggcgagcggagggtggggcaccaccggcacagcaactcgatggacgggtcgtcgacgacgtcgtttgaggcggactcggcgatgataatggacggtgtgaagaaagctatggctcctgataaacttgctgaacttgctcttatggatcccaagagagctaagaggattcttgctaacaggcaatctgctgcaagatccacggagaggaagattcggtacacaagtgagttggagaggaacgtgcagactcttctgactgaagctactaacctttctgcacagcttaccatgcttcagacagacactacagatttgactacagagaattaggagctcaaactgcgtttagatgctctggagcacgaagcacagcttagaggagatctcactgaggcattgaacgaagaactgccacgccttagtgcacatagtactcgtatgggagctattggtggtcactct

SEQ ID NO: 3826 - DNA, 456 bp, Glycine max
aaagagacatgttggaaattttactgtattagactcataatataatacaaataatttatacttgtgccgctccctctgccgtcgcagggcgccggcggcgtggttccgatgtccgtcgtctccgaggagtctggcggacggccgaggccgtccggggcttccgccggcgggcacctgcggagtctgtcggtggattctgacttcttcgatgggctcgggtccggcgtcggcggcgatgagagaggtgccgggaatggcggcggcgagcggcacagcaactcgatggaggggtcgtcgacgacgtcgtttgaggcggactcggcgacgatgatggatggcatgaagaaagctacggcccctgataaacttgctgagcttgctcttacggatcccaaaagagctaagaggatgcttgctaacaggcaatctgctgcaagatctaaggagaggaagatt

SEQ ID NO: 3827 - DNA, 676 bp, Glycine max
agagaaccccaaagcgtccaacagcattgcaaggatagttaataaaaatcatttcatgagactccagaaccttctcactgagccaagggtcaaagaatcggtggtttatggtggttcaatggacgaaaatgacttatttattgaaccgacaatattgctggatccgccacttgattcagcagtcatggctgaggaaatctttggccctgtacttccaataatcaccctggagaagattgaagacagtgttgagttcataagctcgaggcctaaagctttagctatttatgccttcacgaaaaaccaaactctgcagagaagaatggtatctgaaacatcatcaggaagtcttgtattcaacgatgcaattctacaatacgtagcggataccctaccatttggaggagttggtgaatgtgggtttgcatcaaggatctttgattctactgctattactattactttatactgaacataccacaatgaagtgtcattaatagactgtaattacggagatggattttgtggatccgtatataccactagattcagagaagaaatcagccacagagacgtgtggaacaccagaaaaggacatgacagcacgcaagcttcactagcaaatgccctttatcttcaatttgtaatggtacgatgcgatttatgctaaggacta

SEQ ID NO: 3828 - DNA, 498 bp, Glycine max
cgaaaaaccaaactctgcagagaagaatggtatctgaaacatcatcaggaagtcttgtactcgtcgatgcctttctgcagtacgtagcggataccctaccatttggaggagttggtgaatgtgggtttggcaagtaccatggaaagttctcctttgatgcgttcagtcaccataaggctgtggctagaagaagttacttgactgatttttggtttaggttccctccatggactcttgataagctccaactacttgaggtgtctcacaatttagactaccttggaatacttctagttctgctcggcttaaagaaatcaaatcggtcactatttcaggcttgtaattgagttgcattatgctgcttcacttatctatttcaagtgagtccctaataaggattggtgattccaagcttgtgtgaattcctaggtttatgatgcttaaataaatgcatatctggtttttctgtatgtgttatatgcctagttagacttgggt

SEQ ID NO: 3829 - DNA, 608 bp, Glycine max
  unsure (1)..(608): unsure at all n locations
ggagagagaagcctccatttataaaacatcgtgtgcgcactctctcttctcctaggtttcgctcccatcaacagcaacgatggtgcagaggctcacttatcgcaagcgccatagctatgctaccaaatccaaccagcaccgggttgttaagacccctggtgggaagttggtgtaccagaccactaagaagagagcaagtggacctaagtgccctgtcactggcaagaggatccaagggattccacacttaagacctgctgaatacaagaggtctagattgcctaggaaccgcaggaccgtaaaccgagcctatggaggtgttttatccgggggagctgttagagaaaggattattcgcgctttccttgttgaagagcaaaaaattgtgaaaaaggtattgaagatccagaaggcaaaagaaaagcaggcatcaaagagttaagctgttgagttattcgtgagtgaaaaaaagatcttgttaaaatttgtgctaaagaattttgactttgaatggtgttaactatgaatgtggaaacctaatttgaaatttattttatgattcttgtgccctttgggaagcggnnnnnnnnnnnnnnnnnnnnnnnnnn

SEQ ID NO: 3830 - DNA, 1043 bp, Glycine max
ttcttcgcgtccgcccacgcgtccgcggacgggttatcttcttatagcttcatcccaaaaagctcttttccttctaaatttgattccttagttcagcattctattattatatatggcttcttcaccttcctcagaaaacaaaaacctagagggagtagctggtggtgccggagagaaacccattccacttggtgagaacgttctgcagaagcatgctgcattctttgacttgaataaagatggtgtcatctacccatgggagacttttaaagggttgcgtgaaatcgggactggggttttgctgtccgttggaggtgctattttcatcaatgtgtttctcagtcagagtactcgtcccggaaagtttccatctatactttttccaattgaaattaaaaatatccaacgcggcaaacacggcagtgacactggagtctacgatactgaaggaaggtttgtaccttcaaaatttgaagaaatttttaacaagcatgcacatacacatccaaatgctttgacatatgatgagttaacggagatgataaaggcaaatagagagcctaaagatttctcaggaaggattggtagtgtggttgaatggaaaattctttacaaacttgctaaagataagagtggattactgcagaaagaaacaatccgaggtgtttacgatggaagtttatttgaacaactgaaaaaacaacactcttcaggcaaagagaagtagtaatatttttcagacacgtatgtgaaaagaagaagttacttgtcgatctcagcaaaattggttatttttatgaatttatatgctagtaagttagtcacaatattcaaagtgtctgtttatttttatgttcatcaataatgtatatgtcaagtcaaacttatgtgtcatctatcatgtttgaattcatccgaaaagcacgtatacagtaaaataaagaatacaattttataataaaaaaaaaaacttttgttcccttaaggtcttaaatgggtgaaacaatttaaaaggtcgattaacaaaattaaaaaaggggcgg

SEQ ID NO: 3831 - DNA, 442 bp, Glycine max
cttcttatagcgcgtccgcaaaaagctcttttccttctaaatttgattccttagttcagcattctattattatatatggcttcttcaccttcctcagaaaacaaaaacctagagggagtagctggtggtgccggagagaaacccattccacttggtgagaacgttctgcagaagcatgctgcattctttgacttgaataaagatggtgtcatctacccatgggagacttttaaagggaaagtttccatctatactttttccaattgaaattaaaaatatccaacgcggcaaacacggcagtgacactggagtctacgatcctgaaggaaggtagttgttcaaatatttcttttttcatacctttattgcttccattttagtcatctaattaattttaaaacatttgggttccatattaattttcatggtcatggataaatct

SEQ ID NO: 3832 - DNA, 2121 bp, Glycine max
cccacgcgtccggggagtttgaaaaagctgatgatgttgatgctgagaatcattctagtcaggctaaaaagcaaagaaatgagtgtgaaagtgatgccttgacaatgcctgaggatagaggtttatgctctattgtgactggtattgctgctgaacatgtggaggaaaatttagaaacgaaagaggttcatgaccaacctgccagagaggaacttcccaaagattcacctagtgtcctttcacaagaaatggataagcatcttgattctaaagggtcaaaattgattgccatggaagcggaggaggctgaggagtgcacctctaccactgcagatgcttcttccgtgtctgctgcagctgtgtcagatgcagatgctaaggttgaatttgatttaaatgaagggctcaatgcagatgatgagaaatgcggtgagttcaacagcagtgcacctgctggtcgtttggtcagtcctgtgccatttcctgcttcatctatgtcttgtggtattcctgctcctgtcactgtggctgctgctgcaaaggggtgctttgtgcctcctgaagatttattgagaagtaaaggggaaattggttggaagggatccgctgccactagtgcatttaggccagccgagctcaggaaagttatggaaatgccttttggggcgctaacttcctctatacctgatgctccagctggaaagcagagtcgagcaccattggatattgacttgaatgtggctgatgaaagaatacttgatgatatttcttctcaaccctgtgctcgtcacacggattctgtatctcttacaactgatggtcatgatcctgtaagcagtaaaatggcttcacctcttcgctgctctggagggcttggtcttgacttgaaccaagtggatgaagcttctgacgtgggcaattgcttgagcagtaatcataaaattgatgtgccaattatgcaggtgaagccatcattgggtggtccaccaaatcgagaagtgaatgtccacagggactttgatttgaacaatggaccttcagttgatgaagtcaccactgaatcctcattgttttctctgcatgccaggagcagtgtgccatctcaaccgcttgtttctggacttagggtgagtactgctgagccagtcaacttctcttggcttccttccagtggcaacacctattctgctgtcacaatatcttcaattatgcctgatagaggggatcatcccttttcaattgttgccccaaatgggccacaaaggttgttgactcctgctgctggtggcaacccatttggacctgatatttatagggggccagtattgtcatcttctcctgcagtgtcatatgcatctgctccatttgaatatcctgtcttcccttttaattccagctttcctcttccatcagcttctttttcttctggatcaactacttatgtatatccaacatcaggcaatcagctttgctttcctgcggtaaattcacagttaatggggcctgctggtgcggtttcatctcattacccccggccttttgttgttggccttgcagaaggtagcaatagtggtagtgccgagaccagtagaaaatgggcaaggcagggtttagatcttaatgcgggacctggaggttcagacgtggaggggagagacgacaattctcctcttccatctaggcaactttctgttgctagttcacaggccctagctgaggagcaagtaagggtccagctggctggtagtgttcgtaagaggaaggagcctgatggtgggtgggatggccacaaccaatcctcatggcaatagcaaaatatataatcatacaatctaatgaccacaaatgcttgtaagtgtttagatttgtatattcaaatgtttgtaacactttgtcacttgtgggagaggatctgaaaatatatcctgtgtcatgctgatgtaattcagtgagggggttacttttttcgttaagaaatatatttaaatgataaaggaataaatgctattgccatttctctgtgggcggtcttctgtcccatcttcattgagaaatcctgctcttttgcagcctactgtggctctcctatatttcatttttcttgctagtttatttttaact

SEQ ID NO: 3833 - DNA, 2141 bp, Glycine max
gccagacccgttcgctctcttctttctctcttctctctctctctgaagatggcttcacgcaggctcgtatcttctctgattcgatcctcccttcgtagatctcaatcgaagccctcaatttccgcatcgacatcgaggctcacgtcatccaaccgtgcctcaccgcacggatacttgctgaaccgcgtcgccgagtacgccaccgccgcggctgctgctaccgctcctccctctcctcctcctccggggaagaaggagctcggcggcggcgggaagatcaccgatgaattcaccgggaagggcgcgatcgggcaggtctgccaggtcattggtgccgtcgtcgatgtcagattcgacgagggtttgcctccgatcatgaccgcgctggaggttctggatcactcgtcgaggcttgtgttggaggtggctcagcatttgggtgagggcgttgtccgaaccattgccatggatgccaccgaaggggtcgttagagggtggcgcgtcctcaacactggctcccctattaccgttccagttggtagggctacccttggccgtatcataaatgtcattggagagcctattgatgacaagggagaaatcaataccgagcattatttgcccattcatagagaagctcctgcttttgttgagcaagaaaccgcacagcagattcttgttactggaatcaaggttgttgacctgcttgcaccatatcaaagaggaggaaagattgggttgtttggtggtgctggtgtaggaaaaactgtgcttattatggaacttattaacaatgttgcaaaagctcatggtggtttctctgtgtttgctggtgttggagaacgaacccgagagggtaatgacttgtacagagaaatgattgagagtggtgtcattaagcttgatgataagcagagtgaaagcaagtgtgctcttgtgtatggtcaaatgaatgagccccctggtgcccgtgcccgtgttggtcttactgggcttactgtggctgaacacttccgtgatgctgaagggcaagatgtgcttcttttcgtagacaacattttccgttttacccaagctaactcagaggtgtctgctttgcttggtcgtatcccatctgctgttggttaccaaccaaccttgtctactgatcttggagctcttcaagagcgtattacaacaaccaagaagggctcaattacctctgtccaagctatctatgtgcctgctgatgacttgacagatcctgctcctgctaccacttttgctcacttggatgccacaacagtgttatcacgacagatctccgagcttggtatctatcctgctgttgaccccttggattctacatctcgtatgctttccccccttattttgggtgcggatcactatgaaactgctcgtggtgtacagaaagtacttcagaactacaagaatcttcaagatatcattgctattttgggaatggatgagctcagtgaagatgataaattgactgttgcccgtgcccgtaagattcagcgattcttaagccagcctttccatgttgctgaagtcttcactggtgccccaggaaaatatgttgagttgaaggagaacatcaccagcttccagggtgtgttggatggcaaatacgatgaccttccagagcagtcgttttacatggttggcggtattgaggaggtcattgctaaaggccgagaaaattgctaaggaatctgcagcgtcttaatcacacacagccctgttctcattttaatcccttttttttttgtaattgctaaatttaataatttaggaactcttggcaatgccaaacaacaaaattttccattttttgggtatgaaaatgtatcaggttattccttccttccattttaatgttgccgactgtgagatgaactacggtcaatgtctgtggccaaactgcccccctgtttttaagttgtgttatttaataaggggaaaagggcaagaggatgtacattttttactttctggttgagaacgttggatgcattaatgttaaaaactctgcaactgttccacctggtccatggccagcgtaatttgagttccttactgaatattggagattgtattgtcctttttatgctaattatttaatcttaaggattcttttt

SEQ ID NO: 3834 - DNA, 261 bp, Glycine max
ttttctttgtggactaatgcatggttaatgattcctttgtttttgtgtatctgacagggtgtgttgcatggcaaatacgatgacctcccagagcagtcgttttacatggttggcggtattgaagaggtcattgctaaggctgagaaaattgctaaggaatctgcagcgtcttaattacatacaacagccatgttctcattttaatcctttttttgtaattgctaaatttaataatttaggaactcttggcaatgccaaacg

SEQ ID NO: 3835 - DNA, 320 bp, Glycine max
cttgaaccaggtggatgaagcttctgacgtgggcaattgcttgagcagtaatcataaaattgatgtgccaattatgaaggtgaagtcatcatttggtggccccacgcaggctcgtatcttctctgattcgatcctcccttcgtagatctcaatcgaagccctcaatttccgcatcgacatcgaccgctcacgtcatccaaccgtgcctcaccgcacggatacttgctgaaccgcgtcgccgagtacgccaccgccgcggctgctgctaccatcccacagaatcatcctcctccggggaagaaggagctcggcggcggcgg

SEQ ID NO: 3836 - DNA, 852 bp, Glycine max
cttttcgctcattctagaaacacccataagtcggcattacaagcaccatatttcggaagctggaagctcacacatttttttctgcgtccgagaatcgcatttttctagttcctgcgcatccaaacgagtccttaatatcgaactttcctgaagatggtgttgatagagcatgaagagagcaagcagagaaacgcgaacccctccaacgccgccaacgacgattccgacggcttcgaaaccgccagcgacaccgatctggccggtgaaggcgacgacagtggggccggcatcccggaagaacagaatcgcaccgaacagagtcataccgagaagcagacggagcaagagccggaacacgatgctcctcggagcagcgaatcatccgagaacaatgccctgatcagtgaagaagaatcgagacagaaagcattgaatcaagcaaatgaagcaaaggtagaagggaataagctttttgtagaagggaagtatgaagaggcattattacaatatgaacttgctttacaagcagcaccagacatgccttcatctgtggaaatacggtcaatatgccattcaaaccgtggtgtgtgctttctgaaactgggaaaatatgacaacacaattaaagaatgcacaaaagcattagaactgaatcctgtgtacgttaaagctttggtaagaagaggagaagctcatgaaaagcttgagcattttgacgaggctattgatgatatgaaaaagatcttagaaattgatccctcaaatgatcaagctaggaaaaccattcggcggctagagccccttgctgcagaaaaaagggaaaagatgattgcacaagtgaaagacatgggc

SEQ ID NO: 3837 - DNA, 462 bp, Glycine max
  unsure (1)..(462): unsure at all n locations
atcgcatttttgtatttcgtgcatcgaaactttccagaagatggtggtgatagagcaggaagagagcgagcatcgaaacgcgaacccctccaacgacgcttccgacggcttcgaaaccgccagcgacaccgatctcgccagtgacggcgacgacggtggagccggcagcccggaagaacagaatcacatcgaacagagtcataccgaacagaatcacaccgaacagagtcacaccgagaaacaccagcagcagcagcagacggagcaagagccggaacacgatgatcctcagagcaccgaatcatctgagaataatgcgttgatcaatgaagaagagtcgagacagaaagcattggatcaagcaaatgaagcaaaggtagaagggaataagctttttgtagaagggaagtatgaagaggcattattacagtatgaacttgctntacaagtagcatctgacat

SEQ ID NO: 3838 - DNA, 869 bp, Glycine max
  unsure (1)..(869): unsure at all n locations
actagccacaaacaaaaccaattccattttatccattccaacttcccaacccaaccaacaacaaccataacacaagacagtgtcagcgcgcacgcatacatggccatcacaggcaacctcaacctcaacctagtactccccgtggcacgccccatggcgtgccccccacgcgccccaacgtccctcctcgctcgtggccgtggcgcgtcgtcgtcaccttcgctcctggtcacgcgcgccatcgacgtgaacgagttcctgggggacttcggggcgcgggaccctttccccgcggagcttgagagttccttcggggagaaagtgctgggatacagcaacaccgagcacaaaatcctcatccccaccatcactgctctcgccctctcgcagcaggagtgtgctcccgtttccccttcgcagccccccatctcgctggatgacgcccagacgctcattagaaaggttgtgggttggagacttgtgaatgaggaaggtggacttaaaattcaatgcttgtggaagttaagagattttaaatgtggggttgaactcattaacaggatctctaaggttgttgaggctttgggccatttcccaaatatctacttggagcaaccaaatcaagtgagagcagaactatggacagcttccattggaggtttaagtatgaatgattttattgttgctgcaaagatagatcagataaagacatcagatcttgtcccaaggaaaagggtttgggcgtaatgccttaatgaacttcataaaacattttgccgcttgattttcttcaatattgaattaccactagtttgtgttatttgattaaatctgttattctttactttcnnnnnnnnnnnnnnnnnnnn

SEQ ID NO: 3839 - DNA, 385 bp, Glycine max
cacactgtgtgtttgtaaaaatggccatcacaggcaaccttaacttcaacctcaacctagtacttcctgtggcacgccatatggcgtgcctccacgcgtcccgtcgtttctcttcactcgcggtcgaggcgcgtggtccccctcgcttctggtcacgcgcgccatcgacgctaacgagtttctgggggatttcggggcgcgggaccctttccccgccgagcttgaaagctcgttcggggacaaagtgctgggatacggcaacactgagcacaagattcttattcccaccattactgctctcggtctctcgcagcaggagtgtgctcccgtttcttctgcgcagccccccatctcgctggatgacgcccagactctcattagaaag

SEQ ID NO: 3840 - DNA, 1884 bp, Glycine max
gaaaatagtggtgacttcattcttgggttaagtttgtgactttgtcaaaatgcagaatatccctctcaatcacagaatcccaaacgagacctattaattttatgaaatatgtatgtaattcacatcatttcccccgaaatccctataataatatctgttcacagtcatgatcagatgaaagtcctacctatgaagcaattgtttacattttccgtcaaccaaaatgctacaaacgaaaccagagattcgtaattgcacattctcttttgttgtctccagctcatagaatattataaactcagattcattcagaatttcagattcacctttttcttttcttctctaccttctttttcctctgacagctttttgcagaaagttgtgatttttccttgaaagatggcatctttgagcatgatccagatcagaactgggaattgtgcatctgggtttggtttgaattgtgctgggaaggttaaggttggtcccagcagagttgggtttaaggtgtttgcttcagagactcaggctacagagcctgatcttagtgtcactgttaatgggttgcacatgcctaacccctttgttattgggtcaggtccaccagggaccaattacactgtcatgaagagggcatttgatgaaggttggggtgctgtgattgctaaaactgtatcacttgatgctgcaaaagttataaatgtaactcctcgatatgcccggctacgggcaggtgcaaatggatctgcaaaaggagaaattattggatgggagaacatagaacttatcagtgataggccacttgaaactatgttgaaagaattcaagcaattaaaagaagagtatccggacagaattctcattgcttcaatcatggaggagtacaataaggctgcttgggaggagcttatggatagagtcgagcaaactggagttgatgcatttgaaataaatttctcatgtcctcacggtatgccagaacgcaaaatgggtgctgctgttgggcaagattgtgctcttctggaagaggtttgtggatggataaacgctaaagccacaattcctgtttgggctaagatgactcccaacataactgatatttcacagccagcaagggttgctctaagttcaggatgtgagggagtttctgccataaatacaatcatgagtgtcatgggaatcaacctcgatacactacgtcctgagccttgtgttgaggggtactcaactcctgggggttattctgcaaaggcagtccatcccatagcacttgggaaggtgatgagcattgcaaagatgatgaagtcagagtttgatagtgagaactatacactttctgccattggtggcgttgagacaggcggtgatgctgctgagtttatccttctcggggcaaacactgttcaggtgtgcactggggttatgatgcatggctatggtcttgtgaagaaactatgtcttgagcttcaagacttcatgaaaaagcacaatttcacatccatagaagatttcagaggggtttctcttgagtactttactactcacactgacttggtaagaaggcagaaggaagcagttcagaagaggaaagccataaagaaagggttgcagtctgacaaagactggacaggagatggttttgtgcaagaaactgaaagcatggtttcaaactgaaaataaaatgtgcagttaaattatatatagcgtctttggaaatggaccatgggcatggtgtttcacatcttaattaatgttactagttctaccttttacatttccaaacacatttaagtaacctttcatatgcaattgcaaatgttgtccaaacgttaagtataactatagacattatgttttattatcaatgatggatattaatctttt

SEQ ID NO: 3841 - DNA, 550 bp, Glycine max
  unsure (1)..(550): unsure at all n locations
ctcaaaatgcagaatgttccactcccacacaatcactgaaatcacaaacgacacctatgaattgattaaaatatatatttaattcacatcatttcccccaaaatccttataatatcttcccgcagtcattctcacatgcaagtccaatctatgaagcaattgtttacattttttccccaaacttatccgatacaatcgagcaaatgcaacaaacgaaaccagagattcataattgcacgttctcttttgttgtctccagctcatagaatattacattaactctgattcattcagaatttcagattcaccttttcttcttctcttttttttttcctctgaaagctttttgcagaaagttgtgatttttccttgaaagatggcatctttgagcatgacccagatcagaactgggaattgtgcatctgggtttggcttgaattgtgctgggaaggttaaggttggtcccagcagagttgggtttaaggtgtttgcttcagagactcangctacagagcctgatcttagtgtcactgttaaatgggtgcacatg

SEQ ID NO: 3842 - DNA, 672 bp, Glycine max
  unsure (1)..(672): unsure at all n locations
gactttcatttttttttcttccatacctttccctccttctgagtccttaccttacccaattttttctttttcccttatttgttttctctcgaaatttgcccataacgttctctttgtacctcatcttatcctgcacacacccccccctccctcccttcctataagatttatttgcgtagcattcaccatcacaatcaatcttctttatccactctctcttaattaaattaaaacaaaaaatgtgcgctgccatatccgaagtggaacaagaagagttgctcgaaaaattggaggtgttcaagatcaaaggcagggacaagcatggccgcaagatccttcgcattatcgccaaattcttcccagcacggttggtgagtgttgaggttctgaaaaagtacctggaggagagggttttcccgaagctgatggggaagaggaaattcgcggtgctgtacgtgcacaccggcgtccagaggagcgagaattttcccggaatctccggtctccggtggatctacgatgcgattccggcgaacgtgaaggagaatctcgaagccgtttattttattcacccgggcttgcaggcccgccttttcctcgctacattcggccgctttctctttaacgctgggctgtatggaaagctgangtacgtaagcagggttgattatc

SEQ ID NO: 3843 - DNA, 430 bp, Glycine max
gacaatcaatcttctttatccactctctcttaattaaattaaaacaaaaaatgtgcgctgccatatccgaagtggaacaagaagagttgctcgaaaaattggaggtgttcaagatcaaaggcagggacaagcatggccgcaagatccttcgcattatcgccaaattcttcccaggtagattgattaattaattaattaaatccctaattcctttttttttatgtgcatgaattttttaaatcttcggtaattgtttgaattgaggacagcacggttggtgagtgttgaggttctgaaaaagtacctggaggagagggttttcccgaagctgatggggaagaggaaattcgcggtgctgtacgtgcacaccggcgtccagaggagcgagaattttcccggaatctccgggtctccgtggatctacgatgcg

SEQ ID NO: 3844 - DNA, 384 bp, Glycine max
aaagcatttatggtgctttcagcggcttggagtatcttaaagctcagaaaatgaggaatcgccaattgcaatttcacaagaaaatatttgctgaggcagatgtcattgtctcaccaacaacgggtgtgactgcatatccaattcaagacgatgccctgcagaccggtgaacttgactacgtgaatggagctgcacttgttcgttattccatagcaggaaactttcttggacttcctgctgtcactgttccggttggattcgatagattgggtttgcctattgggcttcagtttattggaaggccttggtctgaggccacactaatccatttggcatttgcaatgcaggctatctgcatgtcagagtacagaaagcccgagcttt

SEQ ID NO: 3845 - DNA, 412 bp, Glycine max
attttattttattttattttcctggttggtggggaatcggggaagtgtaggctaagatggggatgacagatgagtttgagacttctttgcaagtgttacgaggatttgacacagatatatctgttgaagtatatgaaattaagatctgtggcttcaacgggaaaaagagctacaatccgatttgcagatctcaagaggcaaagatattggttccccttaatggttggtattggcttacttgttcttcagcagttatctggtatcaatggacattttgttctattcaactaccatctctgcaaatgcaggaatttcatccagcgaaggcctaccagttggacttggagccgttcaggtcatcgcaactggcattcccacatggttggtggatctacgtcgccggaggtgcttc

SEQ ID NO: 3846 - DNA, 583 bp, Glycine max
cgaggatttgacactgatatatctgttgaagtacatgaaattaaggtatttttttggctcatcattgtggctaaaattttccacccaaatgcatgataggatgcatatgtgaggtgcagttaagtatatagctttaaatatgtatttcagaaacatgcactgctaaccattttacttttctagagatctgtggcttcaacgggaaaaagagctgcaatccgatttgcagatctcaagaggaaaagatattggttcccgttaatggtataatatgatgctgtataagttctgattttctaaaccctctcttcccaagcatgacttattgtcatttatccaaaaggtcaagcattatttgctaactgagctcctgcaggttggtattggattacttgttcttcagcaattatctggtatcaatggaattttgttctattcaactaccatctttgcaaatgcaggaatttcatccagcgaagctgctacagttggacttggagccgttcaggtcatagcaactggaatttccacatggttggtggacaaaagtggccggaggctgcttctaataatatcctcatct

SEQ ID NO: 3847 - DNA, 1017 bp, Glycine max
ctcgagccgtttttttcctggttcgcgttgcgcaccggcctctatagcgagcttgaaccatcttcagcttcagctactttgcactaacaaagcgccccacgttctgagacaaacccagtatgctatctgccatgggggatcagaaagtttcgatttttcattgattgtgtataactgcacaaagaaggtagtgaagcaatgcgtagagcgatcgcgtttctcgttcacccacgattcctcctcctcttccttgtcctctcaattttcctcattttcacattttctggttctactactaccagtggttttgctacacctcaacaggttgttgagatcattgaggagaaaccagaagaggagccagaaattacacacagagtatttttggatattgatattgataaacagcgtttaggtaggatagtgattggattatatggccaagttgtaccgaaaactgtggaaaattttagagctttgtgtacaggggagaaaggaaagagtgaaaatggcataaagcttcattacaaaggaacaccatttcatcggataatatctggttttgtgattcagggtggagacattgttcatcatgatggtaaagggtctgaatctatttttggtggcacctttcctgatgataatttcaagattaaacattctcacgctggtgttgtttctatggcaaattcaggacctgattccaatggctcacagtttttctttaccacagtgaaggccagatggttggatggagagcatgttgtctttggcagggttgttcaaggcatggatattgtgtatgtaattgaagggggagccggaacctacagtggaaaacccagaaagaaggtagtgatagcagactctggggagataccaaagaaccactgggatgaggaaaattgaacttcctccttttggtgaccgaccactagcacatgtttggatagcagacacggctggtttgtctttgatcttgattctctagttcttaaaccatggtttacaaattat

SEQ ID NO: 3848 - DNA, 400 bp, Glycine max
gatccatactcaaaatacaaaaatggagagagtagctaaggtgttggtgatgttgagcatggtggtgttggtgcttgcatcaaatgctgaagggggacgattacttgaggaagagaatgtggatcagccccagaccttccttggatcaggtggaggccttggtgggatatttccaagcccaagcccaggcttcagcttcaccggcgtgggctttggcccatctgggttttgcactttccctggtggttgcaccggtactccttctttgcccactattcccggtgctggtgggtcactaccagtaccaacacatgcataaggaaatggctttggtagaagacctatattattacttaatgctaaagtaccctagaatttgtttaagctttaatttgccttt

SEQ ID NO: 3849 - DNA, 353 bp, Glycine max
gaatccaaacctagctaagtgctcttacaaagagaggagtgagtgagaaacaagatatttaaagttacaaaaaatggagagagtggcaaaggtggtggtgatgttggccatggtggtgctggtgctaattgcttcaaatgttgaagggggacgattactgaagcaagagaatgtggatcagcccgagaccttccttggtgggatatttccaagcccaagcccaggtttcagcttcaccggtgtgggctttggcccatctgggttttgcactttccctggtggttgtaccggtaccccttctttgcccactattcccggtgccggcgtgtcactaccagttccaccacatgcat

SEQ ID NO: 3850 - DNA, 677 bp, Glycine max
actagagctcacccgcagttgtgctctattcccccattctctctccgtttagttcacagtatatttcaccagccttatcttcatcttctctcacccgcagggtttagagaaaatttaacaattagggttgcttctcctttgccgacccatggctcccaaagctgatagttcaaagaaggctgatccaaaggcacaggccttgaaaactgccaaggcagttaagtccggtgctaactttaagaagaagaccaagaagatccgaacatctgttaccttccatcgaccaaggactttgaaaaaggataggaaccccaaatatccacgcattagtgctccacccaggaacaagcttgatcactatcagatattgaagtttcctctcacgactgagtctgcaatgaagaagattgaagacaacaacactttggttttcattgttgacttgcgggccgacaagaagaagatcaaggatgcagtcaagaagatgtatgatattcagaccaagaaagtaaacaccttaatcaggcccgacggcaccaagaaggcctatgtcaggttgacacctgattatgacgccctggatgtggccaacaagattggaattatctaaactaatatatggcctcaccaaagtagatttctgtttagatggtagtttgttatggggtgttgagggg

SEQ ID NO: 3851 - DNA, 970 bp, Glycine max
tggcaatggagatggttaaagaactggagattagtgacttgggaccaaagctgatatctcctctaccaactctagggttggagagtggtggagtgtgcagaagagcgtcgcagtcgcaaccctaatcagaagaagcgcagcttcaagcgagtgacagccaccagccatgggtcgtatgcacagccgcggtaagggtatatcctcttctgctttgccctacaaaaggacacctcctagctggctcaagatctcttcgcaagatgtcgaagaaaatatctgcaagtttgcgaagaaaggtttgaccccgtctcagattggtgtcattctcagagattctcacggtattgctcaggtcaatagcgtcactggcagcaaaatccttcgcatcctcaaagctcacggacttgcgcctgaaattccagaggacctgtaccatttgattaagaaggcagtttcaattaggaagcatcttgagaggaacaggaaggacaaggactccaagttcaggttgattcttgttgagagcagaatccaccgacttgctcgctattacaagaagactaagaagctcccaccagtctggaagtacgaatcaacaactgctagcactctggttgcttagagaatgtatcaactttcatgggttttgctaccttgcagtcgccgttgagctagcaatttgccatatcattttgatgtttatttgaaggctggataggttatgtggcttagttttgttaagaacctatggttagactgggaaagataatttaactagttaagtcaatttatcaatgtggtgttctttttcttttagccgttggaggttgtcctttaaagagatgactatggtttttggttttattttcaagtaatatatatgctgagaagatttgaaggcttaaaaaagtgaatgaagaagatgtcaatgggcttgccaacagggtggcattccagaagtttgcactga

SEQ ID NO: 3852 - DNA, 821 bp, Glycine max
gagctcgcatcatcattcataaatagttcatcttgaggccaatcttgagcaaaagggtaatgattcccacgatagtgggaattattcttgtaggaagaaccaaacactggaagagaagcatgagaggaagagcgagaagatgttgagaagaaagggtggtggttactcatgtcatactcttcttcatagctaaaactatgctgcttttgatactcagcactgccccaatccctccatttagggaccaaagctgatatctcctcctcaatcattttagcaatctccaatggttccaagtcactaatctccagttctttaaccatctccattgccacatcaatggcagtgtcgtatatggtgtcaaatggaaagaaaatgtttctcttttgcccatctttgttagaaatttgtactttcaggaaaaccgtgtcatcctcttcatttattgatccggtgattgtcatgtgtgagtcctttgtttggttactctttggctgagataactctttggcaagtgatgcagtgaaattgagtgtgggggcttgttttttaggtaatgttgggctaggaagtggagagtctagttgttccgtggctaaaaatgggtccaacaagagctcctttgctgacaacctctctgagacatttgccaaacattttcccacaaatctctgggcttccaagtcatggattctgtaatacgcttctggcagcttccccgaagtaactttcttgtatatctgagcagggtttgagcactcgctgtacgggaactcagaagtaaaaatttctatcatgcacatcccaaaggagtatatgtc

SEQ ID NO: 3853 - DNA, 775 bp, Glycine max
  unsure (1)..(775): unsure at all n locations
tcctggcggcactcttgcggacacaacagttcttgctaatcgcaaccctaataagaagaaggagagcttcaagcgagtgacatccaccagccatgggtcgtatgcacagccgcggtaagggtatatcctcttctgctttgccctacaaaaggacaccccctagctggctcaagatctcttcgcaagatgtggaagaaaatatctgcaagtatgcgaagaagggtctgaccccgtctcatattggtgtcattcttcgagattctcacggtattgctcaggtcaacagcgtcactggcagcaaaatccttcgcatcctcaaagctcacgggcttgcgcctgaaattccagaggacctgtaccatttgattaagaaggcagtttcaattaggaagcatcttgagaggaacaggaaggacaaggactccaagttcaggttgattcttgttgagagcagaatccaccgacttgctcgctattacaagaagactaagaagctcccaccagtctggaagtacgaatcaacaactgctagcactctggttgcttagagaatgtatcaactttcatgggttttgctaccgtgcagtcgccgttgagctagcaatttgcgatatcattttgatgtttatttgaaggctggataggttatgtgggttaattttgttaagaacctatggcttgacccggaaagataatttaactagttaagtcaatttccccaaaaaaaaaaaaaaaaaaaaaaaanncnaccggccgctctagaggatccaagctt

SEQ ID NO: 3854 - DNA, 441 bp, Glycine max
  unsure (1)..(441): unsure at all n locations
aggttgattcttgttgagagcagaatccaccgacttgctcgctattacaagaagactaagaagctcccaccagtctggaagtacgaatcatcaacaactgctagcactctggttgcttagagaatgtatcaactttcatgggttttgctaccttgcagtcgccgttgagctagcaatttgccatatcattttgatgtgtatttgaaggctggataagttatgtggtcttaatttttttaagaacctataatttagctagttaagtcaatttatcattgtggtgttctttttcttttagccgttggaggttgttctttaaagagatgactatggtttttggttttattttcaagtaatatatatgctgagaagatttgaaggatcgtaaantataaaaattaaaaactctctttctttctcccctataaaaaaattttaaaa

SEQ ID NO: 3855 - DNA, 206 bp, Glycine max
attttgatcttcatttgaaagctggataggtgatgtggtctctacgtgtggtaagaacctatctccagactgggacagatactagttaagtcaatttatcaatgtggcgttctttttattttagctgttggaggttgtcagagatggctgtggtttttggttttaataatataattgttgagaagatttgaagggtcgcattcttt

SEQ ID NO: 3856 - DNA, 437 bp, Glycine max
cgtttgtgggaacattatggagcccagattcgtaatctccgcatcggaggccgaatcccaatcaatctccaaactcctcccttccctcgtttcctcttctcagtccctcgcccgtccttccatctccaactttcccgtcgccgccgtcggactcgccgcctccggccgcatcttcgtgggcgtgaacgtggagttccccggcctccccttccaccacaccatccacgtcgaacagttcctcctcaccaacatggccaacaacgccgagacccgcctcgactccttcgccgtctccgccgccccctgcggccattgccgccagttccttcaagaactccgcgacgcccccgacatccaaatcctcatcacctcccacaaaaaccctcacttcagccctctctcccacttgctgtcccaccacttgggcccccacgacc

SEQ ID NO: 3857 - DNA, 598 bp, Glycine max
cattaacaaatactatttctctctcgaatagaaaaaagaaagaacccaacgaagaaagaagaaaaaataaaggacccaaacaaagccgaaagaaagaaagaaagcacgattacttgcacttgttcttcctctgcagtaaaaccctagctagccatcatcgtaacgtaatcgatccctctgactctcactctagaaccttcgactcgatccgaatccctagatcggattgcaaggctggcgggtattctggtcaagtaaatgacggatctcccccgccgcggcttcttattatcgttgatagggttaccgcgctgtgacgattgttattgttttttccaagaagaagaagaagaagaagaagagtgtgaagaagcatgctgagcgtggtgcgcgtgcacctgccctcggaaattcccattgtaggctgcgagctcacgccgtacgtcctcctccgccgccccgacaagaccgtttccaccgacgatgttcccgaaaccgctcccttagacggccatttcttgcgctacaaatggtatcgtgtacagagtgataaaaaagttgctgtctgtagcatacatccatcagagcaagccaccct

SEQ ID NO: 3858 - DNA, 380 bp, Glycine max
ctttctctctcatcatccctctcgaatagaaaaacagaacagaagaaagaagaagaaaagaaaacccaaacaaactctaaaagaaagaaagaaagaaagcacgattacctgcacttgttcttcttcctcctctgcagtaaaaccctagccatcttaatcgatccgaatcccgagatccgattgcaaggctggcgggtattcgggtcaagtaaatgacggatctcccccgccgcgccttattgataatagggttaccgcgctgctgtgacgatctgttgttttcaagaagaagaagaagaagaagaagaagagtgaagcatgctgagcccgtggtgcgcgtgcacctgccctcggaaattcccattgtaggctgcgagctc

SEQ ID NO: 3859 - DNA, 1650 bp, Glycine max
ctcggaatacagctcgagctgtgttgttcacttgtttggtctctttctttcaaccttaacccttccaaaccaacacatataaaaatcaaccctctcttcttcttctctctccgcgggttgagttgaacttcaagaacctcataaaaccctttctctctctctctctctagatctgttcaaatccgaaaccatttccgctctaatttccaagagcaaaccctaatccgctctctctgtatgatactagatttcccctcctcaaaggcgtagttttgtgtcgatttgtaaattcattcggtagtttaggttagaatttttgtgtcaagtttttagggttttgaatcggtgagatgaatcacaacaacagcaacaacaatagagcgaggtaccctcccgggatgggacttgtgcgcgggggtttcaatccgaacctgagccagaacccgaaccagaaccagaacccgagcctgaaccagaatcatcacgcgttccaggctcggccgccgtaccaccaccagcaacaacgggcgcagtatgtgcagaggcatttgttgcagcagcagcagcaacagcagcagcagcagtggctgagaagggatgccaacgccgtcgacgaggtcgagaagaccgtgcagtccgaacccatggattcgagttcccaagattggaaagcaagactaaagattccaccagctgatactcgctataggacagaggatgtaacggcaactaaaggaaatgagtttgaggattactttttgaagcgtgactgctcatgggaatatatgagaagggttttgaaaggccttctcccatccaagaagaaagcattccgattgctcttactggtagtgacattcttgctagggctaagaacggaactggcaaaacagctgcattttgcattcctgcattggaaaaaattgaccaggacaataatgttattcaagttgttatactggtcccaacccgagaattggcattgcagacttctcaagtgtgcaaagagcttggaaagcacttgaaaattcaagttatggttacaacaggtggtaccagcctgaaagatgatataatgcgcttatatcaaccagttcatttactagttggaactccaggaagaatattagatcttgccaagaaaggtgtttgtattctgaaagattgtgctatgcttgttatggatgaggccgataagcttctgtccccagagtttcaaccttctatagagcagctgattcattttcttcctacaacccgtcaaatcttgatgttttcagcaacatttcctgttactgtaaaggatttcaaagataggtatcttcgaaaaccttatgtcatcaaccttatggatgagctaactctgaagggtattacacaattttatgcattcgtggaagagagacagaaagtccactgcctaaatactcttttttctaagctgcaaataaaccagtctatcatcttctgcaattcagtgaatcgggttgaactccttgccaagaaaatcacagaacttgggtattcatgtttctacattcatgcaaagatgttgcaagaccatcgtaacagagtgtttcatgatttccgcaatggtgcatgtcgaaatcttgtttgtactgatctttttactagaggaatagacattca

SEQ ID NO: 3860 - DNA, 497 bp, Glycine max
cccacgcgtccgcaagaacctcataaaaccttttctctctcttacatcactctctctctctctctctctctctctctagatctgttcaaatccgaaaccatttccgctccaatttccaagagcaaatcctaaccccttctctctgtatgatactagatttcccctcctcaaaggcgtagtttttgtgtcgatttgtaaattcattcggtagcttaggttagaatttttgtgtcaagtttttagggttttgaatcggtgagatgaatcacaacaacagcaacaacaatagagccaggcaccctcctgggatgggacttgcgcgccggggtttcaatcccaacctgagccaggacccgaaccagaaccagaatcatcacgcgttccaggctcggccgccgtaccaccaacagcaacaggcgcaatatgtgcagaggcatttgttgcagcagcagcagcagcagcagcagcgacagcagcaacagcagcagtggctgaga

SEQ ID NO: 3861 - DNA, 563 bp, Glycine max
aatccttccgaaccaacacatataaatccagcactctcttcttcttcttgtgctctccgcggggtcaattgaacctcacaaaaccctctttctctctctctagatctggtcaaatcccgaatcatttccgctccaatttcaatttccccgaacaagagcaaaccctaaccctttctctctgtatgatacctgagtatttccctcacgcgtgtagcattcgtgccgatttgtaaattctttcggcagtttaggttagaatttgtttttgctaagattttagggtattgaatcggtgagatgaatcacaacaacaacaatagagcgaggtaccctcccgggatggggcttgtgcgcggcggtttcaatccgaacccgagccagaacccgaacctgaaccagaacccgagcctgaaccagaatcatcacgcgttccaggctccgccgccgttccaccatccgccacacgtactatatctagtgaagcatacgctgcccctgcagcagcgacatccaccgacaccgagaggctataccatatcagtcgcattcgcaaggcccctgtg

SEQ ID NO: 3862 - DNA, 483 bp, Glycine max
cttgttttctttcttcctttcaatctttacccttccaaaccaacacataaagggccagccctcttcttttctctccgtgggttgaacttgaagaacctctgaaaatcctttctttctttcatcgatcactctctctctctagatctgttcaaatctccgaacatttccgctccaattttcatttccctgaacaaaaccaaaccctaaccctttctttctgtatgatacctgattcccccccagaggcgtagtttttgtgtcgatttgtaaattctttcggtagtttaggttagaatttgtttgtgaagtttttagggttttgaatcggtgagatgaatcacaacaacaacaatagagcgaggtaccctcccgggatggggattggtcgcggaggtttcaatcccaacctgggccagaacccgagcctgaaccagaacccgaacctgaaacagaatcatcacgcgttcaaggctcggccgccgt

SEQ ID NO: 3863 - DNA, 1386 bp, Glycine max
gactcacaccaaaatttgccaattgccatttcaatccccagtttcttcttcaacgtcctcttacgagcagatcccaattctccttcccagtttcaaaccctaattccctcattcccatggcctcagaagagcccactgtcgcggtggaacccgctcccgaacctgccaccgccgagcctcccccggaggagaaggaggagcccaaacctgaagccaaggctaagaaaaccaaggaacccaaacctaaaaaggtttccagaccacgcaaccctcccactcatccttcctacgaggagatgattaaagacgcaattacctcgctgaaggagaaaaccggttcgagccaacacgcgattgcgaagttcatcgaggagaagcacaagcagcttccaccgaacttcaggaagcttcttctctaccatttgaagaaacttgtagccgctggaaaactcgtcaaagtcaaaggctccttcaagctcccacctacccgaccttctgcatcttcttcttcttcgccggcgaagaagaagaagcccgcacctgctaagccccaacccaagcccaagcctaagcctaagcccaagcccgctgctaaagccaaggacactaaggcaactaagtcaaaggcaccagctaagcccaaggcagctgctaagcctaaagccaaagttccagccaagcccaagcccgcccctaaaccaaaggctgctgctgctgctgcttccaagcccaagcctgctgccgccaagcccaaagggactaagccagctgccaagcccaagcccaagcccgctgctaaaacaaaggctgctgctgccaagcccgcggcaaagcccaaagcgaagcccgccaaggcttcaaggacgtcgacacggacttcaccagggaagaaagcagctcctgctgcgaagccggcagcgaagaaagtagcgcctgctaagaaagcgccagtgaagagtgtgaaaccaaagagtgtaaagtctccagcgaaaaaggctacggctaagagagggggtaggaagtgagaatgtggtgggtagagtggttttagggttagttttgtgaagttctttgtcctcttggtggtgtagttggggttacagatgatcctataatatatgaaatctgattttatgaaacctttgttttttttttcttttatttagtttgaattttttctttggttcgaccttagggagtagattaaaaaaagcttctagctctgcttttcagctaaatgagttaatcataaaatgtatcttatagagtatgaggtttctctgcgttatagtacctttgatggatcaatgtagtataagcacctttttcacatgaatgcatctgtagcacatgctttctgtgtatgaagtataaaattataccttt

SEQ ID NO: 3864 - DNA, 1350 bp, Glycine max
agaagggacaacaaaatttgccaattgccatttcaatcctcagtttctttcttcaacgtttccatcatacacagatcccaatcctctctcaagccctaatttcccctcatttccatggccacagaagagcccactgtcgcggtggaacccgctcccgaacctgcctccgccgatcctcccccggaggagaaggaggagaccaaacctgaagccaaggctaagaaaaccaaggagcccaaacctaaaaaggtttccagacctcgcaaccctcccactcatccttcctacgaagagatggttaaagatgcaattacctcgctgaaggagaaaaccggttcgagccaatacgcgattgcgaagttcatcgaggagaagcacaagcagcttccaccgaacttcaagaagcttcttctctaccatttgaagaagctcgtcgccgccggaaaactcgtcaaagtcaaaggctcgttcaagctcccacctaccagacctgctgcatcttcttcttcttcttcttcgccggcaaagaagaaaaagcccgcagctgccaagtccaagcctaagcctaagcccaagcccgctgcgaaagccaaggatactaaggcaactaaatcgaaggcaccagctaagcccaagccagctgctaagcctaaagccaaagctccagccaaggccaaacccgctgctaaaccaaaggcttctgctgctgccaagcccaagcctgctgccgccaagcccaaagccgctaaaccagctgccaagtccaagcctgctgctaaaacaaaggctgttcctgccaagcccgcggcaaagcccaaagccaagcccgtcaaggcttcaaggacgtcgacgaggacttcaccagggaagaaagcagctcctgctgctaagcccgcggcgaagaaagttgcggtggcagcgaagaaaacgccagtgaagagtgtgaaaccgaagagtgtaaagtctccggccaaaaaggctacggccaagagagggggtagaaagtgagaaagagtggtcggtggggtagggttgttttggggttggtgttgtgaagttctttgtcctcttggtgtagttgggggttacagatgatgttcctataacagatgaaatctgattttatgaaacctttgttatttccctttttagttttgatttttttttggttcgacctaggaagtagataaaaacaatgtttctagctatgcctttcagctaaatgagttaatcataaaatgtatcttagagtgtgaggtttctttgcgttatagtacctttgatggatcgatgtagtataagcacctttttcacatgaatggatttgtagtatatgctttctgtgtattt

SEQ ID NO: 3865 - DNA, 441 bp, Glycine max
acagaaggggacatcattttttgccattggccatttcaatccgcagcggctttcttcaacgtttccatcatacacagatcccaatcctctctcaagccctaatttcccctcatttccatggccacagaagagcccactgtcgcggtggaacccgctcccgaacctgcctccgctcgatcctcccccggaggagaaggaggagaccaaacctgaagccaaggctaagaaaaccaaggagcccaaacctaaaaaggtttccagacctcgcaaccctcccactcatccttcctacgaagaggttcgatccgaaaccataattctaattctagttctaataataactctgattctaattctcttacaatttttgtgatctgaacttggatctaattattctgattgtttttttctgcacatggttaaagatgcaattacctcgct

SEQ ID NO: 3866 - DNA, 481 bp, Glycine max
gtgtgggcataaagtcgttgacagtgaaaaacaaactcctctcactcttccttccatctcttcttcaacattccaatccaatccaaaacgctgcgttttattttgtattcaattctatcaatcccaaaattcctcgccggagatagagaatcttaacaattccaccactttccggcgagacatggccgtcgccgtcgccggccccgcccgccagaagccgagctccgacgcgagcctcttcacgctctgccccttctggagctcgcgcaacgctactcaaaggtccaccaaaacggtgtcgtccgtcgccaggtcgctgctccctccccgccgcagactccgcctcgatccttccaattacctctattttccatatgaaccggggaagcaggtaaggagcgcggttcggttgaaaaacactagcaagtctcacgtggctttcaagtttcaaacgacggcaccaaagagttgttacatgcgg

SEQ ID NO: 3867 - DNA, 819 bp, Glycine max
gagaaggttaccatcgattgccacacacattccaattccacacgctattacgtttggttttcagttaattttcgggacaataataaaataacattcttgctgctgttgaataattacaatgagtgtggggccaagcccaatgcaataagaaaagtggcactctttcttctttctttcattttttttttcggtttctggtttactatgctatgtagcttggagcggtgttacggtgacagagtgagaaatgggtctgctttctaacagagtggagagacatgagatcaagcctggcgatcacatctacacatacagagctgttttcacctattctcatcatggcatttttgttgggggaagcaaggttgtacatttcagacctgaaagaaacttaaagtcaatgactgagacatcatcaaactgggatgatccaacatcaaacccatgtccaacctttcctgattgtggattcagacaaccaaacagtggagtagtcctttcttgcttagactgcttccttcgaaatgggtctctttactgttttgagtatgaggtttcaccatctgttttcctcagcagaataaggggtggcacatgcactactgcatcagctgacccaccagagactgttattcatcgagctatgtatcttcttcaaaacggctttggaaattataatgtttttcagaacaattgtgaggattttgccttgtactgcaaaactggtcttttgatacaagacaagcaaggggttggaagaagtggccaagcttcttctgttattggtgctccattggctgcaatgatctcttctcctct

SEQ ID NO: 3868 - DNA, 403 bp, Glycine max
  unsure (1)..(403): unsure at all n locations
gcgagagacgacagaaggggactgcaaagttgagaagtgaatacacaagcaaaattaaattaattaattaagctgaaagcaagagaaaatgaagatggaaattgaggaagttggcaactgcgaagcacttcccctgctttcactgaaccacgtgtcccttttgtgcagatcagtgtgggagtctatgaggttttatgaggatgtcttgggctttgttcccatcaaacgcccttcttctttcaagttcactggagcctggttttacaattatggtattggaatccacttgatcgagaatcccaacattgatgaatttgatacctgcgtggttgaagaaaggcctattaatcccaaggacanacatatctcattccagtgtactgatgttgaacttgttaagaag

SEQ ID NO: 3869 - DNA, 400 bp, Glycine max
cccacgcgtccgcccacgcgtccgcacacgtgagaaagcaaattaagctgagtgcaagtgcttcattgagaaaatgaagatggaaattgaggaagttggcaactgcgaagcacttcccctgctttcactcaaccacgtgtccctctcgtgcagatcggtgtgggtgtctatgaggttttatgaggatggcttggggtttgttcccatcaaacgcccttcttcttgcaagttcactggagcctgggtttacaattatggcattggaatacactcgatcgagagtcccaacattgatgaatttgatacctgcgtgaatgaagaaaggcctataaatcccaaggacaaccatatctcattccagtgtactgatgttgaacttgttaagaagaggttggaagag

SEQ ID NO: 3870 - DNA, 926 bp, Glycine max
ctcgagccgaatcggctcgagagaaaatgtttatgttcctgagaagaaatttcactctttcaagaaggtgtctcggtccatgggatatggtgagaatgatatcaccttagtatcttttcaatcagtctccaaaggctatcacggggagtgtgggaaacgaggaggttatatggaggtgactgggttttctgcagaagtgagggaacaaatatataaagtggcatctgtcaacctttgctctaatatctctggtcaaattcttgcaagcttggtcatgagtccacccaaggttggagatgagtcctatgactcattcatggctgagaaggagaatattttggcgtcccttgccaggcgtgcaaagacactagaagatgcattcaacaaattagagggtgtaacatgcaacaaagcagaaggggcaatgtacctgttcccccaaattcgcctgtccgaaaaggctatcaaagctgcagaggctgcaaatgcaacacctgataacttctattgcaaacgcttgcttaatgccacaggagtcgttgttgttcctggttctggttttggacaggttcctggcacatggcattttaggtgcaccatattgcctccagaagaaaagattccggccatcgtcacccgcttgactgagttccatgaaaaattcatggatgagttccgtgactaagtcctacttgaattttatccgtcaatttaagggtacccaattgatatttgatgaggatggattttgtagttagagaaaatagtctcttttgttttcaggaataaatttgtcaactccttatagttgcattttgaatatgcaagacttgaaaggatatttgattttctccattcttatacttgtattaggtcctatataaatctctttttaatcgaataaacttcgtattagaatacccccc

SEQ ID NO: 3871 - DNA, 1467 bp, Glycine max
ctattttgtttcattttttatttaatttttccgcagtcataacgacaagccttattttaattattattattttttatttttatggtgtgcttgccttgttggttattgtgagaaaggaagagggtttgtttccgttttgtttgtgaattgtaaagaaggaaataaaacattttgggaaggatttgaagtgggttattgttgtttgtggatttcttcattgttttgctctaaaaatggagagagattttctgggtctgagctcaaaagaaccattggctatgatgaaggaagagatgaatattgatattggaagcaaagacacaggtttcacaaatggagcagtggtaaaatggcccttcatgaacaaagtatatgtccatcctcttttgatgtcattcaatcctcctcaggtgaattctgtgaaccatcctcatggtatgaagatgttttcagttcccaatcaagcaatttcagtttccatgggacatccatccctaaagaatcattttgcaactgttggtcagaatatgaatgttgctactgtgaagcaaccactactcggaggaatacctgttacggtgcctcattcagttcatcccattgttggtgctgttgctggaatgaccgaaacacgcgtgaaaccatccgtacctgctcctaaacttacaatcttctatgcgggcactgtgaatgtctttgaagatatctcccctgagaaggcacaagctatcatgttgttggctgggaatggcttatcagctggttctaatgaggcatcacccaatgttcaggcgccctgcttgaagttggcagtaggtgatggtgtgcctgttagtcaacccataccaccctgctccggtctttcaagtccttcatctgtttcttcacatactggttcaccgtcagggagtggttcacgtagcagtgatgagtttctcgcagctaaaacatctggaggtaccacttcctctgtttacaaagtggagactccgacagtagtcaacacaactaccatgctaacatcagctgtgccacaggctcgcaaggcatcattagctcgatttttggagaagcgcaaggaaagggtgatgaatgcagcaccatataacctcaacaagaagtctgagaatgtgccacagcagaatacaatggtttctaacatcactgcaagcgcaggagattacttcagataaagaatatttgttgtaacttgtaagttgtaatatatttatgttgcatgcatatgattttattttatttatcagaacttatgctgagattcttaagtgtaaaactatgttcagtccattggtaggtccttaccttaattatttctagtgtaggggctttaccttattacttgaaagttggattttaccttccaacagtatagcattagcatatagaccactatgtaactgtatctgacaatttgttacattgtggaaattaaaagcaagtttagat

SEQ ID NO: 3872 - DNA, 485 bp, Glycine max
gagaagaagaagagagaaggtataagcagccgttttttctgttggtatatgaaggtggtgaagagagaagaagaaggagaatggtgacggaccaggatatagcgaaaggggtggagtctctactgcgtcactctgacccaaactccataactacggttaacggtgtcgttcagcagctggaggccaaactagggttagacctctctcacaaggccagtttcatcagagaccagatcgaccatcttctccggtcacagccacaggcatttgctcctcaccctcctccacttcacaaagactattttgcccctcacccccaaccgcactttccgaccacccactttccttcccattttgccctccatgacgagatcaacttccagcagcacccccgcgctcctccaccgtgcaaagttgagacctttcctcctcaaaatgctcacactgttgcccctcctcaagtgcccaaagaaagtgttcaaact

SEQ ID NO: 3873 - DNA, 1889 bp, Glycine max
tatgtacaacagatgcgtcctccatttctccatgggtaattaatttcatgggtaccactaccacctttccgccttcagccgtttcaaccaccagcaaatggctgggcttcgtggcggccgtgtggattcaatgcatctccggcaacaactacactttctcaaactactccgacgccctcaaatccctcatgcacctcactcagctccaactcaacaacctctccgtcgctaaagacgttggcaaagcctttgggcttctcgcgggcctggcctccgaccgcttccccacttgggccattctcctcataggctccgtcgaaggcctaattggctacggaacccaatggctcgttgttagccaaagaattcaacccctcccctactggcagatgtgtgtgtttctgtgcatgggagggaacagcacgacgtggatgaacactgccgttttggtaacatccattcggaacttccgttcaaacagaggacccgtttcggggattctgaaaggctttgtagggttgagcactgcgatattcactactctctgttccgctctcttcgccgacgatcctggctccttcctcatcatgctctctgtcattcccttcgcagtttgcctcaccggtgtgtttttcctccgggagattcttcccgtcgcctccgccgacgccgacgccgaggaggtaaagtatttcggcgtcttcaacgtcgtggcggtggcaatggcgctttttctgttggcgtatgggttcatccccagccccagcatgttggtgtcaagagtgttcgtggcggttttggttgttatgctggtttcgccgttggggatcccggtgtactcgtacttgaagggtagcttcggagaggggaatgacgtggaggggcagagggtgaaggagccgttgcttcagattccggagaaggagaacgaagctgtggcggcggagatagtgaagagggtgccggtggtgggtgaggagcacacgataatggaggcgctgagaagcgtggatttttggatcttgttcgtgtcgtttctgtgtggggttggaacgggtttggcagtgatgaacaatatgggtcaaatcgggttggctctcggatacccagatgtctcgctctttgtgtcgcttacaagtattttcgggttttttggacggatcatctcgggtactgtttcggagttcaccatcaagaaagctggaacacctagacctctttggaatgcagcatctcagcttctaatggctgtaggttacatactcctggccatggctatgccaggttccctatacattgggtctattttagttggcatgtgctatggagtgaggcttgccattacagtcccaacagcctcagagttatttggactcaaatattatggtctcatatacaacattctcatccttaaccttcccttgggttctttccttttctctggtctgcttgctggcatactctatgatatggaggcaactacaacagagggaggaggcaacacgtgtgttggaggtcattgttacaggctagtctttgttgtcatgactggagcatgcattgttggcttcttcttagacattctgttgtcaatcagaaccaagaatatttacaccaagatttccatgagcaagaaatccttagcaacatccaataggcagtgattcagaatggtatgacattcctgggattgatgaactttatgctcaagtgatatctcaagatctgtcagcaaggtgacttatcctatcagatagttaaaactcattttttcaataaaggagggccgtttgtcatgtactgtaatttttatttatttatttttatgatgtgtttggaaggatcagtgagaattctttttgttccatatggagagaagtgcatttagt

SEQ ID NO: 3874 - DNA, 561 bp, Glycine max
cgtccgcatcatctgataggataagtcaccttgctgacagatcttgctaaggatttccatgagcaagaaatccttagcaacatccaataggcagtgattcagaatggtatgacattcctgggattgatgaactttatgctcaagtgatatctcagtatccgtcagcgaggtgacttgtcctatctgatagttaaaactcatttttccaataaaggagggccatttgtttttaattccatttaggcctccatgtactgttattattagttttttttatgatgtgggatcagagagaattctttttgttccatatgaaaataagtgtatttagtatcgtgagagttttttgatagattaaaatatcacgctgtgttattattagctgtttgttcgtaccagtcagtgttatttggctaatagcgatagtcactagtctgtccaaagtttgcaagtggccatcctaatgttgcaatctttgacattgtaccatgtgttatgtgttgtattgtattggcaatatgttcaatgaaggtggcagtagatgcaattgatgcaatatgg

SEQ ID NO: 3875 - DNA, 411 bp, Glycine max
ttttcgatgggcagcactagcagctacgttgctaccagcagcagcagcagcaaatggctgggcttcgtggcggccgtgtggattcaatgcatctccggcaacaactacactttctcaaactactccgacgccctcaaatccctcatgcacctcactcagctccaactcaacaacctctccgtcgctaaagacgttggcaaagcctttgggcttctggcgggcctcgcctccgaccgcttccccacttgggctattctcctcattggctccgtcgaaggccttattggctaccgagcccaatggcctcgtggttagccagagaattcagcccctcccttactggcagctgggcgtgtttctctgcatgggaggcaacagcaccacttggatgaacacctgccgctttggtaa

SEQ ID NO: 3876 - DNA, 933 bp, Glycine max
ctaaacctaaaccaaaatcacctgcgccagttgcttctctcacttctaaaatggaccgcagaagcctcctctgcctcgcaatcatcggcattgtcgtcgccgccgtcggaggtcagtctccagcggcggctcccaccacttcctcggcatccccagccacagccccttctaaacctaaaccaaaatcacctgcgccagttgcttctcccacttcatctcctccagcttcatcccccaatgctgcaaccgcaacccctcccgtttcgtctcccacggtagcatctcctccgtctaaagctgctgctccagctccagcaaccactcctccggtggccacacctcccgcggccactcctcctgcggctacacctcctgctgtgacaccagtgagctcgccgccagcgccagttccggtgagttctccaccagcgcctgttccggtgagctctccccctgcactggcaccgacaactccggcacccgtggtagcacccagcgctgaggttcccgctcccgctcccaagtcgaagaagaagacgaagaagagtaagaagcacactgcaccagcaccgtcgccggcattgcttggccctcccgctcctccggtaggagctccgggatcaagccaggatgcctcgtctcctggtccagctgtatctgaggacgagagtggagctgaaaccatcaggtgcctgaagaaggtcattggatgcttagccttgagctgggctacccttgttttgttcttctagagaagaggctgaggcttcattgctgctgttacatagtattattgtatcatttattgtcttttttggaccctgtcggggggctaaaattaaatttattaccattgttttcttcaatctcttattactttataattgatgatgtttgttgacactattattattttagtactccttgctcctt

SEQ ID NO: 3877 - DNA, 499 bp, Glycine max
tctcaaactcaaacacacttctataatggatcggaaaagcctcctctccctcgcaatcatcgccattgtcgtcgccgccgtcggaggacagtctccagcggcgtcgcccaccacttctcctccggctgccaccaccactccctttgcatccccagccacagccccttctaagccaaaatcaccggcgccagttgcttctcccacgtcatcatctccaccagcttcgtcccccaatgctgcaaccgcaaccccacccgcttcatctcccacagtagcatctcctccgtctaaagctgccgctccagctccggtggctacacctcccgcagccactcctcctgcggctacaccaccggcagccacacctcctgccgtgactccagtgagttcgccgccagcgccagttccggtgagttctccacctgctcctgttccggtgagctctccacctgcactcgcaccgacaactcccgcacccgtggtagcacccagcgctgag

SEQ ID NO: 3878 - DNA, 2836 bp, Glycine max
ctactccactcgctctctctctctcgctccgtcgccgttttaccaggacacgccaaccctctcttccaaactacctaatatctctatcttcttctcttcgcgtagcgcgtcgtcccccgcaacgacgtcgtttcatggttacgttattgttgttgtgctgattctctctccgaaaatcttctgagggcttctcggcgatgagtggagtaatacattctctggtgtttgattccgcgtttccatttttcaatttctctgtctcgcatgtaagaaatgtttgattggaacgacgaagagctcgctaacatagtatggggtgaggcgggtgagagtgatgatcatattgtgccttatccggaggcaagtgaagatcttaatgacaagaaagaatggaatcaggaagcttctgctactaaactgattgagcagaagagaatagaggctaaaactgattttcatcaaggaaagctaggaagcagttccaaacttgatataattgagggacaatctgcctcagaatctggcacaaactcatggcctgatttatctttatccactgcggctaaaactgatcaaggttccctgggtgctgctgatgtatctaaaactttaggtgaaattagcgaatttagttcagcaagagagagactacacagcttgaaaaggatgtagaaaagcaaggtgattttgtcaactatgcctgggataacataggaagctttgatgatcttgatcgaattttcagtgatgattttgcagcaatgatgacgaccctatatttggccatgtaagtcttgagaattctgatgagctgtggtcttccaaagacgtgagtaacagcacagtacccatactcttggaggctccaaacccaacaagtgctttaagcaacagatctgagcctttggaaattaaagcagaatatgttcaacagaatgatcaatcattttcccctagatttaagaagattggcaattcttcatctcatgatattgcgaatgctcctgcaaacacattcaatgtaggatatgatagagatagaattgccccagctgataaggagcaacaggattttgggcaaaataatcagttgaaagctcggaaaaaatcacaaggtaaacaagaggtaaaagcattgcaggagttttatggtagctggtctccttcatcaactacatgtggacaatttcagaatcagcaggtcttcagtcatacagtcttctccctcttcaattcttgggcagcggaaccagcttcaaggacctgagacactataccaggacatcacaaatacatatgtgacatcctctgcatatgggaaccttacaaatacatattcttctatgtcaatgctaccacaggctcagtcaggagttcttatgcgacagcctctgctttctcgctatgaagcatctcttggtgttatgaatcctgtgagcaagtctgtggacttagttaagcctcttacaatgactccccaggaaaaaattgaaaaattgaggaggcggcaacaaatgcaagcaatgcttgctattcagaaacaacagcaagaattcggccatcaagttcctagctctaataaatcaatgaatgaaaaatgtgccatagaaatgcatagtcaactttgtgatggggctgatcctgaaattgaagatttaagaacaactctagatccaccaactgagcaagatgattctaatacaatctctctggcaattgatgatctttttgttgaagacaccatactgtacatgcttcaggatgttatatcaaagttagatgtcaacataagactctgcattagagatagcttgttccggttggctcaaagtgctatgcaaaggaattatgctagtgatacaagcagtacaaacaacagtagcagagaagaacttaaagttgctgcaagagaagaaagaagtagccaaaacagatatgctaggattgctgatgttgaaaccaagacaaatcccatcgatcgaactgtagctcatttgctctttcataggcctttggatttaactgggaattatcctgataagcttgagtcacctatttctgctaagatacaatatgaaagcaaagaagctaacctcgagaagtttcctatgggatgcttgccagatgaggacatgaaaagtaatcaacaaatttctccccaagggcttgaggcccagcctcaggaccaatttaaaaacagtcgttgcatagacacctcagagaatgcttctaacaatgttctagctgatgctggagatcaggtgcttgaagccttgcaatgaagaaaaagtctcccctggtattgtcagctgtctggatcataatcaaggcaaccgttgaagtctatcatcacataactgaacacctgtttctcatgtgtatgttatcattaatatttatgtttcgtctgtcaaaatcttgacagtatatgtatctcagcatatgaacttattcagcttggtgagtgacttatgttaataatgactttgtcagacttgtgtagtagtaagtaaatgccaataatgttaaagactacgtcagatttgtgtagtagtaatgccactcatgtcaaatagtcaagtcttcacccaactggtttggatgaagcttaaagttggtgttagatttctgcattatgtaactcgttttagttgccccacatcaatagctaaacctgttgactgtcattgagattgagtcttgatatcaaattatggtttttattaggtttatgtatgtttctggcttgaccggttggtcatggattcaaatccagaaacatctttgcatatgcaagggtatgactgtataatggcgtccggatccgctccatttt

SEQ ID NO: 3879 - DNA, 637 bp, Glycine max
cgttttaccgttttgcattgttgaattgaaggtttttgcgactgagagcttcttcgtgttctctttttttgcatgttcgtttttctcgactagatttgatggagtgcgtttctctgtgatctcgaggggaattcggcgatgtgtgagctaattcggtgcctggtgtttgattctggtttcgcttttgcgcatttgtttgctcccgtgatatgaaatgtttgattggaacgacgaagagcttgctgacatagtatggggtgaggggggtgagggtgatgatcatattgtgccttatccggaggcaagtgaagatcttagcgacaagaaagaatggagtcaggaagctgctgcgactaagctcactgacctgaagagaccggaggctaaaactgattttcatcaaggaaagctcggaagcagttccaaacttgatataattgaaggacaatctgcctcagaatctggcacaaactcatggcctgatttatctttatccactgcggctaaaactgatcatggttccctgggtgctgctgatgtatctaaaactttagaagagactacacagcttgaaaaggatgtagaaatagcaaggtgattttgtcaactatgcctgggataacataggaagctttga

SEQ ID NO: 3880 - DNA, 589 bp, Glycine max
atgaaaagtaatcaacaaatttctccccaagtgcttgaggcccagcctcaggaccaatttaaaaacagtcattgcagagactcctcagagaatgcttctaacaatgatctagctgatgctggagatcaggtgcttgaagcctctcaatgaagaaaaaggttccccagaaattggagatatgcaaatgttctctgttattgtcagctgtctggatcataatcaaggcaaccgttaaagtctatcatcatataatcctgaacagctgtttcgcatgtgcatgttatcattaatatttatgtttcgtctgtcaaaatcttgacaatatatgtatctcagcatatgaacttactcaacttggtcagtgctgacttatgttaataattacttcagacttgtgtagtagtaaatgctcctaatgtcaaagactacgtcagatttgtgtagtagtaatgccactcatgtcaaatagtcaagtcttcacccaactggtttggatgaagcttaaagttggtgttagatttctgtattatgtaactcgttttagttgccccacatcaatagctaaacctgttgactgtcattgagattg

SEQ ID NO: 3881 - DNA, 694 bp, Glycine max
agaaactccgttgttaccgttttgctttgttgaagattttttgaggttattcgcgttttcttcttttgcatgttcatttctccgtcgatcagtgaagtgtgaaacgacgccgtttcgttgctctcggctcgaactgatggagtgggtttctctgtgatctcgagggggagttcggcgatgtgtgagctaattcggtgcctggtgtttgattctgttttcggttttgcgcatttttttgctcgaattatatgaaatgtttgattggaacgacgaagagctagctaacataatatggggtgaaggaggtgagagtgttgatcatattgtgccatatccagaggtaaatgaagatgttagcaacataaaagagtggaatcaagaagctgctgcgactaagctcaccaagctgaagaggccagaggctaaaactgattttcatgaaagaaagctaggaagcagttccaaccttgataatagtggagaactactaacctcaggatatggaacaaatgcatggcctgacttgtctttatccccttcagctaacattgctcagggttccctgggtcctgaagcatctaaaaattaaagtgaccttagcaaattcagttcatcaaaaggtgaaggaactacccaacattaaaagaaaggctgattgtgaagtataataataatatatggaatggtcacgttc

SEQ ID NO: 3882 - DNA, 1874 bp, Glycine max
cggttcgaatcccggtttttccacgcgtccgggagactacctaacataatatggtgtgaagacgcgagagtgtttatcatattgggcatattcaaaggaaaggaagatgttaccaacataaaacagtggaatcaagaagctgctgcgactaaactcaccaagctgaagaggccaaaggctaaaactgattttcatgaaagaaagctaggaaacagttccaaccttgataatagtggagaactactaacctcaggatatggaacaaatgcatggcctgacttgtctttatccacttcagctaacattgatcaggggtccctgggtactgaagggtctaaaaatttaagtgaacttagcaaatgcagttcatcgagagaagaaactacacaacatgaaaaggatgctgaaattttccaaactgctcatgaaggtaaagagcaaggtgattttgttgattatggatgggtcaacataggaagttttgatgaccttgatcaaatttttagcaatgatgaccctatatttggccatgcaagtcttgataattctaatgagctttggtcctctaaagatgtgagtaaaaatgcagcacctttaccattggacacaccaagttcatcaggtgctttaaggaacagaactgagcctttggaaatcaaagaagaatatgctcaatgtagtgatgaatcattggacctcaacaatgagaagattgggggtcctgcatcccaggttatagaaaatgcatgcacaatcacagctaaagtgggaaatggtggagttagaagtaagcctactggaaaggaacagcaggtttttaggcaaaagaatcttttgaaaactcggaaaaaatcactggtaaaacaagaggagaataccttgcaggatttctatgataattggtctccttcagcagcaccggcaaaacaatttcagaatcaattggcaccttctgttatacaatcttctccctcttcaattctggggcagccaaagcagatccaaggagctgaaaccctatatcagaatatcataaatccatatgcggcttcttctgtgtatgggaaccttactaatacatatcctgctatgccaatgctatcacagactcacccagcactttctgggtacgaagtgtctcctggtattgtgaatcctgtgaataatttagtggactcagtcaagcctcaaatcatgacccctcaggagaaaattgaaaaattgaggaggcggcagcaaatgcaggcaatgattgctattcagaaacaacaacaacaattgggccatcaagttcctagtactagtaaatcaagcactcaaaaatgtcctccagaaattcaaagtcatcttagtgatgggactgatgacgatctaagaactcttcctgctctagatccaccaattgaacaagatgattctaatacaatgtcagtggcagttggtaatgatttcgttgaagataccgtattgtacagacttcaggatattatatcaaagttttagacatcaaaataagactctgcatcagagatagcttgttccggttggcacaaaggcattatactagtgatactagcagtacaaacaaaagtagcagagaagaacttgaagttgctgcaagagaagaaagcattagccaaaacagatatgccaggatgcctgatgttgaaacagagacgaatcccattgatagaactgtggctcatttactttttcataggcctatggagttgacccaaaactattctgacaagctggagtcacctatttctaccaaatgtgaaagcaaagcagctaaccccttgaactttccagtgagttgcttaccagatgaggactcgaaaaacaatcaacaactttctcaccttgggttt

SEQ ID NO: 3883 - DNA, 1887 bp, Glycine max
  unsure (1)..(1887): unsure at all n locations
cttgtccctatttaaatagctatctagaaagtcctctctatgttccatttcatctcccatacttaaactcactctttctaagtttcttctatcctctctctgccatggttctctccaaaaccacctccgaatccgacgtctctgtccactcaaccttcgcttctcgatatgtcagaacttcgcttcccaggtttaagatgccggaggagtcgataccaaaggaggcagcgtatcaaataataaacgatgagttgatgttggatgggaacccaaggttgaacttggcatcatttgtgacgacttggatggagccagagtgtgataaactcatcatggctgccattaataagaactatgttgacatggacgagtaccctgtcaccactgagctacagaatcgatgtgttaacatgatagctcatcttttcaatgcaccactagaagagactgaggctgcagttggtgttggcacggttggctcatcagaggccattatgttggctggattggcattcaaaaggagatggcaaaatagaaggaaactggaagggaagccttatgacaaacccaacattgtcactggagccaacgttcaggtttgctgggagaaatttgcaaggtactttgaggtggagttgaaggaggtgaagctccgtgatgattactatgtaatggaccctgaaaaggccgtggaattggtggatgagaacactatttgtgttgctgctatccttggttccacactaaatggagagtttgaagatgtcaaacgcttaaatgatctcctaattgaaaagaataaaataactgggtgggacactcctattcatgttgatgcagccagtggtgggttcattgccccatttctttacccagagcttgagtgggacttccggttaccactagtgaagagcatcaatgttagtgggcacaagtatggtttggtctatgctggaatcggttgggttatctggagaagcaagcaggacttgcctgaggaactcatctttcacatcaactatcttggtgctgatcaacccaccttcacccttaacttctccaaaggttctagccaagtcattgctcaatactaccaactaattcgccttggttttgagggatatagaaacgtgatggaaaactgcagagacaacatgttggtgctgaaagaaggactagagaaaacagggagattttcaattgtgtccaaagacaatggagtgcctttggtggcattcacactgaaagaccacacccactttgatgaattccaaatctctgacttcttaaggcgctttgggtggatagtgccagcatacaccatgcccccagatgctcaacatgtcacagtgcttcgtgttgtcatcagggaggacttctcgaggactctcgcagagcgcctcgtggccgatgttgagaaggttctgcatgagcttgattcacttcctgctagggtcataagcagcactagtgtgacagtcactgctgaagaaaatggcaaggtagtggttgctaagaagagtgctatggagactcagagggaaatcactgccatttggaagaagtttgtgttggagaggaagaagaacaatgacaagatgaatggtgtttgttagtgttagcttcaagagtgtgttgtgttgtgttgtgcctatgcctctgccttattgtacttctttattatatatataatttgggcagtaagtacttttgattgagtcaagctatttatctgtttcggttgcttattgatgagaggcaaatatcaaactgtattttcatctgtataagtatgattcactgtatttttgactattttctgaatcatgaattatatttatctcccctatgatatgttcnnnnnnnnnnnnnnnnnnnnnnnnnnnn

SEQ ID NO: 3884 - DNA, 553 bp, Glycine max
gctgcagttgactggtggacatttggagtttttctctacgaacttttgtacggcagaacaccctttaaaggttcaaacaatgaagaaacattggccaacgtagtgttgctgggtcttcgattccccgagcacccaaatgttagtttccaagcaaaggatctgataagagggttgttggttaaagagcctgaaaaccgtttgggttcagagaaaggggctgccgagattaaacagcatcccttcttcgagggccttaactgggccttaattcgctgcgctatgcctccagaacttccagacttctatgattttggagtttcagacatgatgaactcgcagtgcaagggtgctaagtacttagagtgtaaagtaggagagcatgtagaattcgagttgttttgaagacattgctttctatcaggaatggcattcatgttatggattcccaatatttatggctccatgtcggtgtcaagatgtatcttatatgtaagcctaaagccgaatagtctatgttgcaaataagttttgtatcaaaaaacaaaaaaaataa

SEQ ID NO: 3885 - DNA, 482 bp, Glycine max
cccacgcgtccgcccacgcgtccgtggtgttgcaaggtctcagattccctgacaccccatttgttagtatccaagcgagggatctcattagagggttgttggttaaagagcctgaaaaccgtttgggttcagagaaaggggctgctgagataaaacagcaccccttcttcgaaggccttaattgggcgttaatacgttgcgctatcccaccagaactgccagacttgtgtgaatttggagtttcagagatgaccccacagtcccagggaaagggtgttaagtatgtagagtgcaatgcagcaggagagctagttgaatttgagttgttttgaagagactgctctttggcaagagtagcattcttggtttatggattcccttgtttttggctctatgcttcacgtgtcgagctgcaacagttatgtaaggctatgttgtatattagttttgattataacagggtaacatgtgccttttgaggt

SEQ ID NO: 3886 - DNA, 529 bp, Glycine max
gccagactcctgagatagaacactcaccgattgttgcggcaatacagaagatattatatgctccagatgacaatggaatggctgtggtcgaagctcaagctatgatttctgttggtcgtaaggaaatagagggattaagccccattgctgaggtttcggagcagaagagcagttcagaaactcataagagaaagaatattgccaatattgattttgatgttgctggcctcgcaacgttgtctcccagacagaggctttctgatgtttcagatgttcattgtagcgagtcacctcttatgacttgttagggaggaggaaggatcaccttctgttgttaattcagttagcaacttgttaaaaccgtttttggtcacagtaattcctgtttcatgtgtgaattgaccgcgttattcataatggttaggggtttttagggagactattctgttatcaagtatccccctcagcccagaaaaatgtaaccagatatgttttgcctttatagaatttgctgctagtgctttgattt

SEQ ID NO: 3887 - DNA, 553 bp, Glycine max
ttcccatgtctaagaggtttctttgcaagttctttgctcatggagcttgtctgaaaggggagcattgtgaattttctcatgactggaaagatcctccaaataatgtatgcacattttatcagaaaggagtctgtgcttatggtagtcgctgcagatatgatcatgtcaaagcttctcgagagcaatcttctgctccatcttcttcagtaaccgaaccccagaccccagtttcagatactgttgcttttggaaatactagagctacatttaatggtgttgctacagctgcagagttttctctttccaggagtccttactttcttcctagtgaaccagcttggaatcaagaaccggtttggaatcaagagtttgggtataatgaacctttatgagaggacaatgttggtcaaaccataatcacttcaccttctgagctttcaatttgttcatttgctgctgctggaaactgtccacgaggggaaaaatgccctcatattcatggggatctatgtcccacctgtggaaagcattgcttgcatcctttccgacctga

SEQ ID NO: 3888 - DNA, 612 bp, Glycine max
ttacgcgtgggcggacgcgtgggcggacgcgtgggcttgaatgctgttttcccttttctgcgccatgcccacctttcctcttcctcttccttctgcttctctgtacacttgaatcccatagcagtaatcatcgtcagggtcctgtacgactggatagccgtgtgggttctatgttccccaaaccctcacctcttggttctccgcaaccctttcttcctctcgcaccttcacctttggctccattcaccaataccactatcccaaagttatcaggactttgcactttgaactttactactgctgaaagtttgataagtgtgacagcaattgattgctgggaagtttttgcaccatttctggctaatgtaatatgttgtccccaattggaagccactctcacaattcttattggtcaatccagtaaacttaccaatgtacttgccttaaacgggaccgttgctaaacattgccttgcagatgtggaacaaattttgatgggccagggtgccactaataatctgaagcaggtatgttcaattcgttcttcaaatctcactgaggcatcttgcccagtaaaaaatgtgaatgatttatatgacatggtggatacta

SEQ ID NO: 3889 - DNA, 2292 bp, Glycine max
gaaacgatgaatggacttaggaaggaagtgaattgaaggtgcagtgagggcaaaatggaagggattattcagatccgatcagtgctgctactactatccataaccatggcatctctcactctggctgtggccgatggcgtttctcgagaagaagctaaagaacttcgagatgaggttaaggatatgttttatcacgcctttaatggatacatggaccacgctttccccctcgatgaattgagacctctctcctgcgcaggacatgatacgcttggtggctatgcgttaaccttgattgactctttagacactttggctttacttggtgaccgccaacgattctctgcttccgttgaatggattggtaaaaatcttcgctttgatataaataaaacggtttctctctttgagactactatcagggtcctcggaggattactttcagctcatcttattgccactgattatgctacgggcatgagagttccgttgtatgataatcagttactaaacttagctgaagatcttgccaggaggttgttacctgcatttgatacccctacaggaattccatttggatctgtaaacttgttacatggagttgataaacatgaaagcaagataacttcaacagctggtggtgggaccttgactcttgaatttggagttctaagccgattgacaaatgatcctatttttgaacaagttaccaagaatgcagtgcgtggactttgggcacggcgttcaaagcttaacctggtcggtgctcatattaatgtttttacaggatgctgggataggaactagtattgactctttttatgagtatctattgaaggcttatttattatttggagatgaggagtacttgtatatattccaagaagcttatgctgctgccatgcattatctttaccatgacccttggtatgtggaagtgaatatggattctgctgctattgtctggccattatttaacagcctgcaggcattttggcctggccttcagctggagatatcaatcccgcaattcgcacccatgctgccttcttgagtgtctggagaagatatggttttactcctgagggctttaatcttgctagtctcagtgttcagcatgggcagaagagttacccgttgcggccagagctaatcgagagcacctattggctatacaaagctaccagagatcctagatatctcgatgctgggagggacatggttgctagtttacagtatggaactcgatgcccttgtggatattgtcacatttctgatgttgagaatcaccaacaagaagatcacatggagagcttcttcttagctgagacagtcaagtatctgtggcttctgtttgatttggctgtgggtcctgacaatcttgtggaaaatgggccttacaagtacatatttagcactgaaggtcatttactgcctgctactcctcaaatctccttagtgagggaacattgtttatactatggggcttattgtagaagtggtgatttgagacaaacatactttgtgccagagtctgacaaagataagaaagaatccaatgatactggattttatgagagttggactaaacctacttattcttcggactacactactgttgagccaagtgctgtttcaggtttgatcaagggtttctgcccaggattaaatcatggacagaagtttggtatattatatgcctatccaactgatgaacgtcatgattatgaaaccaaccaagtccaacagaaagaatcaactactgctgtgcaactgcaaagccattcagtattggttctccgtgaccagagttctgacaatttgctaccagaagacaatagcagtaatcataatgatagtcagacaaatgaatcaagcgatactccttgaagtaggaattataagatctcagttatgcaataggattggtggggaagaatatactcttcaacttcaaagggttgtacttctaaaactcgggcaggctcacccacctgaaatttaaattcaagttttgttagtctgtctaattgagaaagtatgcatttgataatttcggcaactgttgatacagagagcatggagctgaaagagttaaattatggatgaactgacccactaatatcctgcctcctaatcatcgggcacatgtataagaatgtaatgtaattatttttgttgtatcatttttcctaaggctcttgtaaacctattgtgagaggtttaatcagtgtacatgacataggtattatcagattattgaatttagatcataatttgaattgctgatag

SEQ ID NO: 3890 - DNA, 490 bp, Glycine max
agctcgccttcaccgccctctccgccttcacctattggttcaatttcaaaggcaagaccaaggccaaagctcaagatccctcgccttctcaacccgatgctaccgactccaacgccatctcccgcgctgctcggtccagtgatagggctgaggagagggagcaggacactgttacacaggctgatttggaacattttcttcatcttcttgaagggaaggatggagtgatggactggcagagttttatggaaaggtcaacaccaaacatgcagtacaaagcttggcgtcacgatcctgagacaggtcctactgtttactgtagtagaactgtcttcgatgatgcaactccagagttggtgagggatttcttctgggatgatgactttcgtcctaaatgggatgctatgcttgcatactgcaaagtattggaggaatgccctcgtaatgggacaatgatttctcactggattaaaaagttcccctttttctg

SEQ ID NO: 3891 - DNA, 564 bp, Glycine max
gatctgcagtgtttttttcctaacaggatcatttcgttcggagctgaggaggcacaaacacaacaacatatgagatggaagctgcaaagggaaccgtcaaaggtgtggctatcatcatcggagacaacaacattagaggctctcttcagtgtcttcagcaccccaatgggaccacccatgtgacagggatagtgacagggttgtcccaaggctttcatgggttccatattcatgcttttggtgacaccaccacatggctgcaactccactggtcctcacttcaatccgttcaagaaggatcatggggctccttcagatgataagcgccatgctggtgatttgggcaacattgctgcaagccctgatggagttgctgagatttctattagagatagacagattcctctaactggagttcactccataattggaagggctgttgttgtgcatgctgatcctgatgatcttggaaggggtgggcatgaactcagcaagactactgggaatgctggtgcaagagtagcatgtggtatcatcgggctccagtcatctgtttaggatagt

SEQ ID NO: 3892 - DNA, 732 bp, Glycine max
aatttgcattgatatgtaaatatgcaatggactagcaacattactaaatacattcgtgtacgatatccatatgttaaagccgtaacctatggactatcacacaacagttctgctactgattacctttgtgagtgcaaccattattctcatattcattcggagattattcaaccaaacctcagaatcagaatatgcaaagcttccaccagggcctcgtccatttcctatcataggaaacatcttggaacttggcacaaatccacacatagcactcaccaaattctcaaagatttatggacctcttatgacttttaaacttggcagaataaccaccatagttatctcctctcctcaagtagccaaagaagtactacttgaaaatggtcaagtcctttctagcagaacaattccacattcagtccatgcacttgaccatcacatatactctactgtgtggctgccaccatcagctcaatggaggaaccttaggcgagtttgtgcaacaaaaatattctctccacaattgcttgactccactcaaatccttcgccaacaaaaggttaaagatttattggattttgtgaaagaacgatgcaagaaaggtgggcgctgtggatattgcagaaggttgtctttacaacaatccttaattccatttcaaccactttcttctctatggatttgcctgattctacatctgaaaagtctcatgagttcatgaacattattcga

SEQ ID NO: 3893 - DNA, 464 bp, Glycine max
ggccttttgtagataacaaaatgaaaaggagtacatggaaaagagaagaggagataattgaaccataccctacccgaggcatgcattgagaaatctgaatttctgatcttgtagcccacgctacaatgcaaaggcatcaattccatacaccaaaggaaattcagcattgtgggtacctcaacattggtctttttataagtgagttaaacataatgccacattgattctcaaccatggaacatggcctccttcagacacacaaccctatttaatataggagttgtcactttttaactaaccaaaatgaaatatgtcaacaataataggcaacttttaattagatttcaacaaattaataccttctttttcatgagatcgattacacaaatattttagcttactttttctcacgcaccctcgtgtacactctgtccaaccacaccaatattctactggatttctgc

SEQ ID NO: 3894 - DNA, 1734 bp, Glycine max
cttagccgcaatgagctatctggagacatccctaatgagataactggcatgaggatattgaattacttgaatctttctaagaatcatttagtgggtagcattccctcttcgatatcatctatgcaaagcttgacttctgttgatttttcatacaacatcctgtccggtttggtgcctggtaccggtcaattcagctacttcaattacacgtctttcttgggaaaccctgacctctgtggcccctatttgggtgcttgcaaggatggggttgccaatggcgcacaccaacctcatgttaaaggtctctcctcttcttttaagctgctacttgttgttgggttgctactatgttccattgcttttgctgtggctgcaatattcaaggcccggtcactgaagaaggccagtggggctcgtgcatggaagttgactgcgttccaacgtttggacttcactgtcgatgatgttttgcattgcttgaaggaggacaacattatagggaaaggaggtgctggcattgtctacaaaggggctatgcctaatggggatcatgttgctgtgaaaaggcttccggctatgagtagaggctcttcacatgatcatggcttcaatgctgagattcaaacattggggcgaatccgacacaggcacattgttaggttgttgggcttctgttcaaatcatgagacaaatctcttggtgtatgagtacatgccaaatggaagtttaggtgaggttcttcatggcaagaaagggggccacttgcattggtacacaaggtataaaattgctgtggaggcttcaaagggcctttgctatctacaccatgactgttcaccactcattgtccatagagatgttaaatccaacaacatccttcttgattccaatcatgaagcacatgttgctgattttgggctcgctaaattcctgcaagattctggagcatctgaatgcatgtctgctattgctggttcttatggatacatagctccagagtatgcctacacattgaaagttgatgagaaaagcgacgtgtacagttttggtgtggttcttttagaacttataacaggcaggaaaccagttggcgaatttggtgatggcgtggacattgtgcaatgggtgaggaaaatgacggactctaacaaggaaggagttcttaaagttcttgatcctagacttccctcagttccccttcacgaagtgatgcatgttttctatgtagccatgctgtgcgttgaagaacaggctgtagagagaccaactatgcgtgaagttgttcaaatactgacagagcttccaaagccacctgactctaaagaggggaacttaacaataacggaatcatctttgtcatcatcaaacgctttagaatctccatcctcagcctctaaggaagatcaaaatcctcctcaatccccaccacccgatcttcttagcatttaaagtgctctgttgggtgtttcatcttattagttcccttgggttgtgatcgcttatccatttactttctttttctgtctctcttctggggttggggcttttcttcttcctctaactgaaggtgttaatgtttggattttttaatggttttgtacagtaggattgatggggggtattttcttataaagtcactgtcttcatcatgtagtactgctttttaatttttatttgcgcccgttgttggggaggattccccggatacaattaaattactcgtttgtttccccc

SEQ ID NO: 3895 - DNA, 542 bp, Glycine max
cttacggatacatagctccagagtatgcctacactttgaaagttgatgagaaaagcgacgtgtacagctttggagtgtttcttttggagcttgtaacaggcaggaaaccggttggcgagtttggcgatggtgtggacattgtacaatgggtgagaaaaatgacagactcaaacaaggaaggagttctaaaagttcttgatcctagacttccctcggttccacttcatgaggtgatgcatgtcttctatgtagccatgctgtgtgttgaggaacaggcggtggagaggccaactatgcgcgaagttgttcaaattctgaccgagcttccaaaaccaccaagctccaaacaaggagacttaacaatcacagaatcctctttgtcttcatcaaacagtttagagtctccaaccacggcatcaaaggaacccaaagatcaacatcctcctcagtcgccaccaaccgatctacttagcatttgaattttgaagtgctcagttggggacagggttgtgtttcatttttatttcctttgggttgtgata

SEQ ID NO: 3896 - DNA, 560 bp, Glycine max
  unsure (1)..(560): unsure at all n locations
agagagagagagagagagagagagagagagagagagagagagagagagagagagagagagagagagagagagagagagagagagagagagagaggaaaggaaatgaagctgtgctcagggctcgctatgaagatgctaagttcttttatgagatggacactcgtaaaaggttttcagaattccgaaagcaactgaaacacattctctttcatgagaagcttggaaccatgctggataagatgactcgtgttgaaaacatggttactaaactaagttgcctcctagatatcaatgaagatgtgcaacaaattatccgggatgcttcctcacttgctatgtctgatcttgccactgcagttgtcactgaatttacatcactttcaggaattatggggcgtcattatgcccttagagatggatactcagagcagattgcagaggccttgctggagatcacacttcctagattttctggggacatacttccccaaagtgatgctggcatagttntggcaattgctgatagattagatagcctgctaggtttatttactgctggt

SEQ ID NO: 3897 - DNA, 693 bp, Glycine max
caagcagcgtacgtggcacatttcctcaagtcagtttaaacttcatgggcggacatctatggttttgaatccagaacattacctcatgcattatggtttccttgatggtgctgacaatgtggtgcattggcttccaaaaagtggagcagggattcacaattttacgagatcttgtcctaaaagataagatatttgtatatgacttagctaatcaacgaattggatgggccgattatgattgttccttgtctgtgaacgtctctctggctaccagcaagagcaaggatgcatacatcaacaattcaggacagatgagtgcgagctgctcccacataggcactttctccaagttgttagctgtaggcattgctgctttccttgtgcacataatagttttcatggagtgccaatttttgtaaaccactaccacgagtcaaagatcactctttgaaacttaaaagggttggctgatgtcttatttattatcggcatacccttgtattgaaacgggaggtggttgcagttttctgagctgtatttaatctcataggtatctttagcacgctgaaaatgaggatctcattgtaaagggtatctcttgttgggaacttgcataattgtatacagtaccagtttatctctggatggaaattgtatcatttataaactgctctgactacataaaacagtgta

SEQ ID NO: 3898 - DNA, 1164 bp, Glycine max
aaaaaatagaaaaaccaaagcacaaaaaacacatgtcttaatagaaaagtcggcaacgattgatggtttgtcacaccaccgaagaaggcttcaggaatctacatagctttttcctcagagcgttgaaaattcccagactctctcgcttcctcaaaatttcgccctctttcattcaattctcttctctgctcttctcttctgttcccaccttctgatccatcatccctcgttttctccgaacaatggctgctggtgtcactgtcaagtccgaggttctagaatcttctccccctgaaggagtatgttccaacacggaggaaaaccacctggttcagaccaatttgtctgatgggtcacccaacaagtctgtgccagcatctggacttaatgcagtgattcctagtgcaaatcagcttaccatcttctataatgggagtgtttgtgtctatgatggaatccctgcagagaaggtgcatgaaataatgcttattgctgctgctgctgccaagtctactgaaatgaagaagattgtgacccaaactaccctcatttcacccgttccctctaggccttcttctccacatggaatcactaacaatattgcttcctcgcagaagagttccatctgcaggctccaagctgaatttccaatagcacgcaggcattcacttcaaaggtttcttgagaagcgtcgtgacaggcttgggagcaaggcaccttatccttcctcatcaaccacaaaagtggctgacaacatagagaacaacttctgtgctgacaatgcaccagaactgatttccttgaatcgatccgaggaggaatttcagccaacggtctctgcctcttgagcgtaaccagtgtttgctctattctatgttgtgtgatagagtggaagaccatgagtgtgcttgtagaatcacagacactgatataattgtattaggttatgaattctgtaactgtgttttatatgtaacatagctactgaacctgaaattgtctgtaacagtgtaacatgaaaattgtgtgtatctgtccacatctaggattgtttgctttgtgttcttatcagtgatcacccatattaaactgttatgcttgtatgagactatgtgaacaactgattatctattgtgttgatgttccaacttatatttttatgac

SEQ ID NO: 3899 - DNA, 651 bp, Glycine max
tccggaatcgacgccacgcccccgcgtccgataacatgtcttcaccattgcccagtttaacttcgaatactccacaactcggcaacgattgatgatttgtcacaccagcgaagaaggcttcaataatctacatagctttttcctcaaagcgttaaaaattcccagactctctcgcttcctcaaaatttcgccctctttcattcaattctcttctctgctcttctcttctgaaaccaccttctgatccatcatccctcgttttctccgaacaatggctgctggtgtcactgtcaagtacgaggttctagaatcttctccccctgaaggagtatgttccaacacggaagaaaaccacctggttcagaccaatttgtctgatgggtcacccaacaagtctgtgccagcatctggacttaatgcagtgattcctagtgcaaatcaccttaccatcttctataatgggagtgtttgtgtctatgatggaatccctgcagagaaggtatgcccttgctgcacttttaaatcatgaatcaatcttgcagctgttgtttcttcaatcctggctctaactttacatgttgcgagcttatgatgcaattctaatcatacattgttttatttactaacaggtgcatgaaataatgcttattg

SEQ ID NO: 3900 - DNA, 573 bp, Glycine max
cccacgcgtccgaaaacacatgttttactaaaaaagtcggcagcgattgatggttggtcacaccaccgaagaaggcttcaggaatctacatagctttttcctcagagcgttgaaaattcccacactcgctcgcttccccaaaatttcacccctttcattcaattcttccctcttctctgctactgatccatccctcgttttctccgaacaatggctgctggtgtcactgtcaagtccgaggttctagaatcttctcctcctgaaggagtttgttccaacacggtggaaaaccacctggtccagaccaatttgtctgatgggtcacccaacaagtctgtgccagcatctggacttgatgcagtgattcctagtgcaaatcagcttaccatcttctataatgggagtgtttgtgtctatgatggaatccctgcagagaaggtgcatgaaataatgcttattgctgctgctgctgccaagtccactgaaatgaagaagattgggacccaaactaccctcatttcacctgttccgtcaaggccttcttcttcacatggaatcactaacaatattggt

SEQ ID NO: 3901 - DNA, 673 bp, Glycine max
  unsure (1)..(673): unsure at all n locations
caactgtatccatctatagagtctagacatcacccaagcttgtgcttattcactgccctgtgtcccccatacactcgcacaccatatgtttgattatttgcgtcagccaacactgaataaaaattgttccttggcagtgttgaatgtggatgcacttgaggccgttctttcgcgaggctaacctgttaaacgggttaacctcgcgagtgcaagcccgttcctatgctcgtcgtcgcgaaccgtttcccaccaaagtttctcactacctccaccgtgcaaaactcattgactccattagacttactctacgctccaacacccccaacccctcccttccctctctcataaaccaccgtcttatggactctttcgtggccactcatgcacttcgctctgccccttctgctgattccgctctctccttcgtccgtgccctcgaaaaaagttctcatttttcccacacccaccacacactccattcacttgccactgtgcttgccaagtctggtcgaagctctgagctcatatccctcgttgatgatatccgagccaaccggttcggctctgttcagatcagtttcatgaatctcatgcagnggcatgctgcagttagggaccttgacactgttcttcaggtgtgggaacagtatgcacttgagaatgaccatctatg

SEQ ID NO: 3902 - DNA, 1325 bp, Glycine max
aaatgcttgccggtgcatcattgatggatgaggctaatagaagtactgtggtatacatcagtttctcaccatttttttttgttgtcagcttgtcgctgttattgttgttgttgttgtatctaaatatttctttcagagttgtgcactagtaattgaaggattttcatgtatgataatgcatgagttgtaccatacttagagcttcttcatacttcatgatttgccaatgccataccttaagtactatcgacgcttcatgagaattacggtgttaaggaataaccctgcagctctgctggctttatgttggtattgggctacagatggtgtaggatccaaagatatggttattcttccatacaaggacagcctgttattattcagtagatacttgcagcagctggtcatggaatctctaggcaaggagtttgacttggatggtaatcgggttaatcaaggaattagtgtctatggaaataaaggaagcacagatcagcatgcctacattcaacaactgagggaaggtgtacacaatttctttgtgacattcattgaggtgctacgtgatagacctcctggtcatgattgggaacttgaacctggtgtcacatgtggtgactacttgtttggtatgctacagggaacaaggtcagctctgtatgccaataaccgagagtccatcacagttactgtacaagaagtgacacctagaacagttggtgctcttattgcactctatgaacgagcagtaggaatttatgcctcccttgtcaacataaatgcttatcatcaaccaggtgtggaagctggtaaaaaagcagcaggtgaagtactagcacttcagaagcgagtgttggcagtgctaaatgaggcaagctgcaaagaacctgtagaaccattgaccctcgaagaagtagcagaccgttgccatgctcctgaagatatcgaaatgatttacaagattatcgcacacatggctgccaatgacagagcattgattgtcgaaggcagctgtggttcaccacgcagcatcaaggtttttcttggggaatgtaacattgatgggttgtatgcatgagttagacgactaccagaattcatgttttggtaatgttgcaattgtgtttgaatacacggaccaacagaagagaagttgcctgcaataatttggtttcaatgttgaatctccatcattaacgaaagtggaaatttctgttaagacaaattcttgaaagtgttttggtgttctgaattggaactacgtgtaaccaaatggagaatccagtgggtaaatataattaataaaattgttcctttcgctgcct

SEQ ID NO: 3903 - DNA, 1368 bp, Glycine max
atatcacaaagaaccagaaaacaaccttcaacaaagacaaaaaccgctctcttctccaacgctgtctgtcaccttaaaaaacaaagttccacttcatcagattcacctaaaccacaccattcgcatcaaaacacttggttgtttgttcccaactccgaaaaatatcatgctcctaacgtaaaatcctcggtttcaacgttcaaccgcgatctcaaaaaacaaaactatggcatcactctcaggcatttgctcctcttccccgactctcaaaaaattcccaaaccaatccccatcgttgaccgaccctctccgcaaagaccacgtgtccttccccgcacgcctcgccgatcggaccctcagcctcgcgccgctccgtgcggtggctcgggaggtttccgacggagcgttggcggcggcggtgaagaaggggttggagaaggatccgcgcgcgctgtggcggagatacgtgggttggctgtaccagcacaaggaacttgggatttacttggatgtgagtcgggtcgggttcagtgatgagttcgttaaggagatggaaccccgtttccaagcggcgtttcgggcgatggaggagttggagaagggcgcgatcgcgaatcccgatgagagtcgcatggtgggacactattggctgagggaccctaagcgtgcgcccaactcgttccttaaaacgcagattgagaacactctcgacgctgtttgcaagttcgctaacgacgtcgttagtggtaagattaagcctccttcgtctccggagggtcgatttactcaaatattgtctgtgggaattggaggttctgctcttggaccacagtttgttgcagaagcattggcacctgataatcctccactcaagataagatttgtggacaacacggatcctgctggaattgatcatcagattgcacaacttgggcctgagctagcttcaacacttgtgattgtgatatcaaagagtggaggtactcctgagaccagaaatggtttattggaagtgcagaaggcctttcgtgaagcaggcttggattttcctaaacagggtgttgctataacacaagaaaattctttgttggataacactgccagaattgagggctggttagctagatttcctatgtttgattgggtgggaggtagaacgtcagagatgtctgcagttggcctgcttccagcagcccttcagggcattgatattagagaaatgcttgccggtgcatcattgatggatgaggctaataggagtactgtgttaaggaataaccctgcagctctgctggctttatgttggtattgggctacagatggtgtaggatccaaggatatggttattcttccatacaaggacagcct

SEQ ID NO: 3904 - DNA, 908 bp, Glycine max
cgagcgaatcggctcagattttgcaagcaaatatggatcacgacatgggataaggagatgaagtgtggttcaaaagaagaagagcaggatagtgtttagttggtcatctgtggatggcatattgcattccaaactcaccatcactccagggttggaagacaggtccatgttgtttattcggctggaacataggcaagaatagagttaatggcaaacctcagattaagtaccatgatattgatcttacattcccaacttctctggtcgacaaaacatttttgagagggaaggagctcaaatgctgctatagggctacaattgatggattcagtgcaaccaatttccacgaatgttgtgacttcaagggcccatgtgtgataatcggctatacaaacaagtctttcaagtttggtgcatttaaccctgaagggtatagaagcacagatgactactacgacacatttgatgccttcctattttactggatagacaatgaaactactaaacccatcatgttgcccaaggttggtggaagtggtgcagccctctttgattatgcacgtgggggcccacaatttggagcagatgggcttctcattgggcccccattggccccagttatgggtggctttgctgggcctgataccaattctggcattggtgatttaagacaagccaagtctagattgggattgtcttatgccaaaagagaggatgggaaagagtccatttttggtgatgagtcaagggctacccttgaagaagtggaagtcttttgtagtcctcaaattgcaagcttatattagaattgcatattgaatagtgtgtgtgagttataaatctctaatattaatgtttgatttctacgaataaaaaatattagaattgcataaaaggggtaaccgggg

SEQ ID NO: 3905 - DNA, 541 bp, Glycine max
gattccaaccattctccaccattcacaatctaagcatcccaaaactaactattgtgctagctacttagttgtgtaagatggcttccaagggaaatgttgcatccacttatgttgcactactcatgtgtctctatttgctttcattcaccatggtgagctctcaaatctcaaccccaccaccaatgccttctcaaaacggtacatgtcctataaatgtacttcgattgggtgtgtgtgccaatgtgttgaacctggtcaatgttacactaggatcaccaccaaccctcccctgttgcaccctcattcagggtttggctgatgttgatgttggtgtttgcctttgcactgccctcagagctaaccttcttggcatcaacttaaacttgccaatttccttgacattgcttctcaatacctgcagagggaacatccctaatatccagtgttcttaaatttatcttctctagtggaatatacatgtggtctatgaaaaaataaactcatcgcctccatccacaattccacatgttgtctctctcat

SEQ ID NO: 3906 - DNA, 437 bp, Glycine max
agaagattgaagatctcgcgcttaagtttcagctctcagatgacgccaccaccaatgcgaacgatttggaatcggaggattttcaggagatttcgtcgacggtgaatttcgcggaagagttcgagccgccggaggagattattccggcgaacatcgaacggaaagcgaacagcgtggagcttccgttttcgctgaggataatcaagaagaagctgcagtggaaggaagggttcagagaggcaggggaatccgcgtattgctctgtcaagaaagcgttctcttccatggtttttatcatcagggagcttcacagtttcactatgcagatgagggagtttttgttctacgaagatctgcaagggattctcgaaagggtgcccaacgaaatgcacgcgtccttcgtgtggctgttccagcaagttttctctcacactccg

SEQ ID NO: 3907 - DNA, 557 bp, Glycine max
gtcaccttttcaaccatgggagcggcatgctgatttttacggagacctgaaatgtttcctttttcaactaaatccagtggcatctatattcaggccaactggagcaaacaataatctgcaatggtgcgctatcaacttcagttcagaggacattccaaatggcattggctttgggggacgagtgaatcacttgggtttgtttatatcagcaaactttgatcaaggacatacattttcgtgtaccacgtttggtagcccttgtctctccaagactaaccgtatattgcctgaagtaatagaatgctggggagtcacacaagatgcgacacaagacaagaatgatgctgtcaagggcactattctggagaggttcaaggaagatcgcaacatgctcaaaatggtaggcctagcaaattccagcgagtaaagtgttgcttgcatgcgtttgatataatccacccattggacttttaatatcattgttcatatgccatgagaaatacaactttatgtagcggtaatctttgttaaataacatattgtgaagcctttctttt

SEQ ID NO: 3908 - DNA, 802 bp, Glycine max
gttcttaagcattgaaatttgtcttgtagggtggctatgttgatttatgccgtggtgtttggaggatccagggatctcttgctgtgtctaggggaattggagatagacacctgaaacaatgggtgacagcagagcctgagaccaaagttctcagaattgaacctgaacatgacttgttaatcttagcttcagatggattatgggataaggtatagaacttgaccatttcacttcaatgttaatagtgtctttttaagtattttttaatattgttgctcatgcattggactgagtcactaaacaagtttgtttctcattctcatttcaggttagtaatcaggaagcagtagatactgctcgttcttttctcgtaggcaacaacaaatcacaaccattgctgctggcttgtaaaaagcttgtagatttgtctgtttcacgaggctctttggatgacacaagtgttatgctaatcaaattggagcactatatttaaagttaccttagtacaacagaaggggaggtagtgcataaggttttagattattgcagttgagatcgcattgaggttaagattgcgttgcagtttgcgactttgaacagccttggtggtgcctgatggataagagtagctgattcttttctgtatatataaatctgactacattattggaatttttttgtacccgcataggggagagggggatattaacaataacatttagtaattatttttttcattgaataatttatgtaatgagcagcatacaattaattaatttatacattatttatttagtaattc

SEQ ID NO: 3909 - DNA, 1004 bp, Glycine max
cctcgagccgagccgaatcggctcgagcaaacacacaagccaaacccaaacacaacaacacaaagaaaaaaagagcacaaacagaccaattccaacggttgaattttgactgaagacaaagttagaaaaaaaaaacatgtcttgctccgtcgcggtttccaattcgccggtgttctctccttcttcttccctcttctgctcgaagccctccatcatctcttcttcgccggaatccctctccctctctctgtcgcatctcaaaccttcgaactcttctacgtcgtcgtcttgttcttcgccttctgctgctgctgcttcttcttctccttcttctccgtttcgacttcgccttcccaagcctcccaccgcgttctccgcgtcttctgctgcttctgcttcgtctacctctccgaactgcaccgttttgaagaggaagcgacccgctaggttggacatacccgtttcctccctcacctttgcggttccgcccacgccctccgtggcggcgcgtgacgtggttgaggctgaggaagatgggtttggggtgtcctgcaagagagggaggagggagtatatggaggatcgttacacagctggggataatcttcgcggagaacacaaactggctttttttggcatatttgatgggcacggtggtgcaaaagctgctgaatttgctgcaagtaacttagaaaagaatgtgttagatgaagtaatcgtgagagatgaagataatgttgaggaggcagtgaagcgagggtacctaaacaccgattcggatttcctaaaggaggatcttcatggtggctcttgctgtgtgacagcattgattaggaatggtaacctcattgtgtccaacgctggtgattgccgcgctgtcattagcagagggggtgttgctgaggctctaacatctgatcacaggccttcaagggaagatgaaagggacagaattgagaacctggtaagcttctgagtgtgatagtacttaatcttttctctgt

SEQ ID NO: 3910 - DNA, 695 bp, Glycine max
ctgttcacaggccttcaagggaagatgaaagggacagaattgagagcctgggtggctatgtcgatttatgccgcggtgtttggaggatccagggatctctggctgtgtctaggggaattggagatagacacctgaaacaatgggtgacagcagagcctgagaccaaagttctcagaattgaacctgaacatgacttgttaatcttagcttcagatggattatgggataaggttagtaatcaggaagcagtagatattgctcgttcttttctcgtaggcaacaacaaatcacaaccattgctgcaggcttgtaaaaagcttgtagatttgtctgtttcacgaggctctttggatgatacaagtgtcatgctaatcaaattggagcactatatttaaagttaccttagtacaactaaggtttcaagattattgcagttgagatcgcattgaggtcaagattgcgttgcagtttgtgatttttgaacaaccttggtggtgcctgatgatggatagagagtagctgattcttttctgtatatataaatctgactaccttattggaattttttgtacccgcgtaggggagggatattaacaataacatttagtaattatttttttcatagaataatttatgtaataagcataaagttcattcccttatacattatttatttagtaattaatttatttttt

SEQ ID NO: 3911 - DNA, 465 bp, Glycine max
acctgaaacaatgggtgacagcagagcctgagaccaaagttctcagaattgaacctgaacatgacttgttaatcttagcttcagatggattatgggataaggctagtaatcaggaagcagcagatactgctcgttcttttctcgtaggcaacaacaaatcacaaccattgctgctggcttgtaaaaagcttgtagatttgtctgtttcacgaggctctttggatgacacaagtgttatgctaatcaaattggagcactatatttaaagttaccttagtacaacggaaggggaggtatgtgcatatggttttagattattgcagtcgagatcgcattgaggccaagattgcgttgcagtttgcgactttgaacagccttggtggtgcctgatggataagagtagctgattcttttctgtatatataaatctgactacattattggaacttttttgtacccgcatag

SEQ ID NO: 3912 - DNA, 393 bp, Glycine max
ctcgagccgctcaaacacacaagccaaacccaaacacaacaacacaaagaaaaaaagagcacaaacagaccaattccaacggttgaattttttggctgaagacaccccaccgacgttagtcaaataaaacatgtcttgctccgtcgcggtttccaattcgccggtgttctctccttcttcttccctcttctgctcgaagccctccatcatctcttcttcgccggaatccctctcgctctctctctcgcatctcaaaccttccaactcttctacgacgtcgtcttgttcttcaccctctgctgctgcttcctcatctgcttcgccttcctcgccgtctcggcttcgccttcccaagcctcccaccgtgttctctgcttcttcttctgcttcgtc

SEQ ID NO: 3913 - DNA, 324 bp, Glycine max
cttcgtttattagtgtgcgtaaattgactaggtgacttaaacgttggattgaatagttaaagctgagaaattagggaaagatcatcatgagtgcgcctttaattgaggattccttaatatgctcttcaggcccatgcttaatgagctgaatggatgcgagtggaatgaaatcttacgaggaggaaatttgttttgtgattgcaggctttttttggcatatttgatgggcacggtggtgcaaaagctgctgaatttgctgcaaataacttgcaaaagaatgtgttagatgaagttattgtgagagatgaagatgatgttgaggag

SEQ ID NO: 3914 - DNA, 460 bp, Glycine max
gagacgcatacataggaggttttccgccaaattcgaaaatggtgaaagaaatcgaaactctgacagaagatgaaagacgcgcacttcgtggaagcaaattcgcccctcttccccgcccttccaattccaaacctaggttggctcatccaggtggacccttggcgacgaataaagcagcggctttggccaagtttctggagagaaagctgaaagacccaaatggattggcgtctattaaccctgatatccttgaacttgctgtcaataatgccaaagaaactgtctatgcaagtggtacttctaattcacgaagaaatgttcggcatgtggactcctttggtgactctgattctaaggattctagtgatgaagagcagaatgaactatcctgaggtaaaggaaagcaagaagaagaagaaaaagaaggagaaaaagaaaaacaaaaaacgaaagaattcag

SEQ ID NO: 3915 - DNA, 412 bp, Glycine max
tagattttccttttcccgaattcacagttccgtgcgacgaaaacaaaaaaatccaaaacattttccatggcccttctaatccactccctggaaatgtccgttactccccaaattaccccaaaccctaaccttaagctgcgcaaattcaacagcttcaaaccccacacaaagggcaaagcgattgggtcaacgcgtggtgtgagaatttcctgcaaggtgaaggactgtgcggttttggatgagaacgtgaattcgtacggtcaattttcggttccggtgaagcaagggtcgaagcagagcaaagaggatgaggaagagaagcagaattactatgtgaatgtgggatatgctatccgaactctgagggaggaaatccctgatctcttctacagggaacttagctttgacatct

SEQ ID NO: 3916 - DNA, 606 bp, Glycine max
gcgtacgtaagcccctctctctctctctctctctaactctcttctaaaacttaccaacacaacaaaatcgagtttccaataaagagttttgttgaaatggaaaacgttccggcggtgtgtaaggaagatgatcagatggatttgcctcccggatttcgattccacccgacggatgaagagctcataagccattacctctacaagaaggtcattgacaccaagttctgcgccagggcaattggagaagtggacctcaacaagtccgagccttgggatttgccatggaaagccaaaatgggagaaaaagagtggtactttttctgtgtgagagacagaaaataccccactggcttgagaaccaacagggccacagaagctgggtactggaaggccacagggaaagacaaagagattttcagaggaaaatctttggttggaatgaagaaaactctggttttctacagaggtcgagcacccaaaggagagaaaagcaattgggtcatgcacgagtaccgactcgagggaaaattctctgctcacaaccctccaaaaactgcaaagaacgagtgggtgatttgcagggtgtttcagaagagttcaactggg

SEQ ID NO: 3917 - DNA, 606 bp, Glycine max
tccatctacacttccttcatttccatccccttctctcttttaaacctcacgcacaacgaaatcgtgattctgttgttcttttgaaatggcaaacgctccggtggtgtgtaaggaagatgatcagatggatttgcctcccggatttcggttccacccgactgatgaagagcttataagccattacctctacaagaaggtcattgacaccaagttctgcgccagggctattggagaagtggacctcaacaagtccgagccttgggatttgccatgtaagtgaaaccaaaccaattcgatcaatctacctttcatgtattatattgattttccttgaaaagttaaaattgcaagtttgtgtttagggaaagccaaaatgggagaaaaagagtggtactttttctgtgtgagagacagaaaataccccactggcttgagaaccaacagggccacagaagctgggtactggaaggccacagggaaagacaaagagattttcagaggaaaatctttggttggaatgaagaaaactctggttttctacagaggtcgagcacccaaaggagagaaaagcaattgggtcatgcacgagtaccgactcgagggaaa

SEQ ID NO: 3918 - DNA, 634 bp, Glycine max
gaagcttcaacattcaagacattacagctccctctccttctggaatccattgagcgtacaagcgtgaagaggccgaagccgcgagccaggaacgagaatgaagaagaagaaggcgtagaagaggtgttagtgatagatgttgagtacgatagcactgatggtgtgaggtttgatgtgttcatcaacgaccaaggcgataatgagattggaccccaggattcagagtttgcgggaagctttgtgactttgcctcactcgccgcatgtcaaccataacaacatcaccagagcttctttcaaattgccattaacgtatcagttgaaagacttgggagtaacaaaagacgatgatagtatttctgtcacactggctcccatatatggagacaagcctgttacaattaaggacgtaaggataaagcgtgtttatcctgaggtagacgatgaataaatctaaattatgtgtgtgctactgctagggtttgtttctccggggatactctatttgtcatttgttgtttcttaattagtgtgttgtagttatttgccttggaacttaatagatccctttcatctttgagggatactatgatattgttataataaatgtttgttaaattgtttgttttattggt

SEQ ID NO: 3919 - DNA, 804 bp, Glycine max
ggaaatgaaaggaaattttcaaaaatttaaaaaaaaaaaaaaaaaaaaaaaaaaaaaagagacataagtttgattgtcctagctttgagcaacatcatgaagatctccattctctttatcacaatcttttcttgtggttttcttggaaatgttgtttcaaatgctagtcctcttccatatgaagctatttttaactttggtgactctataagtgatactggaaatgctgctcataaccacccacctatgcctggcaatagtccttatggttcaacatactttaaacatccttctggacgtatgtcaaatggacgactaatcatagattttatagccgaggcatatgggatgccaatgttgccagcctatttgaatctcaccaaaggacaagacattaagaaaggagtgaattttgcatacgctggttcaactgcacttgataaggattttttagtacaaaaaagaatcaatatagaggaagctactttttcattgagtgctcaatttgattggtttaaaggactcaaatcctccctttgtacaagcaaagaagagtgcgataattacttcaaaaactcattgtttctagtaggagagattggtgggaatgacatcaatgcactcatcccatataaaaatattacagaacttcgagaaatggttccatcaattgttgaaacaattgccaataccacctctaaattaatagaagaaggagcggtagaactagtggtaccagggaacttcccaattgggtgtaattctgctgttttggcaatagtgaatagcgaaaagaaagaagac

SEQ ID NO: 3920 - DNA, 548 bp, Glycine max
atgcattctctctcctccccaaaaatcgatttcgtgatgctgctgtaatcctcatgctcattcaccagttcatcacattcggttttgctagtactccactgtactttgtctgggagaaggtaattgggatgcatgacacaaaaagcatttgcataagggcactagcaaggttgccagtggtgatacccatatggttcttggccataatcttccctttctttgggcccataaactctgcagttggagctcttctggttagtttcacagtctacatcattcccgccacagctcatatgcttacttacagaaaagcctcagccagacagaatgctgctgagaagcctcctttctttatgccaagctggactgcaatgtatgtcttcaatgcattcattgtggtgtgggttttggtggttgggtttgggtttggaggatgggccagcatgaccaacttcgttaagcaaattgacacatttgggctctttgccaaatgctaccaatgcaagccctcaactccaccacccatggcagcagcaccaccttctcat

SEQ ID NO: 3921 - DNA, 833 bp, Glycine max
gttggtacgtattatatataatcctccttgcattgcattttattgtcattggctcagggtctcttccattcacaaccttaaacctttctttcttgtaaactttattgattgattctgagaatagaactaagagggtatagacatggctagcgcaattgcagcttcttttttggttctgcttctggctttccccactgtatttggagctgaccatgaagttggtgacactagtggatgggccctcggagttaattacaacacctgggcctctgggaaaactttcacagttggtgacactttggtgttcaagtatgactccactcatcaagttgatgaggttgatgagagtggatacaacagctgcagctcaagcaacagcatcaagaactaccaagatggaaactccaagattgaattgacttcaccaggcaaaaggtacttcttgtgccccatttcaggccactgtgctggaggcatgaagctgcaaattaatgtggctgctgctagtgggacccccccaacaaccccaagtggcaccccaccaaccaccccatcaaacccttctccttctcctccctctgagtcaggatccaccaacaccacttcaccaccaaagcctagtggagctgtaactgtttccagtggcattggccttttggtggggtctttctttgtgtcagcaattatgtttggtttcatgggctagggaagaggcagtgctgttttttttttattctcctttttattaatatgttattgtttgctggagttgtgtgattcatcattaatccaatgatatctaatctgatatgatctcctttatattaaaatgc

SEQ ID NO: 3922 - DNA, 487 bp, Glycine max
ggagcagatgttagtagaagcaaacagatccttgacagtgaagctggaagaaatcaattcaagaaaccactacaggcaatcatgggaagctggtgatcaaagtatgccatatggtggtggtggtccagagaattctcactctcattctcactctcagggcttcttccaaccattggaatgcaaccctacactacatattggtcctgattacaggtacaatgctgtagcttcagatcagataactgccacaactcaacctcaacaagtgagtggctttattccagggtggatgctttgaactaattaggctcagtgcattcaggtggagacataaaaaagcaaacaccttacaaaagggcaaaagccaaaaatgcatcttggtgttggcaaggtgtaaatgcaaccctgcttctacagttattttggtgtataagaaactgatgttgtgacttgttcaaacttttgaacttttagccatagacatata

SEQ ID NO: 3923 - DNA, 1634 bp, Glycine max
cggctcgagctcgagcgaattcggatcgagcaagccacaaattagtactctcgttaatttttttgctaattgctaattgggcacaatggaaaagcttcatgctgtgtgcatcccatacccagcacaaggccacataaacccaatgctcaagctagcaaaactccttcatgttagaggcttccacatcacctttgttaacacagaatacaaccacaaacgccttctcaaatcaagaggttctgattccctcaatagtgtcccatcatttcaatttgaaaccatccctgatggtctctctgataaccctgatgttgatgccacacaagacgtagtttctttaagtgagtctactagaaggacttgtttaactcccttcaaaaatctcctttcaaaactcaatagtgcctcggatactcctcctgtgacttgcatagtttctgacagtggcatgtccttcactttggatgctgcccaagaattaggcatccctgacgtgtttttgtcgacagctagtgcatgtgggtacatgtgttacatgaaatatccaagacttgttgatatgggcttaacacatctcaaagactcaagttacttagaaaattccatcgattgggtaccaggcatcaaagaaattcgattaaaggacttgcctagcttcatgagaaccacaaacccacaagatctcatgatgatggatttcatatatagccagtgtgagagagctcaaaaagcttcagcaatcattgtgaacacgtttgatgcattagagcatgacgttttggatgcattctcatccatattgttgcctcctatctattccattggccccttaaacctactcttgaacaatgatgtcaccaacaacgaggagttgaaaacaattgggtccaacctttggaaggaagagccaaagtgtctagaatggcttaactcaaaagaaccaaattcagtggtttatgtgaactttgggagcattatggtcatgactagtgaccaattgacagagttagcttggggacttgcaaatagtaacaaaaactttttgtgggtcattaggcccgatcttgtggcagggggaattaattgtgcgttacccaatgaatttgtgaaagagaccaaagatagaggcatgttggcaagttggtgtccccaagaggaggttttggctcacccagcggttgggggattcttgacacattgtggttggaattcaacgttggagagtgtgtgtgaaggggttccaatgttgtgttggcctttctttgcggagcaacaaaccaattgtcgattttgttgcaaggagtgggggattgggttggagatagaggatgttaagagggagaaagttgaagcacttgtgagggagttgatggatggggaaaagggtaaggagatgaacgcatgagctttggagtggaagaaattggcacacgaggctgcttcgagtccacatgggtcctccgttgtgaacatggacaacgtggttcgtcaagttcttatgaacaaaattgctacaaagtagtgtttagattattacaatgctcaatggcatgaattcgttcatgtagtagtgtaatgattttacaaccattctaactctattgaaataaaggtataatatatttttagttttt

SEQ ID NO: 3924 - DNA, 675 bp, Glycine max
ctagtcgtctgaaataaaccagagccttagaggaggagtttctggttggagaatagcagaggagaaaatcaggcctaaatgtacaactcatcaatttgcagttttatgtttagtactaatattttgcagcctaggatggtaattgcgaggctgtcatgcacattgaagactcatcaaaacgtgagaatcggacactgcacaaaggtgcccaggaatgtaaacatggagaaactgcaacatggttatttatttcctgagattgaaagacacgagcttatgcacttagagatgtatccacatgcaaatgtaatagacctcggaattggtgatacgacacaacccttaccaacaattgtaacatctagcatggttgattttgtgcatggcctttcaacagcaacaggctataaaggatatggaccaaagcaaggtgaaaaggccttgaggaaagcaatttctgttacattctacaatgatctggggataaaaccttctgatgtttttgtttcagatggtgcacactgtgatattactcgtcctcagctgcttatgggtcccaatctgaacatagctgtgcatgatccatcctttccggcctacatagattcgagtgtcataattggtcaagctggcaagtttgtacataaagctgggaagtacaaagacatataatac

SEQ ID NO: 3925 - DNA, 531 bp, Glycine max
ttcatatgcaaaagcgtaataagaaataacgagagaaaaattctggggtttagaggagaaaaggggagaaagggtgggtattgcttcacacaaacacaacagtgtctgctgcaccttgcaatggtttcgctatcaacatggtttcgctacattgcccacaagctcgaatactccttctccctcagctggaagaactacaaaggaggtcaaattacagacagagaggtacgtgatgttgtttggaaaaacttctttcaaggaaagctgacgtacttgcactggaataaaggagaggagatggcccctactattgatggaaaagcagtaactcttgttcggaaattaccagttgtagacccaacgtaatttcacacactccttttgtgcaaatctattgactgttattgttagttgtttggcgtgtttttgtaggagatgttgcggttgtgaaggaccctgagaagccagataactacctactcagaagattaactgcaattgaaggctatgaaatgggttctacttgatgaa

SEQ ID NO: 3926 - DNA, 515 bp, Glycine max
gaagacgacagaaggggatagcagtagtgagtggagagcgagaggcataacataacataagaccacacaaagctgtgttgcgcgttgaagagcgaagaaggaagaagatgtcgggtatgggagatgggtacgtgggcaccgcccaagacgcggtgaggattcgacggttggagaagcagagagaagcggagcgtcgcaaaatccaagagctgaaaaccaagtctgcctccgccaaggaccaacccggtcttctccaattcggttccagcacttccgagattctagagactgcctttaagaaggaaactgtgggtttggtcactagagagcagtatgtagaaaagagggttaatattcagagcaaaattgaggaagaagagaaggagaaacttcagaagcaacagcaagaagaggaggagcttcaattagaaaagcgtaaaaagaggaagatcaggggcaactctcgattgtcctttgctgaggatgttgacaatgatccccaagacgacgaacca

SEQ ID NO: 3927 - DNA, 499 bp, Glycine max
aaaattcccccttaattttaggaaatagtaaccacagaaggttctgaatgtgttctaactgtatttttatatttgactctgcaggtagaggaggtttacaacttctctcaggacgacctgttgccggaggatatccttatacttgacacacatgcagaagtgtttatttggattggtcattctgtggacccaaaggaaaagcaaaatgcttttgatatcggccagaaatacatagatttggctgcatctctggagggactatctccacatgtaccactatataaagtaacagaagggaatgaaccttgctttttcacaacatacttttcatgggatcatgcaaaagctatggttctggggaactcatttcagaaaaaggtgtcactactctttggacttggccatgctgtggaggaaaagtcgaatgggtcaagtccagggggaccaagacaaagagcagaagctttggctgccttatctaatgcatttggttcatctt

SEQ ID NO: 3928 - DNA, 1256 bp, Glycine max
cccacgcgttcgcccacacaaaactcgaagcagaaactcaactcaccaacacagttgcattattttctttccagatccaactcaaaattgcaatgggagtagaagatacagatatttgtatcatcaaggagccagatcatgttgtagtctattcagatggcatttcccatgattcaggtcatgaagctggaagtgatcatcacaatattacagagtcttatgaacaaatcaatgagactactgaacatcatagttcagaggagagtgcaaaggaatatgaggtgaaggaatgtacaacagaaatttctgttaaggtctctgatgtctctaatgttaaaaaatgtgaggataagttaacctcagattctgagggtgtcctcagtgagaaaagttttaaatctcacaaaacaaggggtaaacataagccacgagataccgggaagaatggatcaagacctcctgttacaggcagtgcccaaatcaggcccacagttccacaaccgttttccctagcaactgagaagcgtgcttcgatcgcaactcgtcctgcttttgaagaagacaacaagggcagtaacgagagaaaatctttgaacaaaaaaaatgtgctatctcccaatctgtttaaacagaatcagttgaaatctcctgtagtttcaagaatgccattgcaacctgataacaagaagcatcctgatgatgatgattcttgttcagttgcttcaataactgcagcttctgtgcgatcaatcaagtccaggacaactgttgcttctgctcctgtgtttcggtccagtcaacgtgcagaaaaacggaaggagttttatacaaaattagaggaaaagcagcaagcaatggaagctgagaagaatcaaagtgaagctaggaccaaggaagagatggaggaagctatcaagcagctaaggaagagtctaacttttaaagcaagccctatgccaagcttttaccatgaagggccccctcctaaggttgaattgaagaagctaccagcaacgcgagcaaaatctccaaagctgggccggcgaaagagcaacaatggtgcagttaatttatctgaaggggacaaggagaaaggagctggaatcaggagaaagcatcacacaccgaagaccaacaactatggtgataagagtgatgtaaatggcttatctgaccccaaaaacaagaccaagcatattgaaggaattaatgcaaccgaggtaactggctgccaatctccaagtttgcttgtccag

SEQ ID NO: 3929 - DNA, 770 bp, Glycine max
acgacagaagggaattcagaattaataataataagagagtaaggaagggcactccaagactttggtggagagcaagagctataagtgtgagaagtgattggaaattgttggaacccaccctatcaacaaggagaagctgttttcgttcgtcgccactaacactaatcgtttcttcaatgccttacgagaaggaactcgccgctgcaaagaaagcagtcactctcgctgctcgtctctgccagaaagttcagaaggctcttctgcaatccgatgtgcactcaaagtcagacaaaagtcctgtcacagtggctgattatggttcacaagcattggtcagctttatacttgagagagaacttccttctgaatcattttcattagtagctgaggaggattcaggtgatcttcgtaaggaaagtggccaggatactctgaatcgcattacagaacttgtcaatgatactcttgctagtgaaggatcaaatagcttttctactttaacaacagatgacgtgcttgtggccatcgacagtggtaaatctgaaggtggttcagttggacggcactgggttttggatccgatagatggtacttaagggtttgtaagaggagatcaatatgctatagcattagctttggtacatgaaggcaaaattggattgggtgtctttggcttggccaaatcttccactggcatccattggctctaatcagcagcattcttcttcaaatgaagttggttgtctcttctttgctaaagttggtgatgg

SEQ ID NO: 3930 - DNA, 448 bp, Glycine max
ggaaaaagatgggtactcaaacaacactttggtgtagagcaagaactactataagtgtaggaggtgattggaagttgttcgaatccagaatccgaaaaaagggcaccaccgtgtcaacaagtagaagcagaagctgtttttgttcttcgccgctgacactaatcgtttcttcaatgccttacgagaaggaattcgccgctgcaaaaaaagcagccactctcgctgctcgtctctgcaagaaagtacagaaggctcttctgcaatccgatgtgcactcaaagtcagacaaaagtcctgtcacaatggctgattatggttcacaagcattggtcagctttatacttgagagagaacttacttctgaaccattttcattagtagctgaagaggattcaagtgatcttcgtaaggagagtggtcaggatacgctgaagcgcattacagaact

SEQ ID NO: 3931 - DNA, 800 bp, Glycine max
ctctcccctcaaatcttgcgtactatttattttgcttttattaaaagaaattataaaatcatttcttctctattcctcacactctcgagagtcagacgacagagtgcagcattgctttgcttcgctgttgatccattctggagagagaaacactttttcagttctctctctctctctctaagatggccgacgatccaatgcccacgcgctggtctttccaggacttcaaattgtgttatgatgctaagtttggtagaaagaaagtcgcggagaacggagatgatgctgccggtaaagcggtcagcaatggaaatggaaattcagtgacagtggccattgtgtccaatggcaacaaaagggcatcggaaatggctgtttatgagcagtttcgaagcgaggggcagaatcagattcacacaaatggctttgtgccgacccttacagatgaaaggccgcagaagtctttgcttccaccctttgaatctgcggaaatgcgagctttagcagagagcttaagtagggatatcattcgtggaagtccagatgtgaagtgggaaagcatcaaggggttagagaatgccaaacgtttactgaaagaggctgttgtgatgccgattaggtatcccaagtacttcactggtctgttatcaccatggaagggtatcctcctttttggcccaccggggacaggaaagacaatgcttgcaaaggcagttgcgacagagtgcaatacaactttttttaatatttcagcctcatctgtagtcagcaaatggcgaggtgattcagagaagttagtg

SEQ ID NO: 3932 - DNA, 593 bp, Glycine max
atctcgttctcattcctctgtataaataaaatacattgttcttccatcaagtttgtgatgtgagagaagaagagatgggtagaggagaagatcgagaaggggtcgcagtagccgggggcttcttctggtcctacacagacgaaccccatgccacacgacgtcgtcagatcctctccaaataccctcaaatcaaacaactctttggccccgaccactctgctttcttcaagattagtggagttgttctgcttcagcttggtacgggtgctttacttcatgatgctggctggctgaagatatttttagtagcatacttttttggttcttttctcaaccacaatctctttttggctatccacgagttgagtcacaacctggccttctcaaccccagtctacaaccgttggttggggatttttgctaacctccctataggtgtgcccatgtctgttaccttccaaaagtatcacttggagcaccaccgcttccaaggtgtagatggcattgatagggatgtccctagcctcactgaagtccgtcttgtgaaaaatattattgcaaaaaccatttgggtccttttacagctccttttt

SEQ ID NO: 3933 - DNA, 1118 bp, Glycine max
gaaaaactgaagcaaaagaaattagtggcgttattggagaagttagttagcaaagaatggccaacagctaagctttatctctatggatcatgtgctaattcgtttggtgtttctaaaagtgacattgatgtttgccttgctattgaggaagcagacatggaaaaatctaagattataatgaaattggcggatattttgcaatcagataatctgcagaatgtgcaggcattgacgcgtgcacgtgttcccatagtaaagctcatggatccagtgacaggaatatcttgcgacatatgcattaacaatctcctagctgttgtgaataccaagcttcttcgggattatgcacacatagatccaaggttgcgtcagctggctttcattattaaacattgggctaagtcaagaagagtcaatgaaacttaccatgggaccttgtctagctatgcgtatgttttgatgtgcattcattttttacaaatgagaagacctgctatccttccatgcttgcaggagatggagacaacgtattctgtaactgtggatgatgttcattgtgcttactttgatcaagttgaaaaactttgtgattttggtcgccataacaaggaatcaattgctcagcttgtgcggggatttttccattattgggcatattgtcatgattatgcaaatactgttatatctgtacgcactggaagcataatcagcaagcgagagaaggactggacaagaaggataggtaatgatcgccatttgatatgtatagcggatccttttgaaatatctcatgatctaggtcgagtggtagataaacatagcatcaaagttctcagggaagagtttgaacgtgctgctgaagttatgcagaatgatccaaatccatgtattaaactttttgagccctatgttcccagttaattgattgttttgaatatagattttataggtttggtaatggacactcagcttgtaaagcttcttttgtcacatctcatatattaacctagtctcatgtttacaagtgtattttttagttagggttttaaatatgccatctcaatgtaaagaactttttggcctttgatcttttatttgaaaggcaagaattttctgtt

SEQ ID NO: 3934 - DNA, 784 bp, Glycine max
gacacacagagcggttctcatattttggagaatccgaaaaacacgttaaagaaagtcccattcccactaccgaagcaaattaagaagatgaagagagtggagtttatggggctggggctgttagtggtggtgatgatgggatgttgtgggtctgcgactgctgcggatgacttggcaaccaagtgttcagcggtgattcagaaggtaataccgtgtctgaacttcgcgacggggaaggaagaaatgcccaaaaaggaatgttgcgacgccgccacggccataaaggagagcaacccagagtgcttgtgctacatcattgaagagacccacaagggtagcccacaggttaaaagcttgggcattcaagaggccaagctgcttcagctcccttctgtttgtaacgtcaaaaacgccagcatcaccaactgtcctaagcttttgggtctatctccaagttcccccgatgctgctatcttcacatcaaattcttcgaagacaacaccttcagcacctacaacaacaaactcgcaaaccacgaccccgcagagccaaaacgcttctcatggaagcatggttcaacctagtagtaccgtcacctatgtgatggtgatggctttggccattgttctggttgcagttccacccgaaactgtgagcatttatacatgatccggccttatgcactgttgaagacagttgggggtgtcgatttgtgtccggcttttgttatgccataggacttcgcagctttgaattaatgaattagtttgcatttgtggcttgc

SEQ ID NO: 3935 - DNA, 463 bp, Glycine max
tacggctggacgacagaaggggacacacagagcggttctcatattttggagaatccgaaaaacacgttaaagaaagtcccattcccactaccgaagcaaattaagaagatgaagcagcagagagtggagtttatgggcatgggcatgggcatgggcatgggcctgggccttttggtggtgatgatggcatgtgggtcggcgagtggtgcggatgatttggcaaccaagtgttcagcggtgattcagaaggtaataccgtgtttggatttcgcgaaggggaaggaagaaacgccgaaaaagcaatgttgcgacgcagcaacgtccataaaggagagcaacccagagtgcctctgctacatcattgaagagacccacaagggtagcccacaggttaaaagcttgggcattcaagaggccaagctgcttcagctcctttctgtttgtaacgtcaaaaacgccagca

SEQ ID NO: 3936 - DNA, 453 bp, Glycine max
  unsure (1)..(453): unsure at all n locations
aacaaaggcagagcagagttgttgcgattaagaagatgaagagagtggagtttatggggctggggctgttagtggtggtgatgatgggatgttgtgggtctgcgactgctgcggatgacttggcaaccaagtgttcggcggtgattcagaaggtaataccgtgtctgaacttcgcgacggggaatgaagaaatgcccaaaaaggaatgttgcgacgccgccacggccataaaggagagcaacccacagtgcttgtgctacatcattcaagagacccacaacggtagcccacaggtcaaagggccccccccccccaaaaacccaaaaaagggggggtgtaaaagcttgggcattcaagaggccaagctgcttcaagctccttctgtttgcaacgttaaaaacgccagcatcaccaactgtcctagcttttgggtctatctncaagtcccccgat

SEQ ID NO: 3937 - DNA, 958 bp, Glycine max
gttcgactgttatacggggaagataagcctacaattcccccgtttgtgattccgggaccacctccctccctaccaaaggacccgaggtgtagtgtcaacaagaaaaagaagagaagatcacacaagttcagtcggggtcttccagattttgctggaaacagcacggatttgcacagaagccaccatgttgataaccgtgcttcaagctcactcccattgagcccatcattgcctctactttcacatacaggagctctaggaactcagcagattgaatctgaccttaacttgcctcctctaaatttgaaagtggcaagctcgtcacactcttcaaaaaaagcaagttcaggactgtctccatctcctgaagtgctccagttggttgcatcatgtgttgctcctggcccccatcttccatcgatcgccggtgcttcaaactttctcgacagcaagcttccattgccaaggcctgttggcagagccaaattcaaagactcagaaggtgccttcagaaataagaatcctagacagctctcacaaaaaaattggtgttcacctcaagaacaagaagtacatgaccttgatagtggagattccagcaagactcagtcagatccctctcgggttgaacggccctatgaagtggaagtgtcatctgagggaactgtctcagaccatgctgtgagagatcaggaaacataactttagtgttttggataaaaaaaaatgaaaccatattctttcttgatgctgaagccttttcaccaatgcgctagaatttttgtaggtatgacgagtgaactagcaaaaatataggattgttgagaacatgtaaagttttttttttctccaagtgaaatgaaatatagtgttgcttgttgaaaattgtttgttgtcctctttgtctggcattttttgaaattggaaccagatataataattcattattatatgcatg

SEQ ID NO: 3938 - DNA, 1216 bp, Glycine max
ttaattttgaagacattggaatagatatttttatgttggagggatacgatagtaatttcagatgtggcagagatgagtttgagataatatatcaatcctctgggagtggcagtagggggtctagttagagtgaatccatgaccgtgaccatggcggctgcgtttacaagtacaagtgcaacactgagactgtcaaatgttggagagagcagaggtttgcagctgcgtaagtgtaaccctaatcctaataagctgaaggttatgggggggtttggaggttgttctggagtggcagtgggtgtgagagaaagaaaaggaattggaagggttagggttcgggttcgggcgagttcttcgtcggacgaggcagtgagtgcgcagtcaaaagtgactcagaaagtattctttgacgtcagtattggaaatccagttgggaagcttgtgggacgtattgtgattggactgtacggcgacgatgtcccccaaacggccgagaacttccgtgccctttgtactggagagaagggctttggctataagggctccaccttccatcgtgtcatcaaggatttcatgattcaaggaggagactttgacaaaggaaatggaactggaggcaaaagtatatatggtcgtactttcaaagatgagaattttaatttgtctcacactggaccgggtgttgtcagcatggcaaatgcaggtcccaacacaaatgggagtcagtttttcatatgcactgtcaagacaccttggctggatcagagacatgtagtatttgggcaagttttggaaggcatggatattgttaggttgatcgaatcacaggagacagataggggtgaccgtcctacaaagaaggtgaccatcagtgactgtggtgagcttccaaatgcttgaggtggttcttgtgtaattttgttggttattccttctattaacttgttgagttgagaagggaaagaggggcggggaagaagaaactttggctttcttaaattttggtctggctattcttaaaatatgttctgtaaccccttattttcacactggacctacaaacttttagcagccccatgttttctggtagaactatagtttgggttgtcgtcgggttgggcaatttaataccccatttgaatggtatcttcttaagccaaagtgcagtttccatggggaattggatggctagagaattattggagtcttctacaaga

SEQ ID NO: 3939 - DNA, 1414 bp, Glycine max
cctcgagccgaatcggctcgagttcattctctcttttacaccacttcaacttctagtgaaatatctgatcaattaatggctcagtatttctttttgtttgttttggtgtttgccagccaactgatggctggattcaatgcaccgctaccgctaccatctccgtcatatggaaatcatacaaccattctcagcatagacggtggtggtatcaggggcattattcctgcgactgttcttgaatacttagacaaggctcttaaggctaaggatccaacaacatctttagcccattattttgatgtgatatcaggaactagtactggtggcctcatgactgctatgttagcagccccaaactcatctaatgccaatagtcctctctttactccctcggaagtcgtgcaattctacaagaactatggccctaaaatatttgaacctagagcttggtatgatcttgacaaatgtcccaaattcaatggagagttcttacatgatataactcgtcagatattgaaagaaacacgactgaataaaacattgacgaacgtggtaataccaactttcgacgagaggcaaaccaagccagttatattctcaaactataagctcaagacggaaacttacttaaatgccaaactctcagatatatgcatcgggacttcggctgcaccgacttatctaccgccgcaccaatttcagaatgacggtgttcaatttgatttggttgagggtgctatgtctgctaataatccagcgttggttgctgtgagcgaagtgatacaacacaatgagcataaagaaatcctgttgctgtcattaggaacaggaacaataaaagctgaggagaagttatctggcatctttgatggcttgtgtcaacttgagtggctagttagcagcactaacgtttttagtgaggctctatatagtacaaacatgatccactactatcttgccacagtgtttccaggtgttttgcctgcggataactatcttcgaattgaggagtataacctggatccatccatggaagaaatggataatgctgacaagaaaaacatggataatcttgtaaaggtaggaaaaaacctcttgctccaaaaagctttgaggatgaatgtgaactattttgtcccagttgaactagaccaaacaaatgctgaagctcttgacaggttgtctgagaaattatatgcagagaggcagttgcgtctgaaaaggatatctatggacaaaggaggaagccgaattattgaatctgtcaaagtcccttctggccgaatgcatgcaacttaagcaatattgttattagacgtatttgaataaatgtcatgtatatgaccttatattatcctgtgtgttttatccatgtctgttgtaataaggttcattgcttttcgggttctatgta

SEQ ID NO: 3940 - DNA, 509 bp, Glycine max
tgggagcatccaaaccacggagttaatgcatctttcttgctaccgcagccacttttgaacatggggtgacctttcaataacaagatattataattatgttacatcttcgttatatggcaattaccgtgaggaagcatcagaagtagggaggaatgaacttgacctgactctggaaccattatattcctgtcaccttggatgcttttgaatactttctttgaggtggatgatattatatagctttggtatggcatttgacaacatatttgagggcttatatatgcctctatgttttgtggttttccctactctgcagacgttaatgtttattgtgtgttgtaagtttataatttggtcacaaggctaggctttcttaagtggaagctttgctatatatagttaagttgctgaaagacaggtctcgtatctgaactaattaagcgttgagtttgtccttgtttgctaattgctaataacagtatatacaatatataattattttaaatcga

SEQ ID NO: 3941 - DNA, 425 bp, Glycine max
cttaataaagtgatacaggagcagaataacatgcttgcaaagaagatcaaggagaaagaaaaggttgcagcgcatcaagcacaatgggagcatccaaaccacggagttaatgcatctttcttgctaccgcagccacttttgaacatgggtggcaattaccgtgaggaagcatcagaagtagggaggaatgaacttgacctgactctggaaccattatattcctgtcaccttggatgcttttgaatactttctttgaggtggatgatattatatagctttggtatggcatttgacaacatatttgagggcttatatatgcctctatgttttgggggtttccctactctgcagacgcgtatgtctattgggtgttggaagttcataatttggtcacgcggctaagctttcttaagtggaagctttgc

SEQ ID NO: 3942 - DNA, 849 bp, Glycine max
aggtagagcctcctcatccaccaaaaccaccgaagaaaccaccaagcccaccaaaagtagagcctccacttccaccaaaaccaccaaagaatcctcctcctcttccaccaaaaccaccaaaggtgccaccacttcatccagttccaatctacaagaagccacttccacctcttcctccactccctaagtttccaccacttcatccagttccaatctacaagaagccacttccacctcttcctccactccctaagtttccaccacttcatccagttccaatctacaagaagccacttccacctcttcctccactccctaagttgcctccactcaagccacttccacctcttcccaaacttcctccaaagcactttttccatcaccccaaatggttcccagtaccaccttcttcctctcatccttaggctttatatattaatattgcagaggtagatgattactcttgttgggtctgcaaaatatgcatgcattttttctgtcttcttttttgtgctttccgtatgatcaagtatattgaggaagtctatttgttgctaataaagccttggaaggatagggcatgtgatgagcctggggtgagaatataaataaaatttaaactaaaatagagcgatatgattaagaagtttaaagtgatgtgaagtatgagtgtgatcaatattgttgttctcgaatgaagatcatcatcggggcaagttagacaacccagatcattgtatttatttttaattaatttcatgtgtatacaaatgcattgtgattggatagttaagttttctaatatctcttcaaagaataagagttcatttatgctcatttaatagcaac

SEQ ID NO: 3943 - DNA, 980 bp, Glycine max
aaaaacctttgtggttagtaatggaatttaagaaacctagcattcctctaaggtctttatcacaattatttgcccttcctctttgtcataacaaaagtggactaggtatgtatagcactcacatatattattacttttttgtctgagatacactacaagcctacaactctgtctattgcacaatggatgcagatgcagctcctttgcacatagcaatgtatccatggtttgctatggggcacctcaccccatttctccaccttgccaacaagttagccaaaaggggacacaaaatctccttcttcatacccagaagaacacaagccaagttagaagacctcaatcttcacccaaacctcatcacctttgtccccatcaatgttcctcacgttgatggtcttccttatgatgcagaaaccacttcagatgttccctcctctttgttcccactcattgccactgccatggacctcacagagaaaaacattgaacttctcctccttgatctcaaaccacacatcgttttgttcgatttttccacatattggctaccaaacttggctcgtagaataggaataaagtctcttcagtactggattattagccctgcaacagtagggtacatggcatccccagctagacaaagagaagatgacatgagaaaaccaccttcagggttccctgattgttccatcaagctgcatgcacatgaagttcggttccttgctgcagcaaggaaactagagtttggcaatggtgttcttttctatgatcgtatctcagttggtgcagatttgtctgatgctattggattcaaaggttgtagagaaattgaagggccttatgtggactatctagagacacaatttggtaagcccgttcagttacatagtcctttgtgcccgagccatcaaattcaaacttggacgcaaaatggggcgaatggcttggtagatccaaagcttgtccattgatttaca

SEQ ID NO: 3944 - DNA, 639 bp, Glycine max
ctttgtttgttggtgtgttagccaccacggaggcatatcatccttatcatcatcttcataaaattatatcttttgcgcgcattctcattcaccaatggcgttcaccgtcgccattggcagtggcgtggctataatcccctgcggcaataccaccaccgcaattccttacacccgtggtggtggtcaccgaacgagaagaaagctccatctccatgtggcgcgcgcgaagaagcccctgaacggcgacgacgtttccatttacactgagctcctcaaaaccgaagtttccgttttcgaaaataagcccctcggcgacaacgatgccgctttgaagttcgtagagaagatagaccgtcaatttcaataccccgatttctgggaaggatcccagtgggactggttaggcatcttcgtcaagttttccccaatcattggcgtcgctgttgcggcatgtcttgctatctacggttgctttacatttcatgaaccaccaaaagaaatgagggaggctgctgaaaggctgtattctgtgcagtccggcgtggagtctagtgcagagtccggtttggagtctagtgcagattccagtgtggagtccggtaaagttattgaagagcctgatacatatgactcagatgt

SEQ ID NO: 3945 - DNA, 456 bp, Glycine max
cgcaatcaaaagagcaaacgttgtttgttggtgtgttatcataaaattatattttttaggcgcattctcattcaccaatggcgttcaccgtcgccagtggcagtggcgtggctataatcccctgcggcaacaccggcaccgccgcactcttccctcaccgaacgagaagaaacctccacgtggcgcgcgcgaagaagcccctcaacggcgacgacgtttccgtttacgctgagctcctcaaagccgaagtttccgttttggaaaataataagcctctcgacgacaacgatgccgctttgaagttcctagagaagatagaccgtcagtttcaacagcccgatttatgggaaggaccccagtgggactggctcggcatcttcatcaagttttcccccatcattggcatcgctgttgcggcaagtcttgctatctacggttgctttacatttcatgaac

SEQ ID NO: 3946 - DNA, 550 bp, Glycine max
atgaaccagctgggaagattttagagctgtctattcttcacttggccatgtctgaaatggaagtgctagaaactagacaccaaatcgtcattaatgaggcagtagatcttgctaaacggttttgtgatggagcagcccctcgcatcattaatggctgtctccgcacatttttccgagaactggagcttgaagcatcgaataaccgggtttagttgagctccatgtacattggcagattgtctacacgttgtagtcctcgggtcgttgaaaaggttgacgtgcatttcaggaaatatcaccaatggtggtttgataatttgcatattgacctgcaggcaaggcctgagttaggaatcgtgttgtttgaaactggtagatagttatcatgccattttgtttttacagcagttatgacattgcaatattgtaatcgtgtatatgtatgttatattttatgtattttacctcgtgggatttgtaataaattttgtttaagttaaagaacttttgacatataatttaattaagtacttttgaaacatggtactac

SEQ ID NO: 3947 - DNA, 489 bp, Glycine max
agtgaggaagatgggaagcgaagaagtgaagctgttgagcttttttgcgagtccatttggcaaaagggttgaatgggcattgaaactgaagggtgtggagtatgagtacatagaacaagatatcttcaacaagactagtctccttctccagttgaacccggttcacaagaaggttccggttcttgttcatgcccacaaacccatcgctgagtcattcgtcatcgttgaatacgttgatgaaacatggaagcagtatccactgttgcctcgagacccttatcaaagagcacttgctcgattttgggctaatttcgctgagcaaaagcttttagatgcagcatggattggtatgtatagcagcggggatgagcagcaaaacgctgtgaaagtagccagagaagcaattgagaagatagaagaagagattaagggggaagaaaatattttggaggggagaatataggataccttgacattgcacttggatgg

SEQ ID NO: 3948 - DNA, 621 bp, Glycine max
ccgctcgcgcggctcgagctcgtaaatatcaccatcaacaggcaactccttgtcctgaatcaattgatgtcttgtccttctcctccctcagttcctcttcactccctttcattctccctcgcctcacacgcacactcacactcatcattctcaaaaaacacgcccaaattctaatcaaattagggttagggttttcaactcccctcgaattatccctgtaatgcagtgcgattcccgggtcctaccatggagccatcagcaatgtacggaccctcccagcccctgaacatcccctcgcggatcggcgctggcgaaagagacgacggctccggcaacgagcccgccgtcgacggccaccaccaccacattcagtacgaaacgcacgcgctcgatgacggtgccgccggtggcgccgtggttgtcgaggatgttacgtcggacgcggtctatgtctccggcggtggaggccccgaggagtccagccagcttacgctgtcgtttcgtggccaagtttacgtcttcgatgccgttacgcctgataaggttcaagcggtgttgttacttttgggtggatgtgaactatcttcgggtggttcgccatgtgtggatcctagggctcaa

SEQ ID NO: 3949 - DNA, 2137 bp, Glycine max
ccattattgtcgtaactattactcactccaatactctcatactcacagctactttatcatttttctccctttcttttcttcttctgttcagcttagacactcatttttattagttttgttgctgagtgtgtgtgaaactgtgaaagagagttatggcaggaggtggtggagctccagcacctaagattgatgagccacaacctcatcccccgaaggatcagttaccgaatgtttcttactgcattacgagtcctcctccatggcctgaggccatacttcttggttttcaacattatcttgtgatgctcggtacaactgtgctaattcccactgctcttgttccccagatgggaggtggcaatgaggagaaggcaaaagttatccaaactctactttttgtagctggaattaacacattgctgcaaactctgtttggaactcgattgcctgcagtaattggagggtcttatacttatgttgcaacaacaatctctattatccttgctggccgattcagtgatgaaccagatcctatagagaaattcaagaggataatgaggtcaatccaaggtgctcttattgttgcttcaactcttcaaatagtactgggcttcagtggcctttggcgtaatgttgcaaggttcttaagtccactttcagcagttcctttggtatctcttgttggttttgggctttatgagttaggctttcctggggttgctaaatgtgtagagattggactgccagagcttatattactagtatttgtttcacagtttgtaccccatgtgctacatgcaggaaaacatgtcttcgatcggttcgctgttttatttacaattgcaattgtatggttatatgcttatctgctcactgttggaggggcatacaaccatgctgcacctaaaacacagtcaacctgtcgcactgatcgatctggttaatagaatctgccccatggatacgagttccttatccatttcaatggggagcacctacatttgatgcaggtgaagcctttgccatgatgatggcatcctttgttgctcttgtagagtccagtggagctttcattgctgtctatcggtatgcaagtgcaacaccattaccaccatctattcttagtcgcggcatcggttggcagggagttggcattctgttatcaggattgtttggaactggcaatggatcctctgtatctgtagaaaatgctggtcttttggctttaactcgtgttggcagtcgaagagtggtgcaaatagcggccggttttatgattttcttttcaattctcgggaaatttggagccgtttttgcatccattccacctcccattgttgctgcactgtactgcttgtttttcgcttatgttggagcgggaggtctaagttttcttcaattctgcaacctcaacagttttagaacaatatttgtattaggctactccatcttcattggcttgtctgtgtcacagtacttcaatgagtacacagcaattaatggttatggtccagttcacaccaaagcaagatggttcaatgatataatcaacgtcccattccaatcaaaagcatttgttgcgggttgtgtggcatatttcttggacaacacactacataagagggaagctgctattaggaaggacagaggtaaacattggtgggacaagtacaagtccttcaagggtgacacaagaagtgaggagttctattcccttcctttcaatctaaacaagtacttcccctctgtttaattgtgcacaagagctcaatcaaatatataaaggtggtctcatcatcttcaccacggtctagttctaatatttaatttaaatcttgttacacgccatagctctatgaatagtccaccctattatattttatagcattttgtaatacatttattttattgcccttgtttctgtaaatctgatcaagcaagtggattgacgtagcaaatgcgcgatggttaaatcctcgcccccttcatttttgttacgttcactttagaatgccccctccatgcaatgcattttgtactcaattgtctattgaattatattgtactgtttattaatctagacataaacccgcacagtgcgggtagataagcaaaaatgctttagctgttacaattt

SEQ ID NO: 3950 - DNA, 422 bp, Glycine max
atatgctcatctacttactgttggaggggcctataatgatgctccacataaaactcagatatcatgccgcactgaccgtgctggacttattgattctgctccttggataagaattccatatccatttcaatggggagcaccttcatttgatgcaggtgaagcctttgccatgatgatggcatcttttgttgctcttgtggagtccagtggagctttcattgctgtatataggtatgcaagtgcaacgccattgccaccatctattctcagtcggggtattggttggcagggagttggcattctgttatcaggattgtttggaacagtcaatggatcctctgtgtctgtagaaaatgcaggtcttttggctttgacacgtgttggaagtagaagagtggtgcaaatctctgccggatttatga

SEQ ID NO: 3951 - DNA, 684 bp, Glycine max
ctcttaactcacttcttaaattgtgctattattgtggccattgctttcacttcattgcctaaagagagtccccagctcaactctctagttgttgttgctgcatttttcattttctaggcttagtcattagatagaaagagaaggaaaaaaaggctattatggcaggaggaggagctccagctaaagcagatgagccacagccacatccaccaaaggatcagttaccaaatatttcttactgtattactagtcctcctccatggcctgaggccatacttcttggttttcaacattttcttgtgatgcttggcacaactgtgttgattcccactgctcttgttccccagatgggaggtggcaataatgagaaggcaagagttatcgaaaccctgctttttgtagctggtattaacacattgttgcaaacaatgtttggaactcgattgcctgcagtaattggagggtcttacaccttcgttgcaacaacaatctctattattctttctggtcgattcagtgatgagccagatcctatagagaaattcaagaggataatgcgggcaacccaaggtgctcttattgttgcttcaactcttcaaatagtactaggctttagtggcctttggcgaaatgttgcaaggttggtctcaggttcttagttcttaagtccactttcagcagttc

SEQ ID NO: 3952 - DNA, 531 bp, Glycine max
ttcggctcgagatttgttattagcttttgtcatgaattcacgtacactaacaattttatgtgcttttcagttcaatgatataatcaatgtcccattccaatcaaaagcatttgttgcgggttgtgtggcatatttcttggacaacacactacacaagaaggaagctgctattaggaaagatagaggaaaacattggtgggacaagtaccgttccttcaagactgacacaagaagtgaagagttttattcactgcctttcaacctcaacaaatacttcccatctgtgtaactgtgcagcttaactaataaaaatagggggtttcatttcatccaaaattgagtcacaagagtctctgaaaggtcgtgatttgactttttctgatatgagattggatcttattacaggttatagttatatgaagtcctcttctgctatagaatattctataacatttgttatattgcttttctttatgtaaatgctgacttggaatttggaaagttgattcactgtagttaagtgcccatttt

SEQ ID NO: 3953 - DNA, 480 bp, Glycine max
ctttcttttttgcatcttctcttaactcctttcttaaactgtgcaattattgtggttttggccattgctttcacttcattgcctaaagagagtccccagctcagctcagagatagaaagagaaggaaaaaagggttattatggcaggaggaggagctccagctaaagcagatgagccacagccacatccaccaaaggatcagttaccaaatatttcttactgcattactagtcctcctccatggcctgaggccatacttcttggttttcaacattttcttgtgatgcttggcacaactgtgttgattcccactgctcttgttccccagatgggaggtggcaataatgagaaggcaagagttatcgaaaccctgctttttgtagccggtattaacacattgttgcaaacaatgtttggaactcgactgcctgcagtaattggagggtcttacacctttgttccaaccacaatctcaattat

SEQ ID NO: 3954 - DNA, 377 bp, Glycine max
acaattattgtcgtaactattacttactcaaagggaactctctagtctctaatttgcgttttgattcattgattccttcatttccttgctgagagtgcgtgtgatttctctcgtctcctttagaattccgattggtatttctaacactgtgaaagacagagagatatggcaggaggtggtggagctccagcacctaagatcgatgagccacagccacatccaccgaaggatcagctaccgaatgtttcttactgcattacgagtcctcctccatggcctgaggccatacttcttggttttcaacattagcttgtgatgctgggtacaactgtgctaattcccactgctcttggtccccagatgggaggtggcaatga

SEQ ID NO: 3955 - DNA, 288 bp, Glycine max
gtcattgttttgaactttagagcatgatcataattgacattttttatgcaagactctgttgcatccttgagatattaatttattattcactgataattttctatttagtcatagccttgcgacttgaaacttatggggaagtattcataacgtgtattttgggtttgcaggatacgagttccttatccatttcaatggggagcacctacatttgatgcaggtgaagcctttgccatgatgatgacatcctttgttgctcttgtagaggttctctgaaaggcaagagta

SEQ ID NO: 3956 - DNA, 327 bp, Glycine max
aactactactacttccctgggcttatgttgttgaaaatatgaccaagatatacggtttttctttttctttctttaatttgatgagaaatttggtgcaattctgatgcagctgaggccttacttcttggttttcaacattatcttgtgatgctcggtacaactgtgctaattcccactgctcttgttccccagatgggaggtggcaatgaggagaaggcaatagttatccaaactctactttttgtagctggaattaacacattgctgcaaactctgtttggcactcgattgcctgcagtaattggagggtcttatacttacgttgca

SEQ ID NO: 3957 - DNA, 421 bp, Glycine max
ctacactataacttaaacacaaggctactagtgacgagtgagtgagagaaagacagagacattactttttggtagtagcaacaagcaaagggagggaagaaggaaagaaagagagagaatcttcattcatttttttctgctcattttctgtgtacacctttatcgtttctctcactaactttggagtctgctttactccacactccacaacaaagatcgtctgcattccctttcccttctcttttcacccccctttcttttttctctcttcttcttttttctttttctggtgggggcacctcatttgtttttgacttcataatactactacttcttcactcaaaaaagagatagaaagagaaggaaaaaacaggctattatggcaggaggaggagctccagctaaagcagatgagccacag

SEQ ID NO: 3958 - DNA, 367 bp, Glycine max
cttactcaaagggaactctctagtctctagtacgtactctcatactcatagctactctatcacttttccctttattttcttcttctgttcaatatagccactcatttttaggtagctgagtcttttttagagtgtgttttgtaattttgtttcagatttgcgttttgattcattgattccttcatttccttgctgagagtgcgtgtgatttctctcgtctcctttagaattccgattggtatttctaacactgtgaaagaaagagagatatggcaggaggtggtggagctccagcacctaagatcgatgagccacagccacatccaccgaaggattagctaccgaatgtttcttactgcattacgag

SEQ ID NO: 3959 - DNA, 451 bp, Glycine max
tgcttattgcggccaattcaagtgggtgtgtaaaagtgttacagatggtttaaaggaaaggttccctgtggcggcaactttcttgcagttttgcgagttcctggagttttgcacttgtcgcccttgcactcaggctaaatcccatcaacctgctgggagcatataaaaaaatattttgacatcttgagctctggcttataatttgaagtagaagggcttcttcaatttcggccataattggatggagaaatagatctgcaatctaaatcctggtctttttaaatcctgatgtgcaacctcggatttcaaaccagaatttcacattgtcatatgtagaaaaggcttgttatacttaaatatcactgggatcaatccgagaagcagattcaatatgaaacagattaagctccaccttagataaacttctcaacgatagttttatggagaagaa

SEQ ID NO: 3960 - DNA, 721 bp, Glycine max
cataattccctaaccggtggaccgaaaaattaagcaccgaaacgtgacccttccaatctcgcaacgcaagcgacaacaatcgtcacagctcagcagcacaatcaaaaccaaaactccctccccttgcgacatttttacaaacaccttctgcctacaaataaaagatatttcagttttcatgtcctcgtagtggttgggtttgagtgcgtgagtgtgagaatggaagagagtggcgatgcgagggatcttcagaaaccgttcctccacacagggagttggtacaagatgggttccaggcagtccagcatcatgggatcctccactcaggttatccgcgacggcgccgtttccgtcctcttctgcgtcctcatcgtcgccttgggtcccattcaattcggcttcacgtgtgggtattcttctccaacccaaggggctatagttcgcgatctaaacctctctatttcggagttttctttctttggatctttgtctaatgtgggagcaatggtgggagctatagctagtggtcagatagctgaatacatcgggcgcaaagggtcattgatgattgctgcgatccccaatataatagggtggcttgctatttcttttgccaaagattcctcatttttgtatatggggaggttgttggaaggttttggcgttgggattatctcttatgtggtgcctgtttatatagctgagattgcaccccaaaaac

SEQ ID NO: 3961 - DNA, 709 bp, Glycine max
cccacgcgtccgcatgaatgccagcggtctcttttgcagggtgctgacgactggttaagactgcatcaagtcagtcatccagattttcagtttttcagccgttgatgatgttaaggtgactgtaatgttattatactttggccatttatgaatagtacctaagtatttgccagtgcctcctatggttcttttcttagatgccagacctgatgaagttggagttaataacctaattaattgactgaaggaaaatgaaaattggagaaaagatgtttagcactgtccttggtaattttctgcactgtttccttccgtaagaagtgaaagaatcagaaaagtaatggtaataaagcagtaaagctttggacaagcggcagtgttgaggcttaatgtgttcatggaggatgtacagattaacaagcagcttctcaagtgctagctgatctgtttatttgctaacatcaatgagtcctccatcagttgcgtatctgttggtatggttttgttaaagagaacaggctacattttttctgtcctggtgatgttctataattggactttacctttaatttattggggaattttactggatatggtcttttagatgtattcatgcttgaatttcccccaactctatttgaattctttaagttatctttctttgctgcattacctatagaactttttttattgaatttagataccgatg

SEQ ID NO: 3962 - DNA, 1673 bp, Glycine max
gaaccacacatttttcattaccgccgtgataacacactaacaccaccacttcatcaactttacttgacaacaatattgtaaaactcaaaatctagtttcatactttttttcttcttcttgaaatggctctccaggctgcttctcttgttcctgcttctttctcggttcttaaagagggaaagagtggtgtgtctctcaaggactccaccttgttcggtctttcattttcagaacctatcaaagctaacttcagctcttctgcattgaggtgcaagagggaattcgaacaaaagctctgtgctgtgagggccgaaacagtggctacagcctctccagcagttaccaagtctacaccagaagggaagaaaacattgaggaagggcagtgttgtgataactggggcttcatctggactaggcctggccactgctaaggctttggctgagacgggaaaatggcatgtaataatggcctgcagggattacctcaaagctgcaagagctgcaaaatccgctggcatggctaaggaaaactacaccatcatgcacttggaccttgcctcgctcgacagtgtccgccaatttgttgataacttcagaagatcggaaatgccgttagatgtgctggtttgcaatgctgctgtttacttgccaactgctaaggaacctaccttcactgctgagggctttgaacttagtgttgggacaaatcatctggggcatttcctcctctcgcgcctgttgcttgaggacttggaaaaatccgattacccttcaaagcgcttgatcatcgttggttcaataacagggaacacaaacacattggctggtaatgtacctcccaaggctaaccttggtgacttgaggggacttcagggtggtttgaatgggctaaacagctcagccatgattgatggtggagacttcgatggtgccaaggcgtacaaggacagcaaagtctgcaatatgctcacaatgcaagaattccacagacgattccatgaggaaactggaatcacatttgcttccctttaccccggttgcattgccacaacaggcctgttcagagagcacattcccttgttcagaactctgttccctccattccagaagtacataaccaaaggctatgtctcagaagatgaagcaggaaagagacttgctcaggttgtaagtgatccaagcctaacaaaatctggtgtttactggagctggaacaaagcatcagcttcgtttgaaaaccagttgtctcaggaggccagtgatacagagaaggctcgtaagatctgggagattagtgagaaacttgttggttttgcctaagtgggaggagcctccaacatcccatgttgttctagagaccttgcacttgcatggaggaagaaaatgatgtctcaaaagagtggatagataacatcctatcattttgaatgcattgatgttgttttgttagctaggagcttctttgctttgatgtaaggtgtcaatggctttttgtgaatcaagactcaataaaatcattcagccatgtgggtgtggtgaagttgctcacaaaaaaaaattatataagaacaaattaaaaaaaggttattgcctcaaaggtccccaacagccccgtgtacctgtggaagcttcaagattgttgctgtagaagagatgccagagattgaagag

SEQ ID NO: 3963 - DNA, 519 bp, Glycine max
gcttgttcagagagcacattcccttgttcagacttctcttccctccattccaaaagtacataaccaagggctttgtctcagaagatgaatcaggaaagagacttgcacaggttgtgagtgatccaagcctaacaaaatcaggtgtttactggagctggaacgcggcctctgcttcgtttgaaaaccaattgtcccaagaagccagcgatgcagataaggctcgcaaggtttgggagattagtgagaaacttactggtttggcttaagtggtactttggcagcttccaatatccatcttgatttagggacatttgtcatggagttcaataacatctcagaagagtttagaccctcttctgatgagtttgttagattctttttctagctgctaactcctcttggtctgataactactgtcgatgaatccttcacctgaggccaagtgcacatgaactatagagaaataataattgtgcacatgaactatagaaaaataataattgtgcacattgactatga

SEQ ID NO: 3964 - DNA, 682 bp, Glycine max
cccacgcgttcggaaacattctaaaacaaaggacccagttttacatttttttttgttcctgagttccaatggctcttcaggctgcttccttggtttctgcttctttttctattgctaaagagggaaagtctggtgtatctctcagggacaccacaatgtttggtgtttcattgtcggatactctcaaatctgacttcagctctccctcatcgacttgcaaaagggaattccaacaaaaatttggccctttgagggttcagtcagtggcaacaacaactccaggagtcaccaaggcttcaccagaaggcaagaaaactttgaggaaaggcagtgttattatcactggggcttcctctggattaggcctggccactgctaaggctttggctgagacaggaaagtggcatgtgattatggcctgccgggatttcctcaaagccgagagggctgcaaaatctgctggcattgctaaggaaattgtgtctcttgatagtgtgaggcaatttgtggataacttcaggcaatcaggcaggccactagatgtgcttgtttgcaatgctgcggtttacttgccaactgctagggaacctacatacactgctgatggctttgaactcagtgttggaacaaaccatttggggcatttcctcctttcacgccttttgcttgaggacttgaacaa

SEQ ID NO: 3965 - DNA, 475 bp, Glycine max
tttcttttttacacggtcataaaatatgtgtatcggtatttaataagcatatgccttggcaacaaagcattaagtcaaaaatttcagcctgtcaaattaaaaactcatgaaagataagtggtatatctaaaatctccaaacgatagaatataaaggccatcaggccggccactggatgtgcttgtttgcaatgctgcggtttacttgccaactgccagggaacctacatatactgctgatggctttgaactcagtgttggaaccaaccatctcgggcatttcctccttttcgccccttttgcttgacgacttgaacaaatctgactacccttcgaagcggttgatcattgtaggctcaatcacaggaaacaccaacacattggctggaaatgtgccacccaaggctaaccttggtgacatgaggggactagctggaggcttgaatgggctaaacacttcagccatgatagatgga

SEQ ID NO: 3966 - DNA, 1025 bp, Glycine max
ccctcgcgtccgcccacgcgtccgttcaattccaattcaaaggagaacaggtatctgttccttcatcttccccaactctccatcacatacccgatacctgttctccttcttttcccctttatccaccaaagccagggttttctctttcaattttcattttcatgcctctcagattcacgggattatgttttttctgtcgcacaaaccctttttcttcttcggtgtaaactcctattccttgttgcaatcgaaaagggtccctttgtctgttcttgtctactgttgttgatgtctattactgttgctgatgggaattggcttgtgattgtgaacacacccaattcctcgccattgcaacacacccactcgtctttctctaaacgcagatgggataaggagttttctgagctccagagtggatagtatctgaatcagattcataacataacaattcaattgtggttttttgatattttggaatcaatggattcttcacaagggtctaccattgctggtttcgtggacaatgcatccattaagagaaatgagtctagttttgatggcgttcccgtgtatgttaaggaactaattgccggaggctttgctggtgcgctttctaagacctccgttgcacccctcgaacgggttaagatactttggcagacaaggacaccaggatttcattctcttggggtgtaccaatctatgaataagttactaaagcatgaaggttttctaggattatataagggaaatggagctagtgttatccgcattgttccgtatgcagccttgcattttatgacatatgagcgctacaaaagttggatcttgaataattatcctgtgttaggtacaggtccttttattgatcttttagcaggctctgctgcaggaggaacttcagttttatgtacctaccccttggatcttgctcgtaccaaacttgcttaccaggtggctgacacaagaggacttatcaaagatggtatgaaaggagttcaacctgcacataatggcattaa

SEQ ID NO: 3967 - DNA, 1310 bp, Glycine max
tctcctatactctatttttcgcgtcacataaacaaaaaaaataaactggggagaagcatgttgttgatgttgggactatgcttcctattgttctctgcatttccacttgcgttctctgagagatgccacccacaagacaagaaagcgttgctccaactccagaaggacctcggcaacccttatcacatcatatcctggaacgcaaaggaggattgctgcgagtggttctgctgcgttaagtgtgacgagaaaacaaaccgcgtcattagcgttgccttatcatccccttttccagacaccaatctctcggcccaaatacctccctctgtgggtgacctcccttacctcgagtccctcgtcttccacaaattccccaaactcgtgggcccaatccagcccgcaatcgccaaactcaccaaactcaagtaccttgatctctccaacaacaatctctctggcccaatacccgattttttcgcgcaactcaagaacctcgacgatatcgacctttcctttaacaacctctccggccccataccaagctcgcttggtaaactgcctaaactcgcgtatctagatttgagccgcaacaagctcacgggctcaattccggcctcatttggatccttccaaaagcccgggccggctattatgctctctaaaaaccagctttcagggcgccttcctgcttctttggccaacttagactcggacaggatagacttgtcaaggaacaagctcgaaggcgatgcctccatgcttttcgggagcaataaaaggacgtggtctcttgacctttcaaggaacaatttcgcgtttgatctatctcgcgtggagattccccacaagaccctggcaaggttggatctcaaccacaataagatttatgggagccttcctgtggggttgaccaaagtcgaacattttcagctattcgacgtcagctataatcagttatgcggtctcataccgaagggtggagaattgcaaaagatcgataagtctttgtactctcacaacaagtgtttgtgtggctctccactatcaccttgcaaccataagcagatgactgtctaagtcgatttcatactttgataagtattcgtattttcatgtgtgtttgtgtgactttccaatttcacctttcaaccattataagcatatgcctatcaaagttggtttcatcagattaattattctgatttcaataaaatcgattacttgtttttctgtaaaacgtttatatggagtatcgtggtaatggattattagccccacttcgagtgtgaattgtaacattcgtgataatt

SEQ ID NO: 3968 - DNA, 944 bp, Glycine max
  unsure (1)..(944): unsure at all n locations
gaaaatcctctcgtctatagtctattgcactctgacactatcagatatcagatttcagaggcggaggcggaggctggagctgcctcaactcaagtcttcaactatctgaatctgaactcatccactcactcgttagcgcatgctagaacgaaaactgagtaatggaaagtggagggaactcccttccatcagggtcagatggtgtgaagagaaaggtttcatatttctatgatccagaggttggaaactattattatgggcagggacacccaatgaaacctcataggattcgaatgacacatgctcttttagcccactatggattgcttcaacacatgcaggtcctgaagcctacggctgctaaagatagggacctttgcaagttccatgctgatgattatgtggcctttttgagaggcatcacccctgaaacgcagcaagatcaattgagacagctgaagaggtttaatgttggcgaagactgccctgtatttgatggtctttactccttctgccagacatatgcaggaggttctgttggtggtgctctaaaattgaaccacggagcatgcgatgtcgcaataaattgggctggtggtctacatcatgcaaagaagtgtgaggcttctgggttttgctatgttaatgacattgtgctggctattttggaacttctcaaaatacatgagcgtgttctgtatgtggacattgatatccaccatggtgatggtgtagaggaggccttttacaccactgacagggtcatgactgtttcgtttcataagtttgnggattactttcctggaacaggtgatattcgcgatattggatatggtaaagggaaatattattcacttaatgttcccttggatgatggaattgatgatgagagctatcagtccttgtttaagccaataatggggaaggttatggagatntttagg

SEQ ID NO: 3969 - DNA, 529 bp, Glycine max
cccacgcgtccgcccttacatacattgttagtctctatatatacgatccatacctcatcatcatccaaatcactcgttgctatctccaaagtcccagcacacccatttccgttctttgtccttgatgggtttagtctttggaaaaataaccgttgagacagcaaaatatgaagtgatcaaatccacaagtgagtacgaaattcgcaagtatgcaccatcagtagtggctgaagtcacatatgacccttcacagttcaagggaaacaaagatggtggctttatgattttggccaattacattggcgctgtggggaagccccagaacaccaagcctgaaaagattgccatgactgcaccggtcataacaaaggacagtgttggtggtggtggcagtgatggtgagaagattgctatgaccgctccagttgtgacgaaggagggtggcggtgaaggtgaagaagggaagaggaacaagatggtgactatgcagtttgttttgccggctgtgtatgggaaagccgaagaagcg

SEQ ID NO: 3970 - DNA, 678 bp, Glycine max
  unsure (1)..(678): unsure at all n locations
nccacgcgtncgctttcttacaaaagtttgttttcaaagtgtgttttgtttcccgaagcctactcttgtggccacaacccttcctcctctttcttttgaaacctctttttttctattccccaaccaaacaagcaaacgctactcactcatcatcactgagatcatggctcctaatatcaccactgtcaaaaccaccatcaccgacgctcaagccaaggccgccgccgggcgtggccgtgcctacgtcaccttcctcgccggaaacggtgactatgtgaaaggtgtcgttggcttggccaaaggtctgaggaaggtgaaaagcatgtaccctctggtggttgcagtgttacccgatgttccagaacatcaccgaaacattctcacctcccaaggttgcattgttagagaaattgaacccgtgtaccctcctgagaatcagacgcagttcgccatggcatattacgtcatcaactattccaagctacgtatttgggagtttgtggagttcagcaagatgatatacctagacggtgatatacaagtgtttgacaatattgaccacttgtttgacttgcctgataactacttttatgcggtgatggactgtttttgtgagcccacttcgggccacactctgcagtatcatatcggatactgccagcagtgccctcataaggt

SEQ ID NO: 3971 - DNA, 409 bp, Glycine max
cataccaagatcttaaaatatctcttccatacaagtttgttttcaaagtgtttttgtctcccaaatcctactcttgtgaccacaagccttcacttcactctctctctctctctctctctctctctctctctctctctctctcttttttgaaacccttttttctcttctcaaaccaaaccaagcaagcaattatattacactactcactcactgagaccatggctcctaatatcaccaccgtcaccgacgctcaagccaaggccgccggcgggcgtggccgtgcctacgtcaccttcctcgccggaaacggtgactatgtgaaaggtgtcgttggcttggccaaaggtctgaggaaggtgaaaagcatgttaccctctggtggttgcagtgttacccgatgttccagaac

SEQ ID NO: 3972 - DNA, 712 bp, Glycine max
cccactcgtccgcccacgcgtccgctctcacttcctatctaatttttttcgttccggcgtttcatcctcgcgagcgtgcatttgcattgcattgctctctctctctcacaaaacgacgacgacgtcgccaccgcgcaccgttttggttttcctttctcttccgtcgtttgcttccgcaaatagcctttcgcatgggaaacgctaacggcagagaagacggatccattccccccgccgccgccgatccctccgccgccgcacgtggaactcacgcgccgccggtctctctccctccggttcgcgccttctcctccgattcaatggccaatagcccgccgcacagccctcgccgctccagatcgccgatcctcttcggtcctcaggttcctctagctccattacaaagaggtaatggccctccttttctcaatcaaatgtggcagaatgagtctcatggtattgttaatcaacttcctgagcaagggatccctgtcatgattacatggaactatggtggtaacaatgtggctgtggagggatcttgggataactggacatctaggaaggcattacagcgatctggcaaggatcactcaatccttatagtccttccaccaggtatatatcattacaggttcattgttgatggtgaagagagatttactccagagcttcccaatgtagctgatgagatgggacatgtctgcaatct

SEQ ID NO: 3973 - DNA, 438 bp, Glycine max
gaggggggggaccgatttgattcttgtcttcctcgccactgttcccctgtctccataaccaaccaaccatacattaacaccaacactcaacctcactcagtcgctcgctcgctctcttcacaatttcgagatctgaaatcgaaatcgaaaccgaaactgaagagagagacaaaaaaatgagggagccatcgtcggtgggattcgaaggcaacggcgccgtttcttcgccgccgcaagctctcctcgagagactgaaagactacggtcaagaagacgctttcgccctctggtacgagctctcttacgaggaacgcgagtttctcatcaaggacattgagagtttagatctttcgagaattgaccggattattcggtgctcgctgcgatctcaaggactgccggcggcggccattgagcctgtgccggagagcagtgtgt

SEQ ID NO: 3974 - DNA, 413 bp, Glycine max
cccacgcgtccgcccacgcgtccgttcttgtcttcctcgccactgttcccctgtctccataacagaccaacactcaacctcactcactcgctcattcgctctcttcacaatttccagatctgaaatcaaaatcgaaatcgaaaccgaagagagagaaaacgtgaaaccgagagagagagagagagagatgagggaaccatcgtcggtgggattcgaaggcaacggcgtcgtttcttcgccgccgcaagctctcatcgagagactgaaagactacggccaagaagacgttttcgccctctggtacgagctctcccccgaggaacgcgagtttctcgtcaaggacattgagagtttagatctttcgagaattgaccggattattcgatgctcgctgcgatctcaaggactgccgg

SEQ ID NO: 3975 - DNA, 478 bp, Glycine max
  unsure (1)..(478): unsure at all n locations
gacagaacagtatttttagcctttccaataaaacataaatagtgtttgtagtgcagaagagaaggtagagtcataaagaaaaggatgacatgctctgtggattttaacaacaaagatgctcgaataagcttctatgttttcaagccaactgtagtaattgtcgaccatcttgttcatggactgcaacagttttccttactcactcagaatcttggttgtgtacaaagctctatatttaggagcatacatggaaatatgatcatatggtatggagcatggcagaaacggtctagtgaagaaaaagataagctgacagaaaatcttgtaagtttgatccctaactattggttctcttttttgaagcactgaagtagactttgaagtacttcaataggacagcaacttaataaaatttagacatctatatacaaaacangacaattctgatgaatcctttatgtgaacaaaaattatatgt

SEQ ID NO: 3976 - DNA, 706 bp, Glycine max
atttgatgactctcacacacaaaaacaaacattaataatttagtagttcgtagtgaaggctaagaatatacaaacacaacagatggcatgttctgtgccttttaacaacaagaatttggatataagtttctttgttttcaagccaactattgtaatcatagatgaccttgttcatggactcaaacacttctccttaaccactgagagccttggttgtgttcaaagctctatatttaggagcatccatggaaatatgatcatatggtatggagcatggcagaggcggtcgagtaaggaaaaagaggagctgacctcaacccttaaatcaatgttaagcaacatatcaagcatggctgtgttaattgaacacagtttccttgaagcatacggtggagaatcaagagatggctcttcaactgcaaaattctccactggggacataatatccttgaactcagcagtcaccactactaatgacctcaatgacctttgctacgcggtcctagccattttaaggtcacgctttgcaaaaatggaaggcataaccgctggcctttgcttcaagggacaaagcaaacccagagtggtgtgcattcatgtctggaagtctctccatttttgttactcttggattctcaactctgaccacagaaattggatgatgccatatcttgaacgcttctctatcaacatgaagtatgatatt

SEQ ID NO: 3977 - DNA, 559 bp, Glycine max
ggttgttgttgttgttgatgatgtttgctttgttctctttctctctcctcaaattttttcctctctctctagggttccaagagtgtcttgaactactccagaaccctctcttgtttttcacaaatttgggtttagtagagtactgacccagaaaagaaggttcaacaggtacctaagagaggggatagaaagaaaaaaatagaaactgtacgtataaaagaagaaagaaacaaagatataaggaaaaagggaaaatattttgaataaggaagatataaggcaatatataaaaatattagtatttgataataattaggtgtagaaatattatggggaggggaagagtggaactcaaaaggatagagaacaagataaacaggcaggtaacgtttgcaaagaggagaaatgggcttctcaagaaagcctatgagctttctgttctctgtgatgctgaggttgccctcatcatcttctccacccgtggcaagctttatgaattctgtagcaccaacagcatgctcaaaacacttgaaaggtaccaaaagtgcagctatggtgc

SEQ ID NO: 3978 - DNA, 484 bp, Glycine max
agatgaacacaactgtgttgtagttgttgttgttgatgtttgctttgttctctttctctctctctctagggtttcaagagtgttttgaactactccagaaccctctcttgtttttcacaaatttgggttcagtagagtactgacccagaaaagaagattcaacaggtacctaagagaaggaaagagggggatagaaagaaagaaaaagaaatagaaactgcacgtataaaagaagaaagaaagaatcaaagaaaataggaaaaaagggcaaatattttgtttgaataagatataaggcaatagtaatattagtattgttgataataattaggtagaaaaaatattatggggaggggaagagtggaactgaaaaggatagagaacaagataaacaggcaggtaacgtttgcaaagaggagaaatgggcttctcaagaaagcctatgagctttctgttctctgtgatgctgaggttgccctcatca

SEQ ID NO: 3979 - DNA, 513 bp, Glycine max
gtaccatcttataactaggtatttattttctcatatgctcttcttaaacttctctttggtagtgtgttcacatacatatctacttattgttattattattgtcaccacatacaataatgggttccattagtaacaccgaggttcataatcatcacaatgatgatgacgacgatgatcatcgtcatcgggtgaatttctcgatccagagaggatttgggacaaaattgaaggaggcattgaaggaaacattgtttccggatgatcccttcaggcagttcaagaacgaggagaagccaatggggagggtgatgaaaggggtgcaatacttcatcccaatctttgagtggctccccacttacaattttcgcctcttttgctctgacttgatcgctggactaaccatctcaagccttgccatccctcaaggcattagctatgccaaacttgctgaccttccttccctcattggcctttattccatctttgtcccacctttgatctatgtgtttttgg

SEQ ID NO: 3980 - DNA, 985 bp, Glycine max
ccctcgcgtccgcggacgcgtgggcaaaatcagaacaaccaccaaagcttccatctgatttgcagagagttttttctcaagggaccaaccaaggacactatagagagagaaagtggttctgttctttctgtgagtaacgtaacatgcaatagatactttatgaatagagagagaaaaaagagttgaagaaagattgttgttcagttcgaaaaatttgcccatcaagtaccctttttctgttttcattttttggttggttttgcttcctattccaaccctgctcttgattttgctgtggtggattgaaggttgtggcgttcctggatcgttcttctctgtggcggagacatgttggacggtcgttcctgcgttgttccgaggatgttttccggcacttgccaggcagagaacgattggtcttacatgaagtgcttgctggagttggacatcaagaatggcaagcgccctatggagattgatgatgttgaggaggatgagccccaccagccaaggaagtgtactaagaagttggattcttgccatagagttgaaatggctcgaatttcgtttcaacgtcaatctattgaggccaaggattctgttgttccccctatggatcaggagaccattgagccactgagtgtttgtcaaggagttgttgaagaagatggagctttgaccgaccagctattgggtgagaaagaacaggagggtgatggtgatttgatggattttggtgaccatcaatctgataaacagcagcaggctcagccgggggatttgtcagatttcggtgttcggctatttgatgaagatcagttgcagcatgatgataatttattgaatttgagtgagcagcaatccgaggggcggcagcagcagcaccaccatggtggggattcttcggattccagttctctcttgccacgcatgaaccgggacagctcaatcacctgtctcagccgctgttcgaggtcagattatg

SEQ ID NO: 3981 - DNA, 322 bp, Glycine max
ttattttgctccaaaatcagaacaaccaccaaagcttccatctgatttgcagagagttttttctcaagggaccaaccaaggacactatagagagagaaagtggttctgttctttctgctcttgattttgcactggtggattgaaggttgtgtcgttcctggatcgttctttctctgttgcggagacatgttggacggtcgttcctgcgttgttccgaggttgttttccggcacttgccaggcggagaacgaatggtcttacatgaagtgcttgctggagttggacatcaagaatggcaaacgccctatggggattgatgatg

SEQ ID NO: 3982 - DNA, 451 bp, Glycine max
cggctcgagcattatttgtactttttccttattcaccaaaacggcgtcgttttgatttggggggaaacagcacaacacgtcgaactaccctccctcactcaaaaccctcgacgctcactccctctctcacatcgcaagccagccaccgcctccactggtggcactgtcataatccggcgcgaagttgccccctcaacgtgggagagtgtcgctgaagaagttgtttcgggtacggctaagagatttctgggaatctcatcctgaggaatgccagcacacaaaccagttgttgggttatcatggcaaccacagttgcctattccatcatcattcaaagccactgatgggtctcataccaaacctcaaactgaggcatcaagcagcactgttaggaaatccagttcagagctggttgatggccttttcgtccctccaaacgatcccagaaaat

SEQ ID NO: 3983 - DNA, 1106 bp, Glycine max
ctcgagccggaaaattgttaggtacgactccggctcggacagtgctccaacaaacggaacgattattgtagtactttcccagaagtcgtttaacgctaaacgacattacctccgcaaccggtgaacggcagaagaagttaacgcgagaaaaccgaaatccgcactttaccgcaccctgcgactccgcgtgggtttggcgaaaccttctagaattttcttccatggaggttatcagagttctaacggcggcgatcacggtggcggttctcgcggcggcgcttccggcggacgccggcgacgacaaccgagtattcgcgccgtgttcggacacgcgagtgcagagatccgacggattcacgttcggaatcgcgttcgctccgaaggacaagttcttctacaacaacaacaacagcgttcagttgtcgccgtgcgatacgaggctctcgctctccaatgcgaattctcagatctccgtgttcagacccaaggtcgacgagatctcgctcctcaccgttaactcctcctcgttcgtggcggactcgtatggctatatggttgcatttgctggccacagatatgcagcaaggtcgcctcctgcttttgttgcaaacggcacatatactgttaccagttttactcttgtccttgagtttaagagaggcaggctgcagaatttatattggaaaagagatgggtgttctaaatgctcaagcaactcgaaagctgtctgtctcaacaatcaggattgtgcactacaaacatccacttgcaagagccatggaggaactgtggattgcagcataggaatacaattggcattctctggcacagatagacaccttgcagttctcaactcttggtatgaagtgaaaaaccttcgccagtattcactctatggtctttattcaaatctgagagattccctcactagccagtatgataagtttttttaattccctttagttctttggttagttttatctgtaccattccattgtgatttgctcttgttattactttagccacatcccaacccttctcttatcaatatatttgtgaaaaaccagaatgatggcatgtatatttatataacagttgtttttaat

SEQ ID NO: 3984 - DNA, 459 bp, Glycine max
caaaaactgaaaaacacgagaccaccgcagtcatcactcgcgacgtgagacggcgagacctccacctcctcaccgctgccttgctgcgccgccgcgacgcgagagtgaaagacggcgagacctccgcaccgctgcgccgccactagagctcctcgccctcaccctcgcgagaccccctcattcctcattcagtctcagactctcagcacctcaccggcgccgttagagacagttctcgttggacctcaccctctcatcctcacggacctcgccgccattgatcctcatcttcacggacctcaggaatgccagaacgcaaaccagttgttgggttatcatggcaaccacagttgcctattccatcatcattaaaagccactgatgggtctcacaccaaacctcaaactgaggcatcaagcactgttaggaaatccagttcagagctggttgatggctttt

SEQ ID NO: 3985 - DNA, 493 bp, Glycine max
gccacacacctacccaagtgccaaaatgaaagcccatttggtccttttcttgctcatgattcttgtcaccttcactagcaatgttaacactctctcgattaatcccaaatctaactcttcaattcctcaattgacccaacagaaaaggcctgacaatgagaccatatatagggtgtcaaagcagctatgttggggttgcattgcggagtcactagagtttttgttcaggcacaacttggtgagagcagccaagtgggaacttccactgatgtgggacttccagctggagcaatacgcgaggtggtgggctggtgaaaggaaagcagattgcaagctcgaacattctttcccagaagatggtttcaagcttggagagaacatttattggggtagtggctcagcgtggacgccaagtgatgctgtaagagcatgggctgatgaagagaaatactacacctacgccactaatacctgtgtgccaggtcagatgtgt

SEQ ID NO: 3986 - DNA, 406 bp, Glycine max
attgacaacaaaatcacacaactattttgcagatgctatttttatttgatggatctaactaaactagtaagcaaaaaaattaatggcaaaaccaaagttgaggtgcgccaaagacgaaagatggtcgctccatgacagccagctctagtgacaggaggcactcgaagcataggtgagagcgcttctccatccagagatagaaaggttttttctacatcatcaaccccacagagtccagtattggcctctgaaacggtattcttctgctacccagttcttttttccttaattattttcttggttttgttctttttcagtgaaagtgataagatattctttacacatagacggtattattctgcttcccacttttttcccaagacataggatggagagaagagaatat

SEQ ID NO: 3987 - DNA, 266 bp, Glycine max
ccaaagttgaggtgcgccaaagacgaaagatggtcgctccatgacagccagctctagtgccaggaggcactcgaagcataggtgagagcgcttctccatccagagatagaaaggttttttctacatcatcaaccccacagagtccagtattggcctctgaaacggacagaaagctcacacaagcttgcttgcttactgtaatgtaatggttatagagagttagtatttattaaattgatggaagcatcaaaaggttgcagagaaaa

SEQ ID NO: 3988 - DNA, 910 bp, Glycine max
  unsure (1)..(910): unsure at all n locations
gccagctttgccttttgtgtgatctgtcggccgttgcttgatcttcgtgtttctgtcactggtggagttcattttgatcttgtcaagcgtgttttgcgggacattcatcgtgccggtcaagagcctgaagaaataattcatcaaatctctgaaacggcgtatcctatgtataaagcttttatcgagccagatctccaaacagcccatttaaaaattattaacaagtttaatccattctctggatttcagaatcccacctacatattgaagtcagcaagaactgtgacagttgatcaaataaaggcagttattgctgcagagcatactgaaactaaagaggaaacatatgacatatttcttctaccccctggggaagaccccgaagcttgtcaatcatatttgagaatgagaaaccgtgatggaaagtacaatctcatgtttgaggaatgggtgacagatagtccattcataatatcacctagaattacttttgaggtcagcgtgcgccttcttggagggctgatggccttgggatacacaattgcagctatcctgaaaagaagcagccatgtctttcatgatgataaagtgaccataaaaactgattggctagaacaacttaatcgcacctatgttcaggtgcaagggaaagacagaaactattgcaaatttgttgcagagaaactggggttggatggttcctatgttcctcgcacttacattgaacaaatccagcttgaaaagcttgtaaatgatgtgatggcattgccagatgatcttaagacaaaactcagcatagatgatgacttggtttcaagccccaaagaagccctttccagagcttctgcagataggagaatgaagtatcttaatcgcggtatttcacaatcctattcaactcanagggaca

SEQ ID NO: 3989 - DNA, 559 bp, Glycine max
gatctttttggaaattgtttttctgttcttgaggaaatggtctgagcaaaatttaccattattggttcacggagaggttacagattcaaacgttgatatttttgaccgagaaaaagtctttattgaaacaattttaatgcctttaattcaaagacttccacagctgaaggttgtgatggagcatatcactactgcagatgctgttaaatttgtagagtcttgcaaagaaggttatgtagcagcaactgttacaccacagcatcttcttctgaatcgtaatgctttgttccaaggtggcttacagcctcacaattactgtcttccagtgctcaaaagagagatccatagacaggctattgtttcggctgtcactagtggaagtaaacgatttttccttggaactgatagtgctccacatgataggcgtaaaaaggaatgttcctgtggatgtgctggcatatacaactcaccggttgctctatcactatatgccaaagtttttgaagaggctggtgcacttgataagctagaggcttttacaagctttaacggacctgac

SEQ ID NO: 3990 - DNA, 872 bp, Glycine max
tgcctacgcgtccgcccacgcgtccgcccacgcgtgcgccgacgcgtccgcttcttcccaaccactactactcactcactgcagatctcaattgcatcgctgtccatggctaccatcgttagcatcaaggcccgccagatcttcgacagtcgtggcaatccaactgtcgaggtggatttgacttgctccgatggtacttttgccagagctgctgttccaagtggtgcatccactgggatttatgaggcccttgaattgagagatggaggatctgactaccttggaaagggtgtatcaaaggctgttgacaatgtgaacaccgtcattggccctgctttgattggcaaggacccaactgagcagactgctattgacaacttaatggttcaacagcttgatggaactgttaacgaatggggttggtgcaagcaaaagctaggagcaaatgccatattggcagtgtctcttgcagtctgcaaagctggtgctagcgtcctgaaaattcctctttacaagcatattgctaatatcgcgggtaacaaaaagttggttttgcctgttcctgctttcaatgtcattaatggtggatcacatgctggaaacaaacttgctatgcaggagtttatggttcttccctgtgggagcttcctcgttcaaggaagccatgaagatgggtgtagaagtatatcacaatttgaagtctgtgattaagaagaaatatggtcaagatgcagtaaatgttggtgacgaaagtggctttgcccctaacatccaggaaaaacaaggaaggtttggaattgctgaatactgctattgccgtagctggttacacaggcaaagttgtcattggaagtgatgttgcagcttctgaa

SEQ ID NO: 3991 - DNA, 559 bp, Glycine max
cgaggcttagttgagcctataaataaccccacacacttctcccgccccctctctctcgctccctcttctttccaaatcccaactactactcacactcactgcagatctcaatccatggctaccattgttagcatcaaggcccgccagatctttgacagtcgtggcaatccaaccgtcgaggtggatttgacatgctccgatggtacttttgctagagctgctgttccaagtggtgcatccactgggatttatgaggcccttgaattgagagatggaggatctgactaccttggaaagggtgtatcaaaggctgttgacaatgtgaacaccattattgcccctgctttggttggcaaggacccaactcagcagactgctattgacaacttaatggttcaacatcttgatggaactgtgtaacgaatggggtggttgcaagcaaaagctcgcagcagatgccatattggcactgtctctcgcagtctgcagagctggtgctgctgtgctgtaagtccctctatacacgcatatagcaaacaatgccgaaaacaaaaaggtg

SEQ ID NO: 3992 - DNA, 486 bp, Glycine max
caaatcccaactactactcacactcactgcagatctcaatccatggctaccattgttagcatcaaggcccgccagatctttgacagtcgtggcaatccaaccgtcgaggtggatttgacatgctccgatggtacttttgctagagctgctgttccaagtggtgcatccactgggatttatgaggcccttgaattgagagatggaggatctgactaccttggaaagggtgtatcaaaggctgttgacaatgtgaacaccattattgcccctgctttggttggcaaggacccaactcagcagactgctattgacaacttaatggttcaacaacttgatggaactgttaacgaatggggttggtgcaagcaaaagcttggagcaaatgccatattggcagtgtctcttgcagtctgcaaagctggtgctgctgtcctgaaagttcctctttacaagcatattgcaaatattgcgggtaacaaaaagttg

SEQ ID NO: 3993 - DNA, 354 bp, Glycine max
tcctcccatggagtctatggaaagttcctgagccttcttgaacaacccggtcctccccttcgagaacatgacttgtctgctgttggcattgttgattcttttgatctcgatcttccctcgacccattggcttaatttctcgctctctcagagcacaaacatgcccaactgaacgagaaattagagctggtgttttgggaggagtagcaattcgacggttgaagatgcgaaggaaggcaccacactaagtaaggttgcgggaatggaaagcgttttacctcaactgaccagagaggttggctggaaacagcaactttgcatggctccgcgttcttggtgcatttagagactattt

SEQ ID NO: 3994 - DNA, 279 bp, Glycine max
atttctctctctcccgtgctttctagagctggtgctctgggaggagtaggattcggcggttgaagatgcgaaggaaggcaccacactaagtaaggttgcgtgaatggaaagcattttagagagtgtcatgggggcacaaaaaaagttttatttttgttgatagagggttttactcgattgaaacgtcgctgcttctgctcgctcttaaggacccaactgagcatactgctattgacaacttaatggttcaacagcttgatggaactgttaacgaatgag

SEQ ID NO: 3995 - DNA, 463 bp, Glycine max
tctctcttcactctccacaatcccacacccaagcccctctctccgaagttgggaacatgagttggcggtcggtgaggggaagccgtaagaggaagatggatttcgaactggacctcaaccgtgatccgccgctggttcgagaagaggaggaggaggaggaggagggggggccctcaaggcatcagcagcaccaccaccaccaacaagaacctcaaactcccattgtcgatgtcgacgccattgacgacgatgttgttgaaagctcgcctaggtctttcgctcaggctaagagcaatgctgatgagaggaggagagttcgcaggaggacgactattgttgatttggactcagaagatgggaccggaggagttcctcaaaaccaaacaatcatcaatggcgatctttatgtaaatttggccaacaacagcagttctgcgagtgaaaatgctaagaagacacctga

SEQ ID NO: 3996 - DNA, 423 bp, Glycine max
aaggagtgatttttatttgtagtagtgttgcaccatgtgaagggtgtagagatgactgatgttgatctccccattcaatggagctgcaacaacagctaaatgtgctaacgtcaagcccgtaataacaggaaaagctcctacttgtgcagcctagaatgagcaactacaataatgcccattttttttaacaatgttcttatggttttttcctttcttgagtttagcaagccatccccattaaaagaggagatgtctagctagctagtaattgtattcccttgtaaataaatacttcaacgcaactattcaataactcaataacaaaggacgtcttctttatttatattattaaggagcttgtaatatgtcccaaatatgcatacccaagtttaaattttagaaagtgtcatggaatgatataag

SEQ ID NO: 3997 - DNA, 403 bp, Glycine max
tggggtggttcttgtttgtagtagtggtgcaccatgtgaggctgtagagatggctgatattgatctccacattcaccggagctgcagcaacagctaaatgtgctaatgtcaagcccacaataacaggaaaagctcctacttgtgcagcctagaatgagcaactacaataatgcccctttttttttaccaattttcttttactatttttcctatgtagagaagcaagccatccccattaaaagaggaggtgtctagtaattgtattctcttgtgaataaatacttcaacgtggctatggtaaaataatgatcatatatgtaatgtttcttcaataccaaaagaagtcttctttattcatcttattaattagcttgtaatatgttccaaattcatacccaagttt

SEQ ID NO: 3998 - DNA, 934 bp, Glycine max
  unsure (1)..(934): unsure at all n locations
ctcataggctcgtgtaagaagtaccgatccggcatagtattagcttggcttgactcctctcatcagaagaaagcgaaaaaagcaaaaatgcaatctatgtccctgacgctgagcaagaggctctccaattcaaagcctctcttcagaatctcttccagcctcgtcgctcacgcatcctccgccacaacctctccgccgccaccttcgccgccagtcccctctccctccgccctcaacagcctcctcaccgctccgtggtccgccactcagtcacgcggaatcacgctttccggatctgatattagagtcgggaatctcattggaaaccgaggacgcgctcacgaggttctcaaactgtatcgccctcttgaaggaacgggcaaagccactcttgaggttccgcctcaaagtgtagctggttatgccacagttgctactacagaggatggcgccgaaaggaaggaacgaaacagtggattgagtaaggcaacgaagacaaagagagagcagctcctaaaagctactgcagttgcctctcttcttctaatatacccgaacacttattcattgctcttcgcaaatttctttgtgttctggcacttatatgcagggatcggagagattttggcagactatgttcaccatgaaatgaccagagaatttgtcatgatttctctcaggttgttcttgataatcgcattgaaggatgtatgcttaaattttgtatttgtataatcagatagtgcatgggttgtgctgacattactttccaataagaggccatttagggtcaaacttggcaaaaccttaatttgtagtttctagtcgttttctcaaacttaagaggcgaggcaacgtgataacttgatgatttatcatggtaatggatgaattttagcgtgtcttgcacannnnnnnnnnnnnnnnnnnnnnn

SEQ ID NO: 3999 - DNA, 699 bp, Glycine max
tgggctcgagaaaatgacaccgaaaatgacgtcgtggtgaatgaattattcgaaacctttcatcttccataatcccgcaaggtaaacgacggtgacgattggtgggtggcgccgtacgcctcatcccatccatcgccatcggcaccttccttaaacgacatcgcgtccatcaccccttttctcttcctcacagtcacagcagtggtagcttcccaaaaaagagtgccaatggcatcttcttcagactcatgggtgaaggaatataatgaagcactgaaacttgctgatgatatcagtggcatgatttctgagcagagttcatttcctgcatctggaccagaaacccagcatcattcatctgctataaggagaaagattacaatattggggaccaggcttgatagcttgcagtcccttttgtcaaagcttcccggcaagcagcccatatctgagaaggagatgaatcggcgcaaggacatgctttcaaatttgaggacaaaagttaaccaaatggcttcaacattgaacatgtcaaactttgcaaatagggatagtttgcttgggccagaaataaaatcagatgcaatgaccagaacggttggcctggacaacaatggacttgttggacttcagcggcaaattatgaaagaacaagacgatggccttgagcaattggaagagaccgtggcaagcaccaaa

SEQ ID NO: 4000 - DNA, 623 bp, Glycine max
gactgcgcgcgcacgcgtgcttaagctcggtattcaggtcgagcaattacttgttactcgcgtagtgcacgggacagcttaaacgacgccgcgctgatcaacgactccttacgtaaacgacgacggtgtcagacaaacggtgccggttggtggtgccgccacgctattacgctaatcgtatccatcaccctcatcaaaacccctcctttctcttaatttagaaaccctaattcagaagaaaaaagtcaccttctccagaatttgcgcggtaatggcatcttcttcagactcatggatgaaggaatataatgaagctgtgaaacttgctgatgatatcactggcatgatttctgaacgtagttcattccctgcatctggaccagaaacccagcgacatgcatctgctataagaaggaagatcacgatattggggaccagacttgatagcttgcaatctcttttgtcaaaggtccctgcaaaaactgagaaggagatgaatcgtcgaaaggacatgcttgcaaatttgaggacaaaagttaaccaaatggcttcaacattgaacatgtctaactttgcaaatagggatagtttgctacggccacaaataaaatcagatgcaatga

SEQ ID NO: 4001 - DNA, 389 bp, Glycine max
ggcaactgtttacaacaataataagttaataactcgcgtaggccaaggaacagcataaacgacgctgcgctgaacaacgccggtgtcagacaaacggtgccggttggtggggccgccacgctattacgcctaatcgtatccatcaccctcatcaaaacccctcctttctcttaatttagaaaccctaattcagaagataaaagttactttctccagaattagcgcgctaatggcatcttcagactcatggatgaaggaatataatgaagctgtgaaacttgctgatgatatcaatggcatgatttctgaacgtagttcgtttcctgcatctggaccagaaacccagcgacatgcatctgctataagaaggaggatcacgatattaggga

SEQ ID NO: 4002 - DNA, 1117 bp, Glycine max
cattcggctcgagaatcagtgcaagagaatcgccctccatcttctttcttcttcaattcattccgatggcgattccgttgccctctctcgatctcactcaccactccgatttcgaacccttagtctccccagacggttacatctccatttgcggctacggttccctcctctccgagacaagtgccagaaccactttccccgacctcgtcaacttccgaatcgcccggttaactggtttccgccgtctcttcaactccgtcggacgcatctttttcactcaccgtgttgccaatatcaaaactcaggaaattgctggcctttctgttgaaccatgtgatggtgaattcgttgttgtagctgtttttgagataaagaacacagagattccagcatttattgaaagggagcgcgaatatcgttttttagctgttgtccctgaaacactagatgggaagccctttatcaatccagcagttctctgtgcttcttacactgatgagggattctttaaatttagatgcagtgagggcagggaaaaatattttgaacaatacggagaatataagatccataagatttggcgggatgatgttttcccatgccgtgtttatcttcgtcactgtgtcctggctgcaaaaagccttggcgatgaagtccacaataactttttggatcatactttccttgctgaccgtaaaacgaccatacgtcagtactttgaaaaagtgggtacaagcatcttggaagaagagccacctgagtctttgaaaacccgttatggtggttgattgatgtcatcacagagtcgatactcgatacagttctcaattcgccatttctgaatttggctgttccaattatttcttattatagcatctgccatctggattgaagattgaagagtcactgtggcgaacgttgaatggcggtgacaagtagtagttgttagaaaaccaacaaagcagatttctattttctaggatgaagatatattaataaattaatagggccagcaaatgtttagaataatatttatatattgtgaataaattgctggtaacagtgcccgttcaacaaatatttatagaaaaatgtttgattgaaataaaaaaaaaaa

SEQ ID NO: 4003 - DNA, 2541 bp, Glycine max
  unsure (1)..(2541): unsure at all n locations
gtttcgttttttcggcccctgtacctgctagggtttcgttgttggctagtttcttgggggagtgtanttgatagtggtgagtttctgtggtttttggagtggttgcacgtgcgctactttagggtattgttgaaggagagagtgtaaatgaataaaccaacaagcgacgcaattaatatggggaaaaggagcctggagggtggagaagatgatcagcccgaacgaaagaggcctgctcttgccagtgtaattgtggaagctctcaaggtggacagtttgcagaagctttgctcatctttagaacccattcttcgtagagttgtcagtgaagaagtggagcgtgctttggcaaagttaggtcctgcaagacttagtggaaggtctcctcctaaaatgattgaaggccctgatggtagaagcttacagctgaaatttaggtcccggctgtctcttcccctattcacaggaggaaaagtggaaggcgagcagggggctccaatacatgttgttctgattgatgccaatagtggaagcattgtaacatctggacctgaatcctgtgttaaacttgatgttgttgtccttgaaggtgattttaacaatgaagatgatgaagattggactcaggaggattttgaaagccatgtggtaaaagaacgtgaaggacagagacctttgttaactggggacctgcaagtgacactcaaggaaggagttgggacattaggggaactgacgtttacagataattccagctggataaggagtcggaaattcaggcttggcttgaaggttgcatcaggtttttgcgagtccatacgcattcgtgaagctaagacagtggctttcatagttaaagatcatagaggagaattatataagaagcattatccacttttagtttttctctagcatcagggctctccctgctcctacactgtaatagcatcttttaaattttatattttgacctttttctcagtatataagaagcattatccacctgcattgactgatgaagtgtggagattggagaagataggcaaggatgggtcatttcataagaagctgaatagtgcaggaatagtcacagttgaagactttcttcggcttgtggttaaagatcaacaaagattgcggaatatccttgggagtggtatgtcaaacaagatgtgggaggctcttttagaccatgcaaaaacatgtgttctaagtgggaagctctatgtttattatccagaagatgcaagaaatgttggcgttatttttaacaacatctatgagctgcgtggccttatatcaggagaccaattctattctgctgattctctcactgatagccagaaggtttatgtagattcattggtgaagaaagcatatgaaaattgggatcaggttgtggattatgatggcaaatcactcgtgaatgctaaaatttcttctgaaaatgaacttcatgtggagtcaattgattatggtagtggtttagatcatcaactgcaactgccggtccttccagtgtctgttccttctgaacagcaaatcaattcagggatacctgttggaggttacaacgataataatatagtaacacgatatccaacccagtcattgattccaaactccagctcccggaatcagttcgatagctcattatatgtgtcgaatgaccaattaatcagcaatgctcaccaaacccaaagcactagtaatgatcatggcaccgttgggttagctcttggtcctcctcaatcatcgacatcagggttccatgctggcagctcttctattcagccatctactataaatccttttgatgattggtcccacaacagggacaagggggctgatgaattcttttcggaagaagaaatccgcttcagaagtcacgagatgctagagaatgaagatatgcagcagttgcttcgcctcttcagcatgggaggtcatggctccatgagtgctgaggatggcttttcattcccatcattcatgccatctcccagtataccgaactatgatgaggatcgctctcgcccaggcagagctgttgtgggatggctgaagatcaaggcagcaatgaggtggggcttctttatcaggaagatagccgctgagaagcgggcacagatagaggagttagatgaataagttgtatggacaatggttgcaggcttaacagttagccttaagataatactgatattctgcagatttagttgtctttatcagtgccaaccaaattgtgcagtccatggtgttaatattcttgatttatgcatctctgtatctgatttgacagcagcacgtttgccccagtatcctgtacagtttgttgaagcttaggaaaaactgtgattgtcaatttgtttttctctttcacgtttatgctcctctctttccattggctttgggtttttagggatgctgtgtttacgcaacccccctcatatttgagacgataactaagattggtcatctcactgtatattttgagctacttgattttctatttatattacgagttattatcttgttatc

SEQ ID NO: 4004 - DNA, 510 bp, Glycine max
cgaacattgttccgcaaagtaggcgattcttcctccctcaagttgaaagtcgccataggagaccataactacatgaacgaactgaaactgttggactttcaattccaactaaggcaaaaccaaaactcatttcatgtaattcattttctctctccccccgaacactcaagttttatctctcagcctcagtttgctgctagaggttgcatatttggggtttcacacgtgcgcaatttgaagatttggtaatttaggtattattggaggagagagtgtaaatgaagaaaccaacaaccgacgcaattagtatggggaaaaggagcctggagggtggagaagatgaccagcctgaacgaaagaggcctgctcttgccagtgtaattgtggaagctctgaaggtggacagtttgcagaagctttgctcatctttagaacccattcttcgtagagttgtcagtgaagaagtggagcgtgctttggcaaagttaggtcctgcaagacttagtggaa

SEQ ID NO: 4005 - DNA, 322 bp, Glycine max
cttccaactaaggcaaaaccaaaactcatctcatctcatctcattttctcgctcctctctctctctctctctctctctctcacacacacacacaccaaacactctcaagttttctctcagatttggtactttagggtattgtggaaggagagagtgtaaatgaataaaccaacaagcgacgcaattaatatggggaaaaggagcctggagggtggagaagatgatcagcccgaacgaaagaggcctgctcttgccagtgtaattgtggaagctctcaaggtggacagtttgcagaagctttgctcatctttagaacccattc

SEQ ID NO: 4006 - DNA, 726 bp, Glycine max
gtcgaacttgcgtcccttcaaacatcgtttctgactctggatgaggccatcaagaccacgaatcgtagggttaacgctctggaaaacgtggtgaagccgcggttggagaacacgattagttacatcaagggagagctggacgagctggagagggaggatttcttcaggctgaagaagattcaggggtataagaagagggagattgagaggcagatgctgcagcagaacaactccaagcttgacactaatctccctttgcgcaaaggtctttcctacaattctgctcacaacttgttgtctgtgggtgacaaagatgaggatatcattttctgaatgtgctgctgctgctgctgctgatgggtgagactgagactactctgctattgtttaggtctcagttgagtgtatcatgaataaaggatgatactggttaaattttgcagagaagcttgaaccaattgagattgtggcaaagcaagaagctgctcatggtgttgaggagttaactgcggggctgggcagatggaaacaaaccataactatgatcagaaaggtgattggttttgctggtggatctgtattacttataaccaggtgaaatctgtgtaatttgcaacatttatcctcgatgtttccaaggatgtctcacaatgagtacaaataggtctatctttcttcgtgcctttgggtttttgatcttgaccatacttggatgaagaagacaca

SEQ ID NO: 4007 - DNA, 393 bp, Glycine max
agatgctgcagcagaacaactccaagcttgacactaatctccctttgcgcaaaggtctttcctacaattctgctcacaacttgttgtctgtgggtgacaaagatgaggatatcattttctgaatgtgctgctgctgctgctgctgatgggtgagactgagactactctgctattgtttaggtctcagttgagtgtatcatgaataaaggatgatactggttagtatatgtttatttatttctttgttcatttaattcagacattcatcgtttttaagtatgtgatcttatggaagatttttgaagtccccgtgacccgctgtattttcgtttcgaaatatattacatctcaaaagagttatgagacttgtggaaagaaaggcatattttttga

SEQ ID NO: 4008 - DNA, 684 bp, Glycine max
gtagcaggttctcgtattctccctccatggaactacaatcttgtggggcttgctcaaagctattgaccgagagatcaacatggagcaaccagaagtttattgccaacagtgacctctcagttgttgctgtactagtctgtggtcattcatatcatgcagaatgtttagaggctatgacatcagaggcagataggtatgatccagcatgtccaatttgtatggttggagataagaacttgtcaaagttgttgtccagaaaaggtcttcgggctgaatcagagatgaaggccaagaaccacaagatatccagaaaccgtgtagttgatagctaccttgatggtggttttgatgtttttgatcgtcaaaaaggcattgatttgagaggaaaagtgtcaaaaatggaacctagctccagtgcaaggagctcatttggaaagccattcttgaggcggcacttttcacttggatccaagtggagccgttccctgtccgagaatgattctgccaggaagaaaggcttttgggcaagatatcgttaagattgagttccatttgctgtaagagtcaatcattctctaattatagttgtaataacaccatcaatttagaatgaatattttctatgtagcctaactttactgataactttgaatgctttaaaataattaatttttacttttgacc

SEQ ID NO: 4009 - DNA, 1751 bp, Glycine max
cgctcatccactaactgctactcgctcatcccgtggaggtttcgctctctcagtttcttttccccaaattgtttttcatctaacaatttactttgcagaaccctaaccctagccccttcgcctaccttgtaaccttcctttcgatccttcatctcgcagacaatgggagaaactaaggacgaagcatacgaggaagagcttctcgattacgaggaggaagacgaaaaggcccccgactccgccggagctaaagtcaacggcgaagctaccaagaagggctatgttggaattcacagttcgggattcagggacttccttctgaagccagagcttcttcgggctattgtggactcgggatttgagcatccatctgaagtgcaacatgagtgcatacctcaagcaattctcgggatggatgtaatttgtcaagcaaaatctgggatgggaaagactgctgtttttgttctgtcgactctgcagcagattgatcctgttcctggccaagtttctgcacttgttctttgtcatacaagagaattagcataccagatatgccatgagttcgagaggtttagcacctacttgccagatctcaaggttgctgtcttttatggtggggtcaacatcaaagttcacaaggatctgctgaaaaatgagtgccctcatattgttgttggaacaccgggaagaatactggcattgacctagggataaggacctttctttaaagaatgttagacatttcatattggatgaatgcgacaagatgctggaatcattggatatgaggaaagatgttcaagacattttcaagatgactccccatgataagcaagttatgatgttctcagcaacactcagcaaggaaattcgcccagtctgcaagaaatttatgcaagatcctatggaaatttatgttgatgatgaggccaagttgacccttcacgggcttgtgcagcactacatcaaattgaaagaggaagaaaaaaaccggaagttgaatgatcttcttgatgcactggactttaatcaagttgtgatctttgtgaaaagtgttagcagagcagctgagctggacaaactacttgtggagtgcaactttccatctatatgcattcattctggcatgtcccaggaagaaaggttaaagcgctataaaggtttcaaggaggggcatacaaggattcttgttgcaacagatttggttggaagagggattgatattgaacgtgtcaacattgttataaactatgacatgcctgattccgcagacacatacttgcacagggttggtcgagctggaagatttggcaccaaaggccttgcaatcacatttgtttcttgttctactgatgtcgatgttctcaacaatgttcagtcaaggtttgaggtggatataaagcaacttcctgagcagatcgatacctctacctatatgccatcgtagaattttttgggaacaatgttaagtgcttggtggcatgagtaatcgtgacgcagaacggtgcagctgatgattaaccgtgctgatagataccagagtctgtttacagactaggccattttaccattggatatttatcggtattagatgtagcagcagtgtaatggcttatgtatttatgggttttcacttactgtattttgtgtggcacctacgctgttttcatgaacggtcatgttttgagttggtcttactgcgaccttgatatttgatgctttatacttttggcttgaattcttggcctcga

SEQ ID NO: 4010 - DNA, 382 bp, Glycine max
cgttcgcgtgggaactgctactcgctcatcccgtggaggtttcgctctctcagtttcttttccccaaattggtttttcatctaacaatttactttgcagaaccgtaaccctaaccccttcccctaccttgtaaccttcctttcgatccttcacctcgcaggtctgattttagttgattcggtgattcccagataatgggagaaacaaaggacgaagcatacgaggaagagcttctcgattacgaggaggaagacgaaaaggcccccgactccgccggagctaaagtcaacggcgaagctaccaagaagggctatgtttggaattcacaattccggagatcaaggaatttccttcgaaacccaaacttctcttgggcaatgtg

SEQ ID NO: 4011 - DNA, 339 bp, Glycine max
gctactcgctcatcccgtggagaaccgtaaccctaaccccttcccctaccttgtaaccttcctttcgatccttcacctcgcagataatgggagaaacattggaccacgcatacgaggaagagcttctcgattacgaggaggaagacgaaaaggcccccgactccgccggagctcaagtcaacggccaagctaccaagaagggctatgttggaattcacagttcgggattcagggacttccttctgaagccagagcttcttctggctattgcggactcgggatttgcgcatacatctgaagcgcaacatgagtgcataccacaagcaattctcgggatgg

SEQ ID NO: 4012 - DNA, 652 bp, Glycine max
cttttaattctcaggctgtgtacttaaggcgaagaggggccttccatgggcccccaacaacctcctctaaaacattggatgctgctgggagactgagttcagtggagtctactgaagacaaaagtgagctgtatgttgtgagtactgaagatccagaaaatgatgacgataggaatgatggctctgatccagctgagggaatgcctggatttcagaatgtcttgaaagatatgattccgggggtaaaggtgaaggtattcaaggtgataactccagagaaagtagacaaggatctatctaatgtgattgagaagataattgaggacgaagacggagacgaagacgaagatgaagagatggaaaatgatgcagaaagtctagaactggaagagattaagtctgagactgaccaggagggagatgatgagattgaaataaatgctggtctgggaacttttgaacgtgaagaccagaatgagtttgctgtcaaaattgccattggtggtcttgttcagaaactttctggtaatctatcctctagagatttgcttcgagtccctgctatgctggagatgaaagggcgtggttcattttcctttactgttgaaaaagaagtcaatcagcaggttggtcttgacaaaggaaaatcttc

SEQ ID NO: 4013 - DNA, 2396 bp, Glycine max
acgcgtcagattgagcaacaggctttcaagcagttcccattgggataaaaaaaaaaaaagatgaaaagaaaagaagaaggaaaccccaacccaataatcatactcgtacttgggatgatattggataatctcaacctcaattttcctaaataaacaatcaccttcactttttttttctcctcttcatttctgaactcatccccatggatccctttgatttgatacgcgaagggtttggttgaggctgactggacatgcgctgttactacttttaaagtctgtttatgctgtagttattttgtccatattttagttaataatgaacttatccaagaaaggacccctaagggatgcaaagctattaagcccaaacaaggcaacaactctgaatccaaatgcagcagagtttgttccttttgccctcagatcatcgtcattatctggaactaccagctcggtagatgcaacagcaaagctttctgctgctggagctcttgggaaagcagtttttgatagatcagaatcatccatttcaaataattctgatgatgaggtacaccaatactggcgatgtcagctccctgatgatatcacccctgatttcaaggtcatgggagaagatgagtctcgagttcttgatgatctttctttagcaggcttatccatacatgatgacaatgaagcctccaggtttccttcttctaaaggaagtaaatatattataaatgagcaggaggaaatatctcaacagcatgttaatggcaatagcttggcagataaactagggttttccaattcaagctacagggaggacccatcttctggaagctttttgaatgttctggcaaagccttgggaggggccaattgggagtgctgaccagtgtattagcagtggtcaagagggccttacttatgatgacaactctatacatggatacttaaatgatgttttggttgaaaatgcaattgtggatgatactgatctgaatcctttggagtttttagcttccctgttccctggttttgcagcagaaagccttgcggaagcttactttgctaatggatgtgatttacatctgaccactgagatgctcaatcagttagagcttcaagttgatggtggtttcaatcagaatctgaattcaaagactttgtctgctcccaatctcagtgcaatggactaccctgcacttacttcaccagatggccagactgcttcagtagaatatgtggttgataatgtgcaacaaagtggcaatccttaccgatcatatgacagtgatgtgctgcttttcaaatctgtctcttcagtttcatctaggggtggtgctattgactttgcttcagctgttaggaagttggcttctcgggattctggtggtatttggaagtatgataaaaatggctctggtgatgctgctatcggctcaagtaggaattcgaatgttctggctagtggttacaatggtggacaggggagagcacactttggtgatcggttacagaaccgtggttcagctcgggcatttcctgtttggcttgaaaccggtgatgcagttgcaaatatgtattcagagttgcgggaagaggctcgtgatcatgcatgcttacgtaatgcatattttgagcaggctcagcaagcctatcttattggtgataaagccctagcaaaggaactaagtgctaaagggcaactgcacaacatgcatatgaaggctgctcatggaaaagctcaagaatccatttaccgccagagaaatccagttgctccagaggtgcagggcaatggaagaggaaatgagaggatagtagacctacatgggttgcacgcaagtgaagccattcatgtgctgaaacatgagttgagtgtgctgaaaagcactgccatagctgccgagcagcgtttgcaggtttatattcttgtggggacaggtcatcataccaggggttctcgcactcctgcgagacttccaatagctgtacagcgttttcttcttgaagagggcattgacttcatggaaactcagccaggcctactacgtgttgtgatatattgaaccagccaagaatgtgtacaagttttttgacacagtataaagtccaccaacacggacattttagttattgttgtatctgtatatgcccgaagaacaggaaaaaaaaagaagagaaaaacagttaggggagaaggaaagagaaggagttgtagcagaatctgtatcgttaagcgtttaggggcagcagtcatttatccttccgtataattgttgtacccgtaattgttttttctttattatctcagatagataactgcactagaatctccaattacctctattagacactaattgattctctccagaattgagattcaatagaccaaacacgagacga

SEQ ID NO: 4014 - DNA, 430 bp, Glycine max
ttcttgaagagggcattgacttcgcgagaactcagccaggcctacttcgtgttgtgatatattgaacttgccaaggatgtgttttttgacacagtataaagtccaccaacactgggatattttactcatcgatgtatctgtatatgcccgaagaacaggaaaagaaaagaagaaaaaatcagttaggggagaaggaaagataaggttttgtagcagaattgtatcattaaggtttaggggcggcatcagatttacatttagtaagcaggatttctcatctgcccatgttatgggatcattttccttctgttaattttgtaccctaattttcatttttttgattcagatgtaattgatagaactcaattacgccatagaacaattgattttgcaaattagattcaatgtcaaacaatttatatctcacaac

SEQ ID NO: 4015 - DNA, 390 bp, Glycine max
gcgtttttcttcttgaagagggcattgacttcatgggaaactcagccagggcctactacgtgtttgtgatatattgaaccagccaagaatgtgtacaagttttttgacacagtataaagtccaccaacacggacattttagttattgttgtatctgtatatgcccgaagaacaggaaaaaaaaagaagaaaaaatcagttaggggagaaggaaagagaagggttgtagcagaattgtatcgttaaggtttaggggcagcgagcgtcattttccttccgttaattttgtaccctaatttttttttttttattcagatgtaactgacctagaattcaattaccctatagaacaattgattttccaaattagattcaatgccaaacaaaaaaa

SEQ ID NO: 4016 - DNA, 424 bp, Glycine max
acgaggcagaatcagatgaagttgcaaattaatgcacaaaattgcttacattgcaaggcttgtgatatcaaagatccaaagcaaaatattgagtggacagtgcctgaagggggtggaggcccaggatactcagtcatgtagtcatggtattgttcacgcaaataacgtgcgtgtattattaccctctgcgttgggaaaaaaatgaaaaagctgcccctgtattttgttgcctcccccaaaaaataaagcctcaccccttccatacgcaacacaaacaccaaaagtgggctacatactaaaatagtgtatttgctgaaataaaatgtactatagatacagattactcgccatacagtcaacaaatgttacattattctattcaaattatgactgttaattatttatcgatccttaaaaaaaaaaa

SEQ ID NO: 4017 - DNA, 757 bp, Glycine max
cctttattcatttcatttctcttatcctatgaacactcattatcctcttctctaacaaagccatagtacgacacttttagttcattagttcttcttatcctatggataccattcgtaccaccaccatcacccgcgtgcaacaaacaaccccaacaaagaaaaccaagcccaagaagaagaactcaccccacccagtgaaggtagtctacatatccaaccccatgaagatcaagaccagcgcctccgagtttagggctttggtgcaagagctcaccggccaggacgccgagtccccgccagatcccacccgcttccacggcctaattcaccctgattcctcctcttctgtcgatcacatcaaagaggaggaggacaatgttcacagtgtgaattgtgttgttcctcccgcagtcgccgacgaaaatatgagcctcgccggctgctacgaggaggaacaacaacaacagccttcctcgatggagagtataaataatttcgagccgctggacgacgacgacgttttcacgccccagatgatagagaacatctccgccctgctcccagcaagtgtattctatgaatcccctcatcttaatcactggtgataccccggatggatgcagtgtaattagttattatattatgttccttctatcctcggtaaggtcaagctcaaatttaaaaaagcaagttaattttgctctccatctatagatggataataattgttcttaattattgttgatttcggcccctt

SEQ ID NO: 4018 - DNA, 662 bp, Glycine max
gcccaagaagaagaactcaccccacccagtgaaggtagtctacatatccaaccccatgaagatcaagaccagcgcctccgagtttagggctttggtgcaagagctcaccggccaggacgccgagtccccaccagatccctctcgcttccacggccatcaccccgattcctcctcctccgtcgagaatatcgaagaggaggaggaagaggataatattcaccgtgtgaattgtgttgtccctcctatgacagcaaccgatgagatcagtcttctcatcggctgctgcaaccagaacggacaacatcagccttcctcaatggagagtaataatttccagctgctggacgacgatgactgttttcacgccccagatgattgagaacatctctgccctgctcccagcaagtgtgttaaatggacaccctcatcttaatcactggtgataccacggatgcacgcagtgtaattagttattatattataatgcgctccttctcctcggtaaggtcaaactcaaattgaaaaaagttagttttctctccatgactccatctatataaacagattgatggataataattgtacttaattgttgatttttgaccagtaattccccgggtacgtcagctctagtatatatagtaaaaaaaaaaaaacagaaa

SEQ ID NO: 4019 - DNA, 2076 bp, Glycine max
  unsure (1)..(2076): unsure at all n locations
nactaacaagtttataaatatacatgacgttccttgttaatttcatgaagaaaataatacgtgcatacatagctatctatttatctatagcaagtgcgtcaagagacacgtggtaccctagctagagtgccattctgtggtttctttctttctttctttctgcatcacatcacaatttgcattgcctcgtgtcctttttcttctttgctctccaaaaatctcacacacacaggtatctagcaaatgggttctcaccaacaagaaccatggctattggagaatgggaaaccaagggttttgaccaaggagaccaggcatggccgttctgcacacagaatgtcctccacctctttgcgcaagaaatctagccgaactcttgtctcaaaggttccatgtgccactctcagaaactttctttcaaatttgcaagaggttattcttggcaccaagctttccattctcatccctgctattccagctgccatcgttgctgagtgctttggctttggaagaccttggatttttatattaagcttacttggacttacaccacttgctgaacgtgtgagcttcattacagaacaagttgccttttacactggtcccacagttggaggacttctgaatgctacatgtgggaatgttactgagctcataatagcaatatttgcccttagcagtaacaaaattgccgtggtcaagtattctctgttgggttctattctttcaaaccttcttctggttcttgggacctctctattatgtggtggcattgcaaacgttggagtggaacaaaaatatgatagaagacaagcagatgtgaactcacttatgctgttgttgggattgttgtgctacttgcttccaatgctgttcaaatacagtggtgcctcagctgctctcactgtagacccttcactacacttgtcaagagcttctagcattgtgatgttgattgcatatgttgtctacattgtctttcaactgtggacacacagggagttatttgaagaagaagatgacggtaaagatggcgaggatggttcagaagaacaagctgtgattggattatggagtggcattgcttggttggttggaatgactgtattcattgctgtgttgtctgaatatgtggtggatacaattgaggatgcatcagattcatggggtttgtctgtgagctttctcagcataatcttgctaccaatagttggaaatgcagctgaacatgcaggagcaatcatatttgctttcaagaacaagctggacatttcattgggtgttgcattgggttcagcaactcagattgccatgtttgtggtcccattatgtgtaatcgttgcttggataatgggtatcgatatggacctgaacttcaacctcctagagacaggttcccttgcgttggcaataatagtcacaggcttcactttacaggatgggacttctcactacatgaaaggccttgttctcctgctgtgctacattgttattggggcatgcttcttcgtacaaagaacaccctttaataaccaagctgatgttactaacatcacacttaaaccagccactaatgcagttttaagcgcttaattagtaggctttggcctatttcttgtcctttcctgagatgaagaatggtggtatcgatccaaacccaaaatcagattcaaattcaatggattggttattgtttcattctgatcacattgtcatatccataaagaaggggggaaaaaaagttagcactttgcagaagcattgcaattattttaagttgcaatagctgtgagaaatgaaccactgtgaaagatgttgaatcatacgtacgtgtgttctatcagagagctgcttttgatcttgtttactacggtagatgccaaatgagtggaagttgttcttgtttgagtttgctttagtaagaatccctttttcagtttgcagaatctcttgtatttattgtgttactatatattgtactaggtctcgtgggaaataaaatttttataaattttaattttaaaaaaaaaaaaaaaagggcggcacgccgactagtggctagtagctcgtcgaccc

SEQ ID NO: 4020 - DNA, 1105 bp, Glycine max
  unsure (1)..(1105): unsure at all n locations
cgtttctcttgttttgtttcacagtctgcagagtgcagagccttctctcctctattttggcttccaacctttttgctccattcattctcaacaacaaaccaatctctatattttgcttagacaatgagggggagcttgtggcaacttgggcaatcgatcactcgccgtcttgcccatggagataagaaggctgttgctcgccgatgttttgcctcagaagctgagctgaaaaagacagtgtttcatgacttccatgttgctcatggtgggaagatggttccatttgctggatggagcatgccaatccaatacaaggactcaatcatggactctaccatcaactgtaggcagaatggtagcctttttgatgtttcccatatgtgtgggctgagcctcaaggggaaggacgctgtcccattccttgaaaagctagtcattgcagatgttgctgggcttgcccctggaactgggacgttgactgttttcacaaatgaaaaaggaggggcaattgatgattcagtgattaccaaggtgaaggatgaccacatatatttggttgtgaatgctggttgcagggataaagatctggctcatattgaggaacatatgaaggcattcaaggccaaaggtggtgatgtgtcttggcacatccacgatgagagatccctacttgctctgcagggtcctcttgctgcccccgttcttcaacacctgacaaaagaggatttgagcaagctctactttggggagttccgtgtgttggacatcaatggttcgcagtgttttcttaccaggacagggtatactggggaagatggatttgagatctcagttccttcagagcatggagtagatcttgccaaagcaatactggaaaaatctgaagggaaggtaagattgacaggattgggagctagagatagtctgcgacttgaagctggattgtgcttatatggaaatgacatggaacagcacattacacctattgaggcaggactaacatgggctatagggaagaggaggagagcanaaggtggttttctaggagctgatgttatcctgaaacagcttgaagaaggtcctaaaatcaggcgtgttggtttct

SEQ ID NO: 4021 - DNA, 1365 bp, Glycine max
cgtcacatgcacgcgtacctaagctcagaattcagctcgaggttcaggacggtaaagatggcgaggatggttcagaagaacaagctgtgattggattatggagtggcattgcttggttggttggaatgactgtattcattgctgtgttgtctgaatatgtggtggatacaattgaggatgcatcagattcacggggtccggcggcgtgcttcctaagcataaggcttgctgcccatagttggcagtgcagctgaacatgcaggagcaattatatttgccttcaagaacaagctgcacatctcattgggtgttgcattaggttcagcaactcagattgccatgtttgcggtcccattatgtgtaatcgttgcttggataatgggtatcaatatggacatgaacttcaacctcttagagacaggttccctggctttggcaataatagtcacaggcttcactttacaggtatatatttaattaacaatcttaactggaaaaaaaaaacccatatttttttacctcattttcattcaatctctgaataatggaatattatgagaattgacaaaaccacccttaattattcataggatggaacttctcactacatgaaaggccttgttctcctgctgtgctacattgttattggggcatgcttcttcgtacaaagaacaccctttaatagtaagtaaaatatatcaaatttttccaacggttacataaatagtcaaaatctatgatgccattataaatctgccattcatgcctaaaatacgatctgttattctctacagatcaagctgatgttactaacatcacacttaaaccaaccactaatgcagttttaagcgcttaattagcacgtgagctaatcacaagctatgtgtcacataaatataaacataattcttcttgtgaaatcacagaaaattcgatctaaagttaaatttgggaacttgattttgcaggctttggcctatttgttgtcccttcctaagatgaagaatggtggcatcgatccaaaccaaaaatcagattcaaattcaatggattgattattgtttcatgatctgatcactttgtcatatccataaagaagggagaaaaagaaagtttggaatttgcagaagctttgcaagtattttaagttgcaatagctgtgagaaatgaaccactgtgcaagatgttcaatataatacatacgtgtgttctatcagagagctgcttttgatcctgttctactacggtagatgccaaatgagtggaagttgttcttgtttgagtttgctttagtaagaaatccctttttcagtttgcagaatctcttgtatttattgtgtgagaaataaaaattctattaatgct

SEQ ID NO: 4022 - DNA, 424 bp, Glycine max
caatagataagccttcctctctgcagagtgcagagctttctctccccgttgcttcattcattctcaacaacaaaccaatctttcttagaaaatgagggggggcttgtggcaacttgggcaatcgatcactcgccgtcttgcccatggagataagaaggctgttgctcgtcgatgttttgcctcagaagctgagctgaaaaagacagtgtttcatgacttccatgttgctcatggtgggaagatggttccatttgctgggtggagcatgccaatccaatacaaggactcaatcatggactctaccatcaactgtagggagaatggtagcctctttgatgtttcccatatgtgtgggctggagcctcaaaagggaaggacgctgccccattccttgaaaagctggtcattgccgatgttgctgggc

SEQ ID NO: 4023 - DNA, 495 bp, Glycine max
tataaatatactggcgttctttgttaatttcatgaacaaaataatacgtgcatacatagctatctagctagcaagtgggacaagagatatatatacgtggtaccctagagtgccattctgtagtttatttctgctcaccaaggcttatcacatcacaatttgtgcattgcctcgtgtcctttttcttctttgcttgccaaaaatcttacacacacaggtatctagcaaatgggttctcaccagcaagaaccatggctattggagaatgggaaaccgagggtgttgaccaaggagaataggcatggccgttctgcacacagcatgtcctccacgtctttgcgcaagaagtctagccgaactcttgtctccaagcttccatgtgccacactcagaagcatccttttaaatttgcaagaggttattcttggtaccaagctttccattcttatccctgccattccagctgccatcattgccgagtgctatggctttgga

SEQ ID NO: 4024 - DNA, 385 bp, Glycine max
gatccttctgtttttgcactactgtgcctttttgggcacccagatttccaccattctgagtaacttcacacactatataacagaaaatgagggggggcttatggcaactcgggcaatcaatcactcgccgtcttgcccagggtgataagaaggctgttgctcgtaggtattttgcctcagatgctgagctgaaaaagacagtcgtttatgacttccatgttgctaatggagggaagatggtgccatttgctggatggagcatgccaatccaatataaggactcaattatggactcaacccttaactgtagggagaatggtagcctctttgatgtttcccatatgtgcgggctaagcctcaagggaaaggactctgtcccatttct

SEQ ID NO: 4025 - DNA, 534 bp, Glycine max
tgtggatacaattgaggatgcatcagattcagacagcacagcaatgaacacactcatccctacaacacggtgaagaagaacaagctgtgattggattatggagtggcattgcttggctggtagggatgactgtgttcattgctgtgttgtctgaatatgtggtggacacaattcaggatgcatcagattcgtggggtttgtccgtgagctttctcagcataatcttgctaccaatagttggacatgcagctgaacatgcaggagcaatcatatttgctttcaagaacaagctggtgagaacttgggagagtgctataaacttttcacacttgccctcatttaacataatattcatattggccaagcaatattttttttaattaattaaaatgttaaactaaagtaatgccttgaccacaggacatttcattgggtgttgcattgggttcagcaactcagattgccatgtttgtggtacgatacacacacctttaatatgtacacggacactttcataatttcatttagttactt

SEQ ID NO: 4026 - DNA, 768 bp, Glycine max
  unsure (1)..(768): unsure at all n locations
ngtgcccacgcgtccgcccacgcgtccgcccacgcgtccggtcccttcaaatgttgaagacaagttgccttttacactggtcccacagtcggaggacttctgaatgctacatgtgggaatgttactgagctcataatagcaatatttgcccttagcagtaacaaaattgctgtggtcaagtattctctgttgggttctattctttcaaaccttcttctggttcttgggacctctctattatgtggtggcattgcaaaccttaaagtggaacaaaaatatgacagaagacaagcagatgtgaactcacttatgctgttgttgggattgttgtgctacttgcttccaatgctgttcaaatacagtggtgcctcagctgctctcactgtagacccttcactccacttgtcaagagcttctagcattgtgatgttgattgcatatgttgtctacattgtctttcaactgtggacacacagggagttatttgaagaagaagatgtaaggtttcttgaattatgaaaatggttaattaagttggttagcaattaatctaatccttgccaatatcgtagaagtaattaattaattaattaacaccatgaattgttcaggacggtaaagatggcgaggatggttcagaagaacaagctgtgattggattatggagtggcattgcttggttggttggaatgactgtattcattgctgtgttgtctgaatatgtggtggatacaattgaggtaataattgacataaaatgtttttttt

SEQ ID NO: 4027 - DNA, 295 bp, Glycine max
acttacaccacttgctgaacgtgtgagcttcattacagagtaaggaacctcgatgaacttgttgcaccctttcttttctttggatgatttgttatacaacaagcttttgtttctgggttgattgctgctactttttctattttctctgttggtgattgtcccttcaaatgtcgcagacaagttgccttttacactggtcccacagttggaggacttctgaatgctacatgtgggaatgttactgagctcataatagcaatatttgcccttagcagtaacaaattgccgtggtcaa

SEQ ID NO: 4028 - DNA, 457 bp, Glycine max
  unsure (1)..(457): unsure at all n locations
tttccctagagtgccattctgtagtttatttctgctcaccaaggcttatcacatcacaatttgtgcattgcctcgtgtcctttttcttctttgcttgccaaaaatcttacacacacaggtatctagcaaatgggttctcaccagcaagaaccatggctattggagaatgggaaaccgagggtgttgaccaaggagaataggcatggccgttctgcacacagcatgtcctccacgtctttgcgcaagaagtctagccgaactcttgtctccaagcttccatgtgccacactcagaagcatccttttaaatttgcaagaggttattcttggtaccaagctttccattctcatccctgccattccagctgccatcattgncgagtgctatggctttggaagaccttggatttttatattgagcttacttggacttacaccacttgctgaacgtgtgagct

SEQ ID NO: 4029 - DNA, 207 bp, Glycine max
  unsure (1)..(207): unsure at all n locations
ttatttttttaaaattaaaatttataaaaattttatttcccacgagacctagtacaatatatagtaacacaataaatacaagagaagctgcttttgatcttgtgttactacggtagatgccaaatgagtggaagttgttcttgtttgagtttgctttagtaagaatccctttttcagtttgcagaatctcttgtatatatagtaacn

SEQ ID NO: 4030 - DNA, 480 bp, Glycine max
caaaaatgcacaatagcaataacaacttggggaacacagacccgcacccagcgaaggagagagaaccaaaagaggagctagaaccaccagcaacttcagcaatgcagatggttgcttgcaggagattgttcgtgagaaggaagatgcatttttttgtggaatgctgtttgcaagccctattggtgatgggggctcccttttgcaacatgatttggaacaacttacatgagccaagaagtacccatcaaggcagcgcttgacacttccagtccaacctggatcaaaggaaaggcctgttgtccttaattacaaaaagagtctgaaagactatacaagtggaaattcagaaaccttaactgttgtattcaaggatttgggcccacaagtttcttaccggacacttttcttctgcgagtatttgggacctttgcttctctatccagtcttctatcatcccctgtctaccaatattttggttac

SEQ ID NO: 4031 - DNA, 451 bp, Glycine max
cggacgcgtgggcggacgcgtgggttgtgtttgtgagtaatttgcaaacacaccaacacaaacacaccaaccctctctctctctctctctctctctccaattcagacccctagttctgttggatcttgcatatagtaaccctttattgattcgcaaagatgaaggtcacagtggtttctcggagtggaagagaagtggttaaaggtggcattgagctcagtgattctgctactatagcagatctgcaggaggcaattcataagcgaaccaagaagtacccatcaaggcagcgcttgacacttcctgtccaaatactttggttttaaaagaatgtctgagatgtaaaataactaaaatccaattagtcttgggcttataagggtgctaaaggaggtgtactgtacatgtgggtataggtggtttttacttttgatgggattttaacttatta

SEQ ID NO: 4032 - DNA, 527 bp, Glycine max
attaatttatcttctcccatctaaaatctatatataatatattacatctgagtttcaatattcctaagctcacatttcctttgtgtttgtgagtaactggcaaagacaccaacaccccttatctctctctctccaattctgacctcaagttctgttggatcttgcatatagttaccgtttattgattcgcaaagatgaaggtcacagtggtttctcgaagtggaagagaagtggttaaaggtggcattgagctcagcgattctgctactgtagcagatttgcaggaggcaattcataagcgaaccaagaaatacccatcaaggcagcgcttgacacttcctgtccaacctggatcaaaggaaaggcctgttgtccttaattacaagaagagtctgaaagactatacaattggaaattcagaaaccttaactgttgtattcaaggacttgggcccacaagtttcttaccgtacactatttttctgcgagtatttgggacctttgcttctctatccagtcttctattat

SEQ ID NO: 4033 - DNA, 267 bp, Glycine max
gtaatttgcaaacacaccaaaaccatctctctctctctctctctctccaattcagacccctagttctgttggatcttgcatatagtaaccctttattgattcgcaaagatgaaggtcacagtggtttctcggagtggaagagaagtggttaaaggtggcattgagctcagtgattctccaagaagtacccatcaaggcagcgcttgacacttccagtccaacctggatcaaaggaaaggcctgttgtccttaattacaaaaagagtc

SEQ ID NO: 4034 - DNA, 498 bp, Glycine max
  unsure (1)..(498): unsure at all n locations
gcctgtcgtagaagttggtcagctttatctgtgtttatgatatttttggttgctggcagattggtcatccaattagttgaataggaatacatagttggaaatgtgatagttgagaaggttccgaggttatttgatcattagctctagaaaagaaaaaggaaattctttccatgttttgaaattctcagctcatgcttcatagattgaacaatttataccatgtttggttgagaagttgtaaaagatgaacatttcattagcgatggcaacacttgttgtctggcttttttcatgggtgaagttatgtctctggaactgcatctgccatgtggttatgcagattttgttgaatctgccatcagttctgtaacagggattggggacccatgagatantcaacagatgatatggagttttttttactctgtaaccttttccaatgtgtacttctgatgcccaattttaccaaataatactttactttgggctgacacnaac

SEQ ID NO: 4035 - DNA, 876 bp, Glycine max
ccatgatgggctcaatgctgctcagtctcagaccctttctcaccaccatcttctttctcacactcacagtgctcaaggtttcagcatcatcctcagtgattttctacaacaagtgccagcacccagtgtggcccgggatccagcccagcgcaggaaagcccgttctggcccgcggaggcttcaagctcgccccaaaccgggcctactccctccagctccccgctctatggtccgggcgcttctggggccgccacggctgttccttcgacgccggcggccgggggcgctgcgccaccggggactgcggcgggtccctgttctgcaacggcatcggcggaagcccaccggcgaccctggcggagttcaccctgggcaacgagcaggacttctacgacgtgagcctggtggacgggtacaacctacccatctccatcacccccttcaagggatccggaaaatgcagctacgccgggtgcgtgagcgacctcaacaccatgtgccccgttggcctccaagtgcgctcacgcgacaacaagcgcgtggtggcctgcaagagcgcttgctccgctttcaactcccccaggtactgctgcacgggctcctatggaagcccacaggcctgcaagcccaccgtctattccaagatcttcaagaccgcatgccccaaggcctactcctatgcctatgatgaccccaccagcattgctacttgcaccaaagctaactatttcctcaccttctgcccccatcgcccctgatccataattcatcttgtatgcttgttctactttattagaccattggatctatcatctatgtatccctaaatggtattattaaattaatggtgctttgatcaatattaaaaaaaaaaaa

SEQ ID NO: 4036 - DNA, 705 bp, Glycine max
gcgcgtggtggcctgcaagagcgcttgctccgctttcaactcccccaggtactgctgcacgggctcctatggaagcccacaggcctgcaagcccaccgtctattccaagatcttcaagaccgcatgccccaaggcctactcctatgcctatgatgaccccaccagcatcgctacttgcaccaaagctaactatttggtcaccttctgcccccatcgccgctagctcatccatccatcactttctactctctctacttaccttagctagccttattttattgtcatacctcctttatgttgatgggtactactactatatatgccagtccccattcatattatatggttcttcaactttattagttcttgcacgacattggatctatgtaacccaagatggcataatgggaagatatatagtattatattaagggtggtttagcttagtcttggactcggtttgatgaccattactaccttttttcgttaaggcgcgctaatgtgctcaatttatggtagatggtggcgaaccatattctattctatccccacgggccacggtgtaattgatgtgtacttttttcgtctctaattggcttatgatttgtctatttcacaaaccatatggtggcgaaccatatgtgttgtccattttttcggagcttgacatcgatatacatggatttagcaagcgcttacctgaaa

SEQ ID NO: 4037 - DNA, 985 bp, Glycine max
tttcgcttcacgcgtccggcatagtaaatgccaagatcaagggggtcagagttgtctcatttgcagtctccatgcggtgcatatcaacatcggacatcaagttctgactctgatccattgcatcatcggccgattgctgaccgaagtccaaagctaggagatcggcgttcccccagaggtactcaatctgagggattaaatcagaagaagctaggaactcgcattgcagatttggaatctcagcttggtcaagcacaagtagagttgaaagttttaaaggaccagctagcttctgctgaagccgcaaagaaagaagctcaagatgagctagtgaagaaagctgtgcaatcagtagtgccagtggtagagaagctccaagagaaatccacttccaagaatgctccagagactaataaaactgaaatcaaaccccaagatgttatacctgatgacgaccaactagagactgatgtgtttgaagttccaattgagaagttgacaattgaattcagcaaaccagctgatcaatcagaaaaggaaactcaaccatttgaagacacaaatgcagcagcaatatcaaagccagaaaagctttctgtggatgaacatgaactgacactaaagaatgatgaaattgcattgttgaaaaccggtttggaagagaaaggtaaggagttagagtccatgagtaatgaaaaggagaatctgaagaaccaactgaatgaagcagtttcaaaagtgtctgctgctcaaaccaaggaagaaggaatgactttgcagttgaaccaactgagagaagagttggaaaccagtaaagccaatgcagacaagttggatgagaagttgaaatctgtggaagcagaaaaggaggggttggagtcagagatgaagaagctaagggtgcaaactgagcaatggagaaaagcagcagatgctgcagctgcagtgcttgctgggggtgtggatatgagtgcaaggattcctg

SEQ ID NO: 4038 - DNA, 626 bp, Glycine max
acgcgcgattatacaaattttacgtatacacaaatgctacattgtagcgcaatgtattgatacgcgtacacacactcgtagaagaagaaagcgtttccaagaagcgaaaggaaggaaaggggttttgtgatttttgaaagaatcgcgtttgggagtagtcggagatggagctttcgactccgaattcttcctcgaagcacttgtccatcacgccgggttctagggttttgagaagccctctctccgacgaacagatctggaagcgcctccgtgacgctggcttcgacgaggaatcgattaagcacaaagacaaagctgcgcttattgcttacatcgccaagctcgaagctgagatatatgatcaccagcaccacatgggccttctcatattggagaaaaaggatttggcttcgaagtatgagcaagtaaaggccttggctgaatcatccgagttaatgcataaacatgactcagccatgaataaatctgcgttaactgaatcaaggaaacgtgaagaaagtttgaagaagacagtaagcgtcaaagatgcatgcatagcaagtcttgagaaggccttgcatgagctgcgtacagaaagtgcggaaacaaaggttgcagctgagagt

SEQ ID NO: 4039 - DNA, 491 bp, Glycine max
ttattttcttctgtttagaatagagaatcagtgatcagtccccacagtaatggaaggttaatgtcagttaagactgcattaggtacaaaggaaaagtgtaaggtcagagacaatagaacaatagaacaggagtgcataaaaaggccatgaataaaacgacatttcactaaatggaaggtgtagtgtccaaaatgaatgggttagactaatttaagcttaatgtccatatctcttttgaaggtaaccttagagcttaagattttagaattgaacatccgttatgtaactaggattgccagttgcaacaatttcactgaggtaataacattgtaaactatacttatacttgttcgtaactcattcctaatagcaaaattagaatctatgcaagtttaatttgcctccaagtggttgacaagtcttgtttgggtacaaggtctttggccttggttaacaagaaaatcgagtgttaggaaaattgagtgttaggt

SEQ ID NO: 4040 - DNA, 435 bp, Glycine max
gactttgaccgatccgttcgaagcgctttcgcattcttctcttcgttcgtttcgcctcttcccaacccaaccctcattcattttctctttctctctgtgaacacaaaccctaacaagaagaagaaagagcgatgatgcgttggtagatcgtgatctggtgcgggcgcgatcattgtacgatcggtgcgttcgaatttcgcactgacgtttgggagttgtgggaggggagtgaaggaatcgctattatgtctgaattggtggcgcgtacgggccggcatcagcagcggtacgagaacggttaccgtcttgtttccggggaggttgggagactgacgaaactgttgagcaggcagctgtcagggaagctgtataagaagcaggagttcgaggagacataatggattttcttggacactacgaagtttacgagtaaga

SEQ ID NO: 4041 - DNA, 346 bp, Glycine max
attttctctttctctctgtgaacacaaaccctaacaagaagaagaaaggagcgatgatgcgttggtagatcgtgatctggtgcgggcgcgatcattgtaggatcggtgcgttcgaatttcgcaatgacgtttgggagttgagtgaaggaatcgctattatgtctgaattggtggcccgtacgggccggcatcagcagcggtacgagaacggttaccgtcttgtttccgggtgtgttccatttagatataaaagttctaatgattgtggagaccctagttctgagaagattgttgaagtgcttatgattaattcaccaagccgacctggtcttttgtttccaaaggg

SEQ ID NO: 4042 - DNA, 421 bp, Glycine max
taggggacttgggttgcagaaaagttccagcgtcagaaaaagagaaattagcaaaatggcggatgtgagagggagggacacgtggacggaggagctgcccagtctgatagaggattcgggagtgctctacggtggagatccgacgacgacaacaacaacaacaacaacgacgtcgtttgaggtgtacgcgccgcatagcgagtcgggggagagcttcaaggagcaggccttggggttcgtgatggcgtggtgcgagatactcatggagttggggagaggcttcagggacattctgcgacagaacttgatgaacgaggattcgtatgtggttaggaagttcggtggaccttgttccaaggtttcgaagcggctgaggtttctcaacgactttctccccgaggatcgcgatcccgtccacgct

SEQ ID NO: 4043 - DNA, 463 bp, Glycine max
gtaatgaccctcggttgaagaaaagttgcagcgtcagaaaagtgagaaattctagtattcatctttttggcctttttcttgactaatattctccttttttttgaatactgggttggatattgaaaaggttttggttgtagatgaggaagaggggtgtgtggcgcgtggttctttaatctttatcatcaccaccgtcacttactagtttgagaaattagcaaaaatggcggaagtgagagggagggacacgtggacggaggagctggcgagtctgatagaggattcgggagtgcgctacggtggagattctcctccgacgtcgtttgaggtgcacgcgccgcagagcgagtcgcgggagagcttgaaggagcaggccttggggttcgtgatcgcgtggtgcgagatactcatggagcttgggcgacggttcagggacattctgcgacagaacttgatcaacgag

SEQ ID NO: 4044 - DNA, 1125 bp, Glycine max
tccggaattcccgggtcgacccagccgtcctccggttgcaaaaggccaccgaagggggattaaggattggaaccaccaaagcctttctttaaggcggcctttaaaaatttaatgtaaaggtgggtcaaatggtttaatctttcgaagccttgaaccctggaaacaaaatgaaagtttatgcacaaaatactttgttcctgaaacagatcaaagtgaagtgacaagccctgatgatcccctgcctgaatctccaaggtgtacagtccattcattttgcaagacactcactgcttctgacactagcactcatggaggtttctctgttcttcgaagacatgcagatgattgtttgccaccactggatatgactcagcagcccccatggcaagaattagttgcaactgatctgcatgggaatgaatggcattttagacatatttttcgagggcaacccaggcgccacttactgaccactgggtggagtgtctttgtcagttccaaaaaattagtggctggtgatgcatttatattcttaaggggtgaaaatggagagctgcgagttggagttaggaggctcatgagacagcaaagcaacatgccatcttctgttatatccagtcacagtatgcatctgggtgttctggccactgcatctcatgccattgccactggaacactgttttctgtgttttacaagcccagaacaagccggtcagagtttattgtgagtgtcaacaagtatctggaagttcagagtcataaactctctgttgggatgagattcaaaatgcgatttgagggtgatgaaattcccgaaagaaggttcagtggcacaattgtgggtgttggagataataaatcatcgtcggtctggcctgattctgagtggcgatcattaaaggtgcaatgggatgaaccatcctcaattttgcgtcctgacagagtttcatcatgggaattggagccacttgtgtctaccactcttgcaaactcgcagccaacccaaagaaacaagagggcacggcctctcattctaccttctacaatgcccgattcttctttgcaaggcatatggaaatcatcagttgaatctacctctttctcttattgtgacccccaacaagg

SEQ ID NO: 4045 - DNA, 782 bp, Glycine max
atcgtgccgtgcggtgtacagcactagaattacgcagagacagacacagagggggggtcctgtcggcttgaaaccaaacacgaccttatcggcgatccaatttcgatctgtgcaaatcgtaaaccctacctacttgcttctgcaattctggtggactggatccattttcatctcaattctcagtaagttggggcacatcacacaataactttgacatggcttccgctgcgccaggtgcaaccaatgatgctttatacaaggaattgtggcatgcctgtgctggaccccttgtcactcttccgcgtgaaggggagagagtttattacttccctcaaggtcatatggaacagcttgaggcatccatgaatcagggattggagcagcaaatgccttcctttaatctgccttctaaaattttatgtaaagtggtcaatgttcatcttcgagctgaacctgaaacagatgaagtatatgcacaaataactttgcttcctgaagcagatcaaagtgaggtgacaagccctgatgatcccctgcctgaatctccaaggtgtacagtccattcattttgcaagacactcactgcttctgacactagcactcatggaggtttctctgttcttcgaagacatgcagatgattgtttgccaccactggatatgactcagcagcccccatggcaagaattagttgcaactgatctgcatgggaatgaatggcattttagacattattttcgagggcaacccaggcgccacttacttgacacttggtggagtgtc

SEQ ID NO: 4046 - DNA, 512 bp, Glycine max
ataaaaaagaaatgaatatactaaaaaaatgtaatatgcttgatgggcgtgggacagtgggggaagttgtaggggtttcagggcacgcattctatcgctgtttctctcgaatcaacaaaacgccaccgtttcattgatctacttcctccaaggccaggtctccaagaattggtaccaattcaagctgcaaatatacttgaacttcaacttatcccacattctccactctcaatggcttcaactctcaaatctggcggaattcatacaggggcaatcaatgatgatttatacaaggaattgtggcatgcatgtgctggtccccttgtcactctccctcgtgaaggggaacgagtctattactttccacaaggtcacatggaacagcttgaggcatctatgtatgagggattagagcagcagatgccttccttcaacctgccttctaaaatattatgtaaagtggtcaatgttcatcttcgagctgaacctgaaacagatgaagtatatgcaca

SEQ ID NO: 4047 - DNA, 1644 bp, Glycine max
cggaagagaagaaggaagcggaagtgatagtagaagagaagaaggaagttgaagtgacggaagagaagaaggaagtggaagtgaccgaaggaaagaaagaagtggaagtgatcgaagagaagaaggaaacagaagtgacagaagaaaagaaagaagtggaagtagaagtgagggaagagaagaaggaaagtgaagtgaaagaagaagaaaaaggtcgggaggttgttccagaggaagttgagatatggggaattcccctgctgggggacgagaggagcgatgtgattctgctaaagtttcttagggcaagggatttcaaggtgaaggaggccttgaacatgataagaaacacggtgcgatggagaaaggaatttggaatagagggtctagtggaggaagatcttggaagtgattgggagaaggtggtgttcaaggatggatacgacaaagaagggcacccggtgtactacaacgtctttggggagtttgaggacaaggagttgtacagcaagacgtttttggacgaggaaaagaggaacaagttcataaggtggaggaattcagtcgttggagaagagcgttagaagccttgacttctctccgaatgggatatcgacaatagttcaggtgaacgaccttaagaactctcccggactgggcaagagggaactgaggcaggccaccaatcaggcccttcaactgcttcaggacaactaccctgagttcgttgccaagcagatattcatcaatgtcccctggtggtaccttgccttttctaggatgatcagtcccttcttcacacagaggaccaagagtaaatttgtttttgctggcccttccaaatctgctgatacccttttcagatatatagctccggagctggtcccggttcaatacggtggtcttagcagagaggctgaacaggaattcacctctgcttaccctgttacggagtttactattaaacccgctaccaaacattctgttgagttccctgtttctgagaaaagccatcttgtttgggaaatccgagtggtgggttgggatgtcagctatggagctgaatttgtgcccagcgctgaggatggatacactgtcatagtacacaagagcaggaaaattgctcccgctgatgagaccgttcttaccaacggtttcaaaattggtgaacctggcaagattgtactcaccatagacaaccaaacatccaagaagaagaaactcctctacaggtccaagaccaaacccattgcagagtaacttgaataaggatgttactgttactgttatattcatcattacaaccacaacaacattggtgggtggggcgagggacttaattctttcatacggggttcttcttttcttcatttgctttattattttgtttcaagtctgggtttgggctatttcattaaaagcttacagtaatttcctgtcttctttatttggtttttggaattggataaaacctttgctgctttgactgggcgaaggagggatcattatctggacgggcttcatttgtacatgaaacaattaatgtctgtttgcatggtgatatacttttatgcctgtaaagtttgtttaaatgcgatcatgtattccttattcccgtatataattcaaatttgcttcattgtt

SEQ ID NO: 4048 - DNA, 613 bp, Glycine max
ccttctatacacatcttcaccaccaccaaactctccttcttaaggaataatgatcacatttaaacaaactttacaggcataaaagtatatgacaatgcaaacagacattaattgtttcatgtacaaatgaagcccgtcccgataatgaaatagcaaaggttttatccaattccaaaacccaaatagcaaactaccgtaagcttaaatgaaataggccaacgccagacttgaaacaaaataattttataaagcaaatgaagaaaagaaccccaccccgtatgaaagaattaagttgaacagcacaatgttcttgttcttgtggttgtaataatgatgaacatataacagtaacagtaaaatccttattcttgagcttcaagttactctgggatgggcttggtcttggacctgtagaggagtttcttcttcttggatgtttggttatctatggtgagtacaatcttgccaggttcaccaattttgaaagcgttggtaataacggtctcatcagcgggaccaattttcctgttcttctgatctatgcctgggtaaccaccgtctcatcagcgggaccaattttcctgttcccggcgcttaggatggttaccctgtc

SEQ ID NO: 4049 - DNA, 550 bp, Glycine max
aagaaacacacgcgccggcgacaactggtgccgtccttgcagggctgagtgcggtagcgcgcggggtggagccagcactcgaaaaccccgtgcgcgtactcgcacgcgtcacccttcttgcaactccccttgcggaaatcggggcaagccgtgccggagtaatggtacttccggggatcacggcggcgtgccttctcgccggggtgggcgtacggacagtcggtccagtcatgcgacctgcaacgtgcgcatctccgaaccttgaactcgaacatgcggaaatggtcgcaggagtaagcgtccaccgggacttccggttcccgagacggaacctccgagtctgactcagcatcggtggattcgtagtgctgaagtgcactaagtgcttcttgcatggagtacggagagtaatcggcattgccggtgtatggtgagaagatctccggcgcccacggtggcacgtgtacggttggatttgggcggtgggtctccccaagcatcatggtgttttttggtattatcgggattacttggatgcgatgtttacgcc

SEQ ID NO: 4050 - DNA, 1239 bp, Glycine max
attaagttgaacagcacaatgttcttgttcttgtggttgtaataatgatgaacatataacagtaacagtaaaatccttattcttgagcttcaagttactctgggatgggcttggtcttggacctgtagaggagtttcttcttcttggatgtttggttatctatggtgagtacaatcttgccaggttcaccaattttgaaagcgttggtaataacggtctcatcagcgggaccaattttcctgttcttctgaactatgacagtgtaaccatcctcagcgccgggaacaaattcagcaccgtagctgacatcccagcccaccactcggatttcccaaacagcatgacttttctcagaaacagggaactcaacagcatgcttagtcgcgggtttgattgtaacctcagtgacaggatcagaagtggtgaattcctgttcagcctctcggctaagtccaccatattgaaccggcaccagctccggagctatatattggaaaagggtgtgagcagatttggatgggccagcaaagagaaatttgctcttggtcctctgtgtgaagaaggggctgatcatcctagaaaaggcaaggtaccaccagggaacattgatgaatatctgcttggccacaaactcagggtagttatcctgaaacaattgaaggacctgattggtggcctgcctcagctccctcttgccaagcccaggagagttcttaaggtcgttcacctgcactattgtcgatatgcctgtcgcagagaagtcaaggcttctcacgctcttctccatcgactgaatcatccaccttatcaacgtgttcctcttctcctcgtcccacaatgtcttgttgtacaactccttgtcctcaaactcaccgaacacgttgtagtacaccgggtgcccttctttgtcgtgtccatgactgaacaccaccttgtcccaatcacttccaagatcttcctcgacaagaccctcgattccgaattcctttctccaacgcaccgtgtttctcagcatgctcaaggcatccttcaccttgaaatccctggcccggagaaactttagcagaatcacatcgctcctctcgtccccaagcaggggaattccccatatctcaacttcctctggactaataggaacaacactttccttcttctcttctatcacttctgtttccttcttctcttctatcacttctgcttccttcttctcttccgtcacctcaacttccttcttctctt

SEQ ID NO: 4051 - DNA, 459 bp, Glycine max
tgcaaactcacgcgtgcagagtgatgataataaatctgctgcacctgatcagaaccctttaccagacgcatcagcggtgaaggaaaatggtgggaggaagagtttgatttctagaagcaagcaatcgcttggtaaggccattcgcagactcggtggatttcgccatcaggatcgctgggataatcttgaaatgaaattggatgatgggaatggttctaaggtttctggtgctgttgagatgaggagaattgagcctgtgactgtgcctttggttgatcttccagaaatttctgaaccttcagttctcctttcagatagtatacggaacgttctctatgtttctctcccgcctcttattcacggaaggaaatggctgttgttatacagcacttggaggcatggtatatcactttccactctttaccggagaagcatgctttggcctggattgagtttgct

SEQ ID NO: 4052 - DNA, 549 bp, Glycine max
cgctacacacgagaaagcagaaaccaaagaaccatgaagtctctgaggtccatcttagcaacttttgtggttctattatcaatttcactcactatctcacttccaattgaagaagctttcaaccattgtctaacacaacactctcagactccaaaccaatttccctcatcaatctacacttacaccaatggttccttcacttcaatccttgagtccacagctcaaaatctaaggtacttgttgccctcagtgccaaaacctgatttcatattcaccccactggatgactctcaagtccaagcagcagtggtttgtgcaaaaaagcttggtattcacatgagagtgcgcagtggagggcatgactatgaagggctctcttatgtttcccttattgagaagccattcatgatcctagacttggccaaacttcgtgcagtgaatgttgatattgcgcgaaacacggcttggatccaagccggtgccactattggtgaagtttactacagaatttcaggaaaagtgcagttcatgggttccctgcaaggcttt

SEQ ID NO: 4053 - DNA, 475 bp, Glycine max
aaaataatagaatttctagggctttagaactctccattttctcttccgatcatccaggatcctcgagaattctttttgttgaactcacttctctcttgttcgccacgcactcttgtctctgcaagttgtctgggttgctcgtagaccaccaggatatgcatttattgagtttgatgatcggagggatgcacttgatgcaattcaggccttggatggaaaaaatggttggcgtgtagagctttctcataattccaagggtggtggccgaggagggcgtgggcgtggaggtgaaggcacacaatgctatgaatgtggtgaacctggacactttgctcggcagtgtcgattgcgcattggatcacgtggccttggaagtggaaggaggcgaagtccaagtccttatcggcgtcgtacaagtccaagttatgggtatgatcgcaggagttacagccctcgtgggagaagatctccaaga

SEQ ID NO: 4054 - DNA, 421 bp, Glycine max
ccgcccgaatcctcgaaatttctttcgattgaactcatttctctcttcttcgccacgcactcttcgctctgtaagcggtgattttggttctggacaatgtctcgtgtttatgttgggaatttagaccctcgagtcagtgagagggacctcgaagatgaatttcgtatatatggtgttcttaggagtgtctgggttgctcgaagaccaccgggatatgcatttattgagtttgatgataggagggatgcacttgatgcaattcaggccttggattgaaaaaatggttggcgtgtagagctttctcattattccaagggtggtggccgaggagggcgtgggcgtagaggtgaagacacaaaatgctatgaatgtggtgaacctggacactttgctcgggagtgccgattgcgcattggatcac

SEQ ID NO: 4055 - DNA, 376 bp, Glycine max
ctgaacacaatttgctttcgtttgttgttgttgttgtttctgttccttctcttgttccttaaactctttgtttcaaacatccttagaaaaggtaaaaatttaaaaaaaagaaaagaaaatggtggctgtggtttcccaagaaaatgttgcggcattggtttctcgtaccggtagggagttgcaacgttatagaaaaggtcgtcgccaagttgtgggatgcataccgtacagatttaagattggggagaagacttccttggatgttgtttctgatgaattggaagttctggttattagttcccagaaaggaaaagggatgctatttccaaagggaggctgggaattagacgaatcgaaaaaggaggcagctttgaga

SEQ ID NO: 4056 - DNA, 496 bp, Glycine max
ctcgagccgaatcggctcgagatttttcttgcgtacacccgcattgttttttccccacaagcaagtttgcaaaggcaataatctctattaccctcattatccaaaatcagaaaaaatggccactagaggcctcaaaatttgcttggccgtgtcctctcttttcttgatcattcttgccatcgttattgtgaccttaattttgaccatctttaaacccaagaacccagatatatttctccacccagttgacctagaaaactttcaattgctttcacctaatacaactagtgcacccttaggcatagtgatcacaattgtgaaccctaattatggaaacttcaagtacgtgaattccagtggctatcttaaatatcgtgacaccattatagccgaagttccattggggataagatcattccctgctcgtagcactaccaatgtgagcactactgtgggtattatgaccgataaattgatacaagatccaaagtttttg

SEQ ID NO: 4057 - DNA, 1322 bp, Glycine max
ggttgcgtgggagggctttgagaaaacaacattgcccgaaggccaattacctaacacagggaagaaaacaagaaaagaaaaaaaggtttcatcataatcataagctgttaggcatggcgactggattcgacaccgcccatgagaagaagaagaagattgccgttctgagcgtgtcttccatcctcctggtggcgatggtggttgcggcggccgtcggcataagagacggcgccgaagtggtcgaggaaggtggcgacacgatcgcgaaatctcaaaggaaccagcaagtgatatgcgaatccgcggaatacaaagaaacatgccacaagagtctggccaaagcctccggaaccagcgatctgaaggagctcatcataaccgcgttcaacgccacggccgaagagatcgcgaaccaaatcaaaaactcgacgctctaccatgaactcgccaccgaccacatgacaaaacaggccacggacatctgcaaggaggttctaggttacgctgtcgacgacatgcgccgatccgttcgcacgttggaagagtttgaactaaacaagttgaacgattacgcctatgatctcaaggtctggatcgccggtactctcgctcaccaacagacatgtttggatgggttcgagaacacgaccaacgaggctggcaagaccatggctagggttctcaacgcgtctttggagctcagcaacaacgcgttggacatagtcaacggtgtttcgagtctcttcaagggtcttaacttgagttccttcagcgtcaacagcaacaggaagcttctctcggaggaaacggctttggtggatgggttccctacgtgggtgagtgaaggacagaggaggcttcttcaggctgtggaccccaaacccgacgtggttgtggctcaggatgggagtggacaggtgaagacaatccacgaggctcttaaattggttcctaagaagaacaagaagccttttgtgatttacatcaaggccggtatctacaatgagtatattatcatgaacaagcacttgacccatgtcaccatgatcggagatggccccaccaagaccagaatcaccggcagcaaaaactacgtcgatggcatccaaacttacaacaccgctaccttcggtgtgaacgctgctaacttcatggcgatgaacatcgggttcgagaacacagcaggagctgagaagcaccaagccgttgccctgagggtaacagcagacaaggctgtattctacaactgcaacatggatgggttccaggacaccctctacacacaatcccagcgtcagttctaccgcgactgcaccgtcacg

SEQ ID NO: 4058 - DNA, 1302 bp, Glycine max
cccacggtcaaacttgagttcaaacactctcatcttcttattcttctgctttcactctctgactcaatcgttctaatccacaaaaaatgaccttaaattacaacattgccctcgccttctctgcggtgctcacgctgctcctctttcccctactgaccgtaggggagctcgtggaggagcagccactagtcctcaagtaccacaacggccagctcctgaagggccgcatcaccgtcaatctcatctggtacggcaccttcaccccgatccaacggtccataatcgtggacttcataaactcgttaagcagcgcgccaaacgcgcctctcccctcgaccgccacgtggtggaaaaccacggagaagtacaaggtgggaggaggatcccctgcgctcgtcgtagggatgcagttcctacacccggcttacacgctagggaaaaatctcaaaggaagagatctcctcgcactcgcgtcaaagttcaacgagattaactcgataacggtggttttaacggcgaaggacgttgccgttgagggcttctgcatgagccgctgtggcacccacggctctacccggaacgttaaaagtaatgcccgaaccgcatatatctgggttggaaactccgaaacacagtgccccgggcaatgcgcgtggccattccaccaaccgatttacgggccccagacgccgccgttagtttctcctaacggcgacgccggggttgacggaatggttattaacttggccacgcttctcgctggcacagttaccaaccctttcaacaacggttacttccagggtcccccaacggcgccgttagaggccgtttcggcttgcactggtgttttcggaagtgggtcgtacccgggttatccgggtcgggttctcgtggataaggcaaccggggcgagttacaatgcgcatggtgcgaatggaaggaggtatctcgtgccagcgatgtgggacccgcagacttcgacatgcaagaccctcgtctgaagactgccacgtggcgaggttgtgtaatggttgtagatattggtcgatgggaacggaagcagggaatggataatagaggtggtgatggatttggttcggacttcggagtgtttctaaattttctatattctgtaagcctgcttttgtcgtttagtgtgacgtgtaagacgtgtaaattctcttttgctaaagactatagaggaagaagaactgggatgttgtataaataataaattatgaaaaacgaggaataagattttaaaaaaagggatatcatgaatgtgatatatttttattttgg

SEQ ID NO: 4059 - DNA, 473 bp, Glycine max
cctcgagccgattcggctcgaggaaacactctctctctctcttcttcttcttcttcttcttgcacgtattgttctaatccacaaaaataatggccttaaattacaacattgccctcgccttctctacggttctcacgctgcttctccttcccttaccaacccttggggagctcgtgcaggagcagccactagtcctcaagtaccacaacggccaactcctgaaggggcgcatcaccgtcaatctcatctggtacggcaccttcaccccgatccaacggtccataatcgtggacttcataaactcactaagcagcgcgccaaacgcgccgcttccatcgactgccacgtggtggaaaaccacggagaagtacaaggggggaggatcctctgcgctcgtcgtagggaagcagttcctacactcggcttactcgttagggaaaaatctcaaagggaaagacgtcctcgcactcgcg

SEQ ID NO: 4060 - DNA, 389 bp, Glycine max
gcgcatggtgcgaatggaagaaggtacctcgtgccagcgatgtgggacccgcagacttcgacatgcaagaccctcgtctgaagactggcacgtggcgatgtgttgtgtaatggttgtagatattggtcgttgggaacggaagccctgaagcaggggaatggataatagaggtggtggtggattcggtttctgagtgtgtttctaaaaattctattaaacctctgcttttgttgtttaatgtgacgggtaagacggggtaaattctctctttgccaaagactactataaaggaagaagtggaatgttatataaattgtgaaaaacgaggaataagttttttttttatttaaaaaacggatgtcatgattaatgtgatatatttttttttt

SEQ ID NO: 4061 - DNA, 1715 bp, Glycine max
  unsure (1)..(1715): unsure at all n locations
gagtaattgtaaatggttttggcttgcccggattcattaaacggtgcgtgtaactcgtggctcgtgccacctgaccttatataaccactcagatcagtcgaacatttcttcacttcttcgttttcgacgatccccttctccttctctctctctttttcgcctcattccattttcatctatcaatggctccagtagcagcagcatcttcagattcaatcaagccaagagatgtttgcatcgttggtgttgcacgtacaccaatgggtggatttcttggtactctgtcatctctatctgccaccaagctaggctctatagctattgaagctgctcttaaaagggccaatgttgatccatcccttgtggaagaagtattttttgggaatgttcttagtgctaatttggggcaagctcctgcaagacaagctgctcttggagcaggaatatccaattcagttatctgcactaccgttaacaaagtttgtgcatcaggaatgaaagctgcaatgcttgctgcacagagtattcaattaggcacaaatgatgttgttgtggctggtggtatggaaagcatgtctaatgtacccaagtacctggctgaagcaaggaaaggatcacgccttggacatgattcacttgttgatgggatgttgaaagatggtttgtgggatgtctataaggatgttggcatgggagtgtgtgctgagctatgtgcagataaccatgcattaacaagagacgaccaggataactatgcaattcagagttttgaacgtggaattgctgcccaagaaagtggtgccttttcatgggaaattgctccagttgaagtctctggtggaagaggaagaccatcaacagttgttgataaggatgaaggcctaggaaagtttgatgctgccaagttacgcaaacttcggccaagtttcaaggagactggaggttctgttacagctggcaatgcttccagcataagtgatggtgctgctgcactagttttggtgagtggagagaaggcactgaagcttgggcttcaagttattgcaaaaatcactggatatgctgatgctgctcaggaaccagagttatttacaacggctccatcccttgccattcccaaagctattgccaaggcggggttggagattcacaaattgatttttatgaaattaatgaagcctttgcggttgtggctctcgcaaatcagaaacttcttggacttaactcggaaaaagtaaacgtacatggtggagctgttgcactgggtcatcctcttggttgcagtggtgctcgcattctggtgacacttttgggggtactgaagcagaagaatgggaagtacggagttggtggcatttgcaatggaggaggtggtgcatctgcccttgttgttgagcttcagtaagacctatttcatgttcagtagatgtccttttaagagccagcgtttgatgcaaagctcaaaagatcttgcctccctctttagcaagcgaacatgcaagtttcaaatttattacaaggacaagaccgaaagagagcgaaatttagctacatagttgttaggtttaagtcgcatcttgtgaaagtgaaattttcttggcatcaaagtagaacatgaaacaatattatccaaattttagttttctctgaaatgttattggcgtactttggtttggaatgaatcattataaaacctcttattccaagcacanntt

SEQ ID NO: 4062 - DNA, 513 bp, Glycine max
gcgagaagacgacagacgggggggaaaaagaagagtaattggcaaattgattttggcttgctcggcaacacggtgggagcattcttcacttgtccttggttttggaacgacgacagccgagctatctctcattccattttcatccatcaatggctccagtagcagcagcatcttcagattcaatcaagccaagagatgtttgcattgttggtgttgcacgtacaccaatgggtggatttcttggtaccctgtcatctctatctgccaccaagctaggctctatagctattgaagctgctcttaaaagggccaatgttgatccatcccttgtggaagaagtatttttcgggaatgttcttagtgctaatttggggcaagctcctgcaagacaagctgctcttggagcaggaatatccaattcagtaatctgtactactgttaacaaagtttgtgcatcaggaatgaaagctgcaatgcttgctgcacagagtattcaattaagcataaatgatg

SEQ ID NO: 4063 - DNA, 534 bp, Glycine max
ggaaacactggtgtgagaaacagagaggactgagttctgagtctaatatccaatctgaatccgaacataacattcagaaggaagaagaagaaggtgtgttggagaatgaaaactgaaacagagccaaatgaaaccgagtcagattggagcgagttgactcgcgagtgcctcatcaacatcctctctcgactcagcgtcgaggatcgatggcgcggcaccatgctcgtttgcaagtcatggttcagcgtcttcaaggaaccctctcttcacttcgtcttcaacctcgaccctcaattcgactcgcccaccgaatcaactcgctggtggacccccgagttcgaggccaagatcgataacatgcttcgatctgtcgtcgaatgggcccaatcctctctcacccatatacgcattcgccactgttctgatcgttctctcgccctcgtcgcccaaagttgcccaaaccttgaggtgttgtttatcagaagctgtcctcgtgttaccgatgattctatctctaggatagctttgagttgt

SEQ ID NO: 4064 - DNA, 840 bp, Glycine max
aattggattcagattttggaaaacgttttggcaatcaatcgcgtagatcttggcaaggtcctgagcatgatgggcttctaggtagtggttcttttcctcgaccctctgggtatactcctgggttgtctgcctcgaaatttcgagctaatgacaactaccagctaaatcggtctaatgagccttatcatcctcctcgcccttataaggcacctcactcacgtcgggagactaatgactcttttaatgatgaaacatttggttctttggagtgtacaagtgaagacagggctgaagaagaaagaaaaagaagagcttcttttgaattgatgagaaaggaacaacataaagctttccaagaaaagcataagttgaacccggacaagaataacgacgattttgacataacttcacttgctgacaacgatgagaaaagggtagttaataggagcaacgagtatgtggagcctaatgtgactctatcagtgttaagcaatgatgagaaatcttcttccctttcacagactccttcagcagcaagaccacttgtaccccctggttttgcaagtgcacagttggaacgcaatttggcaaccaagacatcccttaacactcattcaacagaggttggacaacctgcgcctggtgatactggaggtaaccatgtattcagtataaattctgacaataaagaaggaaaattattaaccaagcaagtgaataatgatcaacagaatcttcaaaatacaaatctaaatatttcaattaactatgagaaagaaaacattttaaatttaccgtcaattttggatattgccgacattaaaattggaatgggtgatc

SEQ ID NO: 4065 - DNA, 514 bp, Glycine max
cttatcttctttcccactgaggaaacagaggatagcagcaaaagcaatggcatctgcaagagaacaaatgtatttgatggcaatcctccttatattctccccttcaaaattaacgttatcaaatgctggtgcagtaacagggcaaccaattccacctgagtggccgcaccagttccacgcgtttatgttcatgaacgaaagcggaattcttcagaaactggacttgtggtacgactggcccaacggccgaaacttcaacatcattcagaatcagctggaccacgtcgtctcctacgacctcgaatggaccaacggcacctccttcgtctacaccctcgacccttccgacccgacatgcaaagttgtggactttggagtgggtattctccgacccaattggctcgacggtgcaacctatttgggtcagcaacacgttgataacttcctctgcaacgtttgggcgaaggttgatttcattgtctactacgaggaggtcctcactcgtaggcctgtt

SEQ ID NO: 4066 - DNA, 1527 bp, Glycine max
cacccatcatcaatctttatttaacacttgcctcctcttttttccaaccatctcttgctgcttcgttcttttcttcttcaattcatatcatatcaattagatttgttttcagagtttgctagtgagataccatggacaactacaacagcaatgacttttggaaattcagtgaccagttgaggcttgaatctggtttggccaatctgtctctgaatgattattccatttggagcaacagctacagctccaagaggcctgatcagaggaggaactttgatgtcaagggcagtgatttcaacaactcatcaaagccttttgatgatgatttcaatgatggctggaagatcaccaattccaatggaccccttttctctatgcctcacaacaacaacactcacactcttgaagttggaggcttcaacaagggaggaatctattccaacaccaacaccacttcctccttatatcctaaccttaacaacaacgcttttggaggcttcaacaagggaatctattccaacaccacatcctcaccctatcttaacaacaaccaccaccacctcgacgacaacaacaacctcaacagaaataatctcaagggctacaagacatattttaagggtgaagatcagtttcacacacccaaaagtgccaagaagaagaacaccaccaacaacaccaacaacaagaagcatggggacaacactaataataatgatggcaccaagactgctgctgagaagaaattcaaaacactgccaccatcagagtctctgcctaagaatgaaaccattggaggctacatctttgtttgcaacaatgataccatggcagagaatctccaaagacagctctttggtctgcctccacgatacagagattcagttagaacaataactccagggttgcccctttttctgtacaactactccactcaccaactccatggtatctttgaggctgcaagttttggaggatctaatattgatccaacggcttgggaggataagaagtgccctggtgaatctcgtttccctgctcaggttcaagtgattactaggaaagtttgtgagccactagaggaagattccttcagaccaattcttcaccactatgatggccctaagttccgtcttgaactgagtgtgcctgaggcactgtctcttctggatatttttgcaaaccagaacagtttcgatgacattttcaaagccattccagcatagaagggtagaaattatacaagaagagagaagttacaaggacaatggataatgaatgaatactgtggattcatattattagagtgtcagaagataattaagacaacgaatattgaatttcagccgtcatatatttgtgttataattactactataatgttatttgtatagaggctgttatgcctggttgcccatttttttcttgttatgggtgtatatgaacatcacataaaagaatacaataagaaggaactaactttgttcatgattttttctgcaaaaaaaaaaaaaaagggcggccgcc

SEQ ID NO: 4067 - DNA, 1701 bp, Glycine max
aaatttcctctcacatttgacaattacacacgctacccgtaagtaactttccacgaagtttcatctcatctcatttttaatgtctgatataatccaacactagtgattccttatcaaattttctcattccaagcagcacctgctctgaatccaattcttcttcttcttgttcttctgtttaaggcaatacaacatttattacgcatactcaaagtagcttcgaagttcgtatttttattggcatatcatggagaataataatcagtcgttttggcaattcagtgaccagctgaggttacaggcatctaatttggcgaacctttctctaaacgattcgatttggagcaacagttacatctccaagaggcgtgatgaaaggattaattttgacatcaaagttgggggtgagatcaactctttcaagtcaaaggagccagcttgtgattacaatgaaaacatgaatggatctcttcttgccgtgccttacaacaacaataacaaaaacattattttgggtgttggtggagttggtctcaatggaggcttcaacaaaggaatttactccaagcctggttttgccaatcttaacaacaatattaacctgaatatcaatcctaagggacacaagttcaaggatgaagatgagctttttcacccatccaaaccttccaagaaaaacaacaacatcaacaaaaagcatgggggcaacaccaataacgatgataacagcaaggattccaaggctgctggcgacaagagattcaaaacgctgcccccagcagagtctcttcctaggaatgaaaccattggaggctacatctttgtttgcaacaatgataccatggctgagaatctcaagagacaactctttggtctgcctccacgatacagagattctgttcgggccattactccggggttgccccttttcctttacaactattccactcaccaactccatggaatctttgaggctgcaagttttggagggacaaatattgatccatcagcttgggaggataagaagtgccctggtgaatctcgtttccccgctcaggtacgagtgataactaggaaaacttgtgaaccactggaggaagattccttcaggccaatccttcaccactatgatggtcccaagttccgtcttgagctgaatgtgcccgaggcgttgtctcttctggatatttttgcagaacaagacaccttcaatgacactttcgaggctttgccggcataaaaggagattaatagcaaataatgcaacaagaatatcactcacagagacaatagataattagaggtttcggttggtttgaaagttatattaagtatggacttaagaagagagtccgaaagacaaaacaaaatgaatatatagcggagggcgcttggatattcaacaacctatatataatgtattactggtacttttgtatagaggatggtccattataagtattatacacatatatactaagagaatagaataagaatgaactatttttgcatatgggttcttgtacaaaaactacagattgggttcaaatggaatcctatatgttgtagcttgtgttgtgttcagaaggaactgaatatatagtggaaaagtgtgaaaccatggtggttcattacagtgttatttatacatgatacatgtgtgctctaaacattaatatgctttaaagtttttataacccc

SEQ ID NO: 4068 - DNA, 532 bp, Glycine max
atgtgcccgaggcgttgtctctgctggatatttttgcagaacaagacaccttcagtgacacttttaaggctttgccggcataaaaggagataaatagcaacataatccgtcaagaagaacatccctcgcagaggcaatagataattagaggtttgggttggtttgaaagttattaagtatggacttaagaagagagtccgaaagacaaaccaaaatgaatataccggaggacgcttggatattcaacaacctatatatttattactagtacttttgtatagaggatggtctattatactcatattattaagagagaatagaataaggatgaactatttttgcatatgggttcttgtacaaaaactacaaattggcgacaaatggaagcctatatgttgtagcttgtgttgtgttcagaaggaactcaaaatatagtgcagaagtgtgaaaccatggtggtccattcaggtgttattcatacattatatacgtgtgctttaaacattaatatgctttaaagtttttataaccc

SEQ ID NO: 4069 - DNA, 677 bp, Glycine max
  unsure (1)..(677): unsure at all n locations
gngtttgttcaggctgcaagttttggaggatccaatattgatccaacggcttgggaggacaagaagtgccctggtgaatctcgtttccctgctcaggtatatatcatctcatctccaatcaaattaattttattatatctatgcacaaattatgctaatattaattttataaatttaattaaaatgtactgatgctgtaaaagtaaagttttatattgtccttcaaagtaaagttttatattgtccttcagtcaattgatatatcacatatcaattgaatgatttctgattaaatggcaatattgacggtacatgatgattaaactctaattgtattattacttgattttgttataaacttatgaattttgcatacatgatggttacaggttcaagtgattactaggaaagtttgtgagccactagaggaagattccttcaggccaatccttcaccactatgatggtcccaagttccgtcttgagctgaatgtgcccgaggtattttatttttatcttgctgaatattggtcccatttgaaagaagatactaacatggttcagtgtttttatttttcctggtccgctaaactctatcgctttttgggtttataggcgttgtctcttctggatatttttgcagaacaagacaccttcaatgacactttcgaggctttg

SEQ ID NO: 4070 - DNA, 762 bp, Glycine max
tctctcttttccaaccatctcttgctgcttcactcttcttcaattcatatcatatcaattagatttagagctaaacataaaattgttttcacataccatggacaacaacaatgacttttggaaattcagtgaccagttgaggcttgaatctggtttggccaatctgtctctgaatgattattccatttggagcaacagctacagctccaagaggcctgatcagaggaggaactttgatgtcaagggcagtgatttcaacaacaacaacaactcatcaaaggcttttgatgatgatttcaatgatgggtggaagatcaccaattccaatggaccccttttctctatgcctcacaacaacaacaacaacactcttgaagttggaggcttcaacaagggaggaggaatctattccaacaccaacaccaccatttcctccttatatcctaaccttaacaacaacactcttggaggcttcaacaagggaatctattccaacaccacatcctcaccctatcttaaccttaacaacaacaacaacaacaaccacctcaacaacaaccttaacagcaataatctcaagggctacaagacattttttaagggtgaagatcagtttcacacacccaaaagtgccaagaaaaacagcagcaacaacaacaacaagaagcatggggacaacactaacaataatgaagccaccaagactgctgcagagaagagattcataacactgccaccatcagagtctctgcctaagaatga

SEQ ID NO: 4071 - DNA, 418 bp, Glycine max
gttccgtcttgagctgagtgtgcctgaggcactgtctcttctggatatttttgcaagccagaacagtttcgatgacattttcaaagtcattccagcatagaagggtagaaattatacaagaagagaagttacgagcacaatggataatgaatgaatactgtggactcataatattagagtgtcagaagataattaagacaatgaaaatatggtgggggacgattatattgaattccagcccttatatatttatttgttataattactataatgttattagtatagaggctgttatgcctggttgcccattttttcttgttatgggtgtatatgaacatcacacccaaccccttcaataagaaggaactaactaaaatcaaagttttgtctgcaaaaaaaaaaaaaaagggcggccgcc

SEQ ID NO: 4072 - DNA, 1152 bp, Glycine max
  unsure (1)..(1152): unsure at all n locations
aagaagaggggcgtataattgaattcgctgaaaagccaaaaggagaacagttgaaagctatgaaggttgatactacaattttgggtcttgatgacgagagagcaaaagaaatgccttatattgctagcatgggtatatatgttgttagcaaaaacgtgatgttagacctgctccgtgagaagtttcctggtgcaaatgactttgggagtgaagtgattcctggtgctacttctattggaatgagggtgcaagcttacttgtatgatggctactgggaagacattggtacaatcgaggctttctataatgcaaatctgggaatcaccaaaaagcctgtgcctgacttcagtttctatgatcgttcatctccaatctacacccaaccacgatatttgcctccctctaagatgcttgatgctgatgtcactgatagtgttattggtgaaggatgtgtgattaagaactgcaaaattcaccattctgtggttgggctgcgatcttgcatatcagaaggtgcaattattgaagacacgttattaatgggggcagattattacgagacggaggctgataagaggtttctggctgccaaaggcagtgttccaattggtataggcaggaactctcatatcaaaagggcaattattgacaagaatgctcgaattggggaaaatgtcaagattattaacagtgacaatgtccaagaagctgcaagggaaacagatgggtatttcataaaaagtgggattgtcacagtaatcaaggatgctttaattcctagtggaacagtcatctaaacacaaccacctccccaaaaaatttcttgtaccccaaatcctaatggtgactgcgaagctcattactaccgcaggagagtttatcaagctctgcttccacgtctaagataggcttttgtgtttcatgatatatatttttgggcagtggcttgtaaataatagcggaagagaaggcccgctatgagcaatcacgctgtaaagttcgttaatcaattcaataaaagtttcttcgtttcgtactaaannnnnnnnnnnnnnnnnnnnnnnnnnnnnnnnnnnnnnnnnnnnnnnnnnnnnnnnnnnnnnnnnnnnnnnnnnnnnnnnnnnnnnnnnnnnnnnnnnnnnnnnnnnnnnn

SEQ ID NO: 4073 - DNA, 1104 bp, Glycine max
  unsure (1)..(1104): unsure at all n locations
tcaccactctgcaaaaccctaatcccacctagatataaaaactaaacaaaacggtgccgccattcctcactctgcagcagcagctttgaacgccgcagaaggttcatccaatctccgaagcccttcaccgcattgcaaccatgtcgaggagaaaggttagagagccaaaggaggaaaacgtgactctgggcccagctgttagagatggtgaacatgtctttggcgtcgctcgcatctttgcctccttcaatgataccttcattcatgtcactgatctgtctgggagggaaacgcttgtccgcatcactggtggaatgaaggttaaggctgacagagatgaatcatctccttatgctgctatgcttgcagctcaggatgttgctgccagatgcaaggtcagttgccatatctctttaacatagttatttttgttattaacatatgctgctttcttctttatgaatntgatagaattctgatttgatcatcctgtttgttagccaatatcactggtcaattgttctgtttagctgtttcagtgattttgttctggtaatgctctatgaaatcactgtagtatgggatgtaattttctgtgaagctgtcaagcttaatgcactgtttcaaattattgtggatcaggaacttggcattactgctcttcatatcaagctccgtgccacgggtgggaacaagacaaaaacaccgggtcctggtgctcaatcagctcttcgtgcccttgctcgttcaggaatgaaaattggtcgtatagaggatgtgactcccattccttcggatagcactcgtagaaagagtggtagaaggggtagaaggctttaaacttcttgtggtatatgtctggagttgctatattttaatttccatgccagacagaattgtggcattttgaaattttgcttaagtaatatcagaacttctattgtatttcttgaggttttgaacagaattttagttgagtgcatttaagcatcattgttgtcagagattgttgaaagttttgcatgttgcttcgtggcttgcaaagtattgctattcatctacttttgataaaatgtgcctaggtttagtttcaaaaaaaaaaaa

SEQ ID NO: 4074 - DNA, 840 bp, Glycine max
tcgctttcgcgtggggtgccgccattcctcactctgcagcagcagctttaaacgacgcagaaggttcatccaatctccgaagcccttcaccgcattgcaaccatgtcgaggagaaaggttagagagccaaaggaggaaaacgtgactctgggcccagctgttagagatggtgaacatgtctttggcgtcgctcgcatctttgcctccttcaatgataccttcattcatgtcactgatctgtctgggagggaaacacttgtccgcatcactggtggaatgaaggttaaggctgacagagatgaatcatctccttatgctgctatgcttgcagctcaggatgttgctgccagatgcaaggaactgggcataactgctcttcatatcaagctccgtgccactggtggaaacaagacaaaaacacctggtcctggtgctcaatcagctcttcgagcccttgctcgttcaggaatgaaaattggtcgtatagaggatgtgactcccattccttcggatagcacacgtagaaagagtggtagaaggggtagaaggctttaaacttcttatggtatatgtctggagttgctatattttacttttaatgccaaagagaattgtggccttttgatgttttttaagttaatatcagaacttctattgcatttcttgaggtgttgaacagaattttagttgagtacacatttaatcattgttgtcagagattttttaaagttgagcatgttgcttcctgggtgtggttgattattgttttttataattcggttctcctctttcggctactcttaagcattgaatgtattataaatctattcgttgttcgtc

SEQ ID NO: 4075 - DNA, 701 bp, Glycine max
agcgacagaaggggcttcttcttatttgtaacgaagcaaacgctgccgaattcgttatcgctttgcactagcagctttgaaacccggttcatccgaagcccttcaccgaaccatgtcgaggagaaaggttagagagccaaaggaggaaaatgtgactctgggtccagctgttagagatggtgaacacgtttttggcgttgctcgcatctttgcctccttcaacgacaccttcatccatgtcactgatttgtctggcagggaaacccttgtccgaatcactggtggtatgaaagttaaagctgacagagatgaatcatctccttatgctgctatgcttgcagctcaggatgttgctgccagatgcaaggaactgggcataactgctcttcatatcaagctccgtgcgacgggtggaaacaagacaaaaacacctggtcctggtgctcaatcagctcttcgtgcccttgctcgttctggaatgaaaattggccgcatagaggatgtgacccccattccttccgatagcacacgtagaaagagtggtagaaggggtagaaggctttaaggttctcgtggtattttaatttccatgtcaaacagaattgtggcattttgaaattttgcttaagttaatataagaacttctattgtatttcttgaggttttgaacagaatttagttggtacatttaggcattattg

SEQ ID NO: 4076 - DNA, 486 bp, Glycine max
gcgtccggaaataaggtggagggcttccagcaaaaccctactccagatctgtataaaaacaaaaacgctggctttgaaaccctaataagcttcatcaatctccgaactccgaagcccttcagcaaccatgtcgaggagaaaggttagggagccaaaggaggaaaatgtcactcttggtccagccgttagagacggtgaacatgttttcggcgtggctcgcatctttgcctccttcaacgacaccttcatccatgtcactgatttgtctgggagggaaacccttgttcgcatcactggtgggatgaaggttaaagctgacagagatgaatcatctccatatgctgctatgcttgctgcgcaggatgttgctgccagatgcaaggaactgggcataactgctcttcatatcaaggctccgtgccactggtggaaacatgacttaaacaccagggttccccctttggggtttgggccccttttttcccc

SEQ ID NO: 4077 - DNA, 839 bp, Glycine max
ggttgttcatcaacttttaacccccgagaaaggtgattccattttcggaggcctttaacggatttgaacccatggtcagaaggaacggttcgagagccaagggaagaaaacgtgactctgggcccagctgttagagatggcgaacatgtctttggcgtcgctcgcatctatgcctccttcaatgataccttcattcatgtcactgatctgtccgggacggaaacacttgtccgcatcacatgtggaatgacggttaacgctgacagagatgaatcgtgtccctatgctgctatgcttgctgcacaggacgttgctgccagatgcaaggaactgggcataactgctctgtacatcaaggctccgtgccactggtggaaacaagaccaaaacacctggtcctggtgctcaatcagctcttcgagcccttgcacgttcaggaatgaaaattggtcgtatagaggatgttactcccattccttcggatagtacacgtagaaagagtggtagaaggggtagaagactttaaacttcgtatggtatacgactggagttgctatatttcactttcgatgccaaagagaatggtggccttttgatgctcttcaagttaatatcagaactcttgcatttcttgaggtgttagaacagaattttagttgactgcattattgtcagatttttgaaagttgagtatgttgcttcgtggcttgcaaatgtgttaatcactactttgataaattgcgccctaggtttggttgattattgttttttataattcgcttctctctctcggctacttttaagcaatgaatgaattggaaatctaatcattgttcgtc

SEQ ID NO: 4078 - DNA, 393 bp, Glycine max
cctgcacgtaccggtactgaatggtcggaccaacccgtccgcccagccttcggtaaaaggggtgaaaaactttaaacttctattggattccaactgggagttgctatatttttaactttcgatgccaaaagagaatggtggccttttgatgctcttcaaggtaatatcagaactcttgcatttcttgaggtgttagaacagaattgtagttgactgcattattgtcagaggtttgaagaggtgagtatgttgcttcgcggcttgcaaatgtgttaatcactactttgataaattgcgccctaggcttggttgattattgtcttttataattcgctactctctctcggctacttttaagcaatgaatgaattggaaatctaatcattgttcgtc

SEQ ID NO: 4079 - DNA, 1181 bp, Glycine max
tttaaatccgatatgttatttcactctaagagacccccctctctctctccaatcagcggtgattttgtttatcataggaggatctgatgtactcgctcgtggatctcaactatattcacgatcatgatggcccttgaaaattctgaaaatatgcaaataaactgtgaggcatctttaaaatgcctccagggcaagggatttccttgcaattttcagagtaatgggagttctatggaaggctttacagagcttaaaaatgagcctggtactcatccttctggggatgttgctgagcctaactgtcacttaggcagtgagtttcttgagccttccaatgaatttcacaccaaacctacttatcaccaaaattacagcacctggacaccctgccattttaactctcacaaggtgcagcaatgccaaatgaatgcttttgagagccattactatccttatcctgttgagaatccacttcagtatgttccaattaatatggttgctcagggttacccgcgtgagcaatatcaggaatttcagtattttgtggtgatagactttggggctacctgtgacaaggataaaaatccccaccctcaagaaataattgagtttccatctgttatagtgagtagcatcactggccagctggaagcgtgttttcaaacatatgtgaggcccacctgcaatcagcttctgagtgatttctgcaaggatctgaccggcatccagcaaattcaggtggacagaggtgttacattgagtgaggctctactaaggcatgacaaatggcttgagaagaagggaataaagaattccaactttgctgtggttacatggtccaactgggattgtcgggtgatgcttgaatctgagtgccgattcaagaagatacggaagcctccttacttcaaccgctggatcaacttaaggattcctttccgtgaggtatttggtgctgtgaagtgcaatctaaaggaagctgttgagatagccggcttggcctggcagggacgtgcacattgcggccttgatgatgccaaaaatactgctcacctattggcacttctcatgcaccggggttttacatttttcattaacaatttcaataatgtggcagacagctgatcgaacactgatgtggaaaaattcacaagacaaacaaatggttttccgcaattccc

SEQ ID NO: 4080 - DNA, 373 bp, Glycine max
caaatatatcttatttgagtggattttcttctagtttactactgaaagatgggtttgaagacgatgataacattacttactattccattagccatgctcctttttgtttcctcagaggtgtcagccagggattttcaagagggaaacgttgttcacgaggctaatactgggggtgatgccaaactatttggcggtggtagcttcttccctgctggtggcattggtggtggtgctggatacttccctggtggtggcattggtggtggtggtggtggtggattcttccctggtggtggcattggtggtggtggaatcctccctgatcgtggattcttcatgccaaggttttgcttcagaggatgttgttttggga

SEQ ID NO: 4081 - DNA, 1554 bp, Glycine max
aataaataaatattttccgagccgtatgaatattgagtcacaccgaaccgtgtggttcttgctagccagccagatcatctgcaaggacttgttctccttccttcccaacagccatgtcttcttttcttcccgcctcagccgagtcacttgatctggcagtggaggccaaagacccgtctgagtccatctccattctttatcaggtacttgatgatccttcttcttctccagatgctctgcgcatgaaagagcaggcaatcacaaacctcactaagcttctcactgatgagaataggggagaggatctgcgcagccttcttactcagttgaggccattcttctccttgatacctaaggcaaaaactgcaaagattgttaggggaataattgactcggttgctaaaataccagggacatctgatctacaaattgcactctgcaaagaaatggtgctatggactcgtgctgaaaagcgtacctttctgagacagcgagttgaggcaaggcttgcagcacttctgatggaaagtaaggagtattcagaagctttgactcttctctctggcttggtcaaagaagttaggagattagatgacaagcttcttcttgttgacatagatttgctggaaagcaagctgcacttctcattaagaaaccttccaaaggcaaaagctgcactcacggctgcaagaaccgctgcaaatgctatatatgtgcccccagctcaacaaggtgccatagatctgcagagtggaatacttcatgctgaagagaaggattataaaactgcttatagttatttctttgaagcttttgaatcattcaatgctcttgatgaccccaaggctgtttttagcctgaagtatatgttgctgtgtaagatcatggtgaatcaagctgatgacgtaggaggaattatttcttctaaagcaggcctgcaatatcttggccctgacttggatgctatgaaagctgttgctgatgcacattctaagcggtcccttaagttgtttgaaattgctttgagggactacaaggcacagttggaggaagacccaattgtacacaggcacctttcatccttgtacgatacccttatggagcagaatctctgcaggttgatcgagcctttctcaagggttgagattgcacatattgctgaacttattgaacttcccacggatcatgtggagcggaagttgtctcagatgattttggacaagaagtttgctggaacattggatcaaggtgctggatgccttgtcatatttgacgatcctaagactgatgctatatatcctgctactctagagaccatttccaatgttgggaaagtcgtggacagtctttacgttaggtctgccaagataatggcatgagctctctggttattttactccgatgtcacattccttgttgctgttttcttcttaatggtgactagcatgtcatttgttttttctatttttatttttgttgaactcaattgtggtaaacctcttccggtggcttttgaacatttaaatgtttttgtggttttactgccccttgtcg

SEQ ID NO: 4082 - DNA, 524 bp, Glycine max
gaacggggcgtttaaactttgaaagggtgaacagtgaccgacattgcttcttccctgcgtcgtcgtttttttcttctctcctctttgttagggtttgctcggttccatttttcccaaaccattcggcacaacatcgaaatttccccattgtccgcttccgcaacgaaataactctaccgtgccctacgataaggggtttctcagagcaggagcaatgtcttccccttatctacctgccacaactgactcacttgctctcgcaactgaggccaaagacccatctgaggccatctccattctttatcgggtgcttgatgatccttcttcttcaccagatgctctgcgtatgaaagagcaagcaatcacaaacctcactaagcttctcactgatgagaataggggagaggatctgcgcagccttcttactcagttgaggccattcttcttcttggtacctaaagcaaaaactggcaaaattgttaggggaaatattgactcggttgctaaaatttcaggggcatttg

SEQ ID NO: 4083 - DNA, 1406 bp, Glycine max
ctcgagccgctcgagccgaatcggctcgagcaaacataacttgcagtaatggcttcaatgaataaccaaaaagaaattgagctctttgagggccaatctcttctgtacatgcagctatatgggcacctaagacctatgtgtcttaagtgggctgttcaactaggtattccagacataatacagaaccatgccaaacccatttctctttctgacttggtctctactcttcaaattccaccagctaacgctgcttttgtgcagcggttcatgcgcttcttggcacacaatggaatctttgagatccatgagagccaagaagatcatgaactaacatatgctctaacccctgcatcaaagcttcttgtcaatagtagtgatcattgtctatctccaatggttctagcgtttaccgatccacttcggaacgttaaataccatcacttgggggaatggattcgtggggaggacccctcagtatttgagacagcccacggaacaagcgcttggggacttcttgagaaaaatcctgaatattttagtctcttcaatgaggctatggcaagtgattcccgaatagtagacttggcactcaaaaattgcacttcagtttttgaggggctagattccatggtggatgttggtggtggaactggaaccacggccagaattatctgtgacgcatttcctaagttgaaatgtgttgtgcttgaccttcctcatgttgtagagaacttgacagggaccaataatttgagttttgttggtggtgacatgttcaactctatccctcaagctgatgcagtgctactaaagtgggttttacataattggaccgacgaaaattgcataaagatcctgcaaaagtgtagagattctatttcaagcaaaggcaacagtggaaaagtgattatcatagatgccgtaataaatgagaagctagatgacccggatatgacacaaacaaagcttagtttggacattattatgttgacgatgaatggaagagagagaacggaaaaagaatggaaacaactcttcatcgaagcaggattcaaacactacaaaatatttcccatctttggttttagatctctgattgaggtctatccttgaacatttttatgatgtgtatgtcacacttaacgtttatatttatgaacatcctcagacatcgttgtaattgtatttagtggtttgcgtgttgtttgctgaataaagctatgatgacatagcattatcaacttctggtggaattacattatgttcctccccgctatgttgttaaatgttctgtgtacggatttctcattcctatttggccaaaataaattgaataaacatgtaatggatgcaatcaatatacaatgttttggtatggctttacgtctttacctggcttttgtttc

SEQ ID NO: 4084 - DNA, 341 bp, Glycine max
gtcagataatacccacatccgaaaccaaatgggtttgctctgagaaccgaaatgggtgacgaacaaccgtcgaccaccgccgtctccggtctccgtcgagtcatcacgctcatctcttccttgatctccctctccctctcgatcagagtcttcgccggaaagtggcaacttatccggagcaggctggaggaactccactcggccctcgtcgccggagatgccacgtcactctccggcgagctcccggcgataacgggcacggcggaggagtgccacgagctggcgcggcagttcatggatcagtcctagagcggaaagcttcatacgcacatcgatgtgga

SEQ ID NO: 4085 - DNA, 434 bp, Glycine max
gtctttctattactatctcttctctctcacatcgctttcacttcctcaaaccccaacaccatcactctcccactctcccctctcctcaccaaaccccattcctcagactcagatccattccactctctcaaactcgccgcttccgcttccctaacccgggcccaccacctcaaacaccgcaacaacaactccccctccgtcgccacaaccccagcataccccaaatcctacggtggctactccatagatctcaacctcggaaccccaccccaaacctcccccttcgttctcgacacaggtagcagcctcgtttggttcccctgcacctcccgctacctctgctcccactgcaacttccccaacatcgaccccaccaaaatccccaccttcattccgaaaaactcctccaccgccaaactcctcggttgcagaaa

SEQ ID NO: 4086 - DNA, 988 bp, Glycine max
cgatcaacatttgtctctcatctttcaatttcaatcaacggttatacccttttctatttgagcatcatcatgtccaccgcagcgcagcccaaggccaagaaaacggcgtcgtccaagaagcccctctcccatcctaccttcgccgcgatgatagcggaggcgatagcgagtctgaaggagagaaccggttcgagccaatacgcgataaccaaattcatcgaaggcaagcacaaggagttgcctccaacctacaagaagcttgttctcgttcatctcaagaagtctgttgctgctggcaagctcgttaaggtcaaaaactctttcaagctcgcaccgactaagtctgctcctgttaaagccgctgctgctcccaagaagcccaccaaagctgcggctaagcccgccgccaagcccgcttccaagcccaaagctgctgcacctaagaagaaggctgttgccaaacccaaggccaaagctgcggccaccaagcccaaggccaagcccgctaaggccgcgccgaagaaggtcgccgctaagcctgcgaagaagactcccgtaaaggccgtgaagaagcccaagagcgtcgtgaagaaacctaaaagcgtgaaatctccagcgaaaaaggccaaggctaagaagtgagggattggagtgggttttagtttggcgttatagtgtttatgtatttcgggttgaatcgtagtataggtggatatatttttagaagagtattgatgtaaattcctttgctagaaattttaacaagtgttcttcttttgcattgaaaaaaaaaaaaaaaaaaaaaaaaaaaaaaaaaaaaaaaaaaaaaaaaaaaaaaaaaaaaaaaaaaaaaaaaaaaaaaaaaaaaaaaaaaacccccaaaaaaaaaaaaaaaaaaaaaaaaaaaaggggccctttttaagggcccaaatttttttccccgggttttgcaacttaaaactttttttttggggcccccaaattaaat

SEQ ID NO: 4087 - DNA, 900 bp, Glycine max
  unsure (1)..(900): unsure at all n locations
gatccacacctctctctctctctcagaatttctatctatctcttgtttcaatttcaacaacggttactcctttttcgttttgagtttcaatcaagccatcatcatgtctaccgcatcgcaacccaaggccaagaaaacggcgtcgtccaagaagcccctctcccaccctcccttcgccgtgatgatagcagaggcgattgcgagtctgaaagagagaaccggttcgagccaatacgcgataaccaaatacatcgaagggaagcacaaggagttgcctgcaacctacaagaagcttgtcctcgttcatctcaagaaatctgttgctgctggcaagcttgttaaggtgaaaaactcctttaagctcgcaccgactaagcctgctccggttaaggccgctgctcccaaaaagccaaccaaagctgccactaagcccgcttccaagcccaaagctgctactcctaagaaaaaggctgttgccaagcccaaggccaaagctgcggccacgactgccaagcccaagtctaagcccgctaaggtcgcggccaagaaggtcgctgctaagccagctaagaagaagacacccgtaaaggccgtgaagaagcccaagagtgtcgtgaagaaacctaagagcgtgaaatcaccagcgaagaagactaaggctaaggctaagaagtgatgatttggattggggtttggttttggtttggcgttatagttttatgcattccgggttcattcgtagtagtataggtgaatatatttttagaagagtattgatgtaaattcctttttctagaaattcaacaagtgttcttgtttgcattgaacacaatttcgttttctccaaaaaaaaaaaaaaaaaaannnnnnnnnaagcggccgctctagaggatccaagct

SEQ ID NO: 4088 - DNA, 400 bp, Glycine max
tttcttctcgtccgctctctctcagaatttctggcggtctcttgtttcaatttcaacggcggttactcctttttcgttttgagtttcaatcaagccatcatcatgtctaccgcatcgcaacccaaggccaagaaaacggcgtcgtccaagaagcccctctcccaccctcccttcgccgtggtactttcccaaaatactctccttcaaaatcaattctcttagtttatttcttttccaattgtatttaatttgattattctgtagatgatagcagaggcgattgcgagtctgaaagagagaaccggttcgagccaatacgcgataaccatatacatcgaagggaagcacatggagttgcctgcaacctacaagaagcttgtcctcgttcatctcaagaaat

SEQ ID NO: 4089 - DNA, 475 bp, Glycine max
tttatatgtactgtacctctttattaatttggggttgcatgttctaaacaaatttgaactcgcgcggtggctgctcaaattcaacagacacatccatctcatcctcacctcagtatcataagaataataagctcttgtcactgttacaaaaggaacttcatttaccagcttcgctttcgaatttcaatttccaggaagaagaaaaagatggtgattgaggagggcgagatgaagtcccaaggtgaggtggaatcatggctccagcaagaagcgaagaagaaccaccattctccattattctcatcttcttcatatctgggaagacaaacatcatcgatatactctctcacactggacgagttccagcacagtctatgcgagagcggcaagaacttcggctccatgaacatggacgagttcctcagcagcatctggaacgctgaagagaacagccaagccatcaccaacaacaacg

SEQ ID NO: 4090 - DNA, 823 bp, Glycine max
actatagataaataatgaagatgatcccttcttcagaatccctgctttccttttttgacttaaatacttcttatgcaactatagtgaggctaagagattggtccataattaatcaaaatgttggctatattccacaaagcttttgctcatccacctgaagagctcaacagccctgcatcttacaaaggttccaagaagcctaaggttcccgaggaaactctcaaagatttcctttcccaccatcctcacaacacttgctctatgagctttggtgatgctgctgttctagcttatgtccgtcctgatcaatctttctctcgtcatcaaaggctgttttgtgggatcgatgacatatattgtctcttcttggggagcttgaacaacttgtccctactcaacaagcaatatggattgtcaaagagtactgatgaggccatgtttgttattgaagcttacaagacactccgtgaccggggtccataccctgcagatcaagttgtcaaggagcttgatggcagttttgcctttgttgtctatgacagcaaggttggcagtgtctttgcagcactgggttctgatggtggaattaagctgtattggggtattgcagctgatggatctgtggtaatctcggatgatctagatgtcatgaaagaggggtgcgccaaatcctttgctccctttccaccaggtaccatttggaccaggaccaccatgcattactcaaactgttcaagtcacagtagtttacaaagaattttcaataagcacttaaacatatagaatcactttatcctctaacaatacactaagaaaaaagaag

SEQ ID NO: 4091 - DNA, 1981 bp, Glycine max
ggacacacatgggcaaaaaagaagtgtccaggttcatcctcctgaaccagtctctgtcgaagaaggaaggccctttatatataaaaacctaaactcgtattgttctgagcaacccaggttgtctgttacggattagcatcaaagcaagttaacaaaatttgggtgcgtcctggattgacccttttgccccctctccctcaccctccactaactcctcctttttggtttttataaagcacattcccaatagaggagggtccctacacaacacaacccttcaatgacgtccatggccactttcttcgcccaaacctccttcccctcccactctctctccaaaaccttcgatacccatttcgcccctgccccgaaagtcaacgtctttgtgaacttcagggcgaggaggcacgttggggtgcgagtttcgaacgcgctgatcgaaccagatggagggaagctcgtggagcttgtggtgacggattttgagagggatttgaagaagggtgaggctctttcgttgccgaggatcaagctctcaaggattgaccttgagtgggtccatgtcctcagcgaaggatgggccacacccctgaaaggcttcatgagagaagccgagttcctccaaacgcttcatttcaactcgctccgactcgatgatgggtcggtcgtgaacatgtcagtgcccatcgtgctggctattgatgatgcgcagaagcatcggatcggggataacaaaaaggttgctctttttgattccaagggagaccccgttgcaattctcaataatattgagatttataagcatcctaaagaagaaagaatagcccgaacttggggaaccattgcccctggcctaccttatgttgaacaaactataaccaatgctggaaattggttgattgggggtgacctagaggtcattgaaccaattcagtacaatgatggacttgatcattttcgtctatctccgacacaactccgtgcagagttcacaaggcgcaatgcggatgctgtgtttgccttccagctccggaatcctgttcacaatggccatgctttgctaatgactgacacccgaaagcgccttcttgagatgggctataagaatcctgtcctcttgcttcatccacttggaggctacaccaaagctgatgatgtcccacttgattggcgaatgaagcaacatgagaaggtacttgaggatggtgttcttgatccagagacaactgtggtatccatattcccatctcccatgcactatgctggacccacggaggtgcagtggcatgcaaaggctaggatcaatgcaggggctaacttctatatcgttggtcgtgaccccgcaggcatgagccatccagttgagaaaagagatctgtatgatgctgaccatggaaagaaagtattgagcatggcaccgggactagagcgtctaaacattcttcctttcagggttgctgcatatgacaagactcagggtaaaatggcattctttgacccttcaaggcctcaggacttcctgttcatatcaggcacaaagatgcgcacactggcaaggaacaaagaaagtcctcctgatggatttatgtgccctggtggatggaaggtgctggttgattactatgatagcttagtactctcaagcaacggcaaagtgcaggaagctgttccagcttaatcttgtatcatatcataatgtatatatctcatgattgggagaaaccttaagcttatgtattctcctgctaagacatacttcacgaggatcctctggcccaatctaataataataataaattaaaactttggggaggcacaagcacggacacattgcctctctctgtatgtatggcatttagacagcctcttgcacttatggtgcaattgtgcatgccaactctctgtaatataatgtggttgtgctaaggatttggtttgatcaaaaaaaaaaaaaaaaaaacttgagactagttctcctcgt

SEQ ID NO: 4092 - DNA, 467 bp, Glycine max
aaacacactgctgaaaaccctagctataaatttctacacccaccgacggcagaaaccctagtagtagttttgaaagggaaggaaagatgcagatattcgtgaaaaccctaaccgggaagacaatcacccttgaggtggagtcaagcgacaccattgacaatgtcaaagccaagattcaggacaaagaagggattcctccggatcagcagaggttgatcttcgccgggaaacagctggaggatggccgtaccctcgccgattacaacatccaaaaagagtcaacattgcatcttgttttgaggcttcgtggtggtattattgagccatctttgatggcactggcgaggaaatataaccaggataagatgatctgccgcaagtgctatgcccgtttacacccccgtgctgtgaactgcaggaaaaagaagtgtggtcacagcaaccagttgaggccaaagaagaagatc

SEQ ID NO: 4093 - DNA, 633 bp, Glycine max
tgttctatatcgcgagctgccgctcgcgatctagaacgtggagctattacaatttgtccctactcaacaagcaatatggattgtcaaagagtactactgaggccatgtttgtgattgaagcttacaagacactccgtgaccggggtccataccctgcagatcaagttgtcaaggagcttgatggcagttttgcctttgttgtctatgacagcaaggttggcagtgtctttgcagcactgggttctgatggaggagtgaagctgtattggggtattgcagctgatggatctgtggtgatctctgatgatctagaagtcataaaagagggttgtgccaaatcctttgctccctttccaacagggtgtatgtttcacagtgaaggaggtctgatgagctttgagcatccaatgaacaagttgaaggcaatgccaagagtggacagtgaaggggccatgtgtggggccaacttcaaagttgataagttcgccagagtcaacagcattcctcgagtgggaagtcaatccaattggatggaatgggaccaacattagcttaaaaataaagccttaggataatgtaaaataaaaaaaaaaatgtcatctatgtatgttcctttcctaacttaccattctg

SEQ ID NO: 4094 - DNA, 595 bp, Glycine max
aagacgacagaaggggataacaatccctattaaaatcttctaaaattaaattaccatatatagtcacattttctttacactttgtgaggtctaaaatgttgtccatttttcacaaggggtttgctcacccacctgaagagcttaaaagccctgcatctaacagtggctccaacaagcctaagattcctgaggaaactctaagagaatttctttctcatcatccccataacactttttctctgagttttggtcactctgctgttctagcttatactcgtcctgatccaccttcctttgttcatcaaaggttgttttgtgggattgatgacatatactgtatctttttggggagcttgaacaatttgtgctcactcaacaagcagtatggtttggcaaagggcaccaacgaagccatgtttgtgattgaagcttacaagacactccgtgacaacttgatctgcagggtatggacccccagatattcgtgaaaaccctaaccgggaagaccatcacccttgaggtggagtcaagcgacaccattgacaatgtcaaagccaagattcaggacaaagaagggattcctccggatcagcag

SEQ ID NO: 4095 - DNA, 705 bp, Glycine max
catatgacaagactcagggtaaaatggcattctttgacccttcaaggcctcaggacttcctgttcatatcaggcacaaagatgcgcacactggcaaggaccaaagaaagccctcctgatggatttatgtgccctggtggttggaaggtactggttgaatactatgatagcttagtactctcaagcaatggcaaagtgccggaagctgttccagcttaatcttgtattataatgtatatctcatgattgggagaaaccttaagctttatgtattctcctgctaagatacatactcctggcccaatttaataataataataataattaaaactctggggaggcacaggcacagatacattgcctctctctgtatgtatggcattagacagcctcttgcacttatggtgcaattgtgcatgccaactctctgtaatataatgaatgtggttgtgctaaggaggatttggttaaaaaaaaaacctcgtttttttgacttaaatcctttttatgcaactatagggaggctaaaagttggggcataattaatcaaaatgttggccatattccacaaagcttttgctcatccacctgaaaagctgaacagtcctgcattttacaaaggttccaagaagcctaaggttcctgaggaaactttaaaagatttcctttcccaccatcctcacaacacttgctccatgagctttgg

SEQ ID NO: 4096 - DNA, 284 bp, Glycine max
ccccccggctcgaggttacggatcagcaccacagcaagttcacaaaatttcggtgcgtcctggattgacccttctgcccctcctcctccactaactcgccttgtctggcttttataaagcacattcccatagggaccaactacaacacaacccttcaatcgcgtccatggccactttcttcacccaaacctccttcccctcccactctctctccaaaaccttcgatacccatttcgccccatccccgaaagtcaacgtatttgcgaacttcccggcgaggaggc

SEQ ID NO: 4097 - DNA, 437 bp, Glycine max
gtctatcaactctaggtctaggtagtgattccctgcaatctagtgccattgcaagaggttctgtcgtggattatccacaggcaattactccattacacccttatcaaactactcctgtgaggaattttcttggacataacacaccttggatgtcccaaaccccccttcgagggccatggattgcttctccaactcctgcacctgacaatagcccccagatttctgcatcacctgcctcagatacaattaagctaggatcagtcaaaggatctctgcctccttcctctggcataaagaatgttacttctggtgtctctacttccagtacaggtttgcaaagtatctttacaggaactgcctctctgcttgatgcaaacaacgtgacagtatcacctgctcaacacaattcagatccaaagcccaaaaaaaaaaaaaaa

SEQ ID NO: 4098 - DNA, 1006 bp, Glycine max
ctcggttggaaagaaaggtatcttcgtttgctttatatctcctgaagcagaacatcacctttcctatttactcactgtgtgatctaatcttcttctatgggttggcttagtcggttcataactgccgtggctttcttagccatcggagtgatattctcaccggagacactggggtcaaaatcaaccacactttccacctacctcaaactcgctcacctcctctgcttctccaccgccttcggcgccgctctgtgggtaacattcatcggcggcatcatcatgtttaaaaatctgccgcggcatcagtttgggaacctgcaaagcaagatgtttccggcgtatttctcgatggtgggtgtctgctgcgccgtatcggtggcttcctttggctaccttcacccgtggaaaacttcctccaccactgagagataccaacttgggtttttgctctcttcctttgcgttcaatcttaccaacttgtttgtctttacacccatgaccattgagatgatgaagcagaggcataaagtggagagagaaaataatataggggaagaagttgggtggtcaaaaaatgtagaagttgcaaagtcaaacccaaagcttgcagccatgaataagaagtttggtatgattcatggattatcttcccttgccaatataatgtcgtttggcagtctagcaatacactcttggtacttggcaggtaaaattgatctctgattcagtttctgcttccaattctatgaaagacaagtgagtttcttgtgaagagatgtataagtgaggatctcagtgttctctctatcttccactttcttgctttattgccaagtaaaaagagtctagaatgtctgtgcaatttatgaaatgtactatctaagtattacagcatattgattggtcaagaaaatcttatgggttgccatggaaacataatgtaatcatcctacctcacatgaataaaataagtagtctctttgagacggtttacattttggacaaa

SEQ ID NO: 4099 - DNA, 377 bp, Glycine max
tgtttctagagatagggaaaatgtccaaatacagtggtgctgaaacaatggctagctttgcttttattctatttgttttatcttggatcatattgcgcctcatttactacccattctggattctttggagtacaagctatgaagttctgctcactttggataaggaaaagcaccgagtggatggtccaatatattattatgtgttcaatagtcttctgtactgcttgcttgttatgcatatttattggtgggtgctgatatttcggatgcttgttaaacaaatccaagcaagaggaaaagttagtgaagatgttcgatctggttcggtggatgatgctttctgtgcaaggctttcttatgtaaactttccattgact

SEQ ID NO: 4100 - DNA, 1095 bp, Glycine max
gagtttcaggctgtgtcttctcttgttttttgcaaattcgcaacccacacagcaagggaaggtgcgagtgagtgagtatggcgtctccattatcagctcaattggttcaatgtcagaactcacttccacctcttcagggtaattttagccaagatgtgtctaaggttcaaaggtcgcgtgtggtatgttacggtaccagatcaccgcttggttattatggtaaagcattgacatcaagatcacataacgccctgaggttttctgtcacgcgacaatctgaagcacggtcaattggatataggagaatgacatgtgtcaatgctgcagacaatgttgtagagcttcaagccaaggtgacaaccaagtgtttctttgatgtagaagttgggggtgaccatgtggcagagattgttatgcgcctatatggagaggtgtttcctaaaaccgtgaaaatttccgtgctttgtgcacaggtgagaaaggatatggttacaaaggaagctccttccatcgtataatcaaagatatcatgattcagggaggagactttacagaaggaaatggaactggtggaattagtatctatggtcctagttttaaagatgagagttttgccttaaagcatgtcggtcctggagttctgagcatggcaaatgctggtcctaatactaatgggagtcaatttttcatttgcactgtaaagactccatggctagacaatcgtcacgttgtatttgaacatatcattgatggaatggatgttgtgaagacacttgaatcccaggagacgagtaggttagatgtccctcgaaagccttgcagaattgttaattgcggagaactgcctatagagggttgatctttacgtggaagtacaacacttttcttctgattttcagttcagtttccaatgttctgattgtcccttattaatcatgttaatgtgtctggattatcattagtggctgccaaattggttgacaaacggagacagagtggagataccacatccatattttgtatgactagactcatgcttaattcttataacaatagtattcacttttccaaaaagtgcctttgtgttccacaagg

SEQ ID NO: 4101 - DNA, 861 bp, Glycine max
ctttgtttgggctgcccaaccggtttataaacacgaggaagttttagaagaacaatggaaagagatgcttaatcttactaatcgtctatgctggaagttattgaaaaaagatgggtatgtcgcaatatggcagaaaccttctgacaatagctgctatctaaaccgtgaggcaggaactcaaccaccactgtgtgacccaagtgatgacctcgacaatgtttggtatgttaatctaaaatcatgcatctctcaattgcctgagaatggatatggagcaaatgttgcccgatggcctgtacgcttgcatacaccacctgataggcttcaaagcataaaatttgatgctttcatatccagaaatgagctttttagggcagaatcaaaatattggcatgagataataggaggctatgtacgtgctttacgctggaagaagatgagattaagaaatgttatggacatgagagctggttttggaggatttgcagctgcactgattgatcagagtatggacagctgggttatgaatgtggttcctgttagtggtccaaacaccttgcctgtcatatatgaccgtgggctgattggagttatgcatgactggtgtgaaccatttgacacctacccgagaacctatgatttactgcatgctgcaaacctgctttctgttgagaagaaaagatgcaatttgtcatcaattatgcttgagatggatcggatactacgacccggtggacgtgtatacatccgcgattctcttgatatcatcgatgaacttcaagagattgcaaaagcaataggctggtacgtgatgttgcgagacacggaggaggggcctcatgcaagttatagggtattggt

SEQ ID NO: 4102 - DNA, 1506 bp, Glycine max
gtcaagaaggtcaacgaatctggtttaggtgccgggcttaaagttacgggttggcttaactgggccagaaagcccaaaggattaggacagtgagatcccataaaaacaaaacaaaaggacaaaacgacagcacttcttctcttctctcatttttcagtttctcagtttcttattcgttaatcgttagatctcatcttacactcaccggcgagtccatctcgcgccaccgtcgactcagctccggccatcgccgttggttccctcactttctcactcttcttcttcttcttcttcttcttcttcttcttcttcttctcagcggaaatatgccttctcagaaggttgaaacgggtcatcaagacacggtccatgatgttgcaatggattactatggtaagaggctggccacggcttcatcagatcacacaatcaagataattggggtgagcaactcggcctctcagcatctagcaaccttgaccggtcaccaaggacctgtatggcaagtggtgtgggctcaccctaagtttggttctctacttgcgtcttgttcctatgatggccgtgtcattgtttggaaggagggcaaccaaaatgaatggactcaagctcatgtgtttgatgaccacaagtcatctgtgaattcggttgcttgggcgcctcacgagttgggtctctgcttggcttgtggctcatctgatgggaatatatctgttttcactgcaagagcagatggtggctgggacactgcgaggaattgatcaggctcatccagttggtgtcacttcggtgtcatgggcgccatcgatggcacccggagcccttgtcggtgcagggttgcttgatcctgtacagaagctgtgctctggtggttgtgataatactgtgaaggtatggaagctaaacaatggactctggaagatggactgcttccctgctcttcagatgcacacggattgggttcgagatgttgcttgggcacccaatttagggctccctaaatctaccattgctagtgcatcgcaggacggtaaagtgattatatggaccgtggcgaaagagggggatcagtgggaaggcaaggttttgaatgatttcaagacccctgtttggagggtctcatggtcattgacaggaaacatactggctgtggctgatgggaacaacaatgtgacattgtggaaggaagcagtagatggggaatggcaacaggtgacaacagtggagccttagaatgtgatttttccttttgaaaatggttagaattttcgttttgaaatatagttgacatcttgtttctttgcatattatacagttgattaattgtgcttcataatgcactaagttccttgacgtttgtgatccattgagtattctgtgcttggaagaatgaagttgattagtttgagttgttttaagatttagaatgatgttttctaagtatataatgtgacaatgtcttatattccggagttgcataattaatggctgttgcgtttaattttg

SEQ ID NO: 4103 - DNA, 472 bp, Glycine max
cctccactcgttttttcagtttatcagtttctcaatcgttagatctcatcttatactcaccggcgagtccatctcgcgccagcgtcgacgccgctccggccaccgctccggccaccgcctttggttccctcactttctcgtccttcttcttctcagaaatatgccttctcagaaagttgaaacgggtcatcaagacacggtccatgatgttgcaatggattactatggtaagaggctggccacggcttcatcagatcacacaattaagataattggggtgagtaatacggcctctcagcatctcgcaacattgactggtcaccaaggacctgtttggcaagtggcgtgggctcaccctaagtttggttctctacttgcatcgtgttcctatgatggtcgtgtcattgtttggaaggagggcaaccaaaatgaatggactcaagctcatgtgtttgatgaccacaagtcatct

SEQ ID NO: 4104 - DNA, 435 bp, Glycine max
aattcggggccgaccacgcgtcaacacgcttcttctttttctcttctctcatttttcagtttctcagtttcttattcgttagatctcatcttacactcaccgtcaagttcgtctcgcgccaccgtcgacgcagctccggccaccgcctttggttccctcactttctcgctccttcttcttctcagaaatatgccttctcagaaggttgaaacgggtcatcaagacacggtccatgatgttgcgatggattactatggtaagaggctggccacggcttcatcagatcacacaattaagataattggggtcagcaacacggcctcccagcatctagcaactttgactggtcaccaaggacctgtatggcaagtggtgtgggctcaccctaagtttggttctcttcttgcgtcatgttcctatgatggtcgtgtcatt

SEQ ID NO: 4105 - DNA, 539 bp, Glycine max
  unsure (1)..(539): unsure at all n locations
cacacacaccacctttctccactttgtacataaaggggcgtaaacccctttgaacctgttaaccacgcaaagtccaaaatctgcacaagaactcgccggagaaaaaaaaaagaatgatcgacagagggaaaacgtcggtcgccgtcgtgtactccgacggaaaccgcgagatcaatgtcggcacggtcgtggtggaccccacgctcaactttaagagcctcgtcacgctcctcagccagcagatcgggatctcgccgcaccagttctccgtctacctcgccgccgtcggcaccgaccgcaagattccggtcacgtccaagctcaacctcgccgccgtgcgccgcgacggcgccgcgcactacttcttcgtgaagcgctccaagcgcaacaagaaggcgaacggaagcggaaagcggaaaggacgccatgaagaagaattaccctcgtcctccgccggagaaggtcatgctcctncgccgtgccgatgccggagctccgcctttcatgccgccggttctgaatcgggcgcagtacgagcg

SEQ ID NO: 4106 - DNA, 791 bp, Glycine max
  unsure (1)..(791): unsure at all n locations
cgagccgaatcggctcgagtccaagaactcgccgaagaacaccgtgataatgatcgacgctggaagcacgtcggtcgacgtcgtgtactccgacggcagccgcgagatcaacgtcggcaccgttgcggtggacccacgctcatttcaagagctgctcacgctcctcagccacggatcgggatctcgcgnaccagttctccgtctacctcgcgccgtcggtatcgccgcaagattcggtcacggcgagctcatctcgccctgtgagccgcgacgggcgctcactattcttcgtgagcgctccagcgcaacaagaaggcgaacggaaacggaaaggacgccgcaaagaagaatcatcatcatcctcggccggagaatgtcatgctcctccgccgcgccgccgcctccgctgtcagagatccgccgcttgtgccgccgattctgattcccgcgcagtacgagagaaggctgatgactttgcagatcgagagacagtcttatctgatgaacatgaaagtcggagtcaacggcggcgccgctgaaagagaattttcaaacacctccaccgccgccgtcaccgccgcgtgcgacggatgttcaaaggcaaaaatcaccggaattaacggcggctttcacctctgcgtgcacgacgcagtaacggtagggttccggtcaccggcgggaccgattacacggccggcgaagaccgccggcgaagccggcccttgaattctggaggcagttgtgttttgtttcgtttctctcttcaagaaagagaaagaattgtgcataag

SEQ ID NO: 4107 - DNA, 982 bp, Glycine max
gccatggattatccaggatttggtctctcagaaggactccattgctatattcatagttttgatggacttgttgatgatgtcattgagcattactcaaaaatcaaagaaaatccagagttccattctcttcccagcttcctatttggacagtccatgggtggagctgttgcattaaagatacacctgaaacagcctaaggcatgggatggtgccattcttgttgcgcctatgtgtaaaattgcagatgacatggttccaccaaaattcctcactcatatcctgattgggttagccaatgttttaccgaagcataagttacttccaaacaaggatttagcagaagcagcattcagagatttgaagaagagggaacagactgcttacaatgttgttgcttacaaggataaaccacgtttgaagagtgctgtagaaatgcttaaaactaccgaagaaatagaacagcgattgaaagaagtttctctaccaatattcatccttcacggggaagctgacactgtgactgatccatcagtgagcaaagccttgtatgagaatgcaagctgttcagacaagaagcttcagctttacaaggatgcctatcatgcacttcttgagggtgagcctgatgaaataataactcaagtttttggtgacatcatatcttggctagatgagcacagcttgacacacaatcaatcttcctcttaataccgattaattatttttgctctctggattcaaaagatgaatattcattcagcttgttttcagcaatggaaaatagaaagttgctattgtttccataaaagtaactagagtatcaaattttgagcttgtctgttgtttgcaacttaagtcagttactagacataaccttgtttttatgtaaagaacctattttttttttcgataagctatgtaaataacatataatgtttatatctttacttaataaagaaaagaaaatatagtaggaacacag

SEQ ID NO: 4108 - DNA, 720 bp, Glycine max
tgacattgatcctgagagggaaaaagaggaaaaagagaaggctgaaagccaaaatatccgcgcaaatgtgcttcttaaccgaaagcgtgagaaggtgaatcggaagtatactccttcacgtaagagggatgaggatactgagccagagtatgaggatgaggaagaagaggaagaacactatgaagaagctgaacaagttaatgatgcatcagatgaggaggaagaggaggaaccaaagcagaagaacaaggagtttagaggcagtgccaaaaggaagggatttgaatctgatgaggactctcctccaaggaaaacaaccacccatcggcggatggcggttgtgtacgatagtgatgaggactaaacttccttaagctagattttcatgggaagtgcagctatctgatgcagcaaaggcagagatggctcttagttccccccatatatagctacatttttaatatttcatccttatatacataaagcagagcctgggacactaaagtagtgtttattctcaggtcacaatatatgtttttttgactgtcttgttaatggtgataaaagaaattcagtgtaaataagtttgtttttctgtattttccgatcacaaattttcgtccaaggggcaggtaatggttgacaagtgccggacctaaggaacttgttctaggtccttcccttttttactttatcaaatgaataaagtcattacatagc

SEQ ID NO: 4109 - DNA, 502 bp, Glycine max
ccttgtgtttttcctttcgggattggtttctatggcttctgaagtaatagagttccgatgctttgttggtgggcttgcttgggccaccgaccacgatgctctcgagaaagccttctctcaatttggcgaaatcgtcgaatcgaaggtcatcaacgatcgtgaaactggaagatccagagggtttggatttgtgaccttcgccacagagcaggcgatgagagacgcaattgaaggaatgaacggccagaacctcgacggtcgtaatataaccgtgaacgaggctcaatcccgtggaaaaggtggcggcggcggcggcggcggctacggaggaggtggtggtggttacggtggcggcggaggttacagccgcggtggaggaggatatggtggcggaggaggccgccgtgaaggtggttataaccgcaacggtggtggaggaggatatggtggcggtggcggcggatatggaggtggtggaggttatggtggcggtcggagagac

SEQ ID NO: 4110 - DNA, 412 bp, Glycine max
atttcctttcgggattggtttctatggcttctgaagtaatagagtaccgatgctttgtcggtgggcttgcttgggccaccgacagcgatgctctcgagaaagccttctctcattatggttatcatcgatcgtgaaactggaagatcgagagggtttggatttgtgaccttcgcctcggagcaggcgatgaaagacgcaatcgaaggaatgaacggtcagaacctcgacggtcgtagtatcacagtgaacgaagcacaatcccgtggaagaggcgcggtggtggacgtggatacggaggtggtggtggttatggcggcagcggttacagccgcggtggaggaggatatggaggaggaggccgccgtgaaggtggtggaggtggctataaccgcaacggtggaggtggtggata

SEQ ID NO: 4111 - DNA, 597 bp, Glycine max
gaagacgacagaaggggacctcaacattctcacattccatcaccaaagcagtgtagttttccgttgtcactgccatggctttcaaaaaagtactattccaatatttcactctggctttgtgtcttgtcttcgcattttgtgcttttgagggcaatgctcgcactctcgaagatgctccaatgcgtgagaggcatgagcagtggatggctatacatggaaaagtctacacgcactcttatgagaaagagcagaaataccagacattcaaagaaaacgtgcaacgtatagaagcctttaaccatgcgggaaacaaaccttacaagctaggcatcaaccattttgctgatctcacaaacgaggaattcaaagccataaatagattcaagggtcatgtgtgctccaaaataacacggacacccacatttaggtatgaaaatatgacagcagtgccagctacattggattggagacaggaaggagctgtcacacccatcaaggaccaaggccaatgtggatgttgctgggcattttctgctgtggcagcaacagaaggaatcaccaagctgagtactggcaaattgatttctttatcagaac

SEQ ID NO: 4112 - DNA, 694 bp, Glycine max
cccacgcgtccgcccacgcgttcgcaaaaaatggcttctagttcagaatctcaatctcagtctaaaccgctccaagaccgagttgcaatcgtcaccggctcgtcccgcggaatcggccgagaaatcgcgcttcacctcgcctcactcggcgcgcgactcgtcgtcaactacacctccaactcggcccaagccgactcagtcgcggcgcagatcaacgccggttccgccaccacgacaccgcgcgccgtcgtggtccaagccgacgtgtccgatccggctcaggtgaagtcgctcttcgactcggccgagcgcgccttcgactcgccgatccacatccttgtcaactcggcgggcgtgatcgacggcacgtatccctccgtcgccgacaccaccgtggagtccttcgaccgcactttcgcggtgaacgcgcgtggcgccttcgcgtgcgccagggaggccgcgaaccgcctcaagcgcggcggcggagggcggatcattctactgacgacatcgcaggtggtggcgctgaggccggggtacggggcgtacgcggcgtcgaaggcggcggtggaggcaatggtgaagatcctggcgaaggaactgaaagggacgcagataacgggcgaattgcgttgcgccgggaccgattggcgacaggaatgttttcgggggtaagacggggggagtggtgaat

SEQ ID NO: 4113 - DNA, 788 bp, Glycine max
ccgaaagaagagaaaataataatatgaataacaacccacaaaacttgggtcttgcaaattaagttcattttcctccctttcactctcgtagacatcacaaaccttccctccattcatcccacgcatggctgccatgaactctagcgtattggcctgtagctatgccatatcaggtgcagcgtgttcggagctcaatgggaaggtcacttccgtggcctatgttgcatgctctggctacaagttgccattgatcaaagctgaggccagagttcctaaagccaaagaatctgaaggaggaaggagaggtgcccttgttctcttggcagctacccttttcacctctgcagcttccaattcttctgccaatgctgggatcattgaagattaccttgagaggagcaaggccaacaaggaattgaatgacaagaagaggttagctactactggagcaaactttgcaagagcatacaccgtggaattcggtagttgcaagttccctgagaacttcactggttgccaagatcttgccaaacaaaagaaagtgccattccttagtgacgatttggagcttgaatgcgaaggaaaggacaaatacaagtgcggttctaatgttttctggaaatggtgaaaggaggcaaccttttatgcccaactgcgaattattcgctttgcgatgtacctaactgcttgaatatataccatatttttctgcattgatttattattatattgttgctgttggattttatttgttgaaaaaaatgtgtgcattaggcggctatttactc

SEQ ID NO: 4114 - DNA, 491 bp, Glycine max
gagcgccaagccaaagaaaagataatactaatactaacaataacaacccacgaagcttaggccttgcaaagtaagttcatttgactctcacaaaccttgcatccatccacacatggctggcatgaactctagcgtattggcctgtagctatgccatatctggtgcagcatgctccgagctcaatgggaaggtcacttccgtggcctctgttgcatcctctggctacaagttgccattgatcaaatgtgaggccagagttcccaaagccaaagaatctgaaggaaggagaggtgcccttgttctcttggcagctacccttttcatctctgcagcctccaattcttctgccaatgctgggatcattgatgattaccttgagaggagcaaggctaacaaggaattgaatgacaagaagaggttagctactactggagcaaactttgcaagagcatacaccgtggaattcggtagttgcaagttccctgagaaac

SEQ ID NO: 4115 - DNA, 417 bp, Glycine max
tagcctccttacattctgacccagcttggctttcatacttgttttgtgtggcagagcaagagagagcgcaatggaaggtatctcagtgggtttgaagaagtactggagaagaagcattaggggataccaaagattacacgtctcggatcggcgaaagaaggaaacggttcagcttggaggcagccagagaaggaggagatggcgcataaagttagctcgtaagatcagaattcccaaaatctcttctccaaagaaattggtgctgtgggtcagagacgcctacgtcaggatgatgctgggtatggctaactccatgggtgcctccgccgtcggctacggcggagacgccgcgttcaccgccaagggtggattcgagagggccccaccgcccaaggagtacgaccagaagatgatcat

SEQ ID NO: 4116 - DNA, 2771 bp, Glycine max
acgagcagagacggatctcttcctattgttctcgctttgtttcttttgcagtagcatcatcatcatcaccataccttgttcagattctgctcactttcaccacaacggctttactatttaccgcgtttagttttcgtgtcaccgcaaataatgaaaggaggtgttccctgtatccactcctcgtcagggaagatctgaagcagcgctagctgctcacgtcctctaatggacgccgactcctccggcgaagaagtggttgttaagactagaaaaccatatactatcactaagcaaagggaacgatggacagaggaggagcataacaggtttctagaagccttgaagctacacgggcgagcatggcagcgcatagaagagcatataggaacaaagactgctgtgcaaatcaggagtcatgctcagaaattctttacaaagttggagaaagaggcctttgtaaagggtgttccaataggacaagctcttgatatagacatcccccctccacggcccaaaagaaagccaaacaatccttatcctcggaagaccaatgattggtgccccaacattacatagcggagcaaggcatggaaagcctctcatttcaattgtatcttcacatggtaaacaagcactggacttggagaaagaaccacttccagagaagcatgatgtcgacctaaggccatcaaccgtaaaagaaaataaggaccaaagctgctcaaaagtatttaccattctccaagaggcaccctgttcatctgtatcttccgccaacaagaattcaacatcaatattagtgccgctgagaaattcatgtgccctaaggaagtttataccttcggtgaaagaggtaataactcgagatgaaaccaacgaatcttttgttactgatgagcttgaaaatcagaagttggagatagatgatggcaagcacactcaaaagactaatggcacttgtaaagtctctaagttggagaattctggtgctttacatatgaattggttcaaactgagaaaacagatggtcttaattgtgcattaacaatagatggggtgcaaggcaatcagaattaccctaggcatgttactgtgcacgttgttgatgggaaccttggaacaaatactcaaaatccatcacaagatatgttgtttcgagattccatgtttcagccaataggaggggttaacgggcaacgaaatgtttttaccaatacagctccatcgaacacaagtgaaagtcaaaataacactgcacgatcttctgttcatcaatcatttcttccttatcctcccttcacacaacacaaccaagacgattaccaatcatttcttcacatgtcttcaacattttcaaatcttattgtctctaccttgatgcaaaacccagcagctcatgctgctgcaagtttcgctgctacattttggccgtatgcaaatccagaaacttcagcaaattctcctaggtgctcccaaggaggttttacaaatagacaaattggttcccctccaagcgttgcagctattgcagctgctactgtagcagctgcaactgcatggtgggcagctcatggattgcttcctttgtgtgctcctcttcatacttcttttgcctgtcctgcatcagtgactacagttccatcaatgaataccggtgaagcaccggctctgaaggcagagcaagaaaagactactctacaaaatcctcctcttcaagatcagatgctggatccagaatactcggaagctcaacaagctcaacattcagcttcaaagtcaccagctgccattttatcagattctgagagtggagatgccaagttaaatacttcatcaaaggctactgatcatgagacgaacaaaacaatttctgagcaccttgattccaacaaaacaaagggcagaaaaccggttgaccgttcctcatgtggttccaacacggcctctagcagcgatgtggaaactgatgcactagagaagggtgagaaagggaaggaagagcctgaaatacctgatgcgaacgttttagataccgagcttagtaatcgtcgaagtagaagcattagcaaccttactgattcttggaaagaggtctctgaagaggggagactggcctttcaggctctattctccagagaggtgttgcctcaaagcttttcacctcctcatgctttgaagaatacggatcatcaaatggacaacgccaatgataacaagcaaaacatagatgacaaagatgaagatcttgacggcaagaaatgcagttctaattatgaagcgatgcagaaaaacctgctatttgtagaaaataacgagggactgttaaccatagggcttggacaaggaaagcttaagactcatcgaacaggttttaaaccctacaaaagatgttccatggaggccaaggaaaatagggttggagcaagcagcaatcaaggtgaagagcaaggttgtaagagaatacgtttggaaggggagacttcgacttgaggttcgatatatgcagtaacataaaggcaacctttggtttttgcatatcatttctttatccctccaacggtgtacctatattgtatgtttatttctaattctgcagctcacgaaacttgtcgtgtagatgtgtgtaccgtattaaattactgtgtacgctcttttactatctttgtatgatgttaatgctgtttaaaactccgctaaatagacttagataagaaacattaagtattgtttgagccatgaacatcaagtaatttatgatccttcattcagcc

SEQ ID NO: 4117 - DNA, 862 bp, Glycine max
gtcgaaaggaggggttaatgggcaacctaaccttgtcaccatttctgctacatcaaacataagtgaaagtcaaaacaacactgcacggtcctctattcatcaatcatttcctccttgtcctaccttcacacaggatgattatcattcatttcttcaggtgtcctccacattttcaagtcttattgtctctaccttgctgcaaaaccctgcagcccatgctgcagcgagttttgctgctacattttggccatatgcaaatgcagaaacttctggagattctcccgtgtggactccagattttccatacagccaaattggctcgcctcgaagtgtgacagctattgcagctgctacagtagctgctgcaactgcatggcgggctgcccatggactgcttcctttatgtggtccactccatacagcttttgcctgtcctcctgctgcagcagcaactacagttccatcaatgattattgatgaatcaccacaaaaaacagaacgaggagagattaaaccacaaaatcctcctctgcaagatcagataccggatccagaacactcggaagctcaacattcagctcctaagtcaccagctgtttcttcatccaaatctgaggataggggagatgccaatttagatacttcaccaaaggctactaatcatgagatgaaccaagcaatttctgagaaccccgattccaacaaaatgaagggcagaaaacctgtagaccgttcctcatgtggttccaacacaacctctagcagtgaagagactgagttactagagaaggatgagaaagaaaaggaagagcccaaaacacctgatgcgaacgttttagataccgagcttagtaatcgtcga

SEQ ID NO: 4118 - DNA, 565 bp, Glycine max
attctagtggctgatattgcttctgcttcctttgttgtagttgaagtcgctcccctcattcttctttcgttgctacttctactggttcttcctccgatccctcattgccgcaaatgactcctcctgctagtgttaggtgaattccctcgcttcacatgcatgatcgcaccttcaactctcttcttcttcttcttctccatggctttttttcaaggttttggcgccgtggagttcgttttggtgaggattctgattaaagagttttcttttattctttcggagaagcgtctctgtctctctgttgcggtggattcttaaaatttgctaaatctttttttctctattactatcctgcgtgtggcttgtgattggaatgcttagagttataattgctgttaccaaacagagacggatctctacctattgttcttgctttctgtttcttttgcagtagcatcaccttatcatcagcttctgcttgctttcaccacaacggcctcactatttggtgtgttccatgtcacaaaaaacgaaaggagatatcccttttacccactcctcgtca

SEQ ID NO: 4119 - DNA, 492 bp, Glycine max
aacactttcgggcgagtgtgtgtgtagcagtttctggttctgtttttggtttcgtttcagcaaaacctctcttcttcttctgattgattccacctcgcgatttttcgattttcgtttgttttcttctttttcggtttctgatctgaactcgattcgattcgctattgccggaaaatgagtcctccggcaagtgtccggtgatgatcgctccctcgagaggttgttgaggttatcgttgttgttcttcgaagtcatggtttcgatctgaggttttggcgctctcgagttcgttttgtagcatcatcatcatcaccataccttgttcagattctgctcactttcaccacaacggctttactatttaccgcgtttcgttttcgtgtcaccgcaaataatgaaaggaggtgttccctgtatccactcctcgtcagggaagatctgaagcagtgctagctgctcacgtcctgtaatggacgtgaggttctagatcgc

SEQ ID NO: 4120 - DNA, 862 bp, Glycine max
tccaaatgcatcttgattacatccacggctaatttttccccaacttgattgaaaaatatttctggatcttttcttttctaagatttcttgcttgaatacactgaaatgtctgttacacctatttttatttttcgaaaaagtattttggaaattctgcattaggaacaaacgtgctactactccagtaagtgcttttaatggtttttgtgaaacttcacttgctgataataccatttggaattttacttccagctggagaaagaggcccttgtaaagggtgttccaattggacaggctcttgatatagacattccccctccacggcccaaaagaaagccaaacaatccttatcctcggaagaccaggattggtaccacatcattacatagtggagcaaaggatggaaaactcaatttagttgaatcttcacatgttaatcaagcactggacttgaaaaaagaaccacttccagacaaacatgattcgaacgaagggctaacaactgtaaaagaaaataaggatgagaaccacgcaaaagtatttactcttctccaggaggtaccctgttcctctgtatcttcagcaaatgagagttcaataacaatgtctgtgccactgggaaatccatgtgccttcaaggagattacaccttccgtgaaagaggtaatagcacgagatgaaaaaactgaatcttttgtcactgttgaacctgaaaatgggaagttggagatcaatgatggaaaacagactaatggcactagtaaagactccaggtcagaggattctgatgctctacatatgaaattggtgcaacatgagaaaccagatggtcttgattgtgcattatcaatagatcggatgc

SEQ ID NO: 4121 - DNA, 484 bp, Glycine max
tcattcttctttcgttgctacttctactgtttcttcctccgatccctcattgccgcaaatgactcctcctgctagtgttaggtgaattccctcgcttcacatgcatgatcgcaccttcaactctcttcttcttcttcttctccatggctttttttcaaggttttggcgccgtggagttcgttttgtagcatcaccgtatcatcagcttcagcttgctttcaccaaaacggctttactatttggtgtgttccatgtcacaaaaaacgaaaggagatattccttttacccactcctcgtcagggaagatctgaagcagcgctagcagcacacgtcctctaatggacgccgactcctctggagaagaagtggttattaaaacaagaaaaccatatactatcacaaagcaaagagaacgatggacagaggaggaacataacagatttctagaagccttgaagctatacgggcgagcatggcagcgcat

SEQ ID NO: 4122 - DNA, 563 bp, Glycine max
cgtttcagcaaaacctctcttcttcttctgattgattccacatcgcgaacgacacagtttcgtttgtcttcttctttttcggttcctgatctgaactcgattcgattcgctattgccggaaaatgagtcctccggcaagtgtccggtgatgatcgctccctcgagaggttgttgaggttatcgttgttgttcttcgaagtcatggtttcgatctgaggtgctgtcagtgctcacagcgcgacgctgttgagttgaaatttcgctggttttgagttgctttgtgactatttttttttctcggcaaccaaacaggaggattcaaaatttgcactgattaattagtaaagttttggcgctctcgagttcgttttggtgaggattctgattaaggaaatttttcttttattcattcggaggagaagcgtctcaaactctctctctttctccctcggttgtttatttttgaaattttattttcctttatcttctatgtagtactgctttacgtgtgacatgtgaattggaatgcttattccagcttatacaaaacagagacggatctc

SEQ ID NO: 4123 - DNA, 384 bp, Glycine max
attgtctctaccttgctgcaaaaccctgcagcccatgctgcagcgagttttgctgctacattttggccatatgcaaatgcagaaacttctgcagattctcccgtgtgcactccagattttccatcaagacaaattggctcgcctccaagtgtgacagctattgcagctgctacagtagctgctgcaactgcatggtgggctgcccatggactgcttcctttatgtggtccactccatacagcttttgcctgtcctcctgcatcagcaactacagttccatcactgattatcgctgatgcaccaccacaaaaaacagaacgaggagagattaaaccacaaaatcctcctctgcaagatcagataccggatccagaacactcggaa

SEQ ID NO: 4124 - DNA, 249 bp, Glycine max
gcaaaacctctcttcttctgattgattcacttctcgatttttctgttttcgttttcattttcggtttccgatctaatatcgatgcgattcgccattgccggaaaatgagtcctccggcgagtgtccggtgatgatcgctctcgagagaggctgttgttgttgttcttcttcgacgtcatggttttgttctgagattctgctcactttcaccaaaacggctttactatgtaccgcgtttcgctttcgtgt

SEQ ID NO: 4125 - DNA, 293 bp, Glycine max
gtctttgttttcgtttcagcaaaacctctcttcttcttctgattgattcacttctcgatttttctgttttcgttttcatttccggtttccgatctaatatcgatgcgattcgccattgccggaaaatgagtcctccggcgagtgtccggtgatgatcgctctcgagagaggctgttgttgttgttcttcttcgacgtcatggttttgttctgaggttctggcgctctcgagttcgttttggtgcggcttctgattaaggaaaatttctatattctttggaggagaagcgtctc

SEQ ID NO: 4126 - DNA, 1314 bp, Glycine max
ttcctattcaaacaaatcaaattattatgatacgaatggagataagaaaacagctgcggacaattatttattcttggtgaattggttggagagatatccagaatataaggaaagagatttctatattgctggggaaagctatgctgggcattatgtgcctcaatttgcacataccattctctatcataacaaaaaggcaaataagaaaatcatcaatctaaaaggaatcttgattgggaatgcagtgatcaacgaggaaactgactcggacggactgtatgattatcttgccagccatgcaatcatctcagacaaagcagcttatctcaacaaagcttgtgattcatcatcatcaaagattcaggaaagtgtgtgcgatgcagccggagatgaacttggggaggatattgaatacattgatttatacaatatttatgctccactatgcaagaatgcaaatctcacagccctgcccaaaaggaactcaattgtgactgatccatgtagtgagtattatgtgtacgcatatcttaatagaaaagatgttcaagaggctctccatgccaatgtaaccaacctcaaacatgactgggaaccctgcagcgatgtcataacaaagtgggttgatcaagcttcaacagttcttccacttttacatgaattcctcaacaatagcctcagggtttggattttcagtggtgacacagatggaagggtgcctattacatcaaccaagtattcagttaagaagatgaaccttcccattaaatctgtttggcacccttggttttcctatggagaggttggtggctatgtagaagtatacaagggaggcctaacattagctacggtgagggaagcagggcatcaagtgccaagttaccaaccagccagagccctaactttgatcaaatatttcttagacggcactcctcttcccggtcctcccaaaagaaaggactaggactagtttcttcaaatccacttttcaataattgttgtggtaattattaatttaaggaaaataaatacaattatattatagtggggtttcttggattctattcttgttggcgatctttcattggtaagactcctgtaaatatcattataagctctcgccaaaaattgaacatggcctatgaatggggcaacctaggttctttgaacttcctcgcactcaaagaaaaaaagaaaatagtttgatttgagtatttgattaatgaaagtgtttgtgaaaaagaatattgttactcaactttgtgatggtttcttgcgtagtgttgttaaattaagatatacagttattgccat

SEQ ID NO: 4127 - DNA, 744 bp, Glycine max
  unsure (1)..(744): unsure at all n locations
ggtctgtctctgtcatacaaaagctgaagcggggggagttgagtttagtgccgggctgtgtggtgttgtgtgcgtctgtaatcttatagagaaaaaatggtatcgttgttgtcagactcagcgatggtaacaggcacagatgaagtgtacgtggcagcaatgcctctaagggctacatagggaccaccccagttgcttatgtctgctgcttactccctcaatctatgggatttccagcatttcatggtcatcatcaaaccctcttctctttctcaggttctggtttttgattttcaaccaaaagatcctgaagatatatatgtggcactagcggctctatatggtagagcagtgccaggaactgttctggtgaggcagttaaaaaagttgccaagaaacaaatgctggcttgttggatattcaaaggcagaggcggatgctatggaaatagcaagggaattcaacaaagaatgggaaacaaatttgaggattggccttcatgattgtcgcgattataccaatagtttggttaggcaactcactggcgaaaaagatgtgctgaaacgtttgagaaacgttggtagttagagggaatccgttgtctggttagaagatcactttattgaattactttatcttgtatcatgccttcaacattntttagcacattcatcgcttcacttggatgggaactggctaaacatcgctttcatgggggctctgaagaaatcaatctcatacgag

SEQ ID NO: 4128 - DNA, 2108 bp, Glycine max
  unsure (1)..(2108): unsure at all n locations
tcccctcgcggaggaaagaagagagagaacaaagcacttagtgctattcaataattacgaaaaaccaacagcgagtgttgtttttgtttggtccaggctggaccagggaatgaatagagatgagaggctttcggttgaagagaactgagttaagcggcgaagccaaacgcagaatcggcggcagaaattgccaccggaagcacgtcgaagacgggtgaaccaaacacaaaattccatccaccacttctcttttcaatccccaactcaaatctgtgaagaaaatctcaatttctaaattgtaattcttagcactactgctagtagtagtaaaaaaaaacaattagaaagtagtagagtgtttttttttctttttttcgtttgttttacttttaagatgggtgagaagagcaacgttggcggcgacgcgattaacacgacactgcttcacgggaagtacgagctgggccggctgttaggccacggaaccttcgcgaaggtgtaccacgcgcgccacctgaagacgggaaagagcgtggcgatgaaggtggtgggcaaagagaaggtggtgaaggtaggcatgatggagcagatcaagagagagatctcagccatgaacatggtgaagcacccaaacatcgtgcagcttcacgaggtcatggcgagcaagtccaagatctacatcgccatggagctcgtccgcggcggcgagctcttcaacaagatcgccagaggccgtctccgggaggagatggccagactttacttccaacaactcatctctgctgtggacttctgccacagccgcggcgtctaccaccgtgacctcaagccagagaaccttctcctcgacgacgacggcaacctcaaggtcaccgacttcggcctcagcactttctccgagcacctccggcacgacggcctgctgcacactacgtgcggcacgccggcctatgtcgcgcccgaggtgattgggaaaagaggctacgacggcgccaaggccgatatttggtcttgtggcgtaatcctctacgtacttcttgctggttttttacccttccaggatgacaacctggtggccttgtacaagaaaatttaccgcggtgacttcaagtgtccgccgtggttctcctccgaggcgcggaggctcatcaccaagctcctcgaccccaacccgaacacgcgaatcacaatttcaaaaatcatggactcgtcgtggttcaagaaacccgtgccgaagaacttgatgggaaagaaaagagaggaattggatctggaggagaagattaaacagcatgagcaggaggtttctactacgatgaatgcttttcacatcatttcgctctcggaggggttcgatttgtcgccgttgttcgaggaaaagaagagagaagagaaagagttacggtttgcgaccacgcgccccgcgagcagcgtgatttcgagattggaagatttggcgaaggcggtgaagttcgacgtgaagaagagcgagactaaggtgaggttgcagggtcaagaaaaagggcgaaaaggtaaactcgctattgctgcggacttgtacgccgtgacgccgtcgtttttggtggtggaggttaagaaggacaacggtgacaccttggagtataaccagttctgtagcaaggagcttcgtccagctcttaaagatatcgtgtggaggacttctcctgcagagaatcctacactcgcttgaagaacaaccaagactcccatgctaattgtcgttcctttgtagttgtttttgttaattcttgtttcaggactgagatattttagttatttgcttgcttctttgttatgttttggcctctggggtgtgtcgtcttttacccagaaaggggaattgttgaaaaggcgaatgcagtaatgaaccgaaatggacatcgaggagttgttgtcgatgatgattcaggtacatgtgctgcgtgttgttgtgctcgtgggtgatgttgttgctatgttggcgtgattgtgaatatgtttgcaaattgattggtgtggctcatgggtcattcatggctgcgtttaattttgttttatttatattttttcggtgaattagtgctttgtttgggggcggcccccnnnna

SEQ ID NO: 4129 - DNA, 754 bp, Glycine max
gtcgccgttgttcgaggagaagaagagggaggagaaagagttacgtttcgccaccacgcgccccgcgagtagcgtgatttcgagattggaagatttagcgaaggcggtgaagttcgacgtgaaaaagagcgagactaaggtgaggttgcagggtcaagaaaatgggcgaaaaggtaaactcgctattgctgcggatttgtacgccgtgacgccgtcgtttttggtcgtggaggttaagaaagacaacggtgacaccttggagtataaccagttctgcagcaaggagcttcggccagcgctcaaggacatcgtgtggaggacttctcctgcagagaatcctacactcgcttgaacaacaaattcaattcaattgtcgttcctttgtagttttcttgtttcagaacagagacatattttaattatttgcttgcttctttgtttggattctaattctatgttttagcctctcgggggtgtcgtcgtctttttacccaggaaagggggaattgttgaaaaggcgaatgcagtagtagtgaaccgaaatggacatcgaggagttgttgtcgatgattcgggtacatgtgctgcctgttgtattgctcgtggctgatgttgttgctatgttggcgtgattgtgaatatgcttgcaaattgattggtgtggctcatggtcattcgtggctgcgtttaatttattttttccattatttatttttttggtgccagaaaaagataaaaaaaaaaaaaaaaaaga

SEQ ID NO: 4130 - DNA, 563 bp, Glycine max
cgtccgaaagccactgagtgcgattcaataattgcgaaaaaccacggggagtgttgtttgtttcggtcccggctggaccagtgaatgaatagagatgagaggctttcggcttaagaaaactgagttaagcggccaagccaaacgcagaatcggcggcagaaattgccaccggaagcacgtcgaagacgggtgaactaaaaagaagaatctcatccaccacttatcctttcaatccccaaccccaaaaaaaatcacaacttctagtagtaaaaaaaaaaaaagactagaaggtcgtatagtagagtgtttttcattttttattttttattttaatgatgggagagaaaagcaacagcaacagcggcgacgcgattaactcgacgctgctccacgggaagtacgagctggggcggctgttacgccacggaagcttcgcgaaggtataccacgcgcgccacctaaacaccggaaagagcgtggcgatgaaggtggtgggaaaagagaaggtggtgaaggtaggcatgatggaacaaatcaagagagagatctcagccatgaacatg

SEQ ID NO: 4131 - DNA, 573 bp, Glycine max
  unsure (1)..(573): unsure at all n locations
attatattaatcttgcaattggctagttctctgtcttcaaattccaacaacaccaaacaccatgaacaaagttcacatcctggcgttcccatacccagcacagggccacatcctcccactcctcgacctcatccaccacttagccctacgaggcctaaccgtcacaatcataatcacaccaaaaaacgttcctatcttaaaccctctcttatcctcgcatccaaacacggtccaaactttagttctcccattccctccccaccctaacatccccgctggcgcagagaacgtccgtgaggtcggcaacagaggaaactaccccttcatcaacgccctctccaaactccaaccagaaattatccactggttcgcaacccacagtaaccctcctgtagcactcgtctccgatttcttcctcggttggactcagcaactcgcttcccaactcagtattcctaggatcacgttctactgctccggcgcgtccttaatcgccatcctccagcgctgctgganaaatctacacttttacaattcacagggagataataatattattaattttcccgaaat

SEQ ID NO: 4132 - DNA, 483 bp, Glycine max
tcgatttaaaaaaaaaattgtgattataattttgatttgtgtgtattttggtgggccatagatgtgttgaaggagtttgcttccaagaaatgtggtaaacttgggaaattgctcaaggagactgggtagtcatgggattcagatgaagcacaaggactctagagctacaaatcctagcccaaattccaaaaccgaattcggttccattaaggtcgaacaggagattcaacgaatggggaaccatggcagcagcagcagcaacaacaacaataacaaaggtgttggaaggcatttcgttggtagtggtgggcaatggaggccagccttacagagcattgcagaaattggaacttgaacacactattattatagcccccactcccatgaataaaccatgcagagcaacaaccgaccctagcttcctttcatttcacactttccaatgcattcacattgcccttctccttaatttaatagtagttt

SEQ ID NO: 4133 - DNA, 295 bp, Glycine max
cctcgagccgaatcggctcgaggtgattcagcatcctgggaacaagaccgagagggtttattgactcgctaagcgcacacgaggactatgaactcgaatcctgggcactatgttgcgcttgtcgtgtcctcgcccacgctcatggccgagaatggcgcgccgatgaagcagcttaagcttctccgacccgacgatactttgcatattggccaggtttatcgcttgatcaccttcgaagatgtgttgaaggagtttgcttccaagaaatgtggtaaacttgggaaattgctcaagg

SEQ ID NO: 4134 - DNA, 1180 bp, Glycine max
  unsure (1)..(1180): unsure at all n locations
ataattagataatcaaagaaaaaaattcttaaaanaattaatttcttacaaatttattttgtggcctaaaaaaataattttactacaaccggaaagaaagaaaattgatgttacggatctcacaacttgtaactttactttctctaaaatcatcacaaccaaactcgcatacttcatttccgtccaccggtaattcattccatcttttgcaaaccgaacacagcctagaagacaaatctcattattcccagtatatactaaaattaaaaataaacaaattcttatttgctttttttaaaaaacaacacttgcagttaaaaatgtacataataccttaatttcacactcaacttgatgttgaagaagattcctcaattatttaatgtaacccaactgtacaagacgggcacgaagggggggccttcactctgaaccaaataccatagtcttctctttgtccgtgacaaaacagttcccacaaaaaaaagaaaaaagaaaaaagaaaagcactaaaaaaaaatgaagaagggtttctcccttgtgctgctgattcttctgatccagtacaacaacgttgtcaacgcctacaacaacaaaaactgtgtcacagaggattgcctcatcggcaacaaggatttggaatcagagttctactttggatcccatgtggccagaatgctctacgatgtgagccaatctgtgagtggcaaaacaggcaataaaaataacaaagctgttaattgtccaaataagcaaggctaccgaagctgcttgccttccaaaaacggtggtggccctaagcaaagttgtggcgattacaccagggtttgctaagaactcgttccaacccttgtgatttcatttctgatttttaagattgtgatatgatggaatcttatttatgtcaatttgtttagtttaatttccatatgttattgttttttttaatattaagtcaggtaccagaaaatttgcatcaattcacactcatgagtcacctgaacaagagctagacccggttttattgtttgtatcactgtatgtaatatttaatgttttcggttcatacttttgttgcggttgtattgttgttgtgtatcatctgtgccattagtttatttgatgttgataagaatcattccatgtgagatgggaaataataatatattattgcctgcag

SEQ ID NO: 4135 - DNA, 818 bp, Glycine max
  unsure (1)..(818): unsure at all n locations
ttgctatgcgtccgcccacgcgtccgagaagattcctattatttagtgtaacccaactgtacaaaacagacaagaagaggccttcactctgaaccaaataccatagtcttctctttgtctgagaaaatagttccccccaaaaataaaatgaacaagggtctctcctttgtgctgctgattcttctgatccactacaacaacgttgtcaacgccaacaacaaaaactgtgtcacagaggattgcctcatcggcaacaatgatttggaatcagaattctacttcggttcccatgtggccagaatgctctacgatgtgagccaatctgtgtctggccaaacaggcaattcaaacaacaaagctgttaattgtccacaaagcaatggctaccgaacctgcttgccttccaaaaacggtggtggccctaaccaaagttgtggcgattacaccagggtttgctaaagaacatgttccaatccttgtaatttcatttctcatttttaaggttgtcatatgatggagaatctcatttattttagtttaatttccctatgttatcggcttcttttttatattcataagtcaggtacaggaagtttgtttataacaatcctgttattgttagtattactgtatgtaatatttaatgttttcagttcatacttttgttgtggttgtattgttattgtgccatcagtttatcaaatgtggataagaataattccatgtaagatgcccaataataatatattattgcctgaagtaaattcccaaaaaaaaaaaaaaannnnnaaaagcgccgctctaaggatccagcttcg

SEQ ID NO: 4136 - DNA, 832 bp, Glycine max
ggaaggctcgttgatataaaagggagtccttatcttctcgcattgttttaggttttcttagttagagttgttaccatttgctcccagcactgagcttaaccgagcttcacaaagatgaatcgggaaaagttgatgaagatggccggttcggttagaactgggggaaagggtaccgtgagaagaaagaagaaggctgtccacaagacaacaaccacagatgacaaaaggcttcagagcaccctgaagagaataggggtgaatgccatcccggctattgaggaggtcaatatctttaaggatgacgtagttatccagtttctaaatcccaaagttcaagcatccattgctgctaatacttgggttgtcagtggttctccacaaacaaagaagttgcaggatatactccctagcattatccaccaattaggaccagataacttggaaaacctgaagaagctagccgagcaattccagaagcaggctcctgaaggagccgctggttcaaccacagctcaagaggagaatgatgatgacgatgtcccagagcttgttccaggccaggattttgagacagctgctgaggagaccaaggctgcttcttagagtgttttgttactgtgccattgccatatatctcctgtgtttttattttttttcccttgattttccttttttttaaaagtatttcaggtgttcggttctcccctcatatactctaaacagttcaaatactctattaaatatgctttctttcatctaactaggtattcagtttttgaccgcatctgtcatctacaacaccgtttattggcattgttcctgttcggtagtt

SEQ ID NO: 4137 - DNA, 561 bp, Glycine max
cgcaaacaaagaagttgcaggatatactccctagcattatccaccaattaggaccagataacttggaaaacctgaagatgcagggatggcattcacccctattctcttcagagcaccctgaagagaataggggtgcatgccatccctgctattgatgaggtccatatctttaaggatgacgtagttatccagtttctaaatcccaaagttcaagcatccatcgctgctaatacttgggttgtcagtggttcaccgcaaacaaagaagttgcaggatatactccctagcattatccaccaattaggaccagataacttggaaaacctgaagaagctagccgagcaattccagaagcaggctcctgaaggggccgctggttcaaccacagctcaagaggagaatgatgacgacgtcccaaagcttgttccaggccaggattttgagacagctgctgaggagaccaacgctgcttcttagattgtgccatcgctaaatatctcctgtgttttaattttttcgtcttcctgattttccattttaagtatttcaggtgtttggttc

SEQ ID NO: 4138 - DNA, 520 bp, Glycine max
aatctccccgacagaagcagcatcacccaaaccacacttccaaaaccgaaaccctaatttgcacaatgcgtgtggttctgcaacaagaatctcttccttctataataaactccttcccacgcttcttcacgctctagttccatccatccgccatggccaccgagcacgaaaagcagttaattgtggccaaaccgaaccctaacaccaaaagccctcgccgatcctccacctcttcctcgctcgccatcatcgacggcattttcgcgagaaaaagcttcttctacgacaggcttccctcccaaccactcagactcaccgttctcaaactcgacggttcctgcttccatattcaagtttcgaagaccgccaccgttgcggaactgaaggacgcagtggaggccgtgttcagtcacgtgcctcacaaggggcctgccaaaatttcatgggcacatgtctgggggcagttttgcttatgctatgatggacagaagctagttacagaaaaggataatcttcgaaa

SEQ ID NO: 4139 - DNA, 476 bp, Glycine max
gccactcacaaagtttgtaactctacacaggataaacctgccacacctcattagtagtagccagtagattcaaagttgagagaaacaaacaaacaaaacaaagccaagcatctcccaacacaccatcatcatcatcatcatcaaagccaagcacaacaatggcactcaaaagggcaccgtggttgctgctgctgccactgttatctgcagctgctgctgctgccaccaacaccaacagtgtgtaccagccttgttgctgatgccaggattcagagatccgatggcttcacttttggcattgccttcagttccagggactctttcttctacaaccagaaccagtccctccagctctctccctgtgaccgacgcctctctctctcttcctccaacgctcagcttgctctcttccgtccccgggttgatgagatctctctcctcaccatcaacacctctagtttcttccctgattctta

SEQ ID NO: 4140 - DNA, 594 bp, Glycine max
gaagcttctgagctatgacaaacagggtggatggattgttctggcaagagggtctcacattgtggtcaatggacatgccacaaccgggttgcaaaccttggtggagtatgatgctgtgtggaaagaacttgctgacagagatgggtttgaaccagcatttaagaatcactacgacaaggttcattcaattgttagtccttgctgcaggtttgagttctctcattcaatggggagaatcccagagaggctcacgtgccccgagtgtcgccgcaacatgcacgtgctcaccaccttccagtgctgccacgatgaaaaaattgatgaggacttttttgtcagcactgttactcctcctaccatttgataattcattgttcactctctattgcttcctgtgattctctgcagcgcaatttcatgcatagccctatatgtttacatgtatttttttatttttttttatcacatatctatgtaataaaatgtgagtggtgaggttcaggctcccccattgaggtatgggtaaattattatgtgatttgtgtcagggcttgactcttattgtacaattgacacttaaagaagagtatggat

SEQ ID NO: 4141 - DNA, 1129 bp, Glycine max
gttattcccaaagccgatacttccttttcaagtcttttctctctctctctctctataataagattcttccctctcccttctctctctctctctagaacttcgtcctccctctgcttctttctttcttagttgcagcgcgattgctgcatcgtcctccaataagagctcgctgctagtgaaccctaacacggcggcaacgagaggtgttcggttgaagctcagatcagcgatggcagcagcaacccgcacttctctgcggttcctcctctcagtctccgtaaccctaactctcgctcacctcgccgcctcaaattccgaaggcgacgctctctacacgctgaaacggagcctctcggaccctgacaacgttctccagagctgggatcccactctcgttagcccctgtacttggttccacgtcacctgcaaccaggacaaccgagtcactcgagtggatcttggtaactctaacctatctggacatttggtacctgaacttgggaagctggagcatctacagtatcttgagttgtacaaaaacaacattcaaggaactattcctccagaacttggaaacctgaagagtctagttagcttggacttgtacaacaacaacatatcaggcaccatcccaccttcattggggaaattgaagaatcttgtctttttacgactcaatgacaaccgactaactggcccgatccccaaggaacttgctgctgtttcaagccttaaagtagtggatgtctccaataatgatttatgtggtacaattcctacctccgggccattcgagcatattccattgaataactttgagaataatcctcgtttggaaggtccagagttgttgggacttgtaagttatgacacaaactgctcgtgaataacgtgatgtggtaggatctcaatctgcgttgaattatatatatgtattacctcatagtgtaatgggcagtggtaaatgtaatctctggtatatgtaaatttacatactgaagggcattggaatttgtaacaatattatgatctgacgatgatgttaagacttgaatatctattgatgtaatactaaagaaaaaatcgacttggtcactcactgataaaatatttgtgacgtattgctctc

SEQ ID NO: 4142 - DNA, 294 bp, Glycine max
cggctcgaggttattcccaaagccgatacttccttttcaagtctcttctctctctctctctctcttccaaaataagattcttccctctctctctccagaatttcctcctcccactgcttctttcttccttgcagcgcgattgctgcatcctcctccaataagagctcgctgctagcgaaccctaacacggcggcaacgtgaggtgttcggttgaagttcagatcagccatggccgcagcaacccccacttctctgcggttcctcctctccgtttccgtaaccctaaccctaacc

SEQ ID NO: 4143 - DNA, 913 bp, Glycine max
atgcaagcaaaaacctcgaagatttagggtttcgcattgctacttcgcgttcgttcatctctctctcacgcctcaagattttcaagaacacattccaatctggatttctttccattttgtacagccttggataggagtaaacctttgcagatatgggacaaagaagttgtgaatgcccatgttaaacgaccacaggatgaagacatacaatccaatgtactggaaataattggatcaaatattcagtccacatacattacatgcccagctgacccagctgcaacacttggtataaaacttccattcttggttttgattgtcaagaatctaaagaagtatttcacatttgagattcaagttttggatgataagaatgtcagacgacgatttcgagcctcaaattttcaagtgtgctgtcactcgggtaaagccctacatttgcactatgccactgagaatggatgaggggtggaatcaaatccagtttaacctggctgatttcaccaagagagcttatggtactaattatgtggagacactgcgagttcaggtccatgcaaactgtcgcctgagaaggatttacttctctgaccgcctctactctgaagaggaactccctccagagttcaaattgtaccttccaatgcagatttcactttagagatgccctcatttggatgactagttctttttatgtttatcttttattgtaaagtgtatgttatgagtctctctctgtttttttttttttggtaaaatctcaccttgtgcttgtcatcatgcagaaatcatgaaaaaatgggagtttggagttgtagcctggagaaattgatgtgattttatatgcttactacatatagttctactagttgactttattctaaactttgtatctatgttgtgctagattaaa

SEQ ID NO: 4144 - DNA, 272 bp, Glycine max
ctcaagaagcaaaaacctcgaagatttagggtttcgcattgctacttcgcgttcgttcatctctctctcacgcctcaaggttttccaggaccactttccaacctggattccttcccattttgtacagccttggataggagtaaacctttgcagatatgggacaaagaaggctgtcactcgggtaaagccctacattgcactatgccactgagaatgatgaggggtggaatcaaatccagtttaacctggctgatttcaccaagagagcatat

SEQ ID NO: 4145 - DNA, 402 bp, Glycine max
ctctgcgtcaaaagcgtgcaggttttttgtgttcttatttgttagtccttcctgagagctgaatttcccggcaaacacaaacaggtttttgtggtgttgaagatgttcaagaacacattccaatctggatttctttccattttatacagccttgggagtaaacctttgcagatatgggacaaagaagttgttgatggccacattaaacgactacaggatgaagacatacagtccaatgtactagaaataattggatcaaatattcagtccacatacattacttgcccagctgacccagcgacaacgcttggtataaagcttccattcttggttattattgtcaagaatctaaagaagtatttcacatttgagattcaagttttggatgataagaatgtcaga

SEQ ID NO: 4146 - DNA, 756 bp, Glycine max
tgatggagtcttcttggtttaagaaaccggtgccgaggaagcttgctgccgaaaaggtggatttggaggaggagtagattgagagccagctggagaccatcaatgctttccacataatttccttgtcggaggggttcaatttgtcgccgttgttcgaggagaagaggaaggaggagatgaggttcgccaccgcggggacgccgagcagcgtcatttcgcgcctggaggaggtggccaaggcggggaagtttgacgtgaagagtagcgagacgaaagtgaggcttcagggacaggagcgtgggaggaaggggaagctagcgattgcggcggatatctacgccgtgacgccgtcgtttatggtggtggaggtcaagaaggacaatggggatacgttggagtataaccagttctgcagcaaacaacttcgtcctgcgcttaaggatatcttctggaattctgcacctgccagtgcttgaatggtatattatatatatgatgtctgattattgttttacaacaccatttgtcgaccttgttattttattttatttttgtttaggaactttgagttttgttgataagatctgtttgtgttttgttgtttaaattgttagtttggtacttggggactggttagtgggtacttactctctctgtcgcccagaattgttgttaaaaaatgcccccgttgtggatgattctgtcatgtttgtgtttcaattatgagtgtgtaatttggagggcttgtggggcttt

SEQ ID NO: 4147 - DNA, 802 bp, Glycine max
cgcccagcaccgtcatttcgcggctgaagaaggtggccaaggccgggaagttcgacgtcaggagtagcgagaccaaggtgaggcttcagggtcaggagcgtgggaggaaggggaagctggcgattgccgcggatatttacgccgtgacgccgtcgtttatggtggtggaggtcaagaaggacaatggggataccttggagtataaccagttctgcagcaaacagcttcgccctgcgcttaaggatatcttctggaattcctcccagaattccgcacctgctagtgcttgaatgatgtctgattctcgtttttgttcaggaactttgagttgttgataagatctttctctctgtcgcccagaattgtgattgaggatataaaaagagaatcaacaacggatgattcgatatgcatgaaggttaattgattctctcatgtttgtgtttcaatttgttgaaagttactttcacctttttcttttctttcattgctgcctttgctctttattttgttccttctgtagattattatgtccttgagccttcacgagtcacgcctgtgcctaatacaaagaataggaattcgacttttttgtggcgtttcgttcttgttgagaaactcgtgtatgtgattgaggaattgcttctttggttgcatcactatcccaccccttgaagaattgctcgcgcgaaaaaaccttcaaaataaactttaaaggataaatcatcttttaatccttcataatataaacagctatcaaaataagaaaatacaaaataagtcctcttgctatctgcttcag

SEQ ID NO: 4148 - DNA, 645 bp, Glycine max
caagcccctcaacagcctccttattacattccacccacccctatgccgaattcagccttgccccagcacccccagaatcagtacttaccatccgatcaacaatatcgaacaccccaacttgtggctccacaaccaacaccgtctcaagtaaccccatccccacctgtgcaacaattttctcactatcagcagccacaacaacagcagcagccgccgcagcagcagcaacagcaatggtcacagcaggtgcagccttcacagccacccccaatgcaatctcaagtaagaccctcctctccaaatgtgtaccctccgtaccagccaaatcaagcaacaaacccatcacctgcagaaacactgccaaacagcatggccatgcaaatgccatactcgggagttccaccaccaggatctagccgcaccgatgccataccttatggatatggaggagctggcagaacagttccacagcagcctccaccccagcagatgaagagctcttttcctgcacccccagctgacatgtatggaccttccgggaacctcccggcgcttcctccacctagtggtgcatacatgatgtatgatggtgaggggaagagaacacatcatccaccccaacctcattttgctcaacctggatat

SEQ ID NO: 4149 - DNA, 683 bp, Glycine max
ggaaaaccttcactatctctctctcttcaagcaagcgaccatggcggatggaagcaacgggggagttctaatgctggaagccccaccgtcttacggtaggcctaccggttccgacgcggaaataatcgacgcattgccttatatcgacgacgactacgcagaccccagagtcaaactggaggttgaccgtctcgtggaggatgagatgcgtcgcagcaccaagaagcccaccgatttcctcaatgatttccctcctcttcccaactccattttccagaactacccaatgattgcgagagagtacgaacgtgtgagagccggaaggcctcccgttgctcttgatagatcgcgctacgatttggaaatgccgccggccaataaaaggaacgacgaaactgcttggaagcaagctcttcatagagctcaacgcctgctgcaatatcagattatgaggatggaaaatttggatttgatgttaaaatatggtcccgatacctggaaacagcacaaccaaagattggaagtatacttatcaagaatgcagaaattagctcaggaacaaaatgaaaagattgaaaaagtaaaccgtgaaaggaaatatcatcagcaaaacactgcatatgagcttaatgcgttgtccatgcaatggaaggagctttgtcagaagaatatagacatcagtg

SEQ ID NO: 4150 - DNA, 994 bp, Glycine max
gttatatatatacacacacccctctaattcagctttggagtaacctagttgaagatgccatgggaaacctctttggcaaaaataaaaagcgtgacactgaaagtgccaacaataataaaggaagaggtggaagaatctacactgccgtgaccacaagaggcttaccacctcatttcccaacacaattacctcattcacagcctccaccgctattatatccaactctagaacctccgccaccgccaccgccgccgccgccgccaccggcactaccacaatccatgtccaagaaaccaagttttgcgagagttttcgctaaacaaagctcttcagtcatgaacaacaatcaatctgctgccaagaagtatgctttgattcgtgataacttctctacccttgaacaggtgactacagccctgaggaaagaaggattagaatcatcaaatctcatccttggaattgattttacaaagagcgatgaatggactggaagtgtctcattcaacaatagaagcctgcatgctattggaagtacacctaacccctacgagaaggccatctctattattggcaagactctggctccctttgatgatgataacttgattccatgttttggatttggtgatgctaccacccatgatcaagaagtgtttagctttcacagtgatcattcaccttgccatggctttgaggaagttttggcctgctaccagaaaattgttccaaacttgaaactttcaggaccaacttcttatgccccggtgattgaggctgctatagacattgtggagaaaaatcgtggccaattccatgtgttggttatagttgctgatggccaggttacaagaagtgtcgacacaagtgatggaggactcagtcctcaagaagaaaaaacaattaaagcagtagttgatgcaaggtaaatatagcttaatgcatataaaaattgtttctaataattaaagtgaaaaccctccatgccaaaataaca

SEQ ID NO: 4151 - DNA, 568 bp, Glycine max
tccgtaatctgctcgagctcatgatcaagaagtgtttagctttcacagtgatcattcaccttgccatggttttgaggaagttttggcttgctatcaaaaagttgttccaaatttgagactgtctggaccaacatcttatgctcctgtgattgaggctgcaatagacatagttgagaaaagtcatggccaattccatgtgttagttattgttgcagatggccaggttacaacaagtgctgcgtctgagcatggagaactcagtccacaagaagcgaggacaatcaaagcaatagctgatgcaagttcatatcccctttctattattctggttggagttggtgatggaccctgggaagacatgaagaagtttgatgacaagataccagctcgcgactttgacaattttcagtttgttaacttcactgacataatggctaagaaatcaagcccctcagaaaaagaagctgcttttgctctggctgctctaatggagatacccttccaatataaagcagccactgaacttggactacttggtcgtgcaacaggaagatcaaataaaatagtt

SEQ ID NO: 4152 - DNA, 508 bp, Glycine max
atttagtctactcttcaatacatcataattgtgttagccaagaaatgaagaaatcaaagcattgaatgaagctgcgatgggaaactcgcatgctaaaaagcgtgacactcaattttccagaaacgttgttgaagggagagttccctctccgaaaaacaaaaccttgtcgccgtcaccgtcgctagaaccaccactaccacgagaaccaccaccaccagcagctatgtctttgaataagggttcggggaaactgtctgccaaagagaaatatgctctgattcccgataacttcaccaccctagaacaggttacaattgccttgaggaaggaaggtttagaatcatcaaatcttgtccttggaattgatttcacaaaaagcaatgaatggactggaagtgtctcattcaacaatagaagcctgcatgctattggaagtacacctaacccctatgagaaagccatctctattattggcaagactctggctccttttgatgatgacaacttg

SEQ ID NO: 4153 - DNA, 383 bp, Glycine max
ttctagatcgcgagcggccgacctttttcattttttaattttgtttatatatatatatgggtgtgttcaatttttgcggtccctctcgaattgattgaagctgcgatgggaaactcgcatgctaaaaagcgtgacactcaattttccagaaacgttgttaaagggagagttccctctccaaaagacaaaaccttatcatcattacagtcaccatcatcaccatcacaatcaccatcaccgtcgctagaaccaccgcgagaaccaccaccaccggttatgctttttaatacgggttcggggaaactatctgccaaaggggaatatgctctaattcctgataacttcactacccctgaacaggctacaactgccttgaggaagga

SEQ ID NO: 4154 - DNA, 740 bp, Glycine max
gacccacgcgtcagcccacgcgtccgaagacgacagaaggggatcgctctcacacttgcaattattcctcttttattaatccgcacctaaattctagggttccgaaatggacgctggcggaaagatcaagaagggcgccggaggaagaaagggcggcggcccaaagaagaagccggtttcaaggtccgtcaaagccggtctccaattccccgtcggaagaattggccgttatttgaagaaaggaaggtacgctcagcgtgtcggtaccggtgctcccgtatacttggctgcagttctcgaatacctagctgctgaggtgcttgagttggctgggaatgctgcacgtgacaacaagaagaacaggattattccaagacacgtgcttttggcagtgaggaacgatgaggagttggggaaattgcttgctggagtgacaattgcacatggtggcgtgcttccaaacattaaccctgttttgttgcctaagaagactgagagggcttccaaggaacctaaatctccatccaaggctactaaatctcctaagaaggcttaactgacttagtttattgtttctctatttagtgtgcacaaaatgtaaatctgtgtttaggttccttcttgtatcaccattatttgtagttctcaagtcgctgtttctttttcacattttcattcaatctgttgagacagcaagctctcagtaatggattgatttaattttcttaaaaaaaaaaaaa

SEQ ID NO: 4155 - DNA, 567 bp, Glycine max
ttcttcgcgtccgcccacgcgtccgcccacgcgtccgcttttaacaatccgcacccaaactctagggttccgacatggacgctggcggaaagatcaagaagggcgccggaggtagaaagggcggcggcccaaagaagaagccggtttcaaggtccgtcaaggccggtctccaattccccgtcggaagaattggccgttatttgaagaaaggaaggtacgcccagcgtgtcggtaccggtgctcccgtttacttggccgcagttctcgagtacctagctgccgaggtgcttgagttggctgggaatgccgcacgtgacaacaagaagaacaggattattccgagacacgtgcttttggctgtgaggaacgatgaggagttggggaaattgcttgctggtgtcaccattgctcatggtggcgtgcttccgaacattaaccctgttttgttgcctaagaagactgagagggcttccaaggagcctaagtctccatccaaggctactaaatctcctaaaaagtcttaactgacttagtttattgtttctctatctagtgtgcacaaaatgt

SEQ ID NO: 4156 - DNA, 806 bp, Glycine max
cccacgcgatccaactctctaaacaacacattaacctttctcattccccatctcctcaccttattcagccactgctaatttctagggttccgaaatggacgctggcggaaagatcaagaagggcgccggaggaagaaagggcggcggccctaagaagaagccggtttcaaggtccgtcaaggccggtctccaattccccgtcggaagaattggccgttatttgaagaaaggaaggtacgcccagcgtgtcggtaccggtgctcccgtttacttggccgcagttctcgagtacctagctgctgaggtgcttgagttggctgggaatgctgcacgtgacaacaagaagaacaggattattccaaaacatgtgctattggctgtgaggaacgatgaagagttggggaaattgcttgctggagtcaccattgcacatggtggtgtgcttccaaacattaaccctgttttgttgcctaagaagacggagagggctgccaaggagcctaagtctccatccaaggctactaaatctcctaagaaagcctagattatcctttttttttttttttttttaaatctagtgttgtatatcggtgcttagatgcttttggtgtaacaggatattttatgtgtttcgaaaacactgtaattcttgtcccaatttgttgcttgtaggagtgagtttgcttcgttaatgaaaagtggaaacccccttgttttcaatcaacattctctctacctcctttttgtttttattatgagatgttgattcagttgcattgaagtgaagtaatttgtttagaagcggt

SEQ ID NO: 4157 - DNA, 654 bp, Glycine max
cctacgcgtccgctggttattcctcttcccattgtagggttccgaaatggacgctggcggaaagatcaagaagggcgccggaggaagaaagggcggcggccctaagaagaagccggtttcaaggtccgtcaaggccggtctccaattccccgtcggaagaattggccgttatttgaagaaaggaaggtacgcccagcgtgtcggtaccggtgctcccgtttacttggccgcagttctcgagtacctagctgctgaggtgcttgagttggctgggaatgctgcacgtgacaacaagaagaacaggattattccgaagcatgtgctgttggctgtgaggaacgatgaggagttggggaaattgcttgctggagtgacaattgcacatggtggcgtgcttccaaacattaaccctgttttgttgcctaagaagaccgagagggcttccaaggaacctaaatctccatccaaggctaccaaatctcctaagaaagcttaagggtttttattttattttatttgaatatgtaaatcagtctttagatgctttttatgtgaaagaaaaaattatctattgcaaacactgtaattcctatcgtctcgcatgtaggagtttgctacattaataaaatcttctttatttttttttgggggtcc

SEQ ID NO: 4158 - DNA, 526 bp, Glycine max
  unsure (1)..(526): unsure at all n locations
cgttccgaatggacgctggcgaagtcagaggcgcggagagaaggcgcggcctaagaagaagccggtttcaaggtccgtcaaggccggtctccaattccccgtcggaagaattggccgttatttgaagaaaggaaggtacgcccagcgtgtcggtaccggtgctcccgtttacttggccgcagttctcgagtacctagctgccgaggtgcttgagttggctgggaatgctgcacgtgacaacaagaagaacaggattattccaagacacgtgcttttggcagtgaggaacgatgaggagttggggaaattgcttgctggagtgacaattgcacatggtggcgtgcttccaaacattaaccctgttttgttgcctaagaagtctgagagggcttccaaggaacctaaatctccatccaaggctactaaatctcctaagaaggcttaattgactttattagttnattggtctctattnnagtgtgcacaatgtnnaatctgtgtttaaggtttcttttttctatcaccc

SEQ ID NO: 4159 - DNA, 1341 bp, Glycine max
cactcttccttaaataccatcaccacacaccacacacatagtagctattatactctctctagagtaattgcggaatctgctagaattttctaataatggcgaaagacgttgagcaggtcacagagcaaggtgaatactccgcgaaggactaccatgaccctcctccggcaccgttgatcgacccagatgagctcacaaagtggtccttgtacagagccgccatagctgagttcatagcaacactcctttttctttacatcaccgtgttgaccattattggctacaagagacagagtgacaccaaaatccccggtaacaccgaatgtgacggcgttggcattttgggcatcgcttgggccttcggtggcatgatcttcatccttgtttactgcactgccggaatctctgggggacacatcaaccctgcggtgacattcgggttgttccttggacgcaaggtgtctttggtgagggcgttgttgtacatgatagcacagtgtgccggtgcaatctgcggtgctgggttggccaaagggttccagaaatcgttctacaacaggtacggaggtggggttaacactgtcagcgatggctacaacaaaggtaccgctttgggtgctgagatcattggtacctttgttcttgtctacaccgttttctccgccactgatcctaagaggaacgctagggactctcatgttcctgtgttagcaccacttcccattgggtttgccgtcttcatggttcacttggctacaatccctgtcactggaaccggcattaaccctgcaaggagtttcggaccagctgtgatcttcaacaacgacaaagcctgggacgaccaatggatttactgggttggaccgtttgttggagctgcggtggctgcaatctaccatcaatacattcttagaggttctgcaatcaaagctcttggatccttcaggagcaacgcttaattaaaaaaaaaaaaaatcaagtttctccactacctaaattatgatgatttggtcctgtgtcacccaaaacaagaacagtgtttcagttcaagtctgtctacaggtccctctcttttggcttttctgcttacccgtgggtttgggggaaaagccaaataccgtgggctcttgaatttgtagataagaatgcttttatgtcaagggtgtatttgtatcccttttgtttttaatttcttttttcttccaagtatttatcatcatgtgttcacttttatataatgtggaggatcattagccaagttttctttttgcctgcttcttcgttagtggtgtattttcatcagcttcgatctgcttctgcataaaatttatcactcgttgc

SEQ ID NO: 4160 - DNA, 659 bp, Glycine max
gttttctccgccactgatcctaagaggagcgctagggactctcatgttcctgtgttagcaccacttcccattgggtttgccgtcttcatggttcacttggctacaatccctgtcactggaaccggcattaaccctgcaaggagtttcggaccagctgtgatcttcaacaacgacaaagcctgggacgaccaatggatttactgggttggaccgtttgttggagctgcggtggctgcattctaccatcaatacattcttagagctgctgcaatcaaagctcttggatcattcaggagcaacacttaattaataatctccactacctaaattatgatcatttgtcctgtgtcacccaaaacaataacagtgtttcagttcaattcttggagttccttcctttttggcttttctgcttacccgtgggtttggggcaaaagccaaataccgtgggtttggggctcttgaatttgtagataagaatgcttttatgtcaagggtgtatttgtatcccttttgttttgttttttttttttatttaatttctttctttcttccagtatttatcatcatgtgttcactttttatataatgtggtggatcattagccaaattttaccttttgcctgcttcttcgttagtggtgtattttcatcagcttc

SEQ ID NO: 4161 - DNA, 633 bp, Glycine max
  unsure (1)..(633): unsure at all n locations
ggagtggggggttacactgtaagcgatgggctcacaaaggtnacgcttgggggtgctgagatcatgggtaccttggttcttgtctacagtttttttccgccactatcctaagaaggaacgtaggggacttcatgtttcctgtaagcatacttaatttcttattagctaggtttggtgtttttgctggaacatatatctgacgatatatatttttttttcttaattaataattacttactcattcattcaatttacttcaataaaggtgttagcaccacttcccattgggtttgccgtcttcatggttcacttggctacaatccctgtcactggaaccggcattaaccctgcaaggagtttcggaccagctgtgatcttcaacaacgacaaagcctgggacgaccaagtaagtaaaccttaacttttggacaaattaaggtttattttttacatgaaaaaatatatatatttgttaacaccaataacatatgattgtgattgttctttttagtggatttactgggttggaccgtttgttggagctgcggtggctgcaatctaccatcaatacattcttagaggttctgcaatcaaagctcttggatccttcaggagcaacgcttaattaaaaaa

SEQ ID NO: 4162 - DNA, 294 bp, Glycine max
ggaaaagccaaataccgtgggctcttgaatttgtagataagaatgcttttatgtcaagggtgtatttgtatcccttttgtttttaatttcttttttcttccaagtatttatcatcatgtgttcacctttatataatgtggaggatcattagccaagttttctttttgcctgtttcattcgtaagtggtgtatcttcatcatcatcatgcttccgcacaaaaatttatcactctttacctctgttccgaatgccttaaaaaaaaaaaaaaaaaaaaaggggggccgccgtttatt

SEQ ID NO: 4163 - DNA, 757 bp, Glycine max
gcaggttcaggattcaacacactttttgctataggaggagtcttcaatcttcttcatctacatctgtactagctataccgttccttctgccacaaattaactggaaaggatggtgctgcccaagttctctccgttctcacggcttctcctttcttcccttgtgattctcttaataagctatccagttaaatgtgacgatgatgaggaagacaatctttatcagggtatcaacaagtatcgagcatcgttaaacttgaaagctctaacaaggaatgacaatgcagattgccttgctgaaaaaatagctgaccaattcaagaaacaaccctgcacaaataccacaggtgctaacactgtacctggcacagagcctcagttttctaactatccagaccttttatctaagtgtgacttggctatttccaacacaagggatggaaatgtaatgcctgcttgtgttcctggcctggttccaagtcttgtcctcgctaatttcaccaaatctctctactctgatagtctcaacgacacaaagtatacaggaattggtattggttcagaagataactggattgttgtggtcttgaccactaacactccttcaggaacctttgctccctatagttctgatggtgccaatttgatttctaaacctggattgatttactgctcagtgctcttcttaggttacattttcctgttatgaaaaaaggtggttggctgttggaatgcttcatagttaaaattttgttaccaa

SEQ ID NO: 4164 - DNA, 553 bp, Glycine max
cttgatctttatgagcgggttataaaaacaattataagcaaaggtaatgtttctggcactgtaattggagaagctctaaatgcttatgcctcaagaaggatgcctggtttcaacaagggtgtgatccaaggagatattgtaagaaatagattactgttggagaccataatccgaatattacccttggacgtgggcagtgtctctttcagtttcttggtgaagttattaagggtagctattcagttggaacgtgaagagttggagagatctgaactgattaggagaataggtatgtgccttgaggaggctaaggtgtctgatttattaattcgcgccccagttggtgacacagtttttgatgctgacattgtgcaaaggctagtggaagagtttgtagcatgtggtcaacatgttcagacggatactctgttggaagatgactttcaggaggagatcagaagccccgggatggtttcagaatcttcaaaggcaaaagtggcaaaattggtggatggataccttgctgagattgcacgtgatccaaatttacctt

SEQ ID NO: 4165 - DNA, 516 bp, Glycine max
  unsure (1)..(516): unsure at all n locations
agggattggattggattcgtaaagaatattaaaaagcggaagaaagcagagcagagagggaggtggaaaaagaaaaaggaagaaggaatgagtgcaacagtgactctaactctaaacctatgccgttcttccatcgtcgcttcttgtccacattatagccacaaaccaaaccctaatttcaatgccttttttagcttctctttgtctctgtctctgtctcaccacagacgcatcgttatctacaagaaaccattcccctctagacggacgtggctttatggatatatgaatagagatcgagattatgaattggagaatgggttagccttattcggttctgatgaagaactagcaacacaaattccaactcaggcccagtcacttgttgaaggatcaggctccattcgcatagcggagttcaagcctgttcctgatgttgattatcttcaggagttattggccattcaacagcaaggacctanagctattggcttttttggaactcggaacatggga

SEQ ID NO: 4166 - DNA, 360 bp, Glycine max
gggattggattcgaggataattattatcgtaaagaatattaaaaagcggaagaaagcagaacagagcatagcagagcagagagggaggtggaaaaagaaaaaaaggtgaggaagaaatcgaggaaaaggaagagaagaagaaggaatgagtgccacagtgactctaactctaaacctatgtcgttcttccatcgttgcttcttgtccacattataaccacaaaccaaaccctaatttcaatgccttgtttagcttctctttgtccctgtctctgtctcaccacagacgcatcgctatctgcaagaaaccattttcctcaagacggacgtggcttcatggacatatgaaaagagatcgaga

SEQ ID NO: 4167 - DNA, 1875 bp, Glycine max
aatgataataattaattggggaagatgcgttgtgaccgcttatctggtaatccttatccgtatcggtccgcaacgcaattgagtgagagtgaggcccttatttatctctctccgccaaattctggttgggattggttcttcttccacttccaacgccatgcctctttttggaattttccagataccctcatttatggacataatcactgacctcgccatgttcattactccgctatggattgcggttatcgtcggcgtcgtcgtgggctgggcgtggaagcccaaatgggcctttcaccccaaagacgctcttctcaagtttcgctctcctcgccctcccaatccccaaaacgacaccgcttttacctactccgccaccagttcctccgcgcgtgagaaagacgcgagtgggagtcctgtggtgacggaagacgatttgctgcatctgtggaagttggttgaggaaaaagacggagggcgggcatggattcagatgatggaccgttctaccccgaccatgacctatcaagcgtggcgtagggatcctgagagtggaccgccgcagtaccggagcagaacggtgttcgaagacgcgagtcctgagttggtgagggatttcttttgggatgatgagttcaggttgaagtgggatgacatgcttatacatgcttccaccatacaggagtgtgtcctcactggaacaatgatggtgcactgggtgcgcaagtttcccttcttttgcagtgacagagagtatataattgggaggcgaatttgggacgcaggacgaatttactactgtgtcactaagggagtaccttgcccctccatgccaaggcataataaacctaaacgagttgatttattttattcaagctggtgtattcgtgcagttaaatcaagaaaagatgaccagctgacttcatgtgaagtgttattgtttcatcacgaagatatgggaattccctgggaaattgctaagcttggagttcgacagggtatgtggggagctgtcaagaagtttgatccaggactacggacatatgagaaacaaagggtttctggtaccccattgtcaccctgtgcacgtgctgctaagatcaacactaaagtaaccatggactatgtgaggtctctggaaaacacgaccagtgacttgttggagactgaaaatcaggattcttctgacaaaccaggtggaaggaacatacctaagcttttaattgttggtggagccattgcccttgcctgcactcttgatcaaggactactgactaaggcagttatatttggagtagcccgaaggtttgcaaaaatgggaggaaggaggttgtgatacattatgctttttgctttgagaaattgccaggccagccaattccctctggcagtagaattagaaattgagatgtcacttcttgctttggggcaaatgtttattctggatctagttggcagccatggttcaagaagaatggtattattctttctccatttgtttgatctatgaggcggcttttaactggaaatagctacattgtatctttatgtcattaaaaaaagattgtcatgctgcaggaataacatcaatattcaggtttttcttttagttcatgttttttttactgttagctctctctgccctcttctttttctaccgtttgattctgagaaatacagtgaacaagatatggtagctctcaaaatttcgttgcatgaatgtttattgtatttgccaagtctctgtagataaaatgagaagaccggcagttgatgaataatcacagtcaacactttgcagtttgcagggtaggtggttgttgaattacgatttaattattggtcctttaatcgttatagttaatattcattttt

SEQ ID NO: 4168 - DNA, 607 bp, Glycine max
gtcctcgtgccgattcggcacgagcactgacctcgccatgttcattactccgctttggattgcggttatcgtcggcgtcgtcgtgggctgggcctggaagcccaaatgggcctttcaccccaaagacgctcttctcaagtttcgctcccctcgccctcccaatccccataacgacaccgctttcaccttctccaccaccagttcctccgcgcgtgaaaaagacgcgagtgcgagtgcgagtgcgagtcatttagtgacggaatacgatttgctgcatctgtggaagttggttgaggaaaaagacggagggccggcatggattcagatgatggaccgttctaccccgaccatgagatatcaagcgtggcgtagggatcctgagagtggaccgccgcagtatcggagcagaacagtgttcgaagacgcgagtcctgagttggtgagggatttcttttgggacgatgattacaggttgaagtgggatgacatgctcatacatgcttccaccattcaggaatgtgtcctcactggaacaatgatggtgcactgggtgcgcaaggttagctagctagctagctagcttcttctacactctttgtagtgaaag

SEQ ID NO: 4169 - DNA, 667 bp, Glycine max
tgatctggctcccacacattatgtccctactatgagtcgacatcctgggacaggagattggtacccagcaattaataaacctgctgcagtccttcactggcttaatcatgtaaatattgatgctgaattcatagtgattcttgatgctgatatgatcttgagaggcccaataacaccatgggagttcaaagctgctcgtagtcatcctgtttcgactccctatgactaccttatcggctgtgataatgagcttgcaaaattgcatactagccatcccgaggcttgtgacaaggttggtggtgttatcattatgcatattgatgatctccggaaattcgctatgctatggctgcataaaactgaggaggtccgagctgatagagctcattatgcaagaaatataacaggagacatatatgaatctgggtggattagtgagatgtatggttactcatttggtgcagctgagttgaaattaaggcataccataaacaatgagatactgatatacccgggttatgttcctgtaccgagtgtcaactatagagtctttcattacggattgcgattcagtgttggcaattggagctttgacaaagcagactggcgcaacgttgacatggtcaacaaatgctgggccaagttcccagacccaacagattcctca

SEQ ID NO: 4170 - DNA, 1134 bp, Glycine max
cacacactagctctcttgttttctttcttcttcaacataacatgcactgcacaattgcctcatgaatcatcattagtcagggtttatcctctaagaaaataaacatactatagcaatgagtgcgtccaggttcatcaagtgtgtcactgtgggtgacggtgccgttggcaagacttgcatgctcatctcctacaccagcaacacttttcctacggactacgtgccaactgtctttgacaatttcagtgcaaatgtcgttgtggatggaagcactgtgaatcttgggttgtgggatactgctggccaagaagattacaatagattgagacccttaagctatcgtggagcagatgtattcctgcttgctttctctctcataagcagggccagctatgaaaatgttgccaagaaatggattcctgagttgaggcattatgctcctggtgttccaattattcttgttggaacaaaacttgatcttcgggatgataagcagttctttcaagaccatcctggtgcagtgcctatcaccacagcacagggtgaggaactgagaaagcttatcggtgctccagtttacattgaatgtagttcaaaaacgcaacagaatgtgaaggctgtttttgatgcagccatcaaggtagttctccagcccccaaagcagaagaaaaagaagagaaagggacaaaaggcctgttccattttgtgatcttcagttcttaatatagtagtttgtggaggatgacatgactgtagtcttcatcattctatatcttatactatttccaacctagatgaaggaatcatcatgtccaactgaccgcatcaaggttcgctcataagcatcgagctatctgtctaattgtctctggctgtaggatctgtacagtcgtaatttcaatatgtttggtgtgcacacaacacttgcgttactgctggccgtttacctgctgtattgattattaaatggccatttccaccagtggacgcgggttgtattcatgttgtaatctaatctaggaagtgcttgcatatgtggctttggatgtgaaccaagtatatgtcattaattatgttagctgcttttaacagcttggatatatagatggtttgattaaaaaaaaaaacaaaggg

SEQ ID NO: 4171 - DNA, 433 bp, Glycine max
ctcctccttctcttctctctctcccttttcttttgtttctttcttcttctacatccactgcacaattgccacatgaatcattagttagggtttattctccaagaaaagcaatgagtgcgtccaggttcatcaagtgtgtcactgtgggtgacggtgccgttggcaagacttgcatgctcatctcctacaccagcaacacttttcctacggactacgtgccaactgtctttgacaatttcagtgcaaatgtagttgtggatggaagcactgtgaatcttgggttgtgggatactgctggccaagaagattacaatagattaagacccttaagctatcgtggagcagatgtattcctgcttgctttctctctcataagcagggctagctatgaaaatgttgccaagaaatggattcctgagttgaggcattatgc

SEQ ID NO: 4172 - DNA, 524 bp, Glycine max
aggaactctgataagaaaacataataatgggttcacaaaattgtatggataggaagcactatgttctggtgcatggggcatgccatggagcttggtgttggtataagctcaagccacgcttggaatctgcaggccataaggtcacagtacttgaccttgcagcttctggaaccaacatgaagaaaattgaagatgttgatactttctcagagtattctgcgcctttgttgcagctaatggccacaattccctcaaatgagaagttagttctagttggtcacagccttggagggctgaacatagcacttgccatggagaaattcccagaaaaggtagcagttggtgttttcctaacagcttttgctccagacgctgaacaccacccatcttatgtcttggaaaagtacagcgagaggaccccgttagctgcatggttagacactgaatttgctccaagtggaaacaaaacaacaatgttctttggccccaacttcttgtccgacaagctctaccaactatcccca

SEQ ID NO: 4173 - DNA, 626 bp, Glycine max
gggatccgaggttcttaagtaacagaacacacaaaaccctagttagtgttagtgttcctcaagccaccgtaccgtctctgcctctctgcaatccacagccgaaaatgcctttcaagaggtacgttgagatcgggagggttgctcaaatcaactacggcaaggaatatggcaggctcgtcgtcattgtcgacgtcattgaccagaacagagctcttgtcgatgcccctgatatggtgaggtcccaagtcaatttcaaaaggctttcccttaccgacatcaagattgacattaagagggtccctaagaagaaagatcttgtcaaagccatggaggatgctgatgttaagaacaagtgggagaagagttcatggggtagaaaactcattgttagaaagagaagggcatccctcaatgattttgataggttcaagataatgttagccaagatcaagagggcagcggttgtaaggcaagagcttgctaagctgagaaagagcgcttaggcataacttcacattatagtcttcaaatttttgttatgaatttgcttaccttggctgttgtgagatttcatgtatcattgaaccgcttgatttaatgttagtactccaagtttccaataaaaa

SEQ ID NO: 4174 - DNA, 757 bp, Glycine max
ggcgtgtgttcctcaactcaacacactcctttataattgcagcgtcgacaaaaaccctaactcctaacctttttttcttcctttcacctcttcagcagtcgttacagagactccataacccgaaaatgcctttcaagaggtacgttgagattggaagggttgctcagatcaactatggcaaagagtatgggaggctcgtggttattgtcgatgtcattgaccagaatagggctcttgttgatgctcctgacatggtgaggtcccaagtgaacttcaagaggctatcactcactgacatcaagatcgatattaagaggatccccaagaagaaggatctcattcaagccatggaggctgctgatgttaagaacagatgggagaagagttcttggggcagaaaactgattgtgcagaagaggagggcatcccttaatgactttgataggttcaagataatgttggccaagatcaagagggcagctgttgttaggcaagagcttgctaagctgaagaaaagtgcatcataggcattatatcatgtgcaattttcaaattttgttatgaatttcattcagttagtactttttggttgctatatgagtttttatgtatcaatgagggacatcctagaaatgcttattttgaaatcattcgtgttagtggttgatcgccagttctcccaatatcattgttacaccatcaggtgtaaaaaatggattttgcttgagcggccgctctagaggatcctagcttacgt

SEQ ID NO: 4175 - DNA, 384 bp, Glycine max
gaaaactgatagtgcagaagaggagggcatccctcaaagactttgataggttcaagataatgttggcaaagatcaagagggcagctgttgttaggcaagagctcgctaagctgaagaaaagtgcctaattttcaattttcaaattttagttttgaatttccttcagttagtacattttgggtgctatatgaatttttatgtatcaatgagagacatcctagaaatgcttattttgaaatcattcgtgttattgggtgatgctagttctctctgttgaattataattttttcttttttttttattttagtggctgtcttcttactataggaagtctttcattcccgattatatttatttccggacccgttatcctttcttttatt

SEQ ID NO: 4176 - DNA, 699 bp, Glycine max
  unsure (1)..(699): unsure at all n locations
agggaatttaatggtaatggtccttcaaccccgttacgttcccggccccccggcaatccacagccgaaaaggcctttcaagaggtacgttgagatcgggagggttgcccaaatcaactacggcaaggaatatggcaggctcgtcgtcatcgtcgacgtcattgaccagaacagagcacttgatcgatgcccctgagatggtgaggtcccaaggctatgtcaaaaggctgtcccggaccgacagcatgagggtcagcatgagggtccctaagaagaaagatcntgtcaaagccatggaggatgctgatgttaagaacaagtggcagaagagttcatggggtagaacactcattgttacaaacagaagggcatccctcaatgagtctgataggttccagataatgttagccaagatcaagagggcagcggttgtaaggcaagagcttgctaagctcaacaagagcgcttaggcatatcttcacatcatagtcttcagattttagttatgaattggcttgccttggctgttatgagatttcaagtatcaccactgaaccacgtttggtttaccgttagggatttatgtcagcactccaagtttcaagcctttgcattttcttgcagattttaccatattattttcaatattaacttatattcccagccgttgcaagtgagagttgcaattggttttttccat

SEQ ID NO: 4177 - DNA, 571 bp, Glycine max
gcgcatgtgaccccctgtcccctgtcccctgtcccaacacccaaaacaacacaacaaatagaactcatacctgtgaccgtgttggttaacttcacacttcactctctagtcatggcttcttctcttcctcttctcaaccttcttaccctcgctctgtcactactcttctgcattgccttaacttccgaggttggcgtgcaggcgcagatggaggagacaggcttgaacctcatgtcggaggcgttggagtggccaaccgcaatgtcgctctacgacgaagacagcgaagaagaggatgtccagaacggttacagtcggagatcgttgttctggcggaggatgaagtactacatctcctacggtgctctttctgcgaaccgaatcccgtgcccacctcgttctggtagatcttactacacccacaactgctacagggcccgaggccccgttcacccttactccagaggctgctctgtcatcacgcgctgccggagatgagtgagttcggatctgatcacacgcgcgcctcacgcttcagatcgcatataaaaaaaaccaccgtctagggtct

SEQ ID NO: 4178 - DNA, 454 bp, Glycine max
agaaaaagcgataaatgtgcggtctctcaccgcacgcactagcactgtctctcactgaaacttgttcgcacattttcacggatctaactaagttatcgccatgaatcgccaccacgatcccaatcccttcgaagaagaagaagtcaatcctttttcgaatggcactactgctcctgcatcaaagtcacgtattccaccattagcatctgagtcactgggctttggtcaaaggcatgatgctacagttgatattcctttggatactacaaatgactccaagaaaaaaggtcaagagctagcagcttgggaagcagatttaaaacggagagagaaggaaataaaaagaagagaagaggctgtttctagagctggtgttcctgttgatgataagaattggcctccatttttcccaatcattcaccatgatattgccaatgagataccagttcatgct

SEQ ID NO: 4179 - DNA, 462 bp, Glycine max
aggcgtcagtacaggctgcgagagggacgactgactgggactaacaagccaggtagccagaaaaaagggagagaagtgcggtctctcaccgcacgcactagcactgtctcactctctcacgcacgcatcatctcaaacttgttcgcactttttcacggatctgatctaactaagttctcgccatgaatcgccaccacgatcccaatcctttcgaggaagaagaagtcaatcctttttcgaatggtggtgctgctcctgcatccaaatcacgtattccaccattagcatctcagccactgggctttggtcaaaggcatgatgctacagttgatattcctttggatactacaaatgactccaagaaaagaggtcaagagctagctgcttgggaagcggatttaaaacggaaagagaaggaaataaaaagaagagaagaggctgtttctagagctggtgttcctg

SEQ ID NO: 4180 - DNA, 1209 bp, Glycine max
gcttgccccctccaaccccctttctttcctcttctcttattttcatttatttgctttgcttaatacttattttcaagggatcaatacaatataatggttcaaacatgctaacggtgtatgctcctagagctattctgaagtgtcatttacaccaagattcagcttctgctcaacaaccagcatatccatgcaagatcaataataatgctaatttggtgaattgtaatcctaaaccttttggcactccttgtagtaatatattgtttcatagttcctcctctgggaaatgtgataagctacaaaagagccttcatctattccatcatgtcgccacacataaatggctgtgtgggttacaggattccatttcatctgatgatgagtatcgttcttcccgcaacatagccatcagcttgttcaggcgatacaggaacttcattgatcgtggtggagccgacaatctaaaagagttcatcactgccggggtaaatgcatatgcgctaggatgcactgatgaaggattaaggaaagaacttgtggatatgaagaattctgggatcgaaattgatgtaatgcaaagttatggtggaagcacaagcttaaaatctaagatcatctcagaggaggttgatgaatgcattctctggctaagcattatattcatcaccatcttgtgtacaccccaaccaactattgttagatggtcatctacaactccagtctcagatgaagttagacttcagtggaaaggcttttgtgctcttatagcaaatgcatattttatgaagggaatggcttggcttcctgtaaagactcttcagttagaacagacggctgtgatgggtcaggctgagaaaccgtcagttgttgctagcagaatgcgattaatctttagcacacttgaggtagtgagtccacagtggccaagagcatagataatgggatcattttaaaactggctcccaaccatttcacattgagttgtattccatatttgctaacagatgtagcaatatcgtgccagagaggatattaaaaaggaaaagaaaaaactggatttctattttgtatgtatgaaaatgagatacatgatatattgcaattttagtgatatactaaattagaggaagactaattcccaattggtccaaaaaagaaagtattgtttaatacttacattcatttcaaaaaaaaaaaaaaaagggcggc

SEQ ID NO: 4181 - DNA, 291 bp, Glycine max
atttggtgtatctgctaagcctatataccttcaggagatttcactctgctccccacccccctttcctctcctattgattactacttattttcaagggatcaatacaatataatggttcaaacatgctaacggtgtatgctcccagagcagttctaaagtgccatttacaccaggattcagcttcttctcaactaccatattcatatccatgcaagatcaataactaagcctcatgtggcgaattgcaatcctaaacctgttggcactcccagtactaatatatcagtatat

SEQ ID NO: 4182 - DNA, 1053 bp, Glycine max
catcaaagtccgcttgtgattgtctttgtatcacgaaaactatacgattcgattccttgttttcaatggacaccttcttcaattctcaatcttcttcttcttcgagaagccgctggagttacgatactctcaagaatttccgtgagatctctccgctggttcagaatcacatcaaacgggtttattttacgttatgttgcgctgtggtggctgctgctgttggagcttttcttcatgttctgtggaacattgggggttttctcaccacgttggcttccattggaagcatggtttggttgctatctacaccccctgttgaagagcaaaagaggttgtctctgttgatggcttcggccttgtttcagggcgcttccattggacctctgattgatttggctattgccattgatcctagccttattgttagtgcatttgtggcaacttctttggcttttgcttgcttctctgcggcagctttagttgcaaggcgtagggagtacctctaccttggtggtttgctttcttctgggctgtccattcttatgtggttgcactttgcttcctctctctttgggggctcaattgcactcttcaagtttgagctgtactttgggcttttggtgtttgtgggctacgttatagtagacactcaagaaattattgaaagggctcactttggtgacctggattatgtgaagcatgcattgacattgttcactgatttggctgcaatctttgtgcgaattcttattataatgttgaagaattcatctgagagaaatgagaagaagaagaaaaggagagattagtaggctgaccgaccgactcgagctcaggcttctctacagtaatttagtttgtggagaatacataattagctgtttagatgatgttggtcccttgtgtagttagttagctatgtgtttgctgtaatggtaaatgtcaggatttcttttaaacatcttcatatgtatttgccaatatcataatgtgtcgtataacatcataccttggtttaagcagcatgttgacgaaaccttcactaaattttaa

SEQ ID NO: 4183 - DNA, 701 bp, Glycine max
caaacacagcagttacgccctctttctctctcccacccatatccccaaaacctgcctctgtcatctgtgagagtggctcataccatatcatatcacatcttatccagacaaaacaactgttatggataggtatcagagggtagagaagcccaaggcagagagccctataaacgagaacgagatacgcgttacttctcaaggaaggacgaggaattacatcacctacgccaccactctccttcaggagaaaggatctagtgaaattgttctcaaagcaatgggacgtgcaataaataagaccgtaatgattgctgaactgatcaagagaaggattgttggtctgcatcaaaacacccaaattggatcaactgatataactgacacatgggaaccactagaagaaggccttcttcctttggagactactcgccatgtttcaatgatcaccaaatactaaatttctgcgtttgggagtgattcctttggttttgcgttgtacttgcccaatttggagactactcgccatgtttcaatgatcacaattaccttgtcaaagaaagaattggatacgtcatccgcgggataccaacatactgttccagttgatcaagtaaaacctttaaatgaatatgaagaggaaggaagtgagttgataagttattcttttaatgcttcaagactggattttgtagcatgttgac

SEQ ID NO: 4184 - DNA, 327 bp, Glycine max
  unsure (1)..(327): unsure at all n locations
ggagagtgcaacaacaaacgcaccaggtacgctctctttctctctccctaaatttcaattcaaaccacaaacacaaacccatatccccaaaacctgtgtctgtcaactgcacttagagagagtgagtgacgcaaccagactagcacgcacaacacacaataactgcatatggataggtatcagagggtagagaagcccaaggcagagactcctataaacgagaatgagatacgcgtcactactcaaggaaggatgaggaattacatcacctacgccaccactctcctccaggagaaaggatctagtganattgttctcaaagcaatg

SEQ ID NO: 4185 - DNA, 650 bp, Glycine max
aaagaaatggctaagaacagaccaattgatactaaggggaagaaaggatttaaagtacttgtgctcaatgacgttgacaaactctctagagaagcccaacattctctccgcagaaccatggagaaatacagtgcttattgcagattaattctatgttgcaatagttcttctagagttacagaagcaatccgctctcgatgtctcaatgtgcgaataaatgcaccaagtgaagaacagattgttgaagttttagaattcattggtaagaaggaagggctgcaacttcctcctggttttgctgctcgcattgtggagaaatcaaatcgaaatttaaggagggccatattgtcatttgagacttgtcgtgtccaacagtatcctttcactaacaaacaaacaattcctccaatggactgggaagagtatatttctgagattgcatctgacataatgaaggaacagagcccaaaaaggttgtttcaagttcgaggaaagctctatgagctgctaatcaattgcattcctccggagatcattttaaagaggcttctttatgagctattgaggaaactggatgcagaactaaagcatgaagtatgtcattgggctgcatattatgatgcgtctcggacagaaggcgatctttcaca

SEQ ID NO: 4186 - DNA, 720 bp, Glycine max
aaacagagcatctctctgttctctgttctgttctgattctctctctttctgactttctctttctctcccccctcatatattcttcttttcttcagaaggaccacttcactttcagaaacccagtttcgcatctgggtttttgtttgttgaagtgccaattttgaagattaaaataaaataactatgacttggaaaagcagaggagaattgccttctagaagcgttatctcgcagagatgggcactgtttctctgcttaggaagtttctgtgctggaatgctcttcactacaaggatatggactatacctgaaaacaacaaaggactagcacggccaacagcctcagaagctgaaaaattgagtttagtttcagaaggctgcaattccagaattttgcaagagatggaaatgaagcacgataaagacacttatggtgaagttttcaagagtcataattccatacaaacattggacaaggctatttcaaacttagagatggaattggctgctgcaagggcaactcaggagtctctacgaagtggtgctcctatttcagatgatataaggttgagtgaatcttcttcgggtaagagaaagtaccttatggtcgttggtattaacactgcattcagcagcaggaaaagaagggactcggttcgagccacttggatgccacaaggtgagaaaagaaagaagctagaggagaagggcattatcatg

SEQ ID NO: 4187 - DNA, 455 bp, Glycine max
cacctcaacacattcatacaatttccataaagcacaccaacaacaaattacaacttcaaataaaacagagcatctctctgctcttctctgttctgttctgttctgttctgtttctctctcctccccatatattcctcttcttcttcagaactcagaactcagaagggccacttcacttttagaaacccagttttgcatctgggtttttgcctgttgaagtgccaattttgaagataataataaaaacaattatgacttggaaaagcagaggagaattgccttctagaagcgtcatctcgcagagatgggtactgtttctctgcttaggaagtttctgtgctggaatgctcttcactaccaggatatggaccatacctgaaaacaacaaaggactagcacgaccaacagcctcagaagctgaaaaattgagtttagtttctgaacgttgcaattcg

SEQ ID NO: 4188 - DNA, 547 bp, Glycine max
cgcaactattcaaacactgaaaccaagcaacaatcttctgttcccattctccattcgtgagttcacgaacacaaatgttgtccttaacactacctattcctctgctgaaaaccctaactcctccttctccaaacattaacaacccctctctctctccctattctcattatcaacctcgttcccgttccctaacacggggacttatagtccccaaacacagctccgccactgctcctccgagcgcgacgcttcgggacgacggaacctcactcgctggagattcaccggagccgcttccggaggagttagtggcggagctgatgccaaagcacgtggcggtgattatcgacggacatggtaggtgggccaagttgagagggctgccggcgtccgcggggcaccaagcgggtgtgcagccactgaggacggtggtgaggctgtgttgcagtttcggtattcaggttctcacggttttcgtgttatccactgagaactggtttcgccccaaggtggaggttgactccttgatgaagctctttgagacaac

SEQ ID NO: 4189 - DNA, 955 bp, Glycine max
tttgatttggaacaaacaacaatagaggggttgtggtgctctgtgtgctgcaatttccttttgagcttgtgtttgattcatcaaatcatcaaagatgactgtaggggcaggaatatctgttgcagatgggaacttgatggtgttggggaacaaagtgctgagccatgtccatgacaaggttcttgttacccctgcatgtggtggtgctttgctcaatggggcattcattggggttcaatcccatcacaagggtagccgcacagtcttcccaattggcaagcttcaggggttgcgatttatgtgtgttttccggttcaagatgtggtggatgacgcagagaatgggcacttgtggacaagatatccccattgagacgcagttcttgctcgttgaagcacacaatggctctgatattgaaggaggaggagaccaaggtgctgctacctatgcagttttcttaccccttctcgaaggagatttcagagcagttcttcaggggaatgatcaagacgagattgaaatctgtgtggaaagtggttgtcctgctgtggaggaatttgatgggactcatttggtttatattggggctggatccgatccttttgaagtcataacaaattctgtcaagactgttgagaaacacttacagacctttgcacatcgcgagcgaaagaagatgccagatatgttgaactggtttggatggtgtacatgggatgctttctacactaatgtcacttcagagaatgtgaagcaaggattgcagagctttgagaaaggtggaattcctgctaagtttgatataattgatgatggatggcaatctgttgggatggaccccaatggtgttgaatggaaatctgatagttgagccaactttgcagatcgcttaacaaacataaaagagaatcacacattccagaaagatggcaaggaaggtcagcgggtagaggac

SEQ ID NO: 4190 - DNA, 764 bp, Glycine max
ttcttctcattagctagaactcgcagcaccaccaccagcaccaccaccagcaccgttctattcttcttccacaatgggtatctctcgtgattccatgcacaagaggcgcgccaccggcggcaagaagaaagcttggaggaagaagagaaagtatgagcttgggaggcagccagcaaacacaaagctatcaagcaacaagacggttaggaggattagggttcgcggtgggaacgtgaagtggcgcgctttgaggcttgatactgggaactactcttgggggagtgaggctgcaacccgcaagacaaggattcttgatgtggtgtacaatgcatccaacaatgagcttgttcggactcagacattggtcaagagtgccattgttcaggtcgatgcagcacccttcaagcagtggtatctgcagcattatggcgttgaggttggccgcaagaagaagagtgcagcagcttctgtcaagaaggaaggggaggatggtgaagctgcaactgaggaggtgaagaagagtaaccatgttgtgagaaaattggaaaagcgaaagcagaaccgggtgcttgatcctcacattgaagaacaatttggaggtggtcgccttttggcttgtatctcatctcgacctggccaatgtggccgtgctgatggatatatattagagggcaaagagctggaattttacatgaagaagcttcagaagaagaagggcaagggtgctgcttaagatattgtctctcttcctactcgttgtatca

SEQ ID NO: 4191 - DNA, 1371 bp, Glycine max
ggtcgaccacgcctgctacggctgcagaagacccacatttggggcattggggcatgcttttaatttcctagatctcccaaacaaattgtagcataagtcccatggccaaagagactagtgttgtttatctatatcccagcaaatcacaagtttggggtgagaattttgatcataaaaaacttgtaataacaacactagctgctaatggaaagaaggaggagagtaatggagcacctaatgacacatatcctgcgtttcccgggtggtatgctgatgtttcctggccaggagaagcacacacatataaaatagaaaagattctattccacgggaaatcagaattccaagagcttcttgtatttgagtcttctagacaaggcaaggttgcaattcttgatgggcatatccagctgacagaaaacgatgaatttgcttaccaagagatgctcactcaccttgcactctgttccattccagatccaaagaaggtgctgcttattggagggggagatggtggaattcttagggaaatatcacgccattcttctgttgagcatattgatatatgcgaactagaccaaatggtcattgatgtttattcggagtttttcccggatatagctgttggttacgaggatccccgagtgcatgttcatatcagcgatggagttgcgtttatcaattctgttcctgagggcacttacgatgtcattatatcggatgcttttccagcaatggggcatagtgctgatgttcttgctgatgaatgcttcttagaatcagtagcaaaggctcttcgacccggaggagtgttctctgctccagcagacagcctgtggcataagaactttgtggttgcagacaccatagcaaattgcaagaagatattcaaaggctccgttaactatgcttggaccacggttcctacatatgcaagtggggtgattggattcatgctttgctctacggagggtccaccagtgaacttcaaacatccaataaataaattgaatccagagaaaaatggggtggcaaagggacctactaagttttataacccagagatccatgctgctgcattctgtctgccttcttttgtggacaaggttgattgatccaacagacattcataaatgactcggtagcattaaggaattgctgttagttaccctttgtttttgctgtgtcgttctgcatatttatgatattatccttttattatgttatttagttttattttatattccctaaaatattagatgttacacacgtgtatgattatcatctaatgtaaggtttgcacctattgaggtatcaatgaaatgaaatctgaaatttagtttttccaacgaaaaaagggtcgtccagttc

SEQ ID NO: 4192 - DNA, 853 bp, Glycine max
cccacgcgtccgcccacgcgtcccaccccttttattgaaatcctgagcttccattgtgctcactcatctcttacaacgaaaccctcttcatcttgttctatctgtgacgagcatcatggcctcaagagcagtgttattgttggctatgtgtgtgcttccggcgatggttgtggccattcgcccagcaaagaaccctttttgcgtgaagggtcgtgtctactgtgacccttgccgtgctggttttgagacctcagctaccacctacattgctggtgctgagattatgttgcaatgcaagagcagggttagcaacgaggttgtgtacacgaagaaggggtacaccgactcaaccggagcatacacaatgtacgtggatgaggatcacgcagatcagatctgcagtgccaagcttgtaagcagccctcaccctcaatgcaaggaagtcaccccaggccgcgacgaagccgtcgtgattctcacccgctacaacggcattgcctccgacgataggttcgccaatgccatgggcttcatgtctcaggaggttgcttctggctgtgctgagatcctcaggcaataccaggagttcgacaatgagaattaattacgtaattaatttcagtatattattaatctacttcctaatgtctcttgatgtggagtgttatctcgacattttcatattatcatgttatatatgttgatggaacgaccctgcttaattttataattacatcaagatctgtcctggacttgaggatggtagcagtctattttgtgtcgttataataaactattcttttatagatgcattcattgaggggttttgtttttcgtcaagaacaaggatgat

SEQ ID NO: 4193 - DNA, 765 bp, Glycine max
ttgggggccccatatgaaaagttataagttgcaatgcacgggtagttaactttggtccctttaaacgggcccccctttttttttttttttttttttttttttaaccctttttttttttttttttttttttttttttttttttttttttttttttttttttttttttttttttttttttttttttttttttgtgtgtagaaatatatatgctgtatagtaaaaagatgtgtcaactacatgcatggttggcggaaaacattcaacctatgccagcccaagcacggatagagtccatgcttttatttcttatttcttacatatatactagttattacatggagtacactcaagtatatgagtgtgttcagttcatatatttgtgatttttacttcagcaacatttgcagccctttcgaccgcagcatctgcatcctccgccatgtcctccaccgtgtcctcctccgccatgtcctccaccgtgtcctcctccgccatgcccccagtctccaccgtgtccccagcttccatcatgccccccacttccacctcttccccaggcatctggctgtgtctttggttcttctgcttgtgtctcatctttggatggctcagttgccacaacagagatgagaagcagtgcacagaggaagcacaagaagaaaacgggcttggtattcatctttgcaattaggttatatgaagagggcgggtgggcggacgcgtgggcggacgcgtgggcgtacgtcgtgggtcgagccggacatt

SEQ ID NO: 4194 - DNA, 612 bp, Glycine max
tttcagggttttttgtgcccaatattaatgtcggtttttttatattataataaggtttttttcgtctttatcttttttatttttttttttgagtgtagaattatatatcttgtatagtaaaatgatgtgtcaaactacatgcatggttgatggaaaaccggtcaacctatgacagccctagcacggatatagattccatgcttttatttcttaattctacatactatacttattacatggagtacacacgtatgtgtgtcttcagttcatgtttgtgtttttttacttcagcaacatttgcagccctttcgaccgcagcatttgcatcctccgccatgtccaccgccatgtccccagcctccaccatgtccccagcctccaccgtgtcccccgcttccaccatgtcccccacttccaccatgtcctccacttccaccacttctccaggcatctggccgtgtctttggttcttctgcttgtgtcgcatctttggatggctcagttgccacaacacagatgagaagcagtgcgcagagtaagcacaaggagaaaaagggcttggtattcatctttgcaattagtttaattatataagatgagcggacgcgtggg

SEQ ID NO: 4195 - DNA, 1012 bp, Glycine max
  unsure (1)..(1012): unsure at all n locations
tcgtccacgcgttcgnccacgcgtccgnccacgcgtccgggttttagttgccagaccaccttcctctacggtgcgctccaacgcacttgaacatttatcacgcgctttgcttttgttttctttatgcattttctctagcttccccacacactcaaaccatcccttttattgaaatcctcaagcttcaatttgctttgtgctcactcatctatctattataaccaaacactcttcttcatattcttcttcttcttcttgttcttgttctatctgtgacgagcatcatggcctcgagagcagtgctattgttggctatgtgtgtgcttccggccatggttgtggccattcgcccagcaaagaaccctttttgcgtgaagggtcgcgtctactgtgacccttgccgtgctggttttgagacctcagcaaccacctacattgccggtgctgagattatgttgcaatgcaagagcagggttagcaacgaggttgtgtacaccaagaaggggtacactgactcaactggagcatacacaatgtacgtggacgaggatcacgcagatcaaatatgcagtgccaagcttgtaagcagccctcaccctcaatgcaaggaagtcaccccgggccgcgacgaagccgtcgttattctcacccgctacaacggcattgcatccgatgataggttcgccaatgccatgggcttcatgtctcaggaggttgcttctggctgtgctgaggtcctcaggcaatacgaggagttcgacaatgagaattaattacgtaattaatttcagtaatactgttattattaatctactttcgatttgggttttctaatgtctatttaattcaatcttgatgtggagtcttatctcgacattttcatattatcatgttatatatgttgatggaccgaccctgcttaattatattattacatcaagatctatcctggactatgaggatgatgtagtctattttgtgtcgttataataaactattcttttatatctgc

SEQ ID NO: 4196 - DNA, 1035 bp, Glycine max
atccatcgcattgaaaagcagcaccatcaccacccccacctcttaccccttctttcataaatatgcgtctctgcaacaacatgtgcgtctgcacctacatgttcaccaccacctccttgttcttcacatcatcctcatcatcttcttcaatcagttgactcttcgttcctccctctattctttcggatggagcccatggacatcgttgggaaggccaaggaagacgcttctcttcctaaagcgacaatgacgaaaattattaaagagatgttgcccccggacgtgcgtgtcgccagagatgcacaggatttattgatcgagtgttgtgtcgagtttataaaccttgtctcgtcagagtccaatgaagtctgtaacaaagaagaaagaaggacgattgcaccggagcacgtgttaaaggctttaggggttcttggatttggcgagtacattgaggaagtttatgcagcatatgaacaacacaagttggaaacaatgcaagattctttaaaaggtgcaaagtggagcaacagagctgagatgactgaggaagaagcattggctgaacagcaaaggatgtttgcagaggcacgtgcaagaatgaatggaggagccattcaatccaaggagccagaggctgaccaaagtttagagagcttactttataggacacttttattttcttttgaagcataggcaagcagcatctcttactcttccctatgcgttgttaatttagctcgattttgcacatacccccattcactagtttgctggcctacgtgaatgtactcgccatttgtgttcttttagtaatccatatttgtaagttaatgtaattattggagttcatctaaaccctcgtctatttagaattttacatgtagttatcatgtagattatttcatttacctgttgtatctcccacaccaacaacagctattgccttgattttgacaatagttgctatattagaatgtaacaatctattatattctgttatatagaaagtcgtgaaggttttacaacacaaaaaaa

SEQ ID NO: 4197 - DNA, 1056 bp, Glycine max
  unsure (1)..(1056): unsure at all n locations
gcatgacggaagagctctctctctctcttgttcttatccatcgcattgaaaagcagcaccatcaccacccccacctcttaccccttctttcataaatatgcgtctctgcaacaacatgttcaccaccacctccttgttcttcacatcatcctcatcatcttcttcaatcagttgactcttcgttcctccctctattctttcggatggagcccatggacatcgttgggaaggccaaggaagacgcttctcttcctaaagcgacaatgacgaaaattattaaagagatgttgcccccggacgtgcgtgtcgccagagatgcacaggatttattgatcgagtgttgcgtcgagtttataaaccttgtctcgtcagagtccaatgaagtctgtaacaaagaagaaacgatggacgattgcaccggcagcacgtgttaaagggcgttaggggttcttggatttggcgagtacattgaggaaagttatgcaacatatgaacaacacaagttggatacaatgcaggactctttaagaaggggtggtggtggtggtaaatggaacaatggagctgagatgactgaggaagaagcattagcagagcagcaaaggatgtttgcagaggcacgtgctaggatgaatggtggagccattgcttctaagcagccagatgctgaccanagtttagatagctaactttaggatctttattgaagcataggcaagcaccaccctgactcctcctgtctgtgctttcaattagctcgattgtgtacaaaaaccgttcactagtctngccggcctatgtgtgtgctcatttgtgttctttcagatgaatccatatttgtaagtcaatgtaattagtgagagttcatctaaaaccctcgtcgatttagaatctaatgtctcttgatgtggagtgttatctcgacattttcatattatcatgttatatatgttgatggaacgaccctgcttaattttataattacatcaagatctgtcctggacttgaggatggtagcagtctattttgtgtcgttataataaactattcttttat

SEQ ID NO: 4198 - DNA, 267 bp, Glycine max
ctcgcattgaaaagcagcaccatcaccaccccctcgtcttccccccttctttcatagatatgcgtctctgcgacatgttcaccaccacctccttgttcacatcatcatcatcatcatcatcatcatcttcttcttcttcaatcagttgactcttcgttcctccctctattcatctgatggagcccatggacatcgttgggaaggccaaggaagacgcttctcttcctaaagcgacaatgacgtcaattattaaagagatgttgcccc

SEQ ID NO: 4199 - DNA, 1899 bp, Glycine max
cggacgcgtgggcggacgcgtgggccagcttttctccttctctctctctctctctctctctatctgctttttcttcttcttcttcttcactcagtcagatccaactcctcagataacacaagaccaaacccgctttttctgcatttctagactagacgttctaccggagaagcgaccttagaaattcattatggtggcaacagctgctacttcatcatttttccctgttacttcaccctcgccggactctggtggagcaggcagcaaacttggtggtgggcctgcaaaccttggaggactaaaatccaaatctgcgtcttctggtggcttgaaggcaaaggcgcaagccccttcgaaaattaatggaaccacagttgttacatctaaagaaagcttcaagcatgatgatgatctaccttcgcctccccccaggacttttatcaaccagttgcctgattggagcatgcttcttgctgctatcacaacaattttcttggccgctgaaaagcagtggatgatgcttgattggaagccaaggcgacctgacatgcttattgacccctttgggataggaaaaattgttcaggatggtctcgtgttccgtgaaaacttttctattagatcatatgagattggtgctgatcgtaccgcatctatagaaacagtaatgaaccatttgcaagaaactgcacttaatcatgttaaaagtgctgggcttcttggtgatggctttggttccacgccagaaatgtgcaaaaagaacttgatatgggtggttactcggatgcaggttgtggtggatcgctatcctacatggggtgacgtagttcaagtagacacttgggtttctggatcagggaagaatggtatgcgccgtgattggcttttacgtgactgcaaaactggtgaaatcttgacaagagcttccagtgtttgggtcatgatgaataagctgacacggaggctgtctaaaattccagaagaagtcagacaggagataggatcttattttgtggattctgatccaattctggaagaggataacagaaaactgactaaacttgacgacaacacagcggattatattcgtaccggtttaagtcctaggtggagtgatctagatatcaatcagcatgtcaacaatgtgaagtacattggctggattctggagagtgctccacagccaatcttggagagtcatgagctttcttccgtgactttagagtataggagggagtgtggtagggacagtgtgctggattccctgactgctgtatctggggccgacatgggcaatctagctcacagtggacatgttgagtgcaagcatttgcttcgactcgaaaatggtgctgagattgtgaggggcaggactgagtggaggcccaaacctatgaacaacattggtgttgtgaaccaggttccagcagaaagcacctaagattttgaaatggttaacggttggagttgcatcagtctccttgctatgtttagacttattctggcccctggggagagttttgcttgtgtctgtccaatcaatctacatatctttatatccttctaatttgtgttactttggtgggtaagggggaaaagctgcagtaaacctcattctctctttctgctgctccatatttcatttcatctctgattgcgctactgctaggctgtcttcaatatttaattgcttgatcaaaatagctaggcatgtatattattattcttttctcttggctcaattaaagatgcaattttcattgtgaacacagcataattattattcttattatttttgtatagcctgtatgcaagaatgacttgtccatccaatacacccgtgattgtatgctccagcggggatttatgcaagcttcccccatgggaattattgtgtgc

SEQ ID NO: 4200 - DNA, 425 bp, Glycine max
agttagtttactttttttttaacacactttcttttatatatattttaagatacgtagatttgataaaaacaagcaaagctctctatgaatttatgccactcctcctccagtgatgccaatcaataagataagattcaggtgctttctgctggaactggaacctgactcaaaacatgaccaaagttgctgcttaaaggtttgggcctccattgagtcctacccctcacaatctcagcaccatcatcaagtcgaagcaagtgcttgcactcaaaaaatccaccatctgccaagtttcctacatcagcaccagagagatcagagagggaatccagcacactgttcctgccacactccctcctgtactccaatgtcatggcacacagctcatggctctccaaaagtggctgtggagcactctccagacg

SEQ ID NO: 4201 - DNA, 736 bp, Glycine max
ttactttctacttcccctccccttttttagccaaagtaacacactttcttttatatatattttaagatacgtagatttgataaaaacaagcaaagctctctatgaatttatgccactcctcctccagttgtgccagaggataacagaaaactaaccaaacttgatgaatccgctaatttcattcgcactggtttaagtcccagatggcatgatctagatgtgaatcagcatgttaacaatgtgaagtatgttgggtggattctggagagtgctccgcagccacttttggagagccatgagctatgtgccatgacattggagtacaggagggagtgtggcaggaacagtgtgctagattccctctctgatctctccggtgctgatgttggaaacttagcagatgatggattttttgagtgcaagcacttgcttcgacttgatgatggtgctgagattgtgaggggcaggaccgaatggaggccaaaacccttaaacagaaactttggtcatgttttgagtcaggttcctgttccagcagaaagcacctgaatctcattgattgacatcaatggaagagtggcataattcatgttcccacttgcagattggagagctttgcttgttgccttaaaatataaaacaaacaaaaaataataaccaaaaccctcggtcttatcattttgtaataaaaaaatagctcctaccactaaaaaaaaaaaaaaagggcggccgccga

SEQ ID NO: 4202 - DNA, 1290 bp, Glycine max
gtgctcatttaaataatcgctggccctatcacattattgttaatattcttcccttctttaccttctactttccgaatccagaaaacaccacaacaccacccagaattgttgggttccattctcaaaacagagaacaagaagaagaagaaagagagagagtgaaaacgggaaaagcaaaaagttgtttctgtgattgattctctgcaaccgaatcatcatcagccacttcttcccgtttcatctctcccatttcttcttttcttccgctctggttcagtaaggcgaagagggttaacgttattcataatggttgcaacagctgctacggcgtcgtttctccctgtgccttcgccggacgctggaaaagggaaacccaagggtggtggtggcggcggcgtttctgtgaacctcggaggactcaaagagaagcaaggtttgtgcggttgcttgcaggtcaaggcaaacgcacaagcccctccgaagaccatggagaaggttgagaatgatttgccatggttgccgtcgtcgtcgatttcgcacgccccgaggacttttataaatcagttacctgactggagcatgcttctggccgccatcaccaccgtgttcctcgcggcggagaagcagtggatgatgctggattggaagccgcgccgccccgacatgctcattgacccctttgggattgggaagatcgtgcaggacgggctcgtgttcaggcagaacttccccataaggtcttacgaaattggcgcagacaaaactgcgtcaatagagaccttaatgaatcatttgcaggagactgctcttaatcatgttaagaccgctgggcttctaggtgatggatttggttccacgcctgaaatgtgtaagaagaacctgatatgggtggtgactaagatgcaggttgtggttgataaatatcctacatggggtgatgttgttcaagtagacacgtgggtttctgcatcagggaagaatggtatgcgtcgtgattggcttgtgcgtgacgccaaaactggtgaaatcttgacaagagcctcccagtgtttgggtcatgatgaataaagtgacaagaagactgtctaaaattcccgaagaagtcagggcagagataagctcttattttgtggattctgctccagttgtgccagaggataacagaaaactaaccaaacttgatgattcagctaatttcattcgcactggtttaagtcccagatggcatgatctagatgtgaatcagcatgttaacaatgtgaagtatgttgggtggattctggagagtgc

SEQ ID NO: 4203 - DNA, 493 bp, Glycine max
gcgtacgtaagctcggaattcggctcgagataaagagagcattacattacaataactctgtctcttttgtttaaaattagggaaacaaggaagcaaaatgacacaatagtccttcttccctgtttccactttccaggttttctccttctcgtttgttgagcgcttttctctccctctccctcttcttcactcagtcagctgccgtagaaattcattatggtggcaacagctgcaacttcatcatttttccctgttacttcaccctcgccggactctggtggagcaggcagcaaacttggtggtgggcctgcgaaccttggaggtctaaaatccaaatctgtgtcttctggtggcttgaaggcaaaggcacaagcccctttgaaaattaatggaaccacagttgctacatctaaagaaatcttgaagcatgaggatgatctaccttcaccttcccccaggacttttatcaaccagttacctgattggagcatgc

SEQ ID NO: 4204 - DNA, 441 bp, Glycine max
cccacgcgtccgcccacgcgtccgcccacgcggccgctctcttttccaaaattagggaaacaacaaggacgcaaaatgacacaatagcccttcttccctgtttccagcttttctccttctctctctccatcttcttcttcttcttcactcagtcagatccaactcctcagataacacaagaccaaacccgctttttctgcatttctagactagacgttctaccggagaagcgaccttagaaattcattatggtggcaacagctgctacttcatcatttttccctgttacttcaccctcgccggactctggtggagcaggcagcaaacttggtggtgggcctgcaaaccttggaggactaaaatccaaatctgcgtcttctggtggcttgaaggcaaaggcgcaagccccttcgaaaattaatggaaccacagttgttacat

SEQ ID NO: 4205 - DNA, 657 bp, Glycine max
ctcgagccgaatcggctcgagaaacaaggaagcaaaatgacacaatagtccttcttccctgtttccactttccaggttttctccttctcgtttgttgagcgcttttctctccctctccctcttcttcactcagtcaggtacgctaacaaatctgctattcaatcaattcctctttctctctgatctacgtacgtgtccgcaaactgcacctccactctccactcattccatctaatcttcccttttcgcttcagagatccaactcctcatataattcaagacaaaatcccgcgttttctgcatttctagacgttctaccctacaagctgccgtagaaattcattatggtggcaacagctgcaacttcatcatttttccctgttacttcaccctcgccggactctggtggagcaggcagcaaacttggtggtgggcctgcgaaccttggaggtctaaaatccaaatctgtgtcttctggtggcttgaaggcaaaggcacaagcccctttgaaaattaatggaaccacagttgttacatctaaagaaatcttgaagcatgaggatgatctaccttcacctccccccaggacttttatcaaccagttacctgattggagcatgcttcttgctgccattacaacaattttcttggcagctg

SEQ ID NO: 4206 - DNA, 436 bp, Glycine max
aactttggtgttgtgaaccaggttccagcagaaagcacctaagattttgaaatggttaacgattggagttgcatcagtctccttgctatgtttagacttattctggtccctggggagagttttgcttgtgtctatccaatcaatctacatggctttatatatataccccttctaatttgtgatactttggtgggtaagggggaaaagcagcagtaaatctcattctcattgtaattagctactgctgtattctctctttctgctgctccatatttcatttcatctctgattgcgctactgctaggctgtcttcaatatttaattgcttgttcaaaatagctaggcatgtatattattattctttttctcttggcccaattaaagatgcaattttccttgtgaacacagcataattcttattcttatttatttttgt

SEQ ID NO: 4207 - DNA, 412 bp, Glycine max
tttgatttccaatcaacacataataaagagagggttgcattactataactctgtctctctctttttaaaattagggaaacaaggaagcaaaatgacacaatagtccttcttccctgtttccactttccaagttttctccttctcgtttgttgagcgcttttctctccctctccctcttcttcactcagtcagagatccaactcctcatataattcaagacaaaatcccgcgttttctgcatttctagacgttctaccctacaagctgccgtagaaattcattatggtggcaacagctgcaacttcatcatttttccctgttacttcaccctcgccggactctggtggagcaggcagcaaacttggtggtgggcctgcgaaccttggaggtctaaaatccaaatctgtgtctt

SEQ ID NO: 4208 - DNA, 504 bp, Glycine max
ttatccacccagaattgttgggttccattctcaaaacagagaacaagaagaagaagaaagagagagagtgaaaacgggaaaagcaaaaagttgtttctgtgattgattctctgcaaccgaatcatcatcagccacttcttcccgtttcatctctcccatttcttcttttcttccgctctggttcagtaaggcgaagagggttaacgttattcataatggttgcaacagccgctacggcgtcgtttcttcccgtgcctttgccagacgctggaaaagggaaacccaagaaactgggtggtggtggcggtggcggtggcggttctgtgaacctcggaggactcaaacagaaacaaggtttgtgcggtggcttgcaggtcaaggcaaacgcacaagcccctccgaagaccgtggagaaggttgagaatgatttgtcgtcgtcgtcctcgtcgatttcgcacgccccgaggactttcatcaaccagttacctgactggagcatgcttc

SEQ ID NO: 4209 - DNA, 410 bp, Glycine max
atttcggtgccactcaaaacaatcgctggccctatctctcacacacccaaacccaacattattaatactcttccttctctttaccttttacttttcgaagcaaaaacaccataacaaaacacccagaatttgtgggttccattcccaaaacatagaacaagaaggagagagagagagagagaatgcaacgggagaaacaaaaaacagaagtatttctgtgattgattctctgcaaccgaatcatcatcagccacttcttctcccagtttcagctctcccctctctcttcttttcctcggctctggttcggtaaggcgtagggggttgttattattcttcataatggttgcaacagctgctacggcgtcgtttctccctgtgccttcgccggacgctggaaaagggaaacc

SEQ ID NO: 4210 - DNA, 435 bp, Glycine max
ggctattcattcattcattcctccttctctctgatcgcaaactgcacctctacgctccactcttctcattttctcttcctttctcgcttctcagatccaactcctcagataacacaagaccaaacccgctttttctgcatttctagactagacgttctaccggagaagcgaccttagaaattcattatggtggcaacagctgctacttcatcatttttccctgttacttcaccctcgccggactctggtggagcaggcagcaaacttggtggtgggcctgcaaaccttggaggactaaaatccaaatctgcgtcttctggtggcttgaaggcaaaggcgcaagccccttcgaaaattaatggaaccacagctgttacatctaaagaaagcttcaagcatgatgatgatctaccttcgcctccccccagaactttt

SEQ ID NO: 4211 - DNA, 1272 bp, Glycine max
ggagaggagtgttcccaaaatcgcaatatcttcaactctatctgcaacagccaactttctcgttcgtcgatcacaaaaatggcggcgaaacttcaaatatttacgggattgccccccgcgccatttcaatcttcctcctccactctctgcgtactcaagaagcctctcactacctccttcttcggcactgcacgagtggaagttctgaaacttcgagtgatgaggattgcgaagcctgcgcgcggtggaggtgctctcggtgctcgcatgaacctctttgacaggttcgccagagttgtgaagtcgtacgccgtacgcaaacgctgtcttaagctcgtttgaagatccggagaaaatattggagcaagctgtgcttgaaatgaacgacgacttgaccaaaatgcgtcaagctactgcacaagtgttggcatctcaaaagcggttggaaaataaatacaaggctgcacaacaagcttctgaagagtggtaccggaaagcacaacttgctcttcagaaaggtgaagaagatcttgctcgtgaagcacttaagaggcgtaaatcttatgcggataatgccagttctttgaaggctcaacttgatcaacaaaagactgttgttgagaatcttgtctctaatacaaggcttttggagagtaagatacaggaggcaaggtcgaagaaggatactctcaaagcaagagctcaatcagcaaagactgcaaccaaggtgagtgagatgctgggaaatgtcaatacaagtagtgctctttcagcttttgaaaagatggaagagaaagtgttggcaatggagtcccaagctgaagctcttggccagttgacaagtgatgatcttgaaggaaagtttgctttgcttgagggctcatcagttgatgacgaccttgcaaatttgaaaaaagagttatctggtgcctcaaagaaaggagaccttcctcctggaagaagtaccactagcgccaacactggaattccatttcgagatgctgagattgagttggaacttgatcaattgaggcaaagagctaaggaattttgaatcatggaatcttttttgtttcttcatatttaagcttgaatttagtttcttttatttctgatatcaacgttgtacagctaaaggccaatcacgatattgttcgactactggccaaaaattgattagaaaaatgaactgattagctgcatgctcttgtagctcatgttatatgttaattacctcaagtgtgatgatattgtaatatataatttgtacca

SEQ ID NO: 4212 - DNA, 1234 bp, Glycine max
cgagaagacgacagaagggggcatatccaaaggaacaaaaatattattaagatgatcaacattattggagcacttgttctactctttgcatttctcttcctcagttgtgtgtatgcacaagacacaacaacccttgtgcctgcaatcataacttttggtgattctgctgtggatgtagggaacaatgactatcttcccacccttttcaaggctgattaccctccttatgggagggactttgttaaccaccaacctactgggaggttttgcaatggcaaattagctactgatttcactgctgacacattgggtttcaagacctatgctccagcatatcttagcccacatgcatcagggaaaaacctccttattggagcaaactttgcttcagctgcatctggttatgatgaaaatgctgctactttgaatcacgcgattccgttgtcccaacagttgagttatttcaaggaataccaaggcaagctggccaaggtagctggcagtaaaaaagcagcctcaatcatcaaggatgcgttgtatgtgctcagtgctggaagcagtgactttgtgcaaaattattatgtcaatccttggatcaacaaagtctacactcctgatcagtattcgtcctacttaattggttcattctcaagttttgttaaggacttgtatggattgggaggcaggagacttggagtgacttcactcccaccattgggttgcctacctgctgcaaggactatatttggtttccatgagaatggttgtgtctcaagaatcaacactgatgctcaaggatttaacaagaagctcaactcagctgcaacgagtcttcaaaagcaacttcctggtcttaagattgcggttttcgacatttacaagcctctctatgaccttgttcaatccccttcaaaatctggttttgtggaggcaaacagaggatgctgtggtaccgggactgtagagacaacatccttgttgtgtaatccaaaatcaccaggaacttgttctaatgccacacagtatgtgttttgggacagtgtccatccttcacaagctgctaaccaagttctagccgatgctttgattctacaaggcatagcccttgtcacttaagggctcatgaggccataaacgtacgttctagcagtgtaccactaatcatcatggaaatgatgcacgcaccagtgtgttatttttccagtccgcagaagcctgtaccgtagtatttaat

SEQ ID NO: 4213 - DNA, 714 bp, Glycine max
  unsure (1)..(714): unsure at all n locations
gagaagaaaaaataaataagcttgggctataagctacaattagcttatgcataagttgaaattatttttttagagaagataaaatcatttagcttctccaaaaagctgattctaatttatacataagttaattttggtttatgaaggagtttatttcatttttttttgcaagtacgtgcttatagagaagtttattcaaatatggccacattaacattcatatcttgcagtaaaatgatgtttttctttctaaccaatatttccttgaaaatctggttttgtggaggcaaacagaggatgctgtggtaccgggactgtagagacaacatccttgttgtgtaatccaaaatcaccaggaacttgttctaatgccacacagtatgtgttttgggacagtgtccatccttcacaagctgctaaccaagttctagctgatgcattaattctacaaggcatatctcttgtcacataaagactcgtcattatttatgttgttagaaattattattgtgtacaagtacaactacacatcgtgaaagtgattcaaaagtttgctgtttttctttagtttggaaaaaaaaaactgtgctctatgtattttagatcttgagaaatttcagataaactcgtttgtaaaccattttataataatagagaaatgtttgcttattatcatcccnnnnnnnnnnnnnnnnnnnnnnnnnnnnnnnnnnn

SEQ ID NO: 4214 - DNA, 696 bp, Glycine max
cttaaattcgagaaaggcagacatacgggttcaattcaaggatgttcctggtgatatttttaagtgtcaaaagcaggggagaaatgagtttgttatacgcctgcaaccttcagaagctatgtacatgaagcttacagtcaagaaacctggactggagatggaaacagttcaaagtgaactagatttgtcttataggcaacgctatcaagcagtaaccattccagaggcttatgagcgtctgattcttgactcaattagaggtgatcaacaacattttgttcgcagagatgagttgaaggcatcatgggagatcttcaccccacttttgcaccgcattgataagggggagttcaagtcaaccccttaccaacctggaacaagaggtcctgtagaagcagataaattactgctggaaaaagctggttatgttcaaacacatggttatagatggatccctccaacattgtagaaagaacaatgttacactagcttgcactaccttaaaatttgttgatgcgtgcacttaataagcttgggaaaatccccttggagcaagactcttccctaatgggtgattttatcaagcatatgaataaatgtggttgacattgtatatttaatattatctgcctacgaatgcagaagaataagtggttgacatggtgcatgtaacgttatttgcttgtgaataaagaa

SEQ ID NO: 4215 - DNA, 803 bp, Glycine max
actccagataacagctggagatccgtggtgctccagcggaggggttgcacctgatggtacctttgtgagtgctggtggttttgacaccggagcaagaagcgttagatatatgggtcctaattgccaaaattgtgaatggagggaatacgacaacatattcggagccgacagatgagtatgcaactcaacacatccttccacacggagaattcatcttcggtaggaagggcgtagatcattcagctatgagttcatcccagtagaaggccaaaggggcgagaaaccctactttttcccattcttatacgaaacgtcagacatagatgagaacaatctctacccttttgtgcacctttccacagatggaaacctcttcatcttctctaacaatcgttcccttcttctgaaccccaccacccacaaaattgttcgcacctttcccgtcttacccggtggctcccgcaactaccctgcctctggcatgtctgcccttctccccatcaaccttaacgaccccgccaccgccaccaaggctgaggtcatggtttgtggcggcaaccttcccgatgccttccatattgccgagactaccaaaatcttcctcccagctcttcgagactgcaacaggttaaccatttcggagccatttcctgagtgggagagcgagttgatgccttcagggagaacaatgggagaccttttggtcctccccaatggggacctcttgctcatcaatggtgcaaccatgggtacggctgcatggtgggatgctgacttgcctaactacacgcccgtgttgtaca

SEQ ID NO: 4216 - DNA, 630 bp, Glycine max
aacaatcacaacattcaagcgctgcatgaccaatctcctgacttcaggaactggttgagtgcaattatctcgtaccagcaatcatgcatggacggcttcaacaacgagaccaacggtgagcaggaaattaaggaacaactgcacacaggaagtttggaccaaatggggaagctcactggcatagtcctagacattgtcaccaacttatccaaaatccttcagagttttgacctcaagttggatttgaacccggcttctcgtcgtcttctcgagcttgatgctgaagggtaccctacgtggttctctgctgctgatcgcaggctacttgctaagatgaaccaaggaggtgctcccccacccaatgcagtggttgccctagatggttgtggtcaatttaaatccgttaagcaagctattgactcctaccctaagaatttcaaaggcagattcattatttatgttaaagctgggatttataacgagtatatcactatccctaagaagtcagagaatattttgatttatggagatggccctacaaaatccattattactggtaacaaaaactttatagatggcgtcaagacaatgcatactgccacctttgccaatactgcacctggattcatt

SEQ ID NO: 4217 - DNA, 444 bp, Glycine max
gctttttgtgcattgcccgtgtgttggtgttataggaacaatgaacaattgaaagggtagcaaaattaacttgcagcatttgtttctcgatgctgctttgtgaattgaaacgacttacatcgccatgtctactactgtagtaattttcttgaccttaggaaccggggtttgcgcggaatctgaaattgaaattgttacttggtcttggtttggatgtgcgtatatatgaggaaaaacccagccgaggaacagtcgttggatcacggcgtcataattttgcccttttatttttacattgttctgtttgtatgtaactatttgggggtattagctgatttaaggaaagatcccctaatcctgttatggctatactcagcccgaaaggctattgatttattagctattgccttttagtataaataaatgacgagaggatttcttacc

SEQ ID NO: 4218 - DNA, 1818 bp, Glycine max
tgtgattctgaaaatctgaaatttcatttctctctgtataaatatcctagtccttatcagcttcactatttcgattgaacatcgccgaagaaggtattgacgtcgatgatgaaaatgaaattggtgaaaacattactgcttctcctttgtgtgaaactcttctgttatgcagtgattggtgctcctcaaacttgtcctgctaacaatgaggataaatgcggcgattcagatgaatggaaaggggagtttttccctgacattcccaaaattaaatatgagggtccgtcaagtaagaatgtgctttcatttaaatggtataatgcagaggaggaaattcttgggaagaagatgaaggattggttaagatttagtgttgcattttggcatacattccgtggaacaggtgctgacccatttggtgcacctaccaaatactggctatgggaagatggtaccaattcattaaacatggctaaaagacgaatgagagctaactttgagttcataagcaaactcggtgttgacttttggtgtttccacgacagggatatagcccctgatggaaaaactcttgaggaatctaatgcaaacttggatgaagtggttgcccttgctcaagagctccagactaaggctaaaaaaagagtgttatggggaacagctcagttgttcatgcatcctcgttacatgcatggtgctgctactagctctgaattaaaggtctatgcatatgctgctgctcaagtgaagaaagccatagaggtgacacattatttggggggagaaaattatgttttctggggtggtcgtgaaggttatcaatctcttttgaacacagatatggagcgagagcttaatcatttggctaggttttttgaagctgctgttgcatacaaaaagaagattggattcaatgggacatttctaatcgaaccaaagccacaagaacctacaaaacaccagtatgattgggatgctgcaacctcagctaatttcttgcgaaaatatggacttacaggggaattcaaactcaacatagagtgcaaccatgccaccctctctggccacagttgtcatcatgagctcgaaactgcaaggatcaatggattgctgggtaatattgatgcaaacactggtgatcctcaagttggttgggacactgatcagtttcttgtagatattcaagaggcgacactgattatgctcagtgtgatcagaaatggaggacttgcacccggtggattcaacttcgatgcgaaattgcggagagagagcacagatgttgaagacttgttcatagcccacattgttggaatggataccctggcccgtggcctgaggaatgctgccaagttgattgaggatggttctcttgctgagcttgttcgtaagcgttatcagagttttgacactgaaattggggctcaaatagaggctggtaaggctgactttgaactgcttgagaagaaggtcaaggaatggggagaaccaaaggttgcttctgcgaaacaggagctagccgagatgatcctccaatctgttctgtagaaagtagaatctagccgtgtgtggtggctatttttcgtctattatattaggaacaattcggtataattaggtttactaataaaaggaaattaagattgacttatgcctgcttcgttttccttgggaaaatataagtgtgaagctgttatctgctaggtggatacgaagcctggtgaagtgcatgttagcttatgtataaaactacgtgatgcatagcttccctggctttgagaatgcttgagttaattaattttagtttcacccggtatc

SEQ ID NO: 4219 - DNA, 563 bp, Glycine max
cggctcgagacagtgcattcacctagtggaccaaacaagccactgcactatcttgtttttatatttattttcttttgcatcatttgaccggggtaataccctatgaccctcctctttattttctttaacacctcctcctctttctgttctcagcaagtatggccgtggaattcatgatggggtacaggaacgacactttcgcggaggataatgcggttcgtgaagctgcgtcggggctagagagcgtcgagaaactcatcaagttgctgtcgcatactcaacaacaataccagacaacctcaaagtcttccatggaaaacatcgacaccgactacacagctgtcgctgacgtcgcggtttctaagttcaagaaggtcatttcgcttctgggccgcaccagaaccggtcacgcgcgttttagaagagcccctgtgcctgtgcctgtgcctgtggcttcacctccaccttcggaaccgagagtctaccgtgctacgccgctgcagcagatcccgccacccacccttcacactcactctgtcactgaccactctctgatccccaaa

SEQ ID NO: 4220 - DNA, 528 bp, Glycine max
aaaataccctgttcagtgtgttacatacactttgacggaaagggttagctagcgtgacagtgcattcacctagtggaccaaacaagccactgcactatcttgtttttatatttattttcttttgcatcatttgaccggggtaataccctatgaccctcctctttattttctttaacacctcctcctctttcttttctcagcaagtatggccgtcgacctcatgatggggtaccggaaccacactttcgcccaagagaatgccgttcgtgaagctgcgtcggggctagagagcgtcgagaaactcatcaagttgctgtcgcagacccaacaacaattccagacaacatctaattcagcctcaaactcaaagtcttccatggcaaacatcgacgccgactacagagctgtcgctgacgtggccgtctctaagttcaagaaggtcatttcgcttctgggcagcagcagaaccggtcacgcgcgtttcagaagagcccctgttgctccccctcctccacctgcggaacccag

SEQ ID NO: 4221 - DNA, 1169 bp, Glycine max
atcgagcgaatcggctcgagtggcaccggaatcagaggctccccctaacttctggggccacaccccggaagaagaatactacacctcccaaggcgttcgcaacaccaagtcccacttcgaaacccccaacggcaaaatcttcacccagtccttcctccctctcaacctccaaccccaccaagtcaaagccaccgtctttatgacccacggctacggctccgacaccggctggctcttccagaaaatctgcatcaacttcgccacctggggctacgccgtcttcgccgccgacctcctcggccacggccgctccgacggtctccagtgctacctcggcgacatggacaaaatcgccgccacctccctctccttcttcctccacgtccgcaatagccacccctacaaaaacctcccggcattcctcttcggcgagtccatgggaggactcgccacgctcctcatgtacttcaaatcggaaccggacacgtggacgggcctgatgttctccgcgccactcttcgtgattcccgaggacatgaaacccagcagggtacatttgttcatgtacggtctcttgttcggtctcgccgacacgtgggcggccatgccggataacaaaatggtcggaaaggccatcagggatcccgagaagttgaaggtcatagcgtcgaacccgaggcgctacacgggcccacccagggtggggaccatgcgggagctgcttagggtgacacagtatgtacaggataatttctccaaggtaacgacgccgtttttcactgctcacggaacttctgacggcgttacctgcccttcctcgtccaagctgctgtatgagaagggttccagtgaggataagacgttgaagctctacgatggaatgtatcactctttgattcagggagagcccgatgagtctgcgaatctcgtgttgggggacatgagagagtggattgatgagagggttcgacggtatggacctaacaaaaattcccagtgaaacaaaccattactaaattcctattttggttccacattgcatattttgtgtctatcaaaactttattaaagttgttatgtgaagacggaagagtatccttcttctatcatatttggatttcaatcaaaaatgacatttaatcaatccagttatcggtttcgatgcatga

SEQ ID NO: 4222 - DNA, 2787 bp, Glycine max
cgcggacggctctcttcttcagtggtggaagctactagaacactagtttgttgagcactgcgatgaggaagtggacggttgcttccgctctccttcttctctctctcctctttctctttgcagatcaaggtcgaaagtttcaggcgaatgccgagggagattccgacgagcttgtagatcctccgaaggtggaggacaagatcggtgctgtgcctcatggcctttccaccgattcagatgtcgtcaagagggagtcggagtcgatctcgaagagatctctccggagcaacgcggagaagtttgagttccaagcggaagtgtcgcggcttatggatatcatcatcaattctctctacagtaacaaggatatcttcctcagagagttgatttccaatgcttctgatgctttggacaagattaggttcctctccctcacggataaggaggtgttgggagaaggtgataacaccaagcttgatattcagattaagttggacaaggaaaagaaaattctctcaattcgagacagaggtatcggtatgacgaaggaggatttgataaagaatttggggacaatagcgaaatctggaacttctgcatttgttgagaagatgcaaacaagtggagatctcaatctgattgggcagtttggagtcggcttctactctgtttatctcgtggctgactatgtcgaagtcattagcaagaataatgatgataaacagtatgtatgggaatcaaaagctgatggagcatttgcaatttcagaagatacatggaatgaacctctagggcgtggaactgagattagattacacctcaaggaagaggctggggagtacttgcaggagtctaaactgaaagaattggtgaagagatactctgaatttattaacttccctatctatatttgggcaagcaaagaggttgatgtggaggttcccgctgatgaagatgattccagtgatgaagaggattcatctgaaagcagctccaaggaggaaagcgaagatgaagatgctgataaaagtgaagacgaagaaaaaaagcccaagacaaagacggtgaaggaaacaacttatgaatgggaacttttaaatgatgtgaaagctatatggctgaggaatccaaaggaggttacagaagaagaatacaccaaattctaccactctcttgccaaggatttcagtgatgagaaacctttagcatggagtcatttcactgctgagggcgatgtcgagttcaaggcagtcctgtttgtaccacctaaggcacctcaagatttatacgagagctattataacgcaaacaaatccaacctgaagttgtatgttagacgtgtgttcatttcagatgaatttaatgaactgttgcctaagtacctaaactttttgctgggtcttgttgattctgacacattgccacttaatgtatcgcgagaaatgcttcagcaacatagtagtctaaagacaatcaagaagaaacttattaggaaagcccttgatatgatccgtaggattgctgatgaggatcctgatgagtccactgacaaagaaaagaaagaagatacgtcatctgacaataatgagaagaaaggtcaatattctaagttctggaatgagtttggtaaatccattaaacttggtatcatcgaggatgccaccaacagaaatcgtttggcaaaactgctcagatttgagagcaccaagtctgagggtaaattgacatctctggatcagtacatatctagaatgaaaactgggcagaaggatatcttttacataactggaaccagcaaagaacaactggaaaactctcccttccttgagcggcttaagaagaaaaattttgaggttattttcttcacggatccagttgatgagtacttgatgcaatacctgatggattatgaagacaagaagttccaaaatgtgtccaaggagggtttgaaacttgggaaagattcaaaagacaaggaactgaaggaatcttttaaggatcttaccaagtggtggaaaactgctctttccaaagacaatgttgatgatgtgaagatttccaaccgattagataacactccttgtgtagtggtgacatcaaaatttggttggagtgctaacatggagagaatcatgcagtctcaaactttgtcagatgctagcaagcaagcatacatgcgcggcaagagggttcttgagatcaatcctaggcaccctattatcaaggagctccgagagagagtagtaaagaaccctgaggatgagggtgtgaagcatacagcacagctgatgtaccagactgcactctttgaaagcggcttcctgcttgatgatcccaaggattttgcttcccggatttatgattcagtgaagactagcctggacatcagtcctgaagcaacagttgaggaggaagatgacactgaagtagaggctgaaagtgacgcgaaagaagattcaaagcctgaaactgatgctgttaacgatgataatgatgtcaaggacgagttgtagattttgcatgacatccactatttaatgacggtgctgccgattcccctttgtttgttttagctttaagatagaccgtaaaagacttctttagcatgagttttgatttcataagtagttaaaggagaacattagtcttactgtaatcatactatccccttggaattttgccttaccaccttagtcttaacacattgttcaagttctacaaaataaaaaaaaaaaaaaaaaaaaaaaaaaaaacggacgcagcacgatgagatcccaagtgcaccct

SEQ ID NO: 4223 - DNA, 650 bp, Glycine max
tggacaacactccttgtgtagtgttaacatcaaaattggttggagtgctaacatggagagaatcatgcagtctcaaactttgtctgatgctagcaagcaagcatacatgcgcgccaagagggttcttgaggtcaatcctaggcaccctattatcaaggagctccgagagagagtagtaaagaaccctgaggatgagggtgtgaaacatacagcacagttgatgtaccagaccgcactcttcgaaagtggcttcctgcttgatgatcccaaggattttgcttcccgtatttatgattcagttaagaccagcttggacatcagtcctgaagcaacagttgaggaggaagatgacaccgaagtagaggctgaaagtgattcaaagcctgaagctgatgcggttcatgatggtgatgttgatgatgccaaggacgagttgtagatttgcatgacatccactatttaatgacggtgctgtcggttccctttgtttttcatggtttcagctttaagatagaccgtaaaagccttctctagcatgagttttttatttcacaagttgttaaaggagaacattagtcttactgtaatcatactatcccttggaattttgccgtaccatatcagtcttaacacaatgttcaagttcctag

SEQ ID NO: 4224 - DNA, 305 bp, Glycine max
gtgttatttcctcacttccattagttaacaatttagctacttggaactcttgcagcaccaagtctgagggtaaattgacatctctggatcagtacatatctataatgaaaactgggcagaaggatatcttttacataactggaaccagcaaagaacaactggaaaactctcccttccttgagcggcttaagaagaacaattttgaggtacaatttaaattgtttgatttttattacaagtatatttgctctattatctgttcttttaaaaacatttgtccttctattctgctgagagcatgatga

SEQ ID NO: 4225 - DNA, 676 bp, Glycine max
tcgagaacacggagcgaaaaagcgtcacgagcgagacaggaaggaagagaagagaagagagatagggagagcgagcgtgagaggaagatcttcgatttagggttttcaatttcgtattcagcaaggcggcgagtgtgagatttttagagagagagaggtgaggacgctgagtgctctgctgagagattccataaccccaagaggaagaggaggaggagaaggtggatagattttttttcctttttttttgtgctgtttatttatcctcagagcggtggatagggatttttcactctgcagcgttccgttccattgtgatttgttgaagtttctgatggagcagcgaaagcttgtggttttggggattccgtgggatatcgatactgagggattgagggaatatatgagcaagtttggtgagctggaagattgcattgtcatgaaggagcggtcaactggacggtctcgtggttttggatatgttacatttgcttcagtggatgatgctaaggaagtactatcaagtgaacatattattggtaataggacgctggaagtcaaagtggcaacaccaaaggaggaaatgagggcaccagtcaaaaaagttactagaatatttgtagccaggattccacaatcagtaacagaagctactttcagaagtcattttgagaaa

SEQ ID NO: 4226 - DNA, 1249 bp, Glycine max
cttgcagacattcttccccctgcaccattacctgggacaacctcacagcagaacttttcagctcctcctgatgctcaattcttatcctccttttcagcttcatcagggcaaatggcaccacagtctttttttacacagtctggtcaacacgtgcagcaagatttctcagctgtaaccagtcaacctgcagcacaatccttttcagctcctggtggccaacctctacaacccccaccatcagttcccactagtcaacatgcacagcaaccctttccatctcacactgatcaatctgcacagtcagttagtcatatatatggtggatttccttccctggctgctggctctatgactcaagaagcttcttcagccatgttccctcaatctcaaggtggacatatgaaccagacctatgaacaaggatctatgccacttatccctttacacacggctccccaagcttcaacaggactgagtgcaaactatttgtcttctcaatcccccattgccattgatcaagcatcacagtttaacagtgggagcttgttgggacagtcatttaaccatcaaccacttggtcaaggagtacatgcttcacagagtgctgtttctcaaccgcccaaggacaagtttgagacaaaatcgacagtttgggcagatacactaagcagggggttggttaatttgaatatatctggacctaaaataaaccctttagcagatattggagttgactttgatgccattaataggagggaaaagaggatggagaagcccaccaccacagcggtaacgtcaactgtaactatgggtaaagctatgggatctggttccggtatgggccgggctggcgtgggtgctctcagacctccatcaaacccgatgatgggtatgggcatgggaagctatggaggcgtgaacgcacctatgggtatggggcagatgccaccaccacctagtcgatttcctcctggaaattataactccatgatgggaagaagtggttatcctcaacatccttatgggggctaccgatgagattggccattatacctaatacctagatagcaatgtcaaactgtatacgattgatcactatatgtagatagcaatgttaaagtgtatgagatggagcactatacctagataagatcatagcaagtgttttgttaagagtttcgagaaacggcaccccaatacctctggtttacatcttgcgcaatacatgtaattctctgtaaagtatgtg

SEQ ID NO: 4227 - DNA, 401 bp, Glycine max
cgacacagcttttccatcacacatggctccccaagctccaacaggacagctgtcacagggcaccaacttcccccatcatggaggatctactgctcacactgctccgcatttgtcttcttattctccaactcatcaagcatcacagtttaacagccagagctttattggacaacaagggaatgcagccccctatagctcaccaattaccaatcaatcatttgcttctaatgcttcacaatccaattctttagtttctcaaccatccaaggacaagtttgagactaaatcaacagtttgggcagatacactaagcaggggattggttaatttgaatatatctggacctaaaacaaatccattagcagatattggggttgactttgaagccattaataggaagg

SEQ ID NO: 4228 - DNA, 473 bp, Glycine max
tctcgagccgaatcggctccagaggccattcaaaccttcaacataaaatggaagaatccaagggttttgttggtggtgagtctcaaaaaccacatccagaaatgccctctatttcttttcaaattcctatgccagggaggaatcgatctggtggtctctacccttggggatggaggcaaagagcaataataccacagcacaccgtgcgaaactctaacggggcaagtgagaacacaaatttgaaggtgtaagtcactcatggagtaataatactatgtatgaaaatgtgaaacgtttgaacagttgttgcggttgttatgttgtcttcttcattatcgtatattatcgtgcatgggtgtacgtagctcattacctgctttgaggataaaagctttactaggcttgaatatgaatatcttcagcagtttgtattgataaatgactcatatatggaatggaagtgctacaacttt

SEQ ID NO: 4229 - DNA, 699 bp, Glycine max
ggccaacaagagactgcaaatacagcaaagacaaaggagagccagttcttttcctactgctatagttaccggcagatgcaaagacaaggtttacagttttgttcgcttggctgagctatattatgctggaagccatggcatggatattcaagggccaacaagagactgcaaatacagcaaagacaaaggagagccagttctttttcaacctgccagtgaatttcttcccatgattgatgaggtgcaccatcaattagttgagaaaatgaaatcaattcctggagccaaggtggagaacaataagttctgctgttctgttcattttcgctgcgttgatgaaaagaaatggagtgaactggcacaagaagtgagatcagtattaaaagagtacccgaagcttcgtcttaaccaaggaaggaaggtattggagattcgtccatctattaaatgggacaaaggaaaggcgctggaatttttgttagagtcacttggtaggttttaatccaatccaatgcatttttattcttcgatcgttttatttgtcacaagcaatgcatatattgaacaacataataattgcacaaagtcacacataagccactgttgaggaccagtagttggataattcttccaagtgtttgaccattacaaacaactaagacgacgacacccacaccctgtgggattaatttattcact

SEQ ID NO: 4230 - DNA, 732 bp, Glycine max
cccacgcgtccgctcttctcttctcttcactttgatttgattgcaattacctctttttgttgtgatcttcttcccttctctgttctaaaaaagaacacggctgatctgggctcgactaaaacaaatcactaagtaaaaatgacgcagaatgcgatagtgtccaagacaaaatcggggatcaaccgggacataaccgtgccacaaaagccactggcggcggcggcggcggcgggggggtacattcccattccgaggaggagggttttgaagaacctggaaatcaatgcatgggttgattccatgagatcctcttctccaaccaattccaaatccacctcttctctcgcagaagaacacagcacttggattcttcgccacccctcagcattagacatgttcgagcaaattatggatgcgtcccggggaaagcaaattgtcatgttcctcgactatgatggtactttgtcgcctattgttgatgacccagaccatgctttcatgtcggattcgatgaggagaacggtgaggaaacttgcaaggtgttttcctactgctatagttaccggcagatgcaaagacaaggtttacagttttgttcgcttggctgagctatattatgctggaagccatggcatggatattcaagggccaacaagagactgcaaatacagcaaagacaaaggagagccagttctttttcaacctgccagtgaatttcttcccatgattgat

SEQ ID NO: 4231 - DNA, 413 bp, Glycine max
cccacgcgtcttctcttccatccctgtgatcttttcgcctctctgttcagggctcaaatataacaaaacattaagtgaaaatgacgcagaatgcaatagtgtccaagacaaaatccgggatcaagggggacatagccgtggcacagaagccactggcggcgcctccgccgccggggtacattcccattccgaggaggagggttttgaagaacctcgaaatcaatggaggacaaagaattaatgcatgggttgattccatgagagcctcttctccaaccaattccaaatccacctcttctctcgcagaagaacacagctcttggattcttcgccacccttcagcattagacatgtttgagcaaattatggatgcgtccaggggaaagcaaattgtcatgttcctcgactatgat

SEQ ID NO: 4232 - DNA, 463 bp, Glycine max
tcttctcttccatccctgtgatcttttcgcctctctgttcagggctcaaatataacaaaacattaaggttcaataccttaactttccttcatatcctcaaactgatgcacacatatgtgcctactctatagtattcacaatatcataataatttgcttctatctgcagtgaaaatgacgcagaatgcaatagtgtccaagacaaaatccgggatcaagggggacatagccgtggcacagaagccactggcggcgcctccgccgccggggtacattcccattccgaggaggagggttttgaagaacctcgaaatcaatggaggacaaagaattaatgcatgggttgattccatgagagcctcttctccaaccaattccaaatccacctattctctcgcagaagaacacagctcttggattcttcgccacccttcagcattagacatgtttgagcaaattatgga

SEQ ID NO: 4233 - DNA, 1634 bp, Glycine max
atgcgcctcttctggctctgcgcctgccacgcgccccccgaagccggctccctctacttccactacctcctcgcccccagcctccaaacggcgtcgtccaaactcgcctcctccgtcctccgaactttcttcatcaccgtcggcgtcgacaccgaactctgcttcatgcgcaccctcggttacatcattacaaaacttcacttgatcaaagaactcgacgttggattattaggcttaaaaacgcttttgccttctccaaaattctcttacgccaacgaggctcacggtctttggattctcaaaggttacgcgccagtcatgaccatgaaactggcgcgaaccaacacagttcaaaaaactcaattctctggcatcgatgccaaggagtcgattctccgttactcactcgcgcaccaccaacttgaggcacacgtgcagctagactacaccgttgggttttacgatggtttcattcaggttcgtgcacgtgtcgataatatacgcctccacctcgcgaggttaggtttcagccaaaacgacgacgtggatgatttcgttgaggagaagcactttccgtcacgggttcgggtttgggtgggcccggagataggatccacttattgcgctgggctgagcttgggccggtccacggagaacaaagagtgcgaagtggaaacaaagaggattgtggagggtaatttcgagaagtcgcagggttctaacgtgaaagcgttagccaagtcgtcgaggaggacgcggagtaggagttggagaatggaccaagacgcggaagggaacgcggcgatattcgacgtcgttttgcatgataacactacgggccaggaagtgggctcgtggaggcccataagtgaaacgggtgatgacccggctcatgggctgagagggcgctatgtgagggcaaatagagcgtttaataaaagcgggtcggtggttattgctggggatgaatatggggaggaagtggggtggaggctttgcaaagagatggaagggagtgtgatgaagtggagaatagggggagagttttgggttagctatttgcccaaccaagcaaagggttcttcttttgaaactaggtacatggagtggtgtgatgaagttgatttgcctcttattcatggtaaaacaacctaagcaagcatgccagtatatatatatgaaagttgaaacccttaattctctcaccaaattacccacgcgaaaaaaaggatcggaaaaggaggagaggtttcggtaaaaatgcatgtaatagaactaaacttagcgactagcatggttagtatatgcctatatgatactgctgtttaggtgctatatatatcaatatatgtggaatagccattggtgcactatctaattaagaaaatgcttcatctatagtgtctggttccatataggattccttagttaaaatgtctaaaattgagtaaagctagctataatatataactcttggttaaactttcaagggcacgtttagtttacaatattaattaatttctcgtgttgtgacctctattttaatacaaaatttgtgactaaattaatttataggcaccttttaatcacattcaataattttgaatcattttattaattacacctagaagaaa

SEQ ID NO: 4234 - DNA, 605 bp, Glycine max
ctcgagccgaatcggctcgaggtgggctcgtggaggcccaagggctgacccggctcatgacctgagagggcgctatgtgacgggcaaatagagcgtttaataaaagcggatcggtggttattgctggggatgaatatggggaggaagtagggtggaggcttagcaaagagatggaagggagtgtgctgaagtggagaatagggggagagttttgggttagctatttgcccaaccaagcaaagggttcttattttgaaactaggtacatcgagtggtgtgatgaagttgacttgcctcttattcatggaaaaacaacctaagcaaccacgcaatcatatcaaactttaaacccttctcacctaattataaccaccaaaagaggacgcacaagtttgtgtaaaaatgcatctagtactaaacttagccactagctggttagtatatatacatatatatggcactgcagtttaagtgctatatatcaatatatgtacaatagccattactaagcaaatgctttatctgtagtgtctggtttcatatacaattcccaagttataaaatgtcaaataaatgaataaagcaataatatataactcttgttt

SEQ ID NO: 4235 - DNA, 1875 bp, Glycine max
gtctctctctataaatccctctctcactcctcctttttgttcacctgccacatttacaacaaccccctcttcttctttttccactttccctcagaactctcttagatttagctgtttccaatcgtttcgaccaaaagcccattaaccccttttgcagaaaagcaagattgtgctctctgcaagggtcaacgagtgtgaaaagcagaaaaagtttggtgctttgtgctaccaacatgactatagcagaggatagtttgttgcaggtggtggaggaggaagagggtcctcctgattttgctttgcttgatcctgaggacaattctaggcctcgtagaattgctctcttcgttgagccttctccttttgcatatgtctcaggatacaaaaaccgttttcagaactttataaaataccttcgtgaaatgggagatgaggtaatggttgtcaccacacatgaaggagtacccaaggaattttatggagccaaattaattggatcccgaagcttcccttgtccctggtatcaaaaggtgcccctctctttggcacttagtccaagaataatttctgctgttgctgagtttaagcctgacataatacatgcatcatcaccaggcataatggtttttggtgcccttatcattgcaaagcttctgagtgttcctattgtcatgtcctatcacacccacgtaccagtatacattccaagatacacctttagctggctggtgcaacccatgtggtgggtcataaaatttctgcatagagcagctgatcttacactggtgccatcagctgccattgcaaaagatcttgaagaagctagagtaacagcagcgaacaagatttgtctttggaacaagggtgttgattctgaaagtttccatccgcgattcaagtcccatgaaatgcgattaaggctgagcaatggtgaacctgagaagcccttgatagttcatgttggacggcttggagttgagaagagtttagattttctcaaaagtctcatggataggcttcctgaagcacgaattgcctttatcggagatggaccttacagagaggaactagagaaaatgtttgaaggcatgccagcagtgttcacaggaatgttaggaggggaagaactatctcaagcctatgcaagtggagatgtctttgtgatgccgtcagagtcagagacacttggccttgttgttctggaggccatgtcatcaggaatccctgtggtgggagcgcgtgccggtggcgttccagacataattccagaagaccaagatggcaaaattggttacctctatacaccaggtgatcttgaagattgcctgagcaaactaaagccgcttttggatgacaaagagttgagagaaaccatgggagaagctgcacgtttggagatggagaagtatgattggagagcagccactcagaagattcgcaatgaaaactacaatgctgccatttggttctggcgcaagaaaagggctcaactcttgagaccctttcaatggttggctcaacgtattttccaatctccagatccagaagccaacacatagcgtggtgattgatgcaaagcaaatgcttcttttgagctttggatggttctttgaattgttcattgctttggctttaaggaagcctattatgggacataagtgtggttggttgtgtaatgcattcatttgattgatgtatataataatgggacaaaaattatggattgtgccattgtagagtggattaattagagttgaatgtcaattcatgatgatgtattggatagtgtaagataaattgtccaatcagtaaggggagaatccattcatatttgacaacccagatatgcaatagcatagtagaaaactagtcatt

SEQ ID NO: 4236 - DNA, 1798 bp, Glycine max
cattattatggatccaatcaagaatacaataacatagcatagagtgagaagtgagaagagaaaaatggcaatctccatacccagtagacaacttttcatagatggagagtggaaagtccctcttctcaacaatcggtttccgatcatcaaccccgctactgaagacatcatagggcatattccagccgctactaaggaagatgttgaccttgcggtggatgctgctaaaagagccttttcccataacaaaggcaaagattggtcttcagctcctggctctgttcgtgctcgctatcttcgagccatcgcttcaaagataacagagaaaaaggatgaactaggaaagcttgaagcaattgattgtggaaaaccactagatgaagcactggcagacctggatgatgttattggttgttttaactactatgccgagcttgcagaaggattggacgcaaagcaaaatgctcctgtatcccttcctatggaaaccttcaagagttatgttctcaaggagcccatcggagttgttgcattaattactccatggaactatcctctattgatggctacatggaaagttgctcctgctctagctgctggttgtacagcaatattgaagccatctgaattggcatctgtgacctgtttggagctggctgaaatatgcagagaagttggccttcctccaggggtattaaacattgttactggattaggcaatgaagctggtgctcctttgtcatctcatcctgacgtagacaagatttcctttactggaagctctgcaactggaagcaggattatgacagctgcagcacagctaacgaagcctgtttctctagagcttggtggaaaaagcccaatcattgtttttgaggatgttgaccttgataagactgctgaatggaccatctttggctgcttctttacaaatggtcagatatgcagtgcaacatctcgccttattgtgcatgaaagtatagcaacagaatttgtgaatagacttgtgcaatgggccaaaaacatcaaaatttcagatccctttgaagaaggttgtaggctaggtcctattgttagtgaaggacagtataaaaaagtgttgaattgtatctcaactgctaagagtgagggtgcaacaattttgattggagggtctcgcccagagcatttgaaaaaggggtactttgttgaaccaaccatcataactgatgtgactacctcgatgcaaatttggagagaagaagtttttggacctgtgctatgtgtgaaaacattcagtaccgaagaagaagctattgaactagcaaatgacacacactacggcttagggtctgctgtaatgtcaaaagatctagaaagatgcgagcgcatatcaaaggctattcaggctggaattgtatggataaattgtgctcaaccaagcttcattcaagctccatggggaggcgttaaacgtagtggttttggtcgtgaactaggagaatggggactcgagaactatttaagtgtgaagcaagtgaccaagtacatatctgatgaaccgtggggctggtatcagtcgccttcaaagctgtgatatgaattgctgttctaaaatctggcatgaataagttgtgggggacattaatttgtgatgatgatcttaattcgagaaaataatgtgcatatgtataacactgaaattgttccatggccttgttaatgacgggctgagttgattttatcttatttgtgatgatgatcttcacgttagaactttttttgtacaatgtttacatgtgatttcttaaatgttttt

SEQ ID NO: 4237 - DNA, 872 bp, Glycine max
gaggataaagaaggagagactggactagctgagttagggtgagttgcaggcagtgtcatctctcctttgacgacaagatgagcatcccaattccccatcggcagttattcatagacggagactggaaagtccccgtcctcaagaatcggattcccatcatcaacccttccacccaacacatcatcgcgggatatcccagcagctactaaggaagacgttgatctcgctgtcgctgccgccaaagctgccctctcccgcaacaagggcgccgattgggcctccgcttccggctccgttcgggctcgctacctccgcgccatcgctgccaagatcaccgagaaaaagcctgaactagcaaaactcgaagctattgactgtggaaaaccgctcgatgaagccgcctgggacatcgacgatgttgctggttgctttgagttctatgctgaccttgctgaaaaattggacgcacagcaaaaggctcatgtgtctcttcccatggacacattcaagaagtatgttcttaaggagccgatcggagtcgttgctttaattactccttggaactatcctctgttgatggctacgatggaaggttgctcctgctctggcggctcgctgtacagcaatattgaagccatctgaattggcatctgtgacctgtttggagctggctgaaatatgcagagaagttggccttcctccaggggtattaaacattgttactggattaggcaatgaagctggtgctcctttgtcatctcatcctgacgtagacaagattcccgttactgaagctctgcaactggagcaggatatgacagctcagacagctacgagctgttctctaacttgtgaaaagccatcatgtttga

SEQ ID NO: 4238 - DNA, 886 bp, Glycine max
ttttgggaaagttttttatcagaattttttaatttgattgtgaaatgggttaaaaacattaaaaggttttattccttggaagaaggttgtagactatgccctattgttagtgaaggacagaatgaaaagatattgaagtgtatctcaaatgctaagagtgagggtgcaacccttttgactggtgggtttcgcccagagcatctaaagaagggattctttgctgaaccaactgtcataactgatgtaactaccttcatgcaaatttggagagaagaagtatttggaccagttctctgtgtgaaaacatttatcactgaggaagaagctattgatctagcaaatgacactgtatatggcttgggttctgctgtaatatcaaatgatctagaaagatgtgagcgcattactaaggcttttaaggctggaattgtgtggattaattgctctcaaccatgcttcactcaagccccatggggaggcattaaacgcagtggttttggtcgtgaattaggagaatggggacttgataattacttgagtgtgaagcaagtgacccaatatatctctgatgaaccgtggggctggtaccagtctccttcaaggctgtgataggtatccaaaagctaacattaataagttgtgggtaatatcaaattacgattatgaccccaaagtcgagaagacatgatgtctatgtataacattgaaatggtttgcactttgcagtcaagattatgttggtagtgtttttatttgatttgtttatggttggctccaccacatgcttttaatgtttgaatttcatcatggaagacttccatcattacattatattgaagcatttcttgcgcttaagttacgaatcatgcatcaatagatttgactt

SEQ ID NO: 4239 - DNA, 251 bp, Glycine max
aggagagactggactagctgagttagggtgagttgcaggcagtgtcatctctcctttgacgacaagatgagcatcccaattccccatcggcagttattcatagacggagactggaaagtccccgtcctcaagaatcggattcccatcatcaacccttccacccaacacatgacttggtctcttctttcccattctctgtctctcatcagatctcaatctcaatctcaatctccttccttgtcttctcaatg

SEQ ID NO: 4240 - DNA, 408 bp, Glycine max
gctgattctaggttgttgcttcttacatgatgattcaaaatctaaatatgaagggatataatgcacttgccttctccattccttcagggaaggaacttctgacgatatttgggcttgctgctcctgtttttataacattgatgtcaaaggttgtctcaagtagtatactagatctgtggctttgtctagagtggtataaccttttaatataatctgaagttctgatgtttaggtggctttttacgcactacttatatattttgctacatcaatgggtacacatacaatggctgctcatcaagtcatggtccagacctatttaatgtgtaccgtatggggtgaacctctctcgcaaacctctcaatcatttaggcctgaattgatatatggagtaaatcggagtttgtc

SEQ ID NO: 4241 - DNA, 989 bp, Glycine max
agagtgtgatagtaaggagaaaaagaaagtggtatatattgatatatgtgtgtatttcctttgggcttgaaactcaaaactataataatgggttcttcttctcctccggacactagcaagagcataaagctagagcgatacaacagctacatcaggagactcaacagcaccaaactcctcaacgcctcctccaaactcctcttccgtgccactatcttagtcgcactcatcctcgtcttcctcttcaccttcaactaccctcccctcgccccagacttcacctcccaccgccacctccactcccactcccacttcctctcctcctcctcctccttcgcctcctgggagaagcaggtccgccactcctccacccctcgccgccccaacggcctcaccgtcctcgtcaccggcgccgctggcttcgtcggcagccactgctcccttgccctcaaaaaacgcggcgacggcgttctcgggctcgacaacttcaacagctactacgatccctccctgaaacgctcccggcaggcaatgctctggaaacaccaggttttcatcgtggaaggtgaccttcaacgacacccccttgcttcagaagctcttcgacgttgtccccttcacccacatcctccacctcgccgctcaggccggcgtccgctacgccatgcagaacccccaatcctacgtcaccgccaacatcgctggcttcgtcaaccttctcgaggctgccaaatccgccaacccccaacccgccattgtctgggcttcgtccagctccgtctacggcctcaacacccaaaaccctttctccgagctccaccgcaccgaccagcccgccagcctctacgccgccaccaagaaggccggcgaggaaatcgcccacacctacaaccacatttacggcctctccctcaccggactccgtttcttcaccgtctacggcccctgggggagacccgacatggcttactttttcttaaccaaggaca

SEQ ID NO: 4242 - DNA, 540 bp, Glycine max
gggaacatgaacgtgcgatgctgattcttgtatgacaaatcctcacgaagagagagagagagctgtgtctgaattctgaaaaattaaaccatgtctattacaacaacacaagctttgacccccttgtcgtcatcacgtaaaagtagaagtagaaccacatttggcgccaattccacctccacaagcttccccgctactccactctcctccaatctcctcctcttcaagctcagtcacacttcttccaaacgaacctcaaccaccttccatgccttcaagcgcttttcccccgtcatggagtggcaggattgcacggttaagatggagattgatgtgcccatctctgtagcctatacttgttattctgatcgcgaagccatcccaaactggatgccctttatttcttctgttaagatattgccaggcaaacctgacctgtcacggtggtccttgaagtataaagcatttggtcgtgatattgaattctcgtggcttgctcgtaatatgcagcccattccagatcagaaaattcactggcga

SEQ ID NO: 4243 - DNA, 383 bp, Glycine max
ggaagctgtttgtatgacaacaaaaatcctcacgaagagagagagagagagagaggaactgtgtctgaattctgaaaaaactggaacatgtcttcaactactgtggtaggctctatttctacaacagcagctttgacacccttgttgccatcatcacgtacaagtagaagcacatttggcgccaattccacctccacaagcttccccgctactccactctcctccaatctcctcttcttcaagctcaatcacacttcttcttcttcttccaaacgaacctcaaccttccatggcttcaagcgcttttcacccgtcatggagtggcaggattgcacggttaagatggagattgatgtgcacatctctgtagcctacacttgtta

SEQ ID NO: 4244 - DNA, 893 bp, Glycine max
ctttccgattggacctttccagcttctaaacttggctggctatggagttgccgttgctacttcaaaagtatttgctgatgcattttctgatcgcatatttaaatctccactgcttgatcttctgatcaaatctgggcgaaatggcaaaaacaatgggaaagggtactacatttatgaaaagggtggcaagccaaaacctgatccttcaatactaccaatcatcgaggagtctagaagactttgcaatattatgcccaatggaaagcctatatctattactgaccaagagattgtggagatgatactattcccagtagttaatgaggcatgccgtgttctagaagatggagttgttatacgagcatcagaccttgacattgcatctgttcttggaatgagcttcccaaattaccggggtggcattgttttctgggcagatttggttggggctaatcatatatttaccagcctaaaaaaatgggcacaattatatggtaacttctataaaccctcaaggtatttggaagaaagagcactcaaaggaattcctctgagtgcacctgcttcatctactccaaagtcaatggcgcgtctatgagaaagccaattgttcagcatgttggatgttctacaataaaaaaatgtaacaactaatgtttgcttccttcctagattaaataataaattaaagttggtttcacaaagagaaaaatttaaggaaaagaattgtttcttgggggtgactagtaaggcctcagtatgctactttaatcaagtaatttccttcaagtttggtatgtgttttaattttactttatttaacatgtttgcttagcatgaaactacattctcagcgtaacaaaacggtttcagaacttaaattattatgagct

SEQ ID NO: 4245 - DNA, 480 bp, Glycine max
gtgttctagaagatggagttgttattcgagcatcagaccttgacattgcatctgttcttggaatgagcttcccaaattaccggggtggcattgttttctgggcagacttggttggggccaatcatatatataccagcctaaaaaaatgggcacaattatatggtaacttctataaaccctcaaggtatttggaagaaagagcactcaaaggcattcccttgagtgcacctgcttcatctactccaaagtcaatggcacgtctatgagaaagccaagtgttgagcatatatgttggatgttctacaatagaaaatgtaacaaccaatgtttgcttccttcctagattaaagaataaattattaaatttggtttcacaaagagaaaaatcgaaggaaaataattgtttcttggggtgacgagttgctactttaatcttaagtgattgggatttcgttgagtccccgttgtcgagctcttctg

SEQ ID NO: 4246 - DNA, 1003 bp, Glycine max
tctcgagccgctcgagccgctcgagtagaagacgacagaaggggaaggatcagcagggagaattaggtttttagggtttacaccgagcagccacacctccctccgcagcagccatggttctcaaaactgaactatgccgattcagtggtgccaagatctacccaggaaagggcatcagatttgttcgtggtgattctcaggttttcctgtttgctaactcaaaatgtaagaggtatttccacaaccgcctgaagccttcaaagctcacctggactgcaatgtacagaaagcaacacaaaaaggacattgctcaagaagctgtgaagaagaggagacgtgctgccaaaaagccttactctaggtccattgttggtgccactttggaagttatccagaaaaagagagctgagaagccagaagttcgagatgcagctagggaagctgctcttcgtgaaattaaggagaggatcaagaaaacaaaggatgagaagaaggctaagaaagcagaagttgcagccaagtcgcaaaaagcaggagggaaaggcaatgtttctaagggtgctatgcccaaaggtcccaaacttggcggtggaggcgggaaacgctgagcttttagttttgttcctaattttggctacaatttaaatagttgttttgacactgctgtaccgatatttcatttgcaagattaatcttttattgtactgttttattaaacctgtgtttggatattcagaaggtacttggttattgaatggatttcgcaatctgtgctagttttatatttttttacgccaatcatccttgacgttgtctattagtattggttcatgtttgattgtgattttccctaccacaaaagatgattatggtcaatcccgccttggttcaaattttgcatttgttttggtgctctttttaagcattagctcaactgattttgcttccaaatatgattagtaatttgatagagcacaattcttccttttagaatctgatcttc

SEQ ID NO: 4247 - DNA, 708 bp, Glycine max
agaagacgacagaaggggaggtttttagggtttacattgaggaggcacaccttcaggagcagtggtggttctcaaaaccgagctgtgccgattcagcggtgccaagatctacccagggaaaggcatcagatttgttcgtggtgattctcaggttttcctgtttgctaactcaaaatgtaagaggtatttccacaacaggttgaagccgtcaaagctcacctggactgcaatgtacagaaagcaacacaagaaggacattgctcaagaagctgtgaagaaaagaagacgtgctgccaaaaagccttactccaggtccattgtcggtgccactttggaagttatccagaaaaagagagctgagaagccagaagttcgagatgcaaatagggaagctgcccttcgtgaaattaaggagaggaacaagaaaacaaaggatgagaagaaggctaagaaagcagagtttgccaagtcccaaaaatcacaagggaaaggaaatgtttcgaagggtgccatgcccaaaggtcccaaacttggtggtggaggcgggaaacgctgagcctttactttggttcccatttttggctacatttaaaatagtgttgttttgaatctgtactattttactgttttattaaacctttgtttggagcttgtgaaggtcccttgttattgaacggatttagccatcagttttatattcttaagcta

SEQ ID NO: 4248 - DNA, 399 bp, Glycine max
gagacagagaggaagaagacgatggcggaggatccgatttctagcttctgcaacgcattggcagctttctgcggccacctccactcctcttccgatgccctcaaacaatccatcgatcgccgacctattcctcgcgattccgcctcgtcgaccttcttgcaatgcctcaatcgccgcgtatcgaccgcgagcgccgacctccacatgctcgattccatgtccttcggtacagtctctttcgaagagctcctaggtcactgcaacgaattgtagaagaagaaccacgccgatctccttcaacttcaagatcgcctccagagctacggttatagtgctgttcctgatattgaggaggcggatgaagatgaggatatacaacgtcaagatccggaagacaaa

SEQ ID NO: 4249 - DNA, 768 bp, Glycine max
cggctcgagcggctcgaggtgagagagaacactccttgagctccacacatcacaaaaacactcatctgaaaacccttctagcctaaagccttgctaataaacactaacatggcctcccaatttgctagggatgtaaaatgcaagagactaatgcactgtgcagcctcttatggagaaagaggaagccattagttcactgtctcgtcgccaaaactatggataccatcccaatgccaacccgaagaagagaacttcaatgaacatcataatcataataataataccttgggatgtgaaaagggtccaaaacgtggcacaaaccgaggtagacaacaagcacaaaagcttcacaggttgggcttctcgtaccttgcatcatcttttctttacttagtcataaaggttaaggccttctacaatggatttcttggagatgttgctggggaagcgaaaatgggcattgaagcacctactgaggcatatttctcagtgccagttcttccaaattaacaaagctcctcctttgaagtagtggcaacatgttctcatgcatgtgtctagttcactagtatattatctgaatgtttatattattattaaaattgagtagaactttgtgaattatgttgctggctagagttgtaactctatgcgcaaggttcttaaaggaagttcctgctaggctatgaagttaaaatacattttttgggaactgtaaacatgtaatgatgtaataaataaactttgaacataatgttactagtaaaa

SEQ ID NO: 4250 - DNA, 426 bp, Glycine max
caaattttcagttccttcctcgcttttctgcaaaatcatctaaatccgtgagtttctgctttcgctttatccgtttccaattacccgtaactgtccaatcgttcagtggaatatgttctctaccttcttgatctgcatatgaatttcttccttttttacttctgaagaaaaccattgatttttctcttcttcgtaaatgtatgtaccagaccagtatgttgtatttatgtgttacatttctgttgattcatagaccaaccaatgttgctctactataggttagaattcaatttaataacttcgagatgcttaggttagatgatatgggttctcctgaaatacatcacctatgggttcgcaattggctagtcaatgatgaaaacaaaagttctggttttgcatgcaggatcagctgggggattgggt

SEQ ID NO: 4251 - DNA, 369 bp, Glycine max
gatcacacacaacaattttctcacaaaacaaaactccatttgtaactctctctccatttccactcatatcccataagcaccaccatggctccacctaaagaaattgcaaccctcatttaccagaatggtcacattgtagacgattcagttcaaggatcgacgtacacatgtacgaccccaatatttttttacgccaatcgttctattacatttacacaattcatttgaaaaactaacaatcgtctccctactcgagcaactgaacaagttgctcaattggtatttcgtgtccctatttcatttcatctcggccagacatgtaatggattggtatttataaataaatggaatttaaaaaaaggattaacc

SEQ ID NO: 4252 - DNA, 371 bp, Glycine max
tccttgcgtccgcacaaaacaaaactcgatttgtagcgctcacaccatttccactcaggtcccataagcaccaccatggctccacctaaagaaattccgaccctcatttaccacagtggtcacattgtagacgatccagttcaaggatcgacgtacccgtctacgaccccaatatttttttacgccagtcgttctactacgtttacacaattcattcgataaattaacaatcgcctccctactcgagcaactgaacaagttgctcaattgttatttcgtgtccctatttcagttcatctcggtcagacacgtgttatttcagctcaactattcgacaatgatgatcttagaggcgcgatggaaaaaattat

SEQ ID NO: 4253 - DNA, 1522 bp, Glycine max
tctttcacgcgtccgcggacgcgtgggtttttatctctatctttcttcacatcttaaccttgttcttaccagatggctgcctcagttaaactcttatttttgtcctttctctcgttgttcatctctttctccatagctcaaacctctttcagaccaaaggcacttgttcttcctgtaaccaaagatgtttctgcctcagttcctcagtatgtcacacaaatcaaacaaagaaccccacttgtggcagtgaaactaactgttgatcttggtggtggctacttgtgggtgaattgtgaaaagggctatgtctcatccacctctagaccagcccgttgtggctctgctcagtgctcgcttttcgggttatatggttgcagtactgaggacaaaatttgtggccgttctccaagcaacactgtgactggtgtctccacatatggtgacattcatgcagatgttgttactgtcaattccactgatggaaacaatcctactaaggtggtttctgtgcctaaattcctcttcatatgtggatcaaatgttgtccaaaaaggccttgctagtggtgtcacaggtatggctggtcttggcagaactaaagtttctcttccttctcaatttgcctcagctttcagctttcatagaaaattcgccatttgcttgagttcttctactatgacaaatggtgtaatgttctttggtgatggcccttacaattttggttatttgaactcggatctctccaaggttctaactttcacccctctcatttcaaaccctgttagcactgctccaagttatttccaaggggagccctcagtggaatactttattggggtgaaatctattaaagtctcagacaaaaatgtaccattgaacacaacccttttgtctatagatagaaatggcattggtgggactaagattagtactgttaatccatacactgtcttggagaccacaatttacaaagctgtgtctgaggcctttgtaaaagcagtaggagcccctacagttgcacctgtggctccatttgggacttgctttgcaaccaaagacattcagtctacaagaatgggccctgctgtgcctgacataaatctagtgctgcagaatgaagtggtgtggagcatcattggtgcgaattcaatggtgtatactaatgatgtaatttgcttgggttttgtggatgctggatcagacccaagtacggcccaagttggatttgtggtgggttattctcaaccaattacttcaatcacaattggagcacatcagttggagaacaacatgctacaatttgacttggctacctcaaggcttggcttccgctccctcttcttggagcacgccaactgtgccaactttaactttacctcttctgcttagaatttgatattattctactatattcaaaacttgcatcgtaattaagacccatgtgtgtagacgaggagatgaataagtgaggttatatttatgcataacctccatagtcttgttcccttttgtctacaaaata

SEQ ID NO: 4254 - DNA, 463 bp, Glycine max
gatccacatcattaacacgtttccattctatctctatcttcacatatctctacctccctcaaacagtttatgctagctcttgttccaatggcttcctcagttaaactcttatttttgtgctttctctcattgttcatctctttctccatagctcaaccctctttcagaccaaaggcacttgttcttcctgtcaccaaagatgtttctgcctcagttcctcagtatgttacacagatcaaacaaagaaccccacttgtgccagtgaaactaacagttgatcttggtggtggctacttttgggtgaactgtgaaaaaggctatgtctcatcaacctcaaaaccagctcgttgtggctctgctcagtgctcacttttcgggttatatggttgcaatgttgaggacagattctgtagtcggtctctaagcaacactgttactggggtctccacatttgggggaattc

SEQ ID NO: 4255 - DNA, 1229 bp, Glycine max
ggagccactaagtaatatggtttgttattcaccactctttatatagagaggaatcgaaattggttttgaagaccatgttcaggacgcaacgggggtgatggcatcatggttattacagaataaatgatcgaagagtgatggaaggttcttgcttttgtttgtatatatacatactattattgctaggaaattgaagacctaagatacaatagagatggcaaagctatttttgaaacaggcaaagcaatacgcagatgcaagaccaagctatcctccacaactcttccaattcattgcttccaagactccctctcactacctcgcttgggacgtcggcactgggagcggccaagctgccaaatctttagctgcaatatacaagaatgtgatagccacagatgctagtgacaaacaacttgaatttgcagccaagctcccaaatgtgagataccaacacaccccttcaaccatgtcgacggccgagcttgaacaaatggtggcatctgagggaaccatagaccttgtgaccatagcacaagccctgcattggtttgaccgcccaaccttctacgaacaagtgaagtgggttctcaggaaacctcatggaatcattgctgcttggtgttactatttgccaagagttagtgatgcatttgacactgtctttgaccaattctattccactaatgtaagcccttattgggacccagctcgtaaatgggttgatgacaattatagaagcattgattttccatttgagcccgtggatggagctgatcacacaggaccctttgagtttgtgacggaaacaatgatggatttggatgatttcttgacctacataagatcatggtcagcatatcagacggctaaggagaaaggagtggagcttctcacggaggatgttgttgaaaaattcaagcttgcttggggtgaagatgctaaaaaagttgccaagtttccaatttatttgagaattggaagaacaggggattcctaaagatatatgcaaatggttgcttttactgtgtgggagatgtgacgagtaccaacttttatgagtttatccattgattgaataatgtaattttattgaattgcgttcatgttaagaagtcaaaagcttttaaattcgaagggtacaattcctacttatctggaaagagttgagccttagtttgctatgttaattttgtaatttggtattgataaattttgttgtgtgtgtc

SEQ ID NO: 4256 - DNA, 1397 bp, Glycine max
gtaattccttttagattacggaatactttgaggcaattccaggggtcccaaaaattaaagagatgtacaacccagcaacatggatgctagaagtgagttctgtagcagctgaagttcgtcttggaatggactttgctgaatactacaaaacatcatctttgttccagcgaaacaaagctcttgtaaaggagttaagcacacccccgcctggagctactgatttgtatttccccaccaagtattctcaatccacattggggcaatttaaatcctgtttttggaagcagtggctgacatactggaggagtccagattataatctcgtcagatattttttcaccttggcttgtgccctcatgatagggacagtattttggagaattggcaaaaacagggagagctcagctgacctgacaatgattataggagccatgtatgctgctgttatttttgttgggattaacaattgtcaaactgttcaaccaattgtagccgttgaaagaacagtgttctatctagaaagagctgctggaatgtatgctcctttgccttatgccttagcacaggtcttttgcgaagtaccatatgtgtttctccaaactgtttattactcactcatagtgtatgctatggtgagctttgaatggaaagtggagaagttcttttggttcttctttgtcagcttcttctctttcttgtacttcacatattatggaatgatgactgtgtccatcacaccaaaccaccaagtggcatcaatctttgcagcagcattctatggactctttaatctcttctctggtttctttatcccaagaccgaaaattcctaaatggtgggtgtggtattactggatttgtccagtggcatggacagtgtatggattaattgtctctcaatatagagatatagaggaccctctttttgtgcctgggagtactactcaaaatttcactgtcaaaggatatattgaagaccactacgggtttaaatccgacttcatgggtccagttgctgcagttttggtagctttcactgtcttctttgcctttgtattttccttctgcatcagggcactgaacttccaaacaagataaaagaacttcaatgttaaagtacaagttatgctatggcatgttgtaacggtctaaatgacctgtgtatgtaaataactgaggctggagtcaatgctcaagatttatgcaacattataagcttaatagatggccacgatagttttgctggcggagtgttcttcagcaagtgtaaatccacatcaatcgttctattattagtctggtttgctccttagaagaagttaggtgcttattcttgcaacaatattatttcttataagtagcagtttattcttttacattaatttagaatatttatcc

SEQ ID NO: 4257 - DNA, 828 bp, Glycine max
cccacgcgtccgcccacgggtccgccacttggacggcaaaaatggcacctgcaacactgtctctgtctctcctcctcctgttctcactcagcatcgccgtaaccgttagatcgagcgactacgactacgattgtgtgtacactgcatacgttagaaccggttcggtgttgaagggcggaacggactctaagatcgggctgaagctgtacgacaagtacggctactacatctacattaaaaacctcgaagcatggggcggcttgatgggcaagggctacgactacttcgagcgcggcaacctcgacatcttcagcggaaggggaccctgtcttgacggacccgtctgtgccgttaacgttacttctgacggatcgggttctcaccacggctggtaccttaactacgtccaggtcacctccactgggccccacctttcctgcgctcaggatcagtacgaggtggagcagtggctcgctctcgacacttcgccttaccagctttgggccgttaggaaccactgccgctacagtttggaccgggcccagcccgtttcggagcgccccggatccggatccggatctgcgttctctattttgaatgcacgagcctgaggaaggtttttgagtcgctggtgttttatgtgtgcttcgtgtatttatatttattaatattgagaaacagatcgccatagtacttgaattggcatcgggtttgggttaacaacccgttttgtctatgtagtcttcaataataattggccctatctgtatggcctcgatgatctggatatgacagtactactatatgcttattgcctcaatggtagcc

SEQ ID NO: 4258 - DNA, 457 bp, Glycine max
cggctcgagcggctcgagtagccatagactgaaagaagaagaagaagaaaattgagggaggatgtggctcgagattatcttcggtttggtcatttacagattgttccggcgcttcttctacgacgacgacgttttggacatcgaaggatcggattcttctgctcttttctccgtcgcggataggcttaaaaaactttacggagcaaatgtgtatgtgggtcttcggattcccgatgccgatactgcttctcgacagagcattgatatggttcttctcactaaacaagagctatgggtgatatctgtgaaaaacttctctggaattttgacaattggtggcgatggttgttgggtctgtgaaaggccagacaaacataaagcagagcgtcaccctgatcctgtggaagaagcaaggaagcaagcttctatcctccaatcatatcttgaacagagaggg

SEQ ID NO: 4259 - DNA, 471 bp, Glycine max
attgaagcagacaccttaacaaggaaggaagacacagtagtagaaaagttaagcggtgcactggttttgttttaggagaagactgaaagaagaagaagaagaaaattgagggaggatgtggctcgagattatcttcggtttggtcatttacagattgttccggcgcttcttctacgacgacgacgttttggacatcgaaggatcggattcttctgctcttttctccgtcgcggataggtctctttctttcccctatttttcctttccgattatggcactaatcgatttcaatttcttttcaggcttaaaaaactttacggagcaaatgtgtatgtgggtcttcggattcccgatgccgatactgcttctcgacagagcattgatatggttcttctcactaaacaagagctacgggcgatatctgtgaaaaaaacttcttggaattttgacaattggtggcgatggttgttg

SEQ ID NO: 4260 - DNA, 1164 bp, Glycine max
  unsure (1)..(1164): unsure at all n locations
ggaggattcacaaatgataatcatctctactgaccaaatctgaagaaaattgctttctctttggttcctagctcgcactctctctacgcacgcctcaacatcccttctctgctccattcattatgtctccgtcgttggatcttccccccaagggtggcttcagttttgatctatgccgaagaaacgcaatgcttcaaaacaagggcctcaaagccccaacctttctcaaaactggcaccactattgtcggtttagttttccaggatggtgtcattcttggggctgatactagggcaactgaaggacctatagtggctgataaaaactgtgagaaaattcattatatggcacccaacatatattgctgtggagcaggcacagctgctgatacagaggctgtaacagacatggttagctcacagctgcaactacatcgctaccatactggtcgggaatcaagagttgttacggcactgactcttcttaagaaacacctgttcaattatcaagggcatgtctcagctgctttagttcttggtggggttgatatcactggacctcatttgcatactatttatcctcatgggtcaactgacaccctcccatttgctacaatgggatcaggttcacttgctgcaatgtctgtatttgagtctaagtacaaggaaagtttgagtagggatgaaggcattaagctagttgttgaggcgatatgtgctggtatatttaatgacctaggaagtggaagtaatgttgatgtttgtgtgataaccaagggacataaggaatatctcaggaaccaccttctaccaaatcctcgtacctatgtcaatccaaaaggctttgatttccccaaaaagacagaggtcctcttaacaaagattacaccgttgaaggagaaggtggaagtgattgaaggagatgctatggaagagtaacaatcattccaaaaaatatttggtgtttgagtatgaaacttgattagtgcaatggctgtgatatttagttattgtactttcacaactttggctttcattaccaaaaattatgtgaatttaattagattgttgcaagttatttcctcaaatttcttcatttggttggattttggctagaaaatgcttaacaaaacattaaatatatacaatttgattgatgnaaaaa

SEQ ID NO: 4261 - DNA, 839 bp, Glycine max
gctgcgaagacgacagaaggggagggacccaaattttaagaacttggctttgcttccttcaaagtgaggtctctaagtttcactttctttgcatagggcaacctcctttctctgtgactctgagtatcgtatcgttttattattatttctaattctctcttatcaggtccattgaatatgtctccgtcgttggatcttcctcccaagggtggcttcagttttgatctatgccgaagaaacgcaatgcttcaaaacaagggcctcaaagccccaacctttctcaaaactggcaccactattgtcggtttagttttccaggatggtgtcattcttggtgctgatactagggcaactgaaggacctatagtggctgataaaaactgtgagaaaattcattatatggcacccaacatatattgctgtggagcaggcacagctgctgatacagaggctgtaacagacatggttagctcacagctgcaattacatcgctaccatactggtcgagaatcaagagttgctacagcgctgacccttcttaagaaacacctgttcaattatcaagggcatgtctcagctgctttagttcttggtggggttgatatcactggacctcatttgcatactatttatcctcatgggtcaactgacaccctcccatttgctacaatgggatcaggttcacttgctgcaatgtctgtatttgagtctaagtacaaggaaagtttgagtgtaagtaagcatacaaggcttacagccttagaggagtgcatttgatacattgttgttaaatggaggtgccatggcgtgacggtttttttgccagctgcctaccatag

SEQ ID NO: 4262 - DNA, 559 bp, Glycine max
aattgagggggggtatttgattgataatcatttgtatcgaagaaagaagggaccctaattttaagaacttggctttgcttccttcaaagtgagggtccattgaatatgtctccgtcgttggatcttcctcccaagggtggcttcagttttgatctatgccgaagaaacgcaatgcttcaaaacaagggcctcaaagccccaacctttctcaaaactggcaccactattgtcggtttagttttccaggatggtgtcattcttggtgctgatactagggcaactgaaggacctatagtggctgataaaaactgtgagaaaattcattatatggcacccaacatatattgctgtggagcaggcacagctgctgatacagaggctgtaacagacatggttagctcacagctgcaattacatcgctaccatactggtcgagaatcaagagttgttacagcgctgacccttcttaagaaacaccttttcaattatcaagggcatgtctcagctgctttggtgcttggtggggttgatatcactggacctcatttgcatactattt

SEQ ID NO: 4263 - DNA, 483 bp, Glycine max
ctctgagtatcgtatcgttttattattatttctagggctctcttatcagtatgtattcaaaaccctagctaggtttttggagctccctttctttctttccgatcccaccgtcaaacttgtcattctatatgctttgcagggtccattgaatatgtctccgtcgttggatcttcctcccaagggtggcttcagttttgatctatgccgaagaaacgcaatgcttcaaaacaagggcctcaaagccccaacctttctcaaaactggcaccactattgtcggtttagttttccaggatggtgtcattcttggtgctgatactagggcaactgaacgacctatagtggctgataaaaactgtgagagaattcattatatggcacccaacatatattgctgtggagcaggcacaactgctgatacagacgctgttacagacatggttagctcaaagctgcaattacatcgctaccatactggtcgaga

SEQ ID NO: 4264 - DNA, 531 bp, Glycine max
  unsure (1)..(531): unsure at all n locations
gaagaaaattgctttctctttggttccgggctcgcactctctctacgcacgcctcaacatccctgctctgttcacttgctttgcaggctccattcattatgtctccgtcgttggatcttccccccaagggtggcttcagttttgatctatgccgaagaaacgcaatgcttcaaaacaagggcctcaaagccccaacctttctcaaaactggcaccactattgtcggtttagttttccaggatggtgtcattcttggggctgatactagggcaactgaaggacctatagtggctgataaaaactgtgagaaaattcattatatggcacccaacatatattgctgtggagcaggcacagctgctgatacagaggctgtaacagacatggttagctcacagctgcaactacatcgctaccatactggtcgggaaatcaagagttgttacggcactgactcttcttaagaaacacctgttcaattatcaagggcatgtctcagctgctttagttcttggtggngttgatatcact

SEQ ID NO: 4265 - DNA, 396 bp, Glycine max
gatgcttagaaatgtacaactcagagcacaacaagggtgatcatcaacatcatcatcaatgcgctcctccaatgagcccaagaatctctttctcaaatgatttcgtggatgtgaaacaagccatgaagcaagaacaaagaggctcatccagatcagacgcgccagtatcttcagatttcgagttttcagtggcaaactactccatgatgagtgctgatgaacttttcttcaagggcaggttgatgtccacgtataacaaggacaattgcaacaacaacaacagaaacaaccacatgatgatgatgcagcagcagagggccaccagcaccaccacgaccactctcaaggaagagctccttataaatgacgatgatcatgatcatgatttttctctca

SEQ ID NO: 4266 - DNA, 1415 bp, Glycine max
ctcgagccgctcgagccgaatcggctctgtctcaacttttcttcattttctctcttcctctcaccgagtcacgcactcggcttgactcgtacgaactccgatccccccccgagtcacactcaaccagcaccaccgcccgatccgacgatgtctcgcgcctcctccgccgcagattccgccgcctccggtgagatcatactgttcggagtcagagtcgtcgtcgattccatgaggaagagcgtcacatgagcaacctctcacagtacgaacatcctttagacgccaccaacaacaaagacgccgtcgccgccggctacgcctccgccgacgacgccgctcctcagaactccggccgcctccgcgagcgcgagcgaaagcgaggagttccgtggacggaggaagagcacaagctgtttttggttggattgcagaaggtagggaaaggtgattggagaggaatctccaaaaactacgtcaaaacgcgaacgccaacgcaggttgcgagccatgctcagaagtactttctccgacgaagcaacctcaatcgccgtcgccgtagatccagcctctttgacatcaccaccgacacggtctctgcaattccgatggagggagaacaggtccagaatcaagacacgctgtgtcattcacaacaacaacccgtgttccctgctgaaactagcaaaatcaatgggtttccaatgatgccagtgtatcagtttgggtttggttcttctggagtgatttcagtccaaggtggcaatggaaacccaatggaagaactcactctgggacaaggaaacgtggaaaaacataatgtgccaaacaaggtctctacagtgtctgatatcatcaccccgagttcttctagttctgccgttgacccaccgacactgtccctggggctatccttctcatctgaccaaagacagacatcatcaagacattcagctttacatgccatgcaatgtttcagcaatggagatagcatcattagtgttgcttgagaatatggtccttggattcacagattaattacatatactaatctttctctagtttcctgtctttttggtgggagaaagagaaagaggttgaaggaaagggcgatggattagagaaggcaagaagagttttaacagactgaatttgatccttctgttccttgtacagaccccagaaaaggtcctgtcctgtttcttcttgtttgcttatgttaattaatgtcatgactttagattcttgtttatttggccgtttacgtttgtagtagttgatgtaactgaaaataacaaagtacactctgttctttgctgataatgtattaacgttcgatatgaactttcactgatgaggtctttgtggctctttcaaaaaaaaaaaaaaaaaaaaaactcgagactagttctcctggt

SEQ ID NO: 4267 - DNA, 574 bp, Glycine max
ggtgtgtccccttagccaagctcgcgtctcacttctctctcttatattaatcactctcgcaccagaaaaaaacaccacctttctttttccgactaaaggttcgccggaaaatgcctctatcctcctcttcctcctccgccgtagactccgccgtctccggcgagatcatgctcttcggcgtgagagtcgtagtggactccatgaggaagagcgtgagtatgaacaacctctcgcagtacgagctccctcgcgacgccgccaacgccaaagacgacgtcgctgccggctacgcctccgctgacgatgccgctccgataaactccggcaagaaccgcgaccgcaagcgagggattccatggacggaggaagagcacaagctattcttggtggggttgcagaaagtggggaaaggtgattggagagggatctcaaggaactatgtcaaaacgaggacgccaacacaggttgctagccatgctcagaagtactttctccgccgcaccaaccttaatcgccgtcgccggagatccagcctctttgacatcaccaccgactcggtctctacaacccctat

SEQ ID NO: 4268 - DNA, 448 bp, Glycine max
ctcatccaagctgtgtctcccttctctctcttatattaatcactcactcacacattcgccacttccacacagcatagatcacctttccttttttcccacagaaaaaaacaccacctttctttttccgactaaaggttcgccggaaaatgcctctatcctcctcttcctcctccgccgtagactccgccgtctccggcgagatcatgctctttggcgttagagtcgtggtggactccatgcggaagagtgtgagtatgaacaacctctcgcagtacgagcttcctcgcgacgctgccaacgccaaagacgacgccgcaggatacgcctccgccgatgatgcagctccgatcaactccgacaagaaccgcgaccgcaagccagggattctcatggactgaaggaaaacacaagctattcttggtggggttgcagaaagtggggaaaggtg

SEQ ID NO: 4269 - DNA, 631 bp, Glycine max
gacgggcagaagcagaagtgggtctgtcttattcttaccccttggggccttgctgttgttgtgaagccctcttgtggggttcccttctgcttcataagatagactccttcaaacacttagagggaagaagaaaaaaaaaacgtctagaatcaacataaagtcaggcatctggagattctgattctaagaaaggaagtgattgatggaggacaagtatagtctaaacaggcagaggagtggaatatggaattgcttgagagatggagactttgaagaagaagaagtttgggctgttttcaaggaaaaacccgattacatttctggaattcacaagccaaggggaaaaggatcttcttctcctcttgctgtccctaggactctcccaagtgcagcaaggatgatcccaaggactagtagtggcaatagtagtactagttcctctcatgaaaccaaggttctccagcaatcagcacctctcaacattcctgattggtcacagatttataggaacaagccaaacaagaccacccccaagagtgtttcaaggtttggtgaggactatgatgatttctatcattctgttaatgatgagggcgatgttgatggtgatggtgttgtcaattatggggga

SEQ ID NO: 4270 - DNA, 658 bp, Glycine max
cccacgcgtccgtcatactactgttagatatgctacaaagaaattgctggaacgtagagagcagaaaccatcaagcctatcagatgctattgttgaacacacacagatattgaaaactaggtccaggtgcttgaaagaggttcttgagaaaagtgggtgggacgtgcttgaatcgtgtgcgggtgtgtctgttgtggccaagccctctgcctatctcaacaagactattaagctgaaaatttcacccgaaggtgaacgaagccacggaaatgccactaaggaaataaagctcgatgactctaatatcaggactgtcattctcaaagccactggattatgcatcaatagtgggtcatggactggaattcctggatactgtcggttcagtattgcactcgaagaaaatgatttcaaaaaagcattggattgcattctaaaatttaaagaagtcgccctgggttaaaacttcgtgttttgatcccattcggtgtatgtcattcttttggtcttctcgttttcactgttttgggggtaagtttcttattcctcctatatgcacggttcaacagaaataattcatctttcataatctgagtgcgcaataatgttttgtgatgtaaactttctcagttcaaattataatgaaattgttttctct

SEQ ID NO: 4271 - DNA, 1979 bp, Glycine max
tttgagtcttagtgggagtttatgtccttctgttgcgaacttgggttctctcgttgagattaggttggggggtaatgatattagtggtgtggtgcctggtaattggactagtttggcatctttgaaatcgttggatctgagtgggaacaacatttatcctccactgcctgactttaagactggattgaaacctgttgttgtggggaatcctctgttaaatggtggagcgaaaactactccttcggggaacaataacccgtcaactggatctgggaatgttgacccttcagggaacactaactcgaattctagttcaagtgattctcatgaaactaagaaatccaaaaggaaacagttggtttcgattgttgctccgattgcgggtgtggcagctgcggcttttctgctcattccgctctatgcatactgtttcaggaggaggaacggtggcttccaggctccaacttcactggtaattcaccctagggatccatcggattcggacagtgctgtgaagattgctgttgctaataataccaatggaagcatttccactttgacagggagtgggtctgggagtaggaatagtagtggaattggggactctcacatcattgaagctggaaatctaaggatatcagttcaggttctgaggaaagtgaccgagaactttgcgcctgagaatgagcttggccgtggtggatttggggttgtttataagggggagttggatgatggtactaaaattgcagtgaaacgaatggaagcaggtgtgattagtagtaaggccttggatgaattccagtctgagattgcagttctatcgaaagtccgacaccggcatctggtgtctcttttgggttattctacagagggtaatgaaagaattctagtgtacgagtatatgccacaaggggctctcagtaagcatcttttccattggaagagccatgatctggagcccctctcttggaagaggagactcaatattgccttggatgttgccagagggatggagtatctccatactctggctcaccaaagcttcattcacagagatcttaagccgtcaaatatcttgcttgctgatgatttcaaagcaaaagtctccgattttgggttggtaaaacttgctcctgaaggggaaaaagcatctgtagtgacccggcttgcagggacgtttggatatttggcgccagaatatgcagtgacaggaaaaatcactaccaaagcagatgttttcagttttggggttgtgctaatggagttgttgactggattaatggcacttgatgaggatagacctgaggaaagccaatacttggcagcatggttctggcatataaaatcagataagaagaaactaatggctgctatcgatcctgcccttgatgtaaaagaagaaacatttgagagcgtctccatcattgctgagctagcagggcactgcactgcaagagaaccaagccaacggccagatatgggtcatgccgtgaatgtgttggcaccgcttgtcgaaaaatggaaaccctttgatgatgacaccgaggagtattccggcattgattatagccttccccttaaccagatggtgaagggatggcaagaggcagaaggaaaggacttaagttatatggcccttgaagacagtaagagtagtatccctgcaaggcctactggatttgcagattcttttacttctgctgatggccggtgaaacaaattgtttggtgtacccgttttccttttgattttccaatagatgtagatagatagcatgctcttttctttctgtctgtcttaattggcaaagtgtctagtgccagtgttataatagtgtttgagtaaagagatttcacatgcacttgaaatctcagttgcatgctttgtattttccaccaagacatttaagtgttaatggttgtagatattgcgccacgatcaatcatcaatgagaatgcttgtttttttgttcattc

SEQ ID NO: 4272 - DNA, 917 bp, Glycine max
cccgcgcttccggtccaactcagtagtcaacactaggcactctctattcccattcattgcagaagaagatggaggctcacccctacgtcccacgcgatttgcacttacccggctacgctccctgcttcctttccatgtccaacattctttccgtcttcgcctcctcctcattgctcatcgtcactctcgtctggatcttctctggacgctttaagaaaaccaaagttgatagagtgctgatgtgctggtgggccttcacaggtctcacacacattattcttgagggttattttgttttctctcctgagtttttcaaggataaaactggcttctacctggctgaagtttggaaggaatatagcaaaggggattcaaggtatgcaggaagggatgcaggggtagttactgttgaaggaataacagcggttttggagggtccagctagccttctagcagtatacgctatagctactgggaagtcatatagctacatacttcagtttgccatttctttgggccagctatacggaactgctgtttattatataacagcaatcttggaaggtgataatttttctacaaactcgttttactattatgcatactacattggagcaaatgcctcctggattgtaatacccttgatcattgccatccgctgctggaggaagatctgtgcagcatttcgagttcaaggtggccagacaaaaaagcctaaagttcgttgaaggaaacattttcaggttattggtcttagagatcctgagctaataatgatgttttggggtagttgagataggagagattgttgtaagaattgtgacattgattctcttaaactgcatatctcagggagaaaaaaaaatcccagtgtcatttgagaaggtgatgtttttaattttaagttttgaataagt

SEQ ID NO: 4273 - DNA, 730 bp, Glycine max
gacccacgcatccgctcatcttgcaaaattctctcagctaattcgctattttcttgtagtaaacaaagcaagcaagcatatccatttcaacatggccctcaaaactggttcagttgaaatgttcttcttccccttcgtaggaggaggacatcagattccaatgatagacacagcaagagtgttcgcatctcacggagccaaatcaaccattctagtcacaccctccaacgctctaaacttccaaaactcaatcaagcgcgaccaacaatccggtcttcccatcgccattcacaccttctccgccgacatacccgacacagacatgtctgccggtcccttcatcgacacctcggccctcctcgaacctcttcggcagctcctcatccaacgcccccccgactgcattgtcatcgacatgttccatcgttgggcccccgacgtcgttgaccagcttcggatcccaagaatcctcttcaacggtcacgggtgcttccctcgctgcgttactgaaaacatcagaaatcatgtcacgcttgagaatctgagttcagactcagagccttttgttgttcctaatctccctcacagaatcgaaatgacaaggtctcggcttccggtttttctgaggaacccgtctcagttccctgataggatgaagcaatgggacgacaacggtttcggcattgtcaccaacagcttctatgacttagaaccggattatgctgattac

SEQ ID NO: 4274 - DNA, 879 bp, Glycine max
gtcaaacgcgagaagacaacagaaggggaacacaaacacaaattacatagcctcagtaatctgagagagaaacaaaaacaatgaaggtttccattgccaagttccactcccttcccctatgttttttccttctcttggccttcaacacaaaacccctcctagcagcagaaccagagccagtggttgataagcaagggaaccctttggagccaggagtagggtactacgtgtggccactttgggctgatgaaggaggcctcacactaggccaaacaaggaacaagacatgccctctttatgttatccgtgacccttcattcattggcaccccagtttcattcttagcaccaggccttgaccatgttccaacactcactgatctaaccattgatttccctgtggtgacagtgtgtaaccagccaacagtgtggaggctcaacaaggtagggtcagggttctggtttgtgagcaccagtggtgaccctaatgatatcactagcaagttcaagattgagaggcttgaaggggatcatgcttatgagatctacagcttcaagttctgccccagtgtgcctggtgcgctgtgtgctcctgtggggacttttgaagatgctgatggaaccaaagtcatggctgtgggggatgatattgagccttactatgtgaggtttcaaaaagtctccatctttggtcaagacaagaaacaaccttttagcattttgtaggttggtttgtgcctgtaataggtagatgcgggtcatgactcggaataatgagctactagaatgcaatgcaactgtttccttggtgtgcctgtgtgaaagaatcgaataacaagtttattgaaaaaaaaaaaaaaagggcggccgccgctattga

SEQ ID NO: 4275 - DNA, 381 bp, Glycine max
gaagccaaatacacatacacattagcttcaatctgagagagaaacacacacaatgaaggtttccattgccaagtttcactcccttcccctatgttttctccttctcttggccatcaacacacagccactgctagcagctgaaccagagccagtggtagataagcaagggaaccctttggtgccaggagtagggtactatgtgtggccactttgggctgataatggaggcctcacactaggccaaacaaggaacaaaacatgccctcttgatcgttatccgtgacccttcattcatacggtccccagtgaggttccatgcatcatgccttaatcacattccaacactcactgatctcaccattgatttccctgtggtgacag

SEQ ID NO: 4276 - DNA, 378 bp, Glycine max
cacagagatagcttcgaaactctgatcggatacgcaagagttttcaatttgacgaacgaagattaaaaaaaaaaaaaacaagcctgttcaactcaaagacctgataattgttccttctgtctgagctgaaagacttgaggacttctaaagatgttggcccttcatcctgcaaaaaagttatcatttaatcgaccaattaataatggggatttggttattgtttatgaaaggcatgacattatgaaggctgtaacagtgtctgagggatcagtcctgcaaaatcgttttggtgtttttaaacattcggaatggataggaaagccgtttgggtctaaagtagtcagcagtaagggtggctttgtgtacttgttagctccc

SEQ ID NO: 4277 - DNA, 447 bp, Glycine max
ctatggcttattacagatttcttgatgtgttttcatggattcaaaatcttccaccaatcccagcatggaagacatcgtccatgtccctgagcatatgttccacaaactcagctcagccatctcttaatctcaccatagcaaaaatatcatcaccaatcctcaagaatctccttagccattgtggcagacttcaatattcccatctctctttggacctctagacctttcaaacctagcaccacaaccatgaggttaactgatgatgaaaccctttccaatctccttgtgaatttcatacaagagatccttcattatggctccaacaggcacagtattattccctatatcaagttccccaaacttgattctgtttccaacttccaagacattttcaaccttgcttttctcaccctcttgttcctagtttgcatatatgaagccccttct

SEQ ID NO: 4278 - DNA, 407 bp, Glycine max
gcaaatattccatcgtcccatcctgccggtttgccgtagctggaacccggaaaacacacccggagccaccgtgaatgacgaccgttttgaggccaccgattgggttgcgcttcctccaaccaccacagctttccccttctcccacatcgtgtgtttctttctccctctcactcaagcttcccagaatcaactctaattactcctctttcgaagttagagacgttacctatcaacccccggggactcagcttagacttctgaattcagttagtttttcacttccagagaagagttttggtttaattttcgggcacagtggaagcggaaaaacaactctgttgcagcttcttgcaggaataagcaaaccaacctctggatctatttacattcaagaatatgagagtgat

SEQ ID NO: 4279 - DNA, 647 bp, Glycine max
gtacacatgaagcatagctatgcaagaagtctagcccattttgctgcaaaccttggtcctgttgtttgtaagattgctgcaagtaaaatcagcggtgtgttgccagctggacatgattttggtcctggatgggtaagtgaagacgacgggtcgtcacagaggcgacacttcccagttcgtgatgagggtagaacttcagaccatcctgtaccagaggattatagaagtagattttcttctccatctggatcgtttccccttgcaaatagatcaggcttgcaaagtggagacatggctatagataattaccaaaatgacttgaatccagtaatcaacattcctggtgggtctgaatccataactcctatgaggattcagcaggaatccatggtgcactctgatgattttggttcacatgatcggttaggttctaattttccatcccaaatgaagatggtaagacttgctgatctaactgggtcttcgagtgctggggttgctcctcaaatgtttgacatggatccccccataagcaaccacattgcacatacaaatgtttgtccttctcttaagggtcagtacttaagcaaatcaagtcaattagattccggtaatttattggcacgggaacctggatttgagcaacg

SEQ ID NO: 4280 - DNA, 709 bp, Glycine max
gatgtgaaagatgagataatatcgggagtgggtggttgggtctgaagtctgaacaaacagcctgaaacgacgactttccaacacgtccggaaaagaaaataggacagaacatattgtataataataataataaaaaacaacagacaagtttgttgttcctgttctaatctctggaccatgtcatacaactgaatctaattgcaattcctgtgagccgtggcaaagcttttgaatttagtgcctctcctctctgtttacccttccagatattgcagatacagcaagatcatgagtgggacttcggaaaagaaacttgtaagaatcgatgttagttctgatactgtatgcccatggtgctttgttggcaaaaaaaatctagacaaggccatagctgcctccaaggataaatacaactttgagataatatggcatccctttcaacttagccctgatgcccctaaagaaggcattgacaagagggagtattacagaagaaaatttggatctcaatcagaacggatggaagctcggatgtcagaggtgttcaagaatgttggcttggaatatagcttgtctggactcacgggaaacactattgacagccacaggcttatatattttgctaggcagcaggggtcttgacaagcaacatgatcgagttgaagaacttaacattggctaattcacacagggaaaatacattggtgac

SEQ ID NO: 4281 - DNA, 503 bp, Glycine max
  unsure (1)..(503): unsure at all n locations
cccacgcgtccgctctgaaccatgtcatacaactgaatctgatagcaaagcggttgaatggcgggcctctcctctttgtttaccctaccagatattgcaaatacagcaagatcatcatgagtgggatttcggaaaagaaactcatcagaatcgatgctagtgctgatactgtgtgcccatggtgctttgttggcaaaaagaatctagacaaggccatagcttcctccaaggataaatacaactctgagataatatggcatccctttcaacttaacccctgatgcccctaaagaaggcattgacaagagggagttttacagaagtaaggtttggatcacaatcagaacggatggaagctcggatgtcagaggtgttcaagaatgttggtctggaatatagcttgtctggactcacgggaaacactattgacagccacaggcttatatatnttgctagacagcanggtcttgacaagcaacatgatctagttgaagaactgaaca

SEQ ID NO: 4282 - DNA, 813 bp, Glycine max
cgagagagagtgagatactggtgccagctatgtgagtgagtatattgctattgctgctgctatctcttcctctctccgcactctccatcgttttaggaatatcacaccaattcgtgaaatcgaaggattccgacagaatcgtacgaattattgttcattgtttgcctctactgttgtgctccaacttggtaaactagaagtacagatttatttcttcaatgggggatgctgagaatgcccttccaccttcaaagaaaagggctgctggaagggagctcactcgagacactcccattgatgatgaggaagatgcccccgagcttgagactggcactttcaagagagccagccaagaggttatgggcaccagaaggatagtcaaagttcgtcgccaaccaactaattctgctccttctgcaaatccttttgctggaatacgcctggttgctcccactgaatccagtgctaatcctgctgagactactactgaggtaaaatcagctggggaaaacaccgttgcagatgaatcaaaaagtaatgatacagctaaggattctgagaaagcaggagatggggaagctaagcagcctgagagcaaaactaatgaggcagaggataaacttactgaaagtaaggatgctgctgaagaaagcaatgcagacaaggagcatactgcagaaaaggaaagtactgatgatgaatcgaaggtagataaggaacagaataaggatgtcactgaaagtggaaatgaggataagaaggatgctacacacaacgaaagtgccagcaagttagataaagagaaaacttggg

SEQ ID NO: 4283 - DNA, 364 bp, Glycine max
cttttcttctcatttttaatctttactttttttcttcttttttttctctcgccggtttttaggaatatcacgattttcgtttcgccaattcgtgaaatcgaaagattcccacagaattgtacgaattattgttcatttttttgtctctactgtcgtgctccaacttggtaaactagaagttcatttattgttttcattcttcaatgggggatgctgagaatgcccttccacctacaaagaaaagagctgctggaagggagctcactcgagacactcccattgatgatgaggaagatgcccccgagcttgagactggcactttcaagagagccagtgaagaggctctggcaaccagaaggatggt

SEQ ID NO: 4284 - DNA, 2257 bp, Glycine max
cagccaaagtaatcaaatttctctttctgaggggaccaataacttaggaaaagcaacccctgcttccatcttgaaaggtgctaatggaaccaatagtcctggttctatcattgttgctgccaaggaagctgttaaaaggagagtggaagctgcttcagctgccaccaaaagagctgaaaatatggatgccattgtgaaggctgctgagctggcagcagaagctgtatctcaagcaggaaaaattgtaactatgggtgatcctttgccaataagtcagttcgtagaagctggcccagagggatgtttgaaagcaacccgagagtcttctcagcaagttggattattcaaagacattaacagagatatggtgaacaataatgtgagagatattcctgaaacttcttatacacataacagagacattttatctggtggcatttctgctcctattaagatcaatgaaaagaattcaagaggagcaaagggacacaaggttgtttctgatttagtcaagcctattgacgtggttcctggatctgagcctgaaattcaggctcctccttttactgttagtaatggatctgaaaatctggtggaaagtagcatcatcaaggagggcttacttgtagaggttttcaaagatgaggaagggtttaaagctgcatggttctcagccaatattttgactttgagggatgataaagcttatgtaggctacacttcacttgtagctgctgaaggtgcagggccattaaaggaatgggtttcacttgtatgtgatggagacaaacaccccagaatacgtactgctcgtcctcttaatactttacaatatgaaggaacaagaaagagacgtagagcagctatgggagattatacttggtctgttggggatagggttgatgcatgcatacaagaaagctggcaggaaggagtcattacagagaagaataagaaagatgaaacaacatttactgttcactttcctgctagtggagaaacgttgcttgtcagagcttggcatctccgtccatcccgtttctggaaggatgggaaatggattgaatcttccaaagtggggacaaatgacagttctacccatgagggtgatacaccaaatgaaaaacgacctaaattgggtagtcatgcggtagatgtaaaagggaaagacaagatgtcaaaaggcactgatgctgtggagtcggcaaaacctgatgagttgaggttacttgacttgactgaaaatgatagagtgttcaatattggtaagagcagcaagaatgaaaataaatttgatgcacacagaatggtgaggactggtcttcaaaaagaaggatcaaaagtaatttttggtgttcctaaaccggggaagaaaaggaaatttatggaagtaagcaagcattacgtggcacatgaaaacagtaagatcagtgatagaaatgattcagttaaacttgcaaatttcttgatgcctccaagttccggacctagaggatggaaaaatagttccaaaaatgatgccaaagagaaacatggagctgactccaagcccaagacaagccatacagaaaggattaaggattcttcaaatcaattcaagaatgcttcccagagtgaaagtaaggtggagagagcacctcactctgcaagtgatggagcaacaggatcaatcttgttttcaacgctggcaacttcggtggatgctcatcccactaaaagagcatcctcatcaagagcaagtaaagggaaacttgcgcctgcccatattaaatcaggtaaaggtgagatggaaaaggctttaaatgacaatcccatgaaatcagcatccgacgtggttgagccccggagatccaatcgcaggatccagccaacatcaagactattagaaggattgcagagctctttgatcatctcaaagattccttcggtttcacataatcgtaataccaagagttaaatggaagggagcttgcaatgattatgatgcggacacttaaaagaccggcctgttatttagatgaccgacatacctagcatagatgtgtatatttataatagagaaccaacctaggaatggaaattcttgcttcctatgtttcagtagacggtcggtcatatttgattttagtatttatttaaatttgaatgtgatttgatccataggctgtgctgtatatggatattctccatgttaccttgtttgtagaggtttgttcatcaaatgataacataacgcgatgctctactctactctaaa

SEQ ID NO: 4285 - DNA, 710 bp, Glycine max
taactatgggtgatcctttgacattaaatgaattagtagaagctggtccagagggttgctggaatgcagctcaagagtcttctcagcaagttgacttgttgaaagacgtgaccagtgatcgggtgaatgttgacaatgttggagacagaccggaaacatctcatatatgtaatacagataattcatctgatgaaatgaggaagaagactgctgcaagtgagaagtcaccttttcatacagtgcatagtgagatatctcaggaccataagaaatgcattggtggcttttctcctattatcaatcaaaagagttcaaaaggaccaaagggccgcaaggtttctgatttagtcaataccattgatgtgcttcctaattctgagactgaaatacaggctacttccactgctggtaataaacctgaaaatctggaggataataacatcaaggagggctctattgtagaggttttcaaagatggagaaggatttacagcagcatggtacacagccagcatattaaatttgaaggatggtaaagcttatgtatgctatgttgtgcttcttgatgatgaaggtgcaggacctttgaaggaatggatttcccttgaaggtggagaagtcaaatctccgagaatacgtactcctcattatcttcctggtttgcataatgaaggaacaaggaagagacagagggcagctatggtaagatat

SEQ ID NO: 4286 - DNA, 940 bp, Glycine max
  unsure (1)..(940): unsure at all n locations
aggcatgccactttggtcagagatatttttatttttagacatcatcactaacgatcagccctctatatatatacagcctgcacaacctcattaggaagcccccattactcacttttcatccttcgatcatacacttagttgcttccaattaagatggttctgctagagaagctctgggatgatgttgtggctggccctcaacctgagcgtggccttggcaagctcagaaaactcaccaccctcaaaactattgatgaaggagaaagtagcaagctgcagaagacgttgtcgatgccgtcgacaccaacaaccccgatgactccgacgactccaacgacaccgggatcggcccgtaaagctgacaacgtttggaggagcgtcttccatcctgggagcaactccgccacaaagaccatcggtgctcagatgtttgacaaaccacttcccaacactcccactgtctatgactggctgtacagtggggagaccagaagcaggcaccgctgaagctgaagtctttagctaagatgaccgtgggttgcatgtaaatattgtcgtttttcgttaagcatctgccacgtttgcagctactattactattatgtgtcgggaatttattgctccgttgctgactcaaacataatattactagcgtgtttggtttttttgagcaagtgaatgtaaaaatgctaaataattcgttagtatgctaagttttgttaagccagatctgccttgaactttggcgattggttaatctttttctccctttgttaaatgattagtattaaaataaataaatttttgttaaaatcttatgttgtaactagttgttagtgccatctgtatttataactaaaatataattacatgttcaaaattgtgatatgttgaaagttaacgatcggccgccgttnnnnnnnnnnnnnnnnnnnnnnnn

SEQ ID NO: 4287 - DNA, 523 bp, Glycine max
tttcatccttcgatcatacacttagttgcttccaattaagatggttctgctagagaagctctgggatgatgttgtggctggccctcaacctgagcgtggccttggcaagctcagaaaactcaccaccctcaaaactagtacgtaccccttcttatatatatatatatagattaattcctaattaactataatacacatatagctatttctaattaatgtttttagaattttgattaagaaattaaaaagataatttttttttttattggaatggacaaaatttggatgtttatgaattttttcttttaattttttatcaatatctaaggagactcattagtcattagatagatcctaacatatctctgtagctagaaagagagagagagagagagctagctaaaactaaatatttgtaattaattaatgtttgatccttcatgtagttgatgaaggagaaagtagcaagctgcagaagacgttgtcgatgccgtcgacaccaacaaccccgatgactccgacg

SEQ ID NO: 4288 - DNA, 693 bp, Glycine max
aggtaacggtctagaattcccgggccgacccacgcgtccacggacgcgtgggggactttttcttttcatccatcgattaaagacttgcttccaagatggttctgctagagaagctctgggatggcgttgttgctggccctcaacctgagcgtggccttggcaagctcagaaaactcaccaccctcaaaactattgatgaaggagacagtagcaagctgcagaagacgttgtcgatgccgtcgacaccgacaaccccgatgactcccacgactccaacgacaccgggatccgcgcgtaaagctgacaacgtttggaggagcgtcttccatcctgggagcaactccgccacaaagaccatcggtgctcagatgtttgacaaaccacttcccaacactcccactgtctacgactggcatattattggttgttggtaccgtcttttccccatgtataactaatcaacaacttaatttgcatgcatcaagtgttgagaaactatgaattttattttaggattttatctcacactcctagcctaggatacctgggatacataataacatgttgattcatctttttaactagaattttaagaatttaagtttaagtttatgaattttttttaagactttatctcacactcctttcctaggatacataataacatgttgattcatctttttaactaacatt

SEQ ID NO: 4289 - DNA, 567 bp, Glycine max
attaaaagaaattacaaggggtgatttttgtctgctaagttgtaaaaaatatgtataataggattggggtgatgtgagccgttagatcttgtgagaaatcgacggttgatatgtatgtatattgcggtataatgaagcgagttgtatgtgattgcaggctgtacagtggggagaccagaagcaggcaccgctgaaaggataagctaagaaaaccgtgggttgcatgtaaatattgtcgtttttcgttaagcacctgccacgtttgaatctactactaccattatgcgtcggaaattaattgctctgttgctgactcaaatatatattactagcgtgtttgattttgagcaagtgaatgtaaaatgctaaataattaccgtaattagcatcagtatgctatgttttgttaagccagatctgccttcaactttggcaattggttaatctttttctccctctgttaaatgattaatatatattaaaataaataaatttttgttaaaatcttatgttgtaactagttgttagtgccatctgtatttataactaaaatataattacatgttc

SEQ ID NO: 4290 - DNA, 506 bp, Glycine max
  unsure (1)..(506): unsure at all n locations
catcgattaaagacttgcttccaagatggttctgctagagaagctctgggatgacgttgttgctggccctcaacctgagcgtggccttggcaagctcagaaaactcaccaccctcaaaactagtacgtatcctttttatatataacactataataagagagagctagggaaaactatttgtaattaattgattagtgtttgattgttgatatagttgatgaaggagacagtagcaagctgcagaagacgttgtcgatgccgtcgacaccgacaatcccgatgactcccacgactccaacgacaccgggatccgcgcgtaaagctgacaacgtttggaggagcgtcttccatcctgggagcaactccgccacaaagaccatcggtgctcagatgtttgacaaaccacttcccaacactcccactgtctacgactggtaatattattgtttcttcttttaataaaaaaaactntacaaattatgaattcatttttggcaacctttgat

SEQ ID NO: 4291 - DNA, 1951 bp, Glycine max
ggaccatagaggacatgtgccagttgtgcgaccatattgcttccaatttggtcttcttcaccctcttagggtttgcatcagattcccctaattcttgcttgattttgcgctttcgctagattttcttcaaaatgactcaagatctagagatgaaggatcgctcaacgccttccaactccgtttcttcgcctgctccatctactctgcagcatttgaaggagatagcgtctcttatcgagaccggttcgtactcgaaggaagttcgtagaattgctcgcgctgttcgccttacaattgcgttgaggcggaaattgacagcatccgctatctcttcttttctcgatcatgttctcactcctggctctgaagttcacgccaaattgtctgcgtatcttcccaaggatgatgatcatgagatggaagtggacgctgcaacatctgcgattcaaaccccagccaaacacttgttgcccgagctagaaatctactgttacctgcttgtactcctttttctgattgatcagaaaaaatacagtgaggccaaagcttgttcctcagctagcattgtttggctgaagaacataaacaggagaactgttgatgttattgcatccagactgtatttttactattcgtatagctatgagcttacaggagatcttgctgaaattcggggcaacctccttgcattgcaccgatttgcgactctccgccatgatgagctgggacaggaaacacttcttaatttgttacttcgaaactaccttcactacaacctatatgatcaggctgagaagttgaggtccaaggctcctcgatttgaagcacattcaaaccagcagttttgtcgttatctcttctaccttgggaaaattcggacaattcagctggagtataccgatgcaaaagagtctctcctgcaggccgcccggaaagctcctgttgctgcacggggttttcgaattcaatgtaacaagtgggctgtgatagtgcgtttactgttgggagaaatacctgagcggactgtcttcatgcagaaaggaatggagaaagctctaaggccttactttgagcttacaaatgctgtgcggattggagacttggaactgtttaggaatattgcggacaagtttgccactacctttaatgcagacagaacccataatttgattgttcgtttgcggcataatgtcatcaggactggtttacgcaacatcagcatctcctattctcgcatctctctagctgatgttgctaaaaaactgaggctgaactctgcaaatcctgttgcagatgctgagagcattgtatcaaaggctattcgtgatggtgcaattgatgctacattggatcatgccaatggttggatggtgtccaaagaaactggagatatttactccacaaatgagcctcagttagcctttaattctcggattgctttctgtcttaacatgcacaatgaggcggttcgagctcttcgttttccaccaaacacacacaaagagaaggaaagtgctgaaaagagaagagagagacaacagcaagagcaagagctggctaagcatattgcagaggaggatgacgatgatttctgataattgttttttttcaccctatgaattgctatctggataccttcatttccaacgtttgctcatcttttccttttgaagaactttcattatcatttcctttttcaaaaagtgaatttttcatttcctaagtggaagatctctgaaagtcagtttaacatatcgaaatatttacttttttttttcatccatgatgactgctatggtttgttccttgttaggagaattatgttttaggacctgaagaaaaaaaaatcaaatatttaggacgatgcgaattctgttcagaagttttattattagaaactgttacccccgaggctttattgaattatagcatgacaataaatttttctgtc

SEQ ID NO: 4292 - DNA, 454 bp, Glycine max
gtcttcttcaccctcttagggtttgcatcagattcccctaattcttgcttgattttgcgctttcgctagattttcttcaaaatgactcaagatctagagatgaaggatcgctcaacgccttccaactccgtttcttcgcctgctccatctactctgcagcgtaagcatatagtatctttctctaaccacttccactgtgccgatttcgcattttcacaaaactattccagcttttcgctctttattttttcttttctttgctatttggatttgcagatttgaaggagatagcgtctcttatcgagaccggttcgtactcgaaggaagttcgtagaattgctcgcgctgttcgccttacaattgcgttgaggcggaaattgacagcatccgctatctcttcttttctcgatcatgttctcactcctggctctgaagttcacgccaaattgtctgc

SEQ ID NO: 4293 - DNA, 1059 bp, Glycine max
agggtgttgttgagattctaaaaattgccagttacattcccttcacaagattctcacaaacaactttgagaatctgagaaagaatggctgccaacacattgatgagttctgccatctcagccttcccatctctcctttcctcctcaaaatccagatttgccgcagcagttcctctttccagctttgttgtcaccaatgcctcttcttctcgcttttccatgagtgctgactggatgcctggccagcctagacccccctaccttgatggttcagcacctggtgactttggattcgaccctcttcgtcttggtgaagtaccagagaatcttgagaggttcaaagagtcagaactcattcactgcagatgggccatgcttgctgttccagggattttggttccagaggcattgggcttaggcaactgggtaaaggctcaggaatgggcagcagttcctgggggccaagcaacctacctaggcaatccagttccatggggcaccctacccaccattctggccattgaattccttgctatttcctttgtggagcaccaaaggagcatggagaaggacccagagaagaagaaataccctggtggtgcttttgatcctttgggatactctaaggaccctaaaacattccatgaatacaaagtcaaagaacttaagaatggacgtcttgctttgttggcttttgtgggattctgtgttcaacaatcagcttatcccggcactggacctttggagaacttggctgctcacttggctgacccatggcacaacaacattggaaacatcattattccacaatcgattttgccttgaaaaaaaaaaatcaaatatttgtttcaatagctacctgtataattccatgtaacattttgtaacgaatcgggttgctacgttggtatctctgtgttgtaattaaacttcgaattcaaactcatactctggcaactcgttggtatgaaagaaaggcttgaagcaaacttccaagtccaagtttaaaacttgcattacatgattacatccatatctaatgatgaataaaacatgtttt

SEQ ID NO: 4294 - DNA, 475 bp, Glycine max
caagattctcacaaacaactcttgagaaagaaagaatggctgccaacacattgatgagttctgccatctcagccttcccatctctcctttcctcctcaaaatccagatttgccgcagcagttcctctttccagctttgttgtcaccaatgcctcttcttctcgcttttccatgagtgctgactggatgcctggccagcctagacccccctaccttgatggttcagcacctgggtatgcttcaatcgccatacattagttggttggttttgttaaaaatgtcacatgtagggattcgaatctgtcacctttctcttcttttcttttccctttttccttttttcaaccagtgaaccaatcttatatctcttgtttagtacaataatgtttcaacatgttttcggttcttcaaattatgattctaaagaagaactttgcatgttatgtacaatgaaggaaacttgtgctttcacatga

SEQ ID NO: 4295 - DNA, 327 bp, Glycine max
caagattctcacaaacaactcttgagaaagaaagaatggctgccaacacattgatgagttctgccatctcagccttcccatctctcctttcctcctcaaaatccagatttgccgcagcagttcctctttccagctttgttgtcaccaatgcctcttcttctcgcttttccatgagtgctgactggatgcctggccagcctagacccccctaccttgatggttcagcacctggtgactttggattcgaccctcttcgtcttggtgaagtaccagagaatcttgagaggttcaaagagtcagaactcattcactgcagatgggccatgc

SEQ ID NO: 4296 - DNA, 635 bp, Glycine max
ctatatttccatgattttgttgccaagtgcctaacaaaagaaccacgtctccgccctactgcttctgagatgttgaagcacaaattctttgaaaagtggaaaagtggatctgctgcaatgttgccaaaactagaaaaggcgaggcaaatcagggcttcaatggctttgcaggcacaagctcttccagctgcatcagaagatcaggagttagattcaaaactaaatgatgaatatggaggtactgttccatccagacctcataacatcggtgttgagggggctgctgatctctcttcacatggcactacaaggaagctacataaagtggaagatgtagacacgagtgaaggcaactttggcactgttataatccatggagatgaattacataagaccacacaagatgcagattctgcagcttctgtatctgctctgaccagtggctcaggagacagattggctgactctgggattgagagtcagaaagttggtattatgaacactgcctcttttagaggatatagtgctactaccaatactgttcaatcgtctttaccttatgttagtaattcaactgagcagagcctcaaaactagaggtactcatcgagcacaagctggaattggtggtgatat

SEQ ID NO: 4297 - DNA, 557 bp, Glycine max
cttctgcttcggatcagaagaaaagggacaaagatgagagggaggccatggaggcaggaattggaaatattgttatcaattcagattcaaaaccactaatgcattctccatcaaagaaagtcttccaaggcagcagcctgaagtagttcatctggcaggagctctttcccgtgtgacagttagtatgttcttagcgtgcccctgtacatttccctcattcattgatgttcttgggaattgttttgggagcatgttcgtttagccttgggttgggttccacttctgcgaagccgggtgctcgctaaatcctttcaagtcttccacattgcatcttcaaaaagaagttgggatactccgagagctctcactactaagaataccgttatgatatactctgtgccttgtttctcatgcttacgataggtcaaagatgcctttgtcaattggtaccgttgacttgtttgtgaacagtgttcattatcatgtactcttatgctgaatgatattcttgatatgaaaacattataaacatgtttcaagtcattcgatttttgttc

SEQ ID NO: 4298 - DNA, 1645 bp, Glycine max
acgtaagctagctttggcatctttttcccctttttcctccaagcctataactatattcaacccaatctgcactggaccaagtgtaaaaagacattttcctgatcttctgctgtgccaagaaagcagtaatctccatgagcttctattgaattgatactttgatcaagatggatgggaaaaactctcttcaaataactagaagtggtattggtgcttatgatgatgatggacatgccaaaaggactgggaatttgcagagtgctgtagctcatatcattactgctgttattggttctggtgttctttctcttgcatggagcacttcccaattaggatggattggagggccattttccttgctttgttgtgcaattgtcacctatatttcttcattcctcctgtctgattgctacagaactcctgatcctgtcactgggaaaagaaactactcttacatggatgctgttagagtttatcttggttataaaaggacatgtgtagctggcttccttcaatttttgactttgtatgggactagtattgcttatgtactaaccacagcaactagtctgagtgcaattctgagatcaaattgttatcacaagaaagggcatgaggctccttgtaaatatgggggcaatctgtatatggcactgtttggacttgttcagattgtaatgtcattcataccggatctccataacatggcatgggtttcagttgttgcggcccttatgtcctttacatactcatctattggacttggacttggcatcacaacagtaatagaaaatggaagaattatgggtagcttgacaggaataccaactgataaaattgctgacaaattttggttagtcttccaagcacttggtgacattgcctttgcctatccatactccgtcctccttcttgagatccaggacactctagagtctcctccaccagaaaatcaaaccatgaaaaaggcctccatggttgcaatcttcattacaacattcttctacctgtgctgtggatgctttggatatgcggcttttggaaatcatacaccaggaaacctcttgacagggtttggattttacgagcctttctggctcattgaccttgctaatgcttgcatcgttcttcacttggtgggaggatatcagatttacagtcagccgatctatggagctgttgacagatggtgttcaaaaagataccccaacagtggatttgtgaataatttctaccaattgaaactgcctcggttgccagcttttcagctaaacatgttcaggatatgttttagaacaacctatgtggtttccacgactggactcgctatcctatttccttacttcaatcaagttataggagtgttaggagccttaggcttttggccattggctatatatttccctgtagagatgtactttgtgcagagcaaaattgcagcttggtctagaaaatggattgtccttaggaccttcagctttatttgctttctggtgtcattagtggccctcattggatcacttgaaggaatcataagtgagaaactaagctaatgaagggtgcttcatttgtttgagtttattgtcttgttgccatatcttccatgtaattcagtttcgcattaattctattactatttactatt

SEQ ID NO: 4299 - DNA, 527 bp, Glycine max
ttttcccttacttcaaccaaatcttaggagtgttaggagccataaacttctggccattggctatatatttcccagtagagatgtactttgtacagcagaaaattgcagcttggagtagcaaatggattgttcttagaacattcagctttgcttgctttctggtcactgtaatgggcttggttggctcacttgaaggaatagtaagtgccaaattaaaatagctgaaagcctgaaaggttgtttatgccactccccttagtaatgcttactctatttgagtttgtagattgatggttatataatgtttcatataaaaaagtttaaagctgaatgctagtgttattgagagtaagatagagtacaagcaattgtgggggatttcagaaagtgaataaagtggtactgccagtgccattggaataatacaagttttgtttgatgaagaactcacctcaaaggagagaattctaacaaatttgtagtttgatattaatgtaattgcactgtatcatcaaatagattatatc

SEQ ID NO: 4300 - DNA, 388 bp, Glycine max
gacatggtcctaaagtctggcctgagatgaatataaaatggactaatcttcttctggcttgttttcttcagaatcatgggggttacacagagttacaaattgctgcaaatggaataacttgttttcttcagtggcttctctctacctctcacctgaaatcaacttgtaatcttcatgagcttgcattgaattgatactttgataaagatggatgggaaaaaatctctacaaataactagaagtggtactggtgcttatgatgatgatggacatgccaaaaggactgggaatttgcagagtgctgtagctcatatcattactgctgttattggttctggtgttctatctcttgcatggagcactttccacttaggaatggatggaaggc

SEQ ID NO: 4301 - DNA, 330 bp, Glycine max
cctgagatgaatataaaatggactaatcttcttctgacttgtgaactctctttgaaaaaacgaccctctcagccaaccattgcaccaattcgtcagaattatggagtttacacacagagttacaacttactacaaatggaataacttgttttcctctgtggcttctctctttctctcacctgaaatcaacttgtaatctccatgagcttctattgaattgatactttgatcaagatggatgggaaaaactctcttcaaataactagaagtggtattggtgcttatgatgacgatggacatgccaaaaggactgggaatttgcatagtgct

SEQ ID NO: 4302 - DNA, 1241 bp, Glycine max
accctctctctctctctcttcctttttgttatggcatttctcttctcttccctttcgttaaaacttggaactttgttggaactgagtgattacccaactaatgttatgatcagttggaagcgttggcaagaaagaatacgtaatagtggtgttgtttgttcattttggtcaaagaaatagtatctgggtacccaggatattgtagttgtaagatggggtacctcaattcagttttgtcctcttcaagccaggttcatgctgcagaagattcacctgtcagtggagggggcctcagtcagaatggaaaattcagctatgggtatgctagctcccctggcaagagatcttcaatggaagatttttatgagacaaaaattgatggtgttgatggtgaaattgttggcctttttggagtttttgatggccatggtggtgctcgtgctgctgagtatgtcaagcaaaacctatttagcaatttgatcagtcatccaaaattcatttctgacaccaaatctgcaatagctgatgcatataaccataccgactctgaatttctgaaatctgaaaataatcaaaacagagatgctggatcaactgcttccactgccattcttgttggcgaccgtttgcttgttgcaaatgttggggactccagagctgttatatgcaggggtggtaatgccattgctgtttctcgagatcacaagccagaccaaactgatgagaggcgaaggattgaagaagcaggaggctttgttatgtgggctggaacttggagagttggaggtgttcttgctgtttctcgtgcatttggtgatagactcctgaagcagtatgttgttgctgatccagaaattcaggaagaaaaagttgacagctcccttgagtttcttattctggccagtgacgggctatgggatgttgtcacaaatgaggaagctgttgctatgattaaatcaattgaggatgctgaggaggcagcaaagaggctgatgcaagaagcatatcagagaggtagtgctgacaatatcacatgtgttgtcgttcgtttcttgatgaaccaaggtggatccaaagacaaagaggtagtagctcctcctcataatagtagctctgccagtaggaatccttcagtagattctttgtgtgataggtgagttgtggatccaaaagatgctgagacttggtaaaaaatcggtttatagtttggttccgtgataagcaatcttagtagttgtgtt

SEQ ID NO: 4303 - DNA, 645 bp, Glycine max
agaatccactccatcctgttttctcaccctagtaactatgtctcctcctttcgcctcttcaactttctctctctctccctagttgcatgttttcccatgttcaataataataataattctcactaatctcaaccttgttcagtattcaatttgattaatgacaccaagatccaagcacaaaattaaaacttgggagtgtgtgattattattccaaaatgaccccaccccacacttagtgttatgataacttggaaccttttgcacgcaagaataagctgtacacacgcaagaatagcgctattattatttcttcattttttgttgttgtgggtcaaagaagtagcacctggaagccctgaatattcagcctgtgatatggggtacctcaattcagttttgtcctcttcaagccaggttcatgctgcagaagattcacctgtcagtggagggggcctcagtcagaatggaaaattcagctatgggtatgctagctcccctggcaagagatcttcaatggaagatttttatgagacaaaaattgatggtgttgatggtgaaattgttggcctttttggagtttttgatggccatggtggtgctcgtgctgctgagtatgtcaagcaaaacctatttagcaatttgat

SEQ ID NO: 4304 - DNA, 436 bp, Glycine max
cacatgtgttgttgttcgtttcttgattaaccaaggtggatccaaagagttagtagcttatcctcataatagtagctctgcgggtaagaatccttcagtagaaggtttgtgtgatatataggtataggtgagttgtggatccaaaagatgctgagacttggtaaaaatcggtttatagttgggttcctgataagcaatctagtagttgtgttgtactacgtcatgcaagaatttatggtcctcttgcataaaactattcattatttgttagctaggaaatgtatgtaaggagtgtgaccagagttctcattgcacctgctctgcatgtaaacatgggtcttttattagtccatttaatttccttagggttattagtttattcagtactatttgtctattgtgaattgtggcttgtattaagagtaatatataaata

SEQ ID NO: 4305 - DNA, 343 bp, Glycine max
aactatgtctcctcctttcgcctcttcaactttctctctctctccctagttgcatgttttcccatgcctcaataataataataattctctctaatctcaaccttgttcagtattcaatttgattaatgacaccaagatccaagcacaaagtttgtgtcttttttcatttatttttttttctgccttttgagtggaacaaagtttgagtcttttttcggaaatttatatgctctgtgacattaactgcactttcttccttgtggggtttcttctgtgcagattaaaacttgggagtgtgtgattattattccaaaatgaccccaccccacacttagtgtatgat

SEQ ID NO: 4306 - DNA, 229 bp, Glycine max
ctaaaatcaaacagaatacaataccctctctctctctctctctctcatagattatttctcttctcttccctttcttaggttaaaagttggaactgagtgattacccaactaatgttatgatcagttggaagcgttggcaagaaagaatacgtaatagtggtgttgtttgttcattttggtcaaagaaatagtatctgggtacccaggatatggtagttgtaagatgggt

SEQ ID NO: 4307 - DNA, 620 bp, Glycine max
cagaagaagaaaagaccgtcaaaagtcgaacggagacactactctttctttcaccctaacacaacaccggcaatgcagacgctacttctgccggcaacacgcgccggcagcttcacggcagttcctctgtcagcctccgccgtcgcctcccctccactccctcaaccatttctcagcccgaattccttcccctcactccttctcaatcgggctcgttcatcttcctcttttagttcctccatcgctcgtcaaccatggaagaagcttcccttcaccgcaagcgcttcttcgcaagtgtctccggcattcactccctccaacgacgaatcagataaggccaaactcgagcaggtggcgaagagattggagaagacggcgagatacttcaaacgtttgggtaacttagggttttggggtcagctagtgtgcaccgtcgtggctgccgtcatactctcattctccgtcgtggtcaccggaaaagtgacatcgccggccacattttatgccacggcgggtggaatagttgctgccttcatttcagtgttttggtcctttggctatattcgcctctctgagaagcttcgaaaaacaacaaatgaccctaccaaggctcctcctcg

SEQ ID NO: 4308 - DNA, 281 bp, Glycine max
gggaaaaagaaaagacgaacggagactctcctctttgttcacagcaatgcagacgctacttctgccggcaacatgcgccggcagcttcacggcggttccgctctcagcctctgccgtcgccgcccctcgtctcccgctgccatttctccgcccgaattccttgccctcattccctctcaatttgactcttgcttcttcctcatttagtaactctatcgctcgtcaaccatggacgaagcttcccttcaccgcaagcgcttcttcgcaagtatctccggctt

SEQ ID NO: 4309 - DNA, 451 bp, Glycine max
cctcgaggttctgtatcatcaggaaggaagatatgggaaaattaacaagtgcataacttttcctgaaatgctggatatgattcctttcatgactgggacgggtgatattccgccactttacatgctttatgctgttgttgtgcacctggacacactaaatgcgtctttctctggacactatgtttcatatgtgaaagatctgcaaggcaattggttcagaatagatgatattgaggtacagccagtgctaattaatcaggtcatgtcagaaggagcatatatcctattctacatgaggtcctgtccccgtcctccggtagaacatactatgaatgccatgcagcaatctgtttatgattcttcaaagcacaatccaatggaaatgcagaaacctaataaaccaggacatagtaggcatcgcagtcgtcagttttttgtcccagagccatca

SEQ ID NO: 4310 - DNA, 312 bp, Glycine max
cagcatttcaggaaaagttatgctggatatgatccctttcatgcccgggacgggtgaactgctggatatgattcctttcacccgtcccggtcatgaaaggaatcatatccagcatttcaggaccgggacgggtgatattccaccactttacatgctttatgctgttgttgtgcacctggacacactaaatgcatctttctctggacactatgtttcatatgtgaaagatctgcaaggcaattggttcagaatagatgatgctgaggtacagccagtgctaattaatcaggtcatgtcagaaggagcatatat

SEQ ID NO: 4311 - DNA, 904 bp, Glycine max
aatatagtcaaattcctgtagaaagaaagaaactccgttttttttcatttttaattttctttctgccaaaccaaaataaaaataatcacactcataaccaaccttccttgtatagttttcttcttctatccatcttcaactttccttttcttttctccctccaagatcacatttttctttgacccttttgctccctgtatctaaaattcccctctccacccactttccctttaagtcaatttcatgcttctctgtctcagatcctagatcttgctgtcggtgggttgatcggagtagatgtcgccgtcaaacgggttgcagaacggcggcggcggcggttaatggggtgagttatatagagcaccaggtttcaaaacttgacactcttgctggtgtggcaatcaagtacggtgttgaggtagctgacatcaaaaggatgaatgggttagccacagatcttcaaatgtttgcactgaagacattgaaaattccattaccaggacgtcatccgccatctcctgctcctggtccacatgatgaacctgcaaagtcaggagaagctagtattgagaggaaacccctacgcataggtcaatctgccatgaaggaacctctccagtccttaggactgaaaccacctcaaccgaatatttctccagctatgagcattttacagaaattctatggcctcaaatcttcaaattcaagaggtacgttgaatggaacagaaatggcagtttattcatcctcaacttctgatcattctaatggggaatggcttcccaaagccttgccaatttctgacctgccatcagcatcatatgattaccccaggtcaacaaatttagtgtatgatctactgaccggggatgatgaatatgtgcctcttgcggaaattggggat

SEQ ID NO: 4312 - DNA, 452 bp, Glycine max
ctttctttcctttcctcttctttttctccctccaagaacacatttttctttgacccttttgttccctctccacccacttcccctttaagacaatttcatgcttctctgtctcggatcctagatcttgctgtcggtgggttgatcggagtagatgtcgccgtcaaacgggttgcataacggcggcggaggcggcagcggtggtggcggaggtaatggggtgagttatatagagcaccaggtttcaaaacttgacactcttgctggtgtggcaatcaagtatggtgttgaggtagctgacataaaaaggctgagtgggttgaccacagatcttcaaatgttcgcactgaagacattgaacagtgcattaccaggacgtcatccaccatctcctgctcctgtgacacatgatgaacctgcaaagtcaggagaagctagtattgagaggaaacccc

SEQ ID NO: 4313 - DNA, 912 bp, Glycine max
gagtgctgtgcgtcacatctaatgtcttagtttctgtgatctaatctaaattttcaagcttctacaaatacccacccaatccattttcatattataatcttctaccacgagcacgtgctgcctccattccagaatgcttcgttaccttttgatgttcttcttattgggcttgggaacccgtgtggagtcacacgaggaatcgggtcattggagctgcgagtccgagtcggagatccgagtcgaggctgagttcaaacccggtgtaatcacactggatggtcacgctgatgattggaaggacattgatgggtcctactttcccctccttcccgcccttgacccagatgctgaaaatgaattcaaagggggaaagatgagcgttaaaagtgtccatgatggccgcgatatcttctttctgctgcaagtagatggtgactatgcctactctaaaggtgaaagcaataaatgtccatctggtgctctcatgtttcaaattggagatagtgcctcttatcatgatatgggtggctgtaaagaacatccgacctcgtgcactgacaagacctgcaaaggtcatgaagttgacattatgcacttttcgataggaagtgccattccaggacgactttacggtggcaatcccctagacaatagagatgggaatggcggcgataggtttggtcacttggttgatctatatgcttggaatccacattgcagatacttggatggaattggtcctccaggttctgctaatgattcaagtgcgcagaatgactggaaaggtgcttggtggcatagcagcttcacagttcactcaggattcgtagaggatgagagtccatatgcagattatggaaaaaagggcacataccttttttgattctcgaggtctttgaggactatggatca

SEQ ID NO: 4314 - DNA, 671 bp, Glycine max
  unsure (1)..(671): unsure at all n locations
cccacgcgtntcgccacgcgtncggttcttcacatgatcttcataactcttaatgtgtgtatgatttgcatccggggcgatcacatagagattcagtggagaagaaacaaagaatttccttatggttggtggtatggtgttgtaggccacttggagttatgcgatgggaatgaaaattactgccgttgtcatagtagtgacacagtggtgctagagttcaatcagtacactcctgactcgcgttggaggaagacaactataagtagaaaagatcatagagaggaaggaaatgaagcagatggtttttatggaggaatcagaaagattaagagtgagactgagatttccatttggaaaagcatttggccttctgaagtcttggactaatcagatctaattttccacttagcattatgtcaagactagtattcttattaagcattggcagaggcaggttcttctgcattggagaaaaaagggtataggattctcattcaaccaaatgagcgtttgaggctacctatttactttccccgttttatttatcccattttttttcatggttaagtttagcttgtgatttcaataaatgtaaattactcatttatgcactgatggcgtagaatattcattccccaatatatagaatgataaaaatctctgattttctc

SEQ ID NO: 4315 - DNA, 928 bp, Glycine max
tccagatcttccatagtaagctgttgagtggaaccatatcgagcacctgagttgacttgttttgtcccttgtccatctccatggccactccacagtcccacttccgttttctcgctttctcactctctatcatccatatctctctcttcctctccacaaccgcaacccaacaaccgctcctcgaagaacaagacactcccatcacgcacttccagcgctacctccgcattaacacagcccacccaacccctgactacacctccgcggtctccttcctcaaagcccaggcccaaagcctgggcctcaaaacccaacccctcgagttcgtccaaggcaggcccgtcctcctcctcacgtggccgggctcaaacccctccctcccctccctccttctcaactcccacctcgactccgtccccgccgagcccgagaaatggctccacaatcccttctccgcccaccgcaccgcctccggcgccatcttcgcccgcggcgcccaggacgacaaatgtatcgctattcagtacctggaagccatccgcaacctcaaatcccaatccttcactccacaccgcacaatccacatctccctcgtccccgacgaggaaatcggcggcatcgacggggccgccaagttcgtggagtccgaggaattcaacggactcaacgttggattcgcgctcgacgaggggcaggcctcgccgggcgatgaatttagggttttctactccgatagggttccgtggaacgtgaagattagggctaaggggaggcccgggcatgggtcgaggatgtatgatgggagtgcggtggagaatttgatggagagcgtggaggtagtgagtaggttcagggtgagccagtttgatgtggtgaaggcctggatagctttgaatggtgaggttgtgtcggtgaatccgttttatgt

SEQ ID NO: 4316 - DNA, 544 bp, Glycine max
cccactctcgcccctcgatttcactaccagcattactaccagccccatccctccgggtgtcccgcccctcgtcccgcctccaccactcctccgccctacgtcgaccaccagaccgccaagaagataaggaactatgtcaatgtccacaaagacaccctgcgcctcgaggtcgacgaccacaaccccgatctccatcttctctccttcgttttcgatgctgtctacgatggcagcattactatcttatactttgccaaggaagaagaaaaatgtaggtttgttccattatatcccgaggcatttcagccggtcagaatcccctttcagaaaggagttggccagaaatttgctcagccttcaggaacaggaattgacctaggcttctttgagttggatgatctttcaaagccctcacctggagaagatgtctttcctctagtaatatgtgctgaaacaagtttgaaaactacctcagaagatgaaactcctggtgattccttgctagacgcatcccctcacatgcaaataactcaaggtgtcttag

SEQ ID NO: 4317 - DNA, 797 bp, Glycine max
cccattgtcgtcacagttagtacaaaaaagggttacttcagcttccacatatcttgaagaattgatcaatgggcaagtctgtagttgagaagctactttggatggcaattgtgtgcttggtgctgggtgtaatttccattactcccaaggcccaagcagcagtgacatgcaaccaggtggtgagcaacctcaccccatgcatttcttatgtgctcaatggtggcaaaaccgtgcctggcccttgctgcaatgggatcaagaccctctttaacctcgctcactccacaccagaccgccaaaccgtttgcaagtgcataaagaacgctgttagtgcgttccattatggcaagtccaatgtggaccgtgctgctgctcttcctaagcagtgtggggttaacattccttaccagatcagcccttccaccgactgtaccagagtgcagtgaggttaatgatatatggagcggtaactcgagaagagaaggatatacaatatatagctagtgtgtgaataagtggctggctatacgtaggccacacattacattaatgactggtggctgcttattattacatccatcaactagtcttgttattgagttattgtattttttttatttgtaagaatcaaaaataatattaaagatttataataatttatgtattttattcaaccaattccattaaacacccttttaagtcatgtatccatacatgttgcctgttggtgtttcttttgtcagcttgttatgaattggaagggaaggattaaaatgctaaataagcggttatacaag

SEQ ID NO: 4318 - DNA, 2600 bp, Glycine max
  unsure (1)..(2600): unsure at all n locations
gggggggggacccacgcntccgagcatctctcacctttcccttggcgacgccgtgagaaacgaaaagcgaacaaaaaaaaaacagagtggggtgggaggcacacgcacaaacgcagagtcagaatctccaatcttcaatcggagacaaagctagctcgaacgaacgaagtagagtagtgtgctacgaaaaatgtggcggtgcatcgcacgtggtctccgtggacctgcttccaccagatccacctccaatcactcacttggatctcaactttctagattcttctctagtggggcgaactcttcgtacaccgtggtggatcatacttatgatgctgttgtcgttggtgctggtggcgcgggattgagagctgctattggactttcagaacatgggttcaatactgcttgtattaccaagctcttcccaactcgttcacacactgttgcagctcagggcggtataaatgctgctttgggaaatatgactgaagatgactggaggtggcacatgtatgacactgtcaagggaagtgattggctaggagaccaggatgccatccaatatatgtgtagggaagcacctaaagcagtcattgagctagagaattacggattaccattttcccgaacagaggatggaaaaatatatcaacgtgcatttggtggtcaaagcttaaactatggaaaaggtggtcaagcttaccgctgtgcatgtgctgctgatcgaactggacatgctttattgcacactctctatggccaagctatgagacataatacccagttttttgtggaatattttgcattggatcttgtaatgaatagtgatggcacttgccaaggagtgattgccttgaatatggaggatggaacactacatcgtttcaaagctgcttcaacaattttggccacagggggttatggtagagcatacttctctgcaacctcagcacatacttgcactggagatggcaatgccatggttgcacgtgctgggatccctcttgaggatttggagtttgtacaatttcacccaacaggtatatatggagcaggttgccttatcacagaaggatctcgtggtgaaggtggaattcttaggaatagtgagggtgagcgatttatggaacgatatgcccctactgcaaaggatcttgcatcaagagatgtagtttcaagagcaatgacgatggagattcgggaaggtcgtggtgtaggacccctgaaagatcacatctatctccacttgaatcacttacccccagatgtgctcaaagagagacttcctggcatctctgaaactgctgctatttttgctggtgtggatgttacaaaggaacccattcctgttttgccaactgtacattataacatgggcggtattcccacaaaccattatggagaggtggttaccattaaaggtgacaatccagatgcagtggttcctggattgatggctgccggggaaacggcctgtgcatcagtccatggtgccaataggcttggtgcaaattcacttctggatatcgttgtttttggtagagcttgtgctaatagagttgcagaaatccgtagaccaggagagaagcaaaagcctctagagaaggatgctggtcagagaacaattgcatggctggacaaattgagaaattcaaatggttcattgccaacttcgcaaattcggttgaatatgcaacgagtaatgcaaaccaatgctgctgtgttccgtacacaagaaacattagaagaaggttgtcaattaattgataaaacatgggagagcttccatgatgtccaggtgaaggaccgcagtttaatctggaactctgacttgattgagactattgaattggaaaatcttttgataaatgcatgcatcacaatgtactctgctgaagctaggaaagagagtagaggagctcatgcccgtgaagacttcaaggttagagatgatggaagctggatgaaacacactgtgggattctgggagaacgagaaagtccggttggactacaggccagtgcatttgaatgtattggatgatgaggttgaatcattccctcccaaggctcgggtgtattaatatactagctaatggatggattagacttgtctcaatgttaaatgacaggaaaaaaatgcaataaaaggacctagatgggtgattttgatttttgatgataattgttgcattcatcatcaatgctgattgatattcctggcatcctcaaataacaacactctgtatttgcagcagagaataatagcaacccagcaacacagtttcattaactgtttgtattttgacaagattttgcctatttatcatatgcacgtttgtagtttttattttctaaatccctcattcattttaagtttgtttatctaaaaaagcactggatgggaaaaggaaaaatggctttccaaactcacttgttccgttcaaccatgatcacaaaactcttacttgttaccgttgtcatgtgcaactgtttaaattgagtatctccaatgaaaatttcttcatatacttttcgtgatcccccnnaannnnnnnnaacnnaaaaaaaaaagcggccgctctagaggatccaagctta

SEQ ID NO: 4319 - DNA, 623 bp, Glycine max
tcctaaagttggaaattcggttggtgctggacccgttcgagccgtttcggttcgaggattgatgtgggccagtaattacaatcttgtaacagcagagtttgcgtggcattttttccatttattccgaccatccaatttgctactcctacttgtcaaaacaacaaacgcgaacacagaaaatactagtagtatcaaatttaagaacccgagaccaagagtactagaaaaataaaataaaacactacatataaaattagagagaaggagagcgtgagtgtgtctgtgtctgcgcttcagaaatgtggcggtgcgtggctcgtgctattcgcgtaccagcttcggagagatccatacctaatcaccaaccacttagatctcacatttcaagatttttctctggtggtggtggtggtgggagctcctcgtacaacgtcggggatcacaagtacgaggcggtcgttgtgggcgctggcggcgcagggttgagagccgccattggactttcggagcatggcttcaacactgcttgcattacaaagctgttcccaactcgttcacacactgttgcagctcagggtggtataaatgctgcattgggaaatatgactgaagatgattggagg

SEQ ID NO: 4320 - DNA, 529 bp, Glycine max
cgagcatcctctatggataagattatgaacaagcttagattggcccagaaaaaagctcaggaaatgagaagttcagttccacacaaccaaaccgatcgggttgtaagaacttcacacaaggcttcatcatttcttagaaccagccagatgcgttctttgagtggttgtttcacttgccatgtcttttaagcattctttcatgtttgagtgatggtgggtttccgaaggattcaaatgggccacatgttaatgattgaaaggggcacaacagttgacaaaattggtgttgttgcgttttgctatccatggcaccttctttgaaagtctcagatatcataaaatctaagccccgtgttcgggagtttggattcaatgggtagcaatatttgtaagtaggccaaattttagaaataagatcttttgtatttttttctctcctcccaacatgattgtgtgctgttcaaaaacttcaaatgtaatctaccttatagttgaacgagaaaagcaaccacaatatcatttcgttctt

SEQ ID NO: 4321 - DNA, 1855 bp, Glycine max
caaggaagcaaaggctacaagggtcatttgacaggcggtggcaaagcttttaaagacgcacacataggcactgggcactcacattagcattccacctcaaagcaacacaagaacactctcttgaacattcatggatccagtgagcgtgtggggtaacacgcccttggcgacggtggatcccgagatccatgacctcatcgagaaggagaagcaccgccaatgccgcggcatcgagctcatcgcctccgagaacttcacctccttcgcagtcatcgaggccctcggcagcgccctcaccaacaaatactccgagggcatgcccggcaaccgctactacggcggcaacgaattcatcgaccagatcgaaaacctctgccgctcacgcgccctccaggccttccacctcgacgcccaatcctggggcgtcaatgtgcagccctactccggctcccctgccaacttcgccgcctacaccgccgtcctcaacccccacgaccgcatcatggggctggatctcccctccggcggccacctcacccacggctactacacctccggcggcaagaagatctccgccacctccatttacttcgagagtctcccttacaaggtaaactccaccaccggctacatcgactacgaccgcttggaagaaaaagccctagacttcaggccaaaactcataatctgcggtggcagcgcgtaccctcgcgattgggactacaaacgtttcagggaagtcgctgataagtgcggagcattgcttctctgcgacatggcgcacactagcggccttgtggccgcgcaggaagtgaacagccccttcgagtattgcgacattgtgaccaccacgactcacaagagcttgcggggcccacgtgcggggatgatcttttaccggaagggccccaagccgccgaagaaggggcagccggagaacgcggtttatgatttcgaggacaagattaacttcgcggtgttcccttcgctgcagggtgggccccacaaccaccagatcggtgctctcgccgtggcgctgaagcaggccgcgtcgcccgggtttaaggcctacgcgaagcaggttaaggcgaacgccgttgcgcttggaaaatacttgatggggaaagggtacagccttgtcactggcggaacggagaaccatcttgttttgtgggatctgagacctcttggattgactgggaataaggtggagaaactctgtgatctctgtaacattactgttaacaagaacgctgtttttggtgatagcagtgccttggcccctggtggagtgcgaattggtgcccctgccatgacttctaggggtttggttgaaaaagactttgagcagattggtgagttccttcaccgtgctgtgactctcacactggagatccagaaggagcatggcaaacttctcaaggatttcaacaagggtctcgtcaacaacaaggctattgaagatctcaaagctgatgttgagaagttctctgccttgtttgacatgcctggcttcctggtatctgaaatgaagtacaaggattaggttcaaccataccactttctactaaattgtgtcactcaagttcgacacaaagtgcagaaatggagaaaaaggaaatatgtgtcttcctttcctgggagtgatagggtttatcgccatggtgtttcaattcaaaagtttgaagtttctttgtctttgatttcatgtttaattttgttagcctgattgatatcatattttttttcttatttaacaattgaaataatacgtgctgcctttctttcttttcctcagaaaaaaacaagtatgagtactacaccacaagagaagtttgataggtttcacgattgg

SEQ ID NO: 4322 - DNA, 1120 bp, Glycine max
cttgttttgtgggatctgagacctcttggattgactgggaataaggtggttctccgttccgccagtgacaaggctgtaccctttccccatcaagtattttccaagcgcaacggagaaccatcttgtcttgtgggatctgagacctcttggattgactgggaataaggtggagaaactctgtgatctctgtaacattactgttaacaagaacgctgtttttggtgatagcagtgccttggcccctggtggagtgcgaattggtaaccatcttacttctcttttatgtgctacaatacagatcttgctttactaactcaattggaaacaagatctcatttataagatcataataatgatttccttaggctaggactatatcctctctctctctctctctttttcttttttatcatcgcagaacttagatgaattttcttacgtaattttagtactgttctcttatcagagttcgaaagtaagttataaaatttctattgaaggcttgcatatttatataagtgaaattttaattttggttggagaacaatgtccaaaacaccaaagtgattgcatctaagttttttggattttttaatgtatttgtattttgtacaaggtatcttagtaagttgttgtagattagtattgaaagagatttcattgaggatgtgttttttagtgctttaacaaaggaggtatgttagttcgggctaaagcttgcagactgcctttgttaaagaatttcgagttgttgtcgtgcaatatgattggcaaatcaattataaactaatctgttatttcgtttttctgatacttttccctagaaatgaattattttgatgtatcaattaccaaaatggtttttttgtgcccccgtttctgtatttttctctgatgtgttagataaatgtgagtgcccctgactggagtttctgtgaacaggtgcccctgccatgacttctaggggtttggttgaaaaagactttgagcagattggtgagttccttcaccgtgctgtgactctcacactggagatccagaaggagcatggcaaacttctcaaggatttcaacaagggtctcgtcaacaacaaggctattgaagatctcacagctgatgt

SEQ ID NO: 4323 - DNA, 484 bp, Glycine max
ctcgagccgattcggctcgagcaaacacaacaacactctctcttctcgctcttggcttttcgctcttcactcactctcattcattcatttccaccgttcatggatccagtaagcgtgtggggtaacacgcccttggcgacggtggatcccgagatccatgacctcatcgagaaggagaagcgccgtcaatgccgcggaatcgagctcatcgcctccgagaacttcacctccttcgccgtcatcgaggccctcggcagcgctctcacgaacaaatactccgagggcatgccgggcaaccgctactacggcggcaatgaatacatcgaccagatcgaaaacctctgccgctcacgcgccctccaagccttccacctcgacgcccaatcctggggcgtcaacgtccagccctactccggctccccggccaacttcgccgcctacaccgccgtcctcaacccccacgaccgcatcatggggctagatc

SEQ ID NO: 4324 - DNA, 389 bp, Glycine max
gtctgtgtgtcctttgcacactgttcaaatagagagagaaaatcaaatctattatgtttaatcatattgtttcttgctattattctttttaccatttttctcaaaggtaaaccaagacagtgtagaagaataggaaaagggaaagttattgtaagagattattttattcaaacttgtatcgtaaattgaagttcatgtgattatgatgttcatttttcttatcttttttatttgttgttggcatctttgcttcagaggcgtccgcaaaaggccacatgcaaagttatgtcactgcttccgcgcctccaatccaaggttcaccaatctattcccaagtccctagaaacaaagagtttggtgaaccttggattgtggagtatttcagattg

SEQ ID NO: 4325 - DNA, 1504 bp, Glycine max
tgctccatctggccttccacttgataggcattttagctacttccctgagtcacctgaagtttctctcatgagcccagttgcatttgggaatttaaatcacgttgatgggaattttatgatgaacaacataagtgctcgtgcatctgtaggagccggtgttggtctttctggaaatacccctgaaattagttcacccaatttcagaatgatgtctctgcctaggcatggttccttgttccatggaaatagtttgtattctggacctggagcaactaacattgagggattagctgaacgtggacgaagtagacgacctgaaaatggtgggaaccaaattgatagtaagaagctgtaccagcttgatcttgacaaaatcgtctgtggtgaagatacaaggactactttaatgattaaaaacattcctaacaagtatacgtcgaagatgctgcttgctgcaattgatgagaatcaccagggtacttatgacttcctctacttgccaattgacttcaagaataagtgtaatgtgggttatgcttttatcaatatggtgtctccttcacacatcatcgccttctacaaggcctttaatgggaaaaagtgggagaagttcaacagtgaaaaggttgcttcactggcatatgcacggatacaaggaaaggctgcgcttgtgatgcatttccagaattcaggcttaatgaatgaggacaaacggtgccggccaattctctttcattcagagggccaagatactggtgaccaggaacatttgctatccagcaatttgaatatttgcattcgccaaccagatggatcctattcaagtgatttgttggagagcccaaagggcaatttggatcagaagctagagaaagattaaccatttattagacatattgttcctagcccacaataaatgggttctaggattgctaactatttgcttaggtgatcctaaggtgtacaaagccaattcatgaaaaaaggaaaaaaaaaagttgtataaaaatgaagggagcaacccagttatcagcgggtggagactccaaatatgtcaataatcataaaagatgcagagagcagtttgttgatgtgtagagaaacaattgttttacaaccagtggtaaagaataacttggagtgtattgctggatggttggttcctaaagcagcatgcatgccagattgtgcaggattgactctgtctgggatttgttatttttttcttcctctgttgaggctgttgtggccatttgcggatatgactattgtgtatatggggaaaaaaatcaattcatgggggaatggtttgtatagaatgggaacaaggaactatcctgttatttatcaatgctgtttatcatgtagccaaaaaaaatgtgaatgtctgtaaagatgtgaagttgtgaactggtttcttgccattgtagttgtgattttaaatattggatgcactgtaaagcactgttttatcaaccccgatttattaatgtgagtcttgctc

SEQ ID NO: 4326 - DNA, 404 bp, Glycine max
gggctttcatttgatttgatccaaggccaatcctcggtaataacaacgagaagttgatacaaacaatagaatgattgagtttcggatagctcctccatcataggcattttcagtcttcttccattcacactgtaaccatcaatcatatctgtatcgattctaaaatcttcaagaagatgcagctacaagatggttctgctggtaaagtcattaataacctctcacaagttctgatttcctccgtcgccggaatgattatggacaagtcaagggtggtgggagaccagagcatcgttccccgccacataaaagatcactttggccgtgttgtaaagcttgagaaggtctctctctatgttggcaggcaaaatgggaattctagagagcgaggttccagcttaact

SEQ ID NO: 4327 - DNA, 418 bp, Glycine max
aatactttataataataataacaacgagaagttgatacaaacgataaaataaataagtatcatcgtctcctccgttattggacatatttgagtcttcttcgattcacgctgtaaccatcatctgtgatcgattctaaaatcttcatcaagaagatgcagctacaagatggttctgttggtaaagtcattaataacctctcacaagttctggcaagggtggtgggagaccagagcatctttccccacctacacaaaaaagatcactctgcccatgttattgagaagttctctcactatgttggtaggcaaatgggattcttagagagcgaggttccagcagagctgtgtagattggcaaatgagtatttgataaaacccaaggagtgtgtggaaagcatccttgaatatcttgctcatc

SEQ ID NO: 4328 - DNA, 863 bp, Glycine max
ctcgagcgaatcggctcgagcgcggcctttctgttggcgcgggtgaggtagaacccttccacggtggtgactgcgcgatgggtgcctacaagtatgtttcagagctatggcgcaagaagcagtctgatgtcatgcgcttcttgcagcgggtgaggtgctgggagtataggcagcaaccttccattgttcgtttgacaaggtctacccgccctgacaaggctcgtcgcttgggcttcaaggctaagcagggctatgtgatttaccgtgttcgtgttaggaggggtggccgaaagagaccagttcccaaaggtattgtttatgggaagcccacaaaccagggtgttacccaactgaaatttcagcgtagcaagaggtcagttgccgaggagcgagctggacggaagctgggtggacttagggtcctcaattcttactgggtgaatgaggactctacttataaatactttgaggtgattctggtggatgttgctcatgctgctattagaaatgatcccagaatcaattggctcgccaatccagtgcacaagcacagagagctgcgtgggctcacctctgctgggaaaagcaacaggggtttacgtggcagaggacatctataccacaaagcacgtccatcccgcagggcaacctggaagagaaacaacaccctgtctctccgccgctaccgttaatttcgctgtcatcttatttttgcttcattttctgaaatactattttgagaacacacagcatttgatgttttgactttgaaattcgagttttgaatgatttaatcatctttttttcccaaaaaaagaaaagaaaaagaaaccctgaagcggccgctctagaggatcctagct

SEQ ID NO: 4329 - DNA, 925 bp, Glycine max
gagttattctctactgccactgcacttcactacattgggtgcctacaggtctgaaccgtagctcatgagcagcaagaagcagtctgatgttatgagatgatcagcagcgggtgaggtgctgggagtatcgccagctacctgctattgtccgctgacaaggtctactctcccatataatgctcgcatctggtgtttaaaggctcagcagagctacatgagataccgagttctcatacaaaggtgtggccagaaagagaccagttacaccctgtatagattgtagcaagcgcaccaaccatggagccactgatattgaatttctacccaagatgaactgtcgtgccgatgtgagagacctgaggaactcaggcggcctccgggttctcacttcatactgggtgaatgaggactccactgactgatattttgaggtcattctggtggatgttgcccacactgctgtaagaaatgatccaagaatcaactggctctgcaatccagtccataaacacagggaactgcgtggcctcacttctgctgggaaaagcaataggggtttacgtggcagaggacatctctaccacaaaaatcgtccatcacgcagggcaacctggaagagaaacaataccctctcccttcgtcgctaccgttgattttgttgcagttatcgtatgttgcttcattttctgagtatttggaggaaaatcgtcagttttggatccctgaatcatgccttttttccccgataatgtctttagtactaaaacagcagagattaatgatgtaagttttttactatgtgccgggattgtttttatttattttgttcgacttttttcgttgtggcaaatctcgtgctatgattatttttggagtccgtttattttttggtttgttatttttggtgttggtaattatgagcatt

SEQ ID NO: 4330 - DNA, 819 bp, Glycine max
gtgaggtagaacccttccacggtggtgactccgcgatgggtgcctacaagtatgtttcagagctatggcgcacgaagcagtctgatgtcatgcgcttcttgcagcgggtgaggtgctgggagtataggcagcaacctttccattggttcgcttgacaaggtcgacccgccctgacaaggctcgtcgctcgggcttcaaggctaagcagggctatgtgatctaccgtgttcgtgttcggaggggtggccgaaagaggccagttcccaaaggtattgtttatgggaagcccacaaaccagggtgttacccaactgaaatttcagcgtagcaagaggtcagttgccgaggagcgagctggaccgaagctgggtggacttagggtcctcaattcttactgggtgaatgaggactctacttataaatactttgaggtgattctggtggatgttgctcatgctgctattagaaatgatccaagaatcaactggctctgcaacccagtccataaacacagggaactgcgtggcctcacttctgctgggaaaagtaacaggggtttacggggcagaggacatctctaccacaaaaatcgtccatcccgcagggcaacctggaagagaaacaacactctttcccttcgtcgctaccgttgattttgttgcagttatcgtatgttgcttcattttccaagtatttggagtgcattatatgtagactttaggaaaatcgtcagttttgaacgcctgaatcatgctttttccccccaaatcttgtcttagtactaagaacacctccgattaatgatgtgagtttttttact

SEQ ID NO: 4331 - DNA, 832 bp, Glycine max
cccacgcgtccgcccacgcgtccgcccacgcgtccctcccctccggcacaatgggtgcctacaagtatgtttcggagctatggcgcaagaagcagtctgatgttatgagattcttgcagcgggtgaggtgctgggagtatcgccagcaaccttctattgtccgtttgacaaggtctactcgcccagataaggctcgtcgcttgggtttcaaggctaagcagggttacgtgatttaccgtgttcgcgtacgaaggggtggccgtaagagaccagttccaaagggtattgtttatggtaagcccaccaaccaaggtgttactcaactgaaatttcaacgcagcaagaagtctgttgccgaggagagagccggaaggaagttgggtggccttaagggtctcaattcatactgggtgaatgaggactcgacttacaaatattttgaggtcattctggtggatgttgcccacagcgctgttagaaatgatccaagaatcaactggctctgcaacccagtccataaacacagggaactgcgtggcctcacttctgctgggaaaagtaacaggggtttacggggcagaggacatctctaccacaaaaatcgtccatcccgcagggcaacctggaagagaaacaacactctctcccttcgtcgctaccgttgattttgttgcagttatcgtatgttgcttcattttccaagtatttggagtgcattatatgtagactttaggaaaatcgtcagttttgaacgcctgaatcatgctttttccccccaaatcttgtcttagtactaagaacagctgagattaatgatgtgagtttttttact

SEQ ID NO: 4332 - DNA, 608 bp, Glycine max
  unsure (1)..(608): unsure at all n locations
gggactggttttggcaagctgcttccatttgatttcataattgggttttgtggtgtaatccaattgtcttatctcacatgcaccaaccagatgttaattaaattaaatactgtacagtcttgggctcttagtgttatcatcaatttaggtctaacaactcattggtgtcaagtaatatcaaacgattagtcgttaggttggacaatttggtatatatagcttttggttattctgatggaattatgtgtggtacctgtgttggaagtgtaattgataaaacgtgttgtttatgttggtgtgattggcaataggtgcctacaagtatgtttcagagctatggcgcaagaagcagtctgatgtcatgcgcttcttgcagcgggtgaggtgctgggagtataggcagcaaccttccattgttcgtttgacaaggtctaccctgcctgacaaggctcgtcgcttgggcttcaaagctancanggctatgtatttaccgtgtcgtgtangagggtggcgaagaaccagtcaaggtatgtatggaagcacaacaggagtccactgaatacgacagagcagtgcagacactgacgactggtgctaggtctatctat

SEQ ID NO: 4333 - DNA, 534 bp, Glycine max
ggctcgagccgaatcggctcgagcgcgggtgaggtagaacccttccaccggtggtgactgcgcgatgggtgcctacaagtatgacttcagagctatggcgcaatgaagccgtctgatgccatgcgcctccttgcagcgggtgaggtgctgggagtatccgccagcaaccttccattgtccgcttgacaaggtcgacctcgccctgacaaggctcgccgcttgggcttcaaggctaagcaggtgaagaaatttttatttgtttgacatgatttttggggtttattcacctgataaatttatttccatttggttttgcgagagtaatatttaaactgttttctgtaaaaaaatcctggtggaaatttgttggaagtgtttacctataaataaatttcattcttagctggatggttttgccccaatcctccaacagccgaagcagtgggagttgcgtgtaattcattttttattttttctaattgtttgtgaaattgtgacattagtattcagggtaaacaaatcatttgaataatg

SEQ ID NO: 4334 - DNA, 344 bp, Glycine max
ccggcgagaagacgacagacggggctagtttttcgctactgcgactgcgcttcacgatgggtgcttacaagtatgtttcggagctctggcgcaagccgcagtctgatgtcatgcgcttcttgcagcgggtgaggtgctgggagtacacgccagcaaccttccattgtccgtttgacaaggtctacctcgccctgaccaaggctcgccgcttgggcttcaaggctaagcagggctatgtgatttaccgtgttcgtgttaggaggggtggccaaaagagaccatgttccaaaggtttggcatattgtaagccacctttctagggattgaccttactaaaatttcag

SEQ ID NO: 4335 - DNA, 483 bp, Glycine max
gcatttaccttcttgacaaagttatgacagacgatgactttgcttgggaagatataatgagtttgaggttctacatccctgtaagccttcaaatgtcagtgcagctattacaacctatgttctgcaatgctctttttgaactttcggaaatgagtcagaagaaattaaaaactggtgaggagccaatcttcaacatagttcctgtcataggttctgggaggtctgcttcatccatggacgatgtagtaacctgtgaattaatggctcagaaatcctgagtaaatatatgctttctgaaaacactctttaattggctggggttcaaggggtggttcagttgctgtgcactttaccagttgatctacaatttttatttttaaatacaaaatggattcccttttttggaagccaaaacaacgacggtttcactgacagcttggtgaagacgacggaatgggggatttcactcatttaagttgttaa

SEQ ID NO: 4336 - DNA, 641 bp, Glycine max
gatggtggcacttactactcttgtgttgtgtgctactagtaatgaaatgaaattccacgcaaaactccacataagccaccttctttgattcaagaaatcaacaccgagttttcaaaatcccattttgttttcccttccttttttcctatataaaccaaccttttaatttccttctgaattaatactccttgatctggtgtgaagatggacactactgactgggaagtcctttcttatgatggcctttctgattttgatgactatgacttgtgcacctcaccaaaattcaagaaagcctctgaagcatcaaggaattttcatccaagggtgcctaaacagattcttcatattccaattcaattggaaccgagaattgggaaggccccagatgaagggtcaatggaagaaaacactaaggatcatcatcgtgttgaggtccctcttgttccatcatcaccaactaccattgagaatatcaaaggagggattttggaggctgattatgacactgttgcacaccttttctccaagatcaaggaaattgagtctccaaagtccattgatagaggattgttgttccctgatataggtgctttgaaatttgaggacaaaggtggtgatcaggcacaagagatcatcat

SEQ ID NO: 4337 - DNA, 434 bp, Glycine max
cccacgcgttcgccacgcgtcgcgacctgggttttctggtatatttgggctgctgtacactcatgaatgaaattccatgcaaaactcacaaagctaaacttctttattcgacatatcaacacccagttttcaaaattccattttggtttccctttcttttttcctatataaaccaagctttaatttccttctgaattaaaactccttgatctggtgtgaagatggaccccaatgactgggaattcctttcttatgatagcccttatgaggcgtccttagattcaaaaagtgttctggattgggatgactatgacttgggcacctcaccaaatttcaagaaaggcctcaaaaccatcaaggatttttcatccaagggaaccaaaacaggttatccatattccaattcaattggaaccaaaaattgggaaagcccc

SEQ ID NO: 4338 - DNA, 526 bp, Glycine max
ttggtgcgtggcttagatccaaagtccaaacgcctatcgtctggaaggggcaatgtaatagcagagccagaagttatccatccgcagctgcctctgtcaacaactccaaactggccaagaaccagatctaagtcaaggaatgataaaggatggactggattgaccacaacacatgatacctctagacggggaaatactgtgacaaatgatagagaggatatatcatcaacactgtctgatccaggtcctatctgggatgctgaaccaaaatgggatgccgaacctaataattgggatgtagaaaatccaattgagttgccgggaccatcagatgatacagaaataggatctgcaaaggaggttgtgccccattttggagataaatgggttgtgtcaaagggacaatttcttggcattctggtttgcaaccacgcatgtagaactgttcagagttctcacgtggttgctcccaaagctgagcacgatgataacactctagatttgctcttggttcatgggagtggaa

SEQ ID NO: 4339 - DNA, 633 bp, Glycine max
  unsure (1)..(633): unsure at all n locations
cccctcttcctagtcactatagctcacccttgaagaagtgcaatttcgtcctctaacactcttccaaatcatggctagctcactgcttgtgagggttgccagctgcatggttgtggtgtggatgtttagttttgggcacataattcccttggcagaagctgaaattccatgtggcagggtgcaaatcactgtggctccatgcatagggtacctaaggggtcctggtggaggtgtccctgcaccatgctgcaatggggttaagagcataaacaaccaagccaaaaccaccccagatcgtcaaggggtgtgtaggtgcctcaaaagcactgttttgagcttggctggactcaatcttgcaaccctttcagccctccctagcaagtgtgggatcaacttgccctacaagatcacccccaccattgattgcaacacggtaaagcactgagcagtttgctcgagggttttacgcttgttgactttaacacttgtttcgcagtaataaccagcaaaagagggaataaagatggtttaatttcctccattgtttggatcccactagggagtataataatgttgattgtccaaaatgacatatattggattttctgtcactaatatacaannnnnnnnnnn

SEQ ID NO: 4340 - DNA, 802 bp, Glycine max
ggcgaggcgtgaacgaggctcaacgtgcttatcctcggatttttggccatgaagcatctgggattgtggagagtgtaggggaaggagtgagtgaagttgaggaaggggacatagtagtgccaatattcaatggggagtgtggagagtgttcgatgtgcaagtgtgagaagaccaacttgtgtgagaggtttggggtggatgccacgaagaaggtgatggaaggagatggcacaacaagattctccacagttcatgggaaacccattttccatttcttgaacacttcgactttctcggagtacacggtggtggattcggcctgtgtggtgaagtttgtgagcacagaccacagtctcagcatcaagaacctcaccttgctcagttgtggtgtctccacaggggttggagctgcttggaatacagctaatgtgcattcgggttcaactgtagctgttttcggcttaggagctgttgggctcgctgttgctgaaggggcacgagctagaggtgcatccaaaataataggtgtagacatcaaccctgacaaattcatcaaagctatgggagtgacaaacttcataaaccccaaggatgaagagaagccagtatacgagagaattagagaaatgactgatggaggtgtacactacagttttgaatgtactggaaacgtggacgttcttagggatgccttcttgtctgctcatgagggttggggattgactgtagtattgggaattcatgcatcaccaactttgcttcccatccacccaatggagctcttcgatggtcgcaacattgt

SEQ ID NO: 4341 - DNA, 671 bp, Glycine max
gagcaagagagacataccagttgaagcattcaggggagggttcatattgtcaaaagttgcgaacccttggtcaacaggtgagctcaagttgaaaaacaccaacgtggaggacaaccctgctgttaccttcaactacttcagccacccttatgatcttaggcgctgtgtggagggtattcgcttggcgataaaggttgtccagtcagaacacgtcacaaactacactttgtgtgagagagaaactgcagagaaaatgcttaacctcagtgtgaaggccaatatcaacctcattcccaagcatcccaatgacacaaagtcagtagagcagttttgtagagactctgtgatcactatttggcactaccatggtgggtgccatgtggggaaggttgttaactctgagcataaggttcttggtgttgatagacttcgcgtggttgatggctcaacattttctgagtcgccaggaaccaaccctcaagccactgtgatgatgatgggcaggtacatgggactgaagattttaagggacaggctggggaaattggctggtatttaaggatgagtgtgtaatatgaaaattatctaaagaaaaatgaaaaaaaaaaagtgtaattcgaagacaagaaggactgttagttatagcatgtagggctggaaattgatgtatt

SEQ ID NO: 4342 - DNA, 1483 bp, Glycine max
cggacgcgtccgcccaattaaccaataattttttagttaaaccatgtccatggccatcattaacacttttggaaacgttggtgtctactatactgtattattatcatcatggtttctcgtatctggtgtgtgtgtttggggacgacccgccacttttctgcaagactttgaaatcacgtggtcagagactcatatcaggcaaattgatcaaggcagagccatccaactcattctagaccaaaactctggttgtggctttgcctccaagagtaagtacatgtttggccgtgttagcatgaagatcaagctcattcccggagactctgctggcactgtcactgcattttatatgaactctgacaccgacactgtacgtgatgagctggattttgagttcttggggaaccgtagtggtcagccttacacagttcagacaaacatctatgctcacggaaaaggagatagagaacaaagggtcaacctctggtttgacccttctgcggattttcacacttatactattatgtggaatcatcatcatatcgtgttctacgttgatgattttcccattagagtgtacaagaacagtgaggggaaagggaatcccatacccaacaatgcaaccaaatgggagtgtattcaacattgtgggaggctgataattgggcaacaagaggggggttggagaaaattgattggagtaaggcacctttttatgcatattacaaggactttgacattgaagggtgcccagtgccaggacctgccaactgtgcctctaaccaaagtaattggtgggaaggggctgcataccaagctcttaatgccattgaagcccgaaggtacaggtgggttcggctcaaccatatcatctatgattactgccaagataagtcaaggtttccagtgatcccaccagagtgccttgccggcatttaaaccctaaatttcatgtcacttcaattattcaaagtacaggaatacccctatatataatttacattggccactggtcaaaaacatatcatactatattttatcggaaaaaaaaaaacatcatactatatatactagagtaatctatttgcttctgctgagttaatttcaatttatcccatgtggtacgtctcttcaattatttcaagtctttcatataaacacgtgaaataaaatgtacatcaataaaactaggggtaaattattatgtccccataccataccacatggataaattgaaattaacacttgttctgctttgggggagagggcaaatgattctggtgtatgtggggcgagggctatgttcgaccagaagagaataagtcaaaagctatctctgggtttactgtgcctgtgtatttaagtgcgcattgtttgtggtgtaataaagcttgcgcattattgtgatgattcatgaaggatatttttgggcttgtgatgtagcaaatctcattatttgttcaatgaatacatcaatttctgt

SEQ ID NO: 4343 - DNA, 487 bp, Glycine max
gtccaaaatccagtgaggagctgctagtgacactgcagagagtgcttgaggaaagttcccctgttcttgttgcggctaggcttgatgcagaagaaagaagaaataatatgcgcttaagggaggagcaagatgctgcatacagggctgcacttgaagctgatcaagctagggaacgacagagaagagaagaagaagaacatcttgcatgggaagctgctgaagccgagagaaagcacaaggaagaggaggcggctcgtgaaagagcagcacaagaagctgcagagaaacaagctgcattggctaaaatacgtcaagagaaagcccaatctcttggtgaagaacctgaaaaaggacctaatgttacacaggttttggtacggtttccaactggtgaacgcaaggaaaggaggttctacagcacagcgacaattcagtctttgtatgactatgttgactcacttggatgtttaaaagccgagagttacag

SEQ ID NO: 4344 - DNA, 1103 bp, Glycine max
tacggctgcggacgacagatagggaccacagtcatcacaaccactcttaatttctctctgccttgctcatttacacacctctccaacctttcactttcagctttatttgaatccctctctctcctttccaaatggccagcgttgaggttgcacatcaaacaccaacaacagttccagaaaatgaaacaaccgaggtaatcaagacccaggaaacaaccccggaaccagtaccagccactgaggctcctgcaacagaacaagcagcagctgaggttcctgctaacagaacaaccagccgctgaggctcctgccccagaatcaaccaccgaagcaccaaaggaagaaaccaccgaagcaccaacaacagaaacagtagaaacaacaactacagaagtagccccagaggagcctaaagaagttgcagttgagaccgaggaggtggtgacaaaggagacagaggaagagaagccagcagcagaagagaaatcagaggagaaaactgaagaagtgaaagaagaagcagaagagcctaaagaaactactgaaacagaaacagaatcagcaccagcagcaaccacagaggaagagaacaaaccagctgagacagtggaagccccagtagaggttcctgttgagaaaactgaagcttagacttatggacagtgtgagtgagaaaaacaagtttaaaaatggtcctagttgtggggatcattaggtctaccattttgcatgtcatgttgaaaagcttttttttttatttatttctttagtttactttattattaatatattattattatatgatggttaagtctttggttgtattatggagggtatacctacgtgtgagcacaacacttggctccacatcagcgtgcttgccacgtggtgacatgagaaattctgggagttgtgtattgaagtgagcaagctgctggtgctggagtttaggggtgatggtttattggcagggttacatgagtttgtgatggtgtgttactgtgtttctttaggtttgaataaatgatatttactttataatttatattgttgtttgtgcaaaagaataattcaaatttaaaaaaaaaaaaaaaagcgcggcc

SEQ ID NO: 4345 - DNA, 756 bp, Glycine max
tttccgttttttccacaaggtgatgggggaggaataatactagattatggcaatagtactactcacttgaccacaggggctggatttgggcaaccctatccacagaaaagggctcatggttcattccatgggcctcaaaagcaggcccaaacaaatttcccctactcaccacaccagcaaccccaccaccagcaaccccaccaccagcaggaactccaccaccagcagcaactccaccaccagcagcaaccacagaggaagagaacaaaccagctgagtcagttgaaaccccagtagaggttcctgttgagaagactgaagcttagacctatggacagtgtgagtgagaaaaacaagtttaaaaatggtcctagttgtggggatcattaggtctaccattttgcatgtcatgttgaaaagcttttttttttatttatttctttagtttactttattattaatatattattattatatgatggttaagtctttggttgtattatggagggtatacctacgtgtgagcacaacacttggctccacatcagcgtgcttaccacgtggtgacatgagaaattctaggagttgtgtattgaagtgagcaagctgctgctggtgctggagtttagggatgagggtttattttattggcagggttacatgagtttgtgatgatgtgttactgtgtttctttaggtttgaataaatgatatttactttataacttgctaaaaaaaaaaaaaaagggcggccgcc

SEQ ID NO: 4346 - DNA, 368 bp, Glycine max
tcgcttaatttctctctgtctcgtttacacatctctccaacctttcactttcgtttctcagttttattcgaatccctctctcaatctcctttccaaatggccagcgttgaggttgcacagcaaacaccaacaacagttccagaaaatgaaacaaccgaggtaagcaagacccaggaaacaaccccagtcactgaggcttcctgcaacagaacaaccagcagctgaggttcctgcaacagaacaaccagccgctgaggctcctgccccagaatcaaccaccgaagcaccaaaggaagaaaccaccggggcaccaacagaaacagtagaaaaaacaactacagaagtagccccagaggagcctaaagaag

SEQ ID NO: 4347 - DNA, 623 bp, Glycine max
tttggcatgttgctgatgttccccagaatgacaaatttcagtatacacattttgctcataaaataaacagctttgacactgcccctaaaaagttgttggcgtcagattctcgtctacgcccagatagatatgcactcgagatgggcgatctgtcaaaatctggggcagaaaagagcagtttggaggagaggcagcgtgctgaaaagagaagccgagaggagaaagggcatagcttcacaccaagatggtttgatttaactgaagaagtgacatcaactccttggggtgatttggaaatctatcaatataatggtaaatacagtgaacatcgagctgctgcagataactcaggaagcattgatgatgttgatgctaaatcaattgaattcaatccatggcagtatggtaatttggccacggaatgaactagtttcaattttcttttggtttttggatgctacagttagttcatgtaacttttttttattgatacatagaataaatcttttttttttctttttgtggttttgttggcttgtgtacgttgtaatatctgcagttctctttcttttctgactacgttagtattttgattccatcacacagaatgttcttttgttttg

SEQ ID NO: 4348 - DNA, 617 bp, Glycine max
ccgtgctctattgagaaggcatctgatttataaagctaggtagatatattcagcgtcaagtgtcaactatattatggcaagccttctcatgattccttgccagcatctattgctaaagaagttgcaaaggcattgtcatagaaaggcagcatcaaactccattaggagtgagaaaacttcctcattcagtttcagaagcaatgccaatgttccttttcatgaattgcctggggcttcctttgatcaatacatggatgacaagcacagagtgctaagagctgtgttttctgatgacaaaggaacaactaaacagctcaatgaggaagagtggaggatcaaaatgcctcccatacaatgcttatttttgagtgtcaatccaacagcagatgtcaggttaacattcaggtctaatggagaagattatccacctgaaattcctcatcatgtccccaaagttcttgagcttcactttataaggtgggagttacagggcctggataccttctacaaggatcattaccaaatcaacatagatgttagaggctctttatacccagaaaggaagggaaaacatagttggctaaagaatcaaatggtgatgaagataaccttttgtc

SEQ ID NO: 4349 - DNA, 2983 bp, Glycine max
gtggaggcgtcgacgaatcaggtggcggaccagcacatgccggtttacgatctcccacccaagatcctttgtcgggtcatcaacgtgcagctgaaggccgagcccgacacggatgaggtgtttgctcaggtgactttgcttccggagccaaacgtgagtttcctctcctcgttagtgtgtgttttttagagagagacagagtaattgggtgaaaaagtggtgatgcttatgatttttttttaatgtgggtgggggatgatgatatagcaagatgagaatgccgtggagaaagagccaccaccacctccgccaccacggtttcatgttcattctttctgtaagactctgacggcgtccgatacgagtacccatggtgggttttctgtgctgagacgacatgctgatgaatgtcttcctcctctggatatgtcgaagcagccacccacacaggaattggtggctaaggatcttcatgcaaatgaatggcgatttaaacatatcttccgaggtcaaccccgtagacacttgcttcagagtggttggagtgtttttgtcagctccaaaaggcttgtcgctggggatgcatttatatttcttagaggtgagaatggggaacttcgtgttggtgtccgacgagcaatgagacagcagggtaatgttccatcctcagttatctccagccacagcatgcatctcggtgtccttgcaactgcttggcatgccatctcgaccgggaccatcttcactgtttattacaagcctaggaccagtcctgctgaatttattgttccgtatgatcaatatatggagtctctcaaaaataattatagcatcgggatgcggttcaaaatgaggtttgaaggtgaagaggctccagagcagaggtttactggtaccattgttggaatagaagattctgatcccaaaaggtggagagattccaaatggagatgcctcaaggtgagatgggatgaaacatccaacacccctcggccagagagagtttccccttggaaaatagagcctgctcttgctcccccggctctaaatcctctttcaatgcccaggcctaaaaggcctcggtctaatgcagttccttcatccccagattcttctgttcttactcgagaagcatcatctaaagtgagcatagacccttcaccggcaaatggctttccaagggtcttgcaaggtcaagaattctcgaccttgagaggcaattttgctgaaagtaatgagtctgatactgctgagaagtctgttgtttggccacctgctgcagtagatgatgaaaagatggatgtttctacttcaaggaggtatggttcagagagctggatgtcaatggggaggaatgagcctacatattcggatcttctttcaggctttggggccagtggggatccttctcatttatccttgaaggatcaaatgagccctgcttattctgctagaaagcaatcattggatcatgaaggcaaacttcacatgcctcatccatggcctgtaatgccctctagtctgtcactgagcatcttggactctaatacaaaaggtcctgcacatggtggtgatacaacttacaaagctcgagggaatttgaggtacagtgcatttggtgaataccctgcactgcatggtcataaagttgagcattcacatggaaacttgatgccacccccacctgcactcctaactcaatatcagagtccttgttcaagagagcttatgtcaaaacaagtgtcagcaaaaacttgtgaggctgtgaaaccaaaagatggtgactgtaagctatttggcttctcacttatcagtggccctactgtaccagagccttctttatcacaaagaaatgtgagtgaggctgctgatcagatgcatcttacagcacaccaacaaagaacatctgaaaatgatgaaaagttagaccactcgaagggatcaagacctgtagatgatatagttgttgatgaccaggacagaccattacggacttctcagctgcatactaaagatgttcaagctaaacctctcagtggttctgctaggagttgcactaaagttcacaagaagggcattgcacttggtagatcagtggaccttacaaagtacagtggctatgatgaattagttgctgaattggatcagctgtttgaatttgggggtgaattattgtcaactaaaaaagattggcttatcgtctttactgataatgagggtgatatgatgcttgtaggcgatgatccatggcaggaattctgtgccatggttcgcaaaatttatatctaccctaaagaggagatccagaaaatgagcccaggtaccttgagctcgaaaaatgaagagaatcattcggtgacggctagtgatggtgcagatgcaaaagttgttaaatgtcagccgcatcaaaagttcaattcagaaaatggccttgacgcctaatgattagtagattgatttccatagctttcagattctgggatggaaagtaaggaactgtcatgaagccatccacagttggaaaacataacttgaagatgaaatcgaggctgactgctgcttatcagtgactgcttcaaatcaaatatataagatggcattaaaagagtagtatccgtccaattttggaaatcccggaattagtagtatatgcctgcccagttatacaatccctagtatttaatcaattgtgtttttgagtgaggtgatatagggtgatatcgaccttgcttttttttttttttaaaacaatcccaccttgtagttgttgctgtacatagttgtttctctcccaccctatgaacaacaacccattaatgtaatgaaagtttcgtataccaggtcgcgggccttatggttggtatccagtttatttgattttaattttgattcttattcttattaatcataatttgtgagatggtatccattctgcatgatgtattaattaaacttcattcaaattctgcataagttgttttgt

SEQ ID NO: 4350 - DNA, 615 bp, Glycine max
agagaatcattcggtgacggctagtaaaggtgcagatacaaaagatgttaaatgtcagccgcatcaaaagttcaattcagaaaatggtcttgacgcctaatgattagtagattgatttccgtagctctcagattccgggatgcaaagtagggaactgccatgaagccatccatccagttggaaaacttaacttgaagacgaaatcgaggctgactgctgcttatcagtgactgcttcgaatcaatatataagatggcacgaaagagtatccgttcaattttggaaatcccggaattagtagtataatgctcagctatatacaatccctagtatgtaatcaattgtgtttttgagtgaggtgatatagggtgatatcaaccttgcttttcttttccaaaacaatcccaccttgtagctgtacatagttgtttctcatctaccctctgaacaacaaaccgttaatgtaatgaaaattgatagtataccagggaggccttgtggttggtatccagtttatttgattttaattttgattcttattagtcataatttgtgagatggaaattatcgagattccattctgcatgctgtataattaaattttgttttaagtgt

SEQ ID NO: 4351 - DNA, 589 bp, Glycine max
gttccccacagatcttaacacttcaaagttcaatctccccattttcatttttccatagcataagctaacaaaataagaaaaatgaagttgaggtcttcaatcgcattgatttgcattctggcgagtgcgagtgtgacaatttcagaatcattaagccaacaagagcaattgtcagcatatgaagttcttgagaaatacgatctcccagtggggcttcttccaaaaggtgccacagggtatgagctaaacgaaaaaaacgggcacttcacagcgtatttgaatggaacatgctacttcagcatagagtcgtatgagctaaagtacaagtccacaatcaagggagtgatctccaagggcaagttgtcgaagctgaaaggtgttagtgtgaagattgaagtgttgtggctcaaaatcgtggagctaactcgcgacggcgatgacctccaattctcggtgggtgttgcctctgctggcttcagcgtcgacagcttctccgagagcccccagtgtggctgtggattcgcttgcgacaatttcaatcaaaatggtgatgtttcttctctttagaattcggatctgttactatgtt

SEQ ID NO: 4352 - DNA, 282 bp, Glycine max
ttcacgttattgattggtttacgagtttcgtttaatatttgttcctcacagatcttaacactttaaagttcaatctccccattttccatatcatacgctaacaaactaagaatatataaaagaagatgaggtcttcaatcatatttctttgcattctggtgtatctgaacgtggtagctgcggaattgtcagcttacgacgttcttgagaaatacgatctcccagttgggcttcttccaaaaggtgccacagggtatgaattaaacgaaaaaaacgggcact

SEQ ID NO: 4353 - DNA, 710 bp, Glycine max
cccacgcgtccggttgagtcattctcacaaagacaatctgcagttatatatgcaactccaattactataaatgatctctcgaacagtagaaaaaaaatcagccagagggctgtagtaaagaagaaaggagtttggtggaagcaattttggttgctccttaaaagagcatggatgcaggcttcccgtgatgcaccaacaaacaaagttcgggcaaggatgtcaattgcatcggcaattatctttgggtcagtattttggagaatgggaaattctcagacttcaatacaagacagaatgggattacttcaggttactgcaataaacacagctatggctgctctcacaaagactgttggtgtgtttccaaaggaacgggcaattgtagatagagaacgtgctaaaggctcctattccttgggcccctatctgttctcaaaattgttggctgagattcccattggagcagcatttccattaatgtttggtgctgttttgtatccaatggcacgtcttcatcctactatgcaaagatttgggaaattctgtggcattgttactatggaatcttttgctgcatctgctatgggtcttactgttggtgctatggttccaaccactgaagcagcaatggcagtaggcccctctctcatgacagtttttattgtatttggagggtactatgtcaatcctgagaataccccaatcatctt

SEQ ID NO: 4354 - DNA, 2070 bp, Glycine max
ttgtgatttttaaaatctctcctttctttaaatcccaatattttctgcgcgaattttgctagaaaccgttagtgggtatcctcaaaatactagattttcgattcgtttggtgaacggatttttaggtgtgattattacgttttttttttgttcaacaagctatggaggtttcggtgattggaagctcacaagcgaagctgggcgcgtctgaattggcttctagggaagttggattttgtaatctgaagaacaatttaagggttttgaatgatagagttagttttggtaggaataatatacggtgggagaaggctgggattagtttcactttgagggctcttcagactgaacctgttagagaggagaagaagccttctgggattggaacaagatccaaaacggtagatggtgtaagattatttgtggggcttcccctagatgcagtttcttatgactgcaagtcaataaaccatgctagagcaattgcagctggcctaaaagctttgaagctcttaggagttgaaggtgttgagctccctatttggtggggaattgttgagaaagatgccatgggacaatatgactggtcaggctatcttgctattgctgagatggtccagaaagttggtctcaagctccatgtttctctttgctttcatgggtctaagaaaccaaatatccctctacctaaatgggtatcccaaattggtgaatctcaacccagtattttcttcacagataggtcaggacagcattataaagaatgcctgtccatggcagttgataatcttcctgttcttgatgggaagactccagtccaagtgtaccagagtttctgtgagagcttcaagtcttcattctctccattcatgggctctacaatcatgagcatttccatgggtttaggaccggatggtgagctacgttatccatctcaccactggctgccgagtaatggtaaaactcaaggtgctggggaattccagtgttatgaccaaaacatgctcagctttctcaagcaacatgctgaagcatctggaaatcctctgtgggggcttggtggtcctcatgatgcacctatctatgaccagcccccatacaatggcttcttcaatgatggggcttcttgggagtctacttatggggacttcttcctctcttggtattccaatcagctcatagctcatggagactgcctcctttcattagcatcttcaacttttggtgactctggggtgacgatctatggaaaactcccacttatgcactcttggtatgggactcgatcccatccttcagagctaactgcagggttctataacacagttaacagggatggctatggaccagttgcacagatgtttgctcggaactcgtgcaaaattatattacctggcatggacctttcggacgcgaaccaaccaaaggaaaaccattctagccctgagttgctacttgcacaaattatggaagcttgcaaaaagcatgaggttcaggtttcaggtcaaaattcgtctgaatctggtgttccaggggggtttgaacaaattaagaagaatttatctggagataatgtattggacttgttcacatatcatagaatgggagcatcattcttctctccagagcattttcctttgttcactgagtttgtccggagccttaagcaaccggaactgcattcagatgatctacctgctgaggaggaagtaggtgctgaatccgccgtggttatgagccgtgattcaactgtgagcatgcaagcagcctaatggttgtaaatttgtaatctatgataatcatgtatataacaattagttattattatactacccttgcatcagtgcatgggatgagattgaggacaggttattttgtaagcataatatgaggatcccttttccttgtttattctaagcagagaccttatagttattccttataatgtagccaggtgggtggcagattgcctttttgtcatttgtgctcatgtggtatacatttctggtcaatattacttagcttaataagcaccagttgtgaaagttataaaatatctttatttttaag

SEQ ID NO: 4355 - DNA, 304 bp, Glycine max
gtcaattttgctgaaaaccttaagtgggtatccggaaaacactagatgttcgattcgggtggtaagcggatttgttaggttggagtattacgtgcgtctgtccttgttggatatggaggtcatcggtgattggaagctctcaagcgaatctgggagcgtcagaattggcatctagggaagtgggattgtgcaatcttaagaacaagttaagggcttcgaatgatagagttagttctgggaggaataatatacggggggagaaagctggggttaactacactgtgagggctcttcagactgaacc

SEQ ID NO: 4356 - DNA, 1080 bp, Glycine max
gcaagttagataaagaacaaactggggatggcaaggattctgaaaacgatgatgataagaatgagaacactgacaatgtggataagaaggacagcaaagctgaaagtgcagagccaagtgctgaaggtggccatttgaagtcatttcaactgctctcaagtagccaaaatgcctttacaggtcttgctggtactggattttctaattcctcattttcctttggttccatttcaaatgaagggtctggttctatttttggactgaaaagtgataagccttttggtcttggtttatctaacaatggaagttctcttttgggggcatctggggcctctgctgtttctaagaatgagggaagtggtttggcaatgcacgaggttgttgttgaaaccggggaagaaaatgaggaagtggtttttaatgcagactcagtgttgtttgagtttgctgatggaagttggaaggaacgtggaaagggagaactgaaggttaatgtttccagtgaaaccaaaaaagccagacttctaatgaggtctaagggaaattttagattgattttgaatgcacgtctctaccctgatatgaagctcacaaatatggacaagaagggtgttacttttgcctgcatcaatagtgccagcgaagggaaaggtggtctttcaacatttgccttgaagttcaaggacggctccatagtggaggagtttaaagccactgtcatggaacacaaaggtgagacatccacagttctcaagacccctgaaaattctccaaaggcttctgatgattgagagacactccttactcatgtctcacaatgtctgtctcgttagatgttccttcacaaagataatttgctattccgagttcgtttgcccttgtgtggcatagtctattatacttaaattagtgtacttgaatttgagtgaagtctccaactgataatggaacttaattttggatttagactctacacagttttaacgcttgaaccctgaaacgttcaaaaaagaaaaataaagaaaggggcgtcccccaattaaagagctttttatcccgggaatagtttccggacggttc

SEQ ID NO: 4357 - DNA, 1167 bp, Glycine max
ccctcgagccgaatcggctcgagcggctcgagcggctcgagatgggttattttcttctgcgtgactctatgtttgattcagttatcaaatgctcgtgaccgctggctcaaaccaacaggagtgatgtatcctagtcatgctcgcatgtggatggcacctatccggactgggatagtagatcacaaattgggcgattacgagtcgactatggatgattggccccactttgttgatgaaacaaaaacctactatggtgttgatatgagcactttaacgaggcctttttcggaggagcagagaaaatactatctacagacatcattgtggaacaaccttcatccacatcaagtcgtaggaactgctggtataataaaggaaattgattgtttaactgccacggtggctgacatagagaaagtcagatcagatttttcaatgtcaataaccgtggataacacaaagttatgtggatttggagggtggtttgatgtacattttcggggaagaagtgaggatccagctgaacaagagattgagttaaccacagctcccagtgtaaattatggtacacactggggccaacaggttttcctcttgcatcctcccatgcatctgagtgaaggtgatgatttaagggtttcttttctaatgagtcgctcaaaggaaaaccatcgtttgatggaggttgaacttggatgtgagattcatcagcattctggcaagctacttgcacctttcaaaaataagtactacattgaataacaatctggatttcaaattctgggggctgcaagatacaaggaacggctcacatggtttgtgatcatatggaattgtatggttcttaattacgtagtaataggaaaaaagtagttgccgccacttgcaacattcaggttcttccaatcattttggttgtttatgatttgcaactcaagtacgtttagcatgtctcagttatgatggttgggtaaccgtcgtgctggttatctatacctgagttttaggggaagcttgtggccctttttgttttagaatatgttatgctgaagtttgtaatagttggttgattataagattcctgatatttttattttattttattttggcgttccattttacaagacttttctttttcaattggcgtttataattatacgacgagac

SEQ ID NO: 4358 - DNA, 718 bp, Glycine max
acgacgcgtcagcccacgagtccgcccacgcgtccgcccacgcgtccgccttgcagtgccgccaaagcaagcctgccctaaaaattgaacagggcagagagcaagggcaagcgagtgaacatgggaacctctgcgaacgctgtcgcaggtggtcgtggcggcgcccctgtccccaaagacgtcgactacgctaattacttctgcacctatgctttcctctaccaccagaaggagatgctctccgaccgcgttcgcatggacgcttacttcgacgccatttttcaaaacaaacgccacttcgctggcaagactgttttggatgtggggactggaagtggcattcttgctatatggtcggcacaagcgggtgcgaggaaggtgtatgcagtggaagcaaccaagatgtcagaacatgcgcgtgcacttgtcaaagcgaataatctccaggatgtagttgaggtcattgagggatcgatggaggaaattaccttgccagagaaagttgatgtgatcatctctgaatggatgggttattttcttctgcgtgaatctatgtttgattcagttataaatgctcgtgaccgctggctcaaaccaacaggagtgatgtatcctagtcatgctcgcatgtggatggctcctatccggactgggatagtagatcacaaattgggcgattacgagtcgactatggatgattggcaccactttgttgatg

SEQ ID NO: 4359 - DNA, 880 bp, Glycine max
caaaaccaaaaaaagcctcgggggttgagtgagtgagggggttctttttccttctttctctgttctttcctgcttttgcggcttctcgccgcctttgccgttcggttctgccttttttctgcgccaattagtggcgcgcattaaagcggtgcgtcttttattatatataaaactctccccagttttcaagttccactactcagcagcacagcagcaacaacaacaattacaagtgtgtactgcgtagtaacttaacttcattcactatctcattgcatttaaagcttcctttgccatttccatgaatagaatacagaattcttaggcatatgaacatttagcccatctctgccactgactctgctccacagcattcaattataacaaagaccattttttttttttggttttggaaaataggcagagtcatagagagataaaggggctgcttaaattttcagccttttggagaaagagacattactcacatactcactcaccaccgagatccatttttttgcgaagaaagttgaagaaaaaaatggaaacaatgttgcctccgaaccaagcagaggaagcaatagtcacaacaagccttaacgagacagagagtgaagttggtatgagggaagaagagaaggagttgcaacaacaagatcactccatgttcaacatcaagagcttcctctggcatggaggctctgtttgggacgcatggttcagctgtgcttcaaatcaagtggctcaagtgctgttgacactgccctattctttctctcaactgggcatgctatcaggaatcttgcttcagattttctatggaatcttgggaagttggacagcgtatctaatcagtgtcctctacatggagtaccgtacc

SEQ ID NO: 4360 - DNA, 282 bp, Glycine max
ggcgcgcattaaagcggtgcgtcttttattatatataaaactctccccagttttcaagttccactactcagcagcaccgcagcaacaacaacaataacaagcagagtcatagagagataaaggggctgcttaaattttcagccttttggagaaagagacattactcacatactcactcaccaccgagatccatttttttgcgaagaaagttgaagaaaaaaatggaaacaatgttgcctccgaaccaagcagaggaagcaatagtcacaacaagccttaacg

SEQ ID NO: 4361 - DNA, 1602 bp, Glycine max
  unsure (1)..(1602): unsure at all n locations
atgaaagcctatcaaaagagaagaaacagcggtgccatcctcatctagtagtcctccaagaaacttacctgttcaaatgaagtcagaaaaccaaactagagttactggagatcctgttcatgtcaggaaaacatcttttggtgtctcacaatcaactgataaagaggcgtcttcatcttcaacttctgtatcacaagtaacaattggtccaaaaacagaaatccagaaagcttcacccccaagactaaccgaaagatccatggcacaagtggctatgttgtcaaggccatctagtgctccactagttcctggtggtcccaggcccactgctgctgttgtctccatggttcaaactgctccactacttgcacgctctgtgagtgcaactggtcggttaggtcctgatccctcacctgctactcatagttatgttccccagtcctatggaaatgcaataatggggaatcctgtggtgtcaactgctgccagtcttcctcattccagctccagttcaggagtaaacccatctcctggctattcacatccacccatggtatcatccccactatttatctcccggagctccgacaaaatggattcaaatacttcccagtctggtgttccctttggtatgatttcacgggatgttttacagaacggacctaattggattgatagttctcaaagggaagccggcagaagcatgccctatgaacctccttcccgactaaatgatgctcaaaacctagacttgttcaggccaatagacagtagatctttgggcaacataacgagtgagttcccagcttgcacatccaagcatcagaaccaaggggggttggtggatgagttcccacaccttgatataattaatgacctgcttgatgaaccaagggagcatggtattgggaaggcatccagggcaagttcagtgttctactccctcaatgatggaccacagttgctaaatcgtcagttcacttttcctggagacttgggtaccgatgatgatttggggatcttccaccagttcttgtaggtttgagagatcgcgaagttaccatgatgctgggtttcaacaagggtatagcacatctggtcggcattatgattcactacaggattatgttcctcaggcgagtacactatcgtatggaaatggcaaggtagatgggatgattccaaaccaatggcaggttgctggttctgatctatcttatctaggcatgagaaacactgagaatagttactcttactatcaagattactcaaatttggcatgtggtgtcaatggttatactgtattcaggccttcgaatggtccgtagagggaaaagatgacaaaggttgcccacaaattagtggtcatcaaccaatgtaataatgtatttgaggaaattgttgggtctctttagattggagtgaggttgtatccccttgataggaaaacattttgtaaagagtgtttccgattaatttggttgcagtttttcataaaattatacatgttctagccttttgggatttnnnnnnnnnnnnnnnnnnnnnnnnnnnnnnnnnnnnnnnnnnnnnnnnnnnnnnnnnnnnnnnnnnnnnnnnnnn

SEQ ID NO: 4362 - DNA, 425 bp, Glycine max
caattttcgtttcgcaggaatggggaataatagacaaaggagattcagaactcatcgcgcacaatcaagtcgacaccaccaccaacaactcttactagaggacgattctcaaagctctcttccagaaaatggtgagggcgaggaagaggaggaggaactcacggaacctaaaataaagcttgctatgtgggattttgggcaatgcgatgccaaaaagtgcactggacgcaagctttcaagattgggcatgctaaaagagttacgtgtgagtaatggttttgggggcattgttttaagtccggctggaaatcaatgtgtctcaagagaagattactctttaatccagaagaaaggattggctgttgtggattgttcatgggcacgcttagatgacgtgcctttcgtaaggctgcgctgtactgctc

SEQ ID NO: 4363 - DNA, 914 bp, Glycine max
  unsure (1)..(914): unsure at all n locations
gaaaaaagagaaactggttgagcccggaaaaaacaataacaaaacaaaacgtggaggataaaaaagagagaaggatcgcttaaacgtctctctctttctttgaggcttctttccctctcttcgtcccttgctctgtgtcgccgtaacacaaaaagggaagagagagaaagaaccaccccacccaacaacagcttttgttcttcacaagacatagcttcgtgtgtgtgtttcttttcttccttccagcttggaaagactgaagtctctgtctttttcaggttttgggggtgttgttgaagatgttggtagcaaatagctttgatctatggcgaaaggacggttttttctctgcggcggaagaggtgcaggaatcagctgatataatggaatctgcatacagggcatggttgagagagaagagagaaaggtcaactcctgaggaattaaatgaactatgcagagagctgcaaactgctttaggtaccgcaaaatggcagttggaagaatttgataaagccgtcaggctaagctaccgacatcacagtgatgacaatacatccactaggcataggcagtttatttctgccattgaaagccaaattacccaggttgaagcagcactgagggaatcttacattgaggaaggtaagcaaccacttcggtgggtaaaccttgatgaagaagagcgagatgatctggctgcctttctatctggaacttgtcagaccacacaaagactacgatgaatacatggaggtgaaccaagccagaagaaaatagatgtgaataacactttcgaaccggatatatctgctgtgaagcttctaagatccattcgtacagaaccgataggataaataaacaaagctgttctaannttggtnaatgttaacgtcacaatttcaggaacatga

SEQ ID NO: 4364 - DNA, 1457 bp, Glycine max
  unsure (1)..(1457): unsure at all n locations
aagagagagaaagaaccacccaggcaatttttaaagggncaaacacgacaaagccccgcgngngnnnggganacnaaacatccttccagcttggaaggattgaagtttctgtctttttctgatctccgtgtgcgtggtttggttttgttgttgaagatgttggtagctaatagctttgatctatggcgaaaggacgcttttttctctgcggcggaagaggtgcaggaatcagctgatataatggaatctgcatacagggcatggttgagagagaagagagaaaggtcaactcctgaggaattaaatgaactatgtagagagctgcaaactgctttaggtaccgcaaaatggcagttggaagaatttgataaagccgtcaggctaagctaccgacctcacagtgatgacaatacatccactaggcataggcagtttatttctgccattgaaagccaaattacccaggttgaagcagcactgagggaatcttacattgaggaaggtaagcaaccacttcggtgggtaaatcttgatgaagaagagcgagatgatctggctgcctttctatctggaacttgtcagaccacacaaagcactaacgatgactgcatggaggtgaaacaagccaagaaagaagataagattgtagatataaacactttccgcaaccgggatatatctgctagtgaaaagtcttctaaggatgtcatttctgttaacaaggatacagattatgtgatagaaataaaagcagatgctgtttctagaagtaatgatgatgtagtttctcaaacagatcgaacaactagtacaaggaaaacatggagtccacctaattatggtgctttaaaaattgtaattgctgatgaagatgagcagagagataaacctacacggactgttgatgccacccctaaagaaaaaggattcagaaatctattttggaaacaaaagtttgaagagtatcctcaggccatgcgagtagttcatatgttcaatcagcgttttgggcgcataggtatatgccagagccagaggcagtttcaaagtcccttgcacttgcgatatggctgttctgttcaagttacacttgctctaatgttgaccatttttctcattgttccctttgtactttattcaacttgagttaaacggctgcttcacgcaaagagggctttacttgtcttggtgtatcgacaaggtcactgatcatttgagatctcagccactgccttcaagtattggtgggaaaagttatagctaaaggcacagtgagtgccaccttctattttgtcgttgttgagattaagatgaatttacctatgtgagtgtggatacagataggataaccaacctcttcgtcctacagggacacctgtctattttagtttctcagctattaaaatgtacatacattcatccaatatttaatgcaagttccgctttatttggttgcc

SEQ ID NO: 4365 - DNA, 404 bp, Glycine max
cccacgcgtccgcggacgcgtgggggcttctttctctctcttcttcccttgctctgtgtcgccgtaacacaaaaaagggaagagagagaaagaaccacccacccaacagcttttgttcttaacaagacaaagcttcgcgtgtgtttgggtttcttttcatccttccagcttggaaggattgaagtttctgtctttttctgatctccgcgtgcgtggtttggttttgttgttgaagatgttggtagctaatagctttgatctatggcgaaaggacgcttttttctctgcggcggaagaggtgcaggaatcagctgatataatggaatctgcatacagggcatggttgagagagaagagagaaaggtcaactcctgaggaattaaatgaactatgtagagagctgc

SEQ ID NO: 4366 - DNA, 376 bp, Glycine max
gaaggattgaagtttctgtctttttctgatctccgcgtgcgtggtttggttttgttgttgaagatgttggtagctaatagctttgatctatggcgaaaggacgcttttttctctgcggcggaagaggtgcaggaatcagctgatatgtacgttccccgattcgtctctttgattcacggttcctgttttggacccctttcagttgtttttcattggcttaatttgctcacaagattagaatggaatctgcatacagggcatggttgagagagaagagagaaaggtcaactcctgaggaattaaatgaactatgtagagagctgcaaactgctttaggtaccgcaaaatggcagttggaagaatttgataaagccgt

SEQ ID NO: 4367 - DNA, 772 bp, Glycine max
ctggttatacttacacaataaagtcactgactacatggaagtttcataacactcggagttcacttcgaaaccaaagcttctgcttttgtgatggaactagagagctgagaggcctaaacctctgtttgctctctcaccctttttggtgcagatcttgaacttgagctgcattttcatagaaaaccagcaccaagaaatggaacataccatgttacctgccattggatctgttttccctcgtggtgtctttgccgcactcttgctcatgttactgttttctttctccacattcacttctatagaagcctatgatccacttgatcctaccggaaatataacaatcaaatgggatgtcattagctggaccccagatggctatgttgctgttgtcacaatgtacaactttcaacaatatcgccacattcaggcccccggatggtcattagggtggacatgggctaaaaaggaagtgatttggagcatgatgggagcgcaaaccacagagcaaggggactgttcaaagttcaaagcaggcattccacattgttgtaagaaggaccctacagttgtggatttgctgccaggaactccttacaaccagcagattgcaaattgttgcaaagggggtgtcctaaattcatggggtcaggaccccagcaatgcagtaagttctttccagattagtgttggttctgccggaacaacaaacaaaaccgtcaaaatgcctaaaaattttaccctcaaagcaccgggacctggctatacttgtggt

SEQ ID NO: 4368 - DNA, 723 bp, Glycine max
cagctacttcttaagtgagaacatgatgtgaggtgacgtaccacccttactccatgggacagacgaagaacatttatcagccctcagaatgcacttgagcgagaacgaagggatagaggggaagaccttcgtggtcaccggtggactgggattcgtaggatctggtctctgcttggagctcatacgtagaggtgccgtagaggtgcgagcctttgacctccgcctctcttctccttggtcgcgtcctctcaaggacaagggagtcctctgcatccaaggggatgttgcccgcaaagaagacgtggaaagggcccttcgcggttccgactgcgtattccaccttgcggccttcggaatgtcaggcaaagagatgctccaatttggtcgcattgatgaagtcaacataaatgggacttgccatgttatcgatgcttgcctccacctcggcatcaaaaggcttgtctactgtagcacaaacaatgttgtctttggcggtcaacagatcatcaacgggaatgagacattgccctatttcccaattgatcaccatgtcgatccatatggccgcagtaaatcaattgctgaacagttggttcttaagaacaatgcccgtactctcaagaacgactccgggaatcgtctttacacttgtgctgttcgtccagctgcaatctatggaccgggtgaagacaggcaccttccaaggatcgtaaccttggcaaa

SEQ ID NO: 4369 - DNA, 267 bp, Glycine max
gggtaatcctattccctatggctggtgcgacttgcgaggtgtagacatgatgtgatgtgatgaattgaggggaatccattgaagaggcgaggcgagttaatcagaaatcagaatgcacttgagcgagaacgaagggatagaggggaaggccttcgtggtcaccggtggactgggattcgtaggatctgctctctgcttggagctcatccgaagaggtgctagagaggtgcgagcctttgacctccgcctctcttctccatggtcgcg

SEQ ID NO: 4370 - DNA, 667 bp, Glycine max
ctgcttggtgcgaccaaatattcccgttcctcgggccttgactattgagccatatattcgcattcgcgcgtttccttcggcgcttgcttccgtgacttgagaaaaagagaattagggtcacgagggtttcatcctgcggcatcagacatgggaggaggcaatgggcaaaaggcaaagatggctcgcgagaagaacatcgagaagcagaaggccgcctcaaagggaagccagctggattcaaacaagaaagcaatgtcgatccagtgcaaggtgtgcatgcaaacatttatgtgcaccacatcggaagtgaagtgtagggagcatgctgaagccaaacaccctaaatctgatgtttatgcttgttttcctcatctcaaaaagtgaacatattggagagtgcaaatggagaaaaactttatatcatcatggcctcttccttaaacctattgacagagatcttccccattttctatctatataaaatgtgtttttctgtgtttgtgccttgggaatttaggagggacaaggagaggaagactattttattatgatttcccttgatgacaggacaagaaactgtgtgatgcttgtcaaggtgtaactgtttaatgatggttcgtgttaatattaaagtgttacagaaacttaaattccagtcttatcagac

SEQ ID NO: 4371 - DNA, 727 bp, Glycine max
agaatttagggtcttaagggtttcattctgcggcatcagacatgggaggaggcaatgggcaaaaggcaaagatggcacgcgagaagaacctcgagaagcagaaggccgcctcaaagggaagccagctggattcaaacaagaaagcaatgtcgattcaggtaatatggtgcttgtaatctctcacagcatctcgttttatttttctccgcttaagttgaatttctgacacggtttcttgtatagaataatgaacttcgataattaatattgcaataaatgatcaatttcgtcttgatgttttaccttctctactaaatggatatttaatacttgggacttgggaggcgactacacaggggagagagtaatacttaggggtccaaattgattgtttattccattattttgggtggagattgctgtatagatttgccaataaaggctgcatttctgttacggctaaaagagttctctgtgtagtgttttcctattcatcccttgggactagggctgtttcattttttctatttttcttcatttctggaatatcttttgaatttatgttccctgttcatggaaaaggtggtatagtgttattataatgtgccagacatcagtcaaaaatgggattcaagttgcatacagaacctagtaatcgccaattataaaatatatcaccacttcaattacataattttttttctgaactttaaatatctcagaatat

SEQ ID NO: 4372 - DNA, 807 bp, Glycine max
  unsure (1)..(807): unsure at all n locations
gcttctagnnaactatgtgtgtatcccccccgggcttgnncagggaagcttttggtnaaacagtcgtctatttgggttgcgttttgatgaagaattttctgtaagatttttttttcttcctgcccttttggaataaagtacacgttccatttggaggacgctgttgattgtcctgaatggattgtccccttccacgtattcaagtcattagctgaagagtatgactttgagcttgttttcgcgaagaactcacatgaatttgtgcatgagtatatgaaaaaaccggaatttgtggagctcatgcgaagacttggtgcattgggagatggcaaccaagatcaaagtacactctctgctgatgaatgggaggcagcatatttatacatgtcatttgtattgagaaagcgaggtcaacctgacaaaacccaacagagtggcagaaggaaccgagggtcaatgcacatttcagaggaagacatcatgtacattagcactgatgattaaacgtgaataagaaacagccagtgactgaattttatacaatggcatagggcatgaatcggcttgtattgccatgtgccagtaccattgatctcacaaccttgagctccagcaattttttttgctgcaatatgtacgttgaattttgtaggtctactataaataattgaaaacaaaatctctgcctccggatttgtattatcttcttgattagatttgtggcaggttatttttaacaaacttcctctgtaatatattcttccctgttacagcagatgataatgttagtgaatattgaaaatgaaa

SEQ ID NO: 4373 - DNA, 592 bp, Glycine max
ggccacgccttgttgaatccctgaagggaattccttgcaaacaagttgcagcggggcttaatttcacagtcttcctcaccagacaaggtcatgtttagacatgtggaaccaacacacatggccagcttggtcatggtgatactcaggacaggccaacccccaaaatgattgaagtccttagctctgttgttcagattgctgcgggaccaagctatatcttatccgtaacagaaaatgggacagtatactcctttggatcaggtgctaatttctgtcttggccatggtgagcagcatgatgagttgcagccacgtcctatacagaaattcagaaggaaaggtattcatattgttcgtgtatctgcaggggatgagcatgcagtggcacttgactcaaatggatttgtatatacatggggcaagggatactgtggtgctttaggccatggggatgagattgagaagacaactccagagttgttgactagtctcaagaatcaattggctgttcaggtctgtgcaaggaagaggaaaacatttgttctagttgattctggttcagtctatggctttggcttcatgggattcggcag

SEQ ID NO: 4374 - DNA, 443 bp, Glycine max
aaaaaagtaagagcaggaactaggcagaattaagcatctcatcacacccttctatccatctaactgcttgtggggttaaaatgttttcttggctgtgtgagggagcaacacaaggccataatggcttggaagcacaacttaaggcatgtttggactggatagaatttggtactaaagctgccttgttgatcatgatattatttactatcagtgtgttctgttgtcatgatgttttatattcagtaagcttttttcatgattgtcacaacttataaaaccccaaaaaacctgtctgtgggaggttcttatattttatgtgctgtcatgttcatgttgtggtgaaggatttgtagtttgtaaattgcatcatctcttctatgtttgcaacttggtgtgataaaaaacaccaagttgttatatatgtaatgcaccttcaactgttt

SEQ ID NO: 4375 - DNA, 961 bp, Glycine max
ctaaaaaccttcccttctcttctcacccccacactcccatctcacacacccctcgcatccaacaatgtctctcaccattccctccaacctctccaagcccgccgccctccgccccaaactaagcccaaagctaaggtccgccgccacaaccaccatcgtctgcagcaccaccaacaacaacaacaacaacaacgtgtcctccgacctgaaggcgttctccgccgcgctggccctctcctccatcctcctctccgcccctctccccgccggcgccgacatctcggggctcaccccatgcaaggagtcgaagcagttcgcgaagcgtgagaagcagtcgataaagaagctggagtcgtcgctgaagctctacgaggcgggcagcgcccccgcactggccattaaggcgagcgtggagaagacgaagaggaggttcgacaactacgcgaagcaggggttgctgtgcggcggcgatgggttgccgcacctgatcgtgagcggagaccagaggcactggggtgagttcatcacacccggaatactattcctgtacatctcgggatggatcggctgggtgggtcggagctacctgattgcgatcagggacgagaagaaacccaccatgaaggagatcatcatcgatgttcctctggcttctcgcttgctcttcaggggtttcagctggcccgttgctgcctacagagaactcatcaacggcgacctcattgccaaggatgtctagataagagagggtggatggctacattggaggaaagcctggagaatttgtatgtggatgggatctttacgcgctctttttgtaattactttttttataaatggtacatgatatgatgtaatctaatgcatgtgaaccacaatcaacctcatcttccaattcaattaatgtaagaagagttcttgctacactctctcaaaaaaaaaaaaaaaaaaggggcggccg

SEQ ID NO: 4376 - DNA, 367 bp, Glycine max
aaactcaagtcactgccatctcgcacgtttgaatccccagaaagaaaaaaaaaatgcacgaaattagagaccctgcaattaggcttttcggtcagaagatccctttccctgaagatgttgttgttgacaaagaagaaaaagaaatagaaagtggcgaggaaagagaacaagagatggaaaaatatgaagaccaaggacacaaggatgctggagttgaaaatgttactgaggaagagctagaagttgatcctcctccaaatgctgaagagactaagaattcaggctcatcccctgaggctattgtgaaccccaaaacaccttccatagaagaagaaacagaaaaatcaaaaggtgacaaaacagagaa

SEQ ID NO: 4377 - DNA, 393 bp, Glycine max
tgagaagatagttttttctctctccaagttcatggattcttcaaactccaatggagcatcacagaggctcctggacttggctcaacggctccgcctgtacaaacccccaccattccctgaagacatcttggatcagatcatggaagagaagggagataaggttgtctcagaagtgagttacacgaaatcagccaccccaattgctcaaaacacagcaaaaatcggatacaagagagctgctgttttgatctgcatctttgaaggggatgctggggatctgagagtgatactcactaagcgctcttccaagctttccacttactctggtcaagtggccttgcctggtgggaaagccgaggaaggggataaggatgatggggacactgcaaaaag

SEQ ID NO: 4378 - DNA, 1496 bp, Glycine max
tcttcacgcgtccgcggacccgtcggcttcaatggaatttggcaaaaagtagccatcgccccaacgatcccatttcccttgacttctctacgtgaagatccttgtgtcgcatagagctagttaaaatgtccgagggaaatgcagggaaaggaaagagaatcgccatcattggcgtctcaaccttattgttggtggctatggttgtggcggtcacaattggggtcaatctcaatgagaatggttccaacaatgatatagaggacaacaagaaaaatcatgttgcttcttccataaaagccgtccaaaccctttgtcatcccacaaattatgagaaagaatgcgaggaaagccttatagctggggctggaaataccacagatccaaaagaacttatcaaaattttcttcaacatcaccattacaaaaattggtgataaactcaaagaaactaatattttgcatgaggttgaggaggaacccagagccaagatggcacttgacacttgcaagcaactcatggatctttctattggggaattaacaaggtcacttgatggaataaatgagtttaacctcataaatgttgacaaaatcctcatgaatttaaaagtttggcttagtggtgcggttacataccaagatacttgcttggatgggtttgagaacaccactagtgatgctggcaaaaagatgaaggatttgttgacgataggcatgcatatgagcagcaacgcccttgccattgtaacagatttggctgacactgttaatgattggaatatcacaaaatcatttgggcgtcgcctccttcaagattctgagcttccgtcatgggttgatcaacatagactccttaatgaaaatgcaagtccattaaaacgcaagcctaatgttactgtagccatagatggtagtggagatttcaaaagcatcaatgaggcattgaagcaagtgccggagaaaaaccgaaagccatttgtgatctacatcaaggaaggcgtttaccaagagtatgttgaagttacaaaaaaaatgacccatgtggtgtttattggtgaaggggggaaaaagacacgaatatctggtaacaaaaacttcatagatggaacgaacacttatagaactgccactgtcgctattcaaggagatcactttgtggccatcaatatggggtttgagaattctgctggacctcataagcatcaagcggtggcattgagagtccaagcagacaagtccatctttctacaattgctcaatggatgggtatcaggacacactttatgcacacaccatgcgtcaattctatagagattgcaccatttcaggtaccatcgactttgtgtttggtaatgcacttgctattttccaaaattgcactttcgtggtccgctagccattggcgaaccatcattgcattgtgactgcacaaggtagagcagacagacagcaacgacctggaatagtaatcaagggggatccattgtgtctgaccct

SEQ ID NO: 4379 - DNA, 527 bp, Glycine max
attcttcgaaggaatttgtcaaagagtagccatcgccccaacgatcccgtttcccttcacttctctacgcaaagccccttgttttgcatagagctacttaaaatgtcggagggaaatgcggagagaggaaagagaattgccattattggtgtctcaaccttattgttggtggcgatggttgtggctgtcacagttggtgtcaatgttagtgagaatggttccaacaatgaggacacaaaaattgcttcttctgtaaaagccgtccaaaccctttgccatcccacaaattataagaaagaatgtgaggaaagcctcatagccagggctggaaataccactgatccaaaagaacttatcaaaattgtcttcaacatcaccattacaaaaattggcgataaactcaaaaaaactaatcttttgcatgaggttgaggaggatcccagagccaagatggcacttgacacatgcaagcaactcatggatctttctattgaggagttaacaaggtcacttgatggaataggtga

SEQ ID NO: 4380 - DNA, 508 bp, Glycine max
acggctgcgacgacagaagggggcgcaccccaccaaagaggaagcttagagagagagagagagagagagggaggagggagagtgttgacgctccatcaagatgggtatttctagggattccatgcacaagaggcgtgccactggtggcaagaagaaggcatggagaaagaagagaaagtatgagcttgggcgtcaggccgcaaacaccaagttatcaagcaacaagactatccggaggattcgtgttcgaggtggcaatgttaaatggagggcattgaggcttggatactggcaattactcatggggtagtgaagcagttactcgcaagactcgtattctagatgttgtttacaatgcctcaaacaacgagcttgtgcgaactcagaccctggtcaagagtgctattgtccaggttgatgctgctcctttcaagcagtggtaccttcagcactatggtgttgaaattggtagaaaaaagaaagtggcagccaagaaggattctactga

SEQ ID NO: 4381 - DNA, 402 bp, Glycine max
  unsure (1)..(402): unsure at all n locations
cccgagccttttccccccacccncnccccttccagcggtttacccgttactctctctctctccatcttcattctcttcttcttcttcactattttctcagttatcgtgaccttatcccaacccttttctgttgcgaaggtgcttctgggctgttgtcagatcaatccacaaccctcaattgttggtgttttggctcttcctgtatcatggatggtattcatgggggtgattctcggatacacataactgatggacagcatcctatacacgtgccatatgtgcaagaacacgagcatcatggactccaccatataagcaatgggaatgggatagatgatgatcataatgatggtggtgatactaactgtggtgnaagtgagagtatggcaagtgagtccctcc

SEQ ID NO: 4382 - DNA, 441 bp, Glycine max
attttatcatcctttcgagaagcttctccactggccttctcacttgtccattttctctcttcgcttctcttcgctcctccgtcactccaccgccgcgtcgctccgccgttggtcgcgtgtttgcggcgagatctacagccttagtgtgaatctgcgattcttcgaatcgaatcaggtgagagcgtggtgtgtgtttgagttttgagtatggcagcggcggaagataagtggtgcgtggtgaccggaggtcgtggtttcgcagctcggcatttagtggaaatgctaatccgtcacaacgagtactgcgttcgcatcgccgatttggaggccaacattgttctcgagcccgccgagcagttagggcttcccggccaggcccctgcactcgggccgggcccaatatgtctcccttgatcttcgcaacaaggcccaacttctaaa

SEQ ID NO: 4383 - DNA, 989 bp, Glycine max
gttatgtgatatttagtcttaattttattttttttcagcaagcaaaaattatataaacaacggcgagagataatggattttcattgagctttgttctcttttgtgttagtgagagaaagttctctctgcttctctctcttagactcaaaaccctattgcgtgctttgcaatcgaccccgattatggccaacagtaacctccctcgaagaatcatcaaggaaacgcagcgtttgctcagtgagccagcacctggaattagtgcgtccccttcggaagacaatatgcggtatttcaatgtgatgatccttggcccaactcagtcgccttatgaagggggagttttcaagttggaattatttttgccagaagaatatccaatggctgctccaaaggttaggtttctgacaaaaatatatcatccaaacattgataagcttggcaggatatgtcttgacattctgaaagataagtggagtcctgcccttcagattcgcactgtacttttgagtattcaagctcttctaagtgcaccaaacccagatgatccgctttctgagaacattgccaagcattggaaatctaatgaggccgaggcagttgaaacggccaaggaatggacccggttatatgctagcggcgcttgatgctttggtggaaacttttggcttcaaataactatagtgtgggagtgtatgctatataactgtcaaattgaaatggaaatttggaggaattgtctaaactattttggagttaatattccccgtagcttccggttacctgttaattactttctttctcctggaagcattatcttggaacttgtatgaaaaatatgtgatcttttctgtgacaaatttaaacatgcttcatctcccaactcctgagtaatttgggatcctcaaacttaatagtaaaaaatttcgaataaaaaaaaaaaaaaaaaaggggggcccaccaattaaggaccctcccccccgggaattaat

SEQ ID NO: 4384 - DNA, 942 bp, Glycine max
cccttccttagctctctatctcgctgagagaaactctctctctctctctctctctctctctagaaaccctattgcacgttttgcaatcgaactcgacaatggccaacagcaacctccctcgaagaatcatcaaggaaacgcagcgtttgctcagtgagccagcacctggtattagtgcctccccctctgaagagaatatgcgatatttcaatgtgatgatccttgggcctacccagtcgccttatgaaggaggcgttttcaagttagaactatttttgccagaagaatatccaatggctgctccaaaggttaggtttctaacaaaaatatatcatccgaacattgataagcttggcaggatatgtcttgatattctgaaagataagtggagtcctgcacttcagatacgcactgttctattaagcattcaagctctattaagtgcaccaaacccagatgatccactttctgagaacattgccaagcattggaaatctaatgaggctgaggctgtcgaaacagcgaaggaatggacccgattatatgctagtggcgtctgatgatagggttcaaactcatggctccaaaataacaattgtaaccattttatattggaaatctagaggaattgatttatgaactattggaattaatattcctcgcagtttccagttaccttttaatttcttctcttgaaagctgccttatgtttgaatttgtatgaatatatgcgttgatcatttacctatctaacaatttagagcgtgcttcaatcatcgactgtgaagtaatttggtattctcaacatcaaaggccaaaatttgtgaattaaaaaaaaaaaaaaaaactcatcaatgaatcattcaaagatttgattggttagggcatgttggaaatttctctattagtacttatgagagaagaaataattatactttttac

SEQ ID NO: 4385 - DNA, 546 bp, Glycine max
tctcgagccgattcggctcgagtagagtgtttgctgattctctcggacgttgttcatttctgtatcagtgagagaaactctctatctagaaaccctattgcacgttttgcaatcgaactcgacaatggccaacagcaacctccctcgaagaatcatcagggaaacgcagcgtttgctcagtgagccagcacctggtattaagtgcctccccctctgaagagaatatgcgatatttcaatgtgatgatccttgggcctacccagtcgccttatgaaggaggcgttttcaagttagaactatttttgccagaagaatatccaatggctgctccaaaggtacatatttactattattctttctaatggcaccatggcattcttttggtgttaagtttctaccgaattcttatacaccaaaaagaaatgaaactaagtctgtaaagtgtttgctggataattgcttagagtaaactacacaaacctcccccggggtttaaggaaattagagatgtctcccctcaatttttaaaagctacacaaacctccc

SEQ ID NO: 4386 - DNA, 390 bp, Glycine max
cagacttgcttcacccatagggaataccaaacttagcgaggctagctcaggtagctcagttttagaagtgtctttcaagggcagagaaattgttgcttatgatgatatcctctgactatgaaaatctgtattgttagagggtagtcttattctgtatcaatgatttgaatttgggctttagatctctttgtagttcttttttcccttttgttaagtatgtgctcaatgagatactgggaagtaacttatggagttggttgtgatgtttaatacctacatcgtagatgtaatgtaaatagttggatttacattttgttgtctcgtcaattctttggatttgaaagtgtaagatgttcttccatgattgttcacatcacaaaaccttttttt

SEQ ID NO: 4387 - DNA, 657 bp, Glycine max
cgaccactccctcgtctctctcatcaccttcgactccatggtctatctccaccatctctcttcttcccacttttcctctctcctcgtctttcacggcaaccgccatctctcctccaatcagatccgccacttccttaacccccaccgccaccaggcttttcttttgcctatttccgaatgccaattctccatcactactgccattgaagagatccattctacatccaactccaccatctccgcctctcgccctcccaggtgcaccggctctgcaatctccgtcgcccttggtcttttggagtcttgccccatcaatacaggctccaggatcttggtcttcacctctggacctgctactctgggacccggaatcgttgtcgattctgatcgccgccaacccatcataactcaccatcacatcttcaacgcccaagcaacacactatgctaagtcttccgctttctagaatcaactctccaagaggctatccggtgcatctgttgttctcgatctctttgcctgttcccttgatcaagttggggcaaccgagctccgaggacccgttgagcactccggtggattcatcgttctctctgagtcttttgattccgatcagttcaagaattgtctgaggcagatgttcagatgtgatgacca

SEQ ID NO: 4388 - DNA, 352 bp, Glycine max
gtttgtccattgtctctactcttagaacgcgcgcttctaaagagaagagacaatggatcacttgagattcaacaaaaccacccttgtcctcatcggaaccctctcttgcctcctcctgtccatcactgccgtcccctcaactcgcgtcttggaactcgctcccagcgaagcccccaccgcggagcctatagcctccggcatcagcctcttcgacaatcttcttgccaaggaatcaagccccatgattctgaaattctgcaccggcaccgagaaccccaccctctgcgccgaaaccattgcaccatacctaaccggcacattcgacccgatccaagcgctagagaccgagatc

SEQ ID NO: 4389 - DNA, 613 bp, Glycine max
agtagctactcccgagtccaaagctgaagcagtagcaactcccgagcccaaagtggatgcagtagctcctgaagtaaactctgtgcccaaaactgaagtcaaggcagaagaatcacttcctgcgcaaccaaggccactttcaccatacccatattatccagatttcaagcctccaacatctcctaccccttcacagccctagaccttcacttcttttaatcttgaacagaattccatggaaggcaaatcaattatccaaatatccagcatgtatcaagaggtgtacaactctacaatctataatcctatcagaaatagtcatgcatcttaatttgcagataagatccgtgacataagttgtataatttttgaagttgttatgattatccttccactttgtgctactcggtacactttttgtaattgatggatgtgttgtagaggtaggtgtcaagttaacattgtagttattttgagatttagtataacatttaatctttcagttttggagcaagcaaataaggtttatgtatgaaattctgctttgtactgattcatcaacacaaattgactatgcaattgtgaaaagaaaaatgttgatggtagacgtttt

SEQ ID NO: 4390 - DNA, 367 bp, Glycine max
attttgaagttgttatgattatacaacttatgtcacggatcttatctgcaaattaagatgcatgactatttctgataggatccgtgacataagttgtataattttgaagttgttatgattatccttccactttgtgctactcggtacactttttgtaattgatggatgtgttgtacgaggtaggtgtcaagttaacattgtagttattttgagatttagtataacatttaatctttcagttttggagcaagcaaaaagtggaaggataatcataacaacttcaaaattatacaacttatgtcacggatcttatctgcaaattaagatgcatgactatttctgataggattatagattgtagagttgt

SEQ ID NO: 4391 - DNA, 894 bp, Glycine max
tgctatggttaaagttaatccttctggagctgtaaaagcatcctctatgtcattgatacgagatgatgttgagaaagaggatgcttttagaggtctatgtgctatggttaaagctaatccttctggagctctaagttcgctagtttgcatgtgcaaagccattgcaagttggcatgaaataaggagtgaagatttacacaatgaagtctgccaggtcttgcatgggtataagcagatgctgcgcaatggagcatgggaccagtgtatgtctgctttggagcctccagtaaaagaaaagctttcaaaatatcaagtataattcaattgtgagcattgtatctgtattgacctagttggtcattttgtgtgtggtcaagcaatattggagtcgcgattcatattgagcaggagctgagtctcggtccaagttttcagacagggtaccagtacttaatacaattcgtttgagcttgatgattacaggaagttccacaagccttcaagatctcatttgatgggagtttcccatgagaaatgtacaggggaatgattttcaacctttagaaatgcttgattctttgttgtcttaatagttaaagccttaattaaaggcttggagttttattcgacccttgtgttcagcatcacatttttccaatatttttagtttttgaagttgataggttgtatcttggttacacagttttgttcccccagagagagagagagagagagaggggggggagggatatgatctgacttttagttttgagcatattcaggtgttatagggtttgtaagctgtaacatgaaaatcgatttcaattgtgttgcctcaggcagcgcatcagttaaattttgattgagacaataaaaaaaaaaaaaagggggggg

SEQ ID NO: 4392 - DNA, 391 bp, Glycine max
agcaaataatgcatgctgggcaattggagaattagcagttaaggttcatcaagaactttctcctgttgtcttaactgtacatttcatgcctggtcccaattcttcagcatgcggagggactcaacaagtcgcttatagacaatagtgccataacactggggaggcttgcatgggtctgtccggagcttgtatcaccacatatggagcatttcatgcaatcttggtgcactgctttgtcaatgatacgagatgatgttgagaaagaggatgcttttagaggtctatgtgctatggttaaagctaatccttctggagctctaagttcgctagtttgcatgtgcaaagccattgcaagttggcatgaaataaggagtgaagatttacacaatga

SEQ ID NO: 4393 - DNA, 587 bp, Glycine max
gacgtcgatgcacgcctacgtaacctcgaattccggtcgagacagccttgaacttgaactatcgtgtcttcttggctttctctgttcaggatcaacatggatattgtatcacgagctttgctatttccgttggctatacttgtgctcatattaagcacaccttgctcaggtgcttttgggaagagtggaactaatgtgaaaacagctatttttctgtcccccaagtttgaacttggaccaggatcggtagccaataaatatgattatgacgctgattttccaagaggtcatatagcacttaagagtttcaatgctgaagtagttgatgaagcagggaaccctgtgcctcttcatgaaacttatctccaccactgggttgttgtaagatactatcaacctaaatatgtgacgacacacacaaactatgatggacataggatacttcacaactctgaccatatatttgtgaggaacagcggcttatgccagagagatactctaggacaatactatggccttggatctgaaacacgaggaacagctacggatgttcctgatccttttgggatagttgtaggtgatcctgc

SEQ ID NO: 4394 - DNA, 468 bp, Glycine max
cccacgcgtccaaacaaggcatttcaattatcgtgtcttcttggctctctgtttaggatcgacatggatttcttttttccattggcaatacttgtgatgatattaggcacaccatactctagtgcttctggaaagagtgaaagtaatgtgaaaacagctgtttttctgtctcctaagtttgaacttggaccgggatcggttgcaaataaatatgattatgatattgattttccaagaggtcatatagcacttaagagtttcaatgcagaggtagttgatgaagcagggaaccctgtgcctcttcatgaaacttatctccaccactgggttgttggaagatactatcaacctaaatatgtgacgacacacacaaactatgatggacataggatacttcacaactctgaccatatatttgtgaggaacagcggcatatgccagagagatattctaggacaatactatggc

SEQ ID NO: 4395 - DNA, 457 bp, Glycine max
  unsure (1)..(457): unsure at all n locations
gattcccggtcgacccgggcgttccacacgcgtgcgccacgcgtccgagatactatactaataaantattgttgacagatcaagagtggttttgtatctcgaggcttgttattttcattggcaatacttgtggttaccttgaagattttgggaagacagaaagtaatatgaaagtgaaatcaactgtttttctgtcccccaagtttgaacttggaccaggatcagctaccataaggcattattatgacattgagtttccaagaggtcacgttgcactcaagagtttcagtggtgaagtagttgatgaagcaaggaaccctgtgcctctccatgaaacttatctccaccacttggattggtgtgagatatactatcaacaacgtaaagatgtgacacacacaatgtatgatgattgcctttgacacttaaccactctgattatattttggttaggaac

SEQ ID NO: 4396 - DNA, 480 bp, Glycine max
cccactcgtccgcaattcccaacccaaaccgccaccacccttttccttcctcctcacgcctcctctattctttgtcaacccaaccaaaacgaccgtcgttattttcctctttctttcaccaaatgatgatgggttcaaccccgcctcgatcataagaaacaccaaactaacaaagaagcagaagaagccaagaaggcgatggttcatcaaaacgacaacgacaacgacggcagcagcaccgccaccttcctccatctcgcgtagtgatcgacgacgacgacgacgacgacgatcggcgattgaattcttcttccgcggggatgatgtcgaacctgtacggcgaatacaaccacaagatcgactacgtgttcaaggtggtgctggtcggagactccgccgtggggaagacccagctcctcgcgcgcttcgccaagaaccaattcaacgtcgattctaaagccaccattggcgtcgagtttc

SEQ ID NO: 4397 - DNA, 704 bp, Glycine max
cgtaaggagtatgcttctatggcgagtggaagggatatagcaatcaataatgcagaagagactattgcagcatccaagcaaattgaaaaggcagtggaagatttgactgctgagttgattgcaacaaaagaggcgttgaattccatgcgaaccgcgcatttggaagtagaagaacaaagactaggagtagttgatcaagagtcgaacaatttgaagctggaacttgaacaagtagaagaggagctccaaagacttaatgagcaagttttgtcagccagggttcttaaatcaaaattggaatcagcttcctccttactgcatggtttgaaagctgacttagccgcctatatggaatcaaaagtaaatgaggaattttataaagaacaaaaagaggaagttgaggaactaaaactgaacatagaaaaagcaacttctgatgttaacagattgagggtggcttctgtgtcactaaaatcaaaactagaagaagagaagtcggttctcgcatcccttaagcaaagtgaggaaaaggcttcggctgcggttgtgaatctccaagctgaactggagaagtctaggtcagccatagctttcattcaaatgaaagaaaatgaagcaagagagatgatgactgagttgcccaagaaactgcaaaaagcatcacaagaggctgatgaggccaaatcacttgctcaggcagctca

SEQ ID NO: 4398 - DNA, 663 bp, Glycine max
acggtagaggagcaagtgtgcacattgctggtggaccttgcatcactatacagtatgtgaccaacattatcattcatggggataacatccatgactgcaagcaaggagggaatgcctatgtgagggactcccctacacactatgggtggaggactctctcgcctggcgagggagtgtcaatctttggtgggagtcatgtttgggtggaccactgctctctctccaattgccgcgatgggctaattgatgccatccatggatccacggccatcaccatatccaacaattacttgacccaccataacaaggttatgcttttgggtcacagtgacactttcactagggacaagaacatgcaagtccaccatggcctttacccattttggagaagggctagtgcagagaatgccaagatgcaggcatggatacttccatgtggtgaacaatgactacacccattggagaatgtatgccataggggggagtgctgtcccaactatcaatagccaagggaatagatttcttgctcccaatgacaataccttcaaagaggtgacaaagagggagaattcagcacagagcaagtggaagaattggaattggaggtcaagtggagatttgatgttaaacggtgcgttttttacggcatcaggagcaggtgca

SEQ ID NO: 4399 - DNA, 811 bp, Glycine max
tgattgcaagcccacggggaataccaatattagagactctccacatcactctgggttttggactcaatcagacggtgatggtgtgtccatctttaattcgaagcatatttgggttgatcattgctctttgtctaattgtcgtgatggtctcattgatgccattcatggatccacggccatcaccatctccaacaattacatgacccatcatgacaaggttatgcttttggggcacagtgattcgtacacccaagacaaggacatgcaggtcactatagcattcaatcattttggagaaggccttgtccaaagaatgccaaggtgtagacacgggtatttccatgtggtgaacaacgactacacccactgggaaatgtacgccattggtgggagtgcaaatcctaccatcaacagccaagggaacaggttccttgccccaaacatcaggttcagcaaagaggtaaccaagcatgaggatgctccacagagtgagtggatggggtggaattggaggtcagagggtgacatgttcttgaatggagcatacttcaggcaatctggtgctggtgcctcttccagctatgctagggcttcaagtctcagtgcaagaccttcttctcttgttggctccatgaccaccactgctggtgcacttacctgtagaaagggcaaccgctgctgatgattgatgaataaatgatgatcactttaataattattagctaagaaatgaaatttatttccagctgcagggttgcaaaaggaaaaattaatatgaatgattaatatgaattaattaaccttatgctta

SEQ ID NO: 4400 - DNA, 933 bp, Glycine max
attataagcctcttagtattcgggttcttcttactcacctacggaacacaggaaaagcctccaaaaccaacccaccgttggcgcgatggctttcccctccaaaggcgatgacgagcaggttctggtgcagcgtaaatcgaatgcgagagttttgacactaaacaggactaaacagttgaatgccctctctttttatatggtttctcggctacttgaaattttttctgaagatgagaaagattctgatattaaattggttgtcgtgaagggaaatggaagggctttttgtgctggtggtgatgttgcagctgttgctcgtgatggaagtaaaggtgactggaggtttggtgcaaatttttttcaaagtgaatttaaattgaattacttgatggcaacatatagtaagccccaggtttcaattcttaatggaattgtcatgggaggtggtgctggtgtttctgtacatggaagatttcgtgttgttactgagaatacggtctttgcaatgccagaaacagctttgggtttatttcctgatataggttcctcatacttcttgtctaggctgcccggatttcgtggagaatatgctggtcttacaggtgctaggttggatggtgcagaaatgcttgcttgtggtcttgcaacacattttgttccttcatcaaaattgtctttattggaagaagcattatgcaaggtggaaactagtgatccaaatgcggtgtctgcaatcatcaataagtattcagagcaacctttcctaaaagaggatagtgtttatcacaggatggatgtgatcaataagtgcttctctaaaaaggctgttgaggaaatattatcttctctcgaggtggaagctacgagaaaggctgatccttggatttctgcaactattcaatccttaaagaaagcatctccaacaagccttaa

SEQ ID NO: 4401 - DNA, 284 bp, Glycine max
atttgacacttctgtggatgcattgttcttgttagtttttgacttgtctttttcgtaagagtttgttttctatccaaaacaaaaaatggtgatagcaaaggaaggttagtttgaagtggcctttacacgtatgcctttccttttacatctatctagcatccaaatcttcattgacctaaattttctgttagtacttcatgacctacatgttctagtgttttcaggtctttgcaatgccagaaacagctttgggtttatttcctgatataggttcctcatacttc

SEQ ID NO: 4402 - DNA, 439 bp, Glycine max
atttaaagtgttcccctcactcaatattatttatgtgttaggagaggtcatttgccttttcaattttcatattaattcgatatttgtaatggctagcgagagaattctcaagccatcaaagtggttctcaaacaaaactctaagaattagtcttcatcgccgaagatcaagatcctcctccaataactcattatctagtaattctccaagtccaagatcccccatgtcaaacaatggagagatcactgggctaatggaggcttttcgtcactttgataatgatggagatgggaaaatctcggcctatgagctaaggtcatattttgggtccattggggatcacaaggttcatgaggaaggctgaaggggtcatccaggacctagattccgatgggggcaacttgtgtgggacttcagggatttcaccaagctcatgaag

SEQ ID NO: 4403 - DNA, 617 bp, Glycine max
gtgtatctaacttaacttttcttctcaaaatccaagtattccttggctttgtggccatcatcacggtacacaagaagagatcacagaaattttgcggaggatttaccctcaccaggatgtataagaataaatcaatgctttgacggaatcaattgaaacggaactcaatgaataagcatcagcttcaaacagagtcagcatagtgaagctgctgaaaaccaaaactgtgagaagaggtttatatgctggaatgggccttcaaatcttccaacaatttgtggggattaacactgttatgtactacagccccacaattgtgcaattagctggttttgcatcaaatagggttgcactacttctatcacttgtcactgcagggcttaatgcatttggttccattttaagcatatatttcattgacaagactgggaggaggaagcttttgttgtttagtttgtgtggtgttgtggtctcacttgttgttttgaccgtggcttttcatgagactaccactcactcccctatggtcagcacaatcgaaacctctcacttcaacaacacatgccctgattacagcactgctttcaaccctggtgaatgggattgcatgaaatgcc

SEQ ID NO: 4404 - DNA, 796 bp, Glycine max
gcaaataaaagaagacaaaaaataataattgaatgtaaaagagcatgggatctgagactgagacaacaactaagggttattaagagagagaaagagatacatagttagagagagagcagagacaccgttcggtgctccgctgaattcggttgtggcccctgcgctccgctgcaattttacactcaaaaggacctcatgtctaacatagaggagaacaaagatctgggacagatggacgtggatgcatctgatgagtcagctaacatgccatcaccccaaaagcaggaggagtctgtaaagaaaaagtatggaggaatgctgcccaaaaagccaccactcatatctaaggaccatgaacgtgcttacttcgattctgcggattgggcacttggaaagcaaggcggagagaagcctaagggaccacttgaggctcttcggcctaaattacagccaacgcagcagcaaacacgttaccggaaatctccttatgctccttcaggagaagaagggggaagtgttccagccgaggatgcaccttccaaccagtaagcagcaatcagtcttttgatgatgtgctgactattgttctaatacctgagtgagtaggtatcacttctttgttttcaacaataaaggaagcttgtcatgtattcatattagcacaagacaaatgatttgatctgcacctacgcaatagacatttacttgggattttgatttttgtgttactctcttttctcccaaacaaggtctttctttttttgatttttttagaaaggcagtacaagattatatt

SEQ ID NO: 4405 - DNA, 458 bp, Glycine max
cccacgcgtccgcccacgcgtccgagaacaatcgtatgcagttttaagccacctgcatcgtttggtcatgcgtgcaccttatatattttcctcagactacaaacacttctattgccagtataatgagccatcatatgtcaaaaagttgaagcttgaaatgctgactgcagttgcaaatgaaagtaacacctatgagatagtgacagaattatgtgaatatgctgcaaatgttgacattcccattgcaagggaatcaattcgagctgttgggaagatagcattgcagcagtatgatgtcaatgctattgttgatcgacttctccagtttcttgagatggaaaaggactatgttacttctgaagctctggtgcttgtgaaagatctgctaagaaaatatccacaatggagtcaggattgtattgctgttgtaggacatatcagtagtaaagatgtccaag

SEQ ID NO: 4406 - DNA, 1623 bp, Glycine max
  unsure (1)..(1623): unsure at all n locations
atttgggggcgagtgttgtgcgaagtgagggagatgcagtagaatagtaatagtggtaacaaaaggcaacagagaacaacaacctcgccgtggcggaggcgctggtgaaacagatcggcttcctcgccttgtcacaggtcggagctatgaggaaagtcgcaacctacttcgccgaagcgctcgcgaggcgaatctacagagtcttccctcagcagcactccctctcggattctctacagattcacttctacgaaacttgtccttaccttaagttcgcgcacttcaccgcaaaccaggcgattctcgaagcgtttcaagggaaaaatcgcgttcacgtgattgatttcggaatcaaccaggggatgcagtggccggcactgatgcaagcccttgcgcttcgcaacgacggccctccggttttccggctaaccggaatcggaccgccggcggcggacaactccgaccacctccaggaggtagggtggaagctcgcgcagctggcggagaggatccacgtgcagttcgagtaccgcggcttcgtcgcaaacagcctcgccgatctcgacgcctccatgctggatctccgagaagacgagtccgtggcggtgaactccgtcttcgagtttcacaagctcctcgcccgccccggcgcggtggagaaagtcctctccgtcgttcggcagattcggcctgagatcctcaccgtcgtcgagcaagaagcgaaccacaacggactgagttttgtcgaccggttcaccgagtcactgcactattattcaactctattcgactcgctggagggttcgcctgtgaacccgaacgacaaggccatgtcggaggtttacttagggaagcaaatctgcaacgtggtggcgtgcgagggaatggaccgcgtggaaaggcacgagacgctgaaccagtggcggaaccggttcggttcgaccgggttttctccggttcacttgggttcgaacgcgtacaagcaggccagcatgttgctatcgcttttcgggggtggggatgggtatagaggggaaagagaacaatgggtgtctcatgttgggatggcacactaggcccttgattgccacctccgtgtggcaactcgctacaaaatcggtggttgctgctcactgagtcgactcgccgattcctcagccagctttttctttttattttttgttttaaattaatttctaatcatgccccccgaaaaaaaggaaaaaaaaaagaaaagaaggggaacttgaggggggattgagaggtcagtgtgtaattgtgctatgctgagctgtgagcactgattgcatgagcctgagaccccccattgtctattttcctgccccaacttatgtctctctccaacccttaatttacttattttgcatttgccgcaatttgtaaccctctgatttatatttatacttgcgctttctttgggagatggagttggggtggaaatcttctttgttaatattttcacgggtgtgtggaaactcacaaaacgctcataatggtgttattatattttattatagtgggttataaatataaatatactctagcttgttatctattgtatnnnnnnnnnnnnnnnnnnnnnnnnnnnnnnnnnnnnnnnnn

SEQ ID NO: 4407 - DNA, 638 bp, Glycine max
ctcgagccgcgcgtacaagcaggccagcatgttgctcgcgctttttgcgggtggggaagggtatagggtggaagagaacaatggttgtctcatgttgggatggcacactaggcccttgattgccacctccgcgtggcaactcgctgcaactcgctgagtcgactcgccgattcctcaaccagcttttttttttttgtttaaattttattataatttctattcatgcccaccgaaaaaaaaaagggaacttgtggggatgagagggcagtgtgtaaatgtgctatgctgagctgtgagcactgattgcattagactgagacccaccattgtctattttcctgtcccaacttatgtctctctctctccaacccttaatttacctattttgcgtttgcctgaggattttcagattttgattttctcctctttttttgtaaaccttgaattttactttgctttcttttgggttgggatgggtggaatctcttgtaatttttcagggttggaaaatcaaaaggcttaatgtgtatttattttattatggtttaattaatatattagtagtattatgtagcttactggtgagtggtgatatactaataaattagaatctatttttaaaaaaaaaaaacaaaggc

SEQ ID NO: 4408 - DNA, 363 bp, Glycine max
catttgatacagcctggtgaagaaggtttcaagttttgaaacccccgtatcctaatcctaacccacttcgttgattacgttagaaaagaagtgactgtgaatccgaatccaaatttgaatgggttatcttcaatttggcagacatggtgttaggcagatcattagatttagagatgctagttatgataatgttgtggtaaacccactcctatatgcttcccaaggacttcgttacaagaggaagctccaagtcatccttacaactgacatagataagctgggaaaggcaggtgatactgtcaaagttgcccctggatattttcgcaaccacctaatggccaagctccttgccttccctaacat

SEQ ID NO: 4409 - DNA, 1149 bp, Glycine max
  unsure (1)..(1149): unsure at all n locations
gagagctcagaatcttcagctctacttcttcttccagaaaacaaagagatattcattcaaaaatcacctatctcatccctctcttgacccctccaacatgaagaacgctaacagcaacacaaaactaatccttctccacccttatatccagaaacaaggaagctccaatccgcttatggcttctagccttcatatccttcttcaccttagtcttccttgccacactcatttacacaagagacacaacctcatcttcctctaccactacctcttccaccccattatctagtttcgctaacacccctttaccatccactgtaatcaacaccctcctccactatgcctcaaaatccaacgacaccttccacatgccccactcagacctaaaaaccatctctgacatgctccgaaagtgtccctcgccatgcaacttcctcgtcttcggcctcacccacgagaccctcctttggaaagccctcaaccacaacggaagaaccgtcttcatcgacgaaaaccggtactacgccgcgtacttcgaagaaaaacaccccgaaatcgatgcctatgacgtgcaatacacgaccaaaaggagcgagttgaaggagctgatagcttcgacgaaagaacaggtgggaaacgagtgcaggccagtgcagaatcttctgttttctgagtgcaagttagggctcaatgaccttccaaaccatgtttatgaagtggattgggatgtgatattggtggatggaccgaggggggattggccggaagctcccggaagaatgtctccgatcttcaccgctggcgttcttgcccggagcaagaagggtgggaaccccaagacgcatgtgtttgtgcatgacttctcagggaaagtggagaaggtttctgggaatgagtttttgtgcaaggaaaatttggtcgaggctactcatagtttgggaccctatgtgctggaaaaaatggccgatagtagcgttcagtattgtaagaatcattcatcaggatctgcttagttggtgtcttcaatgttactatatatatatatcgtccatctgggtatttaatatagtttccctgtttacttattggttggagcccgttnnnnnnnnnnnnnnnnnnnnnnnnnnnnnnnnnnnnnnnnnnnnnnnn

SEQ ID NO: 4410 - DNA, 519 bp, Glycine max
gtccgcccacccgtccgttcctttcttccatcttcttctcttttcacgtcattatcctaaacttgcagattttcacatcccaagcaacatgaaggggaggttcatgtttctgtcggtgctcctttgtgccacctttcatgtctccttctccattactgacggcttagtagcaaacggcaacttcgagctgggtccgaagccctccgccctgaaaggaactgtggtgattggtggcagccactcgatcccagaatgggagatctctggcttcgtggagtacataaagtccggccagaagcagggcgacatgctgctcgtggtccccgagggggcctacgcggtgcgcctcgggaacgaggcctccatcaagcagaggatcaaggtgatcaagggcatgtactactccatcaccttcatggtggcccgcacctgcgcgcaggaggagaggctcaacatatccgtcactccagactggggcgtcattcctattcagactttgtataccagcagtggttggga

SEQ ID NO: 4411 - DNA, 958 bp, Glycine max
acttggaccaaccatatactaattctccaagaataagagaatccaaaagtctctcaaaaaataaccatgatgatgcatgtcctttgcttctcagtgttcctagcagcagcaatgcaaggaacactggcggttgaatacagtgtcaccaacaacgccctctcaacccctggtggtgttcgtttccgtgatgcaataggggacgaatacgccaaacaaacacttgactcagccacccaattcatatggggggtcttccagcaaaacgctcctgctgatagaaaagatatacaaaaaataaacttatttgtggaggacagggttgtgccaaatggtgttgttgcatatacaagcaaggatgagattcatgttattgcaaaatatgttaatgactatggtggggatgtgaagacagagatcacaggggtgctgtatcatgaaatggtccacgtttggcagtggaatgggaatggtcaggctccaagtggattaattgaaggtattgcagactatgttaggctgaaggcaaactatgcacctagccactggaagaaagcaggggagggacagaaatgggaccagggttatgatgttactgctcgttttctggactattgtaatactctcaaaagtgggtttgtggcacaattgaacaagcagatgaggactggttatagtgatcaattctttgttcagttactgggcaagacagttgatcagctttggcaagactacaaggctaagtatggcaatataccctaggtaaatggctaagagcttgctaatttaaaaataagcgactagtatgtcgcaatctctattgtaggcttgtatcaactctaaatatttaaagttgcaacttatagtaagttatagtggaatggatgttctgattctgatttgtaagtcatgtgtacgccaaaaatttacaagttcaagaaaaaactatttctatattttt

SEQ ID NO: 4412 - DNA, 1398 bp, Glycine max
gctcgaggtggacaagtcttgtactagttgctcgtttttaaattctcatcatcaagattcctgctacctactcccctagttgtaaaattcatttcagcaactagaagatggctatctgattataaaagttattcttttttcacgatctataaataatttcaccctaacccgcagaagattaggagtagaatggcgaaggagatagtgaaagagcttcttcctctaattcgagtgtacaaggatggcagcgtggagcgtcttctaagctctgaaaacgtggcagcctcccctgaagatccccaaactggagtctcatccaaagacatagtcatcgcagacaacccctacgtctccgctcgcattttccttcccaaatcccaccacactaacaacaaactccccatcttcctctacttccacggtggcgccttttgcgtcgaatccgccttctcctttttcgtccaccgctatctcaacatcttggcctcagaagccaacataatagccatctccgtcgacttcagactcctcccacaccaccctatccctgctgcctacgaagacggttggaccaccctcaaatggattgcttcccacgccaacaacaccaacaccaccaacccggagccatggctactcaaccacgccgacttcaccaaagtctacgtaggaggtgaaaccagcggtgctaacatcgcacacaacctgcttttgcgtgcaggtaacgaatccctccccggggatctgaaaatattgggtggattactatgctgccccttcttctggggctcgaagccaattgggtcggaggctgttgaggggcacgagcagagtttggccatgaaggtctggaactttgcctgccctgatgcccccggtggaatcgataacccctggatcaacccctgtgttcctggggcaccctctttggccactcttgcctgctctaagttgctcgttactatcactggcaaagacgagttcagagacagagatattctctaccaccacaccgttgagcaaagtggctggcaaggtgaacttcaactctttgatgctggcgatgaggagcatgctttccagctcttcaagcctgagactcatcttgctaaagccatgatcaaacgcttggcttcttttctggtttgatggatggcttgtcatgagagattccaaacataataaatcgtgcgtgccttcacctgtcttgtctactactccagttttagattgaattttatgttttagttattattcaacaaaaacacaataattccctctccctcgttgtttttgtttttgtttttgtttgtcaccattatcaatacctatcactgtatgtggtcattattcaacaaaaggatgccgtacactcctgaattaatatttcaattttca

SEQ ID NO: 4413 - DNA, 595 bp, Glycine max
  unsure (1)..(595): unsure at all n locations
cccttgtgtcttcaaccataaacttattcaccaaagagaaaccaaaaggctcaaaacacaaccatgatcaatcatgctctttgtttcttagtattcctatctgcactccatgcaacacatggagttgaatacactgtcactaacaacgcactctcaactcctggcggcgtggctttccgtgacaaaataggggctgaatacgccaagcgaacacttgactcggccacccaattcatatggaggatctttcagcaaaacaacccttctgacagaaaaaatgtgcagaaggtaagcttattcgttgatgacatggatggtgttgcatatactagcaacaatcaaatccatctcagtgcaagatacgttggaaacaataaaggggacgtgaaaacagagataacaggtgtgctgtaccatgaaatggtgcacgtttggcagtggagtgggaatggtcgtgctcctggtggattaattgaaggtattgcggactatgttaggctgaaggcaaactatgcacctagtcactgggtgaaagcagggcaaggacagaaatgggaccagggttatgatgttactgcacgctntttggactatt

SEQ ID NO: 4414 - DNA, 586 bp, Glycine max
atgtgtcaagtatgtatgaactttcagaggcctttaacgctatatcattgaggcacacatgcatcctttttatattggagcactatgataaattgggtggaaagccaggacactctcaactgattcagcatataatacccgagatccagaattactttgttaaagccattacaaaggccaattccaatatccagccgtaatgtgctgttctactattgacatctaacccgttgcaatgtacataatgtggttgatgttctttttgttgaacctgcgaaggaagtctcctggatcaagtacagcatggcttaaaaaaaatatctaacatcacgtcatgtacgttcatttctgatgcagtgtaagtcccttctagctgtaacgtcattgtcttagatatagcaaatatgaccttcacgaacattgttttttactcgtgcaaatattgtgatggttgagactttctctttctcaagcatctaatgttgagtttatgagtagtataggttgcccaagcatctaatgtatatatgacaattagatagttgtcttcatattatataatgaaatcttaaagccttttcactgg

SEQ ID NO: 4415 - DNA, 682 bp, Glycine max
gaggagatagtgaaagagctttttcctctaattcgagtgtacaaggatggcagcgtggagcgtcttctaagctctgaaaacgtggcagcctcccctgaagatccccaaactggagtctcatccaaagacatagtcatcgcagacaacccctacgtctccgctcgcattttccttcccaaatcccaccacactaacaacaaactcctttttcgtccaccgctatctcaacatcttggcctcagaagccaacataatagccatctccgtcgacttcagactcctcccacaccaccctatccctgctgcctacgaagacggttggaccaccctcaaatggattgcttcccacgccaacaacaccaacaccaccaacccggagccatggctactcaaccacgccgacttcaccaaagtctacgtaggaggtgaaaccagcggtgctaacatcccacacaacctgcttttgcgtgcaggtaaaccgaatccctccccgggggatctgaaaaatattgggtggaattacctattgctgccccctttctttttggggcttcgaagccaaattggggtccggagggctgtttgaggggggcacccagccaaagtttttggcccatgaaagggtctgggaaccttttgccctggccctggatgcccccccgggtgggaatcttattaaccc

SEQ ID NO: 4416 - DNA, 425 bp, Glycine max
acgacagaaggggggactagttcatacaataccaattacctggaagattcaaaatgtcgttacgttaatggcgtggagtgaccactagcttgctctttttattatataaagcaccctacactttacttttacaacaagcaccaaacacttgctctataagagaaaccaaaagcaaccatggcaatgcgttccctttgcttcttagtgtttctagctgcagcaatgcaaggaacacttgcagttgattacactgtcaccaacaacgccctctcaacctctggtggcgtgcgtttccgtgatgcaataggggacgattatgcaaaacaaacgctcgactcagccacccaattcatatggggggtgctccagcaaaacgctcctgctgatagaaaagatgtgcaaaaagtaaacttgttcgtggatga

SEQ ID NO: 4417 - DNA, 481 bp, Glycine max
gttatatcttttccgattcaaatatcggaaaccctgagaatctccctcccgagtgatcagaagagtaaaactagtaaaaaatttgctgctgaagctgggctccctgtgctgacaaatgtattacttccgaaaacaaaggggtttcatgcttgcttggaagctctgcgaggctcattggatgcagtatacgatgtgacaattgcatacaagaatcagtgtccttcctttctggacaatgtttttggtgttgacccttcagaagtgcacctgcatgtgcggcgtattccggtggaggagattccagcttctgaaaccaaagctgcttcttggttaatcgacacattccagatcaaggaccaattgctttcggatttcaagattcaaggccatttccctaaccaactaaatgaaaatgaaatttctagattcaagagcctactctcttttatggtgatagtttcttttactgccatgtttattt

SEQ ID NO: 4418 - DNA, 557 bp, Glycine max
ctcgagccgaatcggctcgagaccttacctctgttactacaactcttcaatggcttctagctttcaaagttcaccaatggcttccaactacagaagccataataagaaaagccacgacaatgacatgttccatccaacccaagtggtggtggttgtggtgcctttcccagcacaagggcacctcaaccagcttctcaacctctctcgcctcatcttggcacacaacatacccgtccattttgtaggttcgcccacccacaatcgccaagtcatagttcgttgccaaaggttggaaccaaaccttcatttacaacattcaagatctcacgacttcaatgttcctccttttgtttcccctgcccccaacccaaatgctgaaacaaggttcccctcacatcttttaccttccttcgtggcctccacgagtctccgtgtccccgtgtatgcactcttgcaatccctttcatctgtagccagaagggtcgttgtcatctatgactccctcatggcatctgtggtgcaagatgctattcatgtgcccaattgtgagagttaca

SEQ ID NO: 4419 - DNA, 907 bp, Glycine max
cctcgagcgaatcggctcacgaaattctcccatctgcttctcactgatctccattcccattccatggcttccactgaatcatcccctttcaagaaaattcagattcaaagggatgacactacatttgacgcatatgtggttggaaaagaggatgctcctggaattgttgtgattcaggagtggtggggtgtggattacgaaattaagaaccatgccgtgaagatttctcagcttggtagtgggtttaaagctcttattccagatttatacagaggaaaggttggtctggatgttgctgaagctcagcatttgatggatggtcttgattggcaaggtgctgtgaaggatattgctgcttcggttaactggcttaaagcaaatggctcaaagaaggctggtgtaactggattttgtatgggaggtgctctctctattgccagttctgtcttggttcaagaggttgacgcttctgtagcattctatggagttcctgcttctcaacttgctgaccctgcacaagccaaggctcctgttcaggctcattttggagagctggacaattttgttggcttttcagatgttacagcggccaaggcattggaagagaagcctgaagggcattccggaatttccacattgagggtacattatctatgacctggcaatgcacatgcattcatgaacaggtcaactgaaggaatccagaggaggaagaacatgggaatgcctgatgaagatgaagctgcagttcagcttgcttggtctcgcttccagacatggatgacccgttatctgtctagttagataatttcctagctagctcaattccgaagtcacatgctgcatgtgtattccacctggtaagtggttatattgaacccgttttaatggccccacaaactgtgga

SEQ ID NO: 4420 - DNA, 1089 bp, Glycine max
ggctattgctaagagtaccaaacaatttttgttcattcagagctttactcactcctttgcacgtctcaatctgagtcttcacttcatcgtttttgggattctctctctcaataatggcagcacgctttcaatctgcagctgtactatgctggtgttccctatagggaaagatgaaattgaagtctaagaaaggatggaaatctattgtaccacttcatttgaaaggaaaatccgcaacccgtttttctttatttcgcaaagtcaattctgctggctatggacctggcaaaacaccagtttatctgaatgtgtatgacttgacacccatgaatggttatgtgtattgggctggtcttggtatctatcactctggtgtagaagttcatggtgtagaatacgcgtttggagctcatgactacccaacaagtggtgtttttgaggttgaacctcgccaatgccctggcttcaagttcaggaagtcaatattcataggaatcacatctttggattctactcaggttagggagttcatggaacgccagtcagcaagatacaacggtgacacatatcacttaattgtcaagaactgcaaccacttctgcaaagacatctgttacaagctgacggggaaatcgattccaacatgggtaaatcgactggccagactaggttcaatttgcaattgcattcttcctgaagcactaaggatttctgctgtagcgcatgatcctaattatcagcctcatgatagtgaaaagagaaggcttcgaagtggcttcaattgcttgtcctcaatctcaatgcgtcaaaaacacctttccacatcttcactgtttctacagtcacccataagaggctgcttgtcgtcgtcatggccctcctcggaattgagaaaatccattaaccgttccttgaaagaaagataaccgagctttgagaaggtaggaaatgaatgattgtaagaatcttgtttatgtaagtaggatttggtttcatcacataacctcattttcttttatttttctttccttgtcttttgcagttaaacctgccctgttttttaatgttttgattgtggtgactaagaat

SEQ ID NO: 4421 - DNA, 404 bp, Glycine max
ggctcgagctttgcacgtctcaatctgagtcttcacttcatcgtttttgggattctctctctcaataatggcagcacgcttgcaatctgcagctatctgaagctgtgaggccaaactctctcatttcatttccatcccgtgcttaaattggaagctggaacctagtttatgccctgcttgatttggttgctctttaacccttttcagaaatcaaaagcacttgcaagttccattctttcagtttcatcatcaggtacttttcgctggtgttccctatagggaaagatgaaattgaagtctaagaaaggatggaaatctattgtaccacttcgtttgaaaggaaaatcagcaacccgtttttcgttatttcgcaaagtcaattctgctggctatggacctggcaa

SEQ ID NO: 4422 - DNA, 1123 bp, Glycine max
gaaggtgtgtggcgtcaggtagagataatgagattaggtgtgagtgtgagtgtgcggtgctcaatcggcaccgcttcaggcaacacccaaaccgattatcccgccaaattccaacggtcatctttctcaactgccaacttcctccccgacaacgcttcttcagatttagcagtttcaatttcgagtagtagcagcaggagagggctaatacgcatagccacgttgccatgtcttcttcccctcataggttgcctcccagccaacgccatgcagccaggttcaaaggaatatcttctcattaaagaagaggtgaggaaggtcttgtccaagggaaaggctgctggcgtgcttcgattggtattccatgatgccggaacctttgacatcgatgacagtacaggtggtatgaatggtttcatagtctatgaacttgaaagacctgaaaatgctggcctgaaaaaatcagtataggttctgcaaaaagcaaagactcagatagatgctatccaaccagtatcttgggcggacatgattgctgtggctggagctgaagcagttgaagtatgtggaggtccacctattcaagtttcactgggcagattatatacactggtgcctgatccagaagggagacttcctgaggaatctctcaatgcttctggtttgaagaaatgtttccagagcaaaggcttttcaacacaagaacttgtggctttgtctggagcccacactattggcagtaaaggttttggaagcccaatttcttttgacaattcatattataaggttcttttggagaagccgtggacgtcttcaggtggtatgccgagtatgattgggcttccttcagatcacgctcttgttgaggatgatgaatgcttaagatggattaaaaaatacgcagacagtgagaatctattctttgaagatttcaaaaatgcgtatgtcaagctggtgaattctggtgtgaggcggaatagcttataaattcaagagttgaatgttccaacttccactgaaggggcaacttgcatttttattgactttctaacagtgtttatgcacagttgccatgaagttttgggtgctttattattgatttgaacatcaagatctactaccc

SEQ ID NO: 4423 - DNA, 484 bp, Glycine max
cggtccgattccagttcgacccacgcgtacgcgtgcacatgatcgctgtggttggagcttaaacaactagattacgtggaggtccactctattcaagtgacactgtggacattatatacgctggttgcatgcacaaattggacacttacggtggaatgtgtcatggcttccggcttgaggatacgtatgcagagcacttgctattgaacacaataacttagagctttgtctggatcctacactattggaagtaaaggttctggaagcccaattatcttttgacaattcatattataaggttctcttggagaagccgtggacgtcttcaggtggtatgccgagtatgattgggcttccttcagatcacgctcttgttgaggatgatgaatgcttaaggttctttatctttgacaacctcttatgctactcttaatatgaatttgtcccccactttttttcttttctggctaagcactaaaatttt

SEQ ID NO: 4424 - DNA, 689 bp, Glycine max
  unsure (1)..(689): unsure at all n locations
gtcagatcccgctgtctagcggaaacaaacaaaggcagaaaaccatttcctccttaaatctgttcctattttcattttcatttcaacttaacgttttcatgggtattcgcttttcgtcctcccaggcggcgccgtcggaatcgtcgccggcgtcgagtttgggcgaattgcccgagagttgtgtcgctcagatcatgacctacatggatccgccccagatttgcaagctcgcaaccctcaatcgcgcttttcgcggcgcttcctccgccgatttcgtctgggagtccaagctgccgcccaattacgacgtccttctccgccgcatcttcgccgatttcccctcccatttgggcaagagagggatttacgccaggctttgcaggctcaattctctcgacgacggcaccaagaaagtttggctggatcgaggcatgggtaaactgtgtttgtgcgtttcggccaagggactctccataaccgggattgatgataggagaaactggaaccatatccccactgacgaatctagattcagcagtgttgcatacctccagcaaatctggtggtttgaagtggatggggaagttgagttcccatttccagctgggaaatacagcgtattcttcagaatacatctggngcgagccggcagaggtttggacacgagtctgcaacaccgagcatgttca

SEQ ID NO: 4425 - DNA, 417 bp, Glycine max
gaaaaaaaacacacacacacgcactctgagcgaaagaaaaacgaacaagaaaaaatcggatgagctatacatttcttagcagaaacttcaccggacctgagaattgagaaagtgtagtttgagtttcacatcaaaagattgtgtgtaagaagcgttttcttcagatcgatggaatatcttgggattgatctaagctgcgccgttggatctctccgccacggccagttaccggagaaggactgcttgctccctctcatttccaaactcctcggctacgccatcgtcgcggcttccaccaccgtcaaactcccccagattatgaaaattctgaagcatcagagtgtgagaggacttagcatgatatccttcgagcttgaagttattggatataccattgccttggcttactgtctccac

SEQ ID NO: 4426 - DNA, 319 bp, Glycine max
tgaaaaacgaataagaaaaaattggatgagtgatacatttcttggcagacacttgactgaacctgagaattcagagtgtagaatccatttacatcagaagaattcgtcagtgaaagaatcgttttcttcagatctcacaattagagagcgatggaatatctagggattgatctaagctgcgccgttggatctctccgccacggccagttcccggagaaggattgcttgctccctctcatttccaaactcctcggctacgccatcgtcgccgcttccaccaccgtcaaacttccccagattatgaaaattctgaagcatc

SEQ ID NO: 4427 - DNA, 1791 bp, Glycine max
  unsure (1)..(1791): unsure at all n locations
gatggaagaaaaaaggaagggtaagtaaattgggaatggtggtggtagtgccaggtgtctgtctgaggagaaaatagaataaaaagctatgaaattttggcacaaggtctgattgtagaattgaagaagatgactggggggggtatcactatgcaatcgacgccgggaagctcaggatacttggatttgtatccagagcggaagatgtcctttttcaaaaatccttacattctcggactggctgctgtcgccggcatcggtggtctcctcttcggctacgacactggtgtgatatcaggggctcttttatacattaaggatgattttgaggaggttagaaacagcaatcttctccaggaaacaatagtcagcatggctattgccggggcaatcgtgggagcagcattgggtggttggattaatgatgcctatggtcgaaagaaggccaccctctttgccgatgttatctttaccgccggagcaataatcatggcttctgctccagatccttatgttctcattttgggacgccttctggttggtttgggtgtgggcatagcttctgtcactgctcccgtttatattgcagaagcatcaccttccgaaataaggggttcattagtcagcacaaatgtcctcatgataaccggtggacagtttctttcctatcttgttaacctcgcttttactggtgttcctggtacttggcgatggatgcttggtgtttctggtgtgcctgctgttgttcagtttgttctcatgctcttcctccctgaatccccaagatggctttttgtcaagaataggaaaaatgaagccgttgatgtgctttctaagatctttgacgttgctcgcttagaagacgaagtcgatttcctcactgctcaatccgagcaagagcgccaaagaaggtcaaatatcaaattctgggatgtttttagatccaaagaaatcagactggcattcctcgtcggtgccggacttctggcttttcagcagttcacgggtattaacacagtcatgtactacagcccgacaattgtccaaatggcagggttccatgctaatgaattggctcttcttctatcccttatagttgccggcatgaatgcagccggaacaattcttggcatttaccttatcgaccatgctggacgaaaaaaattagctctttctagtctgggaggagtaattgtatctttggtcatcttggcctttgcattttataagcaatcatccacgtcaaatgagttgtatggatggcttgcagttgtaggcttagccttgtatattggttttttctcgccaggaatggggcctgtgccatggactctgagttcagagatatatccggaagaatatcgaggtatctgtgggggcatgtcagctactgtgtgttgggtctcaaatttgattgtctcagagacctttctttcaattgcggagggtatagggattggttcaacttttctgattattggtgtcatagctgtggttgcatttgtatttgtgcttgtttatgttccagagaccaaaggattgacctttgatgaagtggaagtaatatggagggagagagcttggggcaagaaccccaacacacaaaaccttcttgagcagggaagtagttcctaattaataaagtgtgagcttgttggcctaaatagatgtatcgtgtgggtacatttcacataagcattttattatgactttatatatcatactgtttgattataaatcgcaaaaaaaaaaaaaaattaaaaaatnntntagcggccgctctagaggatc

SEQ ID NO: 4428 - DNA, 382 bp, Glycine max
tgcatttgtatttgtgcttgtttatgttccagagaccaaaggattgacctttgatgaagtggaagtaatatggagggagagagcttggggcaagaaccccaacacacaaaaccttcttgagcagggaagtagttcctaattaataaagtgtgagcttgttggcctaaatagatgtatcgtgtgggtacatttcacataagcattttattatgactttatatatcatactgtttgatttggttcgcatctttcacttgcctcataatataagtgaatggaatgggaatagttgtgtagttccatcgatcggcaccatcattaaaatgctgtagttccatcgtccatggttatttcaactcattttgtggagtttcacttttac

SEQ ID NO: 4429 - DNA, 1327 bp, Glycine max
cacgcgtccgcccacgcgtactttttctacttaccttttctcttaatccaaatacgatggcagccatggcaaccacaaccctctcttcaaaccccaaactctcattcttcaacggaaagcccgtcacatattcttcccgcgtcgcgcccaccaccaaattatcctcatccaaacaaggcacaatttccatgtccctaaccccacccccctacgacctccagtccttcaaattccagcccatcaaagaatccatcgtgtcacgggaaatgacgcgccgctacatgaccgacatgataacctacgccgacaccgacgtcgtaatcgtcggagccggctcggcggggctctcctgtgcgtacgagatcagcaagaaccccgccgtgagcgtcgccataatcgagcagtccgtgagccccggcggcggcgcgtggctcggcggacaactcttctccgccatggtggttcgcaagccggcgcacctcttcctggacgagctcggcgtggcgtacgacgagcaagaggactacgttgtgataaagcacgcggctttgttcacgtccaccatcatgagcaggcttctagcgaggcccaacgtgaagctcttcaacgcggtggcggcggaggacttgatcgtgaaggaagggagggttgcaggggttgtgaccaactgggctctggtttcgatgaaccatgacacgcagtcttgcatggaccccaacgtgatggaggctaaggttgttgtgagctcttgtgggcacgatggaccttttggcgccaccggggttaagaggttgaagagtattggcatgattgatagcgttcctggaatgaaggctttggatatgaatgctgcagaggatgctattgtgaggctcacgagggagattgtgcccggcatgattgtcaccggcatggaggtggcagaaattgatggctccccaaggatgggtccgacgtttggggcgatgatgatatcagggcagaaggcggctcatttggcgttgaaggcgttggggaggaacaatgcaattgatggaacgtgtggagttggaagggaagaaccccagcttattttcgcttctgcagacactgaggaaattgttgatgcttaaacttactttcaaattagctagatatatagcttttcttttcttttctttctgtttggtccctacttaattatgattttaattttggaataaatgaacaacatgtgaattatgaaggagacaatacttgttgttacattgtatttggacagcatcgttttggtccccccccccccacgtatagcggaggaaaccatatatataaggatggagagata

SEQ ID NO: 4430 - DNA, 540 bp, Glycine max
atctggatgtgcctctggataaccagcgattgtaatgccaaagtagtcaccatatttagctctgatatgttgcaccaagtcgcgtgcacaggcaaagccgccttcgacctggacgaatttgtcctgaccatgcggtggatcacctcgaagtgcaagcacattttggaggccattggacttgatggtgtggagagcatggtcaatcttctcaacaggcatgttggtgcaggtgaggtgcatcatggtctccacacagacaatgttctgcatcttgttggcaatttccaatgtaagatcagccgttgtccctccagcaccccaagtgatgtcgcaaaacgaggggttgtgcaccaccatgcggtccatcctctcaaacagattgtccaccccatcctcagtcttgggcgggaagaactcaaatgagaacaccaccctgtttggatcagccgaggctgcgtgaattttctcaatgatcttcattttttatctttgtcccttgtgaggtgaggtaaggtaaggtagacagagatacaggaaaag

SEQ ID NO: 4431 - DNA, 534 bp, Glycine max
ggttgaagagtattgggatgattgatagcgttcctggaatgaaggctttggatatgaatgctgctgaggacgctattgtcaggctcactagggagattgtgcctggcatgattgtcactggcatggaggttgcagaaattgatggctccccgagaatgggtccgacgtttggggcgatgatgatatcagggcagaaggcggctcatttggcgttgaaggctttgggtaggaacaatgcaattgatggaacgtgtggagttggaagggaagaaccccagcttattttggcttctgcggacactgaggaaattgttgatgcttaaattaagtttcaaattatataccttttcttttctgttttgtctctgcttatgatttgaattttagaataaatttttaaaaatgtgaatgatgaaggagacaatacctgttgttacttctttgaatttggactcacctatagcagatgaaaccaaattatcaaggatgggagagatagacgccacttaatacatttttaatacttactgtatg

SEQ ID NO: 4432 - DNA, 2356 bp, Glycine max
gtaatatacatgatttttttttctcaaatgccaatgatgacaaggttctcagagaaaagaaataaaagcaaaatataacacacaagacttcgatattctactttcactattaagaaacatccaattcagaggaaggagtaacttgtccttatgtcaacgtacaggttacccatgcgactttgaagaatgaaaatataaagacgttagggacatagcccagaaaaataatttggcacttcaacttagaaccatgtgtaatatgaatcatcatactgagaagaaaacaaaagaaaggaaaggaacatgacaaccaacagaagtgacatagctaaagtactaataaataataagctcatgtcagaaatctgcaaagacggcgaaaagatcaccattgatgtaatcattgtcgaccaaactaaccaagaagtggctgcccccaacctcttcaaccaatttcctggatgcctcatcctcagggtacaagcttgcccatcctcttgaccaaatttcaaatgcctcatccttccatacattgaagctgacaggatctacaatggttggttgaattatctccttagctgggaagacaccccatgtcacagcattaacgtcagtttgacccacattagatttccagctcccatctttattcacagccatataagttaaagatgttcgatccttgcatttatcaacaagtgcatccagcttttccttagagcagaagaactctacatatgccttctggtaaacatacccgcctggtccaccccagccaacagtaggagaatctgacttttccccattgacagctggctggctattgatggtgaggaagccctttgtgttaatcttttccagcagctcatttattatctttgtctctggctgaagaccatctagttctgaccaaggattgcttctcaactttccaagacaatacagtctaaacctctcatatatatcttcaatgcttttcaagggaactgcccattcttcaacaagcttcttgtcccgtgcacgtggccgcatgaactgataatcagataatgcaccatatgatggattacaggaatcaccccaacgcccgtgtgggtattgatcccatcctattgtccttgatatgtagctttttggacgatttgcccaaaagattggacggacatcttctttaacacggaaaacatttgcagggcgtctccaaggtaaggacctagaaactttggtctcttcaattaggccaaggttcattagtatcgctaatgccgatttctccatatttagtgtataaagatgcaatgtcttaattccatgagctaaaatctttttgcacatttcagttcccaggtgaattccataagccttgacagcttcttcgttgtccttgataggctctaaagcagccataatgtcagctggtatctttgttttgcaaaacccagtcatgcggataaagcccttgtaattattaatgggcataattccaggtacaatagggcacgttattccaatttggcgacagtcgttcacaaatttgaggaatatatccgtatcataaaataattgggtgacaatcagatctgctccagcatcaaccttgctcttcaagtaagcaagatcatttcgataaccctctgatgtagccaacccatcactttctataacatccggatgtgcctctggataaccagcgactgtaatgccaaagtagtcaccatatttagctctgatatgttgcaccaagtcgcgtgcgcaggcaaagccgccttcgacctggacgaatttgtcctgaccatgcggtggatcacctcgaagtgcaagcacggggcgatgatgatatcagggcagaaggcggctcatttggcgttgaaggcgttggggaggaacaatgcaattgatggaacgtgtggagttggaagggaagaaccccagcttattttcgcttctgcagacactgaggaaattgttgatgcttaaacttactttcaaattagctagatatatagcttttcttttcttttctttctgtttggtccctacttaattatgattttaattttggaataaatgaacaacatgtgaattatgaaggagacaatacttgttgttacattgtatttggacagcacgtgccacgtatagcggaggaaaccatatattatcaaggatgggagagatagacgccacttaatttttttcatctattctcaatcgatgaaaagtgaccagtatatttctttctataaggtatctgcttgtctacgggatagtatccactcaattgttatgtaaattgtaagaaagtgacgttaataaaggctatgttaacataaaaaaaaaaaaaaaggggggccgc

SEQ ID NO: 4433 - DNA, 430 bp, Glycine max
cgaccggaattccgggtcgccacgcgtacgctcatctgatacgatggctgccatggcaacctcaaccctctcttcaaacccctaactctcgttctgccacggaaagcccggcacatattcttcccgcgtcgcgcccaccaccaagttatcctcatccaaacaaggcacaatctccatgtccctaaccccaccccccatacgacctccagtccttcaaattccagcccatcaaagaatccatcgtctcacgcgaaatgacgcagccgcttcatgaccgacatgataacctacgccgacaccgacgtcgtaatcgtcggagccggctcggcggggctctcctgtgcgtacgagatcagcaagaaccccgtcgtgagcgtcgccataatcgagcaagtcccggttggaaaagggcccccccccccctgggggg

SEQ ID NO: 4434 - DNA, 850 bp, Glycine max
cttaatccaaatatcatcatctgaaacgatggctgccatggcaaccacaaccctctgtgggaacccgaaactctcatttttccacggaaagcccgttacatattcttcccgcgtcgcacccaccaccaagttattctcatccaaacaaggcacaatctccatgtgcctaacccaacccccatacgacctccaatccttcaaattccaacccatcaaagaatccatcgtctcacgcgaaatgattgtcaccggcatggaggtggcagaaattgatggctccccaaggatgggtccgacgtttgggccgctcgtgatatcagggcagaaggcggctcacttggcgttgaagccgttggggaggaacaatgcaattgatggaacgtgtggagttggaacggaagaaccccagcttattttcgtcttctgctatgacagtgcagtcttatattgtatacttaggatcgacattctcatggcccaaacccttcagcaagtgatcttgagtctgcaacgaattcccattacaaattattaggctcacacttggggaaggagtggaatgcttcggggcctatgcacgtggatttgctagagggtgccttgcaacgccaaacatcagttgaactccaaactaatctctggtctccctggctttccaaggatggaagtcttgtactgagcgtccaaaaccaccttgtgagttcaaattgaatattgaatttcattttcttttacacattggacatttatttctcaagaaaacgagggctctgttatctgttggtagtgtctggtattttacatgtttctttttacttataatttcttgcagcactacctgaaaagtcat

SEQ ID NO: 4435 - DNA, 405 bp, Glycine max
aggtaaggtgcatcatggtctccacacagacaatgttctgcatcttgttggcaatttccaatgtaagatcagccgttgtccctccagcgccccaagtgatgtcgcaaaaagaggggttgtgagccaccatgcggtccatcctctcaaacagattgtccacaccatcctcagtcttgggggggaagaactcaaatgagaacaccaccctgtttggatcagcagaagctgcgcgaattttctcaatgatcttcatttttattttttttatctagatgactagatccaacactcaatcctagtgcaaacggagatgtgaaaagagttataagttctttttcagaattgtgaacggaagggaaagcaaatgagagaatagtcgtaccttgtgaggtcagctcgagccga

SEQ ID NO: 4436 - DNA, 2454 bp, Glycine max
cgagaacagagtgacgccaacgcaggacgcaggggcaggttctccaccacaccattctctctacgtgcaagtcaaaaccggcattcgcacgagtcacaaacttcaccgaacttccgtataaattctcttctcttccgtgattattactgaaagaggaatagaatagtcagcgatggcacagaagagattcatcatcgaggtcgagaaggcgaaggaggcgagcgaaggaaggccttcgagaggacctgtctatcgtagcctcttcgccaaggatggattccctgctcctatccaaggtctcaatagttgctgggacgtttttcgattgtctgttgagaaatatccatcaaatccaatgcttggtcgccgggaaattgtggatgggaagccgggcaagtacaagtggctaacatacaaagaagtatatgaccaggtgatgaaagttgggaattctatccgcagctgtggttatggagaaggtgtaaaatgtggtatttacggtgctaattctgcagaatggattatgagcatgcaggcttgcaatgctcatggactttattgtgttcctttatatgataccttgggtgctggggctatagagtttattatatgccatgcagaggtctcaattgcatttgcagaagaaaagaaaatacctgagctattgaagacatttccaaatgcaacaaagtatctcaagacaattgtaagcttcggaaaggttacccctgaacaaaagcaagaagttgaaaattctgggttggaaatatattcatgggatgaattcttacaagtgggtcaaaatcagagttttgatcttcctattaagaaaaggagtgacatctgtacaataatgtatactagtggaactactggtgaccccaagggagtgttgatatcaaatgagagtattattactctcttagctggggttaagcgactgttggagagtgtaaatgaacaattgactgagaaggatgtatacatatcataccttccacttgcacatatatttgatagggtcattgaggagacattcatatggcatggtgcttcaataggtttctggcgtggggatgtcaaattgttaattgaagatgttggcgaactaaaaccaactattttctgtgctgttccccgtgtgcttgatagagtgtactcaggtttgacgcagaagatttcttctgggggcttcttgaagaagacattattcaactttgcttattcatataagcttaataacatgaagaaagggcttagacatggagaagcatctccacttcttgataaaattgtgtttgacaaggtaaagcaaggtttagggggtagagtacgtcttattttgtctggagcagcacctttatctgcacatgtggaaggttacttacgggtggtgacttgtgctcatgtcctacagggatatggtctgactgaaacctgtgcgggaacctttgtctcattaccaaatgaaatagaaatgcttggaacagtgggccctcctgtaccaaatgtggatgtttgcctggaatctgttcctgaaatgggatacgatgccctagcaagtacaccaagaggagaaatttgtgtaaagggaaaaaccttgtttgcagggtactacaaacgtgaagacctcactaaagaggttctgattgatgaatggttccatacaggggatattggagagtggcaacctaatggaagcatgaaaattattgatcggaagaagaatatatttaagctttcacaaggagaatatgttgctgtcgaaaacctggagaatatttacggtcaagtttcttctattgaatctatatgggtttatggaaacagttttgaggccttccttgtggctgttgttaaccccagtaagcaagcacttgaacattgggcccaagaaaatggtatatccatggacttcaattctctctgtgaagatgctcgagcaaaaagttacataattgaagagctctcaaagattgcgaaggaaaagaagttgaaaggttttgagtttataaaagcagttcaccttgactcaattccatttgacatggaacgtgaccttatcactccaacatacaagaagaagaggccacagttgcttaaatactatcagaatgccattgacaacatgtataagagtggaagtaaacccagtgcctgagacctgatttgggagataatttattttctgtatgtgatggtgtttgtctccgttcaattgtttccttttggtgactgtatatacgctgagtagttatatatggatacgtcatttattttgattttttttttcacgtcatattatctattctaccggacttatctaagtaagttgtctttcttctctttttctatctctaggtgtattacagtatccatgaatcatttttacatatataattattcagaaatggctgatgttcaactgcagacatgaaatataaaactattttt

SEQ ID NO: 4437 - DNA, 931 bp, Glycine max
taggggagagcgagacctgctttctttttcgatcttttgcgttagggcactcaacattttacactcttttcttcttctcgttgttgcttcggtgttgaatcatggatcagaaagtcgatttcagtgctccgcattccatgggaaccactatcatcggcgttacttacaacggcggtgtcgttctcggagccgactctcgaaccagcactggagtgtatgttgccaaccgagcatcggacaaaatcacacagctcactgataatgtttacgtgtgtcgctctggatcggctgctgattctcagattgtctctgactatgtgcgctacttccttcaccaacacacgatacaacttggacaacctgcgacagttaaagttgctgcaaaccttgtccggcttctcgcatataacaataagaatttcttacagaccgggttaattgttggtggttgggataaatatgaaggtggacaaatttatggagttcctctgggtggaacaatagtacagcaaccttttgctatcggaggatctgggtccagttacttgtatggtttctttgaccaagcctggaaagagggaatgaccaaggatgaagccgaggatttagtaaaaaaggcagtttcactggctattgctcgtgatggtgcaagtggtggggtggtgcgaacagtcataataaactcagagggagtgaccaggaatttctaccctggcgaccaacttccattatggcatgaggaaatggaggcccacaactctctgctagacattcttggtgtcccagagccgatgagcatgtgaagtgaagaagttgccgtgtttcagaaatgtttcctgatagattatatcttgtcttctctcttttatgaactagctaacgatttgtgtagtcaattactttgtttggttggatatttttgatggttgag

SEQ ID NO: 4438 - DNA, 2044 bp, Glycine max
agccaagcacaggctcacctttacactattataaaggtggacatagatgaagaccttgcagagcagattggaaaggatatatattttgatcttgtagaccatgacaaagtgaggagtttcgtgttcaaaaacagacgtcttttaacctttttaaggaagaggttgctaaagagtttggcataccagttcaattccagcgcttttggctatgggcaaagcggcaaaaccatacgtatcgtccaaatcgaccattgacacacatggaagaagcacaatctgttggacaattgagagaggtatcaaacaaggttcacaatgcagaattgaaattgtttttcgaacgtggagcttgggctggatttacgtcccattgcaccgcctgacaagacaaaggatgatatattacttttcttcaagttatatgatcctgaaaaagaggagctacgttatgttggaaggctctttgtgaaggctactggtaagccatcagaaattttaaccaggttaaataaaatggctggttatgatcctgatgaagagattggactatacgaggaaattaagtttgagccaaatgttatgtgtgaacctattgataagaaagtaacatttcgagcaagccagttagaagatggagatattatatgctttcagaaagctcctgctatagacaatgaacacgtccgctatccagatgtgccttcataccttgaatatgtgcacaatcgccaggttgttcactttcgatctctagaaaaaccaaaggaagatgacttctgcctggagatgtcaaggctctatacatatgatgatgtggtggagaaagtggctcaacaacttggtttggatgatccatccataattaggcttacccctcataattgctactctcaacaacctaaaccccaacctattaagtatcgtggtgtggaccatttgtctgatatgctggttcactacaatcagacttcggatatattgtactatgaagtacttgacatccctctgccagaattacaaggattgaaaactctgaaagttgcatttcaccatgcaaccaaggatgaagtggttattcataccatcagactcccaaagcagagcactgtgggagatgtccttgatgatctgaaaacaaaggtggaattgtctgatcctgaagccgagcttaggttgcttgaagttttctatcacaagatatacaaggtcttccctcccaatgaaaagatcgaaagcattaatgatcaatactggacattacgtgcagaggagataccagaagaagagaaaaatctgggtcctcatgatcgtctaatccatgtgtatcattttactaaagacacagctcagaatcaaatgcaaattcagaactttggggaaccctttttcttggtcatacatgaaggggagactttggctgaaattaaagtaagaatacagaagaaacttcaagttcctgatgatgagtttgtcaagtggaaatttgcctttttttcattagggcgtcctgaatatcttcaggattctgacattgtatccagtcgttttcagaggagagatgtttatggtgcttgggagcagtatcttggcttggagcatactgacaatgctcctaaaagatcatatgctgttaaccagaatcgccacactttcgagaagccagtaaagatttataattaggaaactggtattgatgagttctcgtcttgcgagggatgaatttggcatattctgctacatctatgggcttttgtaaaaacagggaaaatagcgaaaggctactccgtataggccacaattagtgagatcagcaatccaggtggtttctgcaggttttatattagaattgtggtatgtaattctttctgtcaacggatctcaacactgtctgccgaccacagcccgttgagctttactacttccaactttgtgtggaagttgttcaagttggggtcattgatcatcatcactgtactgtatcagtacataagatttttggattagtgagtgtatacagggtatagttggttgactctttttttgt

SEQ ID NO: 4439 - DNA, 1028 bp, Glycine max
cggctcgagcaaagtcctagctagcattaacactataaatagacctccgttttgctctcaatcctcagccgacctcgccttcgaaacattataatttctattacatacattttgtagctaggatgagcaagttactactcattcgtgttgctgggttcgtggcaacctttgtcaccatggtgatgatgatggtgcccaaaaacgtgagtgcccaaaacataggtgatgacatcgtcacacaagacttcttcaacagcataatcagtcaggctgatgatggttgtgcagggaagaacttctactcacgagatgctttccttaatgctcacaattcctacaatgagtttggtaggcttggtaatcaggatgactccaagcgtgaggttgcagctgctttcgcccatttcacccatgaaacaggacatttttgctacatagaagagattaacggtgcatcaggggactactgtgacgagagcaacaccgagtacccatgtgcccctaacaaagcgtactatgggcgtggaccaatccaactatcatggaacttcaactacggaccagcagggcagagcatcggatttgatggattgaacgctccagagacggtggccaatgaccctgttgtgtccttcaagacagccttgtggtactggatggaacatgtgcgtcctgtcatcaaccagggttttggtgcaaccattagagctatcaatggccgacttgaatgtgatggtgcaaaccctagtactgttcaggctcgtgttaattactacacccagtattgttcacaacttggtgtttcccctggtgacaatcttacttgctaatttatcagtatagatggttccatatgatgacatcatacattcatacggtatatcttaacatatatcagaaaataaaccattcaaggcttacagccttattttgattattaatgtaattactacttttgggaatattgtatctgattaccatcgatattgtgcatccaatattgaataaaaatacgttatttctgtgat

SEQ ID NO: 4440 - DNA, 377 bp, Glycine max
cagcattgaatctctcttgcaccctaattcaacagaaaagagtgttgaagaataaagtattcattgcatgtgctacatttctctgtcttaaatgtggaagttcaatggtgctctcggatgaaaggtttggttaaggtttgaacaggatcaatttggctaaaccaacatttgatggaagatgccttccttgtaaaagtacacttaggcaatgtaagatgtaacacactgttcaattcgctgattttttgtgtttcccagtgcaaattttctgtgatttgcacaattttgtgcaacattatgtaatatgttctagtggaactattttccgaaaaaaaaaaattgctcacaaagccagaaaacaaaaaataatgaaaaag

SEQ ID NO: 4441 - DNA, 556 bp, Glycine max
tttaattggcagcttctggaactttgatgccttgttccagccccaacaacacccagcccgtgattcacatgatacattctttttggaaactccttcaacaacaaagatattgccagaggactatgttcagagagtgaagcatgttcatgaatctggtggttatgggtctagagggtatgcatatgactggaagagagaggaagcaaataaaaaccttctgcgaacccatacaactgctgtttcctccaggatgctttaccaattagcacagaaaccatttgcccccaaaaaatatttctctatagatcgtgtattcagaaatgaagcagttgatcgtacacatcttgctgagttccaccaaatagaaggccttgtatgcgatctaggactcactctctgtgacttaataggagtcctacatgatttcttctcacgcttaggcatgaccaagctgaagttcaaaccagcttacaatccatacaccgaacctagcatggagatttttagttatcatgaaggctctaatacatgtgtagaggtaggaaattctgcactg

SEQ ID NO: 4442 - DNA, 773 bp, Glycine max
  unsure (1)..(773): unsure at all n locations
cacgcgttagtagttactcactttccttctcttcacaaacctacttgtttctctctcatttttgccccactatagcatgtctcataagatctagccatcaaactacacctggcttcttcttctccttctttttccctccttaccctcaacaaccaccaacatgcaaacaagttaacaacttccgaaacttgttccaacaccaaggttcgtcccaaacccatttatagcaccaaccctttgatcattcccacgtgtaaagtgaggccaagagtgcaatactgtggcaccatgatcaagagttctttgatagagcctgatgggggggcattggtggatcttgtggtgcctgagggtgagaggggtgctaagatcaccttggctgagtcactgcctaaggtgcagctcacaaggattgatcttgagtgggtgcatgtggtgggggaagggtgggctagtcccttgaaagggttcatgagggaggatgagtatcttcagagtttgcatttcaattcccttagggtcaaggatggttctgtggtgaacatgtcccttcccattgttttggccattgatgatgagaccaaagagagatttggatcctcttcccatgtggggttgctcgggcctgatggagattgtgttgcaattcttcgaagtattgaaatctacaagcataacaaggaagaaagaatagctagaacttgnggaacaactgctcctggattgccatatgnntgaggaggtgattactccggcaggaaattggcttattg

SEQ ID NO: 4443 - DNA, 1259 bp, Glycine max
tgtaagtaagttaggaaggcggaacctggagtggaagtgcgatcccagtgttagtgtgtatttcctctcttctcactccgggatcgatattttcaagaacagatcgaaaagccgttcatcgatttgttggatctgtgagtgagaagatggttactaagacagaggagactcaattgaacaggctcgaaaaccaggtcgataacggcggcggcggcgcgtgggagtacctctgcctcgtgcggaagctcaaagttcggcggtcggagaaagttctgaagcacggtctctccatcttgaacgacctcaaacaacgatcctctctcggctccgatgaatggaccttgtatgagcaggttgctgttgctgctatggactgccaatgtctcgacgttgccaaggactgtacaaaggttcttcggaagagattcctagagagtaaaagagttggtaggctggaggcaatgttgcttgaagcaaaaggatcctgggaattggcagaaaaggcttacacaagccttttggaggacaatcctcttgatcaagccatccataagaggagggtggcaatggcaaaggcacaaggcaaaatttctgtggctattgattggcttaataaatatctggaaacattcatggcagatcatgatgcatggagagaattggctgaaatatacatctccctgcaaatgtataaacaagcagcgttttgctacgaggagttgatattatctcagcctactgttccactctaccacttagcatatgctgatgtactttatacgcttggtggattagaaaacctccaaactgccaagaaatactactcatctactattgacttgaccggaggcaaaaataccagagcactctttggtatatgcttgtgcacctctgctgttacacagcttacgaaagggaaaagcaaggaggacaaagaagggtcccagttacaatctctagcagccaaagtattggagaaagattacaagcagagagctcccgacaagcttcctcaacttacaactgccttgaagagtttaacattgtcatcatgatgcagcatctcttaaaagattattatttagtcactttttgacattttctcagattgttgccagcttgagtcaacatatttagatttcctcagtcattttctccccaatattagaatgaaaattcatattggtctgcattttaccttcggtgatggatatttattgaccgacatgtaaagcctcagatggccctgtagatctaag

SEQ ID NO: 4444 - DNA, 460 bp, Glycine max
ctggagtagaagtgcgatcccagtgttagtgtatttcctctctactcactccctccgggatcgatattttcaagaacagaccgaaaagctgttcatcgatctgttggatctgcgagtgaattgggcgaaagaaaatggttaccaaatcagaggaaactcaactgagcaggctagaaaatcaggtcgataacggcggcggcggcgcgtgggagtacctctgcctcgtgcgaaagctgaaagttcggcggtcggagaaagttctgaagcatggtctctctatccttaacgaccccaaacaccgatcctctctcggctccgatgaatggaccttgtatgagcaggttgcagttgctgctatggattgccaatgtctcgacgttgccaaggactgtacaaaggttcttcagaagagattcccagagagtaaaagagttggtaggctggaggcaatgttgcttga

SEQ ID NO: 4445 - DNA, 896 bp, Glycine max
acgagcccgtatttatgaaaggcccatcaactattgcacatttgtactctgatggcaaggcaagcgcttctcctctttgtgttctggctatgcttcttggcaagagttagatcggacgaggattgcgtgtacacggtgtacgttcggacgggttcgatcatcaagggaggcaccgattcagtaattggtctgaagctatacgacaagtccggctacggcatatacatcaccaacctcgaggcatggggcgggttaatggatccgggtcacaactactacgagcggggcaacctcgacatattcagtggtagaggcccttgcttggaagcacccgtttgcgaggccaacctaacttctgacgggtcggggccccatcacggctggtacgttaattacgtcgaggtcaccaccactggggtccacgcgccttgttctcagcagcagttcacctttgagcagtggctcgccaccgatacgtcgccgtatcagctctgggctgtcaggaacaactgtccaaacaacttgggcccggcccagctcaccgatgttgccatccctcgggctgggcctgctttctctattctggaatccaccgtccgcgtctaggttatgttggttgctctacttgagtgtcggtagtgttgttgggaaacatatgttttttgggacataatacttttggtgaggtttgtacttgcgtcctccttaagcttgttctgtctcgctagaacagaattgtttactgggctcatgagtctagactctagaagttccaatttatatatttatcctttattattgaataaaggaggatgcggtttggacttttttgtgttggtgttatgtttaagtaaatgatcggtgcataatgtgttgtgtgacacacagcatattat

SEQ ID NO: 4446 - DNA, 370 bp, Glycine max
gatatgcaatgatagcagtcccgtatttatgaaaggcccatcaactattgcacatttgtactctgatggcaaggcaagcgcttcacctctttgtgttctggctatgcttcttggcaagagttagatcggtaagcctcataaaaatctcgctacccttcttcatctgtttttcctgattatcactgtcactgattgggtgcaggacgaggattgcgtgtacacggtgtacgttcggacgggttcgatcatcaagggaggcaccgattcagtaattggtctgaagctatacgacaagtccggctacggcatatacatcaccaacctcgaggcatggggcgggttaatggatccgggtcacaactactacgag

SEQ ID NO: 4447 - DNA, 406 bp, Glycine max
ctttaagattctctaccgttcaacgcaacactctcaattccatctactcttcgttcccaatatgacggagtgcatgacggacttggctcaagctgccgcatgccgaaacggcacgacggcggcacacttaaaagtgatttccatctttatgatttttgtgaccagcgtgacaggcgtatgtgcgcctgtcacactggcacgatactttcagggaaagtccctctacaacatagccatcttgttaatcaaatgctttgctgccggcgtaattcttgcaacctcattggtccacgtgttgccagacgcctttgctgcactctccgattgccaagtggcatcccagcatccctggaaggactttccctttgctggcctggtgacccttaatggggtgctaatggccctg

SEQ ID NO: 4448 - DNA, 491 bp, Glycine max
cggctcgaggaagacgacagaaggtcgcagcataaaatgtcaaatacaagtttgcttgatttccaatacagcctctcaaggaaaaaatacctgaggaagccatcacgtctgttctcctgggaccggcagaactcggggtcgaagaatgtatttcctcagcctaaggctgatgagatgaagcaggtgtttgacaagtttgattccaataaagatgggaaaatttctcaacaggagtacaaagccaccatgaaggctctaggcatgggggactcggttcatgaagtgccgaatattttcagggtggttgatttgaatggagatggattcatcaacttcaaggaatttatggaagctcagaacaagggtggtggggttaggacgatggatatacatagtgcatttaggacgtttgataggaatggcgacggtagaataagtgctgaagaagttaaagaaacgctaggaaggctgggagaaaggtgcagcattga

SEQ ID NO: 4449 - DNA, 605 bp, Glycine max
cccacgcgtccgaaaacatagtactattaaagagagatatcaaagcataaggcaaaagcatattcttccaaggttttattcttttctatttctaaaacagcgtttgcttttgtgtttggtcttagacgcagcacgcccccaccactgtttcaaccctcaaattgtgtcttcttcgctttctggttttgattaggttttgttccatttgaaacaatattcatcgatccatcgccaaacatgccttctagtcacttgcttcttgaggaacctattaggatggtctccatccttgaaccatccaagcctagttttttctctgcaatgacaaagattgttggtaccctggggcctaaatctagatccgtcgaaactatttctggttgtctcaaggctggcatgtctgtggctcgttttgacttttcatggcatgaccctgagtaccaccaggagactttggagaatttgaaggctgctatcaagagtactaagaagctttgtgctgttatgctggacacggtgggcgcagagatgcaggttgttaacaaaagtgagaaagcaatctcacttgaggcaaatggtcaggttgttctaactcccgatcaggg

SEQ ID NO: 4450 - DNA, 483 bp, Glycine max
acccacgcgtccgttttaaaggttttctatttctaaaacagcgtttgcgtttgtgtttggtcttagacgccgcacgccaccaccgtcactgtttcaatcctcgaactgtgtcttcttcgctttctggtctttttattaggttttgttcatcgatccatcgccaaacatgccttccagtcacttgcttctcgaggaacctattaggatggtctccatccttgagccatccaagcctagttttttctctgcaatgacaaagattgttggtaccctgggacctaaatctagatccgtcgaaaccatttctggttgcctcaaggctggcatgtctgtggctcgttttgacttttcatggcatgaccctgagtaccaccaggagactttggagaatttgaacgctgctatcaagagtactaagaagctctgtgctgttatgctggacacagtgggcgctgaaatgcaagttgttaacaaaagtgagag

SEQ ID NO: 4451 - DNA, 517 bp, Glycine max
  unsure (1)..(517): unsure at all n locations
acagaggatgaccccgggagcggcgagattgacggaggtgaggaggatcgtccgtttgggattaacaatgggcacagtgagggcgctgatggtgttgttgatgctgatgatgaggaggagagtgacgcggatgaggaggagacggagtcgtcgaggcggatggttgttaatggggagggccaccgggagaacggttttcgggttgcgcccgtcgagggtgacgacgtggaggacgaggatgacgaggatgattccggggaggagattgatgaggaggagggggatgacgatgatgtggtggaggttcatgagattgaagatagtgatgatgaggatggagtggaggagtacgatgacgaggacgatgacgaggatgatgatgaggaggaggaagaggtggataacgacgagggtgattttgcggaacccgagagtaccgggaggctgacgagtactgatggggagattgatgggcatgagcaaggggaggangatggggatgacgatgataatgggg

SEQ ID NO: 4452 - DNA, 962 bp, Glycine max
catttagcaatgcctgggatccaacttactattttgttgttgatgcagttcaatatcctatttatctagtcttctagacaaggaagataggtctgtacgaattgctgctggtgaagcactagctctaatttttgaaattggagttatagataaattttctgctgagttagacagtgcaagtgatacaacgcaagggagtaaaccacttgaaagctacatatttttacaaggattgaaaggaacggtgataaatcaatgcaaaaatctttccaccagccgctggtggaaaaggttctgcacagaaagatcttaatagtcagaggaacttgtttcgagatatcttggatttttttgagtatggttactccccggatatttcaatgaagattggtggtgattccctgcaggcatcatcatggtctgaaatgatgcagttgaattttatcaagcattttcttgggggaggattcatcaagcatatgcaggaaaatgagttcctacatgaagtctttggtttctcaccgaagagaaagtatcttaataccaacgaacacagaatgtctggtggtgaaaagagaatgtttaagtctccaaattcgtttttgaacaaggctaggacgcaatcacttaataagcagcggatattatctgagggcagaaacttcggccactacgctgtcggtgtggttgacgaggaggcatgaatttgactgggaacaacaataattatgtctcaattagagattcgatctttcatttgatgtacaaattcatatattttatcggtgtttatactctttggtcttgttacttttatcaattacacagtagatttccatgacatgggatttataatgttataatatgaatggcaaatagatactattgagaagggatttcatctggttcgaaatgtttattttttaaggttatgcacaagatttaaagagttattaaaaaaa

SEQ ID NO: 4453 - DNA, 455 bp, Glycine max
cgtgcctaagctaggaattcagctcgagggctataatcacttttgttggagggaacgatcaagaagaaacagaacgatcaatggacatgatgtggcgagtgattaatcccaaattaggttccaatgtagttgctgtcaaacctcctgcttcattaattgccaatgtggtgtctgcgtggtccttcctcctctctactgtgagcaatttgaagctaaattcaaaaaactggcagaattcaatatcctatttatctagtcttctagacaaggaagataggtctgtacgaattgctgctggtgaagcactggctctaatttttgaaattggagttatagataaattttctgccgagtcagacagtgcaagtgatacaacgcaagaagggagtacaccacttgaaagctacatatttttacaaggattgaaaggaaaggtgataaatcaatgcaaaaat

SEQ ID NO: 4454 - DNA, 1233 bp, Glycine max
gaagactaaaaggttgcagaatgttatgaactctttagtccacgacaagccgaaggaatatggaggtttctattacagatgaaattgcaggcactatggagctcaaccctgataggctgggtgagctcaaagcatttgatgacacaaaagctggtgtgaaaggccttgttgatgaaggggtcgcaaagatcccaagattatttcatcatccacctgatgaatttgtcatggcttcaaagttaggcaacacagaatacactatacctgttatagaccttgcagaagttggcaaagatccaagttcacgccaagaaattataggcagaataagggaagcatctgagagatggggtttctttcaggtggtcaaccatggcatccctgtgactgttctagaggacttgaaagatggggtgcaaaggtttcatgaacaagatattgaggagaagaaagagctatatacccgtgaccatatgaaacctctggtgtataatagcaattttgatctgtacagttcaccagccctcaattggagggacagtttcatgtgttacctggctcctaatcctcccaaacctgaagacttgccagtagtatgcagggatatacctttggaatatgggacatatgtaatgaagcttggaattgctctatttgaattattatcagaagctcttgggctgcacccagaccatttaaaagacttgggttgtgctgcagggactgtatttcactttgccattactaccctgcatgccctgaaccagatttaactttgggaaccacaaagcattctgataattgtttcctcacagtgcttctccaggatcatattggtggcctgcaggttctttaccagaacatgtggattgatataaccccagaacctggggctcttgttgttaacattggtgatcttctacagcttataacaaatgacagattcaagagcgtagaacatagagtacaggcaaatctcataggtccaagaatatctgttgcatgctttttcagcgaaggtcttaaatcatcaccaaaaccctatggacctataaaagaattattgacagaagacaatcctcccaaatacagagaaaccacagttcggagtatgtacggtatttcgaagctaaaggtcttgatggaacctctgcacttcaacacttcaagatttgagttgaattggtgtgtggtttatttagcacaataaatgaatagattagataagttgga

SEQ ID NO: 4455 - DNA, 621 bp, Glycine max
tcacgtgcaacgaacagacacacagtcacatacatagaaacccattattcccaatttcccaatttccattaggcagagcaaagtaatcgcaaaatctagggtttgttcgttcgctcgttcgcaacaatggcgctgaggagattctacaacgagatcaaggggaagagggtgagcgaggtccctgagcacgtgaagccgatgctgtccctgagctacatcaagaaagcgattcagagaggcttcgacaattaccatgccaagtacattgaaaccagttcccctgatcccatcttccatgtctgctacggcggcatgatcttctcctacctcgtcgctctcccccacgagcgccgccacctcctccacgcccaggagcacgctcagcagcatcactgattccatccaccttcaggatcctggttgaattggaggtggttggcttgcttgatctttgttttaaaatctgaaaaatcaaggcagaaagatactgtcagcttctgtgtatttcatcatttggatgataaaataagttctatttgatacaattctcaattttcttgcagttaaatgttaattgaatgtgtgaaaagtaaacatactttttgatttggttctctgtct

SEQ ID NO: 4456 - DNA, 361 bp, Glycine max
agcaataacagcaacaacattaatgatcagaataataagcagcagtccaacaacatggccttgttgagggttcaagagcaagcaagggagcacttgaggatagccatggcagagaaagcatatgctgaggaagcaaggaagcaagcaaagaggcagattgagcttgcggagcaagagttcacaaacgccaagaggataagacaacaagcacaagcggaactcgacaaggcctacgccttgaaagaacatgcaatgaagcaaatcaactccaccatgctccaaatcacttgccacggttgcaaacaacagttccaagctcgaaatgcagcaaccacccccgatgagaattccttggtgttga

SEQ ID NO: 4457 - DNA, 770 bp, Glycine max
ggcattctatggaaaccagttgagataatatttttggtggatgatgtccccataaggaggtatcctaggaaaagtgaagcaacatacccctcaaggtcaatgtatgtgtacgggtcaatatgggatgcatcttcttgggcaacagaggatggaaaatacaaagctaattataattaccaacccttcgttggtaggtacaaaaacttcaaactgcaaggttgcactagtgaaagctctgcctcgtgcaagccaccttctttctccccatctggctttggtagcctcagtcctcagcagtttagggccatgcaatgggtccaaaacaactacatggtctacaattattgccatgaccctaggagagaccacactcttatcccagagtgctaagctctagttcgtttcaaaactccttcagaagaaagaaatcgcctctaagatatcaaagctataattattaacttctgaagatcacattccagatgtgcaaaaatcacgtccgaaacgtggaatcaattaagctatgatgttggtgtgcctcaattctaagttgccctatacactttgcatatttgaattgtataatggttttgatttttcaggtggaggtggtttttgtgatggtcccacttgctaagggtaattgcaagagtagttgaacgtccaagccactccaatgattggaatgtttttgttgtttatgtaattgtgttgtagtattgtttgggttctgtcttcctgttcaaattgattgattcggttgctaacat

SEQ ID NO: 4458 - DNA, 803 bp, Glycine max
  unsure (1)..(803): unsure at all n locations
gaaacacaccacaccttcaaaccctaaccctagaagaagaaaaaaaccacaaccaccaccatctagggtttttctttttctcatggctagtttgtcaactaggattttcttcatcatgtcccttgtgtgcctggctctcggtccaatggcacaaggggaaatgacatgtggccaggttgtgagcaacctgaccccatgcatctcctatgtggtgtatggtggaaccaatgttcctgaacagtgctgcaatgggataagaaatctctatggcatggctcagaccaaaccagaccgccaagctgtttgcaactgcatcaagaacggtgttaggaacagtggcttcacctactctcacttcaatctcaaccttgctgctaaccttcccaagaactgtggggttaacattccctaccagatcagccccgacacagactgcaccagggtgcagtgaggttggtgcatgatgtttatgttagcagtgttagaataagaggccacgtgacacgaaaagggaatggctagaaattgcttttttaaggctcttgtactagtgctcttgtattatgtctgtggttatatatatatattatatagtgtgtaactgaggtcatggtgctgcttgtgtagcatgcttaattatgtaggctttagtataagatcatatgaagttatgggaagaaacatatggttgtgtaacctgtagttgccacttatttaatgatatgagcaatttgggaaattnnnnnnnnnnnnnnnnnnnnnnnnnnnnnnnnnnnnnnnnnnnnnnnnnnnnnnnnnnnnnn

SEQ ID NO: 4459 - DNA, 567 bp, Glycine max
  unsure (1)..(567): unsure at all n locations
nataattacccaaataagcaccacccacatgccccttttgtctgcactgcaccccatagacacatagtcccatagccttctcccaatatataagcccaaccctaaacccaccacatagtagtttctcaaaacacatcacaccttcaaacccgaaccctaaccctagaagaaagaaaaaaacccacaacacacaatcagtactaccaactagggtttttgtcatggctagtttgcaaactagggttttcttgatggcccttctgtgcctgctggctcttggtgcaaccattattccaatggcacaaggggaagtgtcatgtggccaagttgtgagtaacctgaccccatgcatctcctatgtgctatatggtggagccacggttcctgcacagtgctgcaatgggatcaggaacctctatggcatggctcagaccaaaccagatcgccaagctgtttgcaactgcatcaagaacgctgttaggaacagtggcttcacctactctcacttcaatctcaaccttgctgctaaccttcccaagaactgtggggttaacattccctaccaga

SEQ ID NO: 4460 - DNA, 679 bp, Glycine max
ggcaaagcaaaagccatcgcaatctcattcttcattcttcagcccacagagagagtcatcaatctaaacaaaattgggttccaaaggaacagacggacaatcaaaggaataggatttgcaacgatgcatgtactctagtacagaaattgtatatatatattgttgtcagtgtcaccaacaccaaactctctctctctctctctacgctaattaaggttcattgggcattggcggattctatttccttttctcaaaacccaatttgcttcttcttcatggaagcactctccttcatcatccccaaagactcttgttctcttctccttcgcactccttcttcatattcctcttcgtctgtcagaactccgccgccgccacttgctttcttcaaaaccacccaacactctcactcgcctcaccttctccgtcttcgcgtttttgccctccctaaccccgacgccgatgaacccaccaacgacttcgctttagcgtctcatcctcaggaaaatttaagccattctgagactgagagttccgaagatgatcaagatgctccaccacaaatggacatgtcgtggtcaacgatcacagccccagctggaagtggatccggtggtggcaccagggctggacttttcagaacacccatttctggtggcgtgcagagtgccacctcagc

SEQ ID NO: 4461 - DNA, 1046 bp, Glycine max
ttcgtccaagccttcgccggtggcaaaaagacaacagaaggggttccattccatttctttccaacacacactttctctctctatctctctctctctctctctctggttgtctttcattttgttcattgttgttgatgatgtcacgcgccgccgtgttattacacgcgcaggaggaggaggaggaggagtgtagtacttcgacgtcgtcgtcgatcgggaggaacagcgacgtgtcgtcggagagatcaatggaggaaggagaaaacgaggtggaaagtgcctaccatggacctttgcatgccatggaaactttggaagaggttcttcccatcaggagaggcatctcgaacttttataatggcaagtctaagtcattcacaaccctggctgatgcagtgtcttccccatcagtgaaagacatagcaaagccagagaatgcatacaccagaaggcgtaggaacttgatggcattgaaccatgtcttggacaagaataatagaaactaccctctaagaagcagtggtggtggcatttgcaagagatcaatcagcttgagtagaagctctctagctcttgcagttgccatgaacaactctgacagcagtagtagtatcacaagcgaagattctggttccagctcgaattcgttacactctccctctcctctaccgcctctccatccccgaaatagagtgtcttcttcttccggctcaggtccatcctctcctttgttgcggaatttctctccctggagatcattttccgtggctgatctacagcagcattgtgccattgctgcaacaataaagatttcaagtccctccgttggaaataaaacagctcatccatcatagtaaaaaaaaaaaaaacaaagaggataacaaactatatgttattaacttttagcttatatgaatgaatatcttgctctagtcctatttgtttgagggagcaaaaacttgtagaagcaatgcctttacgtacgtacgatcacttcagattaacttccgtaagatataatgatatgcctggccaataattagagc

SEQ ID NO: 4462 - DNA, 529 bp, Glycine max
aacaaatctataaagatcgccatgtcttgtgtttgtcaccagaggccattccatttctttccaacacacactttctctctctatctttgggtgtctttctttttgttcattgttgatgatgtcacgcgccgccgtgctattacacgcgccggaggaagatgcggcggcggaggagtgctgtacctcgacttcgtcgtcgtcgatcgggaggaacagcgacgtgtcgtcggagagatcaatggaggaaggagaaaacgaggtggaaagtgcttaccatggacctttgcatgccatggaaactttggaagaggttcttcccatcaggagaggcatctcgaacttttacaatggcaagtccaagtcattcacgaccctggctgatgcagtgtcttccccatcagtgaaagacatagcaaagccagagaatgcatacaccaggaggcgtaggaatttgatggcattgaaccatatttgggacaagaataatagaaactaccctctaagaagcagtggtggtggcatttgcaag

SEQ ID NO: 4463 - DNA, 902 bp, Glycine max
cggctacgagaacgacagaaggggacagcaacacacattgttaaaagtttctttatttcaagtgaagttagttagttatatttatatacacaatcatgtcaatgagatcaattggtacaagccttagccttatggtatggcttgtaattgcaacatcagcattagcaaaatctgataaccccccagtcctagacacacaaggcaaccctcttgagcctggcaaagattactacatcaaacctgccataaccgacgttggaggccgcgtcactttgttaagcagaaacaatccatgccctctatatgtaggtcaagagaattctgatgcagcagagggcttaccccttttcttcaccccttttgcagaagaagatgatgttgtgaaggtgaatagggacttcaaggtgacattctcagctgcctcaatatgtgtgcagggcacaaattggaatttggctgagaaggatagtgagagtggaaggaggctcattgctgcatcaggcagggatgattactttagaattactgagacaccaatcaaaggttcatattatataggttggtgtcctacagatgtatgccccttttgtaggtttgactgtggcattgttggtggtttgcgtgagaatgggaagattttgttggccttggatggtaatgtgctcccagttgtgtttgagaaagcatactaatatgtgtagcttcaattttgtgtttgaaatttctgttcttgtaatattgtaacagttgtgaaatgattggagctacttggtaggaccaaagaaagatagcatgtctattttctttttcttaatttatagaataaagctcgaaattgttgtgtgtaatttataggataaagttatatatgttgtctttattatatagaattttatgatttc

SEQ ID NO: 4464 - DNA, 424 bp, Glycine max
taagctcggacatacggctcgagcgcagaaatcctttctatgttgcttaagaagttacctacttatagcaagagaatctagctctattggttgtgtaaggtaaaaaaaaaaaacgcataaccatgtcaaccaaattgattgaaacaagccttagccttatggtatggcttgtaattgcaacatcagcaatagcacaatctgataaccccccagttcttgacacagaaggccaccctcttgagcctggcagagattactacatcacaccagcggtaacagacattggaggccgtgccactatagtagacaacggcacatgccctttatttgtaggtcaagagaacacttttgtaaaacagagctttgccgttttcttcaccccttttgcaaaggaagatgatgttgtgaaggtgaatagggactt

SEQ ID NO: 4465 - DNA, 468 bp, Glycine max
ctttcaggtggcattctcagctgcaacgttatgcttgcagggcaatgggtggactttgggtgaaagggacactgagagtggaaggaggctcattgttgtaggaggtgttggtacttactttaggatttcggagacacaagttaaaggtgtttataatattggttggtgtcctattgatgtgtgccccttctgtaagtttgactgtggcattgttggtggcttgcgtgagaataagaagattttcttggccttggatggtaatgtgctcccagttgtgtttgagagagcataataaatgtgtatcttcaattaatttgtgtttgtgttgtgtgcttgaaatttcttttcctgtaatgttggctaataattggagctaccgtatgtcgatgtataagaccaaggaaagatatacatgtctcttttttattttattaatttatggaataaaggtacaaactaagttgttgt

SEQ ID NO: 4466 - DNA, 369 bp, Glycine max
aataatcacaactcaaaccctctctctctctctctctctctctctcatataacaatatttccacgtacaattaagacacgatcactattgcatctacaatggaattagcaccctcaaactccaaccaacaacatgagaacaacaacagcaacaaggttcaggggctccattgctctgtgaagaactatgagtggggcaaaccgtgccgtgactccctcgttgccaagctattttccatgaattctgggtcgttacaatcatcacagctttgatgaggatcagccatatgcggagctttggatgggcagccacgtgtctggaccctctttcattgtttttgatggctcacaacaaagagtgaccctcaag

SEQ ID NO: 4467 - DNA, 921 bp, Glycine max
cgccgagttcctgtctattctggaaatccaaggaatattattgggcttctactggtcaccagtcttcttactgtacgaccagaaacagagacacctgtcagtgctgtatccatccggagaattccacgggttccatcagatatgcctctctatgatatactaaatgagttccaaaagggaagtagtcatatggctgctgttgttaaggctaggggaaaaggcaaagaaactccacaaatcattgatgaagagaaaaatgaagaaaacaaaagcattggtggggattcacagttgaccactccgttgctacagaagcaggatgcaaaatcaggaagcgttgttgttgccttagtcaagccttcaaagccttccagcattaataagctgtctgttttgcaacgtagtgatagcacaacaaatggtccctcttcagaaaatattgaagatggtgaagtgattggtattatcactttagaagatgtatttgaagaacttctgcaagaagaaattgttgatgagacagatgaatatgtggatgttcataagagaatacgtgttgctgcagctgcagctgcttcctcagtggcccgagctccatcatcgcgaaggttgactagccagaagggagcaggaatccaaagtaagccagggcaagctccaaagaaatctgcagaggaaaatggattgaactctacaaagcaataaggaaatgcatattagcctgtcgggataatgaacctttaatactgaggggctgtttatgtgtcagcaatatgatgaaaaagaagtcaaggagagttttttagtcatttgatctttatgatgtatcaaattaataactttccttttaggaagggcataaacggatgtattcctatttatataggttattaagccggtgccatgctgcaattttatgaa

SEQ ID NO: 4468 - DNA, 572 bp, Glycine max
atagaacacgtgctattttgagttgaattgaaaatcgagaaacggaatgatgaaataacgtagggagttggatctgtggtttggttgcgatgcggtgtgttgcgaatcactgtccaatcccgatcgcttgatccagacagtgaatcagaatcagaatcagaatcagaatcagagagaaacgatgagggcagtaagtgcgttaatggtggctcggatgttgacgcgggaccactcgctccctgtccttggcaacgaaagcatacccttcggatcggtgtggtggttcgcctatgccggcgtctcctgtttcctcgtcctcttcgctggcatcatgtccggtctcaccctcggactcatgtctctgggcctcgtggacctcgagatcctcgaacgcagtggttctcctgccgagaaaatgcaagctgcgattatacttcctgtggttaaaaaacaacaccagcttcttgtcaccctacttctctgtaatgctgttgccatggaggctctgccgttatacctagataaactattcaatcagtttgttgctatcattctctctgtaactttcgtac

SEQ ID NO: 4469 - DNA, 448 bp, Glycine max
gtggtgtgaatcactgtccaatcccgttcgcgtgacccggccagccctataaactatatatcgtgaatcggattcagagagactgacggaaacgatgagggctgtgagtgcgttaatggtggctcggatgtggacgctgggaccactcgctccctgtccttggcagcgaaagcatacccttccgatcggtctggtggttcgcctatgccggcgtctcctgtttcctcgtcctcttcgccggcatcatgtccggtctcaccctcggactcatgtctctgggcctcgtcgacctcgagatcctcgagcgcagtggttctcctgccgagaaaatgcaagctgcgattatacttcctgttgttaaggctaggggaaaaggcaaagaaactccacaaatcattgatgaagagaaaaatgaagaaaacaaaagcattggtggggattcacagtt

SEQ ID NO: 4470 - DNA, 1403 bp, Glycine max
acgagaacaagttcaacaaatcatcaaagacattaagtaggtctgccaaccaaggagaccgtgccactaacgtaatcaggggcacaaagaaagaacaagttcaacaaatcatcaaagacattaaggagtttaaggaaagcactaaggttgacaaggtggttgtcctgtggacagccaacacagagaggtacagcaacgtagttgtgggactaaacgacaccatggaaaacctctttgcttccttggacaggaatgaggctgagatttccccttccaccttgtatgccattgcttgtgttatggaaaatgttcctttcatcaatggaagccctcagaacacctttgtcccagggctgattgatctggccatcaagaggaacagtttgattggaggagatgactttaagagtggtcagaccaaaatgaaatctgtgttggtggatttccttgtgggggccggcatcaagccaacatctatagtgagttacaaccatctgggaaacaatgatggcatgaatctctcagcccctcaaaccttccgctctaaggaaatctccaagagcaatgttgttgacgatatggtcaacagcaacgccatcctctatgagcctggtgaacatccagaccatgtggttgtcattaagtacgtgccttatgtaggggacagcaagagggccatggatgagtacacttctgagatattcatgggtggaaagaacacaattgtgttgcacaacacatgtgaggattcactgttagctgctcctattatcttggacttggtccttcttgctgagctcagcactcgaatcgagtttaaagctgaaaatgagggaaaattccactcattccacccagttgcgaccatccttagttacctgaccaaggcccctctggttccaccgggtacaccagtggtgaatgcgttgtcaaagcagcgagctatgctggaaaacatcctgagggcttgtgttggattagctcctgagaacaacatgatcctagagtacaagtgaagttcaaagtcttaagagtaacggtttgggatagtgtagttgaatgtgatcaaaacttaactcatatcccatacccctcttttctgttatatatttctggcaaatgtgaaatttgaagatcgttgaatctctctatctttgttcctgccgacttatttgagagcaggctatctatgcatgtatgtaataaaataatatcaagttatcgaagtattttgtgcttaataaaaaaaaaaaaaaaaaaaaaaaaaaaaaaaaaaaaaaggggggccccccaaaaagaaacccctccccccgggaaataaatccgggccgggaactggagggggaaaaatttcccccaaagggggcccaaataaaacctgggggaaaacggggcaaaagttt

SEQ ID NO: 4471 - DNA, 1322 bp, Glycine max
accaggccaaggcaagcgctgggctttgaaatggagcatttcagaatcatcaatgatgtaacccgcaacccactcaagttgtgacacgtgtataagcattctatctcgttcctctatatataggacctccttcacccaacacaagtgtgtgtagtataggattctcttctttattccttttgtaatttcattcattcttaatctttgtgaaaaataatgttcatcgagaattttaaggttgagtgtcctaatgtgaagtacaccgagactgagattcagtccgtgtacaactacgaaaccaccgaacttgttcacgagaacaggaatggcacctatcagtggattgtcaaacccaaatctgtcaaatacgaatttaaaaccaacatccatgttcctaaattaggggtaatgcttgtgggttggggtggaaacaacggctcaaccctcaccggtggtgttattgctaaccgagagggcatttcatgggctacaaaggacaagattcaacaagccaattactttgggtcgctgacccaggcatcagctatcagagtggggtctttccaaggggaagaaatatatgctccattcaagagcctgcttccaatggtgaaccctgatgatgttgtgtttgggggatgggatatcagtaacttgaacctggctgatgccatggccagggccaaggtgtttgatatcgacctgcagaaacagttgaggccttacatggaatccatggttccactccccggaatctatgacccggatttcattgctgccaaccaaggagaccgtgccaacaacgtgatcaagggcacaaagaaagaacaagttcaacaaatcatcaaagacattaaggagtttaaggaaagcactaaggttgacaaggtggttgtcctgtggacagccaacacagagaggtacagcaacctagttgtgggactaaacgacaccatggaaaacctctttgcttccttggacaggaacgaggctgagagatttccccttccaccttgtatgccattgcttgtgtgatggaaaatgttcctttcattaatggaagccctcagaacacctttgtaccagggctgattgatctggccatcaagaggaacagtttgattggaggagatgactttaagagtggtcagaccaaaatgaaatctgtgttggtggatttccttgtgggggccggcatcaaggtacaacttttgttgttgttgttgaactgttcgtttttcacgatatcagttgtgccacgaaaatttgtttggctagaatttagtccggctttctcttatgacaagttttgtataggctaa

SEQ ID NO: 4472 - DNA, 518 bp, Glycine max
gtggaaagagcaccattgttttgcacaacacatgcgaggattccctcttagctgctcctattatcttggacttggtccttcttgctgagctcagcactagaatcgagtttaaagctgaaaatgagggaaaattccactcattccacccagttgctaccatcctcagctacctcaccaaggctcctctggttccaccgggtacaccagtggtgaatgcattgtcaaagcagcgtgcaatgctggaaaacataatgagggcttgtgttggattggccccagagaataacatgattctcgagtacaagtgaagcatgggaccgaagaataatatagttggggtagcctagccgaatggtttatgttaataatatgtttgcttatgattttgcaagtgtaattgattgcatcttctcattaatgctttagagcaggacatattctgttttctagggacatgaatgaatgtagtataattttgtgtactttatcctaaaaaaaaaaaaaaaagggggggcccc

SEQ ID NO: 4473 - DNA, 542 bp, Glycine max
ctcgagccgcacacaaccactctttcttcttcttctcttaaaagagcctttgctttttctttaggcctttccgaattaagtacttgtttcattttctctcgaagcaagaaaaatgttcatcgagagtttcaaggttgagagtcctaacgtgaagtacacagagactgagattcagtccgtgtacaactatgaaaccactgaacttgttcacgagaacaagaatggcacttatcagtgggttgtcaagcccaaaactgtcaaatatgaatttaaaaccaacacccatgtccctaaactaggggtaatgcttgtggggtggggtggaaacaatggctcaaccctcaccggtggtgttattgctaaccgagagggtatttcatgggcaacaaaggacaagattcaacaagccaattactttgggtcgctgacccaggcatcagctattagagttgggtctttccaaggggaggaaatatatgccccattcaagagcctgcttccaatggtaaaccctgatgatgttgtgtttgggggatgggata

SEQ ID NO: 4474 - DNA, 517 bp, Glycine max
tctcccacgcgtccgcccacgcgcaaccgttcacaaatctttttctaagtgtagtagaggagaggaaccgcgccaaccctctcttcttcttcttcttcaatccttttataacatttatagtttcattcttaatcgttgggaaaaatgttcatcgagaattttaaggtagagagtcctaatgtgaagtacaccgagactgagattcagtccgtgtacaactacgaaaccaccgaacttgttcacgagaacaggaatggcacctatcagtggattgtcaaacccaaatccgtcaactaccaatttaaaaccaacacccatgttccaaaattgggggtgatgcttgtgggttggggtggaaacaacggctctaccctcaccggtggtgttattgctaacagagagggcatttcatgggctacaaaggacaagattcaacaagccaattactttggctccctcacccaagcctcagctattcgagttggatccttccagggagaggaaatctatgccccat

SEQ ID NO: 4475 - DNA, 473 bp, Glycine max
gcacacaacaaccttcttcttcttctcttaaaagttattaagagcttttgcttttctttctgcgcgcttttcccaattaagtagttcttccttttctcaaagcaaaaaaaatgttcatcgagagtttcaaggttgagagtcctaacgtgaagtacacagagactgagattcagtccgtgtacaactatgaaaccactgaacttgttcacgagaacaataatggcacttatcagtgggttgtcaagcccaaaactgtcaaatatgaatttaaaaccaacacccatgtccctaaactaggggtaatgcttgtggggtgggggggaaacaatggctcaaccctcactggtggtgttattgctaaccgagagggtatttcatgggcaacaaaggacaagattcaacaagccaaggtgtttgatatcgacctgcagaaacagttgaggccgtacatggaatccatggttccactcccc

SEQ ID NO: 4476 - DNA, 556 bp, Glycine max
cttatctttagttttttaaagactcaaatgagtttatggctataacagggaaagttccactcattccacccagttgcgaccatcctcagttacctgaccaaggcccctctggtaagtataatgtatctgattcataattgttcagtgaattttttcatcccccctttgattaattttctcaaattgtgtgaacaacaattattaaattacaggttccaccgagtacgccagtggttaatgcactgtcaaagcagcgagctatgctggaaaacatcctaagggcttgtgttggattagctcctgagaacaacatgatcctggagtacaagtgaagttcaaagtcttaagagtaatggtttgggatactgtagttgaatgagatcaaaacttaactcatatcccataccctcttttctgttatatatttatggcaaatgtgaaatttaaagatcgttggatctctctatctttgttcctgctgactaatttgagagcaggctatctatgctatgcatgcatgtaaaataatataaagttatcgaagtattttgtgctt

SEQ ID NO: 4477 - DNA, 836 bp, Glycine max
gccttacgtaggggatagcaagagagccatggatgagtacacttcagagatattcatgggtggaaagaacaccattgttttgcacaacacatgtgaggattcccttttagctgctcctattatcttggacttggtccttcttgctgagctgagcactagaatccagtttaaagctgaaaatgaggtctgcatgcattgctaaatgattttattgcttgattgtattcgtcattgtatttttttcagccttctgaggtcactatgttgtggtggttgatgcagggaaaattccactcattccacccagttgctaccattctcagctatctgaccaaggctcctctggtgagtttaatctaatcttattcaatgttgagtgcatatccttatttttatataggaattaagttgaaagaaatatgagttttagtattgagatacaattgtgaagttaaatcattgttcagtgaatttcccttttttccccttatcatttttttatcaaaaaagttggcaaggttactcacaacataactcttgcaggttccaccgggtacaccagtggtgaatgcattgtcaaagcagcgtgcaatgctggaaaacataatgagggcttgtgttggattggccccagagaataacatgattctcgagtacaagtgacgcatgggatagaataataattttgttggggtagcctatccgaatggtttatgttaataatatgtttgcttatgattttgcaagtgtaattgattgcatcttctcattaatgctttagagcaggacatattctgttttctagggacatgaatgaatgtagtataattttgtgt

SEQ ID NO: 4478 - DNA, 526 bp, Glycine max
cttctcttaaaagttattaagagcttttgcttttctttctgcgcgcttttcccaattaagtagttcttccttttctcaaagcaaaaaaaatgttcatcgagagtttcaaggttgagagtcctaacgtgaagtacacagagactgagattcagtccgtgtacaactatgaaaccactgaacttgttcacgagaacaataatggcacttatcagtgggttgtcaagcccaaaactgtcaaatatgaatttaaaaccaacacccatgtccctaaactagggttaggtaatgcttgtggggtgggggggaaacaatggctcaaccctcactggtggtgttattgctaaccgagagttagtttcatcttcaattcctaatcattaacgttttaatttatttcttcttcttcttattttttgtggctatggtaatggctataaaataatttaagggtaaccatgtatgtatgtgaattatgtttctcacttctcaggggtatttcatgggcaacaaaggacaagattcaaca

SEQ ID NO: 4479 - DNA, 1167 bp, Glycine max
gaccccacgaatttgcaaatctcaaacgaagcccttttctctttctcttcaatttcacccttttagcatttgtacattcctttcccttccttgaatcgttcttaattgcgagaggggatatcggagaagttgattggcctcccattaattgcaggtctgaatgatctgatggagtctaaagttgggaagaagaagtcgtctagtagtaagtcccttttgtacgaagctcctctcgattacaccattgaagacgttcgaccacacggtggaattaagaagttcagatctgctgcttactccaactgcatccgcaagccatcctgagattccctaggttgtgtgacgacatagcccccgtagtcttgcatctgctatattattctagtctcttcttttcccttttcttgttctcttccttgcccttttgttctctctacctatacagcaagactttgtttctttttgagtcaagatggctggctcagctattggtttcgaaggctacgaaaaaagacttgagatatcattttttgaaaatggtgtgtttgctgaccccggaggattaggcctccgagcattgtccaaagaccaattggacgagattcttaaaccagcagagtgcactattgttgcatcactttcaaatgattatgttgactcttatgttctgtcagagtcaagcctgttcgtctatccttataaaattatcatcaaaacttgtgggactaccaaattgcttctgtccatccctgtcattctcaagttggctgatgctcttgacatagctgtgaaatctgtgaggtacactcgtggaagcttcattttccctggggcacagtcttttcctcaccgcagtttttccgaggaggtttctgttcttgacagctatttcagcaaccttggttctggtagcaaagcatatgttatgggtgacccttcgaagtcacagatttggcacatctactctgcaagtgcacagaccaaaggatcatctgaagccgtccatggccttgagatgtgcatgaccggtttagacaaggaaagcgcttctgtgcttttcaaggagaatacatcttcagcagcttcgatgaccgaaaactctggaaccaggaagatccttccacagtctgatatatgtgaccttgaacttgacccttgcggacatta

SEQ ID NO: 4480 - DNA, 494 bp, Glycine max
ggacccaacgaatttgcaaaactcaaacgaatacgttttctctttctcttcaatttcacccttattagcatagcatattcatttccctttcttgaatcgttgtaagcgcattgcgattttgcccttatctttatttcaattttttgttctgtttttgttattcatttgggttaatttcgattcgaagcttaactgcgagaggggatatcagagaagttgattggcctcccattaataacagatctgaatgatctgatggagtctaaaggtgggaagaagaagtcgtctagtagtaagtcctttttgtacgaagctcctctcgattacatcattgaagacgttcgaccacacggtggaatcaagaagttcagatctgctgcttactccaactgcatccgcaagccatcctgagattccctaggtcgtgtgaggacgtagcccccttagtcctgcatctgctatatttttctagtctcttctcttctcctttttct

SEQ ID NO: 4481 - DNA, 527 bp, Glycine max
gtttattggacaaatagcaaaattatgtcgtggtggaggacgtggaaggccaaattttgctcaggctggtgggaggaagcctgaaaatttggcaagtgcccttgataaggctcggtcagagcttatagccactctatgtgaaaaagggaattgaatttaagtacacttagcagatagatctttttatgctaaagcagcagaaaatattgattctctgttgtcgaagaattcatcacaaaacaattcacaagcaaaaggggcggaagctgctgaagttttaacgagttttcttgcaattccagggggcatgtacttgaactttcaaaatagtatagagcatttgttcgtgtgactttattctcctgacaacctggcctgcattcacacattccaacttgtaaattttgacatgcgcatctcagattggttgcaggatgtaagtgcaaacactatatatatacacctgaaagatagttgagagtgaatgacggcggtggattcactcctttctcttttaaaaaaaaaaa

SEQ ID NO: 4482 - DNA, 655 bp, Glycine max
gatattctacttgctgataaagaacagaaaggtaaaaagagaaccagaaagtcagtccctagcaaatctcctggggaagcatctacagagacacctgccaagaagcaaaaacaaacttcccaatctgggaaaaagcaaaaaccgtcttctgatgatgaggaggatgataaagctgaactttcagatgcaaaaggatgtttctcaggaagatgaagatgttgcagtaccgaacaatgaaagtgatgatgagggaagtagatcagaggaacaggaagagaaatcaaagtctcgcaagcgtacttccaaaaaatctgttaaagagaattcagttagcaaagctgatagaacctcatctgccaagaagacccctgtgaaagatgccaagagcattgaaaaaattaaaaaaaagacaacttcaaaaaagagtgttgctgagcatgacagtgcttctgcctccgttaagtcaaagcaacctgcatccaagaaacagaaaactgttagtgaaaagcaggacactaaggggaaaactgcaagcaaaaaacaaactgacaaatcttcaaaggctttggttaaggatcaagggaaaagtaaaagtaataagaaggccaaggccgaacccactaagcaggacatgcatgctgtagttgttgataat

SEQ ID NO: 4483 - DNA, 395 bp, Glycine max
ctttagtgtggtctaaagaagtggaactctattcaactaatcagaattgcgtgaagatgctagttggaaataaagttgatagagattctgaaagggttgtgagcaaagaagagggtttagcacttgccgaggagttgggatgtctgttttttgaatgtagtgccaaaactcgagaaaatgtggagcggtgcttcgaggaacttgcactaaagataatggaagttcctagtcttttggaagaaggatctacagcagttaaaaggaatattctaaagcaacaacaacaaccccaagcatccgaatttggtggttgttgctcttaattgctgcaatgtgaacattgagtcataactagcgcatattggaatgttccctctgattcctgtatatgtaag

SEQ ID NO: 4484 - DNA, 450 bp, Glycine max
gtccgatttccttccatattccttggtccgaacacgtcacagttgcataccatcaatcttcccccaaattattcattcctctttttttccccattaacaatattaatcaatccaattaatttccatgaccatgtccataacactcttactccaagccaacccctcccacttgaaatggaaccagttaccttcccttccacgtcgcacaaggcccgaccgtttcactccaatacccgactcgaaacgccgcgtttcaagcgtcaaatgtatctcctcgtcgcggaagccggataacacgtttagtttgcagtccccgtgggaggttctggcgagcacggtgtcgaacacgctgaacgcgctgaagaaaccggccatagctgcggtgttggtggggctgttattaatgtacgatccaacttgcgccttcgcggcatctggagggagaatggg

SEQ ID NO: 4485 - DNA, 651 bp, Glycine max
tcaccattgtggcttgtctaggtcttcaatcgaactcgccaggaacggaactttctcagattgacacacaccatgaaggaaagtggtttcgagaataatgatacaaagcaagctgctgctgatgtgttgtttctatattcaaaatttgcaatggcatgcattggatgtaaggctcgtccatgtgatttgaggtttcatttgatgaaggagatttcaggtatgccctcttctctaaatagggagtcaccacagaatgcagcatctcctgatgcaatgggtgagtcatccagcacaggaacagcaagacttgatagaacagacagttttcgtgcactctagttgagagtggactgtgaccatgtttttggttggggctgtggcatagtaggtgtttgtgtcttggtaaaagcacttttttcctgcatattatcatattatgatgctatgcaggcagaattatgtttccaattaccatctatgcaatggctcacagattggtatttgttataccagtcagtcagtcatttcattttaaatttgttgtagtgtggttcaaatttggttcgtttcagtaagtaaatgttgctcttaatccttctacctggctcgagtataattacctctcataaaggatgtatgtagtattgtagt

SEQ ID NO: 4486 - DNA, 519 bp, Glycine max
ttgctctgtcaatgatgtgaaggttagcaacatagttgatcaaaggggacgaaatgctgttgctagtgctgagggattcttgaggcaaaagctatctggccaagggcttgcattcatattagcgggtggatctgttgtacagaaaaatcttgagatcggtgaagttctagctgttgatgtttcgtccattgttgctgtgacaagtgcagtcaatgtccaaataaaatataatggtcccgcaagaaggacaatgtttgggggtgacaatgctgtgacagctcttctaacaggaccaggcattgtgttcatacaaagtttaccttttcatcgactctctcaacgaattgctagggcggtgacatcacccaacatgagggaaaatcccaagtttttcatacagattgcagttttcttttttctggcgtatgttgtcattgtatcttcgttcccattaacagatgtatgaaattcagtttggtttttctttagtagtttttacttttctcttatcctaacata

SEQ ID NO: 4487 - DNA, 550 bp, Glycine max
gtggaatggttggcttgttggtagaagaaattgggcgtgtgggagttgttgaatcgggaagcaaaaaaaatgagaatccatcacatagcatgcctccaagacaattattcctatctgatcgtagacgagagcacgaaggaagccgcggcggtggacccggtcgaaccggagaaggttcttgaagttgccagctcgcacggcctcactctcaaattcgtcctcaccacccaccatcactgggatcatgctggtggaaacgacaagataaagcagctggtgccaggaatcaaagtctatggtggttccattgaaaacgtcaagggttgcactgacaaagttgaaaacggtgataaggtctctcttggagctgaaatcactatattggcccttcacactccttgccacacacaaggtcatataagttactatgttactggcaaagaggatgagcaaccggctgtttttactggagatacattgtctattgctagctgtgggaaattttttgaaggaactgcagaacagatgtatcagtcacttaatgtaacac

SEQ ID NO: 4488 - DNA, 1887 bp, Glycine max
gatcgaaatgctttgtctttggtgtgtaaaagttggtacaggatagagaggtgtacgaggcaaagggtgttcatatggaactgttactccatcactccggagaggttgatccagaggtttcctggtctaaagtctttgactttgaagggaaagcctcattttgctgacttcagtttggtgccttatgattggggtggctttgtgcatccatggattgaggcactggccaagaacaaggttggcttggaggagcttaggctcaagaggatggtggtctcggatgagagcctggagctactctctcggtctttcacacacttcaagtctttggttcttgttagctgtgaagggttctccactgatggccttgctgctttagctgcaaattgcaggtttcttagggagctggatctgcaagaaaatgaagttgaggatcacaaaggccagtggctaagttgctttcctgacaactgcacatcacttgtttctcttaattttgcttgccttaaaggagaggttagtttgggagcactagagagatttgtggccagatctcctaacctgaagagtttaaagctgaatcgttcggtgcccgttgatgcactgcaaaggataatgatgcgagcacctcaattatcggatttgggtattggatcatttgtccatgatccagaatcagaggcctacataaagcttaagaataccattctcaagcgcaagtccataaccagtttgtcaggatttttggaagttgctcctcattgtcttgcagcaatatatcctatttgcccgaacttaacatccttgaacttgagctatgcagcaggcattcagggtagtgatctgataaaactgattcgtcactgtgtgaaacttcagcgcttatggataatggattgcattggagacaaaggacttgatgttgtagctacttcatgtaaagatttgcaagaattgagggtttttccatctgttccctttggggatccagcagctgtcacagaaaaagggctggttgcaatatcaatgggctgccctaagcttcactcattgctctatttctgccaccagatgacaaatgctgcactcataacagtggctaagaactgcccaaattttattcgattcaggttgtgtatccttgatgcaacaaaacctgaccctgatacaatgcagccactggacgaaggttttggcgcaattgtgcagtcttgcaggcgactcaggcgcctatctctctcggggaaattgactgaccaggttttcctttacataggaatgtatgctgagaaacttgaaatgctgtctattgcatttgctggggagggcgacaagggaatgctgtatgtgttgaatggatgcaagaagcttaggaagcttgagataagagactgcccttttggcgacatggcacttctgacggacgtagggaagtatgaaacaatgcgatccctttggatgtcgtcctgtgaagtgactgtcggagcctgcaagttgctagccaagaagatgccaaggttgaatgtggagatcttcaatgaaaacgagcaagaagattgtagtctggaagatgggcagaaggtagagaagatgtatttgtatcgtacattggctgggaaaaggaaagatgcaccagaatatgtatggactctgtaggtgcattttttaggtcatttaatttcttgttattcagaagtttgtacttgtttttaggctgactgaattaatgcaattttagccgggtgtagtgttttgtaacttccttgcatttgctagttttatacatatgttagtttgtcttttctcctagatattattattccataatgccactttttattacgtatattattagagtattttgctttttaaaaaaaaaaaaaaaaa

SEQ ID NO: 4489 - DNA, 522 bp, Glycine max
gtttgggagcactagagagatttgtggccagatctcctaacctgaagagtttaaagctgaatcgttcggtgcccgttgatgcactgcaaaggataatgatgcgagcacctcaactatcggatttgggtattggatcacttgtccatgatccagaatcggaggcctacataaagcttaagaatacaaaaagagagaatggggaacgaggaagaagaagaagaagtggtggctgaagttgaagcagtggaagccgtgtatggaaccgattgcgtccttctccgttcattccctccccatttccacatctctctcaaacccagaaccgctgatgtttcatcccaacagtttgtggaagctgttctggagatacaagcaagctcacagtatccaaaagaaccaccttctgttgatcttgtggattgcaagggtctggatgaacaaagaaagaagtatctattaaattgcatacagagtaaagcctatgagctctccccttgtttaatgcttgtagctctatgtgag

SEQ ID NO: 4490 - DNA, 1549 bp, Glycine max
ttttcaccataagccatgaggctccttagcatcatcaccccctccttaacactattcttcatttacatagcgagccagttggctgagaaccacgctgatgttatgcaatggagccaccatcagaaaggtctcgctgtgcagagaaactatgccgttttaattccgaaggacaatactcagaaaaaggttaatctctcgcttcggatggatccttatgcaactaatgataaaacgaaatacagcgacgcgttcttgaacggtctcgagatcttcaaaatcagtgaggctgggtcaaacaaccttgccggacctaacccggacccggttcagactccacacaacaacatacccgccccaaagggaaaccgcagcagcaaaagcgcgtcgtcgatcggcatcgtggcaggtgtggtatccggcgtcgttttgatctcactcatcatccttttcctcatcgtcttcttccgacgcaagacaatcactacgcccaaggactacaacaagtccaagtcctccgcgacctccaagtggggcccactctccttcacaacgaccaagtcaaccaccaccacgaagtcctccctcccctccgatctatgccgccacttctccctcccggagatcaagtccgccaccaacaacttcgacgacgtcttcatcgtcggcgtcggcggattcggccacgtgtacaaaggctacatcgacaacggctccacccccgtcgccatcaagcgcctcaagccgggttcacagcaaggcgcgcacgagttcatgaacgagatcgagatgctatcgcagctccgccacctccacctcgtatctctcataggttattgcaacgagaacaacgagatgatcctcgtctacgacttcatggcgcgtggaacgctacgcgatcatctatacaacaccgacaacccccctttgacgtggaagcagcgcttgcagatctgcatcggcgccgcgcgtggactgcatgacctccacaccggcgcgaacaacacgatcatccaccgcgacgtgaaaactaccaacattttgttggatgataagtgggtggccaaggtttcggacttcgggctttcgagaatcgggcccacgggcaacgccaaggcccacgtcagcaccgttgtgaaaggcagcattgggtatttggacccggagtattataaacgacagcgtttaactgagaaatctgacgtgtattcctttggagtggtgctgtttgagttactctgcgctcgtccgcctctgatcagaactgcggagaagaaacaggtgtcgcttgctgattgggcgaggcactgctgccaaaatgggaccataggccagattgtggaccccactttaaaggggaggatggcgccagagtgtttgaggaaattctgcgaggttgcggtgagttgtttgttggacgacggaacgctgaggccgtcgatgaacgacgtcgtttggatgctggagtttgcgttgcagttgcaggagagtgctgagcagcgtgaaaatactaatattgttgataatgaaattaatgagagaagagaggaag

SEQ ID NO: 4491 - DNA, 1273 bp, Glycine max
caggaagaaaggtccttgtttggccacttgagtcgtcgcagtcgtcttccactggcaattaacaaattttctctgaactttcctctctctctttcccgtgctttctttcctagcaactactccaggataacctatgaccatgataaataataagtcttcatactttcactgactattagagttgtagtttttcaccataagccatgaggctccttagcatcatcaccacctccttaacactattcttccttcttctctttctctccatagagctccaagcgtacaccccagaagacaacttcaccatcagttgtggcaccaccgggatagtcttcgacggccaaaggacatggacgggggacgcagacacaaagtacttatctggtggtcaaggcagcaccgttttaacccaagcagcaacacaagatccttctgtcaatcaagttccctacaccacagcacggttatccccttctcagttcaattactccttccccgtttctgcgggccccaaattcgttcgcctcttcttctacccggctgattacccttcctttccccgcactgatgcctctttctccgttcaatctaacggattcaccttcttaaaaggtttcaacgcctctctaaacgctgacgcggaagccaccaaaaccatcttcagggaatatgtggtcaacgtcaacgacggtgagactctcatcctcagcttcactccctcgcaaccaaactcctacgctttcatcaatggaatcgaggtgctttccatgccaagtgatttgtattacacgtcagcaactgactcaacaggactcaagttcttgggaagtaccacgctgtacagcgtagaaaccagatttgcgctgcaggcggagtatagaatcaaaatgggagggcaagaaatatcaccactaaacgacaccggtttgttcaggaaatgggccggtgacgaagaagattatttgatcaaacaaaatccacagaataatgatctttcaagcaacacggatggtaagatgaacataaccgtgaatcctgattacgtggcacccaaggaactctacagaacagcgcgtaacatgggcacaaacgccactctgaacaaaatcagcaacctgacttgggagttcccggttgattctggcttcacttacgttctcaggctccacttttgcgagcttgaccccaatattaataaagatggtgacagggtgttcttcatttacatagcgagccagttggctgagaaccacgctgatgttatgcaatggag

SEQ ID NO: 4492 - DNA, 436 bp, Glycine max
tttactcattttgaattattttgtgggttcaacaataccttcagcagtggtactgtgggtaatgagagaattaccacctgaagaagctgctagcatacccgaagaatcaagtacaatagcttttgttgctgatagttcaattgcaatccatcatcctcaacgctgggctacagcaacaagcatgcagaatcagacatcaagagcgagtcctatatgattatgcattaacctttgcaaatatatcttggtctgctggagtttggacagcttaatggaatttcctcaggatgtttaaccctagagcgcagaagagagaaaatgataatgatggatgcaagttctcaagggacttgaggtttcccttcccactgtatttacaatctaaatctaaatgtatccagcagcaatttgatatatgaaaagttcttttccttct

SEQ ID NO: 4493 - DNA, 387 bp, Glycine max
ggaggcgactatctgtttgcttttcgaatgataatggttctatttcgacgagaattctctttttgtgattcattgtacctttgggaggatgttgatgacaaatcagaggaatctaaaggaagattaaagtcattgcgccactatggaaagtacgagagagaaaatatgaaaaatggaggaaagaatggtgaagatcctccccttcccatatctgtttttcttgttgctagtgtgcttaaagacaaaagcacaatgttactccagcaagcgcgaggcttggatgatgttgtcaagatattgaatgatgtaaatggaaatcttgatgccaaaaaagcttgtgtggctgcattaaaacttcacaagaaatatttgaaaaaggccaagaat

SEQ ID NO: 4494 - DNA, 1628 bp, Glycine max
gaaacatcataatgaaaaaaaaagaaaattacgacgtgggtctacaatctttgtgtctgttacttagtatcagtaagataggctttgtttcctccacatgagaagagaaagtgagaaactaccaatggttcttatttaaagcaaataaatattgaaagacaagaggtaacagataaatagagtgtgtgaataataataagtagttgtagctggggagagtggaacattgtcagcttcataataaagatgacaatgaagctggttttggtagttgttgttgaagttgcatgcttagtttctgggatcttgtcctttggatctgagacactctctgagctttctttcttagaaaatgatgtcgtctcaacaacaagaccttcctcttcatctcaacttcaacctcaacctcaacctcaacctcttatggtggacctcactctcattcatgaagctgattctaaaggagctgtctgtttggatggaacggtgcctggataccatttggatcgtggatttggatctggtgcagatagttggcttattcatttggagggaggaggatggtgtaataccatcagaaactgtgtctatagaaaaaatactcgtcgtggatcctcaaaatacatggaaaatcaaataccattcacgggaatattgagcaacaaacctgaagaaaaccctgatttctttaactggaatagagttaaattacggtactgtgatggagcatctttcagtggagatagtgaagatgagtctgcacagctccagtttcgaggacaaaaaatatggctagctgcaatggaggaattaatgtccaaaggaatgcagaaagccgatcaggcacttctctctggatgctctgcgggtggtctggcatccataatacactgtgatgagttcgggagcttgtttggaaaatcttccaaagttaaatgtttgagcgatggaggtttttttcttgatgcaatggatgtatctgggggacgcacactgaggactcttttcggaggtgtggttcagttgcaggatgtacaaaaaaatctgccaaaaagttgtctcgaccaactagacccaacttcgtgcttctttcctcagaatatgatcgaacatgttgagaccccattgtttctactcaatgctgcttatgatgtgtggcaggtccaagccagtttagccccaccttcagctgaccgccttggttcttggaatgaatgcaaatcgaaccatgcaaattgtagctcatctcaaatgcagttccttcaagacttcagaaatcaaatgctgggtgacattaaagacttctcaagctcatctcaaactgggctattcataaattcttgttttgctcattgtcagtctgagagacaggagacatggtttgctgatgactctccccttatcgaggacaagccaattgcagttgctgttggagactggtattttgatcgagaagttgtcaaagctattgactgtgcttacccatgtgacaacagctgccataatctggtgtttaactttaagtgaacaaaatttgttgtctcctcattacactttaatccttgtaattgcaatgagtattcaacaatcaacattcattaattattatggaaggacaattcttggtt

SEQ ID NO: 4495 - DNA, 508 bp, Glycine max
  unsure (1)..(508): unsure at all n locations
gaagacaagagataaataataactagttgtagctgctggggagagtggaacataaacatgacaatgaagctgctgcttttggtagccgttgttgaagttgcatgcttagtttctgggatcttgtcctttggatctgagacactctctgagctttctttcttagaaaacgatgtcgtctcaacagcaagaccttcctcttcatctcaacctcttatggtcgacctcactctcattcaaggagctgattctaaaggagctgtctgtttggatggaacggtgcctggataccatttggatcgtggatttggatctggtgcagatagttggctaattcatttggagggaggaggatggtgtaataccatcagaaactgtgtctatagaaaaaatactcgtcgtggatcctcgaaacacatggaaaatcaaataccattcacgggaatattgagcaacatacctgaagaaaaccctgatttctntaactggaatagagttaaattacggtact

SEQ ID NO: 4496 - DNA, 658 bp, Glycine max
aatccttgtttctgtttctgtataaataaataactaaacagacgattgagtgaatagtgtgattaagcttttgaggttgttgcgagaaatgagaatgaagaagctgattttaatactcatagcagcatttaccttcgtttctgtggctagatctgcgtctgatcatttcttcgaaaacgatggcgtttcactggcagttgctgcaacgcccggacctccacctctcatggtccccctcactcttattcagggagctgcttccaaaggagccgtctgtttggatggaacattgcctggttaccactttcatcctggatttggatctggggcaaatagttggctcattcaattggagggaggaggatggtgtaataccatcagtagttgtgtctttagaaaaactactcgtcgtggttcctcaaaatacatggaaaagcaactagcattcacagggttgttgagcaataaagctgaagaaaaccctgatttctttaactggaacagagttaaagtacggtactgtgatggagcatctttcagtggagatagtcaaaacgaggttgcacagcttcaatttcgaggacaaaaaatatggcaagctccaatgcaggaattattgttcaagggaatgcagaatgccaaccaggccctcttgtct

SEQ ID NO: 4497 - DNA, 944 bp, Glycine max
gtaagttcggaattcggttcgaggagatttttaacctctctctctctctctctttctctatggcatctgcgacgcgtctggtgcactgcgagctgcgctcggcgaggcccgcggttcggccgagggaaccggccggtccggttcaggttacgatccccaaacccaaacccaaagcggcggaggcggaaggcgcgaacatcgttttgcagccgcggttgtgcactctcagatcctacggttcggatcgagccggggtgcttatcaagactcgcaaggagggtgaccatgatgacgtgtcacccttcttcgccgcgctttccgactatattgagagctctaagaaaagtcaagattttgagatcatctctggtcgtctagctatgatggtgtttgcagcgacggtgacaatggaagtggtgacagggaactctgtgttcagaaagatggacattgaaggaatcacagaggctggtggggtgtgtttgggtgcagtaacttgtgcagcactctttgcatggttctccagtgctcgaaacagagttggtcgaatcttcaccgtcagctgcaacgcattcatcgattccgtaattgaccaaatcgtagatggtttgttctatgaaggcgacgaccctactgattggcccgatgaaccgtgatcaaatataccattcttaccattttacacactttgcagatttaatgtgtctaaaaaccatagacacagttagactaagatgtaatattaaataatatttagaaatatataagcagaggaagaatactaaaagtgatgtcatcccgatgcagaagaaaaaatagtaaaataaataaatgatgcgcaccatagatttgttgaacctaaatggattatgtaatgtgtaaacgattgtgtctcactttcttatttacatgtgttttattttttttaaaaaaaaaaaaaaaaa

SEQ ID NO: 4498 - DNA, 493 bp, Glycine max
ctctgtgttcagaaagatggatattgaaggaatcacagaggctggtggggtgtgtttggggcaggtaacttgcgcagcactctttgcatggttctgcagcgcccgaaacagagtcggtagaatcttcaccgtaagctgcaacgcattcattgactctgtaattgaccaaatcatcgatggtttgttctatgaaggcgaccctactgattggcctgatgaaccgtgatcattaagtatatataattcttaccatctttgcagatttaatgtgtctaaaaatcatagacacagttagaagatgcaatactaataatatttataaatatataggcagaggaagaatagcaaaattgatgccatcccgatgcagaagaaaaaatagtaacaaaaataaatgatgaagcatcatagatgttgaacctaaatggatactgtaaacgattgttttcactttcttaagaagcactcttagatgatgaaatatgttttattt

SEQ ID NO: 4499 - DNA, 693 bp, Glycine max
aaaaaacaacagcacatgttcatcctttgattatatcacatactcaccatggaggctaagttggccaccaccataatacttattttctccgtaatttggcttatgagggtgaatggcatagacccttgtgcctctcaagcggataattccgacctgaacgtgattcccatctacagcaaatgctcaccgttcaaaccaccaaagtcagactcatcgtgggacaacagaattataaacatggcctcaaaagacccactccgattcaaatacttgtccaccttagtgggccaaaagaccgtgtccacggccccaatcgcttcgggccagaccttcaacatcggcaactacgtcgtcagggtcaaattgggaacccctggtcaacttttgttcatggtcctcgacaccagcaccgacgaggccttcgttccatgctcgggctgcacgggctgctccgacaccactttctcgcccaaagcctccaccagctatggcccattggactgctctgttccccagtgcggtcaggtccgcgggctttcgtgccccgccacaggtaccggcgcgtgctccttcaaccaatcctacgcgggctcatctttctccgccaccctagtccaagactcgttaagattagccactgatgttatccccaactactccctcggctgcgtcaacgccatcaccggcgcctct

SEQ ID NO: 4500 - DNA, 1050 bp, Glycine max
ggcccgccctcccgacccagacagacgacaacagaaggggagcctcagcagaagcagaacgaggagaagcagaaagaggagcaaaagcaatggcgccgaagaagccgagaaccacgacaaggaaccctgatttggttagggggattggcaagtattcgaggtcgcagatgtaccacaagaggggcatctgggccatcaaggccaaaaacggtggcgttttgccccgccacgatcccaagcccaagcccgaggccccggcccagaagccgcccaagttctaccccgcggacgatgttaagaagcccctcgtcaacaagcacaagcccaaacccgcgaaactcagggctagcattactccagggactgtgttgatcctgcttgctgggaggttcaagggaaagagggttgttttcctgaagcagctcccatctggattgcttcttgtaactggtccctttaagatcaatggggttcctctcagaagggtgaaccaatcgtatgttattggtacatccacaaaggtggatatctctggatgtcaatgttgataaatttgatgacaagtactttgccaaggaagctaagaaaaagaaaacaaagggcgaaggcgagttcttcgaggcagagaaggaggagaaaaatgtgcttccccaagaaaagaaagatgaccaaaaaaccgtggacactgctttgttaaaggccattgagagtgttccagacctcaagtcttacttgggtgctaggttttctttgaaggccggagtgaagccccatgagctagtcttctagagtgctaaatttattttcttcattctgtttttgtcgaagcttggtcccaatagttgtactgttttttcatcatgataatgaacattgttcaagagttttttattccagttttggttctagtaattttatacttctatagttctactaaaaatgaagtaacattgatatgccagttccttatacattattgataatcgaatgtgacgttatctgagtgttaaggaactggcatatcaatgttacatcatttttagtaggaca

SEQ ID NO: 4501 - DNA, 947 bp, Glycine max
atcgagccgctcgagccgctcgagccaattcggctaggggaggggttgtctgctgttagatctgtacccgcctagccattgatttggaaaagtccaagcttcaaagatgagtaagcttcagagtgatgctctgagagaagctatctcaggaatcatggctgattccaaggaaaagaacaggaaatttgtggagaccattgaactccaaattgggttgaaaaactatgatccccagaaggacaagcgtttcagtggctctgttaagttgcctcacattcctcgccccaagatgaagatttgtatgcttggtgatgctcagcatgttgaagaggctgagaagataggattggactacatggatgttgaggccttgaagaagcttaacaaaaacaagaagttggtgaagaaactagctaaaaaataccatgcctttttagcctctgaagcagtcatcaagcagattcctcgtctcttgggacctggtctcaacaaggcagggaagttccctacacttgtgactcaccaagaatctctcgagtcaaaggttaatgagaccaaggccatggttaagttccagcttaagaaggtgctctgcatgggagtagctgtggggaatgttagcatggaggaaaagcaaatcttccaaaatgtacaactgagtgttaacttccttgtctctttgttgaaaaagaattggcagaacgttcgctgcctgtatctgaagagtaccatggggaaatcgtaccgtgtcttttgagtagtggttcttaaattcagtgaatttctgattgcacctaatatattgtcttgataggttggacagaatttttcatcgttctacagttttgttggatgagtattttttgggtagtatttgcttgttatttggcatttatgtttcaagtgctttgcgacatcggataatttagcgtgtaagtttagctctc

SEQ ID NO: 4502 - DNA, 407 bp, Glycine max
cggtccgaattaggggtcgaccacgcgtccgcccacgcgtccgggagaagcagaaagaggagacgaaagcaatggcgccgaagaagccccgaaccacgtcgaggaaccctgatttggtcaggggaattggcaaatattcgaggtcgcagatgtaccacaagaggggcatctgggccatcaaggccaaaaacggcggcgttttgccccgccacgatcccaagcccaagcccgaggccccggcccagatagccgcccaagttctacccggccgatgacgtgaagaagcccctcgtcaacaagcacaagcccaagcccgcgaaactcagggctagcattactccagggactgttctgatcctgcttgctgggaagttcaagggaaagagggttggtttcttgaagcagct

SEQ ID NO: 4503 - DNA, 605 bp, Glycine max
  unsure (1)..(605): unsure at all n locations
gtctcttgggacctggtctcaacagacgaggaatctgcttgatgactgcttcagaggctaaaaaggcagattagtcgtctcttgggacgtggtctcaacaaggcagggaagttccctacacttgtgactcaccaagaatctctcgagtcaaaggttaacgagtccaaggccatggttaaatttcaacttaagaaggtgctctgcatgggagtagctgtggggaatgttagtatggaggaaaagcaaatcttccaaaatgttcaactgagtgttaatttccttgtctctttgttgaaaaagaactggcaaaatgtcaggtgcttgtatctgaagagtacaatggggaaatcttaccgtgtcttttgaggaattttttttttaatccggtgaatttgtgatcgcgcttgatacattgattatcttaatagctagatacacactatcatcttgttacagttttgttggctggatttttatgttagtgtttcgtgttcgtgttcatgttcaaacatttgataatgatatgcgctgtttttggtgccccctttgtttttactcatgaatgcgtgttctaaaatggcctcaaaaaaaacggagagaacnaa

SEQ ID NO: 4504 - DNA, 384 bp, Glycine max
ttgaggcagagaaggaggagaaaaatgtgcttccccaagaaaagaaagatgaccaaaaaaccgtggacactgctttgttaaaggccattgagagtgttccagagctcaagtcttacttgggtgctaggttttccttgaaggcaggagtgaagccccatgagctagttttctagagtgctaaaattattttcctcattctgttttgtcgagcttgttcccaatagttgtactgttttttcatcatggtaatgaacattgttcaagagttttttctttctagtagttttattcttctgtagttctataaaaaaaatgaaataacattatatgccagtgccttatacattattgataatcgattgtgacgttatctgacttttaaaa

SEQ ID NO: 4505 - DNA, 613 bp, Glycine max
ctcgaggtattttttctaccccgaacatctgctgttgggttttatccctccattgctttgcactgccgccgataacaattttctgtatcgtgtattttttttttctttgttcacagctctgcgagatcttcattcgccgattttaaaagatgagtaagcttcagagtgatgctttgcgtgaagccatttcaggaatcatggccgattccaaggagaagaatcgcaaatttgtggagaccatcgaactccaaatcgggttgaaaaactacgatccacagaaggacaagcgtttcagtggctctgtcaagctgccccacatccctcgccccaagatgaagatttgtatgcttggagatgcccaacatgttgaagaggctgagaaggtaggattggactacatggatgttgaggccttgaagaagcttaacaaaaacaagaaattggtgaaaaaactagccaaaaaatatcttgttactcaacttcttcaacaagtgattattagtgtcaaacaatatcatgtacgaaattaaaagtgtactatagggactaagtaattataccttactaatttatcaccggttaaaaacaagtcattgtctcttattgtgggatt

SEQ ID NO: 4506 - DNA, 398 bp, Glycine max
caagtgttagatctgtacccgcctagcaattgatttggaaaagtccaagcttcaaagatgaggtattcattctctcatcttcaacttatctttgttcaaatttcttagtttgttcgtacgttttattgtgaaagcaatgttgttgattgtttttcgttgatagctgatgtgtactttgcgtggtcttactgtgtatgatgttaatgaaaattgttcggtgaaaattgtgcatttggaaaatctatgttttgtgttttctgatctgtattgggtgttggttgttatagtaagctttagagtgatgcttttagagaagctatctcaggaatcatgactgattccaaggaaaagaacaggaaatttgtggagaccattgaactccaaattaggctgaaaaa

SEQ ID NO: 4507 - DNA, 446 bp, Glycine max
tggtgagtaacgctaacactggcaaaggcaagatgattcagacgtatggattggtgtatgcttcaggaaggagttaaaccgttcattatggtcttgtcttcccccaacaaccgtttccttctcttttattcatgacacaccacactctctctcacatcttccatctcctccatctttctcacacttttctcccacatcacaatcacatcattacgttgcattaatacaatggaccaaacaaccgccgctgccaacgaggttgtccgcgagttccccggcctcctccgcgtctacaaagacggccgcgtcgagcgcctcctcggcaccgaaaccacccctcccggcaccgaccccggcaccgccgtccaatccaaagacgtcaccatcaacgccgaaaccggtgccggcgtccgcctctaactccctcgcaccgccgccgcccaaaa

SEQ ID NO: 4508 - DNA, 387 bp, Glycine max
gtaaaatctacaaacatcttgttggatgaaaagttacaagcaaagttatctgattttggtctatccaaaattatcccaattgatgggggaactcatgtgtcaactgttgttgctggtactccaggttatctagatcctgagtactacatatccaatagattaacacagaaaagtgacatttatggctttggagttgttcttctagaaataatcacttgtcaaccagtaatagcatggaatgaagaaaggactcacataattcaatgggttagatccctgattgggataggggatatcaagggcattgttgactcaaggttagaaggagattttgacattaactcagcttggaaagccgtagaaatagcaatggcgtgtgtttcccta

SEQ ID NO: 4509 - DNA, 1329 bp, Glycine max
aaaagggactccactcacaactgaaaccaaaactgaaaaaaaaaacaaacaataccataacatggcttcttccaccatcacctcctccttcctaacatcacccccttcatctctcttcaacaaatcatcatccccttccttccatgccacccctactctccgccccctcgcgccacgcgcctccatgtccgcctcagcgccgccctacgacttcggatcgttccggttcgatccgattagagagtcgattgtgtcgcgcgagatgacccgcaggtacatgatcgacatggtcacccacgccgacaccgacgtcgtcatcgttggcgcgggctccgcgggtctctcgtgcgcctacgagctctccaaaaacccctccatcaacatcgccattgttgagcagtccgtcagccccggcggcggcgcctggctcggcggccaactcttctccgccatggtagtgcgtaagcccgcacacctcttcctagacgagctcaatgtggagtatgacgaacaagacaactatgtggtgatcaagcacgcagcattgttcacatccaccatcatgagcaagctcttggcccggccaaacgtgaagctcttcaatgccgtggcggcggatgacttgattgtgaagaacgggagagctggtggagtggtgaccaactgggccttggtttcattgaaccatgacactcaatcctgcatggaccccaatgtgatggaggctaaggtggtggtgagttcttgtggccatgatggaccctttggcgccactggggtgaagaggctcaagagcattgggttgattgatagtgtgccagggatgaaagcccttgacatgatcaaggcagaggatgccattgtgaagctcactagggaggttgtgcctggcatgattgttactgggatggaagttgctgagattgatggtgctccaacgatgggtccaacatttggagcgatgatgatgtcagggcagacatcagcccatctggctttgagatcattgggacttccccatgctttggattctgtgggaaacgttcatcctgagcttgtcctagctgctgctgaatccgctgaaattgctgaggcttaattaatgttgcaacaaattaggttaaaatagtatcaatgcttgcaactagaaataataattgtagacttgtacttagggaattaagctttgaaggtgttagtagtgatctattggggtggttgatgcgactctatgaagtttgttaatactatatgaagctttgagggtgttgctagtgatctattgtgtcttactttcctcgaagcctaatttcattgggttttttttct

SEQ ID NO: 4510 - DNA, 340 bp, Glycine max
ggcgatttgcgtaattgtccaccacctcaccaaccaagccgtcgttctgtttagtcactgaaaaaaaaaaaaaacttccaccgtcggcggccatggcagcgctgtcctccgccgtcactcttgccgccaaaccgctctcactaccccaaaatcaccgcgccagagtagcggcggcgttgcactctcccaagcgccacctcaagagaacggaattcaagttcttcgccaatggctcatccgcctctctccgctcccttccccgcctctacgtttcatccaacgacgcccgcttcaattccggtcccgaggagagccagcaacaacagtcgtcgagttttgc

SEQ ID NO: 4511 - DNA, 710 bp, Glycine max
cctcgagccgaatcggctcgagataaatcaatccttgttcactctatttcttagctccaacaacatcactaaaaaaaatggcctctctccgttttctcttctttgcttctttcttcattgttttgtcactttccatcaacattggtgaggtccaaggtgcaaatagaaaacttttggcaccaacatttcctgatataggcaacattcctggcgtgcaatatcctcctttccccccagtaaccgattggccagagtacaggttgccatcattcttaagacctaattaccccgcaattcctgcaaattattaccgctacactccccctgccaaaacaaccacaatcacatcttccaagccttgatggccacatgcatgcaatttggtatatacatattattgttatgattgttagcatttcaaataaatcggttcatcaatatggccatgcacaagcattcgatctctctccaagtttaattattactttgtggtttatttaatctgtattccttagattaatggggtgaattcaatttgcgaaatccttgttgatcccgtgatgtttctctccccattatatgttgttcacaatgttcggtgtatgaatgaaaaaaaatgggcttgtttctttaatgttactagaaattaatgtatcatcactcccgagtgtgttgaagtaaatgaaaggctggaaaatacgcgctattct

SEQ ID NO: 4512 - DNA, 701 bp, Glycine max
  unsure (1)..(701): unsure at all n locations
ctggtactggtactgttgtcggatcgaaaaccctaaattgaattcgaatacacaacatgcagcaggggggaggatctgagacggaagtaacatgggaagaccagcagaacatcaacaaattcggaaggttgaataatcgctttcacgagcttgaggatgagatcaaaatcgcaaaggaaacaaatgataatttggaggatgcaagcaacgagttgattctcacagatgaagaggtcattcggtttcaaataggagaggtttttgctcatgtgccaaaggatgaagttgagaacaggatagaacagataaaagaggtgacaagccagaaattagcaaaacttgaagaggagaaagaatctattcttgctcagatggctgaactcaagaaaattttgtatgcgaagttcaatgactcgatcaatcttgaggaggattagtaactttcttcttgttgatagatttctagttgttgttttcttgttaatatgacctaatggacatttggcatttttgagtcatattgtctcttatcatttgattttaggatgtatgttatcttgcttgaacctctttcactccttggcctctgtttctgctttctttggcttcttgtgtgaatttcattttccctttattgtgtcctgaaaggggggaaattgcctttctggtttgagaatcccaagatgtttgacttcnnnnnn

SEQ ID NO: 4513 - DNA, 626 bp, Glycine max
cataaatatttggtttatatacacatatgtacagaacatcctctataacttagcttatacaatatacacaacaaaaggctcggtttcgcacagcacacttccctctccaatggaaaatcaattcccagttatcagtgattcctactgtgttccttatcttatcaatctacgaatcaatacagaaaaaggtatcacttacgacgcaaacaatgtccgtcacttttatatcaaagataaattattcacacttcacaagcgacgtgtcctgtgtgataatcaaggaaaccccatcgtcactctatacaagaagagaatgacattgcatgggcgatgccaagtttttaggggttataaaagcaaagatttctctcaattgctcttttcagtgaagagatcagcaatgagaccgagtgggatggttaacttacaggtcttcctcgctatcaaccaaagagaaagtgcctgtgactttagagtcaacgtctaatgtgtggagatctcagatcatgcactgtttatgccggtgaatctcctagacttgttgctacgatggagaatatgtggcggcttcaatgttttggtctattcctaggtggacgatccattcatagtggcactacttatga

SEQ ID NO: 4514 - DNA, 849 bp, Glycine max
ggttctgggtgtttttcttatctgtgttttgtttcaattgcgcgaggtgggtttttctagggtttggaggctatgccgaaagcgggttgaataagctcaggaatttgagattttgtgggtggtacttgacatggattgaggaatgaagcgactttgtcatgttatttggttggcgattgtgttgttgctaggaaattttcgaaaatgtgtttctcagttgccccaagtcctgattagtctttccccccaagtgtttggatatgttctatgttgtggagtatcggtgttagtcgaggctgggcacttcatggacgatttaagggatctgggacagtttgaactcctaggtgaagaaaatgattctcacaaagcagtaccgatgcatacactcagctagctgtcaatgtactaaagggcatttaagtgaagatgtgatattcttagtatttcataatttgaattggaatcccaagctaattgctactctatcatgtgtgtgcaaatggtttgatgatcttgccaagcgagttctatggagagagttttgtcgaacaagagctccgaaaatgttgtgtgatctgcaatctaatgggagccacattgttgatgggaactggagggccctagggaagcttcttatatactgttcaggatgcacaaaaggtggcttgttcaatagcattcagattcctggtcactttgtttatcagacacgattttctagaacatcaggaaagagctttcttttgccacaatgcaggactgatgttttgtatgtatgtgatccttgtgagcatcttgaccaaggtgaggaaggagatgtaggattcttccgtggcatttttaagt

SEQ ID NO: 4515 - DNA, 480 bp, Glycine max
ataatttcaaatctatctccaatcctttcaaccttctctctttctctctctgtgtattagttgttgctgttcacaccggtaatttcactgtgttctgttatatgcatctctttaccaaattgcccctttttctagggtttggaggctatgccgaaaacgggttaaataagctcggaaaatgattctcacaaagcagtaccgatgcatacactcagctagttgtcaatgtactaaagggcatttaagtgaagatatgatattcttagtatttcataatttgaattggaatcccaagctaattgcaactctatcatgtgtgtgcaaatggtttgatgatcttgccaagcgagttctatggaaagagttttgtcgaacaagagctccgaaaatgttgtgtgatctgcaatctaatgggagccacattgttgatgggaactggagggccctagggaagcttcttatatactgttcaggatgcac

SEQ ID NO: 4516 - DNA, 308 bp, Glycine max
ggttctgggtgtttttcttatctgtgttttgtttctcttcgaattgcgcgacgtgggtttttctagggtttggaggctatgccgaaagcgggttgaataagctcggaagtgaagaaaatgattctcacaaagccagtaccgatgcatacactcagctagttgtcaatgtactaaagggcatttaagtgaagatatgatattcttagtatttcataatttgaattggaatcccaagctaattgcaactctatcatgtgtgtgcaaatggtttgatgatcttgccaagcgagttctatggaaagagtttt

SEQ ID NO: 4517 - DNA, 389 bp, Glycine max
ccaacaacagggtttgtcctgttttctcataagtcataatgcctttctttctttggattggtagcaattttttcttacgtaataacacattgcctaatatttgtaacagtgtgactgcatactcgattcaagatgatgcactgaagactggtgaacttgactacgtaaatggagctgcacttgttcggtattccatatcaggaaacttcctaggacttcctgctgtaactgtaccggtatgattatgttttccttttacttagttactcctttaatgttacttacttacacttacaccccaatagttagcttgtgtttggtctacctatcaaatactacattattttttgagtttaacagagtcagtacataagtttgtatgctatcaa

SEQ ID NO: 4518 - DNA, 554 bp, Glycine max
cttgaagatcgagattttgcatcaaggaagggtgatcccatgccattccctcctggggttggtggaggacgcatagttggagatgccaaccttgatacttttgaggtgattacggccgaaaaagcaattgacgaaaacaatgttggtaatcggatgcttcgcaacatgggctggcaggaaggattggtaccgttttgttcctcctcattacatgagtgtttacgtattacatttttttgttattcacgttgtttggtagagcttgatatattattccaaatttcctcttttcagggatatgctagtactttgatcctagacctagataatattttcctctagtttagatatatgtgtatataatacacacacacacacgtatatatattattttcttcagtcattttggacctcaagaattggatgggatacccctggaaatttggtattttctcaacatatccgccgaaggattctaacatttcttcattatggttgtttcttgtattatggataatttgattacagggactaggaaaggatgggagtggaat

SEQ ID NO: 4519 - DNA, 819 bp, Glycine max
gctttctctctctctctctgaattggaattcaactcttctctttctctttctcttctcttctgtcgaagaagaagaagcagaagtagttacagaaacatgctggagaatcttcaggctcctccgccaacggaatcggccccagtggtgaagcgctatgctcctcccaaccagaggaaccgttctgccaacaggcgcaaatcatctgatcggcttgatcggacaaacagtatcgggaatgacttagaaaagaatcaagttgcttattcaagaagtgttcacattccagatcacggagatgctggtagcagtaatcttcttaatgagaatcactattcaagattaatagctttagaagggtgtagttgtagtgcagctgcccagctgcttaatgatcgttggacagctgcactacaatcctacaataatcccaaagattcatctgaaaagccagttatgtattcgagtgggacatcaggatggactccgttcagaccccctcaacaggacttccttggagaacttcgtcgccaaatgcacagtgctaatcctagtttcaccacatgatggttggcttggattgtttaataaagtttttggatgatcgtggatttgctgaatgctttaagaacactttgatgctcagctacttattgtttgtgtttttgtgacttgttttgtcaaactcattactaatatatgtatcttgaaaatcagattcagaatatcaacctcgcctgtgtatgtgtaaattggggtgtcgctcattcaggaattgtatttaaagatttattctgtatcttacaaatagtagctttcat

SEQ ID NO: 4520 - DNA, 641 bp, Glycine max
  unsure (1)..(641): unsure at all n locations
gggaccaacgattggaagtttccttttgattaaacttaaagatcaagcgggccggcccagacatgccttaattgattatggtaaaaggaaagggaaagaggatgtgctttctctctctttgaattggcattggaattcaactcttctctttctctgtcgaagaacaagtagtttcagacagatgctagagaatcttcaggctcctccgtcaacaacggaatcggccccagtggtgaagcgctatgctccacccaaccagaggaaccgttctgctaacaggcgcaaatcatctgatcggcttgatcggacaaacagtgtcgggaatgacttagaaaagaatcaagttgcttcttcaagaagtgttcacattccagatcacggagatgctggtagcagtaatcttcttaatgagaatcactattcaagattaatagctttagaagggtgagttgtagnngcannnncccanngntnaanatcnnnggacaactgcactacaatcctcaaatattccaaaaatcatttnaaagccaatatgtattcagtgggacatcggatggactcggtcaaacccctaacaggcttcttgagactttctcgcaatgacaggctaatctagttcacacatatggttgcttgat

SEQ ID NO: 4521 - DNA, 447 bp, Glycine max
caataaggatgcaatggctctcctaagctccgatcaggtcttgaaggacaacaatgccgccgacccaacttccgttaccactcttcacctcactcacaaagctctttccgacataacgtgtttggccaatttcgtaaacttggaaaagcttgacctcaagctcaacaatctcacttctcttgagggattgagatcatgtgttaatttaaagtggctatccgttgtagaaaacaaattagaaagcttggaaggaattcaaggacttacgaagctcactgtgctaaatgcaggtaaaaataagcttaaatctattgatcaggtcatgtcagttgttagtctccgagcactgattttgaatgaaaatgagatttcctctatttgcaaacttgatcagctgaaagacttgaacactcttgttctatccaaaaatcctatacgtaaaattgg

SEQ ID NO: 4522 - DNA, 734 bp, Glycine max
gacaacactcatagtagagtaaccaaaaggagagtgcaataactcgttgtacattcctagtgtgtgggagagacatggctaagatgtgtgttttggtgttggttcttgctctggctgtggccacaagtgccagaaacgttcccaaccccaaggatgctggtcttaaggaccagaagaacttcatcagctatggtggagttggtggttattccgggattgggaacaatggactgccttttggaggagctggtgccggaataggtggtggttttggcggaggtggtggacttggtggtggcctcggcggtcctaccggtgggatcggagggtttggcggtaccggtagcggtgtcggtggcggtattggtggtggcgttggaactggcgttggtggtggcagcggtgttcttcctttcccttgaaatgatgaacatgcatgcatgcatgcatatatgctccgtcacgtttctttggattacactagtctttatttttcgttcgggaaataattgtggtttgtgcttgtacgtgtcgttaatcgttcaagctttgttctagtgtttctctcgcctgtggaaagtaaaaaatagttgtaatgtgtcattctgtgtctttcatttgcttaggttttgtgtcagccatagtcactcataaacgtggttcttttacatatggaatatttcatatttagcatggaactaatgccctcaatatatgagtcccatttatttgct

SEQ ID NO: 4523 - DNA, 385 bp, Glycine max
gacatcactcatagtagagtaacggaaaggagagggcaataactcgttgtacattcctagtgtgtgggagagacatggctaagatgtgtgttttggtgttggttcttgctctggctgtggccacaagtgccagaaacgttcccaaccccaaggatgctggtcttaaggaccagaagaacttcatcagctatggtggagttggtggttattccgggattgggaacaatggactgccttttggaggagctggtgccggaataggtggtggttttggcggtaggtggtggacttggtggtggacttggtggtggacttggtggtggcctcggcggtccctcccgctggaatcggagggtttggcggtaccggtagcggtgtcggtggc

SEQ ID NO: 4524 - DNA, 709 bp, Glycine max
actcttccgtcttcctcttctaggttattacgcaccacccaccacgtatccctgaaaagagagacaaacacactaagccgaagccaaagcagcaatggttacagacacaaagcctttagcctatgctgctaataatggataccagaaggaagcttttgatcccagtgctcctccaccgtttacgattgcagaaatcagagttgcaataccacaacattgctgggtcaagaatccatggagatccctcagttatgttctcagggatgtgcttgtaattgctgcattgatggctgctgcaagtcacttcaacaactggcttctctggctaatctattggcccattcaaggaacaatgttctgggctctgtttgttcttggacatgattgtggccatggaagcttttcagacagcccttttctaaatagcctggtgggacacatcttgcattcctcaattcttgtgccataccatggatggagaattagccacagaactcaccatcaaaatcatggacacattgagaaggatgaatcctgggttccattaaccgagaagatttacaagaatctagacagcatgacaagactcattagattcactgtgccatttccattgtttgtgtatccaatttatttgttttcaagaagccccggaaaggaaggctctcacttcaatccctacagcaatctgtttccacccagtgagaga

SEQ ID NO: 4525 - DNA, 424 bp, Glycine max
ggaagatttccttcttcctattctaggtttttacgcaccacgtatccctgagaaaagagaggaaccacactctctaagccaaagcaaaagcagcagcagcagcaatggttaaagacacaaagcctttagcctatgctgccaataatggataccaacaaaagggttcttcttttgattttgatcctagcgctcctccaccgtttaagattgcagaaatcagagcttcaataccaaaacattgctgggtcaagaatccatggagatccctcagttatgttctcagggatgtgcttgtaattgctgcattggtggctgcagcaattcacttcgacaactggcttctctggctaatctattgccccattcaaggcacaatgttctgggctctctttggtcttggacatgattgtggccatggaagctt

SEQ ID NO: 4526 - DNA, 1666 bp, Glycine max
ttttctgctttcagctgctacatacatcacctaccccttctctgttcattgctcaattgtttccctcacaactcataacctctttcccatttaacctttgaaaaaattccatactgtaacaacagatcaccatggctctatcacgtttgtcccaccgcagcatcggatccactctcacaaaacccttctccgccgccgccgcctccgccgcctcctcccgttcgatctccacctcggacacccccttaacaatcgagacctctgtccccttcaccgcgcacaactgcgaccccccgtcacgcgcggtcgcgacctcctcctcggagctcctcaccttcttccgcgacatggccctgatgcggcgcatggagatcgccgctgactccctctacaaggccaagctcatccgcggcttctgccacctctacgacggccaggaggccgtcgccgtcggcatggaggccgccatcactaaaaaggactccatcatcaccgcctaccgcgaccattgcatcttcgtcggccgcggtggcacgctcctggaggtcttcgccgagctcatgggccgcaaggaaggatgctcgaaggggaagggcgggtccatgcatttttataagaaggagagtgggttttatggtgggcatgggattgttggggcgcaggttccgttggggtgtgggttggcgtttgctcagaagtattctaaggacgagagtgtcacttttgctatgtatggagatggcgctgccaatcagggacagctctttgaggcgcttaatatcgccgcgctttgggatcttcctgctattttggtctgcgagaataatcactatgggatggggactgcggagtggagagctgccaagagtcctgcttattataagcgtggggattacgtgcctggcttgaaggttgatggtatggatgttcttgctgttaaacaagcttgcaaatttgcaaaggaacatgctttgaagaatggaccccttattcttgaaatggacacttacagataccatggacactctatgtctgatcctggcagcacataccgtacacgtgatgaaatttctggtgtgagacaggagcgtgatccaattgagagagtaagaaagctggtattgtctcatgatattgctgctgaaaaggagctaaaggacattgagaaagaagtcagaaaagaagttgacgaagccattgctaaagcaaaggagagtccaatgccagatccatctgatctatttaccaatgtctatgttaaaggttacggagttgagacatttggtgctgataggaaagaagtgagagctactttaccataattcagaactttgtcctttgaatatcttgccaccttgtcgtagcagactcttcaaaatagtgaagaataaaaggttctacagagggtcatctctctcccctattcgttgagtttctgcccgcgtgtatagtgtgaatttattcatatgcttggttagcaatggggcggggtttgttatttttttgtcatgtaatatttgcggatctaacagccaaagcatcattgtgattgatgcaactggggtgttctgcaaatttgaggaatacattgtgcactactgaagatatgtagttcagaatattttagacacgtcaaacagttcaaaaatctatatagatatatatt

SEQ ID NO: 4527 - DNA, 1892 bp, Glycine max
cgcgcgcgcgtcccacgaattttccatcacttttttaatctctttgaagacccctctcgtcgtattctttatccctacggacgccgctcggtgatccacctcgatcggagcccctctaccgtggagaccgtcggtgcccttcacctcccacaactgcgacgcgcctccacgcgccgtggagacgtcctcggcggagctcttctcgttcttccgtcacatggcgctgatgcggcggatggagatcgcggcggactcgctctacaaggccaagctcatacgcggcttctgccacctctacgatggccaggaggccgtcgtcgtcggcatggaggccgtcatcacgcgcaaggattgtatcattaccgtctaccgcgaccactgcacctttctcgcccgcgggggaaccctaatcgaggtcttcgctgagctcatgggccgccgcgacggctgctccaaggggaaaggaggactccatgcacttttataggtaagggacgtggcttctacggtggccatggaatcgttggggcgcaggttccgctggggtgtggcttggcttttgctcagaagtattgtaaggatgagaatgttacgttttctatgtacggcgatggtgctgccaatcagggccagttgttcgaggcgcttaacatttccgcgctttgggatctcccctccattttggtctgcgacaataatcactatggaatggggacagctgagtggagagctgctaagagtcctagttattacaagcgtggggattatgttcctggattgaaggtagatggcatggatgctcttgctgtgaaacaagcttgtaaatttgcaaaggagtttgctctgaagaatggtcccattattctcgagatggacacatacagataccatggccactccatgtctgatcctggcagcacataccgtacacgtgatgagatttctggtgtaagacaggagcgtgatccaattgagagagtaaggaagctactattgactcacgagattgctactgaaaaggagctaaaggacattgaaaaggaaataagaaaagaagtagatgaagccattgccaaagctaaggaaagtcaaatgccagagccatctgatttatttaccaatgtatatgtaaaaggcttcggtgtcgaggcttgtggcgcggataggaaagaacttagggctactttgccctgatggaaaacttttccttttcctttcttttccttagttttggacaaatcaaaataatgaagaataaaaggttcagaagatcatctctgcctatttgttgagctttcccctaattgtatatgaaattgattcttcagtagcaatggggcggaaattaatgttttgccatgtaattttggaggatctaacactcatatgacctcaattgattttgcaagcaactagtctcctgcaaatttggaggatttcgttatgcaaaacctccatggttggcaaaattttgccattattttaattttaggtattcaccagattgtgttcaaatgaaatctttttttttttggctattaacaattcatgtttctttggacagttaaaaatatgatgcctgtacattgcacagattgaattgttgatacaggttggattatgttattttatttttctgctctttacttacgtttatgtctcgctatatatagggaaataaattctgttgattttattttagtgctttttatgtatttttattcaacctcctgaaatgtttttaacttacagatttcacgattatagtgaaattttaatgtgaattgtatatggtgaatcagttgtaatattacaataatcaagtcatattccattagatgatgtgggttatatggatcatatgatgtcatatgatgtcatttaacatggtt

SEQ ID NO: 4528 - DNA, 597 bp, Glycine max
cctcagtccacacctaaccctccaacctcaaacaaagtaacaaaaacccattttttcctcttctttgcatcatcattctcattccttctttctaaactaaccaactttttttcaaacaaattcgattctttcttcatttttaacctaattttcttttcgatccaaaaaatggctctctcgcgcgttgttgctcaatcgtcgcaatcgaatcttctgaaacccctagcgtcgtacttatcactacgacgccgttcggtgttcgacctcgtcggagcccctcaccgtggagacctcggtgcccttcacctcccacaactgcgatgcgcctccacgcgccgtggagacgtcctcggcggagctcttctcgttcttccgtgacatggcgctgatgcggcggatggagatcgcggcggactcgctctacaaggccaagctcatacgcggcttctgccacctctacgatggccaggaggccgtcgccgtcggcatggaggccgccatcacgcgcaaggattgtatcatcaccgcctaccgcgaccactgcaccttcctcgcccgcggcggaaccctaatcgaggtcttcgctgagctcatggg

SEQ ID NO: 4529 - DNA, 283 bp, Glycine max
gttattttggaggatctaacactcatatgacctcaattgattaagcatgcaactagtgtcctgcaaatttggaggatttcgttatgcaaaacctccatgattggcaaaattttgccattattttatttctaggtattcacaagattgtgttccaattgcaaccctttttttggctataagagtctctttggacagttaaaaatttgatgcctgtacattgcaagattgaattggtgatacaggttggattatgttattttctttttctgttctttacttcctt

SEQ ID NO: 4530 - DNA, 1011 bp, Glycine max
gcaggccacagccattattgactccatttctttttctcttccctcttaattttattctgccaaaacaaatttcaataataattttttagttagaggaagaggagagagaaagagaaagagaactcgttcttcttttttccattaacattttcaatctttttcacctaacacaccatctcctttccattcctttcttccttcgtcccattctcgaattggcgtgtgcctcttgcaatcccccaaaggttttttgaagcagaagaatggacttctttactagagacataaatgaggattctatgcttagatgcccattcttgaggaacatcaatgagcctactaacttctcattctcttcacctttggctttaccaatgcctgttcgtggagctaaaggtccaatttttgaagatggtcccaattttgatttggcatttaggcttttccacgggagtgatggtgtagtacccttatctgacagatcttttcggccttcagagaagaaagtacaggcagaacctcccaaatcccaattcaatcctttagctgcaaaggcagctactattagtctgtcatcatttggatttggtggggctttcggttttgatgcattttctgagaagtggaacaaccagaaaagaaaatccaaatcatcaaaaaatgatccttcttcgcaggatggttcaaagcatgaggcaggcaatgattggctgcaaaacggtaactgccccatcgcaaagtcataccgagcagttagtaatgtccttccacttgttgcaaaggtcattcagcctcctccaggcataaaatacaagtgcccacaagcagtagttgcagcgcgggcagctatcgcacgcactgcatttgcaaagaacctccgtcctcagtccctgcctacgaaggtcctcgtgattgggatgctgggcatggcggctaatgttcccttgggtatatggcgagaacatactaagaaattttcgccaacatggtttgctgcagtccatgcagctg

SEQ ID NO: 4531 - DNA, 397 bp, Glycine max
ctttcattatctgtttctgcgctgaggcaattggatcaaattttatcatctttagtttgggttttttgaagcagaagaatggacttctttactagagacataaatgaggattctatgcttagatgcccattcttgaggaacatcaatgagcctactaacttctcattctcttcacctttggctttaccaatgcctgttcgtggagctaaaggtccaatttttgaagatggtcccaattttgatttggcatttaggcttttccacgggagtgatggtgtagtacccttatctgacagatcttttcggccttctgagaagaaagtacaggcagaacctcccaaatcccaattcaatcctttagctgcaaaggcagcaactattagtctgtcatcatttg

SEQ ID NO: 4532 - DNA, 294 bp, Glycine max
gatttgccccctacttttttcccctctttctatttttcgttttttttaggtcttttgaagcagaagaatggacttctttactagagacataaatgaggactctatgcttagatgcccattcttgaggaacatcaatgagcctactaacttctcattctcttcacctttggctttaccaatgcctgttcgtggagctaaaggtccaatttttgaagatggtcccaattttgatctgtcagataagggtactacaccatcactcccgtggaaaagcctaaatgccaaatcttttcg

SEQ ID NO: 4533 - DNA, 612 bp, Glycine max
agctcgaccgaaactgaggaaagcataatcaaatcaaccatggctaccctcattgctcccatcaccttttcgcctggtttagatgcagaagctcttagaaaagctttccaaggatgggggactgatgagaagaccgttatagcaatattgggtcacagaaatgttcatcagaggcaacaaatcagaaagatttatgaggaaatttaccaagaggacctcatcaaacgcctagagtctgagctctctggtgactttgagagagctgtgtaccgttggatgctggaacctgcagatcgtgatgctgttttggccaatgttgccatcaagaatggcagcaaaggttaccacgtgattgtggaaattgcttgtgtgctttcagctgaagaggtcttggcagtgaagcgtgcctatcacaaccgttacaagagatctttggaagaagatgtggctactaataccactggtgatattcgccagctgttggttgggttggtgacagcatataggtatgatggtgatgaggtcaatgcaaaattggccaaaactgaagctgatattcttcatgaatctatcaaggagaaaaagggcaaccatgaagaagccatcaggatc

SEQ ID NO: 4534 - DNA, 284 bp, Glycine max
caatctcctatatcacatatttcttcagcacttatagtgtggtgagagagaaattaaggaagagctagcttaattgagtgctgctaattctatggctacccttgttgctccaaaccaaaaatctccggttgaagacgttgaggctctacataaggctttcaaaggatgggggaccgatgagaaaaccgttattgcaatactgggtcatagaaatgttcatcagaggcaacaaatcagaaaggtttatgaggaaatttaccaagaggacctcattaaacgcctgg

SEQ ID NO: 4535 - DNA, 1054 bp, Glycine max
ctctgctcagagcctcatcaaattttctctctttcacttatttattgactccccaaaagcttttcaaatatctctgttcctctctcacgtaccttctccctatctttcactccacttcttaacaccacaaaacagaacaacggccgagcaaacaacaagaaaaatggtgttgttgtccaaagcaacaacagaacaatactcctacattaagaactgcatgccaaccaaattttcctcaacaattcccatagtggacctctccaaacctgatgcaaagacccttatagtgaaggcttgtgaggagtttggattcttcaaagtcatcaatcatggtgtctccatggaagctatatccgaattggaatatgaagccttcaaattcttctctatgtcactcaatgaaaaggaaaaagtaggacctcccaatccatttgggtatggtagcaagaaaattggacacaatggggacgttggttggattgagtaccttcttctcaacaccaatcaagaacacaacttctctgtttatggcaaaaaccctgagaaattcaggtgtctgttgaacagttacatgtcttctgtgaggaagatggcatgtgagattcttgagttgatggcagaagggttgaagattcagcaaaaggatgtgtttagcaagcttctaatggataaacaaagtgactctattttcagggtgaatcattacgctgcttgtcctgaaatgactctgaatgatcagaacttgattgggtttggagaacacacagacccacaaatcatttctctacttaggtccaacaatacttcaggccttcagatttttcttagagatggaaactggatttcagtcccacctgatctcgaatccttcttcataaatgttggtgattctcttcaggttatgaccaatggaaggtttcgaagtgtgaaacacagagttttgacaaatggatttaagtctagactctcaatgatttactttggaggtccacattgagtgagaaaatagtccattatctcacttatgaaaggaaaagaaagcttatacaaagag

SEQ ID NO: 4536 - DNA, 321 bp, Glycine max
taagttttttctcctatacttattcattgactctccaaaagccctttaaacctctctctattcctctctcacgtaccctcttccttccattcactccacttcttaactccccaaaacagacaagcaccaagaaaaatggtgttgctgtccaaggcaacaacagaacaatactcctacatcaagaactacatgccaacggcattctcctcaacaattcccatagtggacctctccaaaccagatgccaagaccctcatagtgcaggcttgtgaggaatttggattcttcaaagtcatcaaccatggtgttcccatggacact

SEQ ID NO: 4537 - DNA, 530 bp, Glycine max
ccctttcgtgcgaaagcgattgcaagaggaaaagaagaagaaaaaaggctccaccgaaatcaatttcccacagaatcaaacaaatcgttggagttggaaaacaaaacaagagaaaatgggtggacgcaagtgtttgttaacgttggtgttgagtttggtgttgatgatgagtatggcagaggcgcaatctggtactagcgcagactgcgcccaggagctaattccatgcctggactaccttaatggcacgatcaacccaccaagctcctgctgcgaccctctgaaacgaacagtccaaaacgaactcgcctgcctctgtaacatctacttctcccctggccttcttcaaagcgtcaatgtcactgtcgatgaggctctcggcctcagtcgccgctgcggcgtcactagcgatctcagcagctgcaaaaacgggtcagctccagctccgggttcacggccaccaccaggtaagacgcctcccaacatccccaattttttttttttttttttcttgatgagcttcttttttg

SEQ ID NO: 4538 - DNA, 730 bp, Glycine max
gaacatctaacaaaatcgattgggagaaaggcaaaggggatcgctgaaatcaattagtctggttgtagtgggaaaagaaaagaaaatgaaaatgggtggtgggtgcaagtgtttggtatcgttggtgttggctttggtgttgatgaggagtttggcggaggcgcaatcgggcagcagcaccacctgcgcccaggagctaattccatgtgtgaactttctgaatgggacaaccaccccaccaagctcttgctgtgaccctctcaaacaaaccgtggaaaaccaactggattgcctctgcaacatcttcttcagccccggcttgcttcaaagcttcaacgtctctgttgatcaggctctcgctctcagtcgccgctgcggcgtcaccaatggtatcaccagctgcacaaacgggtcagctccagctccgggttcacggccaccaccagccactcctggaggtgacaaaggaggagcaggcacagtcacattcaccgggctttctttcctcctcttattttgggtgtctatgctgtttaattaggaaggtggttgtttatccttcggagcccctcctatggtgaagttatctttgtatttccccccgttgaaaattgataaatggttgtattttcttttccccgttttcttcttttttgtttctttaaaaacccctgattcaattgagttaaaagtttatttaagagagagacataaaaaaagaaaaaacaaa

SEQ ID NO: 4539 - DNA, 647 bp, Glycine max
agagtgggaagggaaggaggagagggagagggagagagaaagaaaggtgaattggattgcatctctctctgtgtgttggaagaggggaatcgtagatctgatttctttctttctttttaataattttgtgatcagaattattgagctgaacaaaagacaatgggattgtgggaagcttttctcaattggcttcgcagcctttttttcaagcaggaaatggagttatctctaataggacttcagaatgctgggaagacttcccttgtaaatgtagttgctaccggtggatatagtgaggacatgattccaactgtgggattcaatatgaggaaagtgacaaaagggaatgttacaataaagttatgggatcttggagggcaacctaggttccgcagcatgtgggaacgttactgtcgtgccgtttctgctattgtttatgttgttgatgctgccgatccagataaccttagcatatcaagaagtgagcttcatgatttgctgagcaaaccatcattgggtggcatccctctgttggtattggggaacaagattgacaaagcgggggctctgtctaaacaagcattgactgaccaaatggatttgaagtcaattactgacagggaagcttgctgcttcatgatctcgtg

SEQ ID NO: 4540 - DNA, 382 bp, Glycine max
ctatctttttcatgacacgaatgcgataaacagtgttgaaggatctgtgcgtgagttcttggtgaaacaaaggaatcgtagatccgtttgtttgtgtagtttttttttttttgtcagagaagagaagcgatggggttgtgggaatcttttctcaattggcttcgcagcctctttttcaagcaggaaatggaattatccccgattggacttcagaatgctgggaagacttcacttgtaaatgtcattgctgctggcgggtatagcgaggacatgattcctacagtgggattcaatatgaggaaggtaacaaaaggaaatgtcacacttaagctatgggatcttggagggcaacctagattccgcagcatgtgggaacgttatt

SEQ ID NO: 4541 - DNA, 500 bp, Glycine max
ctacagaagggggttactgttacatgtcacagggaagaaagagcgtcgagaaggttcagttcagatcctccgtctccaccatggcaactcccaaggcatcgtcgaaatggaccgagaacatttcctcaatagcagctcgcatcttcttccttctcatcatctttcagatccctcttttcagggtgacttgcagatctggcatgtgtacaacccctttgcatgtcacgtcgtcacaattaattgcaagtgagatctttcctgttgttgttgtgaagggccttctgtacccaggggctgcagtgaacggcctcatccacaacatgactgttccaagttgggataatttgttggacttgtataacttgaccagtgtgaaggaagcttctgcggtaactgatcttcagcgcttggaggttcttgcagggagctacttcaccgtggccggagcacttgtgggtattctaaaacccgggagaatgagcatgtttgggtccctactt

SEQ ID NO: 4542 - DNA, 1607 bp, Glycine max
agaaggttctgatgatgcatttaagtctgacttcaagttttcatatgcagaaatgagtccattgaaaaatatatcagattataatatggattccaaggaaagtattgtaggtcttccaatcaatgattccaacaaaagatcatctcctgttgatgaaaaaatcaggtctcaaatggatgttattgatgattgtgtccctgctccattatcaatgttcagtgagagtgattcagacatgaaatccgttaatatagatgacttgctgcccaaagaaaagctgcagaggaagctgccaaagccatcagcgggaaggcgaaaaaatggttacctacaaaatggtggttctgtgcatccttatgctgatccagagcaatgtgcagatacaaagcaatcctttggagcctcttccagtggggttacttctcttgatagcatccagaaacataagttgaacatagattctgattctttaggctgtatacagacacaaattcctatgacacgccctgactatagtcatgctccaaatcacacttccctctttccgactttgtctggatcaagatctgagcatgatggacatctgtctccttctcttaaagaatcatcttatgcatcaaacatggagagttcccatggtcattctttggaggctgtggccttgaaaacaaaagagaatagagaaaagttgtataattgctgtgatggacccctaaatagtagtttcaaaaatgaaaatacaccaaatcaaatgccattttgcagtccgggttcagctcagcaagtaggtcatcattttgaaaatgaaaatgaaggtcatagtgaattccgaggagttggcctaggcttttcaccagaaatagattcatcaacagtgcaggaaagctcatccatgggctctgctctggaccaagcttcacttgaagcaactagcttttgccacctgcaacagatcatggatcagttggatattaaaaccaaaatgtgcataagggacagtctataccgcttggctaagagtgctgagcatagacacaataattcaaatgcaaatggttgcattggaggcgatgaaacatgcaaagcaatgatggcgcaggatgcaaacaggtgtgccggattaatggatatggaaactgacacaaaccccattgatcggtctgtagcacacttactgtttcacaggccctcagatccatcggtgttgcttcctaacgaaactttacctttcaaatccagtgccacgatgcataatggatcagtgatcaatccaccagtaaagactgagaaacaggtctgtcaggaagattctactggagtggaaaaaaaggttttacagggtaacacctcatgaaagtgaaaccagcgttggcgcatttcgtcgtacaatttatactttttcggtcatcgtcgtatatgatgatatataattatttcgggcttactcggatgcctttgttaatttgtgaatcatttttgcatcggatgccatgaaactaatgtaaatttgtgctaatcaaatcatcataaggtagcatacgatgatttagtgtaatgctactacgctcgcaactattttcaccagaaagatcacaattatcccgcgc

SEQ ID NO: 4543 - DNA, 1138 bp, Glycine max
gatataacaatcattctttctcaaaacacttgctccattattattttctcattcattcgttcatcatggttcggttcagcaacaacgtgatcggactcctgaacttcctgaccttcctcctctccatcccgatcctggtggccggagtgtggctgagcaagcagggcgccaccgagtgcgagcggtggctggagaagccggtgatcgcactcggcgtcttcctcatgctcgtctcactcgccggcctcgtcggcgcgtgctgtcgcgtgtcgtggctcctctggctctacctcctcgtcatgttcgtcctcatcgttcttctcttcgccttcaccatcttcgccttcgttgtcaccaacaagggcgctggcgaagttgtgtctaatagagggtataaggagtataggcttggggattactcgaactggttgcagaagagggttaacaacactaagacgtggaacaggatcaggagttgcttgcaatctgggaaagtctgcactgagtttcaatccaagtttctaaacgacaccgttactcagttttacaccgagcacctgtccgcgcttcagtctggatgctgtaaacctgcagaagaatgcctatttacctatgagaattcaacgagctggacgaagcccacaaatgtgactaatcagagcaacccagattgtgatgcttggaataacgatccaacagttctgtgcttcaattgccaatcatgcaaggctggcttactgcaaaacctcaagactgattggaagagggtggctgttgttaacatcgtattccttgtcttcctcattattgtctactccatagggtgctgtgcattcaggaacaataggagggaaaattggaagggttattctcgttagctaagattactcagtattattactagtgtgtagatgagtttgctagacaatctggtttatatggtggatttttattttttatttttttatgggctttatgtgtatgagctgttttcagtagacagtctgttatctaaattgctcaattttatatagcagtttcctagtaaaaaaaaaaaaaaaaaaaaacaaaaaaaaaaaaagaaatgaaaattaggagaaacgcggcgaaaaaaaattaccaaaagaaaatggggggg

SEQ ID NO: 4544 - DNA, 1037 bp, Glycine max
cgttcatcatggttcggttcagcaacaacgtgatcggactcctgaacttcctgaccttcctcctcggcgcgtgctgtcgcgtgtcgtggctcctctggctctacctcctcgtcatgttcgtcctcatcgttcttctcttcgccttcaccatcttcgccttcgttgtcaccaacaagggcgctggcgaagttgtgtctaatagagggtataaggagtataggcttggggattacctcgaactggttgcagggagagggttaacaacacttaaggacgtggaaccaggaaagtctgcacttgagtttcaatccaagtttctaaacgacaccgttactgagttttactccgaaaacctgtccgcgcttcagtctggatgctgtaaacctgcagaagaatgccagtttagctatgtgaatccaacgacatggacgaagcccacaaatgtgactaatcagaacaatcctgactgtgatgcttggaataacaatcaaacagttctgtgcttcaattgccaatcatgcaaggctggctttctgcaaaacttcaagactgaatggaagagggtggctgttgttaacatcgtattccttgttcttctcattattgtatactccatagggtgctgtgcattcaggaacaataggagggaaaattggaagggatattctcgttagctagattactcagtattactagtgagtagatcagtttgctagacaatctggtttatatgttggatttatttttttgggctttatgtgtatgctggattatactgttttcagtacagtctgttatggaaattgctcaattttatatagtagtttcctagtatcatctatacgtagatattacttctggacacactgcatttccttctgtttcaacatctaatatcagtattgtccagtgctgaataaccaccctctacgtcattatggtctaaaataattttatttttagttccattaatttgtactgcatgcgaattttattttttaagtatttttaattaatgaagtttttcttttcttctt

SEQ ID NO: 4545 - DNA, 372 bp, Glycine max
tttttctctattttcattcatatcatacatataacaatcattcttcttcttctgcaaatacttatccctcattgattcatcatggttcggttcagcaacaatgttatcggactccttaacttcctcaccttcctcttgtccatcccgatcctggtggccggagtgtggctgagcaagcaaggcgccaccgagtgcgagcggtggctggagaagcccgtcatcgcgctcggcgtcttcctcatgctcgtctcactcgccggcctcgtcggcgcgtgctgccgcgtgtcatggctcctctggctctacctcgtcgtcatgtttgtcctcatcgttcttcacatcgcctatcacaatttcgctttcgtcgttacc

SEQ ID NO: 4546 - DNA, 696 bp, Glycine max
gcttgcagatcattttaaaggtgatccactagacataggtgctggtatttatcaaagtcgttcaaaggctggtgatgataattctaatgctttacatgagtataagaaggatcattttggaaacaacaatcagattcactcaatgatctggtctacatcttgtttccaggaatttacaaattcattctgtaatgactctactataaaccatattgtatctagtcatcaccaacgtgcagagccatggtcttataagcattttaaatcatctccagtacgtaatgtttctgaagaaacaactaaaacaaggtcccaaacagctgcattgtctataccacaaaaaaatgtgtcatcacctcccttccctttgtctcctctgggtaaaaaatcttctaaaaatgaaaatttgggagaatgcagaaatattgatgttatcttggatgatggcaattttacttttaatagtgtggaacagtcacttgatagaacttgtcaaggcattttatcagctcaggagataccaggtaaatcacagctcaatttgaacaatatgcagcaaaagtctgacctgtttactcctgacaacatgattgatatgaaagaatactggactcattctggtagctttcctcctcgggatgccaagttatgtggaactatgagtagactgccaattagaaggtccttggttggttc

SEQ ID NO: 4547 - DNA, 433 bp, Glycine max
ccggccgacccacgcgtcagcccacgcgtccgcccacgcgtccgaaaccatcaaggtggaccactgcaagtcaggagctgatctggctaatggcagtaccacagttgaggaaagctcattggaagtggctgagaagcaggatgctcctgaaattcaagcttccgacaatcctgagcaacatgctagtgaagatagtggtaatgcctcaaagcgtccaaggacagaggagtaagccatatgatctactgaatcagcattgaactgacaagacgataccaattcatttaagatttcgatttagtaaggaagacttggtagatccataacttgagtttcccctaacctgttgtgatcaatgaggacttgcatatgtatgtcattgtgttacaaaaatgatgagtcaatttttggaccatgaggttcttcgaacttc

SEQ ID NO: 4548 - DNA, 454 bp, Glycine max
gaaggagaaaagagtgacactaatttcaaatggaaattgctctctcataacagaattcaagaggaggaagaacaagtatataaaaactatatctacatagttatatctctctcttgagatttcaaacgtagagatatggaatggaggaagtgctacttggatgtgatattggtgcccttgggatttctaacaagcattgggtaccatttctggctatggcacaaggttcgaactcagccacacacaaccatcattggcatcaatgctagtggccgtagaaattgggttaatggcatgatgaaggacaatgacaagaaaaacattctggctgttcaatcactaaggaacacaataatgggtgctactctaatggccacaacctccatcctcctatgctcaggcctagcagcagtgataagcagcacctacagtgtgaagaagccactcaatgatg

SEQ ID NO: 4549 - DNA, 1060 bp, Glycine max
gaagacgatcgaacgggcccgtgcgctagttctgagtattctgatcgctccctgagagagctcgtcgcggcggttgcagaagaagattgcaagatgaagttcaacatcgcgaatcccaccactggatgccagaagaagctcgagatcgacgacgatctgaaactgcgagcattttgggacaagaggatctcacaggaggtcatcggagatgcactcggtgaggaatttaagggctatgtcttcaaaattaccggaggttgtgacaaacaaggatttccaatgaagcagggagtgctgactcctggtcgtgttcgacttttgcttcacaggggaactccttgcttccgtggatatggaaggcgtaatggagagcgtaggagaaagtctgttcgtgggtgcattgtcagcccagacctctctgttttgaacttggtaattgtgaagaagggtgagaatgatttaccaggattgactgatgttgagaagccaaggatgagaggcccaaagagagcatccaaaatccgtaaactgttcaacctgtctaaggaggatgatgttaggaagtatgtcaacacctaccgtcgtacatttacgacaaaagctgggaaaaaggtgagcaaagctcccaagatacaaagactggtcactcctcttacgctccaaagaaagcgggcaagaattgctgataagaagaagaggattgccaaggcaaaatctgaggcagcagagtaccagaaactccttgcctccaggttgaaggagcagagagaccgccgcagtgagagtttggccaagaggagatccaagctttccagtgctgctaaggcagcagctgtataagctgctttcgatagagagatatggtgaagtttaatcatcatatgtagtttttgtttgctatattatgacggctgttgttatgataaactatggttttgctatttttgattacattgagttattcaagtatttcttacgcagtgttacgcattgaatcatatttaactagttggaatatgttatccatttgaagttattttatgtatgaagagatttattc

SEQ ID NO: 4550 - DNA, 769 bp, Glycine max
cccacgcgtccgacgacttacacttacccacagggaggcgaacagagaaactcagagacccgaagccagatttcaagatgaagttcaacattgcgaatcccaccactggttgtcagaagaagctggagatcgatgatgacctgaagctacgagcattttgggacaagaggatctcacaagaggttgttggtgatgctctgggtgaggaattcaaaggctatgtcttcaaaattactggaggttgcgacaagcaaggatttccaatgaagcaaggagtgttgacccctggtcgtgttcgcctcttgctgcatagaggaactccttgtttccgtggttacggaaggcgcaatggagagcgtaggaggaagtctgttcgtgggtgcattgtcagccctgacctctctgttctcaacttggtgattgtgaagaagggtgaaagtgatttacctggcctgactgatgttgagaagccaaggatgagaggcccaaagagagcatccaaaatccgtaaactgttcaacctgtctaaggaggatgatgttaggaagtatgtcaacacctaccgtcgtacatttacgacaaaagctggtaaaatccctggtgcttttatgttgtgtttaattttgtaattgactgattgattaaagaatttgtcttaaaaagagcaaagggtcatggtaatgtgaaaactagctggacttcaacctgttcataactataaatctattgataactcaaatcaccttttctttgttttatctgttatata

SEQ ID NO: 4551 - DNA, 482 bp, Glycine max
agtttaccgtatgttattatagtttccaaaggcacgcagcgagtttaggcgcggcgggatcatcacgagattgcaaaatgaagttcaacattgcaaatcccaccactgggtgccagaagaagctggaaatcgatgacgacctgaagcttcgggcattttgggacaagaggatctcccaggaggtccttggtgacgccctgggtgaggagtttaaaggatatgttttcaaaatcaccggtgggtgtgacaaacaaggattccctatgaagcagggagtgctgacccctggtcgtgttcgacttttgctccatagaggaactccttgtttccgtggatatggaaggcgcaatggacagcgttgaacgaagtctggtcgtgggtgcattggcagttcagatctctctggtttgaacctgggaattgtgaaaaagggggatagtgatttgcccggtgctcactgaatgttgaaaagcccagggatg

SEQ ID NO: 4552 - DNA, 711 bp, Glycine max
aagtttctaagaactttattaatttttaatactgtaatgcatttgttgttatatcaggtgtctacattttcttttgtctacaaactaattttctttttatttgttacttgaacaggaactccttgcttccgtggatatggaaggcgtaatggagagcgtatgagaaagtctgttcgtgggtgcattgtcagcccagacctctctgttttgaacttggtaattgtgaagaaaggtgagaatgatttaccaggattgactgatgttgagaagccaaggatgagaggcccaaagagagcatccaacatccgtaaactgttcaacctgtctaaggaggatgatgttaggaagtatgtcaacacctaccgtcgtacatttacgacaaaatgaaaaagtgagcacagctcccaagattcaacgactagtcactcctttgacactccaaaggaaacgagcaaggattgccgacaagaagaagagaattgctaaggcaaaatcagaagcagcagagtatcaaaaactcctcgcttccagattgaaggagcagagagatcgccggagtgagagcttggcgaagcggagatccaaactctccagtgctgccaaaccaactgttacagcataggttgcttcctggtagagatatggtgaagtttaaacttcaccgtagttttttttaaaatgaaaaggatgatgcatctttatagaaaccaa

SEQ ID NO: 4553 - DNA, 241 bp, Glycine max
tggcaaagtctccagtgctgccaaaccaactgttacagcatacgttgcttcctggtagagatatggtgaagtttaaacttcaccgtactttttggtagtcttgtttgagggcgattatgacgcacatttagggttttttactttaagtacatttgagttcatttaagtattttgcaatgatttttagagttcacaccaaggcccaagaaagaacctgtcgtgactgggataaaaaaatgaa

SEQ ID NO: 4554 - DNA, 826 bp, Glycine max
gaggggggctagtggcagtgaccaaactccatttctcactcgccgtcgtctcttccgtctagggtttctcctcttcacaaaaatggttgccgcaaaaaaaactaagaagacccatgagagcatcaacaacaggctcgctctcgtcatgaagagtggcaaattcaccctcggttacaagaccgttctcaaatctcttaggagctccaaagggaaattgattatcattgctaacaactgcccccctttgaggaagtcagagattgaatactatgctatgttggcaaaggttggggttcatcattacaatgggaacaatgtggatttgggcactgcatgtggcaaatattacagagtgtgctgccttagcattattgatcctggtgattcggatatcatcaagacactgcctggcgaacagtaaagtattcttgaagttccttgcttgttattttctggttttagttgattcaagactttgaaagaatatcttgttgagttgtagactttggtgtaaggtgcaaggtttttgggtattctagcttgagcatcaagtaattttgaccttgcaaatttttcatgatgtttcattgtgccaatttctaagagatgatataattatattttgatcgcacgcttgctgttaacagcaagcccgtgttatccaaaaaaaaaaaaaaaaaaaaaaaaaaaaaaaaaaaaaaaaaaaaagggaagaaaaaaaaaaaaaaaaaacatcaaaaaggaaattaattcaggaaaggaaaaattgcaagaatacaaactttggggaggcccgaatcatattacaccttggactgggaattgt

SEQ ID NO: 4555 - DNA, 470 bp, Glycine max
gaataacgtgtagtgccagacgcagtgactaaaccacacctctcactcgccgtcgtagggtttctcctttcgtttcgcaacaatggttgccgctaagaaaaccaagaagacccatgagagcatcaacaacaggctcgctcttgtcatgaagagtggcaaattcaccctcggttacaagaccgttctcaaatctcttaggaactccaaagggaaattgattatcattgctaacaactgcccccctttgagaaagtcagagattgaatactatgctatgttggccaaggttggagttcatcattacaatgggaacaatgtggatttgggcactgcatgtggaaaatattacagagtgtgctgccttagcattattgatcctggtgattctgatatcatcaagacactacctggcgaacagtaaagtattatttgaagttccctgcttgatattttctgtttttagttgattc

SEQ ID NO: 4556 - DNA, 998 bp, Glycine max
cagcattataactaccccattcccaaacacacctttcacttccttcctcttcttctaacgcactctcaactcttcacttgttaatgcttcctcctgaaagttctaaacttaacacaatggagcttagcaaattgacgttagagatcttctcaaaattggagcagcaatggctctcgcactacgaagcatcaaccaaaacgcgcattctcagcattgacggcggaggaaccaccgccattgtcgccggcgcttccctcgtccacctcgaggaccagatccgcgcccaaacctccgatcctcacgcgcaaatcactgattactttgacatcatcgccggcaccggcattggcgccatcctcgccgtcatgatcaccgccgacgacggcttcggccggcctctgtacaccgtcagagacgccgtcaacttcctcgccgaaaacaaccgcgaactctacaagccgaaacgcgccggcgtgttccgccgacgccgtagattctccgcgaggagcatggaaaacacgctaaagcgcgttttcaagagaaaagagggagaagaacggttgttgactctgaaggacacgtgtaagccgctacttgtcccttgctttgacctcaagagctctgcgccgttcgtgttctcccgagccgacgcgtccgagtcaccgagtttcaacttcgagctttggaaggcgtgccgcgccacgtcagcgactcctggcgttttcgcgccctttcacttctcctccgtcgacggaaaaacctcgtgcgccgccgtcgacggcggcttagtgatgaacaatccggccgcggcggcggtcacgcacgtcctccacaacaagcgcgacttcccgtcggtgaacggcgtggaggatctcctcgtcctctccatcggaaacggagctccggcgaagagaatgaacaacgccggagagtgctccacgtcgacggtggttgacattacgctcgacggcatttccgagaccgttgaccagatgcta

SEQ ID NO: 4557 - DNA, 800 bp, Glycine max
atcgatctaatatcaaacctcaaataaccctggaagttgtcacatatttggtgtccaacgtaagaaaaattgtaagaaaacgtacaaataatgctggaaactctgtattgtaaacacaagctaaggcagagatcaacagaccaacgaaaacttggaccccgcacaattgtttcccgtaaaaaatgaaccagaaaaacattatgtttaatttcataaaaagtcagcagaaaacaacacaaatgccaaataaaataccaatattagatgtccaagtccaggttgacaaaaggcagcaaacgtctcgaaagatgcagtattcaagctttcaaatatggaccatatggatggtagcagctacagttttctttgtaatgatcacaccgtgctttaatccattcaaaaactaccaataccggcaggggagcaagattcaaaagtaaatgtaccaaatgatgaaatcttaccaattaaagttgagaagtactatgcccaattcctaataatcatactcccgggaatgtgatctctctgagcgccgatattcacggtccacatcatgacttctctccttttcatgcgattcagatgttgcacgtccagcatggtagtcatcttccatcccatcatggtcacgatactgattgtaatggtcaccacggtcatctccatgattgtaggggtcataccgctcaggagtgtcatgatcagggtctgcatgcctacgtccatgttcatactggttatgcctaccacgatcatcctcaggttcatagtcatgattcctttccccatgtttagat

SEQ ID NO: 4558 - DNA, 374 bp, Glycine max
gccaaacaattaccaatattagatgtccaagtccacggtgacaaaaggctgctttccaatatggcccatatgtgatagctgcagctacagttttctttttaatgatcacactgtgccttaatccattcaacaactaccaataccggcaggtgagcaagattcaaaagtaaacataccaaattataaaatcttaccaacaaagttgagaagaactatgcccaagtcctaataatcatactcccgggaatgtgatctctctgagcgttgatattcacggtccacatcatgacttctctccttttcatgcgattcagatgttgcacgtccagcatggtagtcatcttccatcccatcatggtcacgatactgattgt

SEQ ID NO: 4559 - DNA, 403 bp, Glycine max
tttacaccggagcttaggcccacagtatcattgtcgtcttcaagcgttcatacttcatactatcctctctctctctctctctgcaactgcaagagatgatggagatggaggaagcagagacgatcgatctatacgagcttcaatattcagacttatcttcaccttcaacttcatccatggtcgattccatcatggaagccctaggacccactggcccaggcctcctcgccgtccccatcgcttccaacctccgctcacaccttctctctctctctcggaacctcgcccttctcgaccgcgactcccggaaactcgttctcaaggagcataacttgggtagtgacgtccctttaagaaatcctgataggacggtgtcctcctttgctatgcacctcaaatatgc

SEQ ID NO: 4560 - DNA, 494 bp, Glycine max
gttagagatgattttgatggaggaagcagagacgatagatctatacgagcttcaatattcagacttatcttcaccttcaactacatacatagtccattccattatggaagccctacgacccactggcccaggcctcctcgccgtcaccaacgttcccaacgcttccaacctccgttcacaccttctccccctcgctcggaacctcgcccttctggaccgcgaatcccggaaactcgttctcaagttttgtagggatgctcattgtgcttgaattgcgtgctttccttcctaggagcataacttgggtagtgacgtccctttaagaaatcctgataggacggtgtcctcctttgctatgcaactccaataagccaaatcacaacatgttcaacaaacggtgagtgagtgctatggaatggaattcgagaatcttggaagctctttcaaagagctagggttatgcatgatggagcttgggctttgccttgctcgaa

SEQ ID NO: 4561 - DNA, 439 bp, Glycine max
gacgatcgatctatacgagcttcaatattcagacttatcttcaccttcaacttcatccatggtcgattccatcatggaagccctagaacccactgtcccaggcctcctcgccgtccccatcgcttccaacctccgctcacaccttctctctctctctcggaaactcgctcttctcgacctcgacacccgaaaactcgttctcaagggtttaggttcaaaattaattcagttttgtagggatgctcattgtgcttgaattgcgtgctttccttcctaggagcataacttgggtagtgacgtccctttaagaaatcctgataggacggtgtcctcctttgctatgcaactcaaatatgccaaatcacaacatgttcaacaaacggtgagtgagtgctatggaatggaattcgagaatcttggaagctctttcaaagagcta

SEQ ID NO: 4562 - DNA, 600 bp, Glycine max
gcgtgcgtgagcgcggggttgggctcgagcggctgcgagaggagacagagggggatctattattattcagagccaataatttctcaaatatcaagttatgacgagtttgcactttgcagagatggaaaagaaagagagaaagatcatggtggctgtggatgagagccaagagagcatgcatgcactctcctggtgcatcaccaatcttatttccgaaaccaacaagcttgttctgctttatgtcaggccaccttctgctttctactccttggatgccgcagggtataacttttcctccgatgttgttgatgctatggaaaagtacagtatgcacttggctaattcagtcatggaaagagctgaagctgtttgcagagacttgaacgctactaatatcaatatggagagagtggttggtgtaggacatgccaagaatgtaatatgcagtgctgtcaagaaactagaggctgacaccttggtcatgggaactcatggctatggattcattaagagggccctccttggaagtgtcagtgatcactgtgccaaacatgcaaagtgtcctgttgtaatcgtgaagcagccataagagatcaattt

SEQ ID NO: 4563 - DNA, 1383 bp, Glycine max
gggaggtaatggtcagcaacaactttagtttcggttttcatactcactcaccgccgggatgtcgccggagcccggagcacacgcctccctcctcccgggatccaagtcaggatgttcctccggcaacctgtgtccggtgccgtgttcaatgtcgccaccagtataatcggcgccggaataatgtctcttccggcgattctcaaggtcctcggcgtgattccggcgttggtgctgattctcgtgattgcgtttcttgccgaactatcggtggagttcctcatgaggttcacacgtgccggcgaaacgacgacgtatgccggcgtcatgagagaagcctttggacccttgggagcagtggcagctcaagtcgctgttgtaatcaccaatctcgggtgttttgcaacagtggtttgggattcactggtggagttctcgggaatttgctctgttggttgtcttgttcttaattttgcttccattggtcttgtaccgtcgcgtagagtcgttgaagttcagttctgcaatatcaactcttcttgctgtggcatttgttacaatatgtaccgtgttagcaatagttgctattgttgaaggaagaacacagtcccctagactgattccttgtttggaccaacatacctctttttttgatctgtttactgcagtgccggtcgtagtcacagcctacacatttcattttaatgtgcatccaattgggtttgagcttgccaagccatcagaaatggcaacagcggttcgaatagcattgctgctttgtggtgtcatttacttttcaataggcctatctgggtacctcttgtttggggattcaacacagtctgatattctcgtcaattttgaccagaatgctggttctgcacttggttcattgctcaatgttttagtccgtttaagctatgcttttcatgttatgttgactttccctctcctcaacttctccttgagaaccaacgtagacgaattcttcttccctaagaagtctcctctagccacagacagcaagagatttgtgagtctcactctagtgctgctagccttaagctacattgctgctattttagtcccagatatttggtacatctttcagttcatgggatcaacatctgcagtgtgccttgcctttgtcttccctggtgctattgttctaagggattcttacggtatatcaacaagaagggacaaaattattgcactggttatggttatactagctgcgataacaagtgtgattgctatctccaccaacatatacaaagccttccagtagcacctcgtaaatttgtattttcttttcccttttcaatttttccctatatttagaattttttattaggggagagagagacgtagagagaaaaagag

SEQ ID NO: 4564 - DNA, 1693 bp, Glycine max
cagcacttgacactggttgtggggttgccagttggggtgcatatctttggagcagaaatgttgttgccatgtcatttgcaccaagggactctcacgaagcccaagtacagtttgctcttgaaaggggtgtccctgctattattggtgttttggggtccataaagttgccttatccttctagagcctttgatatggctcattgttctcgctgtttgattccttggggagcaaataatggaatttatatgatggaagttgatcgagttctaaggcctggtggttattgggtgctttcgggtcctccaatcaattggaaggctaactacaaatcctggctgagacctaaggaagaacttgaggaagagcaaagaaagattgaagagactgctaagcaactttgctgggagaagaggtctgagaattctgaaattgccatttggcaaaaaactgtagacactgaatcatgtcgtagcagacaagaagattctagtgtaaaattctgtgaatcgacagatgctaatgatgtctggtataagaaaatggaggtctgcattactccaagtcctaaagtttctggtgattataagccatttccagagaggctatatgccatccctcctagaattgctagtggcttagttcctggagtttcctctgagacataccaggatgataacaaaaagtggaaaaaacacgtaaaagcttataagaaaattaacagactgctggatactggaaggtatcgcaacattatggatatgaatgctggattgggtagttttgcagcagctattcattcttcaaagttatgggtcatgaatgttgtgcctactatagctgaggcgaatacactgggtgtgatatacgagcgaggacttattggcatctatcatgattggtgtgaagccttttcaacatatccaaggacatatgaccttattcacgcccatggtgtctttagtctgtacaaggataaatgcaaggccgaagatatacttctggagatggaccggattttgcgaccagaaggtgctgtcatattccgcgacgaagtagatgtgctaattaaggtaaagaaaatagttggaggaatgagatgggacactaaaatggttgaccatgaggatggtcctcttgttcctgagaaggtgcttgttgctgtcaagcagtattgggttactaattccacatcaacacaataagccactatatcaaagttgaagaactggcttggcctttggctgccagtacatttctctatacgatcttcacagaattcatattgtggctcaattggtcattgcaatttgcaactgtggcacagaagaggggtttgatggagttttgcacgattgtcacttacctaaggtttcctatgttgttaatttattgatgaagaaagctacaaagctatgcttaaggtttatgcatgccacttgccattttttggtcttagttagttatcttggacattactacattccgaagaaaacacggtctctctcctttgttaattaattatattatattccttatttaaatgttttaatttgtacaccgaaaaagttctttttttattattattcttaattgagttgtaatctctattggcccaatgtatttcattgtattgtggacacttcattttttttagccatcctaattatggcatttggctctttggtgggatttc

SEQ ID NO: 4565 - DNA, 1260 bp, Glycine max
agagagagagagagagagagagagagagagagagagagagagagagagagagagagagagagagagagagagagagagagagagaggattgtccccttgagtataaaaagggtgaaaaccaaacaaatgctgaactgctcaaagaagaagactggagtctcttattgaagatggaagaagaatatattgaggagctatgcatgcagatattgaagtttaaaccggacttggtaatcacagagaagggtctgagtgatttggcaacccattatctcagcaagcatggagttagtgcaatcaggaggctgaggaaaactgataataatagaattgcaaaggcttgtggtgctgttattgtgaacagaccagatgaattgcaggagtctgatgttggtactggcgctgggttatttgaggttaagaaaattggagatgagtactttgcatttattgttgattgcaaagaacccaaggcttgtactgttctactaaggggtgctagtaaggatctattaaatgaagttgaaagaaacctacaggatgccatgtctgttgcaaggaacattataaaaaatccaaaacttgttcctggaggtggtgctacagagttgacggtgtcggctgccttgaaacaaaagagttcatctattgagggcatagagaagtggccttatgaagctgctgccctagcttttgaagccataccacgaactttggctcaaaattgtggagtaaatgtcatccggactatgactgctctacaaggaaaacatgcaaatggagaaaatgcatggattggtatagatggaaatactggcagtatcactgacatgaaagagcgcaagatttgggatgcctacaatgtgaaggcacaagcatttaagactgccattgaagccgcttgtatgcttctgaggattgatgatatagtgagtgggatcaagaagaagcaagcccctggagctgctccttcaaaacccaaggttgagaccgaggcagatgctgacagtgagcaaatccttcctgactgagaatctcggttcaacagacattgttttttggtagagttgatgatgtgcaaggttctttatcttccttaaatcttatcactattcttaggagttttgagtcctttattgggatgctgttttttgtgccttctctactgtttgcaagagcaaattgtgtactttgttgatgttaaagacttaattaactggcgtatgctttaaaacaaagtacactccctcaatgcctcag

SEQ ID NO: 4566 - DNA, 1125 bp, Glycine max
ataaatctagcacattttggcgaaaaacctcagcgtagttcctaacactacactcttccgccgattattcttcctctgtgccctagcttctcttccgccgctgtcaacgaccgtctcccttgccgcttccggcaccgaacgaacagtctccggccaacttcagctcttgcgtgcgaaaattctcggaatattttgaatccaggaaatcatgcacgctccagttctagttctcaaggactctttgaaacgagagtctggatctaaggtccgctatgctattattcaggcggcaaaggctgttgctgatgtagtccgaacaacattgggacctaggtccatgctaaaaatgcttcttgatgctcaaggaggaattgtggttaccaatgatgggaatgctatcttacgtgaattagaccttgctcatcctgctgcaaagtctatgattgagttaagtcgcacccaagatgaagaagtcggagatggaacgacatctgtcatcattcttgctggtgagatgcttcatgtcgccgatgcattcattgacaaaattcaccctacagttatttgccgagcatataacaaagctttggaggatgctattgctgtccttgacaaaattgcaatgcctattgatgctcaggatcgaggtataatgctggggcttgtaaaaagctgcataggtaccaattcacagggcgatttggggatttaattgctgacttagctattgatgctactacaacagtaggtgttgagattggccaaggtttgacagatgtagatattgcatgcagaagactggattctcttattaaagattgaagaagaatatattgaggagctatgcatgcaaatattgaagtttaaaccggacttggttattttggaccagggtctgactgatttggcaacacattatctcagcaagcatggagttagtgcaatgaggaggctgagcaaaagtgataataatagaattgcaaaggcttctggtgttgttattatgaacagctagaccagatgaattgcaggagtctgatgtcggtactggtgctgggttatttgaggttaacaaaattggagaagagtacttctcatatattgttaattgcaaagaacccacca

SEQ ID NO: 4567 - DNA, 518 bp, Glycine max
tgctactacaacagtaggtgttgagattggccaaggtttgagagatgtggatattaaaaattatatcaaagttgagaaggtcccaggtgggcagctggaggattcgagagttctcaagggagtcatgataaacaaagatgtggttgcccctggcaaaatgaggagaaggattgttaacccacacatcattcttcttgattctccccttgagtataaaaagggtgaaaaccaaacaaatgccgaactgctcaaagaagaagactggagtctcttattgaagatggaagaagaatatattgaggagctatgcatgcagatattgaagtttaaaccggacttggtaatcacagagaagggtctgagtgatttggcttgccattatctcagcaagcatggagttagtgcaatcaggaggctgaggaaaactgataataatagaattgcaaaggcttgtggtgctgttattgtgaatagaccagatgaattgcaggagtctgatgttggtactggcgctgggt

SEQ ID NO: 4568 - DNA, 400 bp, Glycine max
gcacattttggcggaaaacctcagcgtagttcctaacactacactcttccgccgattatttctccaaaccgattattcttcttctgtgccctagcgccttttcctccgccgtcaaccaccgtatccctcccgcttccggcaccgatcgaacagtctccggccaagttcagttcttgcttgcgaaaattctcggaatattttgaatccaggaaatcatgcacgcgccagttctagttctcaagggagtcatgataaacaaagatgtggttgcccctggcaaaatgaggagaaggattgttaacccacgcatcattcttcttgattctccccttgagtataaaaagggtgaaaaccaaacaaatgccgaactgctcaaagaagaagactggagtctcttatt

SEQ ID NO: 4569 - DNA, 265 bp, Glycine max
ggcaaacctcagcgtagttcctaacactacactcttccgccgattatgtctccaaaccgattattcttcttctgtgccctagcgccttttcctccgccgtcaaccaccgtatccctcccgcttccggcaccgatcgtacagtctccggccaagttcagttcttgcttgcgaaaattctcggactatttcgcatccaggaaatcatgcacgcgccagttctagttctcaaggactctttgaaacgggagtcttgatctaaggtccg

SEQ ID NO: 4570 - DNA, 600 bp, Glycine max
gtttatttcacttgtatattcatcacagatacaggcattagctgccttgtggcggcttttcaggggtcggaaatggaatcctctgaggcagcggttagatagctttgactatactgtgaagcaacacatccgcccacccctgcgatttacaccacttctacttcttttaccaactacttctgttttctatatattctttagtatcatggacacaaccattaaccttgtctgtctactgattgaagtcactatttcggtaattcatgttaccccttataccaagatatttctttggttggtaagaccaagaagattcccttctggaatatggcttgaaattattggttgtcagagtaatagtactgcttctccaagtgctgatattactgatgaaatgacctcatacaaggagtcattgcatctaaaggatttcaatagagaaaaatctagtagtctagtttctgctctccacagcaactacttgagcttaggaaaaattatctcacctcactacatacatgtttttttgggagtttctgggtcatccatctccacagtggctcatggaatactcattggacaaagaatgccatctatgcg

SEQ ID NO: 4571 - DNA, 933 bp, Glycine max
attttaattacacgtaaaacaaaaacaaaactacaacgaattcttggattcagcagtcaagcgaggcaacgcatcgcaacgagattctccaagctctgcatccctcggcgatgccgtccacaacctactgtcttgaaggagaacaaattaaatctccttcaattatgaaacaggatgttgcacaagataacaccaactcatattcaaagaattcaatcccaccctacatgaaggctatctctggctcacttggagggattatggaggcttcttgcctgcagcccattgatgtgatcaagaccagattgcagcttgataggtcagggaattacaagggaatactgcattgtggtgccacgatttcacgaacagaaggggtacgagctttatggaaaggattgacaccttttgccacacatttgaccttgaagtatgcacttcgaatgggttcaaatgctgtacttcaatcagcgtttaaggaccctgagactggcaagcttagtggttatggacggatcctgtctggctttggtgctggggtgcttgaggctattattattgtcactccatttgaggtggtgaagataagattgcagcagcagagaggtctaagcccggagcttttgaaatacaaaggtcctgttcactgtgctcgaatgattattagggaagaaggcttccgtgggctttgggcaggagttgctcctactgtgatgcgtaacgggacaaatcaatctgccatgtttactgccaaaaatgcttttgatgtacttctgtggaagaaacatgaaggggatgggagagttctcctaccgtggcaatctatgatttctggattccttgcaggcacagcaggtcctatttgtactggtccatttgatgttgtgaaaacaaggttgatggctcagacgcgaaaaggcggtggtgtactga

SEQ ID NO: 4572 - DNA, 533 bp, Glycine max
cgaccctgcatttgggttatatcatcttatggaactgaaagctctcaagcctctcctatccatacaccatatagtgaatgagattagtcctctgaatttcttcaaagataatagacatgccagaagactcttctttcttcacttatgttagtttcagggctagtgtattagttgcagtcattgaaactctacaaggatacgttaacgtctatgaaggcttaagttcatttcctgaaatattcctaccaattttgaaattattaaatgaaatagcagaacagaaaaatatgtcaaatgcattatgagataaaattaaagatgtggctgagctcattaagttgaaagtggacaagcatcacactttaaggcgaccacttcaaatgcggaaacaaaagccagtaccaatcaaattactgaatcccaagtttgagaacatcagtgcaggcctgggggaagtcatgcattacctgaaggcataatcttcgacacttctgatttggaaatgcggcatttgtgggatctttctatgacta

SEQ ID NO: 4573 - DNA, 1378 bp, Glycine max
cgctacttacttcatcaggtgatccgggcattggtccttggaatccacatcccccagaagaagagtttcgttatgattcttcagtttctgttgatgctgggggagctggacgacaaacgccaagtcttcagttccctcgaacaaaagaagttgtagtcaatggcattgctgtaaaggtgaaatattgtgagacttgtatgttgtatcgtcctcctcgttgctcgcattgctccatttgcaacaactgtgttgagcgttttgatcaccattgcccttgggtgggccaatgcattgggctgaggaactaccgttacttctttctgtttgtttcttcggcaactattctatgtatctatgtgttttccatctcagctttttacatcaaggttctgatggatcattatcacgggacagtttgggaggcaatgaaagaatcccctgcatctgttatattaatggcatattgtttcatctctttgtggtttgtcggtggattaactggctttcatttgtaccttattggcacaaatcagactacctatgagaacttccgctacagagccgataacaggatcaatgtttacaaccggggttgtttaaacaatttcctagaagtattttgtacaaaagtgaaaccctcaaggaacaatttccgagcttttgttcaagaggaggtaccgaggccacctcctccggtcatttcccgggaacctgaaccagatctgggtggtggagatcctcgttctaaagttgaagatgatctagatattggtgaagacctgttaaagatatcacagcgtcggaatattgaagaaattgacgaggacatccggagcagagggagcattggacctccccataatacatctgaagttgattcagttttgggttcagatcgccgggccccaacaattcgatccgaagcaaggcactcgagtgagggacgaagtgaaagctgggaaattgcgtccgaggtcctttccaattcaaatgtaactgaaagcagaagctatgctgcatcaaaggaggtgcgccaaaaacttgggggttctttttgagatgtggggttacttagatattaaagatggaaaaggaaatggtgtttgatcagattataggaatgggaattgaattgattgaggcattaagtacaaaaacttatttgatcttttttgtggtaagcttagctcttttggaaagaatagaaatgtgtgtaattttcgagagacaaagcaatagtgtcttttttctcgtctttgtcaattttttttcctacaatcaaatatgtgcattgcatctttatgtggctttattctttgtgtaaataaccagttgtgatgctaaaatatatatctgcatactgtgctttaggcgttgt

SEQ ID NO: 4574 - DNA, 521 bp, Glycine max
  unsure (1)..(521): unsure at all n locations
gtgtgtaaccaattcttctcttttgctttctctctccaaattcatcacaacttctctcgtacctctgcagagaagtaaacatataggagtgagagggagggagagagaaggaaagcttggtagcgatggggaaggagcaagttcaggtgctgaatgccctggacgtggcaaagacacaatggtatcatttcacagcaatcatcattgctggaatgggcttcttcactgatgcttatgatctgttctgtatatcactagtcacaaagctacttggtcgcatttactaccacgttgatggggctgcaaagcctggttcattgcctcccaatgtgtcagctgcagttaatggtgtagcttttgttggaacactttcagggcaactcttctttggctggctcggcgacaaaatgggccgaaaaaaggtctatggcatgacccttgcgcttatggttatagcttccattgcttcgggtctatccttcggacacgatgcanagactgtgatgacaactctatgcttc

SEQ ID NO: 4575 - DNA, 883 bp, Glycine max
gcagaaaaggaacagatgttggaagatatgagagggttgcttcaggctgctgaagaaaaaaggcaagctgctctagctgagctctcagctaaacatcaaaagaatatcgagagtttggaggctcaaattaatgatgcattgtccgacagaagtaaggcaactgaatccatttcttcactgcaggttctagttgcagaaaaagaatccagaattgcagagatggaagcagcatcaacaggagaagctgcacgactcagagcagctgtggaaagtgtgaaaggggagctttctcacataaaagaggagcatgaaaacgaaagggaaagctgggagactgcttctcaggcacttaaagcaaaacttgaaattgcagagagcaactgcatacgtgcagaagttgaagtagcaaaaataagaagtcagctggaatcagaggtatccacccaaacaagaatcctcaatatgagagatgccgaattgttggctgccaaagaagagatcagctctcttgagaaggaattttcttcatacaaagttcgtgcacatgcacttcttcaaaagaaggatgctgagctggctgctgcttaagattctgaacaactcaaagctctagaggaaactctgagaggatatttgatcagtattttggagaagaccttggtttgagtagtggatattaaattattcaccattggcatccttaatttcctccaggaggtggaaaatgaagtattatcaataacagaagaaagggatagagttcttcaagatcttcaatctgctatggctaatcatgagaaagagattgcagaaagagacacagcccttgaaaatgtcaagcaacagataaggagctttgaaataaagcttgactcagctaatg

SEQ ID NO: 4576 - DNA, 795 bp, Glycine max
actcgagccgattcggctcgagattttattttactcattcacataattctttttctaatttagcaaccttaatatttgcctaggtctagtttattggttgtgttgtctccgaggattgaaatccaatccgtgcctcctttttatctgataacacaaaaatggcaaatgctttgagagttggcagtgttatctcactctgctcccttcggaacacgagaccccatcttccccttctctccaacgccacgcgcttccgttccaagttcccatttttcaccctctcatcgtcgccaaatccatctgggtatccaccatttcgcacgcgctcttcttcttctgcttccacagatgaggcagtgaccaccgaagccatcactagcaataatgcaagtggtgaagctgagaacagtattaaggatgcggcggggttgcttgacatgagggttgggtgcattctgagagcatggaaacatgatgaagctgattctctctatgtggaagaggttgatattggtgaacctgaacccagaatcatatgcagtggccttgtcaaatacatccctctagaacaccttcagggcaaaaaggttattgtcctttccaacctgaagccaagaaatatgcgtggtgtcaagtcctgcggaatgctgatggctgcttctgatgcaaaacatgaaaatgttgaacttttgttccctcccgaggaagcaattcctggtgaaagaatctggtttggaacggaagatgaaaaggataatcaacctgatgctgccactccgaatcagctacaaaaga

SEQ ID NO: 4577 - DNA, 1634 bp, Glycine max
caaggacacgaggtggatatatatgagtcaaggccttttattggtggcaaagttggttcttttgttgacaaaggtgggaatcacattgaaatgggattgcatgttttctttggttgctacaacaatcttttccgattgatgaagaaggtgggtgcggataacaatctacttgtaaaggatcacactcacacttttgttaacaaagggggtcaaattggagaactagattttcgcttcccaattggggcaccaatacacgggataagggcgtttttgtccacaaatcagcttaatacttatgataaggctagaaatgctgtggctcttgcactcagtccagttgtcaaagctcttgttgatccagatggtgcactgagggacataaggaatttggatagtattagcttttcagactggtttttatccaaaggtggcacacgcatgagtattacaaaaatgtgggatccagttgcctatgcccttgggtttattgactgtgataatatcagtgctcgctgcatgctcaccatatttgcattgtttgccacaaagaccgaggcttcccttttgcgaatgctgaagggttcaccggatgtttatctgagtggccccatccgaaagtacatcatggacagagggggcaggttccatcttaggtggggatgcagagaactgcttcatgacaaatctgctgatgggagtatttatgttacaggactttccatgtcaaaggccactgccaagaaaattgtgaaagctgatgcttatgttgctgcttgtgatgtccctggaattaagagattacttccatcagagtggagggaacaggagtttttcaataatatctatgaactagttggagttcctgtagtcacagtgcaactcagatacaatggttgggttacagagttgcaggatctagaaaagtcaaggcgactggggaaagctgttgggttggataaccttctctatacacccgatgcagatttttcttgctttgcagaccttgcactttcatctccagaggattattacattgagggacaaggatcattgctccaatgtgttctgacgccaggagatccatacatgcccttaccaaatgacgaaattattgcaagggtagcaaaacaggttttggcactgttcccatcatctcaaggtttggaagtgacttggtcttctgttgttaaaattggccaatctctgtaccgtgagggtcctggtaaagatccatatagacctgatcaaaagacaccagtgaggaatttctttcttgctggctcttacacaaagcaggactacatagacagcatggaaggtgcaaccttgtctggcagacaagcttcggcctatatctgcgatgcaggggaagaattagtggcattgcggaagaagctcgacgctgagtttaaagacgacttaaaaatatcaaatactaaagatgaattgagcttagtatgataaattttcatgaggtggtcatgttgacatgaagcaatctggtttttttgcatgcaacatttttcaatgtatattcaatcgataaataattacagaatagattgtttcgaagcaagtagtgttgtttatagttctaaaatccggggtctataaattgtgattcctatccc

SEQ ID NO: 4578 - DNA, 562 bp, Glycine max
ggctcgagccgattcggctcgagcttcgaatctgattttcatcccttaacaccaacgccaacgccaattccattcagatcacagtcccttcaattcctgctgcagcatactgtgtgcaacaaagccctaaaatggaggggactgtcttcactcctgcactgcaagaaattgagcatgtaaagtctgatcaaggagaaattctgagcaagcctttcttggatgcgtgcaagcacatattgcctgtaatagataagtttggagctgctatggcccttgttaaatctgacataggtggtaacatatcgagattggaaactatgtattcttccaatccaaccagatttaactacctgtacagtttggtacaggtagaggttgaaactaaaacagctaaatcatcatccagttgtaccaatggacttctttggcttacaagagcaatggatttcttggtggctttgttccgaaacttaatcgagcatgaagattggccaatgtcacaagcatgtacagattcgtataacaagactctgaagaagtggcatggttggcttgctagttc

SEQ ID NO: 4579 - DNA, 611 bp, Glycine max
cccacgcgtccggtttcctacaattgctctcttcccaaatcgccaccaaaacaaaataaaagcaataataataaagaaaattacttatagatttttgtgatacgcctgcagttgttgttctcagtctaagatcaccgtcgaggtcttccccattcaatcaaagcacaaaaatggaggtgactgttttcactcctgcactggaaggaattaagcttgtaaaatcagagcaaggagaaattttgacccagcctttcttggatgcttgcaagcatatacttcctgttatagataagtttggagctgctatggcccttgttaaatctgacattggtggtaacatatcgagattggaatctaagtactcctccaatccaaccaaattcaactacctgtacagtttggtacaagttgaggttgaaactaaaacggctaaatcatcatccagttgtaccaatggacttctttggcttacaagagcaatggatttcttggtggcattgttccaaaacttaattgagcatgcagattggtcaatcgtacaagcctgtacagcatcctataacaagactctaaagatgtggcatggctggcttgtcagctcaagcattagc

SEQ ID NO: 4580 - DNA, 1642 bp, Glycine max
cccacgcgtccgcgagacttctctctcacactcactttctctctctataactctttctcacccgctagggtttccttttcatcgcatcttgagtttgcaacctcgtcttgtgatttccatggagggtgctgggatggaagagaataatattattaatgatgatgataataataacaagtctgaggcgcatttgacttctgccgctgcttttgtggagggtggaattcaggacgcttgtgatgatgcttgcagtatatgccttgaagctttctgtgatagtgatccttccacggtgacgagctgcaagcatgagtttcatcttcagtgcattctcgaatggtgtcaaagaagctcccagtgccccatgtgttggcagcctatcagtctcaaagatccaacaagccaagaattacttgaggcagtggaaagagagcgaaactttaggttcaatccatctagaaatgccacaatatttcatcatccaacactgggggattttgagttacaacatttgccagttggagctagtgacgctgatcttgaagagcgtataatccaacacttagcggctgcagcagcgatgggaagagcacgccacattgctagaagagaaggccagagaaacaggtcatcagctcaaggtcgcccacattttttggttttttcaactaatcctaattcacctcccatggctcctgcttcttcctctccatctcagaggggggatgatgaaccaattcctacaattgctgttgccaatctgtctccaactcctgcaactggagaagaatcatcgcagccgactttagttccgcctgttcaagcagaacaggtgtctgcttcaggatctggatctactgctcttgctacagatcatcagggatcatcctacaacaataggagatctcctaatcagtcatctccaagtagtcaagacagagcagggccatcagaattacaatcattttcagaatctctgaaatctaaactgaatgctgtatcaacaagatacaaggagtcaatttccaagagcacaagagggtggaaggagagatggttctctcggaacaacactatgtctgaccttggatctgaagttaggcgagaagttaatgcagggattgcaactgtgtcacgcatgatggaacgcctggagaccagcgacaataatagaagcaatagcaattctgcccccagtaatatagaggatggttcagttcaggaatataatggtcaaactttaacaccaggcaatgaaggggacggtcttttgagagacaataacacaaaagcttcttgtgctgcaggctctagttcgaactaggcatgtagaaggaattgcttgaactctgaatttgttttgtccaaaaggtagaaatagaattgcccattggggatgtgaaattccatggatgtgatgcattgcctattggctggcgcagaccaggcaagtgataatccattggcctgcagaagaagaccaacaattgtgatattggggataaaaaaacttaaaaaaggcagcagtggtctctttcgtttgaaacttaggaacctatatatgattgtatattcccatcgtaaacttatttatagatattcctcaaataatctttacatgaaaaaaaaaaaaaaaaagaaa

SEQ ID NO: 4581 - DNA, 667 bp, Glycine max
aataaaccagtaataacaggaacttattgttagcattccagaatcaaaaagggaatgtccaagtgaaatgttcctctaaataaagggaatgtcttagactgtcttctagtctgtgtttgatgagttaaagttgcacttattttttacttgttgaatattgatactctgatttttgaagtctgtagatatggacatttatttgctaacatgctcctgttggggttcacaaatattttatatacatattttcatatttcttccttgtcttgtggtttattctttaatttcatgaacttcttgtcctggagaaaaaacaatgttggtatcaagggaacaagcactggctaaatctgtgccagcagccacaatccaattgttgtctgaatcacgtaacaatatttggaggatagactttgtattcaattccaacttttatgttgtaggtgtcaaagaagctcccagtgccccatgtgttggcagcctatcagtctcaaagatccaacaagccaagaattacttgaggcagtggaaagagagcgaaactttaggttcaatccatctagaaatgccacaatatttcatcatccaacactgggggattttgagttacaacatttgccagttggagctagtgacgctgatcttgaagagcgtataatccaacact

SEQ ID NO: 4582 - DNA, 557 bp, Glycine max
cgctcttcaacaattgaaaatagttcaccctgccgccccaacccaacatcgtctttctctctccaatatctctaccctaatccaccctttctgaacaaaaataaaaaaataaaaaaaaacccatcgatttcttggacctccatgacttctttgtctacccatcacacctatagccgaaagcaaaaatctctcggcctcctctgcaccaattttctgagtttgtacaacaaagaaggtgtgcgcctggtcggtctcgatgacgcagcttcgcggttaggtgtagaaagacgtcggatctacgacatcgttaatgttttagagagtgtcggtgtgctaaccagaaaagctaagaatcagtatacttggaaaggattttgtgcaattcctgctgccttacaagaacttaaggatgaaggtttgaaggagaatcctggatcatttgatgactccaatgacaatgcaaaagtgtctgatgatgaggaggaggaagaagaaacatttcctaatattaacattgggagtcagagtgagaaggaaaatcctgattacactgctac

SEQ ID NO: 4583 - DNA, 1151 bp, Glycine max
cggctcgaggtccttattgggtacatactttggcagtattgtattggtgattggtcagactagtgttattctccggtggctccttccttccttcgccatggcgttctacgtgctctcgcgtcgtttatcagctggatccaactcaacgacgctcctcgccctgcgttttgcttcctcttccagatccttctcctcttccttcagggaagaaagagatacctttggacccattcaagttccctccgacaaattatggggagcacaaactcaaagatcgttgcagaacttcgacatcggtgggccccgcgaacgcatgcccgaacccatcattcgcgcttttggcgtcttgaagaaatgcgctgctaaggtgaacatggagtatggtcttgatcccatcgtgggagaagcaataatgcaagcggcacaagaagtagccgagggaaaactaaacgaacattttcctctcgttgtatggcaaactggcagtggcactcaaagtaacatgaatgctaacgaggttattgcaaaccgagcagcagagattcttggccataagcgtggtgagaagtttgtgcacccaaatgaccatgtcaatagatcacagtcttctaatgatacattcccaactgtaatgcacattgcagccgcaacggaaataaactcaagactgatccccagcctgaaaaccttacacggtactctaaactcaaagtcagttgaattcaaagatattgtcaagattggacgcactcatactcaagatgcaacacctttgactcttggacaagagtttagtgggtatactacacaagtgaagtacggtattgatagagtaattggcactttgccgcacatgtatcagcttgcccagggtggtacagctgtagggactggattgaatacaaagaaggggtttgatgccaagatagcagcagcagtagctgaggaaacaaatctgccttttgttacggcagaaaataagtttgaggccttggctgcccatgatgcttttgttgaaactagtggagcacttaacactattgcggcttctttgatgaagatgcgctaataccatacggttgttaggaagtggtccacgctgcggtcttggtgaactcattcttcctgaaaacgaaccaggaagtagtatc

SEQ ID NO: 4584 - DNA, 438 bp, Glycine max
gatacatcatttttcataaaagtgacaggtgaggttagaagagtggctaatcactgagagaactacacctgtaaagtgtgtaacctacgaatattatcgtatgattcatactaaatatatctatatagagagagagagagaaagatttcagctccaacttccaacgagactgcgtgtggtatccttatagattggctgcaatattaccctttttcatttttgaagtatcgtttgaaattgaagtacaatggcactttccttcagggaagaaagagatacctttggagccattcaagttccctccgagaaattatggggagcacaaactcaaagatcgttgcagaacttcgatatcggtgggccccgcgaacgcatgcccgaacccatcattcgcgcctttggcgtcttgaagaaatgcgctgctaaggtgaacatgga

SEQ ID NO: 4585 - DNA, 320 bp, Glycine max
ggctgaacaaaaatactagactattcatttggggtccaacttggaagaagactgcggaatcgcgtatcctgattggtcagacaagtgttatgctccggtgactccttccttcgccacccccactcaaattcaaccatggcgttgtacgtgctctcgcgtcgtttatcagctggatccaactcaaccacgctcctcgccttgcgttttgtttcctctaccagatcctactcctcttccttcagggaagaaagagatacctttggagccattcaagttccctccgagaaattatggggagcacaaactcaaagatcgttgca

SEQ ID NO: 4586 - DNA, 1593 bp, Glycine max
cctcgaccgattcggctcagagtgcctggcgtcgcggacacagaacagagcttgcagcagcgatttctcatttcatttttaacaacacacttcaacaatggccaaaaccttcaaatacatcatcctcggtggaggagtttccgctggttatgcggcgagggagtttgccaaacagggcgttaagccaggggagttggctatcatttcgaaagaagcggtagcaccttatgaacgtcctgctctgagcaaggcttacctttttccagagtcccctgctagacttcctgggttccatgtctgtgttggaagtggaggagaaaggttgcttcctgagtggtacacagagaaagggatagagttaattcttagcacagaaatagtaaaggtagaccttgctgcaaaatctctgatcagtgctggaggagaaacattcagttatcagattttgattgttgcaactggctcaacagttataaggctgacagattttggtgtagaaggagctgatgcgaaaaacatcttttatttgagggaggttgatgatgctgacaaattgtatgaggcaatcaaggcaaagaagaatgggaaagctgtggttgttgggggaggatacattggtctggagcttagtgcagtgttgaaactcaacaatattgatgttaccatggtctacccggagccttggtgtatgccacgactttttacggctggtatagctgaattctatgaggagtattacaaaaataagggtgtcaatatcattaaaggaactgttgctgttggattcacttctaattctgatggagaggtaaaagaagtcaaactaaaggatggcagggtcctggaagctgatattgttgtcgttggtgttggaggaaggcctcaaacagtcttagtcaaagggcaggttgaagaggagaagggtggaatcaagaccgatgctttcttcaaaactaatctctccgatgtatatgctgttggtgatgttgctactttccctttgaaattatacggtgaattgagaagagttgaacatgttgatcattctcgcaaatcggctgaacaggctgtgaaggccatcaaggcagctgaggaaggaagaaacgttgaggagtatgattaccttccatacttctattcccgttcattcgatctgtcttggcaattctatggcgacaatgtcggcgacacagtgctattcggagacaacaatcctgcgtcttcaaagcctaagtttgggacatactggattaaagatgggaaagttgttggggtctttctggaaggtggaactcctgaagagaaccaggctattgctaaagttgctaaggtccagcctccggttgcagatgtagatcaacttgctaaggaaggcctttcctttgctagtaaaatataatggttttatttgggaaggataaaaatgcttggtggtttgcatagaagattgtatctgatcaggctttattttactctgaattatgcattacagaagctttattttgtgtttttcgtttaaaggggttgcccgggatatatatatatatatttattgccgtatctatttcaaaaaaaaaaaaaaaaagggcgggc

SEQ ID NO: 4587 - DNA, 2483 bp, Glycine max
ccgatgaatgccttcctccgctggacatgtcaaagcagccacctacccaggagttggtggccaaggatctgcacgccaacgagtggcgattcaggcatatttttcggggtcaaccgcgtagacacttgctgcaaagtggttggagtgtttttgtcagctccaagagactagttgctggggatgcgtttatatttttaaggggtgagaatggggaacttcgagttggtgttaggcgtgcaatgagacaacagggtaatgttccatcatcagttatctcaagccacagtatgcatctcggtgttcttgcaactgcttggcatgccatattgactggcaccatgttcactgtgtattacaagcccaggactagtccagcagagtttattgttccctatgatcaatacatggagtctctcaaaaacaattataccattgggatgcggttcaaaatgaggtttgaaggtgaagaggctcccgagcaaaggtttactggtaccattgttggaattgaagatgctgataccaaaaggtggccaaagtccaaatggagaagtcttaaggttagatgggatgaaacatcaaacataccacgtcctgagagagtttcacaatggaagatagagcctgctcttgctcctcctgctctgaatcctctaccaatgcccaggcctaaaaggcctcgatctaatgtggttccatcatccccggattcctctgttcttactcgtgaagcttcatctaaagtcagcgtagatcctttgccaacaagtgggtttcaaagggtcttgcaaggtcaagaactgtcgaccttgagaggtaattttgctgaaagcaacgaatctgatacggtcgagaagtctgctgtgtggccacctgttgcggatgatgaaaagattgatgtttctacctcaagaaggtatgggtcagacagctggatgtcaatgggaaggcatgaaccaacatatccagatctactttcaggctttggggcccatggagatcattcatcccatccatcctttgttgatcaaaatggtcctgtagctaatgttggtagaaaacatttgttggattgtgaaggcaaacataatgttctgagtccttggtctggagtgccatctagcctgtcactgaatcttttggactcaaatacaaaaggctctgctcaaggtggtgatacaacttaccaagttcgagggaatttgaggtatagtagtgcatttggtgagtaccccatgcttcatggacataaagttgagcattcacatggaaactttttgatgccaccaccaccatcaactccatatgagagtcctcgttcaagagaactgttgcccaaaccaatatcaggaaaaccttgtgaggtttcaaaactgaaagacagtgactgtaagctatttggcatctcacttcttagtagccgccccattgcatcagagccttctctatcacaaagaaatgttacaagtgagtcagttggtcacatgcatacagcatcacaccatcaacgtgcaattgaaaacgatcagaagtctgagcattctaggggttcaaaaccagctgatggtctgctgattgatgaccacgaaaaggtgttacaaacttctcagccacatctgaaagatgtacaagcaaaatctcatagtggttctgctagaagttgcactaaagttcacaagaagggtattgcactctggtaggtcagtggacctcacaaaattcagtgattatggggaattaattactgaattggatcaactattcgaatttggaggtgaattaacttctccacaaaaggattggcttattgtctacactgataatgagggagatatgatgcttgttggtgatgatccgtggcaggaatttgttgcaatggttcgcaaaatttatatctaccccaaagaggagattcagaaaatgagcccgggtaccttgagttcaaagaatgaagagaatcaatctgctagtgaaggtgccacagacacacaagaaatcaagtgtcagctcaataattcagcttcagatacctgataatttgtagatttgatttccatagcttccagattccggactggagtggaaagtaggtgactgtcataaagccatccagttggagaatatgacctgatgaagaaaattctaattctgaatctgactgctttatcaagtgactgcttgtgtttggaatctgaatatggatggcatgaatgagtatccatccaattttggaccgtgtcgtggaattagtagtagtagtagtagtatatatatatgccttccctgttatacactcctaatatagtagtatgttattgtgccttgtgcaaggtgatagggggtgtatcggccttgcatttttcaacaatcctaccttgtacatagttttactcgcatccttagtacccaaactcgttaatgtaattaagtgtcatatacaagggcggtttatctgattttaaatatgattgtctcttattttt

SEQ ID NO: 4588 - DNA, 509 bp, Glycine max
atactcacactctggttcatcactcataaaccgtgccaacattgaaaccgcgattgaacagcttccggttctcggcgaacgggagagtagctgcctagctgcaggaatcgattagtgattgtgaagatgcggagagacaacggtgatagctaagaagaggacatgcttaataggttaaacagacgcttcttttgcaccgttgctccacgcccttggctttttgtggggctgggcaaccctggcgagaagttcaaaggaaccagacacaatgttggctttgagatgattgatgcatttgctgagtcacaggggattcctatggacactgtccattccaaagccatttctggaaaaggttttgttggtgaagttcctgtttttcttgcaaagcctcaaacttacatgaatctcagtggtgaatcaacaggaccactggctgcttattataagctacctcttaatcaggtgcttgtgttccatgatgacatgaacttgccttgtggggtgct

SEQ ID NO: 4589 - DNA, 524 bp, Glycine max
caattactctgccctatcatcttatacattactactattttttactataacttcaataaattcaaagaagatatttttcttcctaataatataccaattcatttcaaagagtgatggattctccacaaaaaaaataatcaagttttgaagaaagaaatcttcactcactatgctcctctgctgcaatagtacggtaaaatgaatcactgtgttccagatttcgaaacccaaatggacgacgacttagaattctcaattcccgtctcaaagaaaccctccacgtaactctctcttcactattattgtcaatttttttgtttttcctgaaagcgacgacaattaaaacaggcaaaacgacgagatcatggaactgttatggcaaaacggccaggtcgtgatgcaaagccagaaccaacgacccttcagaaagccgccgagccgccggaggcgcaacggcggggacggcgccatttcgtcttcttgcatgaacaagtgttggctattattgtagttttctgcttcag

SEQ ID NO: 4590 - DNA, 1661 bp, Glycine max
cttgtgggtggaggaaggaacgagaaatgaaagaaacatttgttgtgtctgtgtgtgtgggtgggtggtacttagccaattgtgagcaaataacaaacgagtggctttcccttcttctcatcctatatataccattcccatcactccccatgccctctcaattcacttcctatccccttctctgattctctccatatattatctcaaacccctctcacagaatgggaagtgctggaggaactgactatggtgcatacacttatgagaatcttgagagagagccttactggccatcagagaagcttaagatttccatcactggtgctgggggttttatcgcgtcacacatagctcggcgcctcaagacagaggggcattacattattgcttctgattggaagaaaaatgagcacatgactgaggacatgttctgtgatgaattccatcttgttgatctcagggtcatggataactgcctcaaggttacaaagggggttgatcatgttttcaatcttgctgcagacatgggtgggatgggttttattcagtctaaccactctgtcattatgtacaacaacacaatgattagcttcaacatgattgaggctgccaggattaacggcattaagaggtttttttatgcctctagtgcttgtatctatcctgaattcaaacagttggaaactaatgtgagcttgaaggagtctgatgcatggccagctgagccacaagatgcatatgggctggagaagcttgcaacagaagagttatgcaagcattataacaaggattttggaattgagtgccggattgggagattccataacatatatggtccttatgggacatggaaaggtggaagggagaaggctcctgctgctttttgtcgcaaagttatcacttccactgatagatttgagatgtggggagatggattgcaaacaagatccttcaccttcattgatgagtgtgttgaaggtgtgctgagattgactaaatctgacttccgagagccagtaaatattggaagcgatgagatggtcagcatgaatgagatggctgagattattcttggctttgagaacaagaatattccaattcaccacattcctggcccagaaggtgttcgaggtcgtaattcagacaatacacttataaaagaaaaacttggttgggctccaactatgaggttgaaggatgggctgagaatcacatacttctggattaaggagcagatcgagaaggagaaggctcaaggtattgatatatcagtgtatgggtcttccaaagtggtgcagactcaagccccagttcaactaggctcacttcgagcagcagatggcaaagaatgaggtggtcaacatatggctgtagtagtattcacctaaatgtttcaagtgaagagttggattatatacagcaactaaatagcggtatctggttatttttaattagctgctaaggatttcttatgtatctgctggttgttcatgtttgaatcggaagccctgatgttcctaatgtattttatatagttttttaaggcacttcgtggtgcttaaggtggtttactgcactagaagctctaaattatttgttttgaattttgatgtctaaataattgattagtaagcaaataatcttttcttccttgtaatatg

SEQ ID NO: 4591 - DNA, 441 bp, Glycine max
attcagacaatacattaatcaaagagaaacttggctgggctccaactatgaagttgaaggatgggctgagaattacatacttttggatcaaagagcagcttgagaaagagaaggcagaaggtgttgatttatcaggctatggatcatccaaagtggttcagactcaagccccagttcaacttggctcgctacgtgctgcagatggcaaagaataaagctgctagtgcaagggatgttcggcagttgcagcagatggcaaagaataagagtgaacaatgcatttccaagtgaagggcaggcttttatgttgctattttgtagagatctatggttacagattagctattgaagttagttttggaacttgttcatgtatttgtaacggatggtgttatgttcttgttttgtttgaggtaataataataactgctgcttaaggtg

SEQ ID NO: 4592 - DNA, 388 bp, Glycine max
cccacacatgcattccagacccaactgtatccttcattcttctcctaaatcctaatccttcttcactttcagttctcagcatgggaagttctggaacaaccgactatggagcatacacataccaaaaccttgagagggaaccttactggccctctgaaaagctcagaatttccatcactggggctggtggtttcattgcctcacacattgctcgccgcctcaagaccgagggacattacatcattgcttctgattggaagaagaatgagcacatgactgaggacatgttctgccatgaattccatcttggtgaccttagggtcatggataactgcttgacagttaccaagggtgtggaccatgttttcaatcttgctgctgatatggg

SEQ ID NO: 4593 - DNA, 335 bp, Glycine max
cccacgcgtccggtggctttcccttcttctcaattctcatcctatatattgcattcccatcactcccaacgccctctcaattcacttcctatccccttcttctctctcaaacagaatgggaagtgctggaagaactcattatggtgcatacacctatgagaatcttgagagagagccttactggccatcagagaagcttaagatttccatcaccggtgctgggggttttatcgcatcacacatagctcggcgcctcaagacagaggggcattacgttattgcttcggattggaagaaaaatgagcacatgactgagaacatgttctgtgatgaat

SEQ ID NO: 4594 - DNA, 358 bp, Glycine max
ccaatgtcaaatttattttcatgtctttggttcaacgaagttgatcgatttacatctcgtgatcaactaagctttgcttatacctatttgaaacttaggagaatgaatccagagagaccaattcagctatatatgttcaaggattgtgaacgtagagcattactgaagctattccggcatagggaacttccatctccacgagagactgcttgatcagttccagatatataagggatgcacacttcactaatggcacaggtcatcatatttgacatcccttccagcttgattagcctgacaagacatgcatgatatgttttaagctggaccaaacagagggaaactcaatccctggttc

SEQ ID NO: 4595 - DNA, 1187 bp, Glycine max
tcttaaatcttgaaaaaagtgatcggcgtggtaatcttagttaacactaggtctttcgttttcttccaccttctctttcttttctcgctctcttttggtcgtcgttgttgttggttctgctctgagcgagctgtgattaattcgtcagcggatcgggatcgagggtttgctattgttgttctttctgtgtttggttgctattctctgctcctgttttgatagtgttgtagttgcagctccaaacgtcgttttataagttgcctcttagtacctgatgctattgatggacacgtgctctaataccaatgttgtgcatgacgacaacttcataagtaatcttggaaggactttcaatgagtcattacagattcaagatgctcataaatctgttcttgcttctgaggagaatgatatctataatgtgaatgaggaaaaattatgtgaagcaatgaaagatcaagagacaaacataaatatgacgtgcttgaaaaaatctgcaacttttccaattcctaatacaatgttgccttcaagcccatctgataaggaggctgatacttcagtcacaggaccactcaatgagcattctgctcatcaaacttactcactctcagtatctccgcctgctcctctgaagcttatatctgccatgaaaggtagccgtgagaaacatgggggatcacaggtgaaattgaatgtgaaatgggcctctgatgtgtatgatcctatacctacattattatcacacactgttagaagcaacaagaagcagcagaaatccaggaagaagaagcctgaaaagaagaatggaaagaagggtcaaaagggaaattcatctcgagggggcagcaacaaagataagcaggttcgcaagctaggtgggacttctggtttgtgctacaagtcaatggattcttgtgataaagtgcttggagcttctactgaattagatgctcttgaagttcgaagccaggattcatactgtggaactagcttcctgaaaaaatcagttactgaagtgcactactcggttgcagaagcactatgagtgaaatactctgaatgtcttttcctatttccttgaatgtacataaataagcgatattttgctgttggcttatttggtggaaaaataaaaagaaaaagacattgggttgtatggtgaaagttgtttggttgatgtgggt

SEQ ID NO: 4596 - DNA, 441 bp, Glycine max
gttaggtttttgagtttctattgacaatgggataagtaaatcttgtaaaggttagtatgttacaactttgtctctgtaacatttccctttctatttggctcctcctgctagaagtgaggtttgaagggattagaaaattttcaccttactatatatgcattcaagacaggtgatgcttgatagaatcgtattctgtgaagtatagtttttggctcataaatatggactaatatctatcttattcttaacacgtgcctattcttcattaatggcttccatttatttctgtatttttataccacaggctcctctgaagcttatacctgccataaaaggtagccgtgagaaacatgggggttcacaggtgaaattgaatgtgaaatgggccgctgatgtgtatgatccagtgcctacattgttatctcacactgtaagaagcaa

SEQ ID NO: 4597 - DNA, 436 bp, Glycine max
ctgtaaccgaaaaaccaaaaaggacctcctttttgcgcgttgtctctctaccaatcaaatcacagtcacgcagcaaagcaacgctctctttttctccgtcactgccacttctcttctctagggtttatcgtcatttgatctcaacctctcttcctcccaaaatgccgtccccaccgcttccacaatcggaccgctactgcccctgctttttccgatgtgcaatgtatattttgttcgctgctgcggttctggaaatgttgaattctgaactgagataagatgagtaggattgaattatcgagggcgaagtcagcgccggttccattggggactctgattggccgtgagcttcgaaatggaaaagttgaaaaaccttttgtgaagtatggacaagctggatttggccaagaaaggagaagattactttctgatcaag

SEQ ID NO: 4598 - DNA, 279 bp, Glycine max
atcacagtcacggagcaaagcaaggctctcttcttctccgtcactgccactctcattgtctcttcttctctcttctctagggtttatcgccatttgatctcaagctctcttcccaaaatgccgtctccccctcttccacaatcggaccgctactgcccctgcttttgccggtgtgcaatgtatgttttcttgctgcggttctggaaatgttgaattctgaactgagataaaatgagtaggatagaactatcgagggcgaagtcagcgccggttccattg

SEQ ID NO: 4599 - DNA, 624 bp, Glycine max
ccttcagctccctcacctgccccagcaacgccaccagtggttcagaatccagctcccgttgaccgaaataattctgcttctccttctcccctgcctgaaccacgctctgcaccgctatctaaaagtagctcatcaaagaaccatctagttgttattttggctggagttatgggtggtgttgtatttcttctcatttcaatcattggcctatatctctgtaaaacaaacaaggtagctactgtaaaaccttgggccacaggattaagcggacagcttcagaacgcatttgtaacaggtgtgccaaagctaaagagatcagagcttgaagcagcatgtgaagattttagtaatgtaattggcacttcatccattggtacagtgtacaaagggactttatctagtggtgtcgaaattgctgtggcatctgttgcagcgacatcatccaaagattggtcaaagactctagaagcccaatttaggaacaagatagattcattatcaaaagtgaaccacaggaattttgtaaatcttcttggacattgtgaagaagatgagcctttcacaagaatggtggtttttgagtatgccccagatggaacactctttgagcatttacacataaaa

SEQ ID NO: 4600 - DNA, 1181 bp, Glycine max
gggttcagattcttggaatggctgctgtgactattgtttttgcagcccagggtttcatgtcaccagcttccaggggtatgctgcttaccgggatgataattttatatcttttcctgggaattgctgctggatatgtcagtgtacgtctatggaggaccattaagggaacctcagaagggtggagatccatttcctggttatctgcttgtttttttcctggaattgcttttattattctgacaggactgaattttcttctctggggcagcaaaagtactggtgctattcccatttccctgtattttgagttgctcttcctctggttctgcatctcagttccacttaccctcattggaggatttatggggacaaaagctcagcaaattgaatatcctgtgcgaactaaccagattcctagggagattcctgcacgtaaatatccgtcatggcttcttgttcttggtgcaggaactcttccatttggaacccttttcattgagcttttctttatcctttccagtatctggcttgggaggttctattatgtgtttggtttcctgttggttgttcttctattgctggttattgtttgtgctgaagtgtctgtggtcctcacttatatgcatctctgtgtggaagactggcggtggtggtggaaggcattcttcgcatcaggttctgtggctctttacgtcttcttatactccattaactacttggtgttcgacctgcagagtttgagtggacctgtctcagctaccctttaccttggttattcactactcatggccagttgcaatcatgttgtcaaccggcaccattggcttccttatgtcattctactttgtgcactacttgttctcatcagtaaagatagattgaggttcttgttgtcattgcatattaactatgaaaaaggttgattgatataacttgatcacattgcatagtagggcaacggatgtttaattcattgtctgattttatattgcgatgggatctgcagtttgttctccttctgcctgtttcccaaagtagtgtactcattcaagtattcaactagtgtttgagatcatgtttcaagtattttgttcaagtttctttagaaggttgtaattcaaactctcatctcatttcaatactttagaaaaatgatgttagattaaaaaaaaaaaaaaggg

SEQ ID NO: 4601 - DNA, 506 bp, Glycine max
tgtctcagctatactttatctcggctattccctgctcatggcaattgcaatcatgttgtcaactggaaccgttggcttccttatgtcattttactttgtgcactacttgttctcatcagtaaagatagattgaagtttgctttgctatctctcaccagctaaagcaaaaggcatgctggaagaggaatttttcttaaatagtgtaacttttgcttaattctttttgtagcttgatttgcagcatgttgagtggtgaaatagatgccttgctgattgcagtaaatagttgccactcaattttatgttgctatgcgaactacagtttgttcccctttctacctgtctctcccgtaagtttactcattcaactagtgtttggtatcattctgtttcatgtgatttagtttggtcaagttgcttgaggaagttgtaattgcacaaactgtgttattccttattcattcaaacccccccaaaaattaaatggatacttctaggtttcggcc

SEQ ID NO: 4602 - DNA, 638 bp, Glycine max
tctctttctaaatcttaacaaaacgccaacaccgtaacaaccaaaacgcatacacactctcaaaaactctttctccttcttctataaactgtaactgttttcgtctctcccagatcttcggcgcagaaaaaggttctcgaatttcatcgcttcctcctttcgcgatgatgctatagtagaagaagaagacaaagagagaaaaaaaaatggacgatagaggtagctcattcatcactgttaggagaattccccacggggaaacctgccattcaaattctgctgaggttgtggtagggtcagccgcatggcttgggcgaggtctgtcctgtgtctgtgttcaaagaagagatagtgatgcttctaacactttcgatttaaccctagcccaggaggaatgcttgcagaggatacagagacgtatagatgttccatatgatagttctataattgagcaccagcgatgcccttagggctttgtggaatgctgcgtttcctgaagaagaacttcatggcttgatatctgagcagtggaaggaaatgggctggcaagggaaagatccatcaacagattttaggggtggtggtcttatatcattggagaattttctcttctttgctaggaatttcccgaaatcctt

SEQ ID NO: 4603 - DNA, 627 bp, Glycine max
ctcgagcgaatctgtttcaacctcatcgtcatcgaactacccacgttctgctccttcgcagatcatttcgcgtttagcttccacgaaagatggcagacaatgaggatggaggggataagacatctcgtgggaatgaatgggaggttgtatctctcacagcatcaacatatgcagctgctcctggtcctgatgaagttgagatgaaggatgatgggaaagaagatgtatatgggcaggatgaaggagaaacgtcacatgctttattcatgtctagacactttgtctttccacccagtcagcatgaaaacttgcccgtggaacctgactatggtgagattcatgatgattttggagacaaagatgttgcctctgaagagactcctgaagaagtgaccatacctagtggaaaggatgaagaaaacttgacattaccaggattagaagttgcagaggagtttgagggcatgcggtattttgacgagaaaatcaacagattatctgttcgtggtaaacagtttgaggaaggtacaactctaccagcatttggcttcactgacaagggggagagtatgtatgaccctgcaaaatacacttcttttgagggtgaaacagctatcggtggcgtaa

SEQ ID NO: 4604 - DNA, 290 bp, Glycine max
ctgtttcaacctcatcgtcatcgtactactactacccacgttctgctcctttgcggatcgtgtccgggtgacggttttcttgtagattatttgtttattaaatcgactcccttgttcgcccatacaaaagatggcagacaatgaggatggaagggataagactactcgtgggaatgaatgggaggttgtatctctgacagcatcgacatatgcagctgctcctggtcctgatgaagttgagatgaaggatgatgggaacgaagatgtatatggacaagatgaaggagaaa

SEQ ID NO: 4605 - DNA, 1748 bp, Glycine max
caataatcattttacaaaagcctccatcaacaaagtgatcaaagttcctcttttgagtcttcgtgcttccttccacgatccttctcatcaaacccctcatcatagaaatttggaaaaagggttctgaaatcttagctactgagtgcgtaatcactgagatctgccttcatcctgggttggttttgttgatgggtgcttgctggagtaataggattaagtctgtgagtccttccaatacagggatcacttctagaagtgtcagcaggagtggccatgacgtcagctcaaatagcaggagctcatcagcctccatatccgtcgcttctcggagtgagggtgagatcttgcaatcttccaacttgaaaagcttcagctataatgagctaagagcagccacaagaaatttccgcccggatagcgtcttgggggagggcgggtttggttcagtttttaagggctggattgatgagcattcacttgctgctaccaaaccaggaataggcaagattgttgctgttaagaagcttaaccaagatgggctccagggtcacagagagtggttggctgaaataaactatcttggccaactacagcatcctaaccttgtcaagttaataggatactgctttgaggatgaacatcggcttctggtttatgaatttatgcctaagggtagcatggaaaatcatctattcagaagaggttcttactttcagccattctcttggagtttgcgaatgaaaatagcactaggggctgcaaagggtcttgcttttcttcatagtacagaacataaagtcatataccgtgactttaaaacgtcaaatatcctactcgatacaaactataatgccaaactttctgattttgggttggccagagatggtcctactggtgataaaagccatgtctctactagggtcatgggaacccgtggatatgcggcaccagagtatttagcgacaggtcatctcactaccaagagtgatgtgtatagttttggagtagttcttctggaaatgatatcgggaagacgagctattgacaagaaccagccaactggagagcataaccttgttgaatgggccaagccttatctatctaataaacgaagagtcttccgtgtaatggatccccgtctcgaaggtcaatattcacagaatcgagctcaagcagcagctgcgcttgctatgcaatgtttttccgtagagcctaagtgcaggccgaatatggatgaggtggtaaaagcattggaggagcttcaggaatcaaagaacatgcagagaaaaggcgctgatcataaacagcatcatgtacgcaattccggccccggccgtaccaatggtggcgatggtggttcagatgcccctagaaaggcttctgcttatcctagaccttctgcttctctcctccgcggttgagagaattttgtgatgcggcaagtagtaaagcatataacaaaattcggaggtttaggtgtggctggcatgaaccatgtttatgtaagcaatgtatagtttgctttatttccatgttacattttgtgctatatataatttttttttctcgttgtggttctgattgttagacattcaagggtctaatgtgggtccttaaggtgttcattaattttgaaccctgtaaacaactgcaacactacccatgtggttgattctctacatttttatcttttgctttataatatgtaaaaaagtcttctccaagttagaatgtgctcccttaccaaa

SEQ ID NO: 4606 - DNA, 336 bp, Glycine max
gacgaagtgatcaaagttcctcttttgaaccttcgtgcttccttccacgatccttctcctctcatcaaaccccaagtgatagaaagctgaaaaatgggtttctgaaatatcagctaatgttactgagtgcgtaatcattgagatctgccttcatcttggggtgattttgttgatgggtgcttgctggagtaataggattaaggctgtgagtccttccaatacagggatcacttctagaagtgtcagcaggagtggccatgacatcagctcaaatagcacgagctcatcagcctacatacccgtcacttctcggagtgagggtgagatctcgcaatc

SEQ ID NO: 4607 - DNA, 808 bp, Glycine max
gctacgtttccgttttcaatttcttcttctttttcttcattagtctagtgacgaaccatcttaattttctcacaattcctctgttctcgaagggcgtaggagaagagggtttcgttccgtttcaatggggagcgaagagcagaacggcgaattctacctgcgttactacgtcggtcacaagggcaagtttggtcacgagttcctggagttcgagttccgcccagacggcaagctccgctacgccaacaactccaactacaaaaacgacaccatcatccgcaaggaggtttacctaacccccgccgttctccgcgagtgccgtcgcatcatcgccgagagcgagattatgaaggaagatgataacaactggcccgaaccggatcgggtggggcggcaggagctcgagattgttatggggaacgagcacatttcgttcaccacgtcgaagattgggtctcttgttgatgttcagagcagtgctgaccccgagggtcttcgcatcttttactatcttgttcaggatttgaagtgctttgtcttctctcttatttcacttcacttcaagatcaagcctatctaatgtgtttgcaataatatgagttcatcctctggggaatatgtactttaacaactatcacttttctgctaatggagttcgacctctgattgagtgactttaatcttgaaatgatttggttctgtatgggtgattacatgaattggaattttaaatttgagggtataacccttgttctaaagtgttgattggtttggtttttatggatggattagttattctttcgttgct

SEQ ID NO: 4608 - DNA, 295 bp, Glycine max
atttaaaagaaaagaaaaacgttcgttaaatactcatttgaacttacaccgcgtgacctagccaagccaacacaaagggcacagaagagggtttctttccgtttacgtttcaatggggagcgaagaggagaacggcgaattctacctgcgatactacgtcgggcacaagggcaagttcggtcacgagttcccggagttcgagttccgccccgacgggaagctccgctacgccaacaactccaactacaaaaacgacaccatcatccgcaaggaggtttacctcacccccgccgtt

SEQ ID NO: 4609 - DNA, 659 bp, Glycine max
  unsure (1)..(659): unsure at all n locations
aaaaaaaaagaggcaaggttaggtaataggtggttttatttgaaggaaagaatctatattgaatgttctggtcttcctttgtgtttttgtagatagaagccatcagtcatggataggcttctatcatcgtcttcacccccttcttttacatttctcactcgattcgaatctgcaactgcaagattcaatttctctccgtcaacacgttctcactctcacttgaagcggctctcctcaatttgttgccagcatgcaaatccatctcctttttcctcttccactccctttctcgcttcttccaaccaccccattaattttccatccttttcctcttcttcagttcgctccacacccgaatcccattctctcaatcaaatcaaaactggggctttccaaaaaccaaaggtaaagctactctttgattnttaaaaattccagggaaccttactatccaattcgaatttcatatgtgtgctaagggggaagaatcttcctttgaaacctaaattaaatgccatgcttcttgtaaatttagtttatctgttcttttactgtttcaatctgtaaccctgcttcagttntttttcttattttctcgcgtaccaaacaaatctatgaccctggtttggtactagggcaagttgttagcttcttagtgg

SEQ ID NO: 4610 - DNA, 768 bp, Glycine max
gagtcttcatttgtgtttttgtagatagaagccatcagtcatggataggcttctatcatcgtcttcacccccttcttttacatttctcactcgattcgaatctgcaactgcaagattcaatttctctccgtcaacacgttctcactctcacttgaagcgggtcacctcaatttgttgccagcatgctaatccatctcctttcactccctttctcgcttcttccaaccaccccaatacttttccatccatttcctctccttcagttcgctccacacccgaatcccattctctcaatcaaatcaaaactggggctttccaaaaaccaaaggcaataacagctcggacgcttgtaatactttctgctcttgctatgatcttaatccaaccagctattgcaccagcagcttttgctacctttcaaactgctgccaagaccggtggtcctgctgctgcagttggtagaaaactaatccatactgagctcctaagtagtgcttggactggtttcttagctggctgcttgcacaccttatcagggcctgaccacctagctgccttggctccattgtcaatcggtcgaacacgaatggagagtgctgctgttggagccctttggggttgtggccatgatgccggtcaagctatctttggcttaatatttttgctcttaaaagatcgacttcacattgaaattatccaaacttggggcacccgtgtggttggccttaccctgctagtaattggtgctatgggaattaaggaaccttc

SEQ ID NO: 4611 - DNA, 458 bp, Glycine max
gactatttcttcacgagctcattcattttcatgcctccgtgcccccatcccaacccctcactccgaataatttccaaaatccaaaggcaataacagctcgaacgtttgcaatactctcttctcttggtttgctcttaatccaaccagcttttgctccggcagcttttgccacgtttcaaaatgctgccaagactggtggccctgctgctgccgcagttggtggaaaactaatccgcactgagcttctaactagtgcttggactggtttctttgctggctgcttgcacacactgtcagggcctgaccaccttgcagctttggctccattgtcaattggccgaacccgaatggagagtgctgctgttggagccctttggggttgtggccatgatgccggtcaagttatctttggcttaatatttttgctcttaaaagatcgacttcacattgaaattatc

SEQ ID NO: 4612 - DNA, 538 bp, Glycine max
  unsure (1)..(538): unsure at all n locations
atggaagttggaagaaggagtgagatcagaggaaggggtgaaaacatcgaaagagaaagagcgaaagagagagagatggcgtcgggctggggaattaccggaaacaaaggtcgctgctacgatttctggatggatttcagcgagtgcatgtctcgctgccgagagcccaaggactgtgctcttctccgcgaagactacctcgagtgcctccaccattccaaggagtttcaacgacgaaaccggatttacaaggaggagcagcgcaaactaagggctgctaccaggaaaggccaggaggatggggttaatgaacatcatcattagaacctggagttaattttcaatctaagcttctgaacaattattttgataaaatgtttgtgatttgcttggatcggtattcctgcatgttctgtgagcccatattttatacttttgatgttgcgggcttcttttccctgtgcaataaattcagaagtcaacttaggactgcaatttcacttaaaaaaaaaannannnanaaaaaaannaacccttg

SEQ ID NO: 4613 - DNA, 795 bp, Glycine max
cggacacacaaaaaaagaaagtaaaaaagaaaaccctagaggagaagaagccaaaaaaaagaagccaaaaaaaaggctccaaagatgggtttcaaaagctcttctcttctatgcctagctcttttgcttgcatgctcttcggctattcatgcctttgacatcacacaactgctaggccaatatccagagttttccacattcaacaaatacctaacggaaaccaagctcgcagacgaaatcaacagccgcaacaccatcactgtcctcgccgttgaagactcagccatgaattccattgctgccaagtccccagaagccattaaggccatcattagcacccatgtcatccttgacttctttgatgagaagaagctcatggaagctcaagctaatagccaacagttgacaaccctattccaggcctcaggcattgcagtgaaccaacaaggcttcctcaaggttgcactcgtcggcgaaggcgagatcgccttcggctcggccgtgagtggcgccccagtcgacgccaccgagctcatgaggaccgtcaccagcgagccctacaacatctccattctccaagtcgccaaacccatcctagtcccaggtgttgattcacaaaccccagcctcatcatctggtgcacaatcctcacaaggagccaatgctcccgttgctgcacagggtgccaaagctcctatgtcatcattacaaggtgccaaggcacccattccgacaccggttgcaaagtcacctgtgccagcacagagtgccaaggcaccagttccttcgaagact

SEQ ID NO: 4614 - DNA, 385 bp, Glycine max
cttttcttcaagcttggtttcggaaaaaaaaaaacgtaaaagagacaaaaaaaaaaacccctagaagcgaagaagctgaaaaaaggctccaaagatggatttcaaaaactcttctcttctatgcctagctcttttccttgcatgctcttcggctattcgtgcatttggcatcacacaattgctaggtcaatatccagagttttccacattcaacaaatacctaaccgaaaccaagcttgcagaccaaataaacagccgcaacaccatcactgtcctcgccgttgaagactcagccatgcattccattgctgccaagtccccagaagccattaaggccatcattggcacccatgtcatccttgacttccttgatgagaagaaactc

SEQ ID NO: 4615 - DNA, 1420 bp, Glycine max
gaaagatcctttaccaatttgaaggataatactaaacaagtagtattattatcgattttattgtaccttccaaacaaaccctgcagcgatttgtttccttccatctccgccgtaccatgtcggaagcaccaccgcctccaactgccgatgcgtcaccgcctccgtactggtgctaccactgcgagaagcgcgtctccgtcgaaacgctcgcgaatctccccgacgtcgtctgcggcgagtgcaagaacggctttgtggaatccatgcccacgccgtcgcgctctcgctccccctccgcctcctccgacgacccctacttcggctcgcagttcctccaggtccttcgcctaatcgctcagtcggcgcgtgacgacgacgcgtcgcctccgccgccgccgagccgctctccggagaacgatttcctcaggatcgagctcggcggctgggacaacgacgaggagaacgaaaacgacgacgataacggcgacgaggagttcgaggaacacgaggaggcggaggatcgctccggcaacgaagatccgcacggaggagacgacgaggatctgagaagaaggaggcgcgagctacttcggcttcggattagggatttggcgacgcgcacgaggagcatgcggaaccggatcttggattgggccgagattctgatgggccttgaggacaattccatcgagttccgcctccagctgccggaatccgaccgctacgtcgggaatcccgaggattacgtcgacgcggcggagtacgaggcgctgctgcatacgcttgcggaaagcgacggcggaggtaggaggggagcgccgccggcgtcgaaggccgcgctggaagccttgccgacggtgaagattgcgtccgaaagcgaagccgtggcgtgcgctatatgtaaagatttgctcggtgttggagacgcggcgaagaggttgccgtgcgggcatcggtatcatggagattgcattgttccttggttgagttctcgaaattcttgccctgtttgcaggtttgagctaccaacggatgataaggaatacgaggaagagagagtggttatcgctgcttcttcgaattcgaacggagcttcgagttccggtggaggtggaagtgccattgtttgattccgcttggtatgctccgtcatgctctgctctgctctgttctcttctgccatttgtgtaatatatttcgtggtttctgaatttcttctttttttgttgttggcattagtggatttaaatcaaagcttgcgccatgttattattaatttatttgaagcttttattatgtagttggcttcttagctttcagatgatgctaagatacttgtatatagcatttgaatcaatgtgaatgtgatcatatcacactacctcaatggaatttacactttctccctgttaataaaaaa

SEQ ID NO: 4616 - DNA, 515 bp, Glycine max
cgtccgaaagcgaagccgtggcgtgcgctatatgtaaggatttgctcggtgttggagacttggcgaagaggttgccgtgcgggcatgggtatcatggagattgcattgttccttggttgagttctcgaaattcttgccctgtttgcaggtatgagctaccaacggatgataaggaatatgaggaagagagagtggttaactctgcttcgagttccggtggaggtggaagtgccattgtttgattccgcttggtatgctccgtcttgctctgttctcttctgccatttgtgtaatatatttcgtggtttctgaatttcttctttttttgttgttggcattagtggattttaaatcaaagcctgccccatgttattatttaatttatttgaagcttttattatgtagttggcttcttagctttcagatgatgctaagatacttgtatatagcatttgaatcaatgtgaatgtgatcatatcacactacctcaatggaattttcactttctccctgtt

SEQ ID NO: 4617 - DNA, 509 bp, Glycine max
catacaaaccctgcagcgatttgtttgtttttatctccgccgtaccatgtcggaagcaccaccgtctcagccatcgcctccaaccgccaacgcgtcaccaccgccgtactggtgctaccactgcgagaagcgcgtctccatcgaaacgctcgcgaatctccccgacgtcgtctgcggtgagtgcaagaacggcttcgtggaatccatccacacgccgtcgcgctctcgctccccctccgcctcctccgacgacccctacttcggctcgcagttcctccaggtccttcgcctaatcgctcagtcggcgcgtgacgacgacgcgtcgcctccgccgccgccaagccgctctccggagaacgatttcctcaggatcgagctcggtggctgggacaacgatgaggagaacgacaacgacaacaacgacgacgaggagttcgaggaacacgaggaggcggaggatcgctccggcaacgaggatccgccgtaccatgtcggaagcaccaccgtct

SEQ ID NO: 4618 - DNA, 823 bp, Glycine max
gattgtatttttaattagaaaaggcgcagaaacagaaacagaaagaatggctggtcccggcaaatgcttcctcgtgacgggtcctccgggtgtgggaaaaaccactcttattatgaaagtattcgagtccctcaaagtcaatccatccctcaagcttcagggcttctacactcgggaaattaggcgcgccggccagagggttggttttgaagtggtcacactcgacggtcgcactgccccacttgcttccatcgacatttcaacccccgagtctctcagatggcctaacgttggcaagtataaagtcgatgttgcttccttcgagtcactagcacttcccgagttacaggttagagaagacactgatctcttcatcattgacgaagttggtaagatggagttgttcagttcctcattcttccctgcagttctaagagtttttggagtcaaatatcccagttttggcttccattccagttccaaaattcggcagagacatacctgaagttgcaaggttgcggaatcatgcaggggcaacttgttttacattgagcgttagtaacagagatgctgttagagaacagatacgctcacaattggaagatatgctgacaaaacactagtcattgcaagtttgtggtctgaattcataccgtgtaatgtagaataaattatgaatttatgatgggctaatactatttagtgagagaaaaaaaagtgcaaatcttaatcgagccttaaataagttgataagctagttgagctttgaataccattagtaatatacatgactttaccgcatgatagtccttttgtaatgact

SEQ ID NO: 4619 - DNA, 703 bp, Glycine max
gattcaattttggatttggtgctagcatcccttcccgaagaaacacgaagcaacgggacagacacacaactgcagttaaagcagaagtttgatgccttaaaaggtagtgtaagacacttcagcttcttcccaccatgagggggaggtatgttggcacattctttggcacatctagcatcctggttgaaggttagggaagacgatcaatcaggtgatgggatcgaatctgtgatcaataaagttgaagtttatttggcagaaggaaaacttgctgaagcagcagattgtctacaagaaagtgtgagaggcacacaagctgcagaaattgttgcaggttgggtgagacaagcaagaaacagggctatttctgagcaagctgtgctgcttcttcaatcctatgccaattcccttagccttacatgattctcaaattttgaatatttacaaaatcatgttgattcaatacaaaaggttgcagagattatctttggcagattatgccaacgggaattgctgacctacgaggaaaataattaacgtttttgtttcatagcagcggaaattagtagattctgtgatttctatgcaactccaatggctttggagttttgactgaagtgatatcaggctctgtataattttgtcttttgttttacctgaataacagaaatgttgcattgcaagatattgacatttcaataat

SEQ ID NO: 4620 - DNA, 390 bp, Glycine max
cttatatatagctatcacccctctccaaagcagcattgtaacagagaaagaaacatttgagcaaaaatggttcaagcacagcctctacaacatgttggtaatggtgcagggaaagaagatcaagcttattttgatccaagtgctccaccacccttcaagattgcaaatatcagagcagcaattccaaaacattgctgggagaagaacacattgagatctctgagttatgttctgagggatgtgttggtagtgactgcattggtagctgcagcaatcggcttcaatagctggttcttctggccactctattggcctgcacaaggcacaatgttttgggcactttttgttcttggacatgattgtggtcatggaagtttttcaaacagtcct

SEQ ID NO: 4621 - DNA, 1815 bp, Glycine max
cttacgcgtgcttttacgcgtgggcggacgcgcgggctctcatcagattcgggtcgggttagcgttatcggataacttcgcccataaattctctgtttacggggcgaaaatgacagtattcttagccacgaggctcgtgttgcggagatccccgccgcttctctggcggcgcagcttttctcgggcggcggtagaggccgaaaaggacactgttgccgtgccgtcgcttccgttgttcgattactctccgcctccgtatgcggggcccaccgctgacgagattctggcaaagcgcagggagtatctgagtccttccatcttgcacttctacaagaatcccgtgaacatagtggagggtaagaagcagtacctgtttgacgagaaggggagaaggtacgtggatgcgtttggagggattgctacggtgtgctgcgggcactgtcaccctgatgtggtcgaagccatagtcaaccaaaccaaaaagttgcagcactccacagttctctaccttaacaacgccatcgccgatttcgctcaagctttgacttccaagcttcccggtaatctcaaggtggtgtttttcacaaactctggaacagaagcaaacgaattggcgatactgattgcaaggttatacacagggtgtcatgacataatatctctaaggaatgcttatcatggtaatgcagctgggacaatgggagctacagctcaaagcatctggaaatttaatgtagtacagagtggtgttcatcatgcagtaaatccagacccttatagaggcattttcggttctgatggagagaagtatgcaagagatgtacaagatatcattaacttcggaacttctggaaatgttgcagccttcatttctgaagccatacagggagtggggggtatcattgaattggctcctggttacttgccagctgtgtacaataccattaaaaaaacaggaggacttttcattgctgatgaggttcaggctggctttggtcgcactggtagccatttctggggatttgaggcccacaatgttgttcctgacatagtgacaatggctaagggcattggaaatggcattccccttggtgctgttgtaactactcctgagatcgcagaggtcttaacccgccggagctactttaacacatttggtggcaaccctgtttgtactgctgcagggttggctgttttaaaagtaatagagaaagagcagcttcaacaaaacgcgtttgtggttggatcctatttgaaagaaaggctcactgccctcaaggacaaatatgaattaattggtgatgtgaggggaagaggcctaatgctaggagttgaacttgtcactgatcgtgaacttaaaactccagcaaaaggtgaaacgctgcatgtaatggaccaaatgaaagaattaggagtacttattggtaagggtggttactatggaaatgtcttcagaattacacccccgttgtgtttcaccaaagaagatgcagactttgtagcagacgcaatggacttgaccttgtctagaatgtgaagctgagccaagatcctagctttaataaaagtctattatatcataaatgaaactgtattatctcatctccatagctggtaaaaattacatagatgcagacttatatagctaaaatagcagaccaatctactgtgatcttaggctatgcatgagccaacaactcgttgtctcttgtttgatgtttatctttccaaatgaatgagccaacaactcgttgtctcttgctttgtcgtttatcttttctcgtagcatgttattagcttaatatctttttccct

SEQ ID NO: 4622 - DNA, 1316 bp, Glycine max
taatttttaattgccgataaaaaaaaagggcaaccgttcgtaaaaccaaaacacttcctgctagaaataaagcgtatgtcatcagagtatggtaaaacatcaattcaggctaacacgaaactgacaaaaaaaacggctaacgcttaccaacttcaaaaatagtatccaaaatttcggacctagaaaataaacagtacatgtaaataaattttcaagaaaatgattccctagacgcaaaataagatagtttctagttgtgcaacgatgatacggcatctgcaatgaactttcactcatcatcttcatcgttatcagcagcagagttgagagctgccacacgtgaaatcaacttagccttcctctcctcataagtcagcttcttcaagttgtacttgcagaaagaggcagatactctcaagaacattctcctcttgtgctcctttgggggctgcttatcagatttcctgagagtaggatcagcacggatggcagcatgaaccttcttgtacagtgcctcaataccatcagcttctatcccacgcttgatgtattcactgaagtgtgactggtatttctctggttcatcttccgccaagatcttcatataggcagcaacatgtccaccaaaaacatatttgcgatgaacctcagcatcaagctccttcttctccttatcaaacccagcaaacctcttgtcactgtgaggaatatccaaccccccatccagagctcccttaagggcaccaaagacacggttaccggttgtagtcctaataagaccaacatcaaggagagcacggaatggcctcctgctctcagcaggttccactgaataatcctctccagtagcctcaacatttccttcatactcctcatccatttcaagtgttttgaggactcttcgggccaacaggagaccagtgcaataagctgctgcataatttgtaagtcctacttcaagaccatatcgtggcagctcatgtgaatatgctgtagcaagaactaaatcgccggcaatgctagcagatattatttgtgcaacaatgtccttgttgctaaagcgaacaacaaatcggtatttcggagtgttatatttgttcttgtcctgattaatcaaccgaatcctggcacggtaatcggtttttccctctcttcttctcttgaacttgacttgatatctcttgaagtaggcttttgatttctgagccttgacgtacaccattgctgctgtgaaactcgacctcttcccccaaaatgacgaaagagagtaagagcgatttagggttagcctttgcttaaatgatatgatgtttttc

SEQ ID NO: 4623 - DNA, 457 bp, Glycine max
tgtcactgatcgtgaacttaaaactccagcaaaaaatgaaacattgcatgtaatggaccaaatgaaagaactaggagtacttattggtaagggtggttactatggaaatgtcttcagaattacacctcccttgtgtttcaccacagaagatgcagactttgtagcagacgcaatggacttgaccttgtctagaatgtgaagcttatagccaagatcctggctttaataaaagtttattatatcataagagaaattgtattatgtcatgttcataactggtaaaatttacatagatgcagacttttatagctaaacacgaatctactatgatcgtgggatatgcatgagccaacaagtcgttgtctcttgttttgttgtttatctcttttcatggcattttatttgcttaatatcgttttcactggtgcctatcaaaaaaaaaaaaaaaaaaaaaaat

SEQ ID NO: 4624 - DNA, 567 bp, Glycine max
gacatcaaagaatggtaaaacatcaattcaggctaacacgaaactgacaaaaaaaacggctactccaacttcaaaaatagtatccaaaatttcggacctagaaaataaacagtacatgtgaataaattttcaagaaaatgattccctagacgcagaataagatagtttctagttgtgcaacgatgatacggaaatcttgcaatgaactttcactcatcatcttcatcattatcagcagcagagttgatagccgccacacgagcaatcaacttagccttcctctcctcataagtgagtttcttcagattgtacctcttgtgttccttcgggggctgcttctcagatttcttgagagaaggatcagcacggatggcagcatgaaccttcttgtacagtgcctcaataccatcagcttctattccacgcttgatgtattcactgaagtgtgactgatatttctcaggttcatcttccgccaagatcttcatataggcagcaacatgtccaccaaaaacatatttgcgatgcacctcagcatcaagctccttcttctccttatcaaaccca

SEQ ID NO: 4625 - DNA, 644 bp, Glycine max
cattaattcaagcttaacacaaaattgaccaaaaataaggctctcaactccaaaaagtatccaaattttggacatagaaaataaacagtacaggcaaataacatagtttctacttgtgcagctatgagacagcatccgcaatgaactttcactcatcatcttcatcattatcagcagcagagttgagagctgccacacgtgcaatcaacttagccttcctctcctcatatgtcagcttctttaagttgtacctcttgtgctccttcggggtctgcttatcagatttcttgagagtaggatcagcccggatggcagcatgaacatttttatacagtgcctcaataccatcagcttctatcccacgcttgatgtattcactgaagtgtgactggtatttctctggttcatcttccgccaagatcttcatataggcagcaacatgtccaccaaaaacatatttgcgatgaacctcagcatcaagctccttcttctccttatcaaacccagcaaacctcttgtcactatgaggaatatccaaacccccatccgaagctcccttaagggcaccaaagacacggttgccagttgtagtcctaataagaccagcatcaagctccttcttctccttatcaaacccagcaaac

SEQ ID NO: 4626 - DNA, 509 bp, Glycine max
aaaaaaaaataattaagaaataaataaaaaaaaatataaataataaaatgaataagcaaaacaaaagaactaaaacatttccttcgtactcctcatccatttcaagtgttttgaggactcttcgggccaacaggagaccagtgcaataagctgctgcataatttgtaagtcctacttcaagaccatatcgtggcagctcatgtgaatatgctgtagcaagaactaaatcgccagcaatgctagcagatattatttgtgcaacaatgtctttgttgctgaaacgaacaacaaagcgatatttcggggtgttatatttgttcttgtcctgattaatcaaccgaatcctggcacggtaatcggtttttccctctcttcttctcttgaacttgacttgatacctcttgaagtaggcttttgatttctgtgacttcacgtaaaccattgctgaaggaactcaagggcagcagcgcctgagtgggcggacgcgtgggtggaagagtgccgcacgc

SEQ ID NO: 4627 - DNA, 446 bp, Glycine max
tgatagtgatttatttttggatgctttttatactgaagccaaagcagaagctacttttatcacttctagtcgaatctaggttgaggcaaaatcatttttacctaccaatagccaattttattaaatcaagtttaactacagtcaaatcaattctcattattcacactcccaaatcatttcttcatgcctgaattaagctaattaagatatcgataagaaaaggatacaaagcgatccacaaatcggtatttcggagtgttatatttgttcttgtcctgattaatcaaccgaatcctggcacggtaatcggtttttccctctcttcttctcttgaacttgacttgatatctcttgaagtaggctttcgatttctgagccttgacgtacaccattgctgaagctcgatctcttcccccgaacccacgcgtccgcggacgcgtgggcga

SEQ ID NO: 4628 - DNA, 566 bp, Glycine max
ttgtcttaaaaaatagtaaaatatgtggcgtctaatttgtgaagtgtatgttcaattaaggaactggatttagccttaagattaagtaaatctggattaaatttaacctaacaaattaaagtggtacattctttcattgtcgaaaaaaaaaacaagcacagttcgttaaactaaacaacttcctgatagaaacaaagcgtatatcataaaataaggtaagacatcaattcatgttgacacgaaattgaccaaaaatacggcttactcaacttcaaaaagtatccaaaattttggacctagaaaataaacagcacatgtaaataaaatgattgactgaacgcaaaataagagagttttagttgtgcaacgatgacatggaatctgcaatgaactttcactcatcatcttcatcattatcagcagcagagttgatagccgccacacgagcaatcaacttagccttcctctcctcataagtgagtttcttcagattgtacctcttgtgttccttcgggggctgcttctcagatttcttgagagaaggatcagcacggatggcagcatga

SEQ ID NO: 4629 - DNA, 514 bp, Glycine max
atccgattcgggtcgggtttgtgttatcggaaccttcaccggaaaattctcagtcgacgtagcgaaaatggcggtatccctagcgacgaggctcgtgcggcggcgatcgccaccgcttctctggcggcgcagcttttctatgtcggcagtggacgccgaaaaggaagtcgtggtcgtgccggagcttccaccgttcgattactccccgccgccatatgcgggccccaccgctgaggagattctggcgaacgcagggagtatcttagtccttccatcttgcattcatacaagaaccccgtgaacatagtggagggtaagaagcagtacctgttcgacgagaaggggagaaggtacgtggatgcattcggagggattgctacggtgtgctgcgggcactgtcaccatgatgtggtggaggccatagtcaaccaaaccaagaagttgcagcactccactgttctctaccttaaccatgtcatcaccgattgtgctcaagctgtggcctccaaacttt

SEQ ID NO: 4630 - DNA, 464 bp, Glycine max
  unsure (1)..(464): unsure at all n locations
nnnnnnnnnnnnnnnnnnnnnnnnnnnnnnnnnnnnnnnnnnnnnnnnnnnnnnnnnnngaccaaaattaaggcttactcaaccccaaaaaaggttcccggattttgggcctagaaataaacaggcaggcaaataaattttcaagaaaatgattctgtagataccaaataagatagtttctactagtgtagccatgagaaggcatctgcaatgaactttcactcatcatcttcatcattatcagcagcagagttgagagctgccacacgtgaaatcaacttagccttcctctcctcatatgtcagcttctttaagttgtacctcttgtgctccttcggggtctgcttatcagatttcttgagagtaggatcagcccggatggcagcatgaacatttttatacagtgcctcaataccatcagcttttatcccacgcttgatgtattcactgaagtgtgactggta

SEQ ID NO: 4631 - DNA, 414 bp, Glycine max
tcaaagaaaaatgtatttttttcttcttctgatacttgagactagagaaaataccagacaatcacaaattacgatcacacctcaggttaacaaaaactgattttataaggtaaaacatcaatttaagctaacacaaagctgaccaaaaataagacctactcaattccaaaaagtatacaaattttggacctagaatttattttttctggaaggcaaaagcatatatagaaaaaaatttggaccaagaaaataaacagcacaggcaaatagattttaaagaaaatgattcatggacacaaaataagatagtttctacttgggcaggctatgggacagcatctgcaatgaactttcactcatcatcttcatcactatcagcagcagagttgatagccgcacgcgtgcaataactta

SEQ ID NO: 4632 - DNA, 540 bp, Glycine max
gactaaacagagtaactaactaaattaaggagagtccaagtgtgtgggagacaaagagagacatggctaagtggtgtatgttggtgttggttcttgctctggctgtggctacaagtgccagagatgttcccaatcccaaggatgctggtctcaatgaccagaagaacttcatcagctatggtggagttggtggctattctggaattggaagcaatggactaccttttggaggtgtcggaataggtggtggtattggcggtggtggacttggtggcggcctcggcggcaccaccgggataggtgggttgggaggattcggaggtcccattggtggcggtggtgttggtggtggtagcatacctcatcctaccccttgatatgaacatgcatgcatatggaatttcttctcgtttctttggattaccctagtcaacgaccttcggtcaggaaataattgtggtttatgttcgtgtcgtttatcttacaaccattttagagtttaatttattatcgcctattgaaattaagcaaaaaaaatag

SEQ ID NO: 4633 - DNA, 621 bp, Glycine max
caatattatgacagtgatgatgaatatgctcctgacagggtgccactcttgagaaatgctccacctcattatgttgttgttgatccaggatatgtgcatggaaatgatgcatggaggagacaagacaaataggtaagcccattttgctttgaattgaaccttgatgcttggagccatggaaggtgggcgtggcaatcattttttatgccagttgacttagaaggggacctgtatgcttgagatggattagctattggattaatggctatgggagaaacaagttcttatcgtgacccttgcatctgttacaccaatttcatacagttatgagcaaacgtatacgttgtatcatatatttttatatttcttttttgggtgaatggacgaacgtatgtatcatattgattcatgtctgtatatcataaataaaatgcagaatctcttgatgaatgatccccctgtatcttctgttaaatgtatcacagaagttggatcaatagatagataagaacaaattttcctttgtttatcctgattactgatcattcatccagttgatacaaaatggaattttggtgcccggtgcatttacacaaaaacatgactgtcctttgttttttt

SEQ ID NO: 4634 - DNA, 587 bp, Glycine max
aaaaaaacccatcaacaagttggcaggatgcccggggaaactgttctcaaaatttttaatgcaaaaagttcgcactctaaacttaaatttgtttgctttggagcggtatatggaggacttaatttctagatatgtcaatattttcaaagagtacagcaaagacatgggaggaaaagatatccttatccagaatatcaaagatggcattaggaatctcgttgaccggcaggatgctataacaaaaggtgcaagtgatctcaaatcttggaagtcccatatttccatgcagttggatcatctactcagggacaatgctgttttgaggtccgaggttaatgaagtccgcaggaagcaaacatctttagaaaacaagggtgtgctagtgttcttagtgtgttgtattttttcattgttagttatattacggctgtctctagatatggctacgagtgtctatagagtagtactgagtgttaatagaacagattgctccaggaaattttgtgccgttagctcttcatggtttctcctattattgaattgtatcattattatttttatattaactctgtgatagtccatttttt

SEQ ID NO: 4635 - DNA, 353 bp, Glycine max
cttgttttctaaagatgtttgcttcctgcggacttcattaacctcggacctcaaaacagcattgtccctgagtagatgatccaactgcatggaagcaaacatctttagaaaacaagggtgtgctagtgttcttagtgtgttgtattttttcattgttagttatattacggctgtctctagatatggctacgagcgtctatagagtagtactgagtgttaatagaacagattgctccaggaaattttgtgccgttagctcatcctggtttctcctactattgaattgtatcattgttatttttatattaactttgtgatagtccattttttaaatatgttgttaacttgtgtga

SEQ ID NO: 4636 - DNA, 630 bp, Glycine max
ggtagcagggtttccagccaacgtgtaaacacgccagtgacggcgtccttctttacttagttcaactcaacccaaggagctcaaggagatggctctgggaagaggcagtgcagtggttctactactttgcttcttgctgcttcactctcagatggctcgtgctgccacctacacagttggagattctgggggttggacctttaacactgttgcctggcccaaaggaaagctctttcgggctggtgacacacttgctttcaattatagccctgggactcacaatgtggtggccgtgaacaaggctggatatgatagctgcaagactccaagaggagccaaagtgtataagtcagggacggatcagatcagacttgccaagggacagaactacttcatctgcaattatgttggtcactgcgagtctgggatgaaaattgccatcaacgctgcctgagtttaataatatggttaactacccatacatattgtattgtaatgcaaattgcaccctttagtgggaagttagctcctttaaataatgttaagaaaaaaagtagctatgtgtgctcttctataaatgtcacttatctataaagaataaatgtcggcagtcgataaaaaaaaaaataa

SEQ ID NO: 4637 - DNA, 459 bp, Glycine max
gacaccaagccacaattccaattcatcctctctctcccatagataacaacaaaaaagtcccagtcacgaattagtcaccaccatcagtacatacacttcctcaaaaaatggaaatggaagcaagcccaagcccaagcccaagcccgaagcaagtagtggcaaggaagctatggaacatagtacgcatcgtgttcctgatgttgagaaagggcatatcaaagagcaaactcgccgctgacttcaacttgaacttgtcgttcaaacgtggcaagctggcagccacaaaggccatagccaacactatcctccaccgctcccaaaacgacgacgccgtttacccgcgcgactacgagttcagctgcagcaacagccccgcgctcttccacgtcatcaagcgcagaccaataagcaccgtcaccaccaccaccgctgcaccaccaccaccaagttcccccacca

SEQ ID NO: 4638 - DNA, 901 bp, Glycine max
ggaaccttagtttcctttataaatacccactctcttctccatcagtttttctccaacacaaacaccacggccgccgccgccaccgagattatcacaacgcgccgccgccaccgagattatcacaacgcgccgccgcagcattcacctccccggagatccaccctttgcatggcagtgagctttctggcgcgcgatgtatcggacctctgccttgggaagccaccgctgaggtcgctctccgctgccgccaccgtcgccgacgccttagacgcgctcaagagctccgacggcgagatccacgtcagcgtgtggagcttcgaggagaatggaagtgggtcgatgcgtagggaaactgtgcatggtcgatgttatttgctacctttgcagagaggacaatctcttgtctccttctaaatctctcaaagaaccactttcctcaattctccctaaggatcataatctcgttgtgcatcttcaaccttcttctagcttgttggaagctattgatcttatcctacaaggtgcacagaattttgtggtgccaatattgccaacaaagaggagtggagtttcaagaaggaaacagcagcatcagaaggcatcatcaacaatcaacagccatagtagttgtgaattctgttggttgactcaagaggatgtgattaggttccttcttggttccattggggtcttcactccacttcctgctttgtctattgactctcttggcatcgttagctctgatgtgcttgccattgactactactcccctgcatcttctacagttggagccatctcaaagtcccttgcccagcaaacttctgttgccattgtgcccagtcatggcactttcattggagagatatcacccttcactctcgcttgttgcgacgagacggtc

SEQ ID NO: 4639 - DNA, 400 bp, Glycine max
gacaacaaaccaccacccaccacccaccgccgccacattcacaccacgcgccgccgcttccaatttccccggagacccaccctttgcatggcagtgagctttctggcgcgcgatgtatcggacctctgccttgggaagccgccgctgaggtcgctctccgccgccgccaccgtcgccgacgccttggccgcgctcaagagctccgaccacgagacccacgtcagcttgtggagcttctgcgagaacaagaacgaggttcgttgcgttgggaaactgtgcatggtcgatgttatttgctacctttgcagagaggacaatctcttgtctccttctaaagctctcaaagaaccactttcttcaattctccctaaggatcaatctctcgttgtgcatcttcaac

SEQ ID NO: 4640 - DNA, 409 bp, Glycine max
gtggtgaagaatttggccctcctcattcttaccttccccagtcatatacttttcaacaggtacgtgtggagccatacgaagcagagtgactcatccccgtggataactttgcctcttaatctgcttcctattgcttgtacagatgtactcaagattaagatcttgggtatattaggagttatatattccctggcccagtatctaattactaggcaacaatatatctctggtttaaagtacatctaaaccatcatatatactgtacgatatgtttgtcaatttaggtattcatgcacgtgcttgtcttcctaaatttgtatgaggaatatgtgaatgcatttttgttattacctataacccattcggataaatttaaatcaatctttcttgatgagttaatggtttggct

SEQ ID NO: 4641 - DNA, 881 bp, Glycine max
ggtgttaaggggggattgactgaggcgccagtacctttcacatccactgatgcctagtgggtctgatccaatccgaaaacccactcgcctttgttgcccgaaaaacctttctttctgcttctcccatccatccatggcttctggaatctcctcatagttctttcagctgcctataccctcgctctttgcctctcacacactaaaagaaaccatgaaggttcggtcatctgtgaagaagatgtgtgaattttgtcagatagttaagcgccggggacgaatctatgtgatttgctctgggaaccctaagcacaagcaacgacagggcatggcaacatttgcaagtgaaggcccatctcaaccagtgtcctcggagacaagtagctgcaagattatgattaagcctgctcaaattgcgcgaccaggtcggatttgtacttccccctcaaaggcaaagtttgtctatgttgtatggatggagggtgggattggcctctattctgtctataaagtagcaaaaataattagtaaccttgaacattacaagtaataagtgtgaagagattgataatcaacggttctggattaaagtctccatcatgctctctcctttctttgtattggtggatgaagttgtctcaaacttaattttgttctcactgggggattttgtttctccgttaagaatatggtcaacagattgtaacctcgtagtatatttggtgttcactgttaagggaatcagcggagcacaattgatagcgctctcctccttatcacttgagccaaagacgagaattttttgcaacgtattgtcatctatatctatatgttacatagtttttgccatcaacgaacaatatttaaaaaaggcagccgccgac

SEQ ID NO: 4642 - DNA, 433 bp, Glycine max
acttacccttacacttcttttagtcctcaacaacaacaacaagaagtagatgaggttcaattctctgatgacaaacacttttccctacatggaaagatattgctttttgtttttctctctgccttctttctactttttgtgttcgtcctcatgattccatggctgaagaatcatgcaaggggttctcatgattcaggaacagaagaagattcgattgagttccagaataacactgcgtcacaaaactggttcagaagaagaaggaaagaagatgatgccaacaccatgcaacaacagtagcaaattctattctccttttatagtgtgaggaattgcttatttttggagcaagaagttaagtgcttgaatttccgtgtgaatatgatgtagctacagtttaattacatatctgattctgtgtgcagaaacttgt

SEQ ID NO: 4643 - DNA, 1416 bp, Glycine max
cctcctcgtgggtttctatcctctctctctctctctctctctctctctctctcttcgttcttttggagtgtgtgtgcacccattgatgacaagcaaccccattgcatggaagcctaagaggaggagaagacgaagaggacaagggtaactgaatcgccgcttctgcagcttcgttctttcgtttttgtttcatctttttagcttcagagggtaaataaaaaatggaggttttggtgggtcccgctttcaccatcgacgttccctcgtctccgccgcagcatgccggttccgatgatcggatctttcttaacgtgtcacccgaagaaggtgatgggtcgaactttcgtatttcgggcccacccaagttcttcgccggcggcgagtcggagagttcgtcgtcgatcggaacccctgatgacagcgacaacgaggaggaggaagaagtgcagagccagttaaagatacgaactgggttgggttctttggatgctttggaagaatctcttcccatcaagttaattcctttaattttctcttttcatcccgcttctttgatttgattctcgtaatcatcgaatgtttttctttaacccttagattagatcctttttattttgagttggataaaattataatatttttttcatttattttgggtggtaataagtaataactaatactaactagtaaagtagtaattggtgtgtgtgatttttgttaatttgattttggattatggaatctgatacgggtatgttttgggattttatggtaagcgatgcaggaggggattgtcgagtcattttgatggaaaatcaaaatcgttctcagatctatctcaaatgagtaatttgagtaatctgaaggagttgcaaaagcaagagagtcctttcaacaagagaagaagggttttgattgcatccaagtggtccagaagatcatctttctattcctggtccaacccacaatccatgcctcttttgcctgtggatgaggatcaggattatgattatgaagaggaagaagaagaagaagatgacgaagaaaaagctagaaaagttccctctgcttcatcttcttcgtcttcctccttggccgaggaaaagaaacaagaagatcaggttcagctaagactcaacagagtgccagaatcttatgctgctcatatgagacttagacttggaagcttcaaggctagaagcttttctcttgcagatctgcaagagcatgatgatgaggaagaagatgatgattgattaaattaacatttaacataggttttttttttttggttttattcttttgttattggtgttgttactaaataaaattaaatagtgtattaattttaagtaagtgttaaaaaacttatccttctctttttacttcgttaaaaaaaattgaattttgctaagg

SEQ ID NO: 4644 - DNA, 757 bp, Glycine max
tcgacggacgcgtacgtaagctaagaattcgggcctgcacccattgatgacaagcaaccccattgcatggaaccctaagagggggggaaggacgaagaggacaagggtaactgaatcgccgcttctgcagcttcgttctttcgtttttgtttcatctttttagcttcagagggtaaataaaaaatggaggttttggtgggtcccgctttcaccatcgacgttccctcgtctccgccgcagcatgccggttccgatgatcggatctttcttaacgtgtcacccgaagaaggtgatgggtcgaactttcgtatttcgggcccacccaagttcttcgccggcggcgagtcggagagttcgtcgtcgatcggaacccctgatgacagcgacaacgaggaggaggaagaagtgcagagccagttaaagatacgaactgggttgggttctttggatgctttggaagaatctcttcccatcaagaggggattgtcgagtcattttgatggaaaatcaaaatcgttctcagatctatctcaaatgagtaatttgagtaatctgaaggagttgcaaaagcaagagagtcctttcaacaagagaagaagggttttgattgcatccaagtggtccagaagatcatctttctattcctggtccaacccacaatccatgcctcttttgcctgtggatgaggatcaggattatgattatgaagaggaagaagaagaagaagatgacgaagaaaaagctagaaaagttccct

SEQ ID NO: 4645 - DNA, 360 bp, Glycine max
atcacgtcgcatgcacgcctacctaagctcggaattcggcttgagcctcgaaccggtcttccttcttggccgaggaaaagaaacaagaagatcaagttcagctaagattcaacagaatgccagaatcttatgctgctcatatgaggcttagacttggaagcttcaaggctagaagcttttctcttgcagatctgcaagaacatgatgatgaggaagaaggtgatgatcattaaattaatcatttaacatagggttttatttttgttttattcttttgttattgtggttgttactaaataaaattaaatagtattaagtaactgttaaaaaactaggaaaaataaaaaaagggtggccgcc

SEQ ID NO: 4646 - DNA, 565 bp, Glycine max
ctcttggcatggggggaatcccctgggttataatgtctgagatatttcccattaatgtgaagggctcggctggaagtcttgtgactttggctagctggttgtgttcttggattgtatcatacgcttttaacttcctcatgagttggagttccgcgggaaccttcttcatattctccagcatatgtggcttcaccattctattcgtggcaaaactagtaccagagacgaaggggcgaactctagaagaagttcaagcatatatctctgaatccatattcaacaaagacatgaatttggcatgacccagtagcaaaattgcatgcataattaatccagaaacaatttcctaagtgccagattatagattatgaattaaattaaagattttatgaaacaagcttgatcacgtttatgatgcaaagattttgtgttgggttgaacctgtgctcctagatttgatcattatggtccctctccctcattcaagagcatttcaatatcagttccatgatgtacttaaaacttgctactacaaataaattaaattggaaggggaagtttgaac

SEQ ID NO: 4647 - DNA, 406 bp, Glycine max
tttaacttcctcatgagttggagttcagcaggaactttcttaatgttctctagcatatgtggcttcactgtgctattcgtagcaaaactagtaccagagaccaaggggcgtacactagaagaaattcaagcttctttgaactcattttcttctaagagatagagattctgaatcaagaaaattacattcagcaatcatcacacaagtttttatcgagactcgtgatgtacacatatgcttacaattaattggcgatattatagatagatacttaatatgtagatttactttgtatatttttttgagtgtcattatgtagagttgaatatttgattttaaactcaaatgtcatagccatgggacatgtttcgctccgtaaatgaaattgcaagttaatgtattttac

SEQ ID NO: 4648 - DNA, 479 bp, Glycine max
cgcgctctcccgagggctttgtcggaggattcttacgcctgaacgagtcctctccttgcgtactaggttggtgctcaattaaaaagaatggggggagatgcacagaagaagagaattgccataattggcgtgtctaccttcttgctggtggccatggtggtggcagtgacagttagcatcaacctcaataacaagggatcaaggctatgattcaaaggaagaaagcaaatccagtgtagcttcctcgatcaaggccgtgaaaaccctttgcgcacccaccgattacaagaaggaatgcgaggacagtcttattgaacatagcaacaacatcaccgacccacgagaactcataaaaatcgcgttccacgttaccatctcaaaaatcggagaaggacttgagaaaacagaactcatgcaccaggtcgagaacgaccccagaaccaaggaggcactcgacacgtgcaagcaactcatgaacc

SEQ ID NO: 4649 - DNA, 312 bp, Glycine max
agggcttcgtcggaggattgtcacgcctgaacgagcccttttccatttcagccttgagcggctcctgttcttgtcaagttggtgtgaattaggagctgcttaattcaaagaatggggggagatgcacagaagagaaacgtcatcattggcgtctctactttcttgttggtggccatggtggtagcagtcacagtcaatgtcaacttcaataacaagggatcaagcagtgattcaaaggaagaaagcaaatcccatgtagcttcctcgatgaaggccgcgaaaaccctttgtgcacccaccgattacaagaag

SEQ ID NO: 4650 - DNA, 1348 bp, Glycine max
cctttgcgtccggtttatttattgtcactcgttacaaaaaatgcactatcttgctttcaatccaagttcactttggtggcagttgaacgagtttgcaaccccacacacaaaaaccaaacccttaaaaatgtcatccccctcgccggtggccacggtggtctccgccgccgcgctgtacgaccgcgccaaagccgtgaaagaattcgacgaaaccaaggtcggagtcaaaggtttgatcgattcgggaatcagaaccatcccccctttcttcgtccacccgcccgaaaccctagcggacctcaagcgcggaaccaaacccgggtccgcgccggagatccccacggtggacctcgccgccgaggagagctcccgcgccgccgtggtggagcaggtccggcgggcggcgagcaccgtgggattcttccaggtggtcaaccacggcgtcccggaggagctgctattgcgaacgctggcggcggtgaaggcgttccacgagcagcccgcggaggagagggcgcgggtgtaccgtagggagatggggaagggtgtgtcgtatatttccaacgtggatctcttccaatcaaaagccgccagctggcgcgacaccatccagattaggatggggccaaccgcagtggattcgagcgagattccagaagtgtgtaggaaagaggtaatggagtgggacaaggaggtggcgcgtgtggctcgtgtgttatacggtttactgagtgaagggctgggattgggtacggagaggctcacggagatgggtttggtggaagggagggttatggtggggcactattacccgttttgtcctcaacctgatctaacggtggggcttaactcgcatgcggatccaggggctcttacggtgttgctgcaggaccatattggggggttgcaggttgagactgaacagggttggatccatgtcaagcctcagcctaacgccttggttattaacattggagatttccttcagataatttctaatgaaacatacaagagtgctcatcatcgggtgttagccaattattctaacgagccacgagtctctattgccgttttcctcaacccaagtgatagggagaaacattttggaccattaccagagctaacatcaacagagaaaccagctctttataggaacttcacgttccatgaatttatgacaaggttcttcacgaaagagttggacggtaaatcattgacaaatttcttcaggcagtgatgtacacatatatattagcatctatttctggtgatgtatcaatgttggatatgcgatgatgaattttatgcttaataagtttgtgaataaaaggtgctatatgtttgacat

SEQ ID NO: 4651 - DNA, 545 bp, Glycine max
cccacgcgtgcgcaacgagtttgcaaccacacacaaaaaccatacccttcccgatgtcattgccgtcgccggtgtccacggtggtctccgcagccgcgccgtacgaccgcgccaaagcggtgaaagagttcgacgaaaccaaggtcggagtcaaaggtttgatcgattcgggaatcagaaccatcccccctttcttcgtccacccgcccgaaaccctagcggacctcaagcggggtgccgaacccggatctgtgcaggagatccccacggtggcgtggtggagaaggtccggctggcggcgagcaccgtggggttcttccaggtggtcaaccacggcatcccggaggaactcctccggcggacactggcggcggtgaaggcattccacgagcagcccgcggaggagagggcgcgggtgtaccgtaaggatatagggaagggcgtgtcgtatatttctaacgtggacctcttccaatcaaaagccgccagctggcgcgacacaatccagattatgatggggccaaccgtagtggattccagtgaga

SEQ ID NO: 4652 - DNA, 524 bp, Glycine max
cgcatgcggatccaggggctcttacggtgttgctgcaggaccatattggggggttgcaggttgagaccaaacagggttggatccatgtcaggcctcagcctaacgctttggttattaacattggagattttcttcagataatttctaatgaaacatacaagagtgctcatcatagggtgttagctaattactctaatgagccacgagtctctgttgctgttttcctcaacccaagtgatagggtgagactttttggaccattgccagagttaacatcaacagagaaaccagctctttataggaacttcactgtcggtgaatttatgaaaaggtgctgcacgaaagagttggacggtaaatcattgacaaatttcttcaggcagtgatgtacacacacatatatagcatctatttcgggtgatatatcattgttgaaggtacatatataaaaatgttgatgtgatgatgatggtattttatgttaatacgtttgtgaataaaaaggtgctatatgtatgtttgac

SEQ ID NO: 4653 - DNA, 403 bp, Glycine max
cactacgtcgctcgtcacggttccgtcagtgcttttccgccgccgacgcggttcaaacttgaaaagtttactccttaaaagggttagagataaacgccgtcgcggttcaaacttgaacagttcaaaaggtgtgaaagcaaataagatgcagcatagaaatttgacttctggaaggccttctggaactgatggctccgattactcctaccgtatggtagtcgattcaaggtagcaactggttgcaaaggggaagaaacgcctgtctctctacgttatcactgaggctgtgttgctgtgattacgagtgacacgtacatatttaccacgaagagaagcagacgctccaaatacagttgcctattcatctgttattgtaagtgttgtctcactaataattgggaat

SEQ ID NO: 4654 - DNA, 255 bp, Glycine max
agataatatcatttccgttctcaaaatcataacagtacttcgcgtgccctagctcactccgtcgctcctcacccttccggcagtgcttggtcgtggccgtcacggttcaaacttcaaaagttataattggttcagcttgatcaggaaggagggtcatctgcagttcaaaaggtgtgaaagcaaagaagatgcagcatagaaaattgacttctggaaggccttctggaactgatggctctgattactcctaccgta

SEQ ID NO: 4655 - DNA, 325 bp, Glycine max
aaataatatcatttccgttctcaaaatcataacagtacttcgcgtgccctagctcactccgtcgctcctcacccttccggcagtgcttggtcgtggccgtcacggttcaaacttcaaaaggtgcgtttccgtttcgtgaacctgtcttgctcttgattgttctgaacaaatggaagtaaaagactgttttttgttcttctctatttcgtgatctcgactctgtatctctcatctatcagttaaatcagcgcatgtgattgattttagataggcaggcacattatgcctttatgtgatattcagatgttttgcaagttagacccgc

SEQ ID NO: 4656 - DNA, 282 bp, Glycine max
ggagcttgggaggaaataatatcatttccgttctcaaaatcataacagtacttcgcgtgccctagctcactccgtcgctcctcacccttccggcagtgcttggtcgtggccgtcacggttcaaacttcaaaagcatttgttgtgttggagtaggctatggatgacttgtttgattcttcgctgaacttggaggacacccattacaaggaaggctatgacgaaggctacagccatggccttgtcactggcaaggaagaagctaggcaggttggcctcaaggtt

SEQ ID NO: 4657 - DNA, 299 bp, Glycine max
ggaggaaataatatcatttccgttctcaaaatcataacagtacttcgcgtgccctagctcactccgtcgctcctcacccttccggcagtgcttggccgccgccgtcgcggttcaaacttcaaaaggctatggatgacttgtttgattcttcgctgaacttggaggacacccactacaaggaaggctatgacgaaggctacagccatggccttgtcactggcaaggaagaagctaggcaggtcggcctcaaggttggctttgaggtgggcgaggagcttggtttctataggggttgtgtc

SEQ ID NO: 4658 - DNA, 538 bp, Glycine max
agtttttgtaccaaaccttacctcttcttctctcatcatattaatttccactgattccatcttcactttctcccttcgttgggggttaaatccatagccacaacttcccttttgcttctttcattcatttctacggccaccaaactcaatcatagtttatggaagctgtagaggcaaaagcttcatctgggtatggcaagcctccatgggtatttagaggcagtgcctggtatcaactccatcttgtgaaggcagagaaagctcgagcttacattccaaaagaattcaaattggttgaagcttttggatacactcttggtggtttctttctagcaagttatgaggacagtccagttggtgtctttgatgagcttgttgtaattgcaggacttgtatggaaccgcccaacatcctgcgcatgggcaacgagggtgtacgtgaacaacgatgaggcctgttatcacggaagaagagatgtgagatttccatctcagatggctatgttttccaagacatttacagcaatctcaagacaaca

SEQ ID NO: 4659 - DNA, 470 bp, Glycine max
ctcattcgtaatcccaaacacttcgtttcgaagtgaaacgaagtgttgctatcaacggaggagcgcccacactggaaaaaaaatctccggcgattgttccgccgaacctcttccgttctccgccccgatcctggattcaatcgcccgtttccagtttctcattctagttgatcgagttcgtagggttttatggtgcttccttggacacacggtggcgatttgcattactcagtgggtggtggcacggtgaattattgagtctgatcatactcgtttttaaaaatcagagagaaatgtcttatcagcataaaagcttttggatgccacgggatgctggctgcatggctgaagaaaatgcgggatatgaaaattcttccagaattgaacccaagcgcagtcatcagtggtttatggatacaggtgaacctgaaatattcagcaacatgaaacaagcagttgaagctgttagt

SEQ ID NO: 4660 - DNA, 427 bp, Glycine max
acgtaagctcggaattcggctcgaggaagtagaggtcttaagagtttgagaactgagaagagatgggtggtgttgcatggacagaagaagaagatcacttgctcaagaaatgcatacaacaatatggagaaggaaagtggcatcgtgttcctttactggctggtttaaacaggtgccggaagagttgtaggctaagatggctgaactatctccgtcctaacatcaagagaggaaattttgcggaggaagaagtggaaatgataatcaaactccataaattactaggcaacagatggtcgttgattgcaggaaggctaccaggaaggactgccaatgatgtgaaaaactattggaactgtcatctgagcaaaaaactaaatgtaatagaagctgaagatagaccaataacaagagatgttcaagtcat

SEQ ID NO: 4661 - DNA, 710 bp, Glycine max
aaatcaaaagcagaaagaaactagggttagggtttaacttataattgcgtgatcgattccgattcgattgattctcttctctctcacacgaagtagaaacacgaaactcagaatccatggcgacaccagcgacgacgaagcgaaaaccggtgttcgtgaaggtggatcagttaaaacctggcaccaacggccacacactgacggtgaaggtggtcagttccaagccggtgaagacggtgaccacccgcggcggtcgatcgtcggtgctcgccgcgcgcccgtcgcgcatcgccgagtgcctcgtcggcgacgaaaccggaaccataatcttcaccgctcgcaacgaacaggtggaccatatgaatgctggcgcaactgtaattctgcgtaatgcaaagattgacatgttcaagggatctatgagacctgcagtggataaatgggggcgtattgagcccacagaccccgcaaattttgacgttaaagaggataacaacctttcgttagttgaatatgaattagtgaatgttgttgaagagtgattttgtcttctgagagtgaatctttggggtttacgggaggttttaatttttattttgacaccattgaacaattggctgcggtgcagttttcttatgggacagtctttgcttatttagtcttaagattgctgtcgttaatttaaggaatgatatttcagatcagttttg

SEQ ID NO: 4662 - DNA, 858 bp, Glycine max
  unsure (1)..(858): unsure at all n locations
acgagaccacctccacctaagccatactattaccactcaccaccaccaccaccaccaaagaagaaaccatactactaccactctccaccacctcctcctccaaagaagaaaccatactactatcactccccaccacctcctcacccttaccctcaccctcaccctcacccttaccctcaccctcaccctcacccccatcctcaccctcacccacatccacaccctcaccctccctacgtttacccctccccaccacctcctcctaagaagccatacaagtacccatctccgccacctcctgtccatcactaccctcaccctcaccctcccttcgtccattactctcctccaccatctcctaagaagccatacaagtacccatcacctccaccaccagtacaccctccttacactccccacccagtttatcactctcctccaccacctcctaccaacaagccttacatctatgcgtcacctccccctccttaccactattagctagcatagctctatggatatgaagaatatgtgcaacgaataaaagaaagcgatagaaaaggaagaagaagcgcttcgcgatgcacgaaagagaagaattggaagcaaagtttcggcgttttgtcttttataaaaaaaatgttaaatcattataattttctatgatagggattggtttcttgtcttttttcttttgtttatgaatatcggtgtattttaacagttgtaaagcactgcgccctcgctgcatgatcatgtagttttcaaccagctgcgtttgcaggggttgtaaaactaataacatatataattaaataaattatattctctctcaaaaaaaaaaaaannnnnnnnnnn

SEQ ID NO: 4663 - DNA, 718 bp, Glycine max
ctatgccatactactaccactcaccaccacccccaccaaagaaaaaaccatactactaccactctccaccaccacctccccctcatcctccttacgtttaccactctcctcctccaccccctaagaagccctacaagtacccttcacccccaccaccagttcaccctccctacattccacacccagtttaccactctcctccaccaccaccttacaagaagccttacatctatgcatcacctccccctccttaccactattagcatacctcttatcgatatgaagaatatgtgcaacgaataaaagaaagcgatggaaagcgcttcgcgatgcacgaaagagaagaaatggaagcaaagtttccgcgttttgtctttcataaaaaaaatgttaaattattattttctatgataggattggtttcttgtcttttttctcttgtttaagaatttcggtgtattttaacagttgtaaagcactctgcgctctctctgcatgatcatgtacaactacaagcatgctctctgtagttttcaacctgctgcgcttgcaggggttgtaaaactaatcaatataattaaataaattacattctgtctctctaaacgctgacggtgaaagtggtcagctccaagccggtgaagacggtgagcactcgcggcggtcgatcgtcggtgctcggggcgctcctgtcgcgcatcgccgagtgcctcgtcgg

SEQ ID NO: 4664 - DNA, 530 bp, Glycine max
agatggcaaaatttacgtggttaacgactcttccgacaatgacctcgtaaaccctaaaccagggacattgagacatgctgcaattcaaagagagccactgtggatcatttttgatcgaaacatgaacattaaacttcacgcggagctcatgctaacggataataagaccatagatgcacgtggtgccaatgtgcacattagtgagggtgcccaaataacgttgcaatatgtgaaaaacatcatcattcacggtctgcacattcatgacattaagaaatgtagtggtggcctcatcagagactccatggatcactatggagtccgtgccatgagtgatggggatgccatttcggtgtttggatccacatatgtttggatagatcatgtttcctttaccaactgcgatgacggcctcatcgatgtcgttagcgcttcaactgctgttaccatctccaactgccatcttaccaaacataacgatgtattattatttggtgcgagtgatagctactcgggggataaaatcatgc

SEQ ID NO: 4665 - DNA, 1874 bp, Glycine max
ctcgagccgaatcggctcgagcggctcgagcaagccttgctttcttcttcacttcaaacttgccaaaaatggcaacagaattggcatcatctcccaattgggttccaagcgcaccacatgtttggcagcctttgccgccctccttctcctcttcctccgcggtctccgccgccgccgatacaacctccccccaggcccaaagccctggcccatcataggcaacctaaacttaattgggtcccttccacatcggtcgatccacacgcttagcaaaaaatacgggcccatcatgcacgtatggttcgggtcgagctccgtggtggtgggctcgtccgttgaaattgccaaggccgtcctcaaaacccacgacgccaccctcgccggcaggccgaagttcgcggcgggcaaatacacaacctacaactactcggacatcacttggtcccagtacggcccatactggcgccaggcccgtagaatgtgcctgatggaattattcagtgctaaacgcttagaagaatacgaatacattagaaaacaagagcttcgtggccttcttaacgaactcttcaattccgcaaacaaaacaattttactaaaagaccacctttccaaccttagcctcaacgttataagccgcatggtgttgggaaaaaagtaccttgaggaatccgaaaacgccgtcgtttcgcccgatgatttcaagaagatgcttgatgagttgtttttgcttaatggggtgtataacattggggactttattccttggattgatttcttggacttgcagggttacataaagaggatgaagactttgagcaagaagtttgatatgttcatggagcacgtcctggatgaacatattgagaggaagaaagggattaaggattacgtggcaaaggacatggttgatgttcttttgcaacttgccgaggatcctactcttgaggtcaagctcgagaggcatggagtcaaggcttttacacaggatctaatagcaggtgggactgagagttcagcagtaacagtggaatgggcaatcacagagctattgagaaggccagagattttcaagaaggcaacagaggagctagacagggtaataggtagagaaagatgggttgaagagaaggacattgtaaatttgccttatgtgaatgccattgcaaaggaagcaatgaggctgcaccctgtggcaccaatgttggtgccaagactagccagagaggattgcaatcttggagggtatgacatccccaaagggacacaagtgcttgtgaatgtgtggactattgggagagacccttcaatttgggacaaccctacagagttccaaccagagaggtttcttactaaggagattgatgttaaagggcatgactatgagctattgccatttggtgctgggagaaggatgtgccctggctaccctcttggccttaaggtcattcaagcaagtttggccaatttgttgcatggatttaactggagactgcctgataatgtcaagaatgaggatttgaatatggatgagatttttgggctctctacacctaagaaaataccactggaaactgttgttgagcctaggcttccacaccatctttattctctctgagcagtgcccttgcacaaagggtttctctctaataagattgctgtaggaataaaatgggtcttgtgtgagcttatgtttgtcacactggattgcaatgaatttttctttcttctcataacaatgttataaaaaataaaataaaaatgatgttgcggtgttagaatagagattgtggtaaccaatgtaataccaaatgtgttagtgaaagtttgtagccattttctctctcacacaaataggcatctctctctctctc

SEQ ID NO: 4666 - DNA, 2006 bp, Glycine max
  unsure (1)..(2006): unsure at all n locations
ctagaactagaaaagaaaaataaaatcccacaggtaagggtaataaacaaataacagaagtcagaaaaacaaaaaacagattggcagccttgtgtcccagggatgaacatgattgtggagcgagcgagtgatgctcatcacatcatgtgcttccaaaactgatctatttcccttctccttcttacttctgtcgttctctctgctgcaaatccaaaaaccaccaaatcgcggttccaatttctgaatttctcgagcgaacttcgcccagttctagggttcccccactgccatggaccaggccgaattaacctccgaacaggttctgaggagggacatcccatgggagacctacatgtccaccaagctcatctcaggcaccagccttcagctcttaaggcgctacgatcaccggccagagagtcacagagcacagttgctcgatgatgatggtccctcttatgttcgcgtgtttgttcgtgttttgcgtgacattttcaaggaagataccgtggagtatgttttggcactgatagatgaaatgcttgctgcaaacccgaagagagcaagactgtttcatgacagtgcccttgctgatgaagatacttatgagcctttcctaagattgctctggaaaggaaattggttcatacaagagaaaagttgtaagatcctcgctttaattgttagtgtcaggccaaaaaatcagaatggcattgtgtcaaatggagaagcatcaaatggaaagaagccatttaccactattgatgatgttttgataggattggtaaaatggctttgtgatcagttgaagaaaccttctcatcctattcgtggagtcccgactgctatcaattgcctagcaacactacttaaggaacctgtggttaggtcttcctttgttcgggctgatggggtcaagttacttgtacccttgatttcgccagcatccactcaacagtctattcagcttctttatgaaacatgtctctgcatatggctcttatcctattatgagccagcaattgaatatttggctacttctagaacccttccgcgacttattgatgttgtcaagagttctacaaaagagaaggtggttagagtagttgtcttgactcttaagaacttgatgtcaaaagggacattgggtgctcagatggttgaccttcagctggcacaagttgtcctgagtttaaaagcacaagcatggagtgatgaggacttgttggaggccctgaattccttggaagaagggcttaaggataatatcaagagactaagttcttttgatatgtacaagcaagaagttctccttggccatctggattggtctcccatgcacaaagatcccatattctggcgagaaaatataaacaactttgaagaaaatgatttccagatcctaagggtcctaataacaattttggacacgtccaatgatccaaggactctggctgttgcttgctatgacctttcacagtttatccagtgccattctgctggacggatcattgtgtcagaccttaaggcaaaagaacgagtgatgaaactaatgaatcatgaaaatgctgaagttactaaaaatgcactgctctgcatccagcggcttttcttaggtgcaaagtatgcaagcttcttgcaggtttaatgctgtttctgtggggtggcctagtgtatgcacttgattccatcaacttctctgctagctcacaaattggatcggctctcgtatacaaccattattcattgttttaatgattaatttattgtgtatgactactaagatttcggttccaacagtagcagaaattttatgtgaggaataagtatgcatgatattctgctgctgaataaatcaagttttgtaatgtactcgaagttgtgcttgtaggtatgttgtctttgttagaaaacaaaatttatcgttactatatgtaatttcttgaaaaatgagccacttgaatatgagctagtttcagnnnnnnnnnnnnnnnnnnnnnnnnnnn

SEQ ID NO: 4667 - DNA, 722 bp, Glycine max
cggcacgcacaaatcgacgaatgaccctataaccaaagaggcactcgacacgtgcaagcaactcatgaacctctccatcggggagttcacgaggtcactcgacaagttcgccaagtttgacctgaacaaccttgacaacatcctcacaagtttgaaggtttggctcagcggtgcaatcacgtaccaagaaacatgtttagatgctttcgagaacacaaccaccgatgctggtcaaaaaatgcagaagctcttgcaaactgccatgcacatgagtagcaatggcctctctatcatcaacgaactgtcaaaaactctctcggaaatgcacgttaacagacctggccgtcgacgccttttgaacaacgttgatgatttaccagttcttggccacgactttgaccttcccgaatgggttgatgatcgcgttggtgttcgcaaactcctacgtatgactggacggaaacgcatggcgcatgtggttgttgcaaaggatggcagtggaaatttctcgaccatcaatgaagctttgaaatatgtgcccaagaaaaacctaaggccattcgttatctatgtcaaggaaggagtttacaacgagtacgtcgaggtttccaaaaatatgacccatgttgttatgattggtgatggtggtaagaagtcaaggatcactggtagcaaaaacttcatcgatggggttgggacctacagaaccgccagtgctgcca

SEQ ID NO: 4668 - DNA, 781 bp, Glycine max
ggccatgtaaaggtgagtgtggaggaggttagagatgcagatgctccagttcctgtacccactaatgaggtttccttagtggggcaggcacttcacaccttccttgcttggccgacacatctggtcaagtctttatcacagtaggtacttattgtccttactatatgtttcttcttttcaaattaggctatttaactttgtttcatgaataggtagttgtgtctccgccaaaaccacctccgaagcccgatccggaggtcgttgatccgctttatctgatgacattgaccatcccagagcttttcttgaggcctttatcaggttagatgggatgccaccgtgttcggggtcgttaatccagatttccccctgtacataaagcacgaagacctctccgaaatcgcacacggtggtcaatgtctcagcatatcagtgttacagttgtggattttgcatctcactgaaacatgtatgcgagtggggaattctgatatctatggattcctcgagccacagtccattcagaggtctgggcaatcgcagtttgagtctgaaagttacataaagagttggatgcagagttcacaatgcgatgtatatcttggagcctacctaaatggcggacactggcacatggtggtcatcttgccgaatgaacacctagttgtctggttttgttcattgcataacatgttatacaactacccttacggggattattaatagtgctttaaaaggtcttgatgatactccatatcctaaatcaaaggcttctgctacg

SEQ ID NO: 4669 - DNA, 410 bp, Glycine max
ggtggccaattaaaggtgagtgtggatgatgttaaagatgcagatgctccagttcctgtacccactgatgaggttcccttagtggggcagacacttcacaccttccttgcttggccaacacatctggtcaagtctttatcacaccaggtacttattggtcttactatatgtttcttctttttaaattaattcattaagcgtgcctcaaatttggctatttaactttgtttcatgaacaggtagttgtgtctccgccaaaaccaccttcgaagcccgatccggaggtcgatgatccgctgtatctgatgacattgaccatcccagagcttttcttgaagccttatcaagttagatgggatgccaccgtgtttggggtcgttaatctagatttccccctgtacataaagcac

SEQ ID NO: 4670 - DNA, 501 bp, Glycine max
catgactcatgagttcagtcttttagctaatctaaatgcattggagtatttgttaaaaaaacataggtttgagccaagcttcttgatagaagactaatagacatttatgaggctatggatgactacctattttctttattttttttccctttaataggcaaggagattcatatatcatcaatgggacaaaatggtggacaagtggtgctatggatccaagatgtagaattctgatagtcatggggaaaactgacttcaatgcagtgaagcataaacagcaatctatgatcttagtggatgtccagactcctggcgttcacataaagagaccattgacagtgtttggctttgatgatgcaccgcatgggcatgcagaagtaacatttgaaaatgtttgtgtgcccgcaaaaaacatcatacttggcgaaggacgtggatttgagattgcccatggtaggcttgggcctggaaagctccaccattgttatagactgataagtg

SEQ ID NO: 4671 - DNA, 535 bp, Glycine max
ctcaaagttacaaataactgttgcttaacgcctctcccaggagcctccaccccaaaacaagaaacagactttgcgtttctcctcagcctcttaaaaccaaacagattttattctctcaaatggagagtccccattcactgtctccctcttcctcctccgacggcgtcggcttcgagacggaggagccgcggacgccgttggccgtgcgccgcgcgctgcagctcctcaactccggcgatcccgacctgcgcctccaagctgctcgcgacatccggcgcctcacgaagacgtcacaacgttgtcggcgccagttatcccaggctgtcggtccactcgtttccatgctccgagtcgactcgcccgagtcacacgaacccgctctcctcgccttgctcaacctcgccgtcaaagacgaaaagaataaaatcaatattgtggaggccggtgcattagaaccgataattagtttccttaagtctcagaatctaaatctgcaggagtctgcaactgcatctttgctcactctatctgcctc

SEQ ID NO: 4672 - DNA, 489 bp, Glycine max
ctcgagccgcgcgattttccttctctcccgtcattttcccgagaaaatcagaagaggggtggatgatgagaggttgagacgctgatcagcactcactcactcgaagacgatggtgagttcgatccgcgatggaaccaagccagattctatcattgcggaccaccacaactgatcctgatcatgtgaaggtcattcagtgggacgacttccagcacgatcttgcaaggttggccagtctctcttccgcgctccacgaagccaacgagaagaagcggaatcttcagcacaagctcgagcccctaatccaggtcaatgctgaatcattgggtcggttgaatgaacttgaggagatgcgtcagaaattggaatcaaagaaaatgttgatggagaatatgtctatatgttctaggctggcaaaggaggaagctagcatgcaggaggagcagcttagtggtgcagtgcaatcacttttggtggcaaggggtgctc

SEQ ID NO: 4673 - DNA, 415 bp, Glycine max
acagtacactagcctctgcgcacaaccctccactctccaaggagattacaatccattctttctttctcccttcttccattctctttctcattcagagactgcacacaaatttctattattccgagaacgacaaatggatccggcggcgataatgaacggcgctgccaacacgacgtcgtttcacctgtcagagatctggcagttcccgcctcccaactcgccagatgcactggggctcaggaggccccacttcgcccacggcagctttgcggactttgccccgggtccgacccgagacgctgacccggccagcattgcccacaagaagccccgcctacgctgccggggaggaggaggaatccgctaagggcgcctccaccaccaatgccgtggatgagggtggtggtggtgatgg

SEQ ID NO: 4674 - DNA, 873 bp, Glycine max
ctcgagccgctcgagccgggaagattcgtaaagaatttcttaacatgcgtcgtcaggctgttacaattcaagctgcattccggtgctttcaagttcggaagcattatcgcaaaattctttggtctgttggtgtggttgagaaagcagtgctgcgttggcgtttgaagagaaggggcttccgtggtctccaggtcaaaactgtcgatgcgggaaccggagatcaggatcagcaaagtgatgtagaggaggaattcttccggactggtaggaagcaagccgaagaacgtgttgagagatctgtggtacgtgtgcaggctatgttccgttcgaagaaagcacaagaagagtacaggaggatgaaattggcccttgatcaagcaaagctggagcgggaattcgaacgacttcttagtactgaagttgacatgcaactgaagacatagattacccaaaaagattctaaattttgggatgcagtatccagtagattttgtaagtcccccttgactctttcagactttcttagtatcctagaatgggtcattatataaagttttcatctgtcattgggctctctatggttgtaacttctgatgcaaagatactgtgccaccccaaagtttaatatacagaatactagaatagttatagctagaagcctggtctggggatggtaatggcttcttcgtttcttttaactcaaaaatagcagaggcaaccaaagatcagtgcgattttttttattattatttataggcgccaacacatcttcaatattagcccatatttacaaagatactctttgtttcttaaatcaccatatccaatatcagttatctctctagattaatgataaaatttattatatgataa

SEQ ID NO: 4675 - DNA, 553 bp, Glycine max
ggagcctattattatttccctctctccttgctccttgctccaaaaccccttcttcagggtcaccgctgtcagggttagggtttttccaccttctttatttaccaatcttcttctactaccacttttccctcgttccctctcttagtctcttcaattgtaagctttttgcgctagggtttcctctgcaatctcttgtacttgaagctcgttccttcttccggatctcgatctatggatacccgcaagaggggaagacccgaacccggcttcagcttaaatggcggattcaagaaatccaagcaagaaatggagtccttatcaactggtgtaggaagcaaatcgaagccatgtaccaagtttttcagcactgctggttgcccatttggtgagggctgccacttcttgcactatgttcccggtggttataatgcagttgcccatatgatgaatctaacacctgcagcacctccagcatcaagaaatgttgcagctctgcctcctgtaccaaatggttccgcaccacctgccgttaagacccgcatatgcaacaagt

SEQ ID NO: 4676 - DNA, 452 bp, Glycine max
gtttagtttcgaaccctttccttttccttccttctccgcctcaccaccctaacccaaccctctctctttctctctccaaaatctctctccctcccaccgttatttagggtttggcagatctcgatccgtcacaatggacgttcgcaagcgcggaaggcccgacgtcaaccttaacggcgccgttaagaagaccaagcaagaattggagtccttatcaagtggtgtaggaagcaaatcgaagccatgtaccaagtttttcagtactgctggctgcccatttggtgagggctgccacttcttacattatgttccaggtggttacaatgttgttgcccatatgatgaatttaaaacccgcggctcctccaccaagaaccgttgctgcaccaccacccatcccgaatggttctgctccatctgctgttaacacccgcatatgtaacaaattcaata

SEQ ID NO: 4677 - DNA, 495 bp, Glycine max
caactattttccgctctccttgctccaaaaccccttattcagggtcaccgctgttagggttagggttagggttagggtttttccgcacattctttctctagcaatcttcttctaccactttcccctcattctctctcttagtctcttcaattgtaagttttttgcgctagggtttcctctgctatctcttgtactcgaagctcgtccctttttccggatctcgatctatggatatccgcaagaggggaagacccgaacccggcttcagcttatatggaggattcaagagatccaagcaagcactgctggttgcccatttggtgagggctgccacttcttgcactatgttcccggcggttataatgcaggtgcccataggatcaatctaacacctgcagcacctcctccaccgtctagaaaggttgcagctctgcctcatgtacctaatgggtatgctccatctgactataacactctcatctgccacaagcttaa

SEQ ID NO: 4678 - DNA, 858 bp, Glycine max
ctaagagcacttatggcacaggtgctttcatactactaaatactggtgaagggataattcaatcgaagcacggtcttttatccactatagctttcaggcttggcccaaaagctccaaccaattatgcattggaaggatcagttgctattgctggagctgcagtgcagtggcttagagacggtcttggcatcatttctagtgctgcagagatagaggagatggcattacaggttgaatccactggtggggtttactttgttcctgcttttaatggattgtttgccccatggtggcgtgaggatgctcgcggcgtttgtattggaataacaaggtttacaagcacgggtcacattgcccgagctgtgcttgagagcatgtgtttccaagtgaaagatgtcttggattcaatgcataaagattcaggagaaagtgaatcccaaaaaacagagtttttgcttagagtggatggtggggcaactgtaaacaacctgctgatgcagattcaggcagatttggtgggatgtccagtaattagacctgctgacatagagacaacagcacttggagcagcctatgctgccggattagctactgggatttggaaagaagattttattttcaatactgaggagaagttgaagaatgctagagttttccgtcctgtaatgactgaggaagtaaggaaaaagaaagttgactcttggtgcaaagctgttagtaaaactttcgacttagctgatcttgctctttgatggtaaaacacagtttatgtttctttttatttttattttttatgtcctttacttctgggtataactttatttttagccttactaaaatgaagggagtaattatatc

SEQ ID NO: 4679 - DNA, 482 bp, Glycine max
attgaataactattcatttcttcatcagcaacttcacggaggagaggaaggcatggctggcaatataatagcttcatcagtgcccaagagcgtccaagaaatgtccatggatggtgatgaaccaccatcaagatatgtagttaatggaaatagctttggatctaaagattcttctgtacagtttccaatacccatcattgatgtgcgtctcctctcatcagaagatgagctagagaagcttagatctgctctaagttcagctggatgcttccaggcaattggtcatggaatgtcaagttcatatcttgacaatatacgagaaactgcaaaacaattttttgcactcccagaagaggaaaagcagaagtatgctcgagctgttaatgaatctgaagggtatggaaatgacagagtagtttcagacaaacaggtccttgactggtcctatcgccctaaacttcgagttttttcagaaacaaaac

SEQ ID NO: 4680 - DNA, 712 bp, Glycine max
acgacagacgaggcagatagatctgcttcttgttgttggaaagaaaccctagcaagcggaacaatggcagacgttgaggtcgatgtggcggctgcagcagcagcagggcagccgaagaagagaacgttcaagaagttcagtttcaggggcgtggatctcgatgcgcttctggacatgtccaccgatgaactcgtgaagatgttcagtgctcgcgcacgtagaaggttccagagaggcctcaccagaaagcccatggccttgatcaagaagctccgcaaagcgaaaagggaagctccaccaggtgagaagccagaaccagtccgcacccacctccgcaacatgattattgtgcctgagatgattggtagcattattggagtgtacaatggcaagacctttaatcaggttgaaatcaaacctgagatgattgggcattatctcgctgagttctctatttcatacaaacccgtcaagcacggtaggcctggtattggtgccactcactcttccaggttcattcctctcaagtgaaaaaaacctctgcaaaatccccatctttttcagattttgtttttattttcagctgcctattgtatggtttatcatgacttgattccatagtatcaacgttttatttagtcttttgatttcgtcaagttcgataacttgttcattttaaacatggaagattatgcatcaatatttttcaaaa

SEQ ID NO: 4681 - DNA, 958 bp, Glycine max
  unsure (1)..(958): unsure at all n locations
cccacgcgtccgcccacgcgtccggttgttggaagccaaaaccctagcagccggcgagaatggcagacgttgaggttgatgtggcggcggcggcggcggcggcggctgcagggcagccaaagaagagaacgttcaagaagttcagcttcaggggggtggatctggacgcgcttctggacatgtccactgacgaactcgtgaagatgttcagtgctcgcgcacgcagaaggttccagagaggtctcaccagaaagcccatggccttgatcaagaagctccgcaaagcgaaaagggaagctccaccaggtgagaagccagaaccagtacgcacccacctccgcaacatgattattgtgcctgagatgattggtagcattattggagtgtacaatggcaaaacctttaatcaggttgaaatcaaacctgagatgattgggcattatcttgctgagttttctatttcatacaaacccgttaagcacgggagacctggtattggtgctactcactcatccaggtttattcctcttaagtgaagactgttactgggaaagctacttcttagtttgtagtggttctgaggaaaaccttcgactcctatcagagattttgtttgttgttgcgcatttgattttgagttgcctatctatgattttggacgtatggtttatcatgacttaattccatagtatcaagatttttctgtttaatcttttgaagttagttttattttgttgaaatggtatttaaacgaatttgggacttgatggaatcaaaggccgattctccatgctatttgaacgtgttaatggatagaatggaatttcgttcttggttggatctttaaaaggttggaactttggtaccccaattgtatgagttcacgggttgagccggattggctgttctatcagattgagttggtttggttcggtggttcccaanntanannacattt

SEQ ID NO: 4682 - DNA, 784 bp, Glycine max
aagaaagagcctgaggttatttcgccgccactgccttcgcttgtttgttgttgttgttggaagccaaaaccctagcagccggcgagaatggcagacgttgaggttgatgtggcggcggcggcggcggcggcggctgcagggcagccaaagaagagaacgttcaagaagttcagcttcaggggggtggatctggacgcgcttctggacatgtccactgacgaactcgtgaagatgttcagtgctcgcgcacgcagaaggttccagagaggtctcaccagaaagcccatggccttgattaaaaagctccgcaaagcgaaaagggaagcaccagccaggtgagaagccagaaccagtgcgccacccatctccgcaacatgattattgtgccctgagatgattggtagcatcattggagtctacaacggcaagactttcaatcaggttgaaatcaaacccgagatgattggccattatctcgctgagttctctatttcatataaacccgtcaagcatggtaggcctggtattggtgccactcactcttccaggttcattcctctcaagtgaaagccttaccgaaactcttgtcagattttctttttatttaagcattttatttttcacttgtctgtcggtatcatgacttgattccatgggatcagcattttatagtttaggttttgattttgtcaacttcgataacttgttcattttaagcatgggagatttatgcatcaatatttgtccaagtagtcttttttctacttgggtttgtgaatgcgtt

SEQ ID NO: 4683 - DNA, 503 bp, Glycine max
accacgccttcacccaagccttcgttcaggtgccaaaaggacaacaaaagggaacaacactcatttctttttctctatcttttgttctgctcagctcgatctacctaccttggttcttctctgttctgttatttcagtgcagcagcagaaaatgaccatcctcattgagcaacctgcccttgagttacaagttgaaggcaacaatgtgcatgctgaagaaaccaatgagcttgtattggatggtggatttccattgccaaaggatggatatatggccccagaaatcaattcatttggccactccttcagagaatatgatgctgaaagtgagaggcaaaaaggtgtggaggaattttataggttgcaacacatcaaccagacatatgactttgtgaagagaatgcgggaggaatatgggaaattggacaaagctgaaatgggcatttgggaatgttgtgagctgctgaatgaattggtagatgagagcgatcctgatttggacg

SEQ ID NO: 4684 - DNA, 511 bp, Glycine max
ggaatttgtaaaacagttggcattagaaaaacgtggctctgcattatcgctagcggccgacaccatttctgattgtagcatcattattattactgaattctgcagtttcaaggtgaagcctgaagcgccatggaagctcaagcggttcaagtcttgcgatattcagctacgctgcattccaataatcccaagcttgagaaaacagggaccaatggctctctccgaatgtttggtggatttaagaaacagctttttgtttcgtctaagttgcagagtgcaaaaccttcggcgaatatacggcgaaggacagcatctttggtggttgcatgttcgcataataatattccagcttcagcattggaatatggaagctttcattcttctgttgaagaaaagttgattttgaagattaaatcacaagagatcgaaccatacttaagtggacgctgtatatatcttgttggtctgacgcccgccgggagtgcttgtgcatacatacattgcaagtata

SEQ ID NO: 4685 - DNA, 776 bp, Glycine max
agcgccatggaagctcaagcggttcaagtcttgcgatattcagctacgctgcattccaataatcccaagcttgagaaaacagggaccaatggctctctccgaatgtttggtggatttaagaaacagctttttgtttcgtctaagttgcagagtgcaaaaccttcggcgaatatacggcgaaggacagcatctttggtggttgcatgttcgcataataatattccagcttcagcattggaatatggaagctttcattcttctgttgaagaaaagttgattttgaagattaaatcacaagagatcgaaccatacttaagtggacgctgtatatatcttgttgatcagtctcttggaatgatggcctctgggaagacaactgttgggacggatattgtcagaggcgctttcttattcgttttatgatagtgatgcattggtggtgaaggaggttggtggaatatctgtaactgatatattcaagcactatggagagcctttttttcgtaataaggagactgaggtgttgcagaaggtgtcaataatgcatagacatcttatttctactggtggaggtgctgtcgtgaggcccatcaattggaaatatatgcagcaggggattagtgtttggttggatgtacctgtagaagtcttgactcagagaataacagctgaaggaactgattctcgcccacttctacattatgaaggaggagatgcatacacaaagactttcatgcgtttgtctgccctttttaaagaaagaagtgaagcatatg

SEQ ID NO: 4686 - DNA, 487 bp, Glycine max
aaaggatctcaatcgaccttgggaagaccctatgccagagtcaggtgaaaggcatcttgcccaggagcttaggggtgttggtttatcagcctatgatatgccggaatggaagaaggatgcctatgggaaaaccattacctttgggcaaaggtcaaagctttctattcaggagcagaggcagagtttgccaatttacaagttaaaaaaggaattgattcaggctgtgcatgataatcaggtcttggtggttattggagaaactggttcaggtaagactactcaagtcacacagtatcttgctgaagcgggctacaccacaagaggcaaaattggatgtactcaaccccgtagggtggctgcaatgtcagttgcaaagagagttgcagaagagtttggttgtctattgggagaggaagttggttatgccattcggtttgaggattgcactggaccagataccgttatcaagtacatgacggatggtatg

SEQ ID NO: 4687 - DNA, 539 bp, Glycine max
catgaaaagatgtccagtcaactttcatggaggtgggagctactgaacctatgtgaatttgtctttcttgggggattttattgatgatgacctctgatgcgaacgaagatcttcaccctagaatagataattgggtttgtttcatttacagagaggaatcactgccttaaggtggaggaaggtatccatgcgatcatcaactcatttgtcaccagcattttgcctgtacatacagaacttttttttatagaaggaaacactggcaaataaagaacagctttaaccttgaagcatcttgttggaaaatcaagggcctcacttgaatggatgttcatagagtagagacatgtaaggcaactcatctgcattttcataaatatcagttacttacattaaattgcaatactttctgaattttgatactaatttactactacaggacagaggtttctttaagaagctgtcattcaattgctgtgatgtacttgacgaatggtctgtactatatttggtttgcacgattttctcttgggtaattt

SEQ ID NO: 4688 - DNA, 421 bp, Glycine max
ctcgttacaagataagcatggtgaagatgtatcaaatatcaatattcaagcagaaaaaagcctggttaaagattacttggttgaccagaatgcaagatctcagaaaagaattataccagttcccagcccagcatccattgaggatatgaggacactgatcacagaaaataataagtccacagaaaacccattgaaattgatccaaacagagagcaaaatcccacgtctggctgcatctccaaatagaactcctttcgcggacgtgaattcagtcaattgactattacatcagtttgggtatgagtatgaaactacacaaagctgctcatcacttgatgagcaaaccttacgttttccttcctagtgtaaaataactactatatgagttttctacttaattgaggagtgtttctgcacgcaa

SEQ ID NO: 4689 - DNA, 890 bp, Glycine max
gctcaacttcttaaatatggtcgtaaaggaaagcccaagttttgtccatttagactttcccatgatgaatcatccttaatctggattacaagtagtggagaaagaaatctgaagctatcttctgtctctagaattattcctggacaaagaactgctgttttccaacgttacttgcgtcctgagaaggactatttgtctttttcacttatttacagtaacggaaagcgatcgcttgatttgatttgcagagataaagttgaggcagaagtgtggattgctggcctcaaagcactgatagcttctggtcaaggtggtcggtccaaaattgatggatggagtgatgggggtctcattcttaatgatagcagagacttaacatcaaataatccaagtgtaagtttggctagcacgtcacgaggcatttgttctcctgacatttctgtgactcttccaaatacttcaccaaagtcctttcggtctgacaatacaatttctgaaaggtcacatgcgccaccagacccaacaaacatgcaagtgaaaggatctgcttcagatgtatttcgtgtcagtgtttccagtgccccaagtacatctagtcatggatctgcacctgatgactgtgatgctttgggggatgtatacatatggggagaggttacctgtgaaaatgttaaagttggtgctgataaaaatgtaaattatgtcagccccagggcagatgtacttctccccagaccactggaatccagcgtagttttagatgtacatcatatagcatgtggtgttagacatgcttctctagtcactaggcaaggtgaagtttttacatggggcgaagaatcaggaggatgccttggtcatggtgttgggaagaatgtggttcaacctcg

SEQ ID NO: 4690 - DNA, 553 bp, Glycine max
ctcgagcctctcagcttagggttttaccgttaaacgattctcttcgtctttctctgttctgaaaccactaccgtttcgtcgtcaccatgccgcaaggggattacatagagcgtcacagaagagactatggctaccgtctcgatcacttcgagcggaagcgcaagaaagaggcgcgtcaagttcacaaacgctctgcaattgcccagaaggctctgggtattaagggcaaaatgattgccaagaaaaattatgctgaaaaggcacagatgaagaagactttggctatgcatgaagaatcaacgtctaggcgcaagactgatgataatgttcaggatggagctgttcctgcttatctccttgatcgtgataacacgaccagagcaaaggttcttagcaacaccattaagcaaaagaggaaggagaaggcgggaaaatgggatgttcctctacctaaggtacgtccggtggctgaagatgaaatgttcaaagtggtccgaactggtaaaagaaagaccaagcaatggaagaggatggttacaaaagctacatttgt

SEQ ID NO: 4691 - DNA, 1832 bp, Glycine max
cggtctagaatccggccgaccacgctcagcagcgtccgtacgctgcaaaacaaaagggataaaacaaaagagagaaaaatctgcgtagagtatacaacgaggggcaagagtaccctggaagcctcactccttttgtgacggtaacatgtatagttgcagccatgggtgggttaatcttcggttacgatatcggaatttcaggtggggtgacatccatggatccgtttctgctcaagtttttcccgtcggtgttccggaagaagaattccgacaaaacggtgaaccagtactgtcaatacgacagccagacactgacgatgttcacgtcgtcgctgtatctcgccgcgttgctgtcgtcgttggttgcctccaccgtcacacgtaggttcggccgaaaactctccatgcttttcggaggcttgcttttcctcgtcggtgcccttatcaacggttttgcccaacacgtgtggatgctcatcgtgggtcggatcttgctcgggttcggtatcgggtttgccaatcagtctgtgccactctacctatctgaaatggctccatacaaatatagaggagcattgaacattggctttcaattgtcaatcacagttggtatcctcgtggccaatgtgttgaactacttctttgctaaaatccatggtggctggggatggagattgagtttgggaggtgctatggtccctgcccttataatcacaataggatcactagtccttccggacactcccaattccatgattgaaaggggtgatcgtgaaaaggccaaggctcagcttcggagagttcgcggcatcgacgatgtggaagaagagttcaatgaccttgttgcagctagtgaatcctccagaaaagtggagcacccgtggaggaacttgttgcaaagaaagtacagaccccacctcaccatggctgtgctgattccattcttccagcaactcactggaatcaatgtcatcatgttttacgcgccggtcctgttcagctccatcgggtttaaggatgatgctgctctaatgtcagctgtgatcaccggcgttgttaatgttgtcgcaacttgtgtctcaatttatggtgttgacaagtggggtaggagagcccttttccttgaaggtggagtccaaatgctcatttgccaggctgtagttgcagctgctattggagcaaagtttggaattgatggaaaccctggtgatttgccaaaatggtatgcagttgttgtggttctcttcatttgcatttacgtatcagcatttgcctggtcatggggtcccctaggttggttggtgcctagtgagatctttcccttggagatccgttcggctgctcaaagtataaatgtgtcggtgaacatgtttttcactttcttgattgcacaagtcttcttgacaatgctttgccacatgaagttcggcttgttcatcttctttgcctttttcgtgttgatcatgacattcttcatctacttcttcttgcctgaaaccaagggcattcccattgaagaaatgaaccaggtttggaaggcacaccccttctggtccagattcgtggagaatgatgattatggcaatggtgttgagatgggaaggggaactgctatcaaagaagtgtagttacttgtttatttttctcaatgactagcgttttagcttttgttggtaaatcatactattggtggtgtcaatgtattgaattgttcctataaattaaaaagggttatttttcttatgtatcccctgcttcttcatatgaagcaagtttacaggatacttttctatattaatccaattgcacaaattgcgatgcctttgaaaaca

SEQ ID NO: 4692 - DNA, 493 bp, Glycine max
tttttttttttttttttttaaaaaaaacatcgcttattttttttacaacatgtctttagaaaaaaacaaaaagttaaaaacacatacatttttttaaaaattaagctaaaaccacgctgccacaaggaagataataaaccccaaactcagatggtagaggccttagtgagggacttaatggtaatagtaggaccaaacccagcctgcgtatactcaaactcaaacgtatcataacgcaaaaagagttccaccagaaacaacctgcacagcagcaccaccagattcttcccgggacactgcttattacgcgccgaaggctcctccgtctccggtgccgaattcggcacgaggtcggatcttgctcggtttcggaatcggcttccccaatcagtctgtgccactctacctatctgaaatggctccatacaaatatagaggagcattgaacattggctgttagttgtccatcactgttggtatccttgtagccaat

SEQ ID NO: 4693 - DNA, 797 bp, Glycine max
cccactcgtacggtcggatcttgctcggactcggtatcggcttcgccaatcagtttgtgccactctacctatctgaaatggctccatacaaatatagaggagcattgaacattggctttcagtggtgcatcactgatggtatccttgcggccaatgtgttgaactatttctttgctaaaatcaaaggtggcggcagaggcagatggcatgacacgtgtttgctccttatcttaagcttgtgccaaaaattttatgtatcccaccttcccacaacattgccacctacctaccattttctgtagtttttctttttcaaatcttggggtggttgaaagttttaaacttttcttgattcgattgcaagtctggtcttgaatgaatacttctaagaaaagggtgcctttaaactttttgaacgcttcttcttcttctttgtcatgtatgtatctctgcacttgatcaacaggtactgcctcgtgtcattggatgtgtgaatttctgaactcatttcacagaggtcatgcattattctgctgcttctctttgcatccaagacctggtgtcgatttagacttggaattcctaattcaggattgttcaagtgtgagctggatcccccttctatcctctggcattggcatgtaccaaatttgggaagcctataagggtttgctggggaagtagaggatctacactaatttgaatggggcattctgcagctgtgtgggactatagagcagcaactgaaattacaaaggactggaatgggattcatcaaattgtgcttcggactccaa

SEQ ID NO: 4694 - DNA, 941 bp, Glycine max
ataacaataataataatattttcggtccaagggggatttaaaaaaaacatcgctgattttttttacaacatgtctttagaaaaaaacaaaaagttaaaaacacatacatttttttaaaaattaagctaaaaccacgctgccacaaggaagataataaaccccaaactcagatggtagaggccttagtgagggacttaatggtaatagtaggaccaaacccagcctgcgtatactcaaactcaaacgtatcataacgcaaaaagagttccaccagaaacaacctgcacagcagcaccaccagattcttcccgggacactgcttattactcgccgaaggctcctccgtctccctcccattcgaccacagcacgtgcttcagcatcttctccccctccccaacaaacctccgcggaacaaacacctcagcatcctcgaagatcctcggatccctcgtcgcaaacggctggtacccgaacagcatctcccccttcttcacctcaaacgacgcgtcatggctcgaaacgacaaggttctccctcgcgcgtgcgtactggtacggcaccgcaggttcgatccgcattacctcgtacaccacggacttcacgagaggcatgttctccaacgcggtgaacgtgacacctccctcgtcgttcaccacgcgccgaacctcacgcgcgaggtcagcatggagcttttcgccgcttagccctagccattttaagacgtaggggaactggttctttaaccctccgtaggcgttgaaccctgcagtgaaaacgacgttgtggcacgcttcgtttcgtttgaggcctagcttgtcggcctcgtcgagtgctgtcgttgcgtgcgttttaacggcctcctagaggttcgtgtagccggactgtgtgaggcacgcggggaaagggtgtgtccggattcggaagtcttcgatgtagttc

SEQ ID NO: 4695 - DNA, 508 bp, Glycine max
cggacgcgtgggtttccctgtctctgttctcttcaccattctctttcttctttgtttcaagtttcaacaacccagattcactctctctctcgtaattttctctcttattgaggctagaaaaagagagcaaaaaaactaaaaaatgcctgcggtcggaggtataaacaccggagggggcaaggagtaccctggaagcctcactctatttgtgacggtaacatgtatagttgcagccatgggtggtttaatcttcggttacgatatcggaatttcaggtggagtgacgtccatggatccgtttctgctcaagtttttcccgtcagtgttccggaagaaaaactccgacaaaacggtgaaccagtactgccaatacgacagccagacactgacgatgttcacgtcgtcgctgtatctcgccgcgttgctgtcgtcgttggttgcctccaccgtcacacgtaggttcggccgaaaactctccatgctttacggatgcttgcttatactcgtc

SEQ ID NO: 4696 - DNA, 694 bp, Glycine max
gttgattctctctccaccacactccatagatttagtagctttcaacccttactctggaatggtgtatactttactctctcttttaaatcttgtgcacaaaattataattataaattttaacattaaaaattgttcaaatctttttgactgtttgtacatgtgtacatgtacttctcgtatcgccacgtcctagaaccagatctcttcagcagccaacagacacagaatttacaagaccggtttttgctccttatcttaagcttgtgccaaaaattttatctatcccaccttcccacaacattgccacctacctaccatttcctgtagtttttttcaaatcttggggtggttgaaagttttaaacttttcttgatttgattgcaagtttggtcttgaatgaatacttctaagaaaagggtactgcctcgtgtcattggatgtgtgaatttctgaactcatttcacagaggtcatgcattattctgctgcctctctttgcatccaatacctgctgtcggtttagacttggaattcctgattcaggattgttctaagtgtgagctggataccccttcaatcctctggtattggcatgtaccaaatttgagaagcctgtaaaggtttgctggggaagtagaggatctacactaatttgaatggggcattctgcagctgtgtgggactatagagcagca

SEQ ID NO: 4697 - DNA, 288 bp, Glycine max
ctcacgcgttcgtctcaccccagttttcactttctcattattccctctcctattgataaagaaacagagagagagagaaaaaaatgcctgcggtaggaggtattagcaacggagggggcaaggagtaccctggaagcctcactccttttgtgacggtaacatgtatagttgcagccatgggtgggttaatcttcggttacgatatcggaatttcaggtggggtgacatccatggatccgtttctgctcaagtttttcccgtcggtgttccgcaagaagaattccgaca

SEQ ID NO: 4698 - DNA, 287 bp, Glycine max
gttccctagatctgaatcacaccagtgaggagagattttgttggttaaattggctagttggcattttggctttaaccgataaggctaattcacttgttttgttacagtataggtgtgagctggatcccccttctatcctctggcattggcatgtaccaaatttgggaagcctataagggtttgctggggaagtagaggatctccactaatttgaatggggcattctgcagctgtgtgggactatagagcagcaactgaaattacaaaggactggaatgggattcatc

SEQ ID NO: 4699 - DNA, 400 bp, Glycine max
ctcgaaacccggccacttcgccatgtccgagcaaccatgcttgccatcgggaaggccacctccgtcgacatctgccgcttcttctccaaacctggcccctacgtgtcctgcgacacgatggagtttctattagcgcgctacgacggcgagctagacgtggatgcggtggactccgaggggaggacgacgatccacgtggtggtgagggaggggcacacgagggttatccggttctgcgtcacgatggggggaaaccctaatcgcgtggattcgaatgggtggaccccactctactacgcagcgtggaatgggcacgtgaaggctgcggagtgtttgttggaatgctccaacgtgaagtgcgtgagggacagggaatggataagaacattttctgttgtcc

SEQ ID NO: 4700 - DNA, 1210 bp, Glycine max
acgcgtcagcccaagcgtccgcccacgcgtccgcggacgcgtgttccaacatctatctcacttcttagttctttgtggctctttccatgatggcctctcctacatctccaagagttctcttcttgagtctctttgtaactctttccatgattttacatttgagttcagccaggaagttgtctgagtcagacccccaattgcagttccaataccacagaggccctctcctcacaggcaaaatctccgtaaacctaatttggtacggtaagttcaaaccttctcagaaagccattgttgctgatttcatcacctctctctcctcttccaaacccctcaccgcccaaccatccgttgccacgtggtggaaagccaccgacaaatactacaaaaactcgttccccaaacttgcactctccctagggtcccaaatcgttgatgaaaactactctctaggaaaatcactcaccaccaaccaaatcttaaaactcgcgtccaagggtccacagagaaacgccatcaacatcgttctaacttctgctgaagtggcagtggaggggttctgttcgagtaggtgcggaacacacgggtcctccgtgggggcgcgcgtgaacggtaagaggtacaagttcgcctacatttgggtgggtaattcagagacacagtgccctggtcaatgcgcgtggccgttccaccaacccatttacggtccccagaatccagcacctttggttgcacccaacaacgacgtgggtctcgacggcatggttatcaacgtggctagtctccttgctggcactgtcactaacccttttggaaatggctactttcaaggacccaaagaagctcctttggaagctggttcggcttgcactggggtttatggtaagggcgcgtatcctggctatgcagggaatctcttgctggaccccaccaccggtgccagctacaacgctaatggagtcaacggaaggaagtatctgttgccagctcttgttgaccctgaaacctcagcttgctccacactcgtgtaaaactaccactcaaactagttttcatccatgcttagttgttacttgttaggcaataccagagattctttcatttcttcattctttttgttatagcttgaaaacaaaattatagtgttagaagtaatgttgtaacgacgttggttacaccaataatattcgtaataaaagctctttattgg

SEQ ID NO: 4701 - DNA, 754 bp, Glycine max
gactaccattcttattttctctctcgatacaaaaatacatagaaatggcctcttctcttgcatcctcatcaactgttctctggatcctttttctaaccattgcaactcttcatttgagttcagccaggaagttgtccgggtcagacccgcagttgcagtttcaataccacagaggccctctcctcaaaggcaaaatctcagtaaacctcatttggtacggtaaattcaaaccttctcaaaaagccatcgttgctgatttcatcacctcgctctcctctcccaaacccgtcaccgcccaaccatccgttgccacgtggtggaaagccaccgataaatactacaaaaactcgtcccccaaactcgctctttccctcggcaccacccaaatcctggacgagaattactccttaggcaaatcgcttacgaataaccaaatcttaaaacttgcatccaagggtccacagagaaacgctatcaacattgttctcacttctgctgacgtggcagtggaggggttctgttccagtaggtgcggaacacacggatcctccgtgggggcgcgcgtgaacggaaagagatacaagttggcgtacatttgggtgggtaattcagagacacagtgcccgggtcaatgcgcgtggccgttccacgagcccatttacggtccccagaagcgagcggtggttgcagccagcacctatgtgggacgtgacggcatgccgatcagtgtggctagtctccttgccggcactgt

SEQ ID NO: 4702 - DNA, 679 bp, Glycine max
acggattcatgagaaggtccaaaaacagtgtaacaaaaagaaaaagaaaaacaatatgaagttcactataatcacaatatttttctctttatttctacttgactttggttttgcacaacagggggatcttgacatatcaagatttggaggaaaaccaaatacaaatataggccaggctttcttaagtgcctggactcaagcatgtgcatcaccaactgctgtcaaaattgtgattccagctggcacataccaaatgggtgcagttgatgtcaaaggtccttgcaaggctcctattgaggttcaagttgatggaacaattcaagcacctgcaaacccaactgaccttaaggcggctcatcaatggtttgatgttcaatatgttaactctttcaccctgtcgggtaaaggtgtttttgatggtcaaggggcaactgcttggaaacaaaatgattgtacaacaaacaaggactgcaagatgctttgcatgaattttggttttaatttcctcaataattcaattgtccgtgaccttacttccaaggatagcaaaaactttcatgtgaatgttttggggtgcaacaatttcacatttgatgggtttaaagttagtgcaccaaaagatagccccaacaccgacggaatccacattggaagatccacagatgtgaagattcttaac

SEQ ID NO: 4703 - DNA, 521 bp, Glycine max
ggaggaggaaaacacagatgcttcagctgctgccggtctcctcaagaaactaactgttggcgaggataactcggaggacatagagccgccggaaaaggccacggataccaatgtgaaacgtgagcaggatgtatagacaagaagccaagcctgaggatcataagatgaatcagctccaccagcatagaatttaatgtggctggtgaatgatttgttctctcataggttgctgatatgcttaaaagattggtaacctagattggaacctcaggatatagaatggttggcatgcagtatggaaatgtgatggactgtgtatctgttgagtactgtttttgttctggtttgcaagtatggttggatggttttgtcattgtgggttttcatctttctcatgtttccttcaattgagttgtttttgtactttcaaaaaaagttttttttttttttttggttttttacggcaattatacatttaggatatgtgctatggttttgttgtgcctttttatattattttt

SEQ ID NO: 4704 - DNA, 670 bp, Glycine max
caatgttttcattgtagtccacatggttggagcatatcaggtgatggctcaaccactatttcgggtaattgagatgggtgctaacatggcggggccgcgttcagatttcattaacaagagctatcccatcacaatgggctccttaacatgtagcatcaacttggttacgataatttggaggccaatgtatgcggcagtggccacagttattgccatggctatgccatttttcaatgagtttcttgccttgcttggagcaatagggttttggcctctcattgtcttcttccctgtacaaatgcacattgcacagaaacgggtaaaaagactatcattgaagtggtgttgtcttcaaatattgagcttcgcgtgcttcctagttacagtttccgcggcagttggttccgttcgtggaattagcaagaatataaaaaaatacaaacttttcctgtataaacaatagggcatttggttgcacattcctgtgtctcacatttgagatatgtgaatatagctatagctaggcagaaaaagaagggagacaagttaatttcaacaaggcagtgagaattatctgaatgcaaaattatttgtcagctacattattccaacttacagtgtgagcaaacactatttcaactagtcaaaatatttctgtctcagttatatc

SEQ ID NO: 4705 - DNA, 913 bp, Glycine max
ttttaggcatttcccttattccctctgatgaatgctctactctactctgactctcacacatcgttttatccgaaagcaagcattatcagaagcagaaagaaagaataagaggttgcagcaacaatggcagccatggctgcgcttcagagctcaatggtcggtctctccctctcctccaactctttcttaggccaacgcctttctcccatcaccctcccctctcttcttccgggtaagtcaacagagaagcaatgtcctattgtaatgaggcttaaacgatgggaacggaaggagtgtaaaccaaacagccttcctatcttgcacaaaatgcatgttaaacttggagatacggtgcaagtcatatctggacgtgaaaggggtaaagttggggagattactaaaatcttcaagcataacagcactgttatagtgaaagatttaaatttgaagacaaagcatgtgaagagtagagaagagggtgaaccggggcaaattattaagattgaaggtcctatccacagctcaaatgtgatgctctactccaaagatcagaaggtagcaagtcgtgtggggcataaagtcctagataatggtaaaaaagtccgctaccttataaaaactggagaaataattgatagttcagagaactggaagaaactgaaggaggctactaagaaatctgaagaagctgctgctgctgctgcctagttttacttatgtaattcattcattcactggtaatgtaactctagcaatacttgttgtgatctctcctccattttgtgatctaatgtatatttgtggtctggctattgatctccataaaatgaaacctggctgatcaaatttgtatattgcttgttgagcaattgagtttttttgaagaaatattgtttgtgtaaaaaaaaaaaaa

SEQ ID NO: 4706 - DNA, 1680 bp, Glycine max
acgcgtccgcccacgcgtccgcacaaccatggataattccaaccttcaacgtctcttcactctcttccttttttccctaattgcaccctctttggctcaacaatccttcagacccagagccctcgttgtcccagttaaaaaagacgcttccaccctccaatatattactcaaatcaaacaaagaacaccactcgtcccagaaaacctagtacttgacatcggtggccaattcctgtgggtcgattgcgacaacaactacgtctcctccacttaccgccccgcacggtgtggctccgcccagtgctccctcgccagatccgacagctgcggaaactgcttctccgccccaaaacccggctgcaacaacaacacgtgcggcgtcacgccagacaacaccgtcaccggcaccgccaccagcggcgagctcgcgcaagacgtcgtctccctccaatccaccaacggtttcaaccctatacaaaacgccaccgtttcgcgcttcttattctcctgcgctccaaccttcttactccaaggcctcgccaccggtgtcagcggcatggccggtctcggcagaactagaattgctctcccctcgcagctcgcttccgctttcagcttccgtagaaaattcgccgtctgcctctcatcttcaaacggcgtcgctttcttcggtgacggaccctacgttcttctccccaacgtcgacgcttctcagctactcaccttcacgccgttattaatgaaccccgtgggcaccgcctctgctttctcccagggagagccttccgccgagtatttcatcggcgtgaaatcgattaaaatcgacgaaaagacagtgccgttaaacaccactttgttgtccataaacagcaaaggcgttggtggaaccaagattagttccgttaacccttacactgttttggaggattctatcttcaaagcggtgacggaggctttcgtgaaagcttcttctgctaggaacataacgagggtggcttctgtggcgccgtttgaggtgtgcttcagtagggagaacgtgctcgccacgcggttgggggcggcggtgccaactattgagcttgtgctgcagaaccagaagacggtttggaggatttttggagcgaactcgatggttagtgtgagcgatgataaggtgctatgccttgggtttgtgaatggaggtgagaatccgaggacttcgatagtgattggaggatatcagctggaggataatcttttgcagttcgatttggctacttcaagattgggattcagctctttgctctatggaagccgaactacgtgtgctaacttcaactttacctccgctgcgtagaaggaaaacgtttcaataattagcattatctcattctctcattcataataaatgccgcctgcggaatttaggttgagcttcgcaactacgagtttcaaataaactgttaaacacaagtattttctatttccttttgatacatacagggttcatgttttttaatttggataagcccctacatggttcatgtatcttataagtttgaatatttgttcagagacaaacgtaatccaagtgtgggacaccttcattgctctttgtcttgcattatatacacatttaaatgcatattttttattaataaatattaatgcttagtattgctaaaaaaaaaaaaaaaaaaa

SEQ ID NO: 4707 - DNA, 962 bp, Glycine max
aaaaccctttcattccattttacattattgtaaagcattcttcgcctttctctctcttctttttactctctctctgtctctctctacgctttctcgttcgagatccctcaagggatccactaactgaaggagaaatggggttgacattcaccaagcttttcagccggcttttcgccaagaaggaaatgcgaattctgatggtgggtctcgatgcagctggtaagaccaccatcctgtacaagctcaaacttggagagatcgttaccacaattcccaccattgggttcaatgtggagactgtggaatacaagaacattagtttcactgtctgggatgttggtggccaggacaagattcgtcccttgtggaggcactacttccaaaacacacagggtctcatttttgtggttgacagcaatgacagggacagagttgttgaggccagagatgagttgcataggatgttgaatgaggatgaactgagagatgcagtattgcttgtgtttgctaacaaacaagatcttcctaatgcaatgaatgctgctgagattaccgacaagttgggtctccactctctcagacagcgccactggtacattcagagcacctgtgcaacctctggggagggcctttacgaaggtctggactggctttccaacaacattgccaataaggcttaatgcctttgggagtcttcttgcggattggtgattctggatgcaggggtgaacattatctagtttttttttttggtcctcttccaagacaactcgaatttgtgttcatgttttatggcttaggacatcttgatggctaaaattatagtaggaatttgtttcatgggatgtctaaatacttttgagttttttttttttttaattgagtttggattcaatgtttataactgtaattgataccaatcaatgcgccatcccattgagttatgattttattttgctaat

SEQ ID NO: 4708 - DNA, 996 bp, Glycine max
ggctttttaggttattttcttaagtaaaaagaaggaaataaataattctcgtagctttgttgctcttataaattctattctggttgacgcttctctcaccatccccatttcgcgttggtgcaaagcatccttcgtttcaatttctctctctcagcgctttctgcaatcgaacctttcatctccaaagggatccacaggccgaaggagaaatggggctgacattcacaaagcttttcagtcggcttttcgcgaagaaggaaatgcgaattctgatggttggtcttgatgctgctggtaagaccactatcctgtacaagctcaagctcggagagatcgttaccacaattcctaccattgggttcaatgttgagactgtggaatacaagaacattagcttcactgtttgggatgttggtggccaggacaagattcgtcccttgtggaggcactacttccagaacacccagggtcttatttttgttgtagacagcaatgatagggacagagttgttgaggccagagatgagttacataggatgttgaatgaggatgaactgagagatgcaatattgcttgtgtttgccaacaaacaagatcttcctaatgcaatgaatgctgctgaaattactgacaagctgggcctccactctatcagacagcgccactggtacatccagagcacctgtgcaacctctgggtagggtctctatcagggtttggactggctttccaacaacatagccaataaggcttgatgcttcctgggtgtcgtgtgcatgcaggggtgaatattatctggttttgttttttggttctcttctcagacacattggctttatgttcatgttttctggtttaggccatcttgatggctcaaattatagcaggaatttgtttcatgggatgtctaacacttttgagttttttcattgggcttggattcaatgtttataactgtaattgataccaatcaatgtgccatcccattaagctttt

SEQ ID NO: 4709 - DNA, 941 bp, Glycine max
cccacgcgtccgcccacgcgtccgcccacgcgtccgctagaggaaaagtaactccacacaacacaacacagcctaagagaattagattctaagctctatagagagagattatctgagaaatcttagccagccaaggaggaagaaagaatcatgtggtgctggcaaggagagggaggctagaaagaaagaaaaaaagaaagagctagagagagagggtaccctcttcttaatttgcactgtttttgtgtctgttacagcacttttaggagttcttctattctagtaacctctgccaaccaacaaaacaagcctgaaaataaaatagagatgctgcctccttgctggcgatcgttcgggaagaaacagtaatgctactgacatgggaaagaaggggagttggttttctgcaatcaaaagagttttcacacaccactccaaagggaaggattcagataataacaaaggcacaaaagagaagaagaaaagtctaggaaaactaaagcatggagagaccaattcattcatccccctcttcagagagccaagcagcattgagaaaatcttcggggacttcgaaagggagcaacaattactggggttaaggcctgccactcctccggagagacctaaaacaccaccttatgtccctccaagagctccttctcctagacctccctctccgagggctccttctccaaggcctccgtctccaagggctgcttctccgagggtggcttctccacgagttacctctcccaaagccgcgtcttcccggattgctcatcaccacaaggaggttggctacagaccagagccaactttgaggcaacagcatgccacagctactaagatccagtctgtttacagaggctatatggccaggaggagttttagagctctaaagggtctggtgaggcttcaaggagtggtaagaggacaga

SEQ ID NO: 4710 - DNA, 364 bp, Glycine max
attccacaatactagcaccctcaccatgaaactcttccactacctcttctcactactcacactactcttcctcttccaagccaaagaaggagtttccattagccctttgcaattgatcacacacccacttgaccccttaacaaagcaagaaatcaccctcgtccaagccacagtcctaaagaaataccccacaccacccaaccatgtcttcttccactacgtcggcctcgacgatcccgacaagacccacgtcctaaagtgggcctcctccggcaccaaaaccccaccccaacgcagcgccttcgttgtagccatcgtcaaaactcccaaatccacgaactcatcatcaacatcaaatcctcca

SEQ ID NO: 4711 - DNA, 460 bp, Glycine max
gggcctttgaggtttggagtcgtttttccaagcaatggaacctgcgaatatctacgtgaggcccattcagtggcataaacattcgtcgctgatcttgacacaatgaagattgttgagtaccatgatgaccgttgttgacgcctgttcctaaggcggagaacaccgaataccgggcttcgcatttgaagcctcccttcggtcccaagcttcattcttggtcctcccgtcaaccggatggaccaggctacactctcgatggacacagtatcagctgggccaattggaagttccacataggttatgatgtacgagctggtgtgataatttcaactgcatcaatttacgaccctgaagtgcataagtcacgtcaagtattatacagagggtacatttctgaactattcgtgccatatcaagacccagctgaggactggtactacaagactttctttgatgctgg

SEQ ID NO: 4712 - DNA, 636 bp, Glycine max
ttttagtactaatataaatcccacaaaacaaagaaaattataaatccttcaaaaggggaaaggtagctagaggaaaagtaactccacacaacacatcacagcctaagagaattggattctaagctctagagagagagagagagagagagagagagagagaagaaagaatcatgtggtgctggaaaggagacggaggctagaagaagaagaaaaaaagaagagctagagagagggtaccctcttgttaatttgcactgtttttgtgtctgttgctgcacttttaggagttcttctattctaacaacctctgccaaccaacacaacaagggaagaaacagtaatgctactgacatgggaaagaaggggagttggttttctgcaatcaagagagttttcacacaccactccaaggggaaggattcagataataacaaaggcacaaaagagaagaagaaaagtctaggaaaactaaagcatggagagaccaattcattcatccccctcttcagagagccaagtagcattgagaaaatctttggggactttgaaagggagcaacaactactggggttaaggcctgccactcctccggagaggcctaaaacgccaccttatgcccctccaagagctccttct

SEQ ID NO: 4713 - DNA, 458 bp, Glycine max
acgcgtccgagacgacagaagggggagagggagagagggagggagagagagagagagaggaaaagtaactccacacaacacatcacagcctaagagaattggattctaagctctagagagagagagagagagagagagagagaaggagaagaaagaatcatgtggtgctggaaaggagacggaggctagaagaagaagaaaaaaagaagagctagagagagggtaccctcttgttaatttgcactgtttttgtgtctgttgctgcacttttaggagttcttctattctaacaacctctgccaaccaacacaagcctgaaaataaaataaagatgctgcctccttgctggagatcgttcgggaagaaacagtaatgctactgacatgggaaagaaggggagttggttttctgcaatcaagagagttttcacacaccactccaaggggaagcaggattca

SEQ ID NO: 4714 - DNA, 488 bp, Glycine max
ttcagagcacctgtgcaacctctggggagggcctttacgaaggtctggactggctttccaacaacattgccaataaggcttaatgcctttgggagtcttgcggattggtaattctggatgcaggggtgaacattatctagcttttatttcttggtcctcttccaagacaactcgaatttgtgctcatgtaatgcggtttaggacatctcgaatttgtgctcatgtaatgcggtttaggacatctcggtgctaaattgtagtaggattttacttcttgggatgcgtaatactctgatctttctattgggtttggatgcaatgtccataactgtaatggagatactaattcaatgcgccaccgggttctgtctgatttatagttttattttggtcatgtatcattcatatattgagtatgaaatggagattttgtttattgttttgtaacattccccaaaaaaaaaaaactatatacacttcgtaccttc

SEQ ID NO: 4715 - DNA, 508 bp, Glycine max
aatgaatgctgctgagattactgacaagttgggtctccactctctgagacagcgtcactggtacattcagagcacctgtgcaacctctggggagggcctttacgaaggtctggactggctttccaacaacattgccaataaggcttaatgcctttgggagacgggagtcttgcggattggtatttctggatgcagggttgaacattatctagcttttatttcttggtcctcttccaagacaactcgaatttgtgttcatgtaatgtggtttaggacatctcggtgctaaactgtagtaggattttactttttgggatgtgtaatactctgagctttctattgggtttggatgcaacgcccataactgtaatggagatactaattcaatgtgccaccaggttttgtctgatttttagttttattttggtcatgtatcattcatataatgaaatggagattttgtttattgtttgtaagataccaggaaaaaaaaaactatattcacttc

SEQ ID NO: 4716 - DNA, 495 bp, Glycine max
aatttcaagttccgggtcgacccacgcgtacgcccacgcgtccgcccacgcgtccggttggtgcaaagcatccttcgcttcaatttctctctgtgagcgctttctgcaatcgaacctttcatctacaaagggatccacaggccgaaggagaaatggggctgacattcacaaagcttttcagtcggcttttcgcgaagaacgaaatgcgaattctgatggttggtcttgatgctgctggtaagaccactatcctgtacaagctcaagctcggagagatcgttaccacaattcctaccatcgggttcaatggtcgtgtattccacagtctcaacattgaacccgatggtaggaattgtggttaacgtctctcagtgcgtgagccaagaccggtaagtgaactgttttgcatcatcatgaccaaccctcggggggggcgtttattatttccacattgcctacagtaatgatttgatttttttagcttcattttttttt

SEQ ID NO: 4717 - DNA, 679 bp, Glycine max
ggaacaacaatgactctctatatgcaactggaaggcccaacctaaaagaaagagcatttaactaaccctaattcgccattgaagcctagacattgtgctttcaccttggctccgctctttggtttgctcaaccgatctccgcagcaatggtgaacgttccgaagacaaagaagacctactgcaagagcaaggagtgcaggaagcacacgctccacaaggtcacccaatacaagaagggcaaggacagcatcgccgctcagggaaaacgccgttatgaccgcaaacagtccggttacggtggccagactaaggcctgttttccacaaaaaggccaaaaccaccaagaaaattgtgttgaggctccagtgtcagggatgcaagcatgtctcgcagcacgctatcaagaggtgcaagcattttgagatcggtggtgacaagaagggaaaaggaacctctctgttctagatggaatattagaatttgccatttcacacactctctctacctctctcagtttttattgtcatcttcggcttttgattttgcagaaatgttttgtgtttgaggatattagaatttgcaatttcgttttgtttaagcactgattatagtattaattactagtttctcttcctttccttcaagtgttgcaattttctaacgagttttccttcgtcta

SEQ ID NO: 4718 - DNA, 402 bp, Glycine max
ggtgatttatggaaaaagaagagccacctgctggtagatacaatggctatgtggggtctcccggtatggctgatgtcttggatgatggttttggaggtggtaagaggaagggttctgggattagaatgtttggtgatttatggaaaaagaagagccaaaagtgatgtctggcttatatattcagtgagtgaattagtagtactttaactaaggtcatgttttgatggtagcagaaacttccaaagcagttacttactgttttgcatctttctggtttctttagtcttttctggtattattaaggccattaagcgtgtagtgttactgttgcatcatctgtgcaaggtactgatgtgaactttttgaaagatggattatatatttcacttctcctgaagctgc

SEQ ID NO: 4719 - DNA, 767 bp, Glycine max
tgaggaaacattatttggcacacgttagcctgcgacacatgttgagaaacgagttgcctgtgtctgacacttgatgttaaagtgtgaagggacaaggaaacatagagtctcgttggttcaatacacttgtgcaatttggccactatgaacacagggcttgctgcaggtgcagccttgcttgcactcttggctatcaccttctccttgttgagccctcaaaccctgttttctccgcctgagattccgggctcgaaggaccaccttcacgctgctcggttactccatgtcaccggagccgtcgggccggagagtcttgtcttcgacgctgacggcggagggccctacaccggcgtcgccgatggccggattctcaagtgggaaggggaagagcgaggttggactgaatttgctgtcaccagttccaataggtcggactgtgtacgcccatttgcaccagagttggagcacatttgtgggaggccattaggactaagatttgataagaaaagtggagatctgtacattgctgatgcctacctaggcctaaaagtagtggggtctacagggggtttggccaccgaagtggtaacagaagttgaaggtcagcccttgcaattcaccaatgacatggacatcagtgaagatgcagacgtgatatacttcactgattcaaccacaatcttccagagaaggcaatttatgcttgtactccttggtggagacaagaccggccggtttatgaaataccacatgtcaacaaatgaagt

SEQ ID NO: 4720 - DNA, 1008 bp, Glycine max
gaaagcacaattcatcgttcccttgagctaataattttgcacttatattcctgcctttacttggattctgtcgcaaaaggcaaatacatagcatcttgagcagttgagcaattgagctatcatacaaaagcaagcgaaggtagaagagatcagttatgatgagcaattccaaacaaaagaagaaattgaaggcacacaagaaaaaggatgaatggttgaaggacatgaggggtaacctaagtttgctggctaccgtaattgcaactatgacctttcagagtgctattaatccaccaggtggcattaggccagcaagtgaaactggagaaatcacatgtccagatacaagcaaaaacattacgggtccatgccctggagaagctgtcctatctgttcttaaagcagacacctacaacagcttcctttattgtaacacaatatgttttgcttcatctttagctgtttgtctcttgcttgtgagtggactccctcttaataaccgattcttcatctggttcttctcaatatgcatgtgcatcaccctcactgccctcacccttacctacttatatggtttgcaaatggtcaccccaaacgacgtttgggataattcattattcagcatggttggagtcgttatttttatttggatcatacttctaggaatcgtcgtaattttcctctccctacgcctacttttttggattgtcactaaatgccggaataaaaaacaaactgaacaaggagaagatcaaaaccaaagtaaacaagaagatccaaaacaaagtacaggagaagatgcaacctagttctgctcatccatcaggccatgcatcgcatatcaaccttccttacttgtggactattttacattgttaagcaatattattaatcatacataaatgagcaaatttgtctttagtgtacgtctcatagcagatttgatttttcaactttcatattattgtataatgctttgttgggtatataaataattttgtagttttg

SEQ ID NO: 4721 - DNA, 370 bp, Glycine max
agctaataattttgcacttatattcctgcctttacttggattctgtcgcaaaaggcaaatacatagcatcttgagcagttgagcaattgagctatcatacaaaagcaagcgaaggtacgtaagattttatcatcctaatggattatgtgttgtgtgcaaaaatattctgtaaaactaaattttcaatctaaattttaatgtgcacacatactttttgaaagtaatcaaatgttatcacaaaatcaagtatacttataaattgagtttgaaagttgaaacagctttgagcccatcaacctaaataattcaacccacttatctaatggatcaataacgggttgggttggattaatcaactagattgagtttt

SEQ ID NO: 4722 - DNA, 574 bp, Glycine max
ggtgacagtttcattattatgattttaatttaatttgattttatagcgacgagaccagcgagcaccaccaccgcgaccggcgagcccagccaccgtgttcgacttcgaattgagtccgagaaggctgttagataggcttttatattgaaaactgagacttgaagggaagcggttataattggtctggctttggacgtttaaacaattccgatcaagatccaattttgccttcccattttctcgtcgtttttttgtaacggtctttccatggcatatcccttctctgatttcaagtactcagatggcctcagtgtagtgggtatctccttctgcacagctattgtctgtgaggctatctcatgggttcttatctatcggaccaattcttacaaaaaccttaggtcctccattgacaaagcctccaagaaacttgagaccatgaagacagacagcaataaaatcaacatcaagaagtccaagaccaaaaaaattgacccgtgttgagacaagcctcaaagaatcgagtcgcgacttgtctctcttcaagttcaagtctgggggtgtggtggctctg

SEQ ID NO: 4723 - DNA, 439 bp, Glycine max
ggagtttcattactatgatttaatttaatttgattttgcagcgacgagaccacagtccacaagacccagaagcaccaccgcgaccggcgaatccagccaccgtgtgcggcttcgaattgagtccgagaacgcagttagacaggctttatattgaaacttgagacttgaagggaagctgttataattggtcagtcttcccatggcgtatcccttctcagatttcaagtactcagatggcctcactgtagtgggtatctccttctgcacagctattgtctgtgaggctatctcatgggttcttatctatcggaccaattcttacaaaaaccttaggtcctccattgacaaagcctccaagaaactcgagaccatgaagacagacagcaatgaaatcaacatcaagaagttcaagaccaaaaaaattgaccgtgttgagaca

SEQ ID NO: 4724 - DNA, 460 bp, Glycine max
aagtatttaaaactagctgctacttttgctttgagttaccgagatagagaaacatctgcttaagaggcttgttcacactaaaacaaactaaagcataacatatgaagtagagggaagtgctattttcaaaagaggagggaggtcagtgtaaattaagcatttttttggagaaggtgaatgtaatttgccctatttattgttctgttcttttaatgaggagttatataatgtgtgattaaatgttttcttatttatacaggctttggacgtttaaacaattccgatcaagatccaattttgccttcccattttctcgtcgtttttttgtaacggtctttccatggcatatcccttctctgatttcaagtactcagatggcctcagtgtagtgggtatctccttctgcacagctattgtctgtgaggctatctcatgggttcttatctatcggaccaattct

SEQ ID NO: 4725 - DNA, 341 bp, Glycine max
gattatgatttaatttaatctgattttgcagcgacgagaccacagtccacaagacccagaagcaccaccgcgaccggcgaatccagccaccgtgtgcggcttcgaattgagtccgagaacgcagttagacaggctttatattgaaacttgagacttgaagggaagctgttataattggtccggctttggatgtttaaacaattctgatctagaatccaagtttgcctgctatttttgccatggattgttcgttacagtctccccatggcgtatcccttctcagatttcaagtactcagatggcctcactgtagtgggtatctccttctgcacagctattgt

SEQ ID NO: 4726 - DNA, 484 bp, Glycine max
gcccgaggacgagaggaagtcgccggacatagaaattccccttgacgcgccgacgatgacgcacgacttcgcgatcacggagaatttcgtggtgatcccggaccagcaggtggtgttcaagctcggcgaaatgatcaaaggaggatcgccggtgatctacgacggcgagaagaaatcgcggttcggaatactgccaaagtacgcttccgacgcgtcgagcatcgtgtgggtggactcgccagacacgttcttcttccacttctggaacgcgtgggaggaacgcgacaaagacgaagtggtggtaataggttcgtgcatgacaccaccagattcaatattcaatgacagagaagagagactgaagagcgttttaacagaagtaaggctgaacatgagaagcgggaaggcgaggaggagggtgctggtggaggaaatgaacctggaggcagggatggtgaacaggaaaaggttggggagaaaaaca

SEQ ID NO: 4727 - DNA, 765 bp, Glycine max
ctcgaccgaatcggctcaggtgtgattgagtttggctgtcataatctctctctcatccgaaaatgtcactcaccttgcaaactccgccttctacaactctctcttctgcatctcccattcacagaacaataacaagatacaccacattctccttctcgcttcgtcctccaacaactcttcacttcaatccccacaggtccctccctctaattcgcgcttccaattcttctatcaatgccgcttcgaccactgaactggacgctgtgtccgccttcagcgagatcgttcccgacaccgtcgttttcgatgatttcgaaaagtttcctccaactgctgctactgtcagttcctcgctcctcttgggaatatgtggccttccagacaccatttttaggaatgctgtggaaatggctttagctgattctgagtgttatggacttgaaaatcctaacgcgcgattgtcttgttttgtcaacaaggctttcgcgaatatcggtagtgacatggcaaagcttgtccctggccgtgtttcgacagaagtggatgcgcggcttgcttatgacacacatgccattatcaggaaggtgcatgacctgttgaagttgtacaatgatagcaatgtacctccgcaacgtctgttgtttaaaattccttccacttggcaaggaatagaggctgcaaggttgctggaatccgaaggcatacagacacatttagcctttgtctacagtattgctcaagctgcagctgcagctcaagctggtg

SEQ ID NO: 4728 - DNA, 340 bp, Glycine max
ctctcttctgcatctcccattcacagaacaataacaagatacaccacattctccttctcgcttcgtcctccaacaactcttcacttcaatccccacagcttcgaccactgaactggacgctgtgtccgccttcagcgagatcgttcccgacaccgtcgttttcgatgatttcgaaaagtttcctccaactgctgctaccgtcagttcctcgctcctcttgggaatatgtggccttccagacaccatttttagcgtcagattttcagtctttgatatacctaacatctgcactttggtctgagtccgagtcacattttttattgttgctgtagaatgccgt

SEQ ID NO: 4729 - DNA, 1332 bp, Glycine max
ggagagaaaagaacaataattttccacagaaaaactcacaatatatagctacaatgtttaaacgtagttaagaaacccgataaacatgtatcataatgcagatagagtcatacaagctgattgccttctcatcatcagattgttaaaatctggaaggcaatcttcagaatgaaaccatctctacagaaccattacaattgttgctcactctaacaacataagtactatattttattaacaagcttataaaatgaaacttaagtagtaaggatcggtggaaggtaatcaactttgtcgccaagaacacgagccttggtgtcagggaagaattcaaatcctggaagctcagtgacaactccttcgttggaaaccccaataggatatcggagcaggtgaccaggaaggtcatgctcaagtgactcacttgaatagatatcccaatacttgtcagcaatttggttcaccttcttaatacattcttcattttcagggtggaggaaagagtcatgaagcaagccaaggtgctcataccacaacgacatgcggaaaccatggatctgtcccctggcaggctgcctggcagccaaatgaaatggttgataagcacccatggcaatctcagaatctctggcaccatccattgatctctggtttatgttggcagatccaacgattatgtattcatcatcaactatcatcatcttggcatgaacataaatcatgaagcgccgggcctcctgagctctgatataatctgtatcaggatctggtctttctggaggctcgtactctccttgtttcttcacctccctattaccaaggcagaagaatgtcaaatagttacgaggattttccactattcccttggcccggagcgcctgaacaacatccttgtacatcatatccattgttctcctctgccaatccaatattgcctgaactgatgcactttctgggacaccctctggccacattggaaccacaacatacacactgaacctttccccagcttcaatcttactaacaatcttaagtgaaagctccttcgggataatatgcaaagcatcgatggcttcaggcttaatgccatcagcactccaatcataactgcttccaaggaaatactgattctcaatatagatgaaatttttcgcacgtcgaatggcattaacataagcatcttgaatactacgatctattatattatccttcccactgacaagccccactctggcagcatcttcaggagtctctgggaacccaaaagcagctccaccatcaatggatctaaataattgctcgagccgattcgctcgaagcgagccgaatccg

SEQ ID NO: 4730 - DNA, 1392 bp, Glycine max
ggagaaagcaaggtgggaaggatgtacttgttccactgagagagcttgatgatgtcattgttcccccatccccagtgacgtttcctgaagatcatgagacctggaatgttcagttgtttagatccattgatggtggggctgcttttgggttcccggagactcctgaagatgctgccagagctggtcttattagtgggaaggataatatcattgatcgtagcattcaagatgcttatattaatgctattcgacgtgcaaagaacttcatctatattgaaaatcagtatttccttggaagctcttttgcctggagtgctgatgatattaagcctgaagacattggtgctttgcatctaatcccaaaggaactttcactcaagattgttagtaagattgaagctggggaaaggtttgctgtgtatgttgtagtcccaatgtggccagagggtgttccagaaagtgcatcagttcaggcaatattggactggcagaagagaacaatggagatgatgtacaaggacattattcaggcactcagagctaagggaatcgatgaagatcctcgaaactatttgacattcttctgccttggcaaccgggaagtgaagaaaccaggagaatatgagccttctgagcaaccagatcctgattcagattatcagagagcccaagaggcccgacgattcatgatttatgttcataccaagatgatgatagttgatgacgaatacataatcgttggatctgccaatatcaaccaaaggtcaatggatggtgctagggactctgagattgccatgggtgcttatcagccctatcatttggctaccaggcagccagcacgtggtcagattcacggtttccgcatgtcattgtggtatgagcaccttggcatgcttcatgactccttcctccagccagaaagtgatgaatgcattaacaaggtgaaccaagttgctgacaaatattgggatctgtattctaacgagtcacttgagcatgaccttcccggtcaccttctccgctaccccatcggggttgccagtgaaggagatgtcaccgagctgccaggatttgaattctttcccgacaccaaggctcgcattcttggtggcaaagctgactacctcccccctattctcactacttaatttgattttgtactttgttacaaacttgttattgcttacatcctaatctgtgttttcattactacttagtaataatcttaatatagtctgtgatgtcttgtggagatgttttttctgctatttttctgaagatttcagtgacagattttagttatctgatgttgttggtgggtccccctcccactggtttctaatcaatgtttcaaattctaccccaaaaaaaaaaaaaaaaaaaaaagga

SEQ ID NO: 4731 - DNA, 1026 bp, Glycine max
  unsure (1)..(1026): unsure at all n locations
ctcgagccgaatccctttcttcctctctgcacgctcttgcctcctccgatctcagagactcaacaaattgcttcgcctttggctctaaagtgactagcaaatcacgtgtcctcattctcgtcgagagtatgttttctctctctgttcagacttcagagtacgcttcctctctcacggtgggtttcattatgccataccactgaagaacgaagtttatctctctcttgtgacttgtgagcaattcaaattgcggagaacagaacctacacactgcattggaagatacaagaatatcatcagtttctcctattcattaactccagttactcactgaagataacattggaagcattgggcaataaaaatgagcaattcctctgctggaacctcatcaaaaccaagaacagcttcctcacaaccatcagaaacttcgtccaagcgcaaaagaggagttttccaaaaagaattgcagcacatgatgtatggctttggagatgatcctaatccacttcctgaaagtgtggctcttatggaggacattgttgtggagtatgtcacagaactggtacataaagcccaagatattggatctcagagggggaagctatcagttgaggatttcctctatttgattcgcaaggattcgccaaaacttaaccgctgtacagaactactttctatgaatgaagagctgaaacaagcaagaaaggtttttgaatcagacgaagagaaactgaggaaggtttttgaggtggatgactcagttgaaggatgaataatgaagttactgaaatgcactaatgactcagttgaaggatgaataatgaagttactgaaacgaactaatgactcagctaacctgttctttgttggttatgatgtgtttcgcctttttgaggatgctctagatatgaacttaatccctaaacgtccatgatcgaattgaaaatttgttttatcttcgtactcaaatatacataatcttaaaatccnnnnnnnnnnnnnnnnnnnnnnnnnnnnnnnnnn

SEQ ID NO: 4732 - DNA, 436 bp, Glycine max
  unsure (1)..(436): unsure at all n locations
agagaggacacagcgccgcgccgcctcaacaactgaaacaaacactatccctaatccgtttcttcctctctgcacgctcttgcctcctccgatctcagtactagcccatgcgattgtaaccgctgttgcacttgcttcttcaccttcttcacactattctctcactcactcttcttcgtttcggttcttcagatctcttctccgattccagaacagaacctacgcactgcattggaagatacaagaatatcatcagtttctcctattcattaactccagttactcactgaagataacattggaagcattgggcaataaaaatgagcaattcctctgctggaacctcatcaaaaccaagagcagcttcctcacaaccatcagaaacttcgtctaagcgcanaagaggagntttccaaaaagaatcacatgatgtatg

SEQ ID NO: 4733 - DNA, 359 bp, Glycine max
ccaagatattggatctcagagggggaagctatcagttgaggatttcctctctctgattcgcaaggtcctcttttgttaaaaaattgcaaataattattatgaaggttaaaagttattggggaaccttgaaatattttagcaaatttttatcttagtctccctaaatccttttgttaattgtttaaatctattagaagggtaatgccaaactgaacaaatgaattaaacaggaatccagcagaaactaaaggaaaaatcctctataacacccttctatatattgataacaccctatttaattgacccatctttttataagtttttgtttcctaatttattcggaatcaaaactttacaac

SEQ ID NO: 4734 - DNA, 368 bp, Glycine max
ctcgagccgaatcggctcgagcgaccatctattccctatatccgcttccaatttgttaattttcattctgatacgattctgggtatcgccaaatttctcgattttccgcatattttggatttggaggggtttgaagaaataaccgaactttggaaggaaaaacacaaccccatatgatgcaacgcttggttgatcatgttcttgctgttactaaagagtcattgaaggcaattacttatgagtccttaaataatattgtgaggctaatcaacggagtatcagcccttttgttggcactactacctgggaaagctaatatacttgaaggcatccatggttgggaactcaagccaactttcaggggaccg

SEQ ID NO: 4735 - DNA, 1175 bp, Glycine max
gtcttatctcggatctacgcaatgcactgtgtatctgaaagaaaaagagggttctcatttcgcaaccatcggccgcacttactcttgttctcaagggattcgattttctctgcactcacttctagggttttctctgcgctataagcaatcatggcggatgaaacaccaaatgagatgaaggaggaggttccagaaattgttccttttgatcctaccaagaagaagaagaagaagaaaattacaattgtagatcctgctgatgaacctgtggagaaattggctgagaagacagaaaacctctcagtttccgagggggttgagactgcatttactggtttgaaaaagaagaagaagaagcctgttgaaatgggtaacttgaatgatgagagtggagatgcaattgaagatttggatgatcaccctgaagatgatgaaggagaaatggttgttccccaggctcgttatccttgggaagggagtgatcgtaattatgaatatgaggagctgcttggcagggtgtttaacattctacgtgaaaataatcctgaacttgctggagatcggcgaaggacagttatgaggcctcctcaagttcttcgtgagggcacaaagaaaactgtgtttgtcaattttatggatctatgcaaaacgatgcatcggcagccagaccatgtcatggccttcttgcttgctgaattgggtacaagtggctcccttgatggacagcagagattggttgtaaagggaaggtttgcaccaaagaactttgaaggaattctgcgacgatatgtcaatgaatatgttatttgccttgggtgcaagagtccggatactatactttcaaaggagaatcgtctcttctttctccggtgtgagaagtgtggatcaggaagatcagttgctccaatcaaggctggttttgttgctcgtgttggccgaaggaacacagggacatagtcctacttttgatttatgttatttggctgaggatatgaaccttttccataaagttttgcatattatatgatgtctctcttactctccaattgagtttgttgcagtaaatggtatcttttgagtcaaaattgttatatctttttctttcggggcaagtgaaaatgattgtcccaaactaatcatttaggaaatcccgaattttagttccatttaagctt

SEQ ID NO: 4736 - DNA, 1819 bp, Glycine max
  unsure (1)..(1819): unsure at all n locations
ctcccgcggcgagaggtacttgctcacagatatatttttttttttgtctccatcattttctcgagagctttcagtttctgtggttcatctttcttcttcttaatctttccccccctctctgtaacatcccgcttctctgaatccctttctgctaatcatctgtctttcaagctaagattttctggtttgtcttttaattcaccaaaaagcaaacttagaaggatttttcgaaagccaggtgttttcagaaacgagatccaggttttattgtcgaatttcgctagtcatattaatatttcatcatttttttttcctttgaaaccagccaagagggttatttttgatccctcaaagctaatttctctctctctttttttatttccgggactgaagaggttgtctatttgaaatctccttcatcctttcctttcttgttgaaaagtttttgtttttgttttaattaaccagcagttcttcagttttagaaagacgcaggttgaattatcatggcagctatgatggatttttacagcagcagcacagagtttcaatttcactcagatccattcaggggtgaactaatggaagttcttgaaccttttatgaaaagtcctttctcaaccccttctccttcaaattcttgttttctttctacctcttactctccttcccccaacaactactctccctccctatactcaaacgggttatcatccatacccaacaccacccaaaacttaattggtttcgggcaagggcagcccacatctcttgtgggcctgaaccacctaaccccatctcagatctctcagatccaggcccaaatccagatccagaatcacagcaacacgctgagcttcctagggccgaagcccatccctatgaagcacgtgggcatgcctccgaagcccacgaagctatacagaggggttcgacagaggcactgggggaagtgggtggctgagattagactcccgaagaaccggaccaggctatggctgggaaccttcgacaccgccgaggaagccgctctggcgtacgacaaggccgcgtacaagctccgaggtgacttcgccaggctcaacttccccaacctccgacaccagggttcctccgtcggtggtgacttcggggagtataagcctcttcattccgccgttgacgccaagcttcaggccatttgcgagggcctggctgagctgcagaaacaggggaagaccgagaagcctccgaggaaaacgcgatccaaactcgcttctccgccagagaacgacaacaacaacgacaacaactcttgtaaggtcgaagctgcttcctcctcttctgaaggttcttcgccgctttcggttctgactttcgctgacgtcagcgagccgcagtgggaaggtgattcggataattttaatctccagaagtacccctcttatgagatcgactgggattctctgtgaagccgtgttttcttagtgtcctatgttgttatgtaagggtattaatcttcattatgtatggtctagtctaggtcttagtgtcttctcaggtggctgctactgcaatggagtttttggcaattgcagagccagtcttagttaattactagtattctgtgtataatctctctctaccttgggtcatagctggtttttttcttgcttgaccagggagaattagtccacttaatatgtttctcaagtgcatcgctgtaatctactacttttaattataaaaatatggatttattattgtaccaaannnnnnnnnnnnnnnnnnnnnnnnnnnnnnnnnnnnnnnnnnnnnnnnnnnnnnnnnnnnnnnnnnn

SEQ ID NO: 4737 - DNA, 1658 bp, Glycine max
  unsure (1)..(1658): unsure at all n locations
ggtacntactcacagagatatagntctaaatgggggggatcattttgtcgagagcggtcagtttgtgtggctcatctttctgcttctcgcttccctcccccctctgtaacaccccgcttctctgaatccctttctgttaatcatctgtctttcaagctaagattttcgggtttgtctattaattcaccaagaagcaaacttagaaggatttttcgaaagccaggtgttttcagaaacgagatccaggttttattgtcgaatttcgctagtcaaattaattttcataattatttttttctttgaaaccagccaagagggttatttttgatccctcaaagctaatttctctctctctttttttatttccgggactgaagaggttgtctatttgaaatctccttcatcctttcctttcttgtagaaaactttttaaatttttttgtcagtgggtgttttaattaaccacctgttcttcaagttttagaaagacgcaggttgaattaattagtatcatggcagctttgatggatttttacagcagcagcccagagtttcaacttcactcagatccattcaggggagaactaatggaagttcttgaaccttttatgaaaagtccttctcccaactatttcccttcctccccctccctccctaatctttactcaaacgggttatccagcaacacccaaagcttaattggcttcgggcaagcgcaacccacatctcttgtgggcctgaaccacctaaccccatctcagatctctcagatccaagcccaaatccagatccaggcccagcagcatcagaatcgcagcaacaccctgagcttccttgggccgaagcccatccccatgaagcacgcgggcatgcctccgaagcccacgaagctttacagaggggtgagacagaggcactggggaaagtgggtggctgagatcagacttcccaagaaccggaccaggctgtggctgggaaccttcgacaccgccgaggaagccgctctggcatacgacaaggccgcgtacaagctccgaggtgacttcgccaggctcaacttcccaaacctgcgacaccagggttcctccgtcggtggtgatttcggggagtacaagcctcttcattccgctgttgacgccaagcttcaggccatttgcgaaggcctggctgagctgcagaaacaggggaagaccgagaagcctccgaggaagtcgcgttccaaactcgcggagaaggttgtttccgacaaggagaacaacaactcttgtaaggtggaagctgcgtcctggtcgtcggaaggttcttcgccgctttcggatctgacgtttgctgacgtgagcgaggctcagtgggaaggtgattcggataattataatctccagaagtacccctcttatgagatcgattgggattctctgtgaagtgtcctattatgtatggtctagtctaggtcttagtgtctcttaggtggctgctactgcaatggagtttttggcaattgcagggctagtactattctgtgtataatctctctaccttgctcacagctggtttttttcttgcttgaccagggagaattagtccgcttaatatgtttttcaagtgcatcgctgtaatctacttcaatttcatcatcttataaaatatattattctact

SEQ ID NO: 4738 - DNA, 368 bp, Glycine max
aaacgagtagcacgatctgttgtttttgttctttttcgttttctacgaggaaggaaaataacaataacagaggaagaaagaaaattacacagtttcaatttcagtatcagctacactttttagaaatggctactctatcaagcttcatcgctacgccgaagaatcccaatacccactttctctcaggttcctcattgacgatggacaaatgcttcttgaaaatcagctccagtgaacactttccaggttcctctttaaagactaaagcaacacgtaaccagccacttgttattcgagcaggtggtgatggtggaagaccaagtaatgggaaatgggtttgttggtggggtttgtattgggaagacaaa

SEQ ID NO: 4739 - DNA, 724 bp, Glycine max
acacactgaaggtgcgccaaactcgaactaccctaaacgacgccgcattcaaatttccgccaccgacgcattaaccccttccaagccccgacggttcccgagtggtgatggcggaaacgcacgaagacacaccgaaagaaaccgttcacaaagaagaagaagaagaggaccaaagcttcgaagagctcggcgtggacgctcgtctccttcgcgccctaatcaagaaaagaatcgagaaacctactccaattcagcgcgtcgcgattccactcattctggaaggtaaggacgtggttgcacgtgccaaaacaggttcgggaaagacactcgcgtaccttctcccgttgcttcagaaactgtttactgctaactctgatcggaagaaactcgcgccaaatgcttttgttcttgttcctactcgcgaactaagtcaacaggtatatgcggaagtgaagtctctggttgaattatgcagagttcagctgaaagttgtgcagttgaatagtaacatgcttgctaatgacttgcgggcagcattggctggacctcctgatattttgatctccactcctgcttgtgttgcgaagtgtttgtcctgtggcgtacttcaggcggcatccattaatgcatcgcttgaaactcttgttcttgatgaggcagatcttctattatcatatgggtatgaaaatgatattaaagctttaacacctcacgtacccagaag

SEQ ID NO: 4740 - DNA, 508 bp, Glycine max
gatactaaacacgatttattttgtcttttttctttatcacagctgcaatcaacaagacttagaatgcgatgagcaaaaatagacctcaattccgaattcagagatagcacgcaccaggagaagccatggctactcaatccccttcacctcagaacctaggtggtgaaattgagcaaacagaaaatgtagatcagcataataggggagaagagcttggtaaacagagttcagacacatcggtgtttgtgaactcagagccattgcgtgaggaacaaattcagaatgctgtgaaatttctgtcgcacccgaaagttagaggttctcctgtcatccacagacgatcgtttctggagaagaagggccttacgaaggaggagattgatgaagcctttcggcgtgtgcctgattcacctccaagtgtgcagacagctggcataaatcaagatggacaattgaagccatcatcaaacattcagcagcaaggccaaccacaggctttgcagctgac

SEQ ID NO: 4741 - DNA, 331 bp, Glycine max
agaccaacacaagacctccaccctcgcagtacatggaatcataaataaaaaatgaaattaacatttgcttgtttagggcttgaataacacataaattagagccaattaactattagaactgtcacgggaagccagtgcctatgtattttgattctcacaccactcggcatcaattattcgaatgtaaagtagggttgtctgttttatgtacccaaaagaaaaagtagcctcgaggtttagctgatggtgcatcacaatcttttttcctggtttaatatagtttcagctaatttatggcaaaaagaacaaatcacactacaagatttttttt

SEQ ID NO: 4742 - DNA, 311 bp, Glycine max
cgcaagagccttttgttgctcttacaagtgaggaggaagatgaggttgaatgtgccttttcttccaactggaggaaaatgttcatatgtataagaagttgcttggggatgttgggaggagaagtggcacgcttcagaggctgaattttgagattgatttgaatgagaagcgcagggaacattataatttgttgcggccgaagaaggaattggttgaggaacaggaagtgccgcaagagccttttgttgctcttacaagtgaggaggaagatgaggttgaatgtgccttttcttccaactggaggaggatct

SEQ ID NO: 4743 - DNA, 1219 bp, Glycine max
tggacctgcaatggtttcattaaccttcatgttcatcataagaccagttgagagttatcgacaatcaagatcctccgatgggactggtttcacgtttatctacagcatttgccttctcttggctgcttacttgatgggagttttgttgctagaaaacatgtttgatttggaccatagcaccatcacattgtttgcagttattttgatcattctcatatttcttcctatcatagttcccattctcttggttttcttctctggaccccaaagtgctgaccaagaagccctcttggagccaccaatgctagaagcaactaagcctaagcactttgttggggagagtagtactagcactacgaaagtaaccaagcacttcgaaaacgagaagaatccttcgaagctagaggtgctgcctctgtcagaagggcctagggatgtttttcagtttcaagctagactttggcaagctgttaccaaagctgtgaagaaaatcaagcgaagaaatgggccacatagaggagaggatttcaccttgtcacaagcaatggccaaggctgatttttgggtcatgttcttctctcttgtcatgggctgtggatcgggcttgacaatcataaataacatgggtcagatttgtcaatcattgggagacaacaatgtcaatgtttatgtgtcggttatcagcatatccaacttccttggtcgtgttggtggcggctacttctcagaggttatagtaaggagttttgggtacccaagacttgctgcattggcagtgattcaagcagggatgtctttgggactttgctactatgtcttgggtttggttggacaagtttacgtggtggccatatccaacggttttggctatggtgcccactggtcaattgctttagcagcagcttcagagctatttggcttaaagaactttggaactctctacaattttctcactatggctagcccagcagggtctctctttctatctggatttgtagcaagcacaatatacgactattacgcggagcagcaagcgaagcaccgaatgctcactggaaattacaatgacttgcttctttgtgagggaaacatttgcttctccatcacatttgggattttagctgtaatttgcttatgtgcagcatctttgagcttgatcgttgctcacagaacaaagaaattctatgcacagctttatgaacagtctcaaacttaaaaa

SEQ ID NO: 4744 - DNA, 1447 bp, Glycine max
cgtcgattcccctaaacatgttcgacatttaatcacagtctctaagcacacattaataccatcggagaaggaccttccatctaccaacaacacgtagtattatttcattgatttctccctcttcgctctctctcagtgaccagagacagatgatgatggagatggcgaacgaaacgctgtcgttgcggcactcgcggcgttggtgctactcgcggcgagtgtggcggtggatgctcaggagaactcggacgtgaagacgctggtgaagtacaagcacgggaagaagtactgcgacaaaggatgggaatgtaagggctggtcaatttactgttgtaacctcaccattaccgattatttccagacctaccagttcgagaatctgttctccaagcggaactcgccggtggcgcacgcggtcggattttgggactaccactccttcatcgccgccgccgcgctttttgagccggaagggttcggcaccaccgggaacaagacgatgcagatgatggagatcgccgccttcttcggacacgtcggcagcaagacctcttgtggttatggagtggccactggaggacctttggcctggggtctttgttacaatcatgaaatgagtcctatgcagtcatactgtgatgactacttcaaactcacatacccctgtacacctggtgctgagtactatggtcgtggagccattcccattttttggaactacaactatggtgctgtcggagaagctttgaagattgacctactcagccatccagaatacatagagcagaatgccacccttgctttccaggctgctatttggagatggatgacaccaatgaaaaagtcacagccctctgcgcatgatgcctttgtcggcaactggaagcctagcaagaatgatactatggagaatcgtcttcctggatttggcactacaatgaacattctctatggggatggtgtttgtggacaaggtgatgtggactcaatgaacaatattgtttcccattacctgtattatcttgaccttcttggtgttggtcgagaacaggctgggccccatgacatccttacatgcgctgagcaggttcctttcaacccatcttccaaacctgcttcttcatcttaagattatatttattagcatatgatattgttgtaccaatccctttgaaagtgaaagttaataagggttcttgaaattattggtatgcaataattttgaactgcgtggtagtgtgggaattcattatatagcttttgttcgttgttatctagaagttttagtcatttgtaatatcatatgtcgtgaaaaatttgtatctggtatatatgtacgttatgggcgattttgttatttttatatatacattccttggttgcaatgtaaaattaaaaatggtcacaaacgaacgcgtggacgaacgcgtggacgaacgcgtggcga

SEQ ID NO: 4745 - DNA, 478 bp, Glycine max
  unsure (1)..(478): unsure at all n locations
tcttgatctataactagtagatcgagtattatttcatcgattctctcccttctctttctctctgcgacaccagatgatggagacgacggcgaagcgaaacgctgtcgttgcgccaatcgcggcgttgttgttggtggtgctactcgcggcgagtgtggtggtggaggctcaggagaactcggacgtgaagacgctggtgaagcacatgcacgggaagaagtactgcgacaaaggatgggaatgtaagggctggtcaatttactgttgtaacctcactattactgattatttccagacctaccagttcgagaatctcttctccaagcggaactcgccggtggcgcacgccgtcggattttgggactaccactcgttcatcgccgctgccgcgcttttcgagccgcatgggttcggcaccaccggggacaagacgatgcanatgatggagattgcggcgtttctcggacacgtcggcagc

SEQ ID NO: 4746 - DNA, 450 bp, Glycine max
gcaggtttggaagatgggttgaaaggaacctgctcagcgcatgtaaggatttcatggggcccagcctgttctcgaccaacacctagaaggtcaagataatacttattagcatatgatattgttgtaccaatccctttgaaagtgaaagttaagaggggttcttgaaattattggtatgcaataattttgaactgcgtggtagtgtgggaattcattatatagcttttgttcgttgttatctagaagttttagtcatttgtaatatcatatgtcgtgaaaaatttgtatctggtatatatgtacgttatgggcgattttgttatttttatatatacattccttggttgctatgttcctattttataatttttaatttctggggggggggtggggtatatattttttatctatttatttattctttttattttatttttatatatcttatca

SEQ ID NO: 4747 - DNA, 701 bp, Glycine max
  unsure (1)..(701): unsure at all n locations
ctcgagccgaagggtttcaagttattgtgagcaaagaaagatagtgagtgaagtaactgaagagaagaaaaaatgccgtgcctcaacctcagcaccaacgtgtccctcgaaggcgtcgacacctcttccatcctcgccgaagccacctcctccgtcgccagcataatcggcaaacccgaagcctatgtgatgattgtactgaaaggatcagtacccatagcttttggtgggaatgagcagccagcagcttatggagaattggtttccattggtggtcttaaccctagtgtaaacaaggaacttagtgctgcaattgcttcaattctggaaaccaaattgtcagtgccgaagtcgcggttcttcttgaaattctatgacaccaagggttccaacttcggatggaatggatctacattctgaaatccgaattccatgttacattggttgtggtaccttgaatgttggatggagtgttcattatgtttcacccgtgtttatgtctatgtttgtatcattatataagtacactcgggatttctggtagcctaagcgcaaacgtaacttgcttaattgcaaggataaatggggatcatatgtgtttgacactttttgtgacaaacattatctggcaccgcttaaaatgataatttgtattgatgatgcattttatgaattaagcttgaaaccatagatttgattna

SEQ ID NO: 4748 - DNA, 690 bp, Glycine max
ttggaaaagaagaagaaagatatgagttcaatggagaatgctgtacatgagttggagaagaaatgggcacaagttcaggaaaatgcacttaaacagccttcccctgggcaaagggagaagacattggataaacacctgcatggtctaattgagcaactagcagttaaacaggcacaagctgagggcttacttggtgaaattcatctgaaagaaatggagctcgaaagattgaatgggctatggcgacgaacggagagtagcaattcagaggcgaacactgctgctaggaatcgtttcagtaaaggctcctctgataagttacatagtttgtcagattacgaaggtcatcagaggcttccttatcattctgctggccgaactgaaagccagcagaggcttatgctactcaggtcggcgttcgtgctctatattttagctttacatatactggtatttatcaggttatctttttaacaagcattgacacatgaagatgacatgttaatttttcccgcgcatgtttgaatctttatttgtactcattaaatatccattgcaaatatatacagaagtctgtaaaaaaattttttgtttttttcattcatgctttgaagtttgatcaaaatgtagcatctatgcgtacagttacagttgaaagagagataagtccaagaaaatgcagtttttgcc

SEQ ID NO: 4749 - DNA, 386 bp, Glycine max
cacaaatggagaattccccatctcatccttcttctcttcaatgtcctccttcaaccctttctcccctccaccacccaccccttacctcaccaacctcggcttcggctactccatcgccatcgccctcggcgtcctcttcctcctctccaccctcatcctctcctcctacctctgctgccgcaccctccgccaccgcaacaacaaccgccacaccccccgtaacaacacctccgatggcatcgtcctcccgcgcgtgatcttcgtcgccgaggacgacgacgatgacgccacccgccagaacgacgccgtcaccggcctcgaccaggccgtaatagactcctaccccaagtttccttacgttaaggaaggtgattacgacagcacct

SEQ ID NO: 4750 - DNA, 957 bp, Glycine max
cacgagctctctctctctctctctctctctctctctctctctctctctctcgggttaagcctcgcttctaacgtcaccgactcagttgttgtcagcgagtgagtgagtcgtttctctgcagcaacaaggtttagccactccaaacagacgggaaatgggtcgtggggtcagtgctggtggtggtcagagttccttaggttatctctttggcagtggggtgcctgccagcagtgcaaacagtcagcctgcaaatggtgctcgcactcaaaatgctagtgctccttcaccaccagtcgataagcaaagtccagcaccagcaccagcaccagcaccagcacctgcatcatcaccaattgataagcaaattccagctggaattcctggaagtctcaaaaacaattaccatcgtgctgatgggcaaaactgtggcaactttcttactgatcggccatctaccaaggttcatgctgccccaggtggcggatcttccttgaattacctctttggtggtcctccagggaactaattcatcattgtgattcaaacctaccatgtgatgtatcatgtgtaaaatagatagctgcattgttttagtccagtggactttgtttcttgtgcaattgaacctcttgacaatgttggtgtggcttgatggccaaactaagctgattcataggtttgttgttctgtgctattgtgtgggtttcgattaatgaaattactgctcataatcgttctcttatctttattattgtgttcatttcatgatgctgactttattgaaatgactcggggatcatatatagcattggtctagttccatgtgatggaattattaagtaaagcagcattggtcttgttagttttctttgtttctagaaatgtacgagagtatttggtttttactcatttctacttctcaatgcaattattaagtaaagcagcattgtcttgttc

SEQ ID NO: 4751 - DNA, 931 bp, Glycine max
cgctcgagccgattcggcgcgaggcctcgccgactcggttgctatcagcgagtgagagtgagtgagtggttctcttgcagcaacaaggtttagtgacaccaaacagacgggaaatgggtcgtggggtcagtgctggtggtggacagagttccttggattatctctttggcagtggggtacctgccagcagtgcaaatggtgctcgcactcaaaatgcaagtgctccttcaccaccggttgataagcaaagtccagcaccagcaccagcaccagcacctgcacctgcagcaccagcacctgcagcagcagcagcaccagcacctgcaccagcaccagcaccagcaccagctgataagcaaattccagctggaattcctggaagtctcaaaaacaattaccatcgcgctgatgggcaaaactgtggcaactttctcactgatcggccatctaccaaggttcatgctgccccgggtggtggatcttccttgcattacctctttggtggtcctccagggaactgattcatacctaccatgtgatgtatcatgtgtaaaatggatagtgttgcattgtgtttagaccagtggactttgtttcttgttcaattgaatctcttgacaatgttggtgtggcttgatggccaaactaagctgattcataggtttgttgttctgtgttattgtgtgggtttcgattaatgaaatttactgtgcgaatgagctaaagcggctcataaatgttctcttatctttattattgtgttcatttcatgatgctgactttattgaaatgaccctggggatcatatatagcattggtcttgttccatgtgatggaattattaagtaaagcagcattggtcttgttagttttctttggttctagaaatgtacgagagtatttgggttttactcatttctacttctcaatg

SEQ ID NO: 4752 - DNA, 787 bp, Glycine max
tttttatggtggcttccaaaagaaattttccttatgatttcatgcctaatgctttgttgatcatggaagtctttgtgtatcatgttgatctttaatgtaaatacagttgtaatatgagttaagtgagagggtgagccttggtgcaatggtaaggttgctgccttgggaccgataggtctttgcttccaagggcaaggttatgtacatttacctttccctagaccacacctcactagttgggagccttgtgcaccagatcctccttttgtttgagtgttaagtgaagccagcagaggtgtttgataatgcaatttaatatacttttcagcatagtgaattgttaggaatttttacatggagagaaagtactaaaccaacggctagcacagctaactgtaaccacctttcttttacattaaagaattggtttgatgctttaggaatgagcttttcttatggtaccgaggaattgttcttaattgttgttttgtgttgggcgcaggatcggccatctaccaaggttcatgctgccccaggtggcggatcttccttgaattacctctttggtggtcctccagggaactaattcatcattgtgattcaaacctaccatgtgatgtatcatgtgtaaaatagatagctgcattgttttagtccagtggactttgtttcttgtgcaattgaacctcttgacaatgttggtgtggcttgatggccaaactaagctgattcataggtttgctgttctgtgctattgtgtgggtttcgattaataaaattactgctc

SEQ ID NO: 4753 - DNA, 718 bp, Glycine max
  unsure (1)..(718): unsure at all n locations
agtgtgttaagcctcgccgactcggttgctatcagcgagtgagagtgagtgagtggttctcttgcagcaacaaggtttagtgacaccaaacagactggaaatgggtcgtggggtcagtgctggtggtggacagagttccttggattatctctttggcagtggggtacctgccagcagtgcaaatggtgctcgcactcaaaatgcaagtgctccttcaccaccggttgataagcaaagtccagcaccagcagcagcagcagcagcagcaccagcacctgcaccagcaccagcaccagcaccagctgataagcaaattccagctggaattcctggaagtctcaaaaacaattaccatcgcgctgatgggcaaaactgtggcaactttctcactgatcgtccatctaccatgtattgtatcatgtgtaaaattggatagtgttgcattgtgtttagaccagtggactttgtttcttgttcaattgaatctcttgacaatgttggtgtggcttgatggccgaactaagctgattcataggtttgttgttctgtgttattgtgtgggtttcgattaatgaaatttgctgtgcgaatgagctaaagtggctcataaatgttctcttatctttattattgtgttcatttcatgatgctggctttattgaaatgaccctgggaaacatatatagcatcgctcttgttccatgtgatggaatttttn

SEQ ID NO: 4754 - DNA, 1393 bp, Glycine max
gacataatggaaccttactattatttaagaatgaaactacgctgatgcttccactagagaaaaaaagtcatgtaggtggggttgagtgaataatagttaataatttaaaattcacatcataatggaaccttagcatcgaaggacaaattatagaatgttgtgtgtgtataaattccaccaaagccaccccaccaaattcctcctcatcaaaccaagacatagcaaacgatccaaactcttttttcatttgcagcatcaaaatgagtggtagcaacgatggtagcggcagctggagctctaggtttttgaaggtggctagtgcagctgccgctacagccgccgttgccggcggtttatatgccattctttcatcctcaacctctgctagctctgagatggaagtgccgtttggcagcgcacggcgtgagagcaaagaacgtgacgatggtggctccgggtctcatcctcgcgagggtgccaccacggtcagtcgttggaagaaacctgagattggttgggtgaagctgaacgtggatggttcacgcgacccatacaaaagttcctccgctggttgtggtggtgttctgagggacgcatcagcaaagtggctccgtggctttgctaaaaaactgaaccctacttatgcagtgcaccagacagagttagaagccattctcacgggcttgaaggtggcttcagagatgaatgttaagaaactaattgtggagtcagacagtgactctgtggtgagcatggtggagaatggggttaagcccaatcaccctgactatggtgtcgtggaacttataaggacgaagcggcgtcgttttgactgggaagtgaggtttgtttctgtctccaacaaggcgaatcgtgtggctgataggctcgccaacgatgctcggaaattggcttgtgatgatgtttgtgaggagtatcttcatcccccggctaactgtaaccagttgctcttggaggatgagataggctgtgagagcttttagtccttttttttttttcttcttctttcaaaaataagaaaagaaaaattactatgacaaggtttttgaaggacaccatgggctacttaattaatttggcaatcatggaagattaagtgctttaatttgggtgggaattaagtatgaaattgaagccactgcttcttcaactagtttgatgcatgtatgatgtatctattattaggttgtcgatcttctgggaaatatgtgtatttatatctagtactatatatatggtatcttaatcaagtttgtattgattttcttgtttgttgagataacatatatgtaatatgctctcctttcagccagcttgaatgtgcacaagtgaacttgttacgctatataatgaaatgatgtattgctcgatc

SEQ ID NO: 4755 - DNA, 575 bp, Glycine max
ttcacaacctctgttttctctctccacactctgcctctaacttgaaaaaaaaactcaaacactctgttctcgtcgcatgcacataaacaataacaaatggcttccacaactatgttgttgctggtcgtgttcatgattctatgtatatcacacccctcatttcaaatggttcttgtgcctttaacacacacactttccaaagcccaattcaacagcacccaccaccttctcaaatccacttccacccgttccgcaaaacgcttccgccgccaactctccctcccactctccccgggcagcgactacactctctccttcaacctgggcccgcaggcccaggcccatcccattacgctctacatggacactggcagcgacttagtctggttcccctgcgccccttttaaatgcatactctgcgagggaaagcccaacgagcccaacgcctctcccccaaccaacatcatcaaagcgtcgccgtttcgtgcaagtcccccgcgtgctccgcagcgcacaacttagcccctccctccgatctctgcgccgccgctcgttgtcctctcgaatcaatcgaa

SEQ ID NO: 4756 - DNA, 831 bp, Glycine max
cggtacgcgtggggtgtatgaaggggctcctaattatcctgatgctgggagatgttgggacattgttgacaaatataaggtgacaatattctacactgctccgacattggtgcggtctctcatgcgtgatggtgatgcgtttgttactcgctactcaaggaaatctttacgagtcctaggaagtgtaggtgagcccataaatccaagtgcatggaggtggttttacaatgtagttggagattcaaggtgccctatctctgacacttggtggcaaacagaaacaggtggcttcatgataactccactaccaggtgcttggccccagaaacctggttctgcaactttccctttctttggagttcagcctgtcatactggatgagaaaggtgttgaaatagaaggggagtgcaatggatatttgtgtgtgaagaaatcatggcccggggcattcagaactctgtatggtgatcatgaaagatatgaaacaacatatttcaagccattttccggatactatttcagtggtgatggttgcagcagggataaagatggataccattggctcactggaagagttgatgatgttatcaattggtagtgggcattgaattggaacagcagaagtggaatcagctttagtttcacatccgcaatgtgcagaggctgctgtggttggtgtggagcatgaggtcaaaggacagggcatctatgcatttgttacagctgtggatggtgttccttacagtgaagaactgcggaaggaccttgtactcacagttcgaaagcagataggagcctttgcagcgcctgacaaaattcattgtgcacctg

SEQ ID NO: 4757 - DNA, 789 bp, Glycine max
accaggtcgtgaccaaaataagaatctggtttgggtcgtcctcgtttgattggacctctctttctctggagtatcctcccctttatttcctcgtcctccaaactccaaagccgtttccaagtgtaatggattcgagttccattaacagcaacagtaaggagataaccatggagattccaagcttggttcgactttacaaggatggcaccattgaacgcctccaaaactcaccaattgtgccacccacgcttcaagatccaacttcttccaaagacgtcgtcatctctggtgaccccctcatctctgctcgtcttttccttccaaaccggattcgatcccagcaagagggtcataaagtccccatcttggtctactttcatggtggaggtttcttctttgaatctgccttcaaccaactccaccataactatttcaacaagtttgtctccgtagcagatgttttagtcgtttccgtcgagtataggttggctccagagacccttcttcctgcagcttatgatgactgctgggatgctcttaaatgggtcgccaccaacaccgaaccatggcttgtcaaacacggtgatttcaacagagtcttcattggaggtgacagcgctggtgctaatatagttcataacattgccatgcgtgctggggctgaagctttacctggtggtgtcaaactcttgggtgcttttctttctcattcctacttctacggttcaaagccaattggatcggaacctgttgcagggcaccaacagagcgtgccctatttggtatggg

SEQ ID NO: 4758 - DNA, 1157 bp, Glycine max
tcgcgtgtctcgtgggcggacgcgtgggttgcattgttgcaaaaaggataggaaacagactctctgatgagcactgggagcttaggaacttcagtgctaatcttgttacttcaatatgccaaagatttgggcatatttatcacaatctgcagccacgtgtgatgaagacatttcttcattctttcttggaccctacaaaagctttgcctcaacactatggtgcaattaaagggatagaagctcttggatcaagactggtcacttttatgctttgcgatttagaacctctagttgtattggtgtcaactaatgcatatattccttcactttgagtagattcgcttgcttatacttccaaatctcgagccatatttgcatcttcttgagccagaaatgcaacctgagaagcaaaaaaatgaaatgaagaggcatgaagcttggcaagtttatggggctttgttgggtgcagcaggacaatgcgtgcatgaaaaggtcaaaatgtttagcaatttgttctctcctccaactcgggttacttcaagaggcagtggaaaagctgtgattgcgatgtcaggcaaacgaaaagccagcactgacaatctgatgcagcagcagcagcagctgcctccaatgaagaaacttgcaacggatggccctgggggtgtggtagcaatgaactccatgttagttgacatgcaaggttcaacaggtggatattcctccatgatgggggtttcttcaatgtcaatggctcgtcaaatatccatcgacaacgtgccggggagggaggttggagatcaacaaaggaaggtgtcgtccactcttgctcaggcttggaaggatgacattgatacaggaaatttggtgtcatcagtggttgaattatttggcgaaagtgtgttgccgtttgttgtttcaaaccctgaagcatgtatgtttttgtagcactagttgcactgtgtaggtatttgttttttgcatgtgaaagtgcatgcaataaggtggcatgtctcatgtgacttgctgcagaatataaattaccataggctagaatagaaattaaccttgtatttaaatttctttgatattagtaacacgtctgggattttgtctttagattatttatttagcagtgatgattctattatcctttctct

SEQ ID NO: 4759 - DNA, 589 bp, Glycine max
cataatttcgcatgttattcgacatagtttgggtggatgaggtattgtaaatgtaaataaagtccactcgatgaaagcaacattaaaataaaatctatgaaatgctcgagaaaagaagcaaaaaagagaagaagagaagagagcaaaaaagatgtggtcttgcccaaaacacgcgacgccgtttaacaaggctcttgtagttattccctccgtctcagccaccacatggcgacagcgccacggcgtctccgccaacgctaagcaacaaggtgagaaattgggttacacccttttggccactctcgaatccaattcgactccaattccgaaagcagcgcaagaagaaggcgagattagtgggtctgatgtactttgggcactgcagagagcaagtgctcgtaagaacaagaagaagaataagaaggagcatcggagagattcatcctctgtggtcactcccaccgaagaaactgctgtgaactacaccaatgttcgcccactccgcataaacgcaaattggggttctaaattggatgagttcgacaaacgccttcgtgagctttcaaataccatttgattaatcacccct

SEQ ID NO: 4760 - DNA, 1207 bp, Glycine max
acaggaggcacattgatagtacactgtcatgctgtttcatttctcaaagtaaaccatgaattctctatcactcttcaccttcctctgcgcaatttgtgcgcactccgtcgccgtcacctccgcggcatatccttccatccccggcacggaaaccggagagtgctccctccgcggcgtcggcgtcggcgacggtgttctggtccctccgcggcgagaagtgtacgaggaggggcgaatcttcgacatcacccacaggtatgtccccgagatgccggtgtgggactcgacggaggggctcgggcaacacttcctgtggctcgataagagcatgaagaatggctcgctcgctaacagctctaacatgaagctcggtgttcacaccggcacccatgtcgacgcgcccggtcacttttacgacaattactacgacgccggcttcgatgttgactcactcgacctaacactcctcaatggccttgcacttttggttgatgttccacgggataaaaacattactgctgaggttatgaagtccttgaatatccctagaggtgtaagccgcgtgcttttcagaactttaaacactgacaggcaactcatgtttaagaaagaatttgacacaagctatgtgggattcaaggaggatggtgcaaaatggctggcagagaacactgacatcaaacttgtaggagtcgattacttatctgttgctgcttatgatcactccattccatctcatcttgttttcctggaaagcaaggaaatcattcttgtggaaggcctaaagcttgatgatgtcccagcaggaatatattcactgaattgcttgcctcttaggttggttcactctgaggcatcaccaattcgatgcattctgatcaaatgatcaaatgatggggtcaaacctggttttcaattgcacggatgaacctgccacaagaagcaacgtagccacgaatacaattagtggtgtccataagaagcagtttgatgcaaattgcaagctaagctgatagtagtatgttgaattactcttactttacgtccttgggttggaaagtactgaattattgtgattaaacttcagttgcggactagggggtccacctgtattaacttatgcttttaatattttcctaggcaagtacttgtgcaattctgaagacgcatgcttgtacgtctcaataattatatctatttctctttg

SEQ ID NO: 4761 - DNA, 546 bp, Glycine max
gcccgagattattagtagtatttcattatttttcaaagagaaatagatataattattgagacgtacaagcatgcgtcttcagaattgcacaagtacttgcctaggaaaatattaaaagcataagttaatacaggtggaccccctagtccgcaactgaagtttaatcacaataattcagtactttccaacccaaggacgtaaactaagagtaattcaacatactactatcagcttagcttgcaatttgcatcaaactgcttcttatggacaccactaattgtattcgtggctacgttgcttcttgtggcaggttcatcctttagcatcagtattttgacttaataaggataaggataattatgcacagaaacaatatgacccattctcgtaatataatcataccgtgcaattgaaaaccaggtttgaccccatcatttgatcatttgatcagaatgcatcgaattggtgatgcctcagagtgaaccaacctaagaggcaagcaattcagtgaatatattcctggtgggaaacattctgtggtcgtct

SEQ ID NO: 4762 - DNA, 660 bp, Glycine max
  unsure (1)..(660): unsure at all n locations
gcanaatgcaatatagaaccaattccagcacttctccaaggtgtcattgatcatcttattcagtggcaattacttcccgagtacaaaagaccaaatggttgtatcatcaacttctttgaagagggggagttttctcagccatttctgaaaccaccacatttggatcaacctgtgtcgactcttcttctctctgaatcaactatggcttttgggcgtatacttatgagtgaaaatgatgggaactacaaggggccactcacgctctcattgaagcaggggtctcttttagtgatgagaggaaacagtgctgacatggcaaggcacgtaatgtgtccatcccctaacagaagggtcagcatcaccttcttcagagtgaggccagactccaaccaatgccaatcaccaactcccactaccatgacaactgcgatgactctgtggcaacctgggcattgctgctagcccatttgctttgccaaacggacctctaagtggctatgaggctatgaatatgatgccccagttgggaatacttagtgctccaatggtcatgttagctcctatgcgccctatggcagcaaacactcgcaaacttcctcgaggtggaactggggttttcttgccttggaaggggtcagccagaaaacatgcaaggcatct

SEQ ID NO: 4763 - DNA, 810 bp, Glycine max
ggaccattctataaaatcaaaataattgaaaccgaagattctctctctctctctcatgatccctacgccatggaaccatttccctcataaaattctctcttcctttttgggttctcctcaatccattccaagcttcaatcttttctctcttctgccctctgcacctcccctcacacccttcctcattcgcaggaggtgaagatgtcgaccccggcaaggaagagactgatgagggattttaaaagattgcaacaagatcctcctgctggcatcagtggggctccccaagacaataatattatgctttggaatgctgttatctttggaccagatgacaccccttgggatggaggtacgtttaagttgacacttcagtttacagaggattatcctaataaaccacctactgtgcgttttgtttctcgaatgtttcatcctaacatttatgcggatggcagtatatgcttggacattttacagaatcagtggagccctatttatgacgtagctgcaattcttacctcaatccagtcattgctgtgtgatccaaacccaaattcaccagcaaattctgaagctgctcggatgttcagtgaaaacaagcgtgaatacaacagaagagtacgtgagattgttgagcagagttggactgctgactaatcatcttggagccgctagggctgctaaaaggttgtcaaaggatctgattgaataaccatataagtacttaaaagaacaattgtgttttgtaacccttgacaatgtgtttgttcagacttatatgaatggatgctccaccttatgatctct

SEQ ID NO: 4764 - DNA, 868 bp, Glycine max
  unsure (1)..(868): unsure at all n locations
cccacgcgtccggatccctgagccatggtaccatttccctcataaaattctctcttcctttttgggttctcctattccaagcttcaatcttttctctcttctcacagccttcttcactcacaggaggtgaagatgtcgactccggctaggaagagactgatgagggattttaaaagattgcaacaagatcctcctgctggcatcagtggggctccccaagacaataatattatgctttggaatgctgttatctttggcccagatgacaccccttgggatggaggtacgtttaagttgacacttcagtttacagaggattatcctaataaaccacctactgtgcgctttgtttctcgaatgtttcatcctaacatttatgcggatggcagtatatgcttggacattttacagaatcagtggagccctatttatgacgtagctgcaattcttacctcaatccagtcattgctgtgtgatccaaacccaaattcaccagcaaattctgaagctgctcggatgttcagtgaaaacaagcgtgaatacaacagaagagtacgtgagattgttgagcagagttggactgctgactaatcatcatagataagatagggcttctgtgacaatcaaaaggttgtcaaaaggatatatgattgaataaccagcagacttcaaaaagaaccattatgattttctagtccttgacactgtgcttgctcaaactctatgagttaatgttccaccttattttctccatgttgtgtggttcatttgtctttggttacaactttatcattataacataggatggcgtatcnnnnnnnnnnnnnnnnnnnnnnnnnnnnnnnnnnnnnnnnnnnnnnnnnnnnnn

SEQ ID NO: 4765 - DNA, 428 bp, Glycine max
ctcgagccgctcgagccgattcggctcgagctcgagcgcgaatgtttcatcctaacattcatgcggatcgcagtatatgcttggacatgcttacacaatcagtggagccctatttatgacgtagctgcaattcttacctcaatccagtcattgctgtgtgatccaaacccaaattcaccagcaaattctgaagctgctcggatgttcagcgaaaacaagcgcgaatacaacagaagagtacgcgagattgttgagcagagttggactgctgactaatcatcatagataagatagggcttctgtgacaatcaaaaggttgtcaaaaggatatatgattgaataaccagcagacttcaaaaagaaccattatgattttctagtccttgcccctgtgcttgctcaaactctatgagaaagaattccccctt

SEQ ID NO: 4766 - DNA, 326 bp, Glycine max
agcctttctctcagtactgataagcatggaagcacttttcaaatgatcaaatcaaattctctgttcacgttcacatcttttataacccgttccatcttttgctttctcctgggactgcacccttcactcacaagtcaccagtctctctcttaggttgtgacttgtgaggatgtcaactcctgcaaggaagagactcatgagagatttcaaaagattgcaactagatcctcctgctggcatcagtggtgctcctcaagacaataatattttgctttgccttgcgggtataatgggccaaggttatatctttcggaccggatgacacc

SEQ ID NO: 4767 - DNA, 714 bp, Glycine max
tggccattattttgggccctttttgtaagctttgtgctaggaactgcttattcaatcaatgtgcctctgttgagatggaagaggtttgcagtgcttgcagcgatgtgcattctagctgttcgggcagtaatagttcaacttgcatttttccttcacatccagactcatgtatacaagaggccacctgtcttttcaagatcattgatttttgctactgcattcatgagcttcttctctgtagttatagcactgtttaaggatatacctgacattgaaggagataaagtatttggcatccaatctttttcagtgcgtttaggtcagaagccggtattctggacttgtgttatccttcttgaaatagcttatggagtcgccctcctggtgggagctgcatctccttgtctttggagcaaaattgtcacgggtctgggacacgctgttctggcttcaattctctggtttcatgccaaatctgtagatttgaaaagcaaagcttcgataacatccttctatatgtttatttggaagctattttatgcagaatacttactcattccttttgttagatgaggatgcagcggcaatattgacttgagaattagttttgtttaaatggtgctgcctttgtcacaggccggcttggagtcgctacattagttttaagtttttaattgctaatttaaatgaagatatatttcttttgggatgaaa

SEQ ID NO: 4768 - DNA, 1644 bp, Glycine max
atttaatttgatgtattttacacatgagaatactctttaactggtgatctaaccgaacaatcgcatatttctgttctgccttcttctactcaatacattacgcgcctctagtctcgtttccaggtttgtaataataataattttagtttcttcgttacgcctgcgttgtgcgtgagaaagtgcgcgtggtgaaaaagcatggcttctcagctcctgagacgaaccttcggaagtcgtttccttgcaaaccctagggccttctcctccgctgcttccactccgatccgcgccactctcttccccggcgacggcatcggccccgagatcgccgattccgtcaaacagatattccaagcagctgatgtcccaatagaatgggaagagcactatgtaggaactgaaattgaccctagaacgcagagctttctgacatgggaaagtttagaatctgtaaggaaaaataaggttggcttgaaagggccaatggccacccctattggaaaagggcatcgttcgttaaatcttactctgagaaaagagctcaatttgtatgccaatgttcgaccttgctacagtcttccaggctacaaaactcgatatgataatgtcaatctaattacaattcgtgaaaatacggaaggcgagtacagtggacttgaacatcaggttgtgagaggtgttgtagaaagtctcaaaatcattacacgtcaagcaagtttaagggtagctgagtatgcttttcactatgccaaggctcatggaagagagagggtttctgccatacacaaagccaatattatgcaaaagactgatggccttttcctcaagtgttgccgtgaggttgcagagaaatatcctgagataacttatgaggaagttgtcattgacaattgctgcatgatgcttgtgaagaatcctgcacttttcgatgtactagtgatgcctaacctttatggtgatattatcagtgacctttgtgctggcttgattggaggattgggcttaacaccaagctgcaacattggtgagggcggtattgcacttgctgaggctgtacatggttcagcacctgatattgctggaaagaatttggctaatccaactgctttactgctgagtggtgttacaatgttgcgccatttggacctccacgacaaagcagaacagattcaaaaagccatcctgaacacaattgcagaagggaagtaccgaacagctgacctcggtggcagttcaaagacaactgaattcacaaaggcaattattgatcatctttagattttggttttggagtcagcaagaaattcttgcttatgattttgattttcagtcaattttctatttattaacccaattaatccgaaagagtgggattacctcagcttaaaggaaaactcacccatgtgtgtgacattttacaaccaaagacaaggaatgggcaggctttcaaatattcgctgccctttcacaatgcacattgattgataacccttggtagtccgttttagtattctttgtcaataatatagtgctaaataaaaaacaccagatgatgtttcatttgttcatctttatgatctttctttgtgcaggatattccaatattatttgctttattttttaaaaaaaatcctcttttttttt

SEQ ID NO: 4769 - DNA, 617 bp, Glycine max
  unsure (1)..(617): unsure at all n locations
gataggcggaagcaccaatcagcaacagnggcgagggaggcaangaacgggggccgaaagcagggcatggatcaacacctgatattgacggaaagaatttggcaaatccaactgctttactgctaagcggtgttacaatgttgcaccatttgaacctccatgacaaagcacaacagattcaaaaagccatactgaacacaattgcagaacggaagtaccgaacagctgacctcggtggcacttcaaagacaactgaattcacaaaagcaatcattgatcatctttaaattttggttggagtcagcaagaaattcttgcttatgatttttgaatttcagtcaattttctatctatttccccaattaatcggaaagaatgggattacctcagcttaaaggcaaactcacccatgtttgtgtgacattttacaaccaaagacaaggaatgggcagggattcaaatattcgttgcccagtgcagtcttatggcattgagaggacaccctttcacaatgcacattgattgataacccttggtagtccgttttagtattctttgtcaataatatagtgctaaataaaaaaaaacaccagatgatgtttcatttgttcatcttt

SEQ ID NO: 4770 - DNA, 378 bp, Glycine max
  unsure (1)..(378): unsure at all n locations
cccacgcgtncgcttttctctctgaatactctctactcaatacattgcgctctagtctcgtctcaaatattaattttaggttcttcgttacgcgttgtgttgcgttgtgcgtgagaaagtgcgcgtggtgaaaaagcatggcttctcagctcctgagacgaaccttcggaagtcgtttccttgcaaaccctagggccttctcctccgctgcttccactccgatccgcgccactctcttccccggcgacggcatcggccccgagatcgccgattccgtcaaacagatattccaagcagctgatgtcccaatagaatgggaagagcactatgtaggaactgaaattgaccctagaacgcagagctttctgacatgggaaa

SEQ ID NO: 4771 - DNA, 282 bp, Glycine max
aaccgaacaatccgatatttgcttcctattggaatcaagtattaacccttttctctctgaatactctctactcaatacattgcgtgctagtctcgtctcaaatattaattttaggttcttcgttacgcgttgtgttgcgttgtgcgtgagaaagtgcgcgtggtgaaaaagcatggcttctcagctcctgagacgaaccgtcggaagtcgtttccttgcaaaccctagggccttctccgccgctgcttccactccgatccgcgcctctctcttccccggcga

SEQ ID NO: 4772 - DNA, 837 bp, Glycine max
  unsure (1)..(837): unsure at all n locations
taccggtctatgattcncgggcgcaaccacgcgtccatatacggtggcaaaaaacaacaaaaggggaagcaaagcagtgaccacggagagagagagagaggttttgacgcaacacactgtcactgagaaaggatctctatctacgaaggagcggaataaaacccttctctctgtgattaagagaatggcttcagatcggaaacttcacacttttgaggaggtggcaaagcacaaccagaccaaggattgctggctcatcatttctggcaaggtgtatgatgtcacccctttcatggaggatcatcccggaggtgatgaggttttgttatctgcaacagggaaagatgcaaccaatgactttgaagatgtggggcacagtgattctgctagagatatgatggaaaaatactacattggtgagattgatgcatcaaccgtaccactaaaacggacctacattccacctcagcaagctcagtacaatcctgataagactccagaatttgtgatcaagattttgcagttcctggtccctctcctgatcgtgggcttggcctttgttgtgcgcccctacaccaagaaagagtagagcttctttatcacattggaccctggtgaagggtctgttagacattttatacagtgtcatttgaaggacagtgtttagtttatttctggggtctttagaattgaatctggatttgactggagaacctaatgttggacgataagtttcgtttctttttccccacaggacagtgtcattttaaaaaaaaaagaaaaaaaaaaaagggggggccgccggtttttgccctcttcacccggggatttttttcc

SEQ ID NO: 4773 - DNA, 491 bp, Glycine max
gaggttttgatgcaacgctgtcactgtgaaaggttctctatctaccaaggagcggagggaaacccttctctctgtgattaagagaatggcttcagatcggaaactccacctcagcaagctcagtacaatcctgataagactccagaatttgtgatcaagattttgcagttcctggtccctctcctgatcttgggcttggcctttgttgtgcgacactacaccaagaaagagtagagttgttccttctttatcacattggacaatggtgaagggtctgttagctattttatagtgtcatttaaaggacagcgtttagtttctttctggggtctgagaattgaatctggatttagaccatatagttcagtaagccaatgttttccaactttctttggcaatggtattagtgttattgtgaccggagaacctaatgttggacgattagttttgcttgggttccgtttattctgggtctttgctgcttctttaat

SEQ ID NO: 4774 - DNA, 319 bp, Glycine max
gtttggtggctgttccctttcacgattctttctttagatcctctcttgactctttattctttatgaaattgtgggtttgacttaaatttctctgggtttgttgatttcgtcgctgtgattaagagaatggcttcagatcggaaacttcacacttttgacgaggtggcaaagcacaaccagaccaaggactgctggctcatcatttctggcaaggtgtatgatgccaccccgttcatggccatggagctgggacgttatccggttttgttatctggaacagggacagatgcaaccagtgactttggcgatgtcaggcaca

SEQ ID NO: 4775 - DNA, 427 bp, Glycine max
cccttacttaaacccggaattcggtccaagggctcaaggcgcttttataccaggtttcatgacattcatgtccatagggggcttcccgtctttcatagaagaaatgaaggttttctacaaagaaagactgaacgggtattatggcgttggagtctacattctttcaaattttctgtcttcatttccctttgtggcagtgatgtccattgctacggggacaataacctattatatggttaggtttcgcacagaattttcacattatgtgtatatctgtctggatcttattggctgcattgcggttgtggagagctccatgatgattatagcttcactggttcccaacttcctcatgggattgataattggagcgggatatattggtgttatgatgatgactgctggctatttccgtcagatccctgat

SEQ ID NO: 4776 - DNA, 416 bp, Glycine max
gctgaagcttgtaaagtagaatcatcaaccatgctcgtcccagcagactacgtattctttgtggggcccatttcattctctggcccatactgtaaacccagcatcgttttccagcttgatggcaccattgttgcaccaacaagccccaatgcttggggcaaaggactactacagtggttggaattttccaagttagggggaattaccatccaagggggtggcagcattgatggaggaggctcagtgtggtggcaagacaatccatatgatgatcctagtgaggagcaagaaaagctcattggcccgttgaaccacacagtatggaggcccggccggcgagggcgcgattcaaagtgagatgggaggaaagatgccagccgtcaagccaactgcattgcgggtctatgggagtttta

SEQ ID NO: 4777 - DNA, 505 bp, Glycine max
cacctctgtagtgtagccaccaccaatcacaaatagccctcttggccttcaatttcgtccaattccaaatcatggctagctcttcagttttcacgtcttacattgttttgagtctagtgatggcactagcaattagcggtttcaatttcaaaggggcagaggcagcacgtgccttctttgtgtttggtgattctctcgttgacaatggcaacaacaactacttagccaccacagctagagcagacgctccaccttatggcattgattatccaactcgcagacccactggccgtttctctaatggcctcaatattcctgattttatcagtcactgagttctaattttgatttctccatcgctaatatattttgtgctgtttaattaatactatatggcttttttttttgttggacgttacatgcgttcgaacccatttcctgatgaaattgtcttactacaattatacggaccaagaatgcccataactaatatatgacttattat

SEQ ID NO: 4778 - DNA, 459 bp, Glycine max
caaatagccctcttggccttcaatttcgtccagttcctaatcatggctagctcttcaggtttcacgtcggacatggttttgagtctagtgagggcactagcaattagcggtttcaactgcaaaggcgcagaggcagcacgtgccttctttgtgtttggcgattctcgcgtcgacaatggcaacaacaactacttagccaccacagctagagcatacgctccaccttatggcattgattatccaactcgcagacccactggccgcttctctaatggcctcaatattcctgactctatcagtcaagaacttgcgtcagagtccacgtcgccatacttaagtcctgagctcaacggggaaagattgctcgtgggtgccaactttgcttctgctggcattggaatcctcaatgacactggagatcaacttgtaaacatcattagaatcacgcgacagctggaa

SEQ ID NO: 4779 - DNA, 772 bp, Glycine max
attcattatgcactaatcattataacaacaccgttcagctgcagcaacaataaataaagaataatcataacaccgttcatcaatggcggttcggctgcattcctagactactctctttttccgcaatttttcattggctgcgttcgttcgttcgttgcgtgctttagttgttacttttccgttacggcgatggagttggagcacccgaccgcgacgccgctcaactccgccatgacctacgacgaagcctccatggagcgcacaagagcttcgtcaacgccttgcaggaacttaagaacctaaggcctcaactttattctgctgcagaatactgtgaaaaatcttatctccatagtgaacagaaacaaatggtacttgacaacctgaaagactatgctgtaagagcccttgtgaatgctgttgatcatctaggaacagttgcatacaagttaactgaccttcttgagcagcaaacatttgatgtctcaactatggatttgaaggtcgctaccataaatcagaaacttcttacatgccaaatttacactgataaagaaggtctacggcagcagcaattgttggctttcattcccagacatcataagcactacattttgccaaattctgtcaataaaaaggtacatttcagtccacaaatacagattgatgcaagacagaatccatttcaaaccagaacccgttttcaatcttcaggtacccctgcagcgaaaactctttcatggcatttagcatcagagacaaagtctacctt

SEQ ID NO: 4780 - DNA, 410 bp, Glycine max
ccacaactccttttcccaatttctctctcctgtctctctctctctctctctgagttctcctttctctctcttgagttaccatttctcattcattcataatgcactaatcataacaacaccgttcagctcaacaacaaaaaataaaataaatcataacaccgttcgttcatcaatggcggttccgctgcattcctagattgctctctttttcaccaattttcattcgttgcgtgtgtttgttcgctgagtgcgttagttattacagcaatggagttcgagcaccccaccgcgacgcctctcaactccgccatgacctacgacgaagcctccatggagcgcacaagagcttcgtcaacgccttgcaggaacttaaggacctgaggcctaaactttattctgctgcagaatac

SEQ ID NO: 4781 - DNA, 821 bp, Glycine max
ccaagcgttcggtagggtggcaaaaggacaccataagggggattcggccaacccctaaaaagcacttcttagttctccctctcccactaaaaaccatagtaatctagataataattaacatcagccctcactccttcgcacaccaaacccttccttcctatctctcactaatctaatggaatccgcagcactgtcgcgcataggcctggcgggcctggcggtgatgggccaaaacctagccctaaacatcgcagaaaaggggttcccgatctccgtgtacaaccgcacggcctccaaagtggaccagaccgtagatcgtgcccgcaacgagggctccctccctctcacgggccaatacacccctcgcgacttcgttctctccctccagcgccctagatccgtcatcatcctcgtcaaggccggcgcccccgtcgaccaaaccatcgccgccctctccgaccacctcgaccccggcgactgcatcatcgacggcggcaacgagtggtacgagaacaccgagcgccgcatgaacctcgtcgccgacaaaggcctcctctacctcggcatgggcgtctccggcggcgaagacggcgcacgccacggcccctccctcatgcccggtgggtcccaccatgcctactccaacgtccaggacatcctccacaaaatcgccgcccaggtcgaggacggcccctgcgttacctacatcggcgagggaggctctggaaacttcgtcaaactggtccacaacggaatcgaatacggagacatgcaactcatctctgaagcctacgatgttctgaagcacgtcggtggcttga

SEQ ID NO: 4782 - DNA, 1000 bp, Glycine max
gtcgtttgattgtgaagtgagttcccattgagcagatgttggaggcaacaacgtcgacggcagctcctcgaggagtccgccaacctcaccaaaccccccaaaaagcccttgtcagtttttcccctaatactaataattagtgagtaacgattaacgatttagaacagcaacaacgacgacgacactttgacacacctaaccctccaaattcctatctctcttcgaatggaatccgcagctctgtcgcgcataggcctggcgggcctggccgtgatgggccaaaacctagccctgagcatcgcgggaaaggggttcataagggccgtgttcttggaccggatcaagaaggcttatcagaggaaccctaatttggcgagtttgattgtggacccggagtttgcaagggaaatggtgcagagacaggctgcgtggaggagggttgtggggttggcggtttcggctgggattagtactcccggaatgtgtgccagtcttgcttactttgatacctatcggagggcaaggcttccggcaaaccttgtccaggctcagagggacttgtttggggcgcatacttacgagagggttgatcgccctggggcttttcataccgagtggacgaaactcgctcgcaatagtggggctggagttggtgcactcaattgattgattttgggttttggttgtttgtttaatggtcgtgcattgcagtgcagcatttgagttgtaattgtttgtttctttgaggatctttggtagggagagagcagctattgttttcttgctataactgtttttaatcttaataaaccaaaggcatgtcatttggcttccacaggcatctgctttaagtagagaccaggttgttgatgctttcatatcgtctggatttgtttcccagtagagttatgattgcctttttggatttgattcctctaaagtgaggaaggttaaaataagtaatctagttgttcatgttggaaaaaaaaaacaaaaaggg

SEQ ID NO: 4783 - DNA, 466 bp, Glycine max
gcgcagtcgtttgattgtgaagtgagttccgattgagcacgtcttggaggcaacgacgtctacggcagctcctcgttggtggttaagtcgcttgtcctttcagtccctcgatgagtccgccaacccctaaaaagcacttcttagttctccctctcccactaaaaaccatagtaatctagataataattaacatcagccctcactccttcgcacaccaaacccttccttcctatctctcactaatctaatggaatccgcagcactgtcgcgcataggcctggcgggcctggcggtgatgggccaaaacctagccctaaacatcgcagaaaaggggttcccgatctccgtgtacaaccgcacggcctccaaagtggaccagaccgtagatcgtgcccgcaacgagggctccctccctctcacgggccaatacacccctcgcgacttcgttctctccctccagcgcccc

SEQ ID NO: 4784 - DNA, 591 bp, Glycine max
gcagatattttcgccgagtggaaccgaggggaacttgagagtttcttaattgaaattaccgcagatatttttaaagtgaaggatgaagatggtgaagggtttttggtggataagattttggataagaccgggatgaaggggaccgggaaatggacggtgcagcaggcggcggagctttcgatagcggcgcccacgattgcggcttcgttggattgccggtacttgagtgggttgaaggaggagagggagagtgccgcagcggtgttgaaggaggcggggttgagtgatgaattggggagggttagtgtgagtggggtggataagaagaggttgattgatgatgtgaggcaggctctgtatgcttccaagatttgtagttatgctcaggggatgaatttgttgagggctaagagtaatgagaaaggatggaacttgaatttgggggagttagctaggatttggaagggagggtgcatcataagggccgtgttcttggaccggatcaagaaggcttatcagaggaaccctaatttggcgagtttgattgtggacccggagtttgcaaggggaatagtccagagacacgctgcg

SEQ ID NO: 4785 - DNA, 1804 bp, Glycine max
attctttccctctcgcaataaagattcactggtgttacgcgttaacatccactctattaagcaaatgtgctcctagtagtacaataaaaatataaaataaaataaaaataacaaatatttatataagattgtgttcttgcaagttccaagttccaagttcatgcacaaccgatcttttcctctgagaagacgtgtcggtagctgaagcattttataagcctccactttcctgaactagttttaacatacaatctttcaagtacacctccccagcttccatttaagaatggagatcactagaataggccaatggttaagtcttctgatatgtgtactactattactgcagacagaaggggttcctgtgggaatcacttttgttgaaaatgcagtggcaaaaggggctgtttgtttggatgggagtcctccagcttaccacttccacaagggatctggagcagggattaacaactggatagttcactttgagggaggaggatggtgcaacaacgttactacttgcctttcccgtagggacactcgattaggttcatctaagaaaatggatacatcactttccttttctgggtttttcagtaacagtaaaaagttcaatccagatttctatgattggaacagaatcaaggttaggtattgtgatgggtcatcatttactggtgatgttgaagctgttgatccgaaaaccaatttgcacttcagaggagcaagggtttttgctgtggtcgttgaggatttattagcaaaaggaatgaaaaatgctcaaaatgcaattatctccggatgttcagctggaggattggcttctattctaaattgcgatcgattcaaatcactactacctgcaacaactaaagtgaaatgccttgcagatgctggtttttttatcaatgtaaaggatgtctctggagcacagcgcattgaagagttctacagtcaagttgttcaaacacatggctcagcaaagaatttgcctacatcctgcacttcaagactcagaccagggctgtgctttttccctcaaaatgtcgtgtcccaaatcagtaccccaatcttctttgtaaatgcagcctatgactcatggcagatcaaaaacattttggcaccaggtgctgctgatccccgtggccaatggcgtgaatgcaagcttgatatcaaaaactgctcacctaatcaactcagtgtaatgcaaggattcaggacagatttcttaagggcatttagtgtggttggcaacgccgcatctaaagggcattttatagatggttgctatgcacactgccaaactggaatacaagagacatggctgagaaatgactccccagtggtggccaagacatcaattgcaaaggcagtgggtgattggttttatgatcgaaggcccttccgtgagatagattgtgcctacccttgcaaccctacttgccataatcgtatttttgatcagaatgagcgtccagacgtatagattcatttaaaagagtatgcttatttatttattactacaaactatactttattagttatctagtttttattgaacgagatgtgtcacttgcactcatggctttgtggtttgagatctcaaaccatcaaagtatgggttcgattgttgcatcaacaaaaaacaagctgtgattgatgatttaaaaggttccaaagtgtaagggtaggcaacctgataaaggatgataattgtctaccatgtaaacataacatttttattatcaataaagggtatatctgtaattctaataactttttttttatctataatttttggacg

SEQ ID NO: 4786 - DNA, 668 bp, Glycine max
cggactcgtgggttcaaagtcccaccacttggttttcataacccattctccatctcagaatggagaatgcgagaataagccagtggttgatccttctggtgtgtgcgctgctgttgctgatatcagaagcttcttatgtgccaatcactattgttcagaacgcggtagcaaaaggagctgtttgtttggatgggagtccaccagcttatcattttgataggggatttggatcagggattaacaattggttggttgcatttgagggaggaggatggtgcaacaatgtcactacttgccttgctcgcaagaccaatcgtttaggttcatctaagcaaatggccaagctaattgccttttcaggaattttgaataacagggaaatgtttaatccagatttctacaactggaacagaatcaaggttaggtattgtgacggttcatcatttactggtgatgtggaagcagtgaatccagtgactaagttgcacttcagaggaggtaggattttcaatgctgtcatggaggatttactagcaaaaggaatgaaaaatgctcgaaatgctattatctcgggatgttcagctggaggattaacatcagtactgcattgtgatcgatttcgagctctattacctaggggagctagagtgaaatgcctctcagatgct

SEQ ID NO: 4787 - DNA, 558 bp, Glycine max
gtacacctccccagcttccatttaaggtatatatagcttataagtgaacttcatatacatcttctttatattaattttcgctcttgccgcttttttcccccatctgtagtttgtggggctagaagtttctatttctgggcattcagaagattgcaggaaaagttatcagctttatttccatattgaacagagttgttgatctagaatggagatcactagaataggccaatggttaagtcttctgatatgtgtactactattactgcagacagaaggggttcctgtgggaatcacttttgttgaaaatgcagtggcaaaaggggctgtttgtttggatgggagtcctccagcttaccacttccacaagggatctggagcagggattaacaactggatagttcactttgagggaggaggatggtgcaacaacgttactacttgcctttcccgtagggacactcgattaggttcatctaagaaaatggatacatcactttccttttctgggtttttcagtaacagtaaaaagttcaatccagatttctatgattggaacag

SEQ ID NO: 4788 - DNA, 508 bp, Glycine max
ctcgcaataaagattcactggtgttacgcgttaacatccactctattaagcaaatgtgctcctagtagtacaataaaaatataaaataaaataaaaataacaaatatttatataagattgtgttcttgcaagttccaagttccaagttcatgcacaaccgatcttttcctctgagaagacgtgtcggtagctgaagcattttataagcctccactttcctgaactagttttaacatacaatctttcaagtacacctccccagcttccatttaagtttgtggggctagaagtttctatttctgggcattcagaagattgcaggaaaagttatcagctttatttccatattgaacagagttgttgatctagaatggagatcactagaataggccaatggttaagtcttctgatatgtgtactactattactgcagacagaaggggttcctgtgggaatcacttttgttgaaaatgcagtggcaaaaggggctgtttgtttggatgggagt

SEQ ID NO: 4789 - DNA, 1459 bp, Glycine max
aattcccggtgtcgactccacgtcgtctcgtaccggggctgtcgagaagaccgaccagaagggggacctcttcaatatgattctaagatgaatgaattgctttccgctgatgggcaagaatttttcacttcatatgatgaagtctatgatagttttgatgcaatgggcctgcaagaaaatcttctgcgaggcatatatgcttatggttttgagaggccttctgcaatacagcaaaggggaattgttcctttctgcaagggtctggatgtgattcagcaggctcagtctggaactggaaagacagcaacattctgttctggaattttgcagcagcttgactatggattggttcagtgccaggctttggttttggcaccaacaagggagctagcacagcagattgagaaagttatgcgagctcttggtgattacctgggagttaaggttcatgcttgtgttggtgggacaagtgttcgtgaggatcagcgcattctccaagctggtgtccatactgttgttggcactcctgggcgagtgtttgacatgctgcggaggcagtctcttcgcccagatcgcataaagatgtttgttttggatgaggctgatgaaatgctttcacgtggtttcaaggatcagatctatgacatcttccagctgctgccatccaaaattcaggttggagtgttctctgctacaatgccaccagaagcccttgagattacaaggaagttcatgaataagccagtgagaatcctggtaaagcgtgatgaactgaccctggagggtatcaagcagttttatgtcaatgttgacaaggaagagtggaagctggagacattatgcgacctttatgagactctggctatcactcagagtgtcatctttgtgaacaccaggcgcaaggtggactggctcactgacaagatgcgaagcaatgaccacacagtctctgccacccatggtgacatggaccaaaacactcgtgatatcatcatgcgtgaatttcgctctggctcttctcgagttctaattaccactgacctcttggctcgtggtatagatgtacagcaggtgtctttggttataaactatgatctgccaacccaacctgaaaattatcttcatcgcataggacgaagtgggcgttttggaagaaaaggtgttgccataaactttgtgactttggatgatgcaagaatgctgtctgatattcaaaagttctacaatgtgactgtagaggagttgccatcaaatgttgctgatctgctctgatgggttaattttcattctttgttaagtcatcagagggctattactttttgccaattattattttgtgctctttgtttttctttttcaaattttagcattagagttccaatacacctgactttatttttataatggattctataaaatttgttaaaaaaaaaaaaaaaaaaaaaaaaggacgaaaggc

SEQ ID NO: 4790 - DNA, 844 bp, Glycine max
acgagcaaaaacctaaactcactcagtcctacgatacgattctcttccgcctcccttcccttcaactccacggcgcagatccgaggagtttgggaaaccctaattcattcctctttgcttcttctatctctattcctctaacaccagtgatggcaggtttggctccagaaggatcgcagtttgatgctcggcaatatgattctaagatgaatgaattgctttccgctgatggacaagaatttttcacttcatatgatgaagtctatgatagttttgatgcaatgggccttcaagaaaatcttctcagaggcatatatgcttatggttttgagaggccttctgcaatccagcagaggggaattgttcctttctgcaagggtctggatgtgattcagcaggctcagtctggaactggaaagacagcaacgttctgttcaggaattttgcagcagcttgactatggattggttcagtgccaggctttggttttggcaccaacaagggagctagcacagcagatcgagaaagttatgcgagctcttggtgattacttgggagttaaggtccatgcttgtgttggtgggacaagtgttcgtgaggatcagcgcattctccaagctggtgtccatactgttgttggcactcctgggcgagtgtttgacatgctgcggaggcagtctcttcgcccagattgcataaagatgtttgttttggatgaggctgatgaaatgctttcacgtggtttcaaggaagagtggaagctggagacattatgtgacctttatgagactctggctatcactcagagtgtcaattttgtgaataccaggccgcaaggtggact

SEQ ID NO: 4791 - DNA, 548 bp, Glycine max
ctccattaattgtttttggtcccattttttcctgttaccctttcgaatataacactccctcttcctccctattcgcctccctttaactccacgaggcagatccgaggagttaccctttcttttcttttttcttttttctctttcctcattctacttaaaactcccaccagtgatggcaggtttggctccagagggaacacaattcgatggtcgccaatatgatgctaagatgagtgaattgctttccactgatgggcaagaattcttcacctcttatgatgaagtgtatgacagctttgatgcaatgggattgcaagagaatcttctgcgaggcatatatgcttatggttttgagaggccttctgctatacagcaaaggggaattgttcctttctgcaaaggactggatgtgattcaacaggctcagtctggaacaggaaagacagcaacattttgttctggaattttgcagcagcttgattatggattggttcagtgccaggctttggttttggcaccaacaagggagctagcacagcagatcgaga

SEQ ID NO: 4792 - DNA, 492 bp, Glycine max
tgatattatcatgcgtgaattccggtccggctcttctcgagttctcattaccccggaccttctggcccgtggtatcaatgtgcagcaagtgtctctggtcataaactatgatctgccaacccaacctgaaaactatctccaccgcataggacgtagtggtcgatttggaagaaaaggagttgctataaactttgtcacgacagatgattccaggatgctgtctgatattcagaagttctccaatgtgactgtagaggagctgccatcaaatgttgctcatttactctgatgagttaatgtttgttctctgttaagtcatcaggttcttattctatttggcaagtattatttgtgctcattttctctctatatattttgcccattagagatcaaagacatgtgatctgatgctatttgtattggattctataaattttgtctaatcccttaattagcaggatgctgctcaaacatgcattaactttcttgtct

SEQ ID NO: 4793 - DNA, 474 bp, Glycine max
gaaggcatctgaaagggtaaacgtggaaacctttattaattgtttttggtcccttttttcctattagcctttcgaatataacactccctcttcctctctattcgcctccctttaactccacggtgcagatccgaggagttaccccttagctttttctctttccttattctatttcaaacttccaccagtgatggcaggtttggctccagaaggaacacaatttgatggtcgccaatatgatgctaagatgagtgaattgctttccactgatgggcaagaattcttcacctcatatgacgaagtctatgacagctttgatgccatgggattgcaagagaatcttctgcgaggcatatatgcttatggttttgagaggccttctgcaatccagcaaaggggaattgttcctttctgcaaaggtctggatgtgattcaacaggctcagtctggaacaggaaagacagcaacattttg

SEQ ID NO: 4794 - DNA, 628 bp, Glycine max
ttgattccttcgatgtttcgtcccgtgagggtcaatagggacagccatgacccaaaccctctcattctctctctcaccttcccagaaaaccctagaaattaattaaaaccatccaatcttcttttctccatttccccgattttgttttttcatttctatttcaatcgcaacctcctcctccttccaagtcaacgcggatttcagaattctcgatccatgtcgtccgagatcgaggttgtcgaggaggtgcagtcccgcgacgagcaatcgggggcggaggagagcctccgtaatgacgtgtacacggcggcggcttacggggatttggagaggctgcagagattggtggagcaagagggttgccccgtctccgagcccgacggtttgggctactacgcgcttcagtgggccgcacttaacaaccgcactgccgctgctcagtacatcattgagcatgggggagatgtaaatgcaacagatcatactggtcagacggccttacattggagtgcggttcggggtgctattcatgctgcagagcttttactccaggagggtgcttcgagtgagtgctgccgatatgaatggatatcagacaacacatgttgctgcacaatatggtcagaca

SEQ ID NO: 4795 - DNA, 783 bp, Glycine max
aacaaaatgcttggagagtttgaccttgttggtattcctcctgctcccagaggtctgcctcagattgaggtcacatttgacattgatgctaatgggattgttactgtctctgccaaagacaagtccactggtaaagaacaacaaatcactattcggtcttccggtggactctcggatgatgagattgaaaagatggtcaaagaagcagaattgcatgctcagaaagaccaagagagaaaggctctcattgacattagaaacagtgctgacaccaccatatatagcattgagaagagtttaggtgaatacagagacaagattcccagtgaagtggccaaagaaattgaggatgcagtttcggatctgaggcaggcgatgtcaggggataatgttgatgaaatcaagtcaaagcttgatgctgcaaacaaagctgtgtccaagattggagagcacatgtcaggtggttctagtggcggttcctcagctggtggttctcagggtggggatcaggctcctgaggcagaatatgaggaggtgaagaagtaagtcggggaggagtttgtatccactttttactgatttatttgtctagatcacaagttagagatgaatcatcttttttcatttagcatataatataaggttttttgtactaaaagatggagttcattttttaccttaaggccttttaaacttgtagtacttctggagaaccaaattatgcctgtttgaataacgatattcaaaattttgcctagtgactagtgacacattttttactct

SEQ ID NO: 4796 - DNA, 367 bp, Glycine max
aatgctgacgaaattaaggcaaagcttgatgctgcaaacaaagctgtctccaagattggagagcacatttcaggtggttctagtggcggttcctcagccggaggttctcagggtggtgaacaggctcccgaggccgagtatgaggaagtcaagaaatgagacatttaggcttggttttgtagcatttgtttcttattaatcatcacataattggaagaatacaaggttacttattttgtatctaatgttgaaagccattttttctggaaggctctttaatttgtagcacttttggagtctgaagtccgaacacggctgtttgaataacttcgaattttttgcataaaatttgttcactacgtttggc

SEQ ID NO: 4797 - DNA, 340 bp, Glycine max
atctgaggttcttagtgataaaaagagtagagaaccgagtatgtctaaagtggccaccctcttcactttagctcttctgttaagcttcaatttaatccatgcctcccgtcttaatccttcacttaaagttttttcttctttgcgtgaggatgttgcagctacaaaggaagagataaatgaagagagttgtgaagaaggcacagaagaatgtttgataagaaggacgctagctgcacatgtcgattatatctacactcagcagcagaaacccaaacgttagtggcatcatcgcaggaccttcttcggggaccaaatataagtggagagtatataaatcaat

SEQ ID NO: 4798 - DNA, 345 bp, Glycine max
tgacggaggagcagtttgccaaatagtttcagacgtgtgacactacaagattggagtaggtgctgcagcttgaccagtgtggaaggtgtataccggatgatgcattacttggtactttgagacagtcaccaaggtggttgccagagttaattaccctgtccgcgcagtggtgcgtgccgcctgtcagggaagggggggcatgtgcgagcttcttctgccccagcactgaggtccaggaacctaggccagtgctcccttcgcgcatctgccagtattaatattttggctgattcattgggatcccttttgaaagagttgtatctagatgattgcctaatgattgat

SEQ ID NO: 4799 - DNA, 563 bp, Glycine max
tctaattacatcatatgcacaaatctttggtgctccttcggtctcttatcctaattaagttagtgcaaagattatggcttccaaacctggcatactaaccaattggccctggaagcctctcgggagtttcaagtgggtgattttgacaccatggattgcacacagcacttactctttcctagtgagtgaggcaaaggagagggaccttggttacttcctcatcttcccttatatgatggtgaggatgctgcatgaccaagtttggatcacactctctcgccatcgaactgccaaaggcaaaaacagaattgttgacaagggcattgagtttgaacaagttgatcgagaaagcaattgggatgaccagatcttgttcaatgggatcatattttatataggttatatgttagttccagagagttctcacatgcccttgtggagaacagatggtgtacttatcactgctcttatacatgctggaccagtggagtttctttattactggttacatagggcacttcatcaccacttcctctattcccgctatcattctcatcaccatt

SEQ ID NO: 4800 - DNA, 813 bp, Glycine max
caatttttgagttattgtcagaggctcttggccttaatccatcttatctaaaagaaatgaattgtgctgaaggacttttcattcagggtcattactatccaccttgccctgaacctgaattaactttgggcacgtccaagcacactgatagttccttcatgacaatagttctacaaggccaactgggtggtcttcaagttcttcatgaaaaactatggtttaatgttccacctgtgcatggagctcttgttgtaaacgtaggagatattctacaacttataacgaatgacaattttgtcagcgtttatcatcgggttttatcgaatcatggagggccaagagtttcagtagcaagcttcttttcgaattcgcatgatccagcaaaaggtgcatcaatggtttatagtccaattaaggagttattatcagaagaaaacccagcaatctatagggacactaccataggagagatcatggcacaccattttgctaaggggcttgatgggaactctgccttgcagcctttcaggttgtgaaatgaacagattaagacctagaaaataacgatgctctcctgattctcatggaggtgcttgtaatgtgttatttctgatgccttttattttcttaattttcttcttcacacaacaagcttcaaattaagaaaccttctgggcagacatatgctcatctgtctcatcctaggcttcttagcttgtgttgtaacgaataatttcgtgccattcaagaaaaatatgtaagagattccattagaatggatatgacttaacaaaggatgataggacaagtttt

SEQ ID NO: 4801 - DNA, 543 bp, Glycine max
acctctaactatttatattcacatatttctcttccttctcagaaatcagaattgagcacgcgtttggagttggaatttgaaggttatcatcatcatttatagatattattattattataagaagttcatcagaaatattcaatggggagctttgaaactgaactgatgaatcttaaggccacagagttgaggttgggactgcccggctgtgatgaaactaatgagaaaagttcatccagtagtggatctgttgttagaagcaacaagagatcttcaccagaacccagtgtggaagagtccaggtgcaactctaatggttcttcagattctaccaccacaagtgatcatgatcaagacagtgcccaacctgaaaaggtacaagtagtggggtggccaccaattagatcttttaggaagaacagtctgcaacaacagaagaaggtggagcagctgcagggtgatggaggtggaatgcacgtgaaagtgagcatggctggtgcaccttacttgaggaagatagatctcaaggtttacaatagctac

SEQ ID NO: 4802 - DNA, 532 bp, Glycine max
ctttacctaattatatatatatatatatacacatatttctctctttctcagaaatcagaattgagcaagcgattggatttggataactgaaggtgatcatcattttagatattattataagaagttcatcaaataattgatcagaaatattcgatggggagctttgaaactgagctgaatcttaaggccacagagttgaggttgggattacccggctgtgatgaaactcatgacaaaagttcatccagtagtggatctgttgttagaagcaacaagagatcttcaccagaacccagtgtggaagagtccaggtgcaactctaatggttcttcagattctaccaccacaagtgatcatgatgaagacagtgtccaacctgcataggtacaagtagtggggtggccaccaattagatcttttaggaagaacagtctgcaacaacagaagaaggtggagcagcatggtgatggaagtggaacgtatttgaaagtgagcatggctggtgcaccttacttgaggaagatagatctga

SEQ ID NO: 4803 - DNA, 534 bp, Glycine max
  unsure (1)..(534): unsure at all n locations
ttccattttgaattgggcaatagagctgtgagacataaaaccccatttggtgtggttagacagcacacaagtgaagagaaagagccttccaaaatgttcaagctatctcgcatgctccctctcacttccacttccaggcataggctgttggaagtgctgtcctctaggaaagttgaagtcggagaccgtcttagccattcagctggcatttctactgctacaaataactatgctgccaaaggatatgcttccgatcgaatatttgctccttatactgtttacaagggcaaagctgcattctcgttgatcccttgtcttccaactttcactaagttgaattctgggactgttgtagttgatcgacgtggttcaatcatgatgactttcatgcattctattggagagcgcaaatatgactgggagaaaagacaaagatttgctctctcagcaactgaagttggttctttgataacaatgggcgctcaagattcctgtgatttctttcatgacccttcaatgntatcaagtaatgct

SEQ ID NO: 4804 - DNA, 525 bp, Glycine max
agagtggtcaatcggaagcattttccgtttccatttccattttgtttgggcatcaaccggcataggcaatataaaaccccatttcgtgtgctaccgctactgacgcaactcacaagtgaagaagaacgagagattgagaagagaaagcgttccaaaatgttcacgctatctcgcgtgttccctctcacttccccttccaggcataggctcttggaagtgctgtcctctaggaaagttgaagtcggagaccgtctgcgccaagaggggcgcgattttacctattcagctgccatttctactgctacaaataactatgctgccaaaggacacgcttccgatcgaatatttgctccttatactgtttacaagggcaaagctgcattctcgttgattccttgtcttccaactttcactaagttggattctgggactgttgtagttgatcgacgcggttcaatcatgatgtctttcatgcattccattggagagcgcagatatgactgggatacaagacacaaatttgct

SEQ ID NO: 4805 - DNA, 737 bp, Glycine max
ggaattgatgagcaggaaataacatatgccttgggtcagagaaagactttacgacagctgatcaggaatggggacattgatgttgcatttggtaaattgcgtgaatggtatccacagattgttgaggacaatacatcagctacatgctttctgcttcattgtcaaaagtttatcgaattagttcgggttggagcacttgaagaggctgtcaaatttggaaggatggaattgtcaagtttttatgacttgcctgtctttaaggatttagttcaggactgtgttgctttgctggcatatgaacggcctctggaatcctccgtaggttatcttctaaaagactcgcagcgtgaagttgtagctgacacagtaaatgccatgatattgtccgcaaatcctaatatgaaagattcaaaacattgcttgcactcctatcttgagaggttacttagacagcttactgcttgctgcttagagaggcgatccctgaatggagagcagggagaagctttccaacttcagagagtgcttagcagtagtagaagaggctagtgctaggtgatatgtctattgatcttcttacgccgctgtttatattgccccaggatttgtaacattgccaagtgcaaaattgatcttagcgtctcgtatatactgtagagtccccgtatatttacttgatgcatgcttattcatttctttgtcaagaagggggagagggtgtctctacattcaagttt

SEQ ID NO: 4806 - DNA, 872 bp, Glycine max
cttccttacggttccaaaaggccgccaaatggggacgctcaattcattttcttctcctctctctctctcctagggttagggttttctctcttcatcactctctgtgtcgctccgtttcaatggctcagcaagacgctcaaaacggcgggtcggagaatgccgctgctgctgctacggtgtcgtttgtcgctgtgaagccgcagctcctcgtcgaagctcccaaagccaacgacgccattctgttcttcaaggctgcgtttggcgctgaggaagttggccgtacgctcaaccctaagcgcaaagctgagcacgagctccctctcatactctccgcagaactcaaaatcgctggctccaccattctcgtcgccgacctcgttgatgacacttcttcgccagcgaaaacggggggaaacggtgtcgttttgtgcttggagacggaggacgtggatggggcagtagctaaggcggtgagcgctggtgcagttgcggagggcgaagtagcggaaggtgaagtcgcgtgctgcggcgggcgcgtggggaaggttaaggacccgtatggcttcgtttggctcttctgcactccagggaagaagtgtgctgacgtggaggcttaatggcctttgatgttgttctgagtctaattgtttggattatcagttttagttgtagaattgattagggaaaggtcgtacgtgtctagttaagacatttctcttcttcagtctttcagtcttttatatctaagtgggattagtattaatctaatggttacgcgtgtatttctattttgaatattttgaagtgcttctcgtttgtcattagactcattatgaatgacattagttgttgcccccccccaaaaaagtaaa

SEQ ID NO: 4807 - DNA, 390 bp, Glycine max
gatactcaattcattttcttcttctgcttcaccttctcttctcttctctcatagggttagggtttttttctcttcattgctctctctgtcgttttatttccatggctcagcaagatgctcagaatggtgggtcggagaatgccgctgctgcggtgtcgtttgtcgctttgaagccgcagctcctcatcgaagctcccaaagcgaacgacgccgttctgttctacaaggccgcgtttgccgctgaggaggttggccgtacgctcaaccctaagcgtaaagcggagcacgagcttcctctcatactctccgcagagctcaaaatcgctggctctaccattctcgttgctgacctcgttgatgactctgcttcaacagcgaatgccggaggaa

SEQ ID NO: 4808 - DNA, 378 bp, Glycine max
caaaccctcaatgtcacttttctttcttacctctggggcatcactgtgactctgtgcatgcttgctgtgcttgaaattaaatggtctggcattgagctggaagaatggtggagaaatgagcagttttggctgattggagggaccagtgcccatctagctgcggtgcttcaaggtttgctcaaagtcatagcagggattgaaatatcattcaccttgacttcaaaatctggtggtgatgatgtagatgatgagtttgctgatctctatattgtgaaatggacatcccttatgataccacctatcacaattatgatggttaacttaatagctatagcagttggagttagcagaaccatatacagtgtcatagcacagtgg

SEQ ID NO: 4809 - DNA, 1258 bp, Glycine max
agaagattgaagaggacatgtctgatagaatagctagagaaaaagcggccgaagaggcaaggcagcaggcattgcttagaaagcgatcaaaagtccttcaacgggaacttcctaggcctcctacagcatcattggagcttataagaaattccttgatgagaactgacgtggacaagagttcctttgttccaccaacctctattgagcaagctgacgagatgattagacgggagcttctaagtttactggagcatgacaatgctaagtatccacttgatgagaaagtgattaaggagaagaagaaaggagccaagcgtgctgtaaatgggtctgctgtccctgtgatagaagattttcaggaagatgaaatgaaagaggctgataagttgataaaggaagaggccctgtatctttgtgcagcaatgggtcatgaagatgaacccctcgatgaatttattgaagcacacagaacctgtctcaatgatcttatgtactttcctacccgtaatgcatatggtctctctagtgttgctggaaacatggaaaagctagcagctttgcagaatgagtttgagaatgtgagaagcaaattggatgatggtaaggagaagacggtacggcttgagaagaaggtgatggttctcacacaaggctatgagatgagagtaaagaaaagcctctggccgcaaattgaggccactttcaagcagatggatgttgctgcaactgagttagaatgctttaaagctttgcaaaagcaggagcaattagcagcatcacataggataaacaatctgtgggctgaagtacagaagcagaaggaacttgagaaaactttgcaaaataggtatgggagtctaattgaagagctggaaaagatgcaaaatgtcatggaccaatgcagattacaagcacaacagcaagaagaaattaaagccaaccatgctcgtgagtcaactgagacccctgagaccaaggctgatggaattgatgtacagggtacagcaaattgtgaagctgtacctcactcggtagagcatggacgagctctagcagttgagtcatctgctgatggaactgctgaccagcaagtagatattgtgcatgaccaggctacttctagtgtcagtcatgacatggatgtggattctgataaattggcaaatcctacaccagctgcagagaatgtcgatgaaaaagtggaaggtaccggcaccggcaccggcagctatactgacgatggggagaccatgctgga

SEQ ID NO: 4810 - DNA, 580 bp, Glycine max
tcgccgttcaattgcttcgtctttggtcttcgaccgtttcaataacctgcccccacctcagctataaggacaaaatctctaacgattttttttccttactttaaaataattgatctattgcgataaaccgagtagaggagtaatggtgtagtagtagtggagagaaatcgcgatctggaacagagtttagctgaaagaaaaagaatcgagttgaaatgggtttctttggtaccattttggggtttttgggatttggggttgggatttcgattggtctcgtggctggctactttctcttcatctacttccaacccaccaatgttgaggatcctgaaatcaagccattggcggagcaagagcaagagactctgcaacgaatgtttcccgagattcctctttggataaaaaatccggattttgatcggcttgattggctgaacaagtttgtagaatatatgtggccgtatcttgataaggcaatttgtaagactgcgaaaaacattgcaaaacccataattgccgaacagattcctaaatacaaaattgattctgttgagtttgaaacactcacattggggtc

SEQ ID NO: 4811 - DNA, 825 bp, Glycine max
gtcccttaacgcaaactgtcatcttgtcattcaccgagaaagtcgtactgattcctcttcatctttcgttaaagcgagtacttttcgttcttgatctgttggttacgatgtcgtattcaaggagatctaggtattctccttctccttctccttctccatacaagcgatacggtaggtctgtgtccaggtctctctcaatatcaagatccagaagccgttcaaggagtttatcaagagatgcagaaaatccaggaaacaatttgtatgtgacaggattgtctcctaggattaccaagagagaactggagaaacattttgctgctgaaggaaaagtgatagatgtccatctggtagttgatccttggacaagggaatcccgtgggtttggctttgtgacaatggagactcttgaggaggctgaacgatgtgtaaagtatctgaatcgctctgtacttgaagggcgtgtcatcacggtggagaaggtatacatttctagcagtgccctattttgtggggcctggatttttattagctattttttttttcaaccccaatgcatggaaattatgtgggtgatttgttctttagttcctctaagttttgaaagttttgtgcttgtttccgtttgaagtttctgtggcagcaggttagctgtgtgaagcagctcttcatcaaactctcaaatcacaactaaacaaacaaatcaaatacaccaccaagtatcagatcattggggttgtatgccctgcattactctcttttttattgcgtttatatcttattcttttgtgcatcgtgaatttgtgggttttaagattctcctct

SEQ ID NO: 4812 - DNA, 1191 bp, Glycine max
gggcgtgtcatcaccgtggagaactttctgtggcagcagcctacctgtgtgaagcagctcttcagcaaacgctcaaatcacaactgagcagacaaatcaaatacaccaccaagtatcagatcattgcggttgctaaaagacgacgtggtcgaaccccaacaccagggaagtatctagggctgagaactattcgtgctcaacggcgttctccaagtgactctcctcgtcgctcccctagctattctccttatagaagaagctatagccggtctccctattcttcagaccgaagtaggagtcgttcttactctcctgactataggaggaggaagtcaaactatccatatcactctaggcgaaggtcatactctccattctacagccggtacaggtcctattctcgatatgatcgacacaggtcatattctcgatctcgctctccgtatagcaggtcacctgtcagcatgcatgacagatcatactctccctatgaaatacgatatgactcgccggatgcgcactcctacagaaggcaccgttaccgatctgtttcacgaagtgcctcgcctgatgatccttattatggaaggcaccgttacaggtctgtttctcggagtgcctcacccaggccaaggagaaggtcaaggaggagctactcacggagtgctacacctgtttcaaagagaagcaactcacgaaatgtgtcccccaggtcaaggaggagccattcaagaagctctaagaggagtggcaaatgtgagaaacgctactcaagaagctcgagtgtgaatgcaagttcaagatcagtatcgaggtcaaatactccaaggtctacctctccttcaacttgaaatttgttggtcctatatggcttaacatcttaggcttatagtggataatatattagtgtggtatatgtatgcagttctagatggagttttcgtttggttccgttcagggcttgtctaaaaaccacctgatcttatttcatgtagtatgggattgaaattatgttactcagtatagattatctaatttcgaactttcccttggtttagttccatttttattttgccattatcttcttttagactttgtattttctgtgttgtcctttctgatgttcagatgatatggtctccctaatgtttacattttttataaatagatgattgcccgattacccggtat

SEQ ID NO: 4813 - DNA, 696 bp, Glycine max
attggatgtaagcaataatcatttggtgggaaagattccaagccttataaaaaacttgtcaggattgaacgaactttgtttgtctaataaccattttgaaggatccattccattagaacttggagaacttgaatatctaacttctttagatctctcccaaaataattttattggtcttgttccatcatttacaaattcttccgtggcatttatccatttgaacaacaatcgtttgagtggattgtctaaaagaatgttccatggaaactcttctttagtgatgttagaccttagctacgatgaaatatctaacaaccttaaagatctgatacataaccttagttataaaaggttaaatattctccttttaaaaggtaatcactttatgggggatataccaaagcaactatgccagttgatagatttaaacatgctagacctttctcataacaatttctctggtgttatccccaaatgcttaggtaaaatgccttttgagaataagaacccgaaggacttgttagcaagattttctatctttgatccagatctccatatccatgccgctgctctgtcgccatcaaatgtgcaagagaaagtgaatttcactacaaaggaaagaactgacacttacatcgggagagtccttgtttatatgtctggaattgacttatctcacaataaactgaagggaaa

SEQ ID NO: 4814 - DNA, 966 bp, Glycine max
aagcttgactccatgcacgcgtcgtagctcgaattcgctcgagcccgaagttcacatctgtttggaataagcttcttttccatacaattgaatttttagaattatggctcagttattgtcaccagtatgcatggaggctctgaaaatccacaatccatcattgaatctttgttcaagaagctcatggcggatgctggtgaagggtgcaagtccttgcacctttctgacacacagtggtagtaagcgaagagggtttggcaaagtaagagttactgctgaagactcagtttctccctctgagaccattgcagatgactattatgaagttcttggactgcttccagatgcgacaccagagcagatcaagaaggcatactacaattgcatgaaatcttgccacccggatttgagtggaaatgatcctgagaccacaaatttctgcatgttcatcaatgaagtctacacggtgctcagcgatcccgtccaacgcatgatttatgatgaaattcatggctactctttaacttcaatcaatcctttcttggatgattcaagcccaagggatcatgcctttgttgatgaattcagctgcataggctgcaaaaattgtgccaatgtagcccctggtgtgtttgcaattgaggaagactttggaagagccagagcatacaaccaatgtggggaccctgaattagttcaacaggcgattgacagttgccctgttagctgcattcattggacatcttctgcacagctatcattactggaagatgagatgcgccgtgtagaaagagtcaatgttgccctaatggtatcaggaatgggaacagcatcaattgatgttttcagaatggcaagttccagatgggaaaagaggcagtcaaaagtcttggctagaactcttatattcaatgccttcattttttggttaatatgtgaagcgtcactttattacatgcaattaaa

SEQ ID NO: 4815 - DNA, 746 bp, Glycine max
gcctaggttccccttggcgcgtttgcgattgaggacgactgtggtggagccagagcatacaaccaatgtggggaccctgaattagttcaacaggcgattgacagttgccctgttagctgcattcattggacatcttctgcacagctatcattactggaagatgagatgcgccgtgtagaaagagtcaatgttgccctaatggtatcaggaatgggaacagcatcaattgatgttttcagaatggcaagttccagatgggaaaagaggcagtcaaaagtcttggcaaaagcaaaattgagaatgatgagggaagaaggttctgataagaaaaattcgtactgggacaatctttggggcaaacagaaagactatcaaagttcagatgaggaagttgaagaaagagcaaaaagagctgcttcagcggcacgaagatggagggaatactcaagtagaggtgttgataagcctcccacatttaaacttccagaggcaagccttggcaaggacaagtgaacagtacttcatttaccttctactatatcatttagtcccgtgtaattagttcatttatagcctcctaagttaaaccaatgagatcttctttctcattctactacccatgattgtatatgcagcaactcctattaaggtaaatttttagaaatagatgaaccatagtaatactttggaaaatataagaaagcttgtttataaaatcataattatggttgcagtgtgctcggtct

SEQ ID NO: 4816 - DNA, 309 bp, Glycine max
gtgttgataagcctccaacatttaaacttccagaggctagccttggcaaggacaagtgaacaaacagaaattcattcaccttctattgcatctagtcccatgcaattaattcatttatagcctcttaagttaaaccatgattgtatatgcagcaactcctattaaggtaaatttttagaaaatagattaatcatagtaatactttggaaaatataagaaagattgtttataattatggttgcagtgtgctcgatctatatcgacgcttaattcttgcggaaatttcaaagaacgaatactttgttgccc

SEQ ID NO: 4817 - DNA, 1560 bp, Glycine max
gtttggtctgttgttgatttacattaaacattacattacattacctgccgactagtttacgctatcagcaatagcaagtcggtcgctcagacacgcacagatctgatctgatctgatctatctgaagccgaaaacgccgacggtgatgatgaagatggggtgttcacgttgctccttcttcctcttcctcatcctcttagtggcgctcttcccctcgtcgctctccgagatccgcttctccgagatccgaaacgacgatcgccgcatcatccccttcgatcagtttggattcacccacaagggtcgccttgagctcagcgtttccaaaatctcactctccaattccaatttggacctctcgaaggtcggcttctttctctgcaccctcgattcctggcttcatgtcctccagcaactcgaggacggtgagattcggtgcgcccttcaatccgatctggtcaagtccgtctattccttcaattctctaaacggcaaggactctttcagcacgctctacaaagaggaaaccgacgccgatcagtacaacctcgtcttcgccaactgccactggcagcaactcaaggtgacaatggacgttaaatctgccatgtacaacctagaagggaatagcaacgtccgcgattacctctctgcgggcagaaccatccttcctagggtttatttgctcttctcgttggtgtatttcgctctggctgctctctggatcagcgtcctctacaagaagcgccaaaccgccttccgcatccattacttcatgctggccgtggtcatcttgaaggccctgaatctcttgtgcgaggccgaggacaaatcctacatcaagcgcaccggaagcgcccacggttgggatatcgtcttctacattttcagcttcctcaagggcatttcgctcttcactctaattgtcttgattggcactggctggtccttcctcaaacccttccttcaggataaggaaaagaaggttctcatcattgtcatcccccttcaagtcattgccaacattgctcaggtcgttattgacgagagtgggccctttggccatgactgggttacctggaagcagatcttcctccttgttgatgtcgtctgttgttgcgctgtgctcttccccattgtctggtccatcaagaacctccgtgaggccgctaggaccgacggcaaggccgctgttaatttgatgaagcttactctcttcaggcactactatgtcgtcgttatctgttacatttacttcaccagggttgtcgtttatgccttggagactattacctcctatcgttattcttggaccagtgtggttgctgctgagttggccacccttgctttctatgtctttactggctacaagttcaagcctgagggctcacaatcccttttttgtcatcgatgacgaagaggaagaggctgccgcagaggccttgaagcttgaagatgaatttgaattgtaacttctttcaaaatacaaaattaagcttttttcctagttaggttttgaacaagttggttccatgctcagcaatgctcaggtttcatctc

SEQ ID NO: 4818 - DNA, 515 bp, Glycine max
ggactgactagtttggtgtggtgtctgttgattaacattacattgcctgccgactagtttacggtatcagcaatagcaagtggctcacacacgcacagatctgatctatctgaagctgaaaacgccgacgcccgacggtgatgatgaagatggggtcctcaccttcacgttgctccttcttcctattcctcctcctcctagtggcgctcttcccctcgtcgctctccgagatccggttctccgagatccgaaacgacgatcgctccatcgttcccttcgatcagtttggattcacccacaagggtcgccttgagctcagcgtttccaaaatatcactctccaattccaatttggacctctccaaggtgggattcttcctctgcaccctggattcctggcttcatgtcttccagcaactggaggatggcgagattcggtgcgcccttcaatccgatctggtcaagtccgtctacaccttcaattctctcaacggcaaggactctttcagcacgctc

SEQ ID NO: 4819 - DNA, 594 bp, Glycine max
  unsure (1)..(594): unsure at all n locations
gcaaggccgctgttaatttgatgaagctgactctcttcaggcactactatgtcgtcgttatctgttacatttacttcaccagggttgtcgtttatgccttggagactattacctcctatcgttattcttggaccagtgtggttgctgctgagttggccacccttgctttctatttctttactggctacaagttcaagccagaggctcacaatccgtattttgtcatcgatgacgaagaggaagaggctgccgcagaggccttgaagcttgaagatgaatttgaattgtaatttctttcaaaatacaaaattagttgttgaacaagttggtaccatgctcagcaatgctctcaggtttcatctcaacagccagtagaaatttgcatgttacattttatgggtatagtcattattcataaatcattgtgctatattttgtgttctggactcatgccagtttttgcattagtgttataatatcctaaacccttgtgtagtgctttgaacatatattacttttaagtataaaaactgatcccttgcnnnnnnnnnnnnnnnnnnnnnnnnnnnnnnnnnnnnnnnnnnnnnnnnnnnn

SEQ ID NO: 4820 - DNA, 590 bp, Glycine max
gactcgtaagaagaagacattggggagtggtgcaccgtgcactgctctaaggtcctataaatttgcctagggtttatattaatcttttcactgttcctcctactttccaagcttcctggcacactttgataagttttttgtgcagctccaatggcaacctctcaaatcacttcatcattgaggaacttgcctgcatttgaaaggtttcaaccttcaacgcttcgatttccttctgctgggcacgtcagaattgggacactgacacaaacctcgtttccctctttcgttgtcaaagccgccactgttgtcgcccccaagcacaccactgttaagcctctgggtgatagagtactggtgaaaattaaggatgcagaggagaagactgcaggtgggattttactgccagcaactgctcaaggcaagcctcaaggaggtgaagtgggtgctgttggggatgggaagtcggttgggaagagcaaagtggatgttagtgtgaagacaggtttgcaggttgtgtattcaaagtatgcagggactgagcgtggagttcaatggttcaaaacatcttattctgaaggacgatgacatcg

SEQ ID NO: 4821 - DNA, 461 bp, Glycine max
atttatctttttattttagcaaagctaaactattgtttctcgggaaatttaagataattcaattggataacatgaacgaaaatctcaattttgtgctgttgtcggagtgactcaggaaaatgcaatgcacgattccaacagcattgtttatgtcgtgatacatttctgataaggttaattttcagttttggttttttgggcggctccaatggcaacctctcaaatcactgcatcattgaggaacttgcctgcatttgaaaggtttcaaccttcagcgcttcgattttcttctgctgggcacgtcagaattggaacactcacgcaaccctcgtttccctctttcgttgtcaaagccgccactgttgttgcccccaagcacaccactgttaagcctctgggtgatagagtactggtgaaaattaaggatgcagaggagaagactgcaggtgggattttactgc

SEQ ID NO: 4822 - DNA, 566 bp, Glycine max
aaaaagtgtatgagcgttaaaactggatacttgaggcaagaaactgttccgctctcagttgaaagtcaacgaagtctcacagcacactcagatctctcttctctttcttcaattccattgttgtttggttcccttcactctcacaatgcgaatcctcgtcctgctctctctcgccacccttctcctcttctcctccttctctcccaccttctgcgaccacctcgccgacgacgaggacctcagcttcctcgacgagccctccgccgcgccggagcacgaccaccactacggcgccgatgactccaatttcggcgactttgaggacttcgaggaggacgacgcggaggcgtacaagcagcccgaggtggacgagaaggacgtcgtcgttttgaaggagaagaacttcaccgacgccgtcaagaacaaccgcttcgtcatggtcgagttctacgcgccctggtgcggccactgccaggccctcgcgccggagtacgccgccgccgcgacggagctcaagggcgaagacgtaattttggcgaaagtggatgccacggaagagaatgaat

SEQ ID NO: 4823 - DNA, 500 bp, Glycine max
  unsure (1)..(500): unsure at all n locations
cccacgcgtccgcaagtctcgtagcacacactcacacactcagatctctcttctctttctgcaattccattgttgttctcttcactctcacaatgcgaatcctcgttgtgctctctctcgccaccctcctcctcttctcctccctctttctcaccctctgcgacgacctcaccgacgacgaggacctcggcttcctcgacgagccctccgccgcgccggagcacggccactaccacgacgatgacgccaatttcggcgacttcgaggaggacccggaggcgtacaagcagcccgaggtggacgagaaggacgtcgtcattttgaaggagaagaacttcaccgacaccgtcaagagcaaccgcttcgtaatggtcgagttctacgcgccctggtgcggccactgccaggccctcgcccccgaatacgccgncgtcgcaacggagctcaagggcgaagacgtaattttggcgaaagtggatgccacggaagagaatgaattg

SEQ ID NO: 4824 - DNA, 550 bp, Glycine max
ctaactcctaactccaacttgacctacatttctatttcccgggcgaagctattcgatctcgatctcaatttccaatccacagatcacaatgctaactcgtaaacgactcgtcgtttctctctctctcgccactctccttctcttctcatccctctctctctctctctgcgataaaaccccccctcaaaacgacaacaaaaaaaacaacaacgacgacgacgaagatctcagcttcctcgaggaatccgatgacgctgccaccacttctcaccaaggcccttttccagatcccgacgagttcgacgaggacgacggcgacgaccaggacgacttcggcgacttcgctggcttcgaccactcgtcggaggaggcgttcaaggagcccgaggtggacgacaaggacgtcgtcgttttgaaggagcgcaacttcaccaccgtcgtcgagaacaaccgcttcgtcatggtcgagttctacgcgccctggtgcggccactgccaggccctcgcgccggagtacgccgccgccgccaccgagctcaagcccgacggc

SEQ ID NO: 4825 - DNA, 1616 bp, Glycine max
cccactttttcgcccacgcgtccgcccacgcgtccggataaaaataaaaatcattgtaactcatgtctaataatgcactaataactctgtaacaccaccttcataattccgattccagttcaaagcgactcaagcacttgttcgactcttttatcctacgcactcctccctgcttatcctgcgcatctttcacctagatcctccccttcactccttcactttcctatttcagtgggaaagaatcatgagttgtttcagctgttgcgaagaggatgacctccataaggctgctgaaagtggaggaccctatgttgtaaaaaatccagcagggaatgatggaaattatcatgcttctcaaactgcaaagcagggcactcagcctgttaaacctcagcccattgaagttcctaatatatcagcagatgaactgaaagaagttacggataactttggtcaagttctctgattggagagggatcctatggaagagtatattatggtgttcttaaaagtgggcaggctgcagcaatcaagaagttggatgccagtaaacagcctgatgaggaatttttagcccaggtttcaatggtatcaaggctgaagcatgaaaattttgttcagttgcttggatattgcattgatggaagctcccgtattcttgcttatcagtttgcatctaatgggtctcttcatgatattttacacggcagaaaaggtgttaaaggagcacagcctggcccagttttgacatgggcacaaagagtaaaaattgccgtaggggcggcaagaggacttgaatacttgcatgagaaggctgatccacacattatccaccgggacatcaagtcaagcaatgtgctaatctttgatgatgatgttgctaaaattgcagattttgatttatcaaatcaggctcctgacatggctgcacgtcttcattctactcgtgtccttggaacctttggttatcatgctccagaatatgcaatgactggacaattgaatgctaagagtgatgtatacagttttggcgttgtccttctggaacttctgactggaaggaaacctgttgatcatacactaccacgtggacagcagagtctggttacttgggctacaccaaaactcagtgaggataaagtcaggcagtgtgttgatacaagactaggaggagaatacccacccaaagctgttgctaagatggccgctgttgctgcactgtgcgtgcaatacgaatgatttcagaccaaacatgagcatcgtagttaaagctcttcaacctttgttgaacgcaagacacgggcctgctggtgaaactccaaactaatctctgtctatatgtatcaacgagtatgtgcataagtctaagtctgcacccgagatataagaaagtgactgcttcagaagcggatggaaaattgcttgaacatgtttatattattgttgtgtaattacaaacttgtgtaggacctattagcaattaagaagactttgtgtatcagttttgtgaacggttaaaattcatttaactgtaattaggcaatggtatttttcacgctttaccatagtttagttttgattaagtgttataaatacacattctaataagtcaattc

SEQ ID NO: 4826 - DNA, 767 bp, Glycine max
gccagcttttccttttctcattattcttctctctctctccaaagtccatactttttgatttgtggaattactcttgttcctacctgcttcagcacagcctcctcaatctcctcctattgtttctttctctttttgtttttttataataaaaagattcagttttgtgtgttgtcgctgatacccatttgcattttgtattctgggtcaatgctgtcatgttctctgcaaattagggtttcaatccgtgctccggagtgattgattctgtttcatgtgttgaaaaggaatgtagctggaaaagattgtgtttgttctgaataataaaaatttcatcttcattgttggggatgctacggattttgtaaatttagcaccttttttttttctttttttgatttggcccttatcctggatttgtttccttaatccccttttgcggctaatcggatgaatatattggtaaatcccattggatttgagtggattctccaataaaggttggaaattttttatctgctggacccctttgggcacaaaattggtggtgaaattgggaacaaatctgaacagaaaaaggctctctgtagttactcggtgtgggtggattgaatgtcttctttgatgatggatcatgtgattggtgggaagtttaaactgggtaggaaaattgggagtgggtcttttggggagctttatatagctgttaatatacaaaccggagaggatgtggcagtcaagctggaacctgtgaagaccaagcatcccca

SEQ ID NO: 4827 - DNA, 461 bp, Glycine max
ctgacgcgtgggcggacgcgtgggttctggaacttttgactggaaggaagcctgttgatcatacactaccacgtgggcagcagagcctggttacttgggctacaccaagactcagtgaggataaagtcagacagtgtgtagatgcaagactaggaggagaatacccacccaaagctgttgctaagatggccgctgttgctgccctgtgcgtgcaatatgaagctgatttcagaccaaacatgagcattgtagtcaaagctcttcaacctttattgaatgcaagacatgggcctgctggtgaaactccaaactaatctttgtctatatttatatctgtatcaatgagtatgtgcataagtgtgcacgtgagatataagaaagtgactgcttcagaagcggatggaaatttgcttgaacatgtttatatatcccattgtttacattgcatttattttgttcat

SEQ ID NO: 4828 - DNA, 568 bp, Glycine max
acaatacaccatgatacttattatttgttctagagaagataaataaataaataaacaaatcattgtaagttgtaactaataataatgcactagtagtaactcattcatcattccgtttccagttcaagaacttgttctactcttttatcctacgcactcctcccttcttatcctgcgcatctttcaccgagatcctccccttcgcatcttcactttccaccatttcagtgggaaagaatcatgagttgtttcagctgttgcgaagaggatgacctccacaaggctgctgaaagtggaggaccatacgtcgtaaaaaatccagcaggaaatgatggaaattatcttgcttctgaaactgcaaagcagggcactcagcctgttaaacctcagcccattgaagttcctaatatatcagcagatgaactgaaagaagttacagataactttggtcaagatgctctgattggagagggatcctatggaagagtatattatggtgttcttaaaagtgagctggctgcagcaatcaagaagttggatgccagtaaacagcctgatgaggaatttt

SEQ ID NO: 4829 - DNA, 1083 bp, Glycine max
gaaggaaaagaaggataaaagagaaagagagagagagtatccgccgttttggaaacgggcttttgagtttgttgacttggcaaaggcaaaggcagcggttgtaataaatatgaataaatagcgtttggtgatgttcataagacgtgtctctgtctaggttggtctcttctggtctgttctgttcttctacgcagacacataacataacacaacgcacctcttcttcttcttctttcccttcaaatttcaacttcttcatccattttgtgctccaaacagcacaaacactgcaatcacaccgtgttcgctttctactcatctaaaagaatagaggttcatgggttgctttggcttctgcaaaggagatgatagtgttacagttgctgacagaggacctttcatgcaaagcactcctactgggaaccccagttatcatggaagacacacagcagtaactgctcctcggactataaattttcaacctattgctgtcccttccatcacagtagatgaattgaagtctttgacagataattttggctcaaaatatttcattggtgagggtgcatatgggaaagtatatcaagccacattgaaaaatgggcatgcagtagtaataaaaaagttagattccagtaatcagccagagcaggaatttctttctcaggtctccatcgtatcaaggctaaagcatgaaaacgttgtcgagcttgttaactattgtgttgatggtcctttccgtgcccttgcctacgagtatgctcctaaaggatcccttcacgatattctacatggacgcaaaggtgtcaagggtgcacaacctggtccagttctctcatgggctcagagagttaaaattgctgttggagcagccaggggacttgaatatcttcatgaaaaggcagagattcatatcatccatcgttacattaagtctagtaacatacttctttttgatgatgatgttgcaaaggttgctgattttgatttgtcaaatcaagcccctgatgcagcagcacgtcttcattctactcgtgttcttgggacctttggttatcatgctccagaatatgcaatgactgg

SEQ ID NO: 4830 - DNA, 1082 bp, Glycine max
tttgggttgtgatgagaagtggaatccctaaggtccgggcagctgcattagctctcagggatttacgatacaaagcagttggcattagattggactctggtgaccttgcatatttatcctgtgaggtcaggaacttctttcgctctatcgagaaggaatttggagtgcctgaatttgggaagttgcaaatcactgctagtaatgatcttaatgaggaaacattagatgctttaaacaaacagggtcatgaggttgatgcctttggaattggtacatatctggttacatgttacgctcaagctgctttaggtgttgttttcaagctggttgaaataaataatcaacctcgtatcaaactttctgaagatgtgtcaaaggtctctattccatgtaagaagcgatgctataggttgtatgggaaagaaggttatcccctggtagacataatgactggagaaaatgagccctctccaaaggtgggagaaagaatcctgtgccgtcatcccttccaagaatccaagagagcatatgtggtgccacagcgtgttgaggagcttctgaggtgttactggtctgggagtacagatattaagaaagatactttaccagctctaagagatattagagagcgatgcatcaatcaacttgagcaaatgcgacctgaccacatgaggaggcttaacccaactccatataaggttagtgttagtgcaaaattatacgacttcattcatttcctgtggctcaatgaggcaccagttggggagctacagtaaggcaaatgtgctggtggcgtgccttcagaacccaatggttttatatttagttttgttatggaagcggaaaaattggctttattagtttcatagttaggtgttggttgtactaatgcccctcctcacatgggtagtgcttacaccaccatcgccgccgatgccattgctcgcttccaggggcttcttcaggtgtatggtggaaatctaggatggtgctttattgaagaggcctattacaagctcctactggaggccctacttagcaaacaacaaggttctgcagaatataaggtgggaatggaactt

SEQ ID NO: 4831 - DNA, 575 bp, Glycine max
ggatgttataagacgtgtctcggtgaagtcaaggttggtctcttctggtctgttctgttcttctacgcagacacataacataacacaacgcacctcttcttcttcttctttcccttcaaatttcaacttcttcatccattttgtgctccaaacagcacaaacactgcaatcacaccgtcttcgctttctactcatctaaaagatagaggttcatgggttgctttggcttctgcaaaggagatgatagtgttacagttgctgacagaggacctttcatgcaaagcactcctactgggaaccccagttatcatggaagacacacagcagtaactgctcctcggactataaattttcaacctattgctgtcccttccatcacagtagatgaattgaagtctttgacagataattttggctcaaaatatttcattggtgagggtgcatatgggaaagtatatcaagccacattgaaaaatgggcgtgcagtggtaatcaaaaagttagattccagtaatcagccagagcatgaatttctttctcaggtctccatcgtatcaaggctaaagcatgaaaac

SEQ ID NO: 4832 - DNA, 529 bp, Glycine max
caatctagtcaaaatcttggaccgctttatcctacgccctcctccctacttatcctgcgcatatttcgccgttttctcgccgagatcttgaactatctcctccgtgttctcactttctcaactacacaatattcttattgaattccagcggaaagaatcatgagttgcttcggctgttgtgaggaagatgactaccagaagactgctgaaagtggaggacagcatgtggtaaaaaactcaacaggaaatgatggaaacagtcgtgcatccgaaactgcaaagcagggcactcaagctgtgaaaattcagcccattgaagttcctgaattaccagtggatgaactcaaagaaatcaccgatggctttggagaaagttctttgattggagagggatcctatggaagagtatattatggtgttcttaaaagtgggcaggctgcggcaatcaagaaattagatgccagtcaacagcctgatgacgaatttttagcccaggtttcaatggtttcacggctgaagcatgacaatt

SEQ ID NO: 4833 - DNA, 726 bp, Glycine max
tttcaatttcactcacaaacccaaaaccaactccttcctccttgccccttctcagatcgccggttccgttaagtcccaaaactcgaaccctagccctaaccctaaccataaccctaaccccagctattcgaattcccctcctcttcgcgcaatcatggcgacgtctttggtgagctccgcgggtgggatgctggcgatgctgaacgagccacatctctcgctgaagcttcacgctctctccaacctcaacaacttggtcgacaccttctggcccgagatctccaccagtctcccgaagatagagagtttgcatgaagatgaggagtttgatcaacatcaaaggcaacttgctgcacttcttgtatcaaaggtcttttattacttgggtgaacttaatgattcgttatcttatgcccttggagctggtcctctgtttgatgtctcagaggattctgactatgtgcacactcttcttgctaaagccatagatgaatatgccagccttaagtctaaggcagcagagtcaagtgatgaatctatcaaaatggacccaaggttggaagcaattgtggagaggccgtcggataagtgtatcgtggatgggaaataccaacaagctatgggaactgctattgaatgcaggagaatgcaaacagaagaaagcggaaagagtgtgtttgtcagttatggccaccaaacaggaattactgaagagcgaaatataat

SEQ ID NO: 4834 - DNA, 778 bp, Glycine max
cttttattacctgcgtgaacttaatgactcgttgacttatgcccttggagctggtcctctgtgggagggttcacaggattctgactatgtgcacactcttcttgctaaagccattgatgaatatgccagccttaagtctaaggcatcagagtcaagtgatgaatctatcacagtggacccacggttggaagcaattgtggagaggctgtcggataagtgtatcgtggatggaaaatcccaacaagctatgggaactgctaccgaatgcaggagattagataaactagaggaggcaattacaaggagtgacaatgttcaaggaactttatcatattgcatttacatctctcattcctttgtaaaccttagggagtacagacaggaggttctccgtctccttgttaaagtatttcaaaagcttccttcaccagattatctgagcatttgccaatgtcttatgttcttggatgagtcagagggtgttgcaagcatactagagaagcttttacattctgaaaacaaagatgatgcacttttggcatttcaaatagcttttgatctggtagagaatgagcaccaagcttttcttctaaatgttagagatcgccttgcaccacctaagtctcagccttcggaatctgcacagccaaaacccagtgagacagcctctactcaaaatgctagtgcgagcgggcaggatgatgttcaaatggctgatgatgattctgctcctatggtcaatgtgccagaggatccgattgaaaccatgtatgctgag

SEQ ID NO: 4835 - DNA, 592 bp, Glycine max
aaattaggttttccctttcttcttcttcttcttcttattaccctaaccctaaccttagctattcgaattccactcctcttcgcgaaatcatggcgacgactttggctacaccaaaactcagtgaggataaagtcaggcagtgtgttgatacaagactaggaggagaatacccacccaaagctgttgctaagtataaggtcagtctggccccggggagcgggtgtattgaggtaaatttacagctctgcctctgctccgaaagagcattctccaataacggtttcactccttctgtcgcaccgctgcagatataaagaaagattctttaccagctctaagagatatcagagagcgatgcatcaatcaacttgagcaaatgcgacctgaccacatgaggaggcttaacccaactccatataaggttagtgttagtgcaaaattatacgacttcattcatttcctgtggctcaatgaggcaccagttggggagtacagtaaggcaaataaaatggcggcgtgccttcagaacccaatgggtatggcaaaaaaaatgttcagttcacgggaaatttctccatacagtatttttttt

SEQ ID NO: 4836 - DNA, 423 bp, Glycine max
tgtcgtcctgctcggtctcgtcaaggttgttctgttcttctacgcagacacacacacaaacacataacataacgcccctccttctcttcttctttcccttcaaattctacttcttcatccattttgtgctccaaacagcacaaacactgcaatcacaccggtgttcttcgctttctactcttctaaaagtgacttaacagctcatattgaaacttacctacagaatagaggatcatgggttgctttggcttctgcaaaggagatgatagtgtcacagttgctgacagaggacctttcatgcaaagcactcctactgggaaccccagttatcatggaagacacgcagcagtaactgctcctcggactataaatgttcaacctattgctgtcccttcaattacagtagatgagttgaagcctttg

SEQ ID NO: 4837 - DNA, 536 bp, Glycine max
  unsure (1)..(536): unsure at all n locations
ccagactccacctgctcacctggatacgtgttttgctttcttttcaacaacaacacatgttttgctttttttccaaaacagcaacatgtcttctttttcttaaagcaccaaaacagctggtgccggagcaagccaaaagccatccctctaaattaggttttccctttcttcttcttcttcttcttattaccctaaccctaaccttagctattcgaattccactcctcttcgcgaaatcatggcgacgactttggtgagctccgcgggtgggatgcttgcgatgctggacacgctctctccaacctcaacaacttagttttttattatggtctattgtcgattctaaaatcctagctgatgaaactgatgacaacaattgatgtatattgtttcaggctacaccaaaactcagtgaggataaagtcaggcagtgtgttgatacaagactaggaggagaatacccacccaaagctgttgctaagtataaggtcagtctggccccgggggagcgggtgtattgaggtanatttacagct

SEQ ID NO: 4838 - DNA, 260 bp, Glycine max
taaagccaggctagtgttggtgcaaaattatacgacttcattcatttcctgtggctcaatgaggcaccagttggggagctacagtaaggcaaataaaatggcggtgtgccttcagaacccaatgggctacaccaaaactcagtgaggataaagtcaggcagtgtgctgatacccatttgcattttgtattctgggtcaatgctgtcatgttctctgcaaattagggcttcaatccgtgctccagagtgattgattctgtt

SEQ ID NO: 4839 - DNA, 908 bp, Glycine max
tcttactgcaagagaaagagaagagacaaggtctatggaaataatgttgagatccaagccatgtgtgaaatgtataatcgtccaattcacatatactcctacaccacagaacctatcaatatctttcatggaagctacaacactgacatgccaccaatacgattgagttatcatcatgggaatcattacaactcccttgttgatccacggcgcttgacaattggtgctgggcttgggttcagcagtcttcgtggaacaaatgttgacaaagatcaagtcaaggctgctattaaagctcaacaagacaaacagatcaataatgcactgttagccgagggtcggttttactctgatctcgagctcacagaaaaggaaattgaacgcatggtgattgaagtttctcgaggctgagtaccttgcagaatagtgcttttaagcaacagcttggcgacagagagtcctctacctcaaatgctgaaccatcatcttctggagcaacaggatcatcgggcactgatcgcaagacggaacatgggagagagcatggttctgatcttagtagcggtatgcagatgttactatcaatgggattcagttacatgcaagcgattgaggcttacagcatatttggggacgatgttgattcaatggtttgttacctgttagaaaccggcagtagcagcagacgtaaaggcaaggccactgaatgacatgccatcaagttaaataaatatctatatctatagtttttgaattgcaaccaaatcagttaaataaataaccctgtatcaagctacttactctgtagtttaatttggtatctggcatatttatgacggatatagaaagaaaaaactgagcaatgatacaattttatttggctaatgattgcaggtcattttatattc

SEQ ID NO: 4840 - DNA, 1050 bp, Glycine max
gaagagctatgaccgtccattccccccgtccgtaagccttcggaatttcggcttcgagggtccacaatattttaaataatggatgggtgccgggttctggggggcggctagcacacctttaactgccgtatatggttctacaaagtgtggccttaggcaacttcaaggatcactattaaaggagtgcaagcgatccaaagtaggtgtccatactgcatctcctggcatggttcttacagatctgcttttaagtggctcaacggtccaaaacaggcagatgtttaacatcatctgtgagcttcccgaaactgttgctagaacactagttccacgcatgcgggttgttaagggaacaggcaaagctatcaattacttgacccctcccagaatcttacttgctttgatcactgcttggttacggcgaggtcgctggtttgatgatcagggaagagcattatatgcagctgaagcagaccgacttcgtaattgggctgaagatcgagcccggttttctttcactgatgcaatggaaatgtacacagagaacacctggttatcagtcttctcactttcagttgtctgtgccttcataattctttccagcacaggcagcaatttgcctggaacatgacgatgtattgctgccaatgcaaaaatgcatttgcttttgtggacaggtaattggtgcctgaaatcatcaagacaatagaatgaatctaaagtctaagttataaacaaagtggatctgtttttttcccaccatgtccacctaaacaattatcatttgacacccttagctcagacatttggctccccatgtactatgtatataggctgccctgcaatcagcattcttcattaagatgcttatagtcatagtatgttactatgtatagccttcattgaattgtagactagtgaaatttcatattttctacccaatatatttatttgaatgtatatttatcagtgtgctaaaatctgaaatttatattggacattggacaacacacaacgcttttattaatgctatatacattttttttggtt

SEQ ID NO: 4841 - DNA, 1306 bp, Glycine max
ggaacagttttcagtcaccaaacattttttttccatgaactttgcatctttctatcatcacatccatggccacagttgtgaagctccacgttttcccagaaagtttgaaccaacacaaaacgaggttgctcaggagaggctttggctcatgcccttcacctggggtgcttggttttggccataaaaattatgatcagttctctgtgaaagtgtgcagggcttttaggactgaggatggtggggatgtgaaggagaaaaagtttcgaaatttgaagaaaaatgaagagaaaaccaaaagggaaagtgggttttggagttccctcaagtctatcttgctgaggaatttcatggtgggttcaaaatcagatgatgagtatcgccaagctgtggtcaaggtggagggtctcctatcctcgattgccattcaaattggaaggtatattgtgactatgatgagcactggggtcatcctttcaattggatttcagatgtcaggtggagacagtcagatggatgcattaatatggtatagttggctaggaggagtaatcattgggacaatgataggtgctaacatggtgttggaggaacattgtcgcgcaggtccacgtaatgttgtcataacggggagtacaaggggattgggcaaagccttagctcgcgagtttcttctttccggggatcgtgtgattgttacctctcgcagccccgagtctgtgcaagccactatcaaagagcttgaggaaaatctaaaggaaggcattgccaatgcagttggctcttctctgacaaagctttcacatgcaaaagttgtaggcattgcttgtgatgtttgtgaacctcatgatgtgcagagactggctaacttcgctgtcaaagaacttggtcatattgacatttggataaacaatgccggaacaaataaaggttttagaccattgcttcagtttagtgacgaagatattaaacagattgtctcaacaaatttggttggatctatcctctgcactcgagaagccatgcgtgttatgagaaaccaagccattgcaggtcacatatttaatatggatggtgcgggttctggaggctctagcacacctttgactgccgtatatggttctacaaagtgtggccttaggcaacttcaaggatcactattaaaggagtgcaagcgatccaaagtaggtgtccatactgcatctccaggcatggttcttacagatctgcttttaagtggctcaactgtccaaaacaggcagatgtttaacatcatctgtgagcttcccgaaactgttgctagaacact

SEQ ID NO: 4842 - DNA, 400 bp, Glycine max
caacaagccatctcaaattgaacagctttcagtcaccaaacaaacatttttccatgaaacttgcatctaccattcaattatcctatcacatccatggccacagttgtgaagcctcatgttgccccagaatgtttgaaccaacagaaaacgaggtcgctcaggaggaggatttggctcatgcccttcccctggggtgcttggttttggccattattgtgatcggttctctgtgaaagtgtgcagggcttttaggactgaggatggtggggatgtaaaggagaaaaagttacgaaatttgaagaaaaatgaagagaaaaccaaaagggaaagtgggttttggagttccctcaagtctatcttgttgaggaatttcatggtgggttcaaaatcagatgatgag

SEQ ID NO: 4843 - DNA, 769 bp, Glycine max
aaacaagacaacataaccccacatacccagaatccaatactcctcatttcctttacagcctcatgaaccatccactccttgccagagaaaaaaacccttttttcgtcatcatgatcttgaccaaagttggtgctgaaacagtacccttgttgaagttgaatcgctttcagatgtggctttgtagccaaagaaggtgagttctccaccagggtcaaaccatggaccagagaaagcctagcttggccaagattagaaagacgagaagaaacggaattcagaagctctagcaaactcaaggtgtagctcaggtactacccttcaatggaaaagatctccaatttactcattgggtagtcaatatccacaacaagctttgcaaaaagccttgttgatgaagggcaagaggccgaaacactttccaaaccatgttaaggacaggggggtctctgatccgggtttcaaatccgatgctagttggtcaattgatttggacatatgggatttaaatgcaagcagtgaggatgataactcctctggttgaaggtgtgtgatggcatggtggtgattctccagcttgaagtaatgttttgtaagtttctctatcaaaagtaccatttgttattggaagctaactagaagacagagatgcttcaaagctttaaaaagagggtgttgacaactaaaattcaaaggtgtgaaagtttggttgcgtaataatatatcaagtttctgccattaatttaatatatagattttgaggttttgtttc

SEQ ID NO: 4844 - DNA, 461 bp, Glycine max
ctcccatttactcattgggtagtcaatatccgcaacaagctttgcaaaagccttgttgattaagggcaagaggtcaaaacaccttccaaaccatgtcaaggacaaggtctctgatccaggtttcaaatccaatgctaattggtcaattgatttggacacataggatttaaacgcaagaagtgaagatgataactcctctggttgaggatgtgtaatggcatggtggcgattctccagcttgaagttgaagtaacgttttgcaagtttctctgtcaaaagtaccattagttattggaagctaactagaacacagcgatgatgatgcttcaaagctttaaaaatgggtggtgttgacaactaaaattcagaagaaatgtttcaaaaagtttccttgtgcacgctagactaaatgattatgttatcaagtttctgcggttattatattatatagataggacgaa

SEQ ID NO: 4845 - DNA, 977 bp, Glycine max
caaaccctaactctgggctccgccatttttcgtagctgctgttcctgcgcgtgaacaagcctcaggtaagccaaaaccatggttaagcataacaatgttatcccaaacggacacttccgtaagcactggcagaactatgtgaagacttggttcaatcagccagcacggaagacaaggagacgattggctcgtcagaagaaagctgtgaagatattccccagacctacggctggacctctcagacccattgtacatggtcaaactttgaaatacaacatgaaagtgagaggtggaaggggattttcccttgaagaactcaaggcagcagggattcccaaaaagcttgcaccaacaattggtattgctgttgatcatcgccgcaagaaccgttctttggaaagtctgcaagctaatgtgcagaggctgaaaacatacaaggccaaattggttgtgttcccaagacgggcacagaaggttaaggctggtgattctactcccgaggagcttgcaaatgcaacgcaagtccagggttctttcttgcctattgtgagggagaagccaactgttgaacttgtaaaggttacagatgacatgaaggcttttaaagcttattacaagcttcgacttgaacgcacaaacaaacgccattatggtgccagactgaagaaggctgccgaagctgagaaggaagacaaaaagtgatgaccttagaagtctctcgtttgtagtccatccatataatagttgttgcaagacaatttttgcacgagattgattagctctattcagaacatgttcggtctaaaacatggatattttcacccatttttattgtgaacttttattcaagtttgttggtttaactagcattttgttttgtctggattaatttggcagtattgtattgattttgttcagaggctgttttctaattgctgttggcatagttattaatttattagtgattatgggataaa

SEQ ID NO: 4846 - DNA, 573 bp, Glycine max
aatttagcaatttacccttaaagttgtagcaagaagttaattaataatgagtgcgaatgcagggttgatgttgggcggtgagacgatgggggagaacgagaaaggagagcgatggagcggagcgatgacaaatctgacggagatggcctccaatctcgactctctccagaagcttctcctcaccaaagccgtcttcgtcgacgacgacaccttctccaaagcctccctcgccgccgaccaggcccgcaccatcaagctcctccagcaacgagtccagaccttggagagagaggtcgacgccgccatcaccaccgccgcccgcgctcgctccgagaagcgccaggccgaggctgctcagaaatccgccgaatcgcgcgctcatcagctcaccgccgaactcgaaaacaccacaaaggtgtttgagttgcacatggaagagctgcgtgcgaagcaagaagagatcgagaagcgtgacgaggacattaaacttctggaagctataattcgaacgcttggaggaaaggaatcgctctctacgtctcagtagaaagaagtctttgttttgaagtgtgg

SEQ ID NO: 4847 - DNA, 381 bp, Glycine max
gcagatcaggatgcaatgagcacaactttgctagcagaatggaatgttttaaatgcagtgctcccagggacacgtactagaaaaaatgagtttatcctagcaagaaaggctacattaattaatggagatgctgcaagatttctttattaatttctttgggatgttgaagacagtgtgaattctgaaaaggtggtttaaaatcccatgttacagagaagctagccagctgcatcccttagggtctttctcagatttacctcaagagctacaacaatgttgttttggtgctttaaactactttctttagttttggcgttagagagttcatttattgtatggtgcgtggttttcttaaatgaatatgaatctcttttcttgtcg

SEQ ID NO: 4848 - DNA, 412 bp, Glycine max
ctccttcccttttttcatttccttttcgatttcaccatttgtttctgagacaccctttcttgaatcactgcaccctttttccctctctctcagaaaataaagtttttttttccaagtgaggatgttaaaatgaaaggaataatagcattgcacacgcttttgccatttcttctattttctgccattttaccactctctttctcagctcaaccccgcaacgcgcaagaagcccaaaaccccatattctgataataatcatcatcgcctttcctcctctgctgttttcaaacttcagggaaatgtgtaccctcttgggcattacacagtgtctctcaacattggctatccccccaagctttatgaccttgacattgactcgggtagtgaccttacttgggttcagtgtgatgca

SEQ ID NO: 4849 - DNA, 735 bp, Glycine max
caaagcttccatcttaagtgaactgaaaaatgaggctgattttcatttgggggccttattaaggaaaggtggacttgaaagtttggagagcattgtgaggataaaggaggcagaagccagaatgtttcaaaccaaggcagatgaagcaagaagagaggcagaagggttccagaggatgatcaggacgaagactgcgcagatggaagaagagtacgccgaaaagctttccaaactctgcttgcatgagaccgaggaaacgcagaggaagaaattggatgaactgaaagtcttggaaaattcctattttgattactataaaatgaaaaagagaatgcaagatgagattgatggtttattgcggagaatggaggcaacaaagcagcaatgggtttaattttatattttgggtgcttttccttaggttttcttattcaggatactgctaaatgtgtaagttattgagatgtaagtgttggtaatgaggtggttcccagaatggatgggtttcaatttgataaaaacaagttttttggtgtctcatctttgtttctttttccttcataaacggaggtatgaaagctttgcacttcctgtcactgtttatattacgacttatgagactataaaacctgtaaattttttcgttatcacatatcattgttgcacatagatttgcatcttcctttatgataacattttccctttaagaaattgaattgtccttttctctatttt

SEQ ID NO: 4850 - DNA, 1832 bp, Glycine max
ggtagtagtataaatgcatctagcagcaagtgttgaatacgagtagcgatggagaagaagaagggtgagctaaagtcaattttccttcctttcctttccactagtcacataatcccgctagtggacatggccagactcttcgccttgcacgacgtcgacgtcaccatcatcaccaccgcacataacgccaccgttttccaaaagtccatcgatttagatgcgagtcgcggtcgccccatcagaacgcacgttgtcaacttccccgccgcacaagtgggtctccccgttgggatcgaagccttcaacgtcgatacgcctcgggaaatgacccccagaatctacatgggcctatcccttctccaacaagtcttcgaaaaactcttccatgacttgcaaccggatttcatcgtcaccgacatgttccacccttggagtgtcgatgctgctgctaaactcggcattccgaggatcatgttccacggcgcaagttatctcgctcgctccgctgcgcactccgttgaacagtacgcaccccacttggaagcaaaattcgacaccgacaagttcgtgttacctgggttacccgataacttggagatgacgcgcttgcagttgccggattggcttaggtctccgaatcagtacactgaactgatgaggacgattaagcagtcagagaaaaagagttacggttcactttttaatagtttttatgacctcgagagtgcttactacgagcattacaagagcatcatgggaactaagagttggggaattggaccggtttcgttgtgggcgaaccaggatgctcaagataaagctgcacgagggtatgctaaagaagaagaagagaaagaagggtggcttaagtggctcaactccaaagcagagagctctgttttgtatgtgagttttgggagcatgaacaagttcccttactctcagctcgttgaaatagcacgtgcgcttgaagattcggggcatgattttatctgggtggtgaggaaaaacgatgggggtgaaggagataactttttggaggagtttgagaagagaatgaaggaaagtaacaaaggatatttaatatggggttgggccccacagttgttgatactggagaatcctgcgattggagggttggttactcactgtggttggaacacggtggtggaaagcgtgaacgcggggttgccgatggcgacgtggcctctgtttgcggagcattttttcaacgagaagctggtggtggatgtgttgaagattggggtgccggtgggggcgaaagagtggaggaactggaacgagtttgggagtgaggtggtgaaacgggaggagattggaaacgcgattgcttcgttgatgagtgaggaagaagaagatggaggaatgaggaagagagccaaggagctaagcgttgcggcgaagagtgctataaaggttggtggatcttcgcacaacaacatgaaggaattgattcgggagctcaaggagatcaagctttccaaggaggctcaagagaccgcacccaatccttaagactggttctgcttttccatcttttgaacaagagtaatgtattttgggacactcttattagtcttagcagtatcagtatcccagggaaatccatcattttctttttcttagtttcattgtttttgtaacttctagtactcaggatgtccatcatcattttcgtgagtatgtactacgaatctacgatcgtgttgacaacttagcgatttcctgacaatgcttttaataaaaatttagagttttattgtaaccattgccccaacaagtctcgatagaaaggaagatgtttgatgaat

SEQ ID NO: 4851 - DNA, 1277 bp, Glycine max
catcgagccgaatcggctcgagctgaggcctgtgcggtgctctgaggggccatagtttgggaccctttgaaccctaatctccacccaaacccattttcccgggaaattgccttggaaaagaaagagcgaagaggaaaatgcagaatcacaggctgaagcagcagcagcagcagcaacaacaagctcttatgcagcaagctcttctccaacaacagtctctctaccaccctggcctccttgctcctcctcagattgaaccatatccaagtggaaatttgcctcctggttttgatccaagtacttgccgcagtgtgtatgttgggaacatccatacacaggtaactgagccgcttttgcaagaagtttttgcgggtactggcccagttgaagcttgtaagcttatcagaaaggataagtcatcctatggattcattcattactttgatcgcagatctgctgctcttgccatattatctctcaatggaaggcatctatttgggcagcctatcaaagttaattgggcatatgctagtggtcagagagaggatacgtcaggtcactacaatatatttgttggcgatctaagtcctgaggttactgatgctacgttgtttgcatgcttttctgtctatcccacttgttcagatgcaagggttatgtgggatcagaagactgggcgttcaaggggatttggatttgtttcattccgtaaccaacaggatgcacaaagctctataaatgatttgactggtaagtggcttggaagtagacagatacgttgtaactgggcaacaaaaggtgctggtggtaatgaagagaagcaaaactcagatgcaaaaagtgtggtggaacttacaaatggctcatctgaagatggtaaagagacatctaacagtgatgctcctgagaacaatcctcagtatactactgtttatgtgggtaaccttgctccagaggtaactcaacttgatctccatcgccacttccatgctcttggggctggagtgatggaggaggttcgggtccagcgtgataaagggtttggttttgtgaggtacagtactcatgctgaagcagctctggctattcagatggggaacgcccagtctcttctatgtggaaaaccaattaagtgctcttgggggagcaagcccactccagccggaactgcttcaaatccccttcccccacctgctgctgcatctttgcctggcctctctgcaactgatcttttggcgtatgagcgacagctagcaattagcaagatgggtggcgtc

SEQ ID NO: 4852 - DNA, 447 bp, Glycine max
tttcgattggggattattggaggagtgacagtgtggaaggtcttctcttgtcttgctcgcgatcggagactttgaaaccctcccttccttctcctttcacctattcatcccaagcattcgacaatgtctccgttctcgaagctcttgtttctgatactgatggtgttcgtctcatccgcgatcgcctccgacgacgaaagagtgagcgaattggtgtccctgcaatcgagatccaaatcgggcctaatccggctgaacgaccaatccctggcccgcttcctcaccgccgtgaaaacccctcgcccttactccatcctcctcttcttcgacgcggcgcagctccacgacaagccggagctccgcctcacggagctccgcaacgaattctccatcgtctcctcctccttcctggccaacaacaaccctcccaacaccaacaagctcttc

SEQ ID NO: 4853 - DNA, 382 bp, Glycine max
aggaggagtgacattgtggaagaaagactgaaggtgttcgcgatcggagactttgaaaccctcctttcacccattcatcccaagcattcaacaatgtctccgttatcgaagctctcgttgctgatactgatggtgttcatctcctccgcgatggcctcctccgacgagagagtgagcgaattgctctccctgcaatccagatccaaatcgggcgtaatccggctgaacgaccaatccctcgcccgcttcctcacctccgtgaaaacccctcgcccttactccatcctccttttctttgacgccgcacagctccacgacaagccggagctccgcctcacggagctccgcagggaattctccatcgtctcctcctccttcctcg

SEQ ID NO: 4854 - DNA, 969 bp, Glycine max
ggagtgagtgagggcattgttgtttaggtaaagacaaatggcatcatctcagtcgaggaagagagttgacgccgtcgattctcgcgctgcttccgttctcgttcgcgccaaagatggcagtgcttttgctcgttgcgacgattgcaagaagaatgtgccggttgcactcatcgacatgcacagttgcagccttgaagctaaaattaaaatgaacctagacgctcaagttgtggaacaggctgctgaagctaagaagccagagaggaagaagcccaaatctaaagagcctatggcaaaaaaagctaaagttgggaaggggaagaaagtcaaggatcctaacatgcctaagcgtcctcccacagctttctttgtcttcttggatgattttagaaaatctttcaaagaagctaatcctgattctaaggatgttaaaagggttggtaaagaggctggtgaaaagtggaggtctatgactgatgaagagaagaagccatatcttgacaaagttgctgagcttaaggaagagtacgagaaggctatggaaagctatgaagctggtccagatgaagaagatcaaactgtgtctgataaggaaacttctgataaggaagctgctgcaaaagaagttgcaatagaagttgaagaggagctaactgacgaggactaatggttgcattatggcactccttgagcttgatagctagtattctaagggccacataattacttaacgactagggttgtaaattttggaacatgttttagttggagttaaaaactgttgaaatccatgcgcaatatcttttcattttttgtaatgctctcttgtgatgttcgtgaatggtagtcacattgttttctccaagaggcttgttggtctctttaaggattgattattgcttgcatatgtttgagcctttgaggcaattggtaaatagtctgatggctacagcgatattcattggattg

SEQ ID NO: 4855 - DNA, 730 bp, Glycine max
gtttggtgtttagtgggtacccttgccttcataggaagtgagaaactaggctagttagtcccattggaattttttttttttgtggctgaagaaggtgaaaagggggcaagtttcactcttcaaggagtttgaagggtgtcaacttgtgttttgagactctgaggttgaagctgcattttttttaagggtggggatgggttctagttgtggttgtggtgtgacacttgttcttgttttctgcttatggggtgtgttgatctccctatcttctgctgctaggctcagtgcttcaaggcagaagcttgaggttgctaagcatttgaatcgcttgaacaagcctcctgttaagaccattcagagtccagatggggatacaatagactgtgtgcctatttcgaagcagcctgcatttgaccatcctttcctcaaagatcacaagattcagacaaggcctagtttccaccctgaagggctttttgaagagaacaagttatctgaaaagcctgatgcaaaagcacatacccccatcactcagctgtggcatacaaatggtagatgccctgaggacacaatacctgtcaggagaaccaaggaggaggatgttctgagagcaagttcagtgaaacgctatggtaggaagaagcacagagcaatccctaagcctaggtctgcagaacctgatctaattaaccaaagtggtcatcagcatgcaatagcatatgttgaagga

SEQ ID NO: 4856 - DNA, 696 bp, Glycine max
ttgtggttagagagagagaaaagagagttttgaggagggagggaataaaacaaaagagggtaagcttagtgtggctgtttagtgggtacccttgttgccttcataggaagtgagaaactaggctagtgagtcccattggaattttttttttgtggctgaagaaggtgaaaagggggcaagtttcactcttgaagggttttgaggggtgtcaacttgtgtttggagactccgaggttgagtttgaaggtgcattctttgaagggtgtttttgttatgggttctagttgtggttgtggtgtaactcttgttcttgttttctgcttatggggtgtgttgatctccctctcttctgctgctaggctcagtgcttcaaggcagaagcttgaggttactaagcatttgaatcgcctgaacaagcctcctgttaagaccattcagagtccagatggggatacaatagactgtgtacctgtttcgaagcagcctgcatttgaccatcctttcctcaaagatcacaagattcagaccagacctactttccaccctgatgggctttttgaagagaacaagttatctgaaaagcctaaagcaaaagcacatacccccatcactcagctgtggcatacaaatggtagatgccctgaggacacaatacctgtcaggagaaaccaaggaggagatgttctgagagcaagt

SEQ ID NO: 4857 - DNA, 1206 bp, Glycine max
cccacgcgtccgcccacgcgtccgcattcttcaaatacctaatatggagtttcacattcttcccatcattacttttctcatgcttgttgtggcaactaatgctgatgctgcattacctcctgcattttactggaagtccaagcttcctaccacaccaatgccgaaagccatcactgatttgctacaacctgattggaaggaagagaaagacacctctgtggatgtagggaaaggtggagtaaatgttggtgtagaaaagggaaaccaaggaccaggagatggcactgatgttaatgttggtggtggagacggtggaatgaatgtgcacacaggaccaaagggtaagccagttcacgttggagtgggcccacattctccatttgattacaactatgcagccagcgagacccaattgcatgatgaccccaacgtggcactcttcttcttggaaaaggacttgcactacggaacaaagttgaaccttcacttcactcgctacttcacctcaagtgttgatgcctcgttcttgcctcgatcagttgctgattccatacccttttcttcaaacaaggtgaatgaagtgttaaacaagttctccatcaaggaagggtcagatgaggctcaaactgtgaagaacaccatcagtgagtgtgaagtgcctggcattaagggagaggaaaagcgttgcgtgacttcacttgagtccatggttgatttcgccactaccaagctcgggagcaacgatgttgatgctgtttccacagaagtgacaaaaaaagataatgagttacaacagtatacaatggcaccaggggttaagaggttgggtgaggacaaggctagtgttgtgtgtcacaaggagaattacccttatgcagtgttttattgccacaaatcagaaaccacaaaagcctattctgtcccattggagggtgctgatggaagcagggtcaaagcagttgcagtgtgccatactgacacatcaaagtggaatcccaagcatttggcgtttcaagtgcttaaggttcatccaggaactgttcctatctgccacttcctgcctcaggatcatgttgtctttgttcccaagtagaaatgtttgttccgtcccaaaataattattatagctcatgcttcataccttgattttataataacacttcatatatgtcaacatagttggatctagcaacaatattgtatgtt

SEQ ID NO: 4858 - DNA, 507 bp, Glycine max
agacgacagaaggggattcctatctcaagtctcacttttttcagcttctctaaattctctgtctacttcaccaagcacttttggttgcagctttggttaatttccaatatggtgtttcctctcctatctatctttgctttactcaatcttgcagtggtggcaacccatgcagaaaccttgccccctgaagtttactggaagtcgaagcttcccaccactccaatgccgaaagccattacagatatccttcacccagatttggcagaagacaaaagcacctctgtggccgtaggaaaggggggcgtaaacgttaacgcagggaaaacaaagccaggaggcacatcagtgaacgtaggaaaaggaggagtgaacgtgaacacagggaaaggaaagcccaacaaaggcacatcagtgaacgtaggcaaaggtggagtgaacgtaaacacaggaccaaagaagggtaagccagtgcacgttggagtgggcccacattctccatttgattac

SEQ ID NO: 4859 - DNA, 1552 bp, Glycine max
  unsure (1)..(1552): unsure at all n locations
tctttccatccatccatccatcggtttgcaacttcatcccatccacaccgtgtctttactcttgttcttgttgcagcttggtggttgcattgaatcggagagggtaggtaggtgggaagacgtgtcttgttttgtagctttccccttcgctctctctctctttcccggcgcatgtgccggattagacgccaactgcttccataattcacctcctccaaccaaccaacacaagatttccctctggattggatggaggaagcatgtgaatttcgaagttgggctgaattgattcctgatgcgctcggggtaatcttcaccaatctttctcttcaggagagggtaacagtgatccccagggtgtgcaaatcatgggctaatgcagtaactggaccttactgctggcaagagatagacatcaaggattggagcaaccgatgccagcccgaccaactcgatcggctacttgagatgcttatcacaagaagttgtggaaccctccgcaaactcagtgtttctggcctccaaactgagagcatcttcactttcattgctgaaaatgcctgttccctccatacattgcgactgccaaggagcagtatgaatgattccattgtggaacagattgctgggaggctttctatgatttctttcttggatgtgagctactgtattaaaattggtccctatgcgcttgagatgattggcaagaactgcaagcttctagaagggttgtgtcgaaacatgcacccattggatactgcggagaagccgcatcaagacgatgaagcatatgcaattgcctccacaatgcctaagctcaagcatcttgaaatggcttatcatcttatcagcacttcgggtgtccttcaaatacttgcaaactgccctaagcttgaatttttggatcaaagggggtgttggggtgtgacacttgaccacatgtttttaaagcagaaatttccaaaactgaaggttttggggcctttggttcttgacacttatgagagtgatggctgggatgatttctcagatgtgtctgattcatcagagtacttggcctgggactttgtggctggtggcatgggagaatactatgttgatgatagtgatagttacgatggaatgtgggatgatgaagcgaggctagatgagcttcagttcgggttttatgaagggatagaagatgcaggaatgtattggcctccatctccataagaagctatagctgctgcatgcattacttgtgatcaattgtatgcttttctactcttgtaactaatgcttcttctactttacttttatgtgctctctttgaatgatgtgtttttttttccttcaagtaatgttgggcttgctctgcctagcatatgcataaccgagtgagattgttattgaccttaccttagatttcttacttaagtaggaaaaggaagggaaagagaaagctcccttgtttctacatgttagaagttcgacatgttgtaattggaacatctggcttatgaccatgttgtaccttcttgaaaaatatctgtttgatgaggttgtcnaa

SEQ ID NO: 4860 - DNA, 463 bp, Glycine max
aacagaagtactttggctcttttcagtctctctctactctacacaacactacacggactttgtacctttctttttctttgcttgctattgctattctgcactgtgtctttactcttgttcttgttgctgcagctggtggttgcattgaatcggaggggtaagtgggaagacgtgtcttgttttgtagctttcccttccctctctcttttccccgccgcatgtgccggattagacgcgaactgcttccataattcacctcctccaatcaaccatcacaagatttcccactgattggatggaagaagcatgtgaatttcgaagttgggctgaattgattcctgatgccctgggggtaatcttcaccaatctttctcttcaggagagggtaacagtgatccccagggtgtgcaaatcatgggctaatgcagtaactggaccttactgctggcaagagatagacatc

SEQ ID NO: 4861 - DNA, 491 bp, Glycine max
tgtttgagtattgcagtaagaaagcattgatattttatctttgcttgtgctctctttttcgtgtccatacgcaaatactgatccttttttgcttgaaaggactctatatccatccatcggattgcaacttcatcccatccagaacagaacagaacagaactggtggttgcattgaatcggaggggtaagtgggaagacgtgtcttgttttgtagctttcccttccctctctcttttccccgccgcatgtgccggattagacgcgaactgcttccataattcacctcctccaatcaaccatcacaagatttcccactgattggatggaagaagcatgtgaatttcgaagttgggctgaattgattcctgatgccctgggggtaatcttcaccaatctttctcttcaggagagggtaacagtgatccccagggtgtgcaaatcatgggctaatgcagtaactggaccttactgctggcaagagatagacatca

SEQ ID NO: 4862 - DNA, 289 bp, Glycine max
cttgaaaggactccatccggcccgccatcggtttgcaacttcatcccatccatccagaaacagatcttggtggttgcattgaatcggagagggtaggtaggtgggaagacgtgtcttgttttgtagctttccccttcgctctctctctctttcccggcgcatgtgccggattagacgccaactgcttccataattcacctcctccaaccaaccaacacaagatttccctctggattggatggaggaagcatgtgaatttcgaagttgggctgaattgattactgatgcg

SEQ ID NO: 4863 - DNA, 757 bp, Glycine max
ttcgaccgattcggctcgagatttcacacccaccttttattctctctctctctctcctatttcttcctctttacttctacactaaatatatcactttccccaccccccatttctttgttgccagttcaggaaaacaaataaagttctcctttgaaacttctctgggctatgttattttgaaagaagttacttcgcatcaataatgggttcaggtgattggtttaagacaataattagcttaagaaaatcaaaagaaggcagatcaaagaaagcaaagggtatcttagctcaagagaaactaaatgcatcaaagtcaaacagctatccaggaaaagagtctggtggtttagcaaatggtactaaaagtgaaaaccttgtgtcagctggggtgtcagttgaaactattgctgcaacaaggatccagactgcattccgagcttataaggctagaaaagctttacgtcgcatgaaaggatttacaaaactgaagatcctaacagaaggtttctctgttaaaaagcaagccagtacagctataacataccttcattcatggagcaagatacaagttgagattagagctcgccgaatctgtatggtaaccgaagaccagatcagggggaagaaaccggagtctcaattaaaactggaggcaaagcttcatgatccggaggttgacatggggtggtggttctgaaaccaaggaggaaatccttggaaggatacatgacagggaagaagcagcagttaagcgtga

SEQ ID NO: 4864 - DNA, 668 bp, Glycine max
ccgttctctctgtattcatatttccttcctctttacttctatgctgatattattgtcccccacttccttttttttcatccagaaatcttgttgcccaagtgagggaaaaagggttgccttggacacttctcaccttgttttctgagttatgttaatttgaaagaagctacgtggcatcaagaatgggttcaggtgattggtttaagacaataattagctcaagaaaatcaaaagaaggaagatcaaagaaattaaagactaagatttatacaagaaaaaagtccaatggtttagcaaatggaatgaaaagcgaaaatctagagtcagatggggtatcagttgaaactattgctgcaacaaggatccaaacagcattccgagcttataaggctagaaaatatttacaccgcttgagaggattcacaaaactgaagatccagactcaaggttcctctgctaaaaaacaagccgttaccactataacttatcttcattcatggagcaagatacaggctgagattagagctcgccgtatctgtatggtaaccgaagacaagatcaggaggaagaaactggagtctcaattaaaactggaggcaaagcttcatgatctggaggtaatctttagcttgccctaattttctttaagtttgtgtaagtcttaaatt

SEQ ID NO: 4865 - DNA, 429 bp, Glycine max
cccacgcgtgcgcatggagcaagatacaggctgagattagagctcgtcgtatatgtatggtgacagaagacagaatctggcggaagataatacattctcaactacaacttgaggccaagattcatgacctggaggtaacttgtaaagctaacaggttttcagtgatggtattctggactttttcttttcgaactgatgccagtttgctaatcactctttctactacaatgattatgtgtggtttcattggtttctctgttttaaatatgcatttgtgtcattatttcaaatttctatgtctctctaggtgattagttaatgcatataactattgaaacggtgtcatgggatgggtctaccatatgagtcaactgcacttctgaggtctaatatcctatagattgacgtttagacattggaagcatgcgc

SEQ ID NO: 4866 - DNA, 467 bp, Glycine max
cggctcgagcccaagtgaagaaaaaagggttgccttggacacttctcaccttgttttctggatttgctatgtgacgtagtttagggacaagggaagggcagaagagattgagggaaagggagactgaaagtgggagaaataaaggaatggaggacgactaaaatgagaagaaagaaacagaaaatttcaaaattatttcaagcatcaattcaagtctaaatccaaaacttactaaatagccatccttgaattgagttaacatacgacaaaacatgctaatctgagagaagctacggcgcatcaagaatgggtgctggtgattggtttaagacgatatattagctcaagaaaatcaaaacaaggtagatcaaagaaagcaaaggggatcttagctcaagatagactacatgtatctcagtcaaacagctatccaggagaagagtctggtggtttagcacatggtacta

SEQ ID NO: 4867 - DNA, 1018 bp, Glycine max
ctcgagccgtaaaaataccgggatcaccgtaacgagtgactcttcttccttcttcttctacttcttttgtttctttttttttctgcgtaggcaaagagagagagagaaaagcgtgaatcatgtcggacgaagagcatcacttcgattctcaggcggatgcgggagcgtccaagacgtatcctcagcaggctggtaccattcgcaagaatggctacatcgtcatcaaatccaggccttgcaaggttgtagaggtctctacgtcaaagacaggcaagcatggacatgcaaagtgtcactttgttgcaattgatatttttaatgggaaaaagcttgaagatattgttccatcatcccacaactgtgatgttccacatgtgaatcgcactgactatcagcttattgatatctctgaagacggctttgtgagtctgttgactgataatggaaataccaaggatgatctgaagcttcctactgatgaggcattgcttgctcagattaaagatggattttctgaaggaaaagatcttgtggtttctgttatgtctgcaatgggagaagaacagatctgttcactgaaggacatcggtcccaaaaattaatatgatgctatggctgtagctatagctgatagcacgctttttcttcttatgttgctaacaggtagtatattctccgatacatgtgtgcaaaataaacttcataagatggaaatttgcctgtgcttgaaactcaaatgcttgggatagaagaaattgagctaagtttagcttttgtccattaattaaggaacacaacggtcttgggtggatgaaattctcataaacatctcatattatttgtttttgttgagtttaatatataaccctatttgttctctgcactgaataatactgtactgaatttctgaaacacgtggttaaccggatattgcccaaagatttgatatgatgaatttagccatcttaatttgggatcccatggtaaaattttacggctttaactataatatgaggtg

SEQ ID NO: 4868 - DNA, 331 bp, Glycine max
gggattgatggctattgttgcagaggataatgcagatcccaacggaacaaatcttgagcttacattcctctgcctgacgtcactgacgatatgtgatttgccagagttaaagtgtttttttgcagtgtgacctgttgaagacattttcacatgtagaaccaaatactaaaaatcaaatctgtattgaaaagcttacacccagtgcgcggcgccgcacattgggtgtaagcttttcaatacagatttgcagcacctgacactcggtgaaaatgaactgaagatgattccgcatggagaatttccaggaaacgtcttgcacaatttaaaagct

SEQ ID NO: 4869 - DNA, 743 bp, Glycine max
cgataaatccatgagagttttgccgtggaaccagttccatttgggccaagaatctgaccacgagctccagctggcttccagaaagaaccgtgtctccagcgggtgtgctttctttgtatgctttggtcgtgtctctgcagggtttgacactacatctcatcttaaagtgggccctgccaaacatcatgatgtctcttcagggacactggtttccaacaagggcaagtacccttctgctaatgtaaatgatgatagtagaaaggttgcacttaaaagttgcttaaaaaggaaacaaaacaaaaaaccagctcctgttgaggctgctactgaacatgaggcatcatccggtggaaagaggaaagtgcagtggacagatacttgtggtagtgagcttgttgaaatacgggaatttgagcccagcgacgcggatgggtcagttgatgaattcgaccatgggaatcacaaaacttgttcctgtgctattatgtaaattggcattccaaaagatgacagagtcacagacccatttatgaggtatcaagtcgttgattgctaacatattccaccactcagcttgaggaaaaggagcagatatttttcagtctagtggagatttatacacctcttttgcctgagcaatcatttgtgtctataaatgcttgctgtggccttcaaattttgtgcctctgctttcatcaattgttggataatcttttgtcgtgtgaattcatttggcttttaat

SEQ ID NO: 4870 - DNA, 595 bp, Glycine max
  unsure (1)..(595): unsure at all n locations
cagacatacctacgtgggttcggtcagtgcgcgaagaagagaccgagtccggggatgatcctgcctcaggcaatgaagtatctgaagagaagcttcaggctcttttgaacattgcaatggcatgtgtttcactagtaccagagaacaggcctacaatgagagaggttttaaagatgattagagatgcaagaggggaggctcatgtctcatctaacagtagtgatcactcccctggtagatggtcagatactgttcaaagctttccaagggaagaacaccagagcatatgattggtaactttttgacagcttattagttgaaactatgcattctgatttttcctgaattggttattgatacgattcatgcataaactaggtgatacgtgaggacctacatttttaatctctagctgtgtgagtaaatgcattttaaacgggtaattaaggattcttttatagagtcatcacaggttgcaaagagtgggagatcatcagttcctgctttgtcttgtattttctttttaaaataaaacacccattccaaataaaaacatggggttcagattnnnnnnnnnnnnnnnnnnnnnnnnnnn

SEQ ID NO: 4871 - DNA, 478 bp, Glycine max
gtttttcaccgattgggtcaacccgacggatcttgattcagtttccgaatttgggtcgggttgccaaacccaagggatggtgaattatgattgtaatgacttatttgtcccttctgtgccgcccttcggccacagccatgtaaactacatggtgggggcaccaccgtccgaggaggaggttcaaagcggtgtgaggactcaacaggccgatggggccgcatgttttcagcagaacccaaatgcccgattgttaccgggctcgggcgacccatttgggtttgggttcatcatgggtcagcaagttgagttcgggtttagggactgaacgatctgatagtgttgttctgtaaataattggggattttaatttaaattctatgctcattgttatggaaaattgcaattttggtcattcttttcggctagacacatacaatgaatcggtatgaaactgagcaaggatgacccaatggtgctt

SEQ ID NO: 4872 - DNA, 442 bp, Glycine max
caagtaaccctatactgttacagcattatggcaccatagctcaattctatatagagcattggtgacacccttctgcgcgcgatacagaacagaaaaaccatggtgtcaccaatctcacttattgtcctcttgttatcagtttctttagcagattcagcttcagttcaagaaagttttgtccaatgtctcaacttgaattcggacaaaacatttccattttactcatcaatctacactgcaagcaacccttcattcaccagcatccttgactcctccgcacagaacctaaggcttttggtgccttcagtgccaaaacccgagttcatattcacaccctctcgtgattcccatgttcaagcagcagtaatctgctccaagaaacttgggattcacattagagtgcgaagtggcggccatgactatgagggaatttcgtacgtct

SEQ ID NO: 4873 - DNA, 982 bp, Glycine max
tagggggacgtgggggttcttcacttctcttcttcaattcattctagttctggattccgactcgccgcattgactcggtccgggttggggtcgactcagttcggtttttcattctctcgcgaatctaatctataggaaaagctaagggcacatcacaatgaaggcattgattctggttggggggtttggaacaaggctgaggccactgacactcagttttcctaagcctcttgttgattttgctaacaaacctatgattctgcatcagatagaggcccttaaggccattggagttactgaggtggtgctagccatcaactaccaaccagaggttatgttgaatttcttgaaggattttgaaacaaagctcggcatcaagatcacatgttctcaggaaactgaaccattgggaacagcaggtcctctggctcttgccagggataagctgatagatgactctggagaacccttttttgttctcaacagtgatgttatcagtgagtatccactcaaagaaatgattgaattccataaaaaccatggaggagaggcttccataatggtaaccaaggttgacgagccatcaaagtacggcgtggttgtgatggaagagagcacagggcaggttgataaatttgttgaaaaaccgaaattgtttgttggtaacaaaatcaatgctggaatttacctgctgaacccctctgttttggatcgaattgaactgaggcccacttctatcgagaaagaggtgtttccaaagattgctgcagagaaaaagctatatgcaatggtcctgccaggattttggatggacattggacaaccgagggattatattgctggcctgaggctttacctggactcattgaggaagaagtcatcttctaagttggccagtggctctcaaattgtagggaatgtcattgtggatgagacagccaaaattggcgagggatgcctcattggacctgatgtttctatt

SEQ ID NO: 4874 - DNA, 483 bp, Glycine max
gggtgcgtgcgggttattatatataggggaagatcaacgggacgtatgtggcaggtgtgggttcttcaattcattctagttctggattccgactagccgcgttgactcggttccgtttttcattctcgcggatctaatattaaggaatagcttaagggcacattacaatgaaggcattgattctggttgggggatttggaacaaggctgaggccactgacactcagtttccctaagcctcttgttgattttgctaacaagcctatgattttgcatcagatagaagcccttaaggccattggagtgactgaggtagtgctagccatcaattaccaaccagaggttatgttgaatttcttgaaggattttgaatcaaagctcggcatcaagatcacatgttctcaggaaactgaaccactgggaacagcaggtcccctggctcttgctagggataagctgatagatgattctggagaaccctttt

SEQ ID NO: 4875 - DNA, 445 bp, Glycine max
taacacctcacgactggagaccgttgggttgttcttcgagaccctctctgactcgcctggttgactcgctcgagtttaggggtttctgattcgcccgcggacggatctcaattttgtctcagttaccatctttagctgcattcgtgtcacactcctttgaacacccgtcacctcaggaaaagcaaagggcatcatatcaccatgaaggcactaattcttgttggagggtttggaacaaggttgaggccattgacactcagtgttcccaagcctcttgttgattttgctaacaagcccatgattcttcatcagatagaggctctcaaggccattggcgtcaatgaagtggtgctagctatcaattaccaaccagaggtcatgttgaatttcttgaaagagtttgagacaaagcttggtatcaaaatcacttgttctcaagaaactg

SEQ ID NO: 4876 - DNA, 426 bp, Glycine max
cgagcggtggccaacaccatcgtaacacctcacgtactggaccgttgggttgttcttcgagaccctctctgactcgccgggttgactcgctcgagtttgggggtttctgattcacccggggacggatctcaattttgtctcaggaaaagcaaagggcatcatattactatgaaggcactaattcttgttggagggtttggaacaaggttgaggccattgacactcagtgttcccaagcctcttgttgattttgctaacaagcccatgattctgcatcagatagaagctctcaaggccattggcgtcaatgaagtggtactagctatcaattaccaaccagaggtcatgttgaatttcttgaaggagtttgaggcaaaacttggtatcaaaatcacttgttcttaagaaactgaaccgctaggtact

SEQ ID NO: 4877 - DNA, 415 bp, Glycine max
ctcacgtactggaccgttgggttgttcttcgagaccctctctgactcgccgggttgactcgctcgagtttgggggtttctgattcacccggggacggatctcaattttgtctcagttaacagggtcttacatcttaagcttctttgacagactgttctttctaatttaagttaccatctttagctgcattcgtgtcacgctcctttgaatgcccgtcacctcaggaaaagcaaagggcatcatattactatgaaggcactaattcttgttggagggtttggaacaaggttgaggccattgacactcagtgttcccaagcctcttgttgattttgctaacaagcccatgattctgcatcagatagaagctctcaaggccattggcgtcaatgaagtggtactagctatcaattacc

SEQ ID NO: 4878 - DNA, 322 bp, Glycine max
gtaacacctcacgtactggaccgttgggttgttcttcgagaccctctctgactcgccgggttgactcgctcgagtttgggggtttctgattcacccggggacggatctcaattttgtctcagactgttctttctaatttaagttaccatctttagctgcattcgtgtcacgctcctttgaatgcccgtcacctcaggaaaagcaaagggcatcatattactatgaaggcactaattcttgttggagggtttggaacaaggttgaggccattgacactcagtgttcccaagcctcttgttgattttgctaacaagcccatgat

SEQ ID NO: 4879 - DNA, 844 bp, Glycine max
ctcatctcatcagtgcaatcaatccgtagcatatattcattctctcatagttataaataatcctcccgaatcgaggtgtcggttttgaaaagagttaacaatctcttctcttcgcttcgctcctgcacttgttgtttctttgcccttcatggcatctcaggctagccttctccttcaaaagcagctcaaagatctttgcaaaaaccccgtcgacggcttctctgccggtttggtcgatgaaaccaacatttttgaatggagtgtcaccataattgggccgcccgatactctctacgaggggggatttttcaatgctattatgagtttcccatccaattacccaaatagtccaccttcagtgaagttcacctcagagatatggcaccccaatgtatatcctgatggccgggtttgcatatcaattcttcatcctcctggtgaggatccaaatggttatgagcttgcaagtgagcgctggacacctgttcatacggtagagagtatagtattgagtatcatatcgatgctttctagtcctaatgatgaatctcctgcaaatgttgaagctgcgaaggagtggagagataggagagatgaattcaagaagaaggttagccgatgtgtgcggaagtcacaagaaatgttgtgatttacagcttggattctcatcttccttttgtgaacagaaggatatacaacttaatgtgtggattggttcacctgtcactgttgaacccagtatagcgccatttgtcttgcaacaaccatctgtattataagtgcttggtcagtgtttggtttctagttaaattccccccttagttgttcatttgcatgaccttat

SEQ ID NO: 4880 - DNA, 612 bp, Glycine max
gacgtttgttacaaaatcctttcacataccataccatactataaatacaattcaactccccgtccgcttttccacttttctcttctctctctgctctccttcctatttctcaatcgaacaacacagcacaatccttaaactctctctctctctctctctctcttcaatttcgttgatggcgtcacaagcaagcctcctccttcagaagcagctcaaagatctttgcaagaaccccgtcgatggcttttccgccggtttggtcgacgaaaccaacatttttgaatggagtgtgactataattggacctcccgatactctttagtaagttctcttcactaaatatctctttctttcacactaatttatgcgattttgatttgattattgggattttggattccccttgtttgtgcagtgatgatctcgttgcttctttgttctggggttttgggttcccccctaaaaatcacgtttttaattatacttatcggggggttcttcagagctttatgttatttttctttttgaacagatggggtggtttctttttctgccctgataccgtggaatcattaaggtgtttcttttttatattttttgagagtctttctg

SEQ ID NO: 4881 - DNA, 768 bp, Glycine max
ctcttctatctctgcttcttcgcaatctcagaacagaacacaacagagcccttcaactctctctgtcgttgatggcgtcacaagcgagcctccttcttcagaagcagctcaaagatctttgcaaaaaccccgtcgatggcttttctgccggtttggtcgacgaaaccaacatttttgaatggagtgtaactataattggacctcccgatactctttatgaggggggatttttcaatgccattatgagctttccacccaactacccaaatagtccgccatcagtgaaatttacctcagagttatggcatcccaatgtgtaccccgatgggcgagtttgcatatcaattcttcatccacccggtgatgacccaaatggttatgagcttgcaagtgagcgctggacgcctgttcatacagtagagagtatagtattaagtatcatatcgatgctttctagtcctaatgatgaatctccagcaaatgttgaagctgcgaaggagtggagggataggagagatgaattcaagaagaaggttagccgatgtgtgcggaagtcacaagaaatgttgtgatttacagcttggattctcatcttccttttgtgaacagaaggatatacaacttaatgtgtggattggttcacctgttactgttgaaccgagtatagtgccatttgtcttggaaaaaccaactgtattctaagtgcttggcacttctttacctgtatatggctgttttccctagcgcttcagtatttgtttacttgga

SEQ ID NO: 4882 - DNA, 384 bp, Glycine max
ccttcctatttctcaatcgaacaacacagcacaatccttaaactctctctctctctctctctctcttcaatttcgttgatggcgtcacaagcaagcctcctccttcagaagcagctcaaagatctttgcaagaaccccgtcgatggcttttccgccggtttggtcgacgaaaccaacatttttgaatggagtgtgactataattggacctcccgatactctttatgaggggggatttttcaatgccattatgagctttccacccaactacccatctagtccaccatcagtgaaatttacctcagagttatggcatcccaatgtgtatcctgatgggcgagtttgcatatcaattcttcatcctcctggtgacgacccaaatggt

SEQ ID NO: 4883 - DNA, 309 bp, Glycine max
ggatgctttcccaaattactgtttactattgggattgatctaggttgggttcgcttgattacaccagaaaatgttctaagttgttattgctttactttggttggtgttggaattttactgacatgcctctgctggtttgttcgtcaattggttggatttctcatagcgaggggggatttttcaatgctattatgagtttcccatccaattacccaaatagtccaccttcagttaagttcacttcagagatatggcatcccaatgtatatcccgatggccgggtttgcatatcaattcttcatcctcctg

SEQ ID NO: 4884 - DNA, 234 bp, Glycine max
gttataaataacccgaatcgaggtgtcggttttgaaaagagttaacagtctcttctcttctcttcgctcctccacttgtttgcccttcatggcggcatctcaggcaagccttctccttcaaaagcagctcaaagatctttgcaaaaaccccgtcgacggcttctctgccggtttggtcgatgaaaccacatttcgaatgatgtcacaaattggacgcgaatcttagagggggat

SEQ ID NO: 4885 - DNA, 565 bp, Glycine max
atcacatgtgccatcgttgccttagctagtctagtagtcccttatttaaacacatagcttctgtacttcggaaatgacaataattgcaacaacaaattctagtcatatcatatatccttcaacctctcatcattaggcattcagcaagcaagaggaaaaaatgggcaaaatgggcaaaattatgcttgttttgggtagcctcattggattatgctgtttttcaatcaatacctatgccttctcaccttctggatggaccaatgcccatgccactttttacgggggtagtgatgcttcaggaactatggggggagcttgtgggtatgggaatctgtatgcaactgggtatggaactagaactgcagctttaagcactgccttatttaatgatggagcttcctgtggtcagtgctacaaaattatatgtgattacaaagcagactctagatggtgcatcaaaggaagatctgtaaccattactgccacaaacttttgccctcccaatttcgcccttcctaacaacaatggaggctggtgcaacccaccactcaagcattttgatatg

SEQ ID NO: 4886 - DNA, 407 bp, Glycine max
ctttttcactcggggccattgacttgagcatattcagtgcgtcgtaaagcaaaaagatactaatggctaaagtcatgtttggtttggtctgcagcttcctcgtattatgctgtttcacaatcaacactagcgccttctcaccttctggatggaccaatgcccatgccactttttatggaggtagcgatgcctcggggaccatgggaggagcttgtgggtatgggaatctgtattcgacagggtacggaactgatacagcggcattaagtactgccatatttaacgatggagcttcatgtggggagtgttacaaaatcatatgcgattatcaaacagatcccagatggtgcttgaaaggagcatcagtaaccataactgccacaaacttctgccctcccaattttgct

SEQ ID NO: 4887 - DNA, 528 bp, Glycine max
tttggtaatgtgattgaagggtagttcaagtctgttacgctgtgagacccttaaccattactcgcacagtcacaaatgttggaccaccagccacatacactgcaaatgtccactcgcctgctggatataccattgtcgttgtgccaagatccttgactttcacgaaaattggggaaaagaagaaattccaagttattgtgcaggcaagcagtgtaactacgcggagaaagtatcaattcggggatttgcgttggacagatggaaagcatatagtaaggagtcctattacagttaagcgcagatgaaaattccccaatggatttggtttttttgtattgtgtggatgcatgtttagatataagctagttagactctatatatatacctaggatttcatgttatgacatgactgtgttgttccttggttatcatgtggtttggtttttttgtattgtgtggatgcatgtgtgcatgtttagatataagcgagtttcactatatatatatatatagcaaggatttcatgtt

SEQ ID NO: 4888 - DNA, 694 bp, Glycine max
tgaactttttgtgtgcttccggatacgaccaacaactcatctccgcactcaatttcaatggcacattcatttgtaaagggtctcacagcgtaacagacttgaactacccttcaatcacattaccaaatcttggcctaaaacccgtaaccattactcgcacagtcacaaatgttggaccaccagccacatacactgcaaatgtccactcgcctgctggatataccattgtcgttgtgccaagatccttgactttcacgaaaattggggaaaagaagaaattccaagttattgtgcaggcaagcagtgtaactacgcggagaaagtatcaattcggggatttgcgttggacagatggaaagcatatagtaaggagtcctattacagttaagcgcagatgaaaattcccaaattggtcaagttggttgtgttgtattgtgtggatgcgtgtgtgcatgtttaaaaataaggtagttggactctataaagttagaattttcatgttatgacataactgtgttgttccttggttcctatgtggttgtttggttatcagaatcactgtataataatttatagcatgttttatgtgtactagtgaaataaaaaaaatgaaattgtgggagggcaaagtccgcaatcttcaaatgtgggtgcaacggacatgctcctccatatagcattaaaatattgtccc

SEQ ID NO: 4889 - DNA, 499 bp, Glycine max
tcaatgcgacgttcacattcaggaatcgttttcttcagaaatttgccatcgttgagagaagcgtgagagccttagtcgttcaagatgagagctaagtggaagaagaagcgcatgaggaggttgaagaggaagcgccgaaagatgagacaaagatctaagtaggtgcttgagcaggagttgagatgagctttccatctgctaccagcctcatgacattttaggctgttatggctcttatgatcttgaggtctagtcgctaggggagcttcactcttgacttagtttgctttactggtcctggtcctggtccaagactattgagtgtgggttaagttgtgatgtttagtgttttgtggtatctaattatgtactggtttttatactttttggttgaatagctatatattagtatcgagacttccatgaaaatttgatcctattgtatgcttgaagtgacctctaatcgttagctcatatataatgctatgtatattatcac

SEQ ID NO: 4890 - DNA, 489 bp, Glycine max
aggggacgttcacattcaggaatcgttttcttcagaaaatttgccatcgttgagggaagcgcgagagccttcgttgttcaagatgagagctaagtggaagaagaagcgcatgaggaggttgaagaggaagcgccgaaagatgagacaaagatctaagtaggtgcttgaacaaggagtggagatgatgtgcttttccatctgctaccagcttcatgacattttatgctgtcatggctcttatgatgatcttgaggtctagtggcgaggggagcttccatcttgactttagtttagctttactggtctaaagattgctgttttagtgtgggttaagttatgatattgagagttttgtgttatctaattatgtactggtacgttttgtatactttttggtttatcttaatagcttaaatattagtattttgagacgtgcaaaggctgttgagaatcaaggtaagcgggcgctctagaggatccaatcttacg

SEQ ID NO: 4891 - DNA, 546 bp, Glycine max
caccaagcggtggctgtccgttccggcgccgaccagtcggtgttctaccggtgcagctttaagggttaccaagacaccttatacgtctacgccaaccgtcaattctaccgtgactgtgacatatacggaaccgtagacttcattttcggtgacgccgtggcggtgcttcaaaactgcaacatctatgtgaggaaaccgatgagcaaccagcagaacacggtaacggcacaaggaagaaccgatcctaatgagaacacagggatcatcatccataactgtcgtataactgcagctggggacttgaaagcagtgcagggctctttcagaacctttctaggtcgcccatggcaaaaatactcacggactgtcgtcatgaagagtgcccttgatggcttgattagccccgcaggttggtttccgtggagtggaaactttgctctaagcaccctctattacgcagaacatgcgaatacaggagcaggtgctagcacaggagggagggttgattgggcagggtttcgagtgatctccagtactgaggctgtg

SEQ ID NO: 4892 - DNA, 732 bp, Glycine max
atgcgatgtggtgagtgaattgcagagtcggcaatggtatgtgtatgagcgtagtcacacttgaattgaattgaagctctgttccttcatgtgacgacaatctccaacgtcatctgagctctcgtatattccccagccatggccgaaaaggtcaccataatgaggctcaaggttgatcttcagtgccacaaatgctacaagaaggtcaagaagattctctgcaaattccctcaaatccgagaccaggtgtacgacgagaagaataacatcgtgaccatcgcggtggtttgctgtaaccctgagaagctcagggacaaaatttgctgcaaaggttgtggtacgatcaaaagcattgaaattgttgagcctcccaagcccaaaccaccacctcaaccagaaaagcccaaggaaccagagaagccaaaagagccacagaagccgaaagagccagagaagccgaaagagccagagaaaccgaaggagccaccgaagcctaaggaacctgaaaaaccaaaggaaccagagaagcccaaagagcctgagaagcccaaggagccagagaagcccaaagagcccgagaagcccaaggaacccgagaagcccaaggagcccgagaagcccaagcctgaatgccctcctccggtgccggtttgtcccgcaccggtgccagtgtgtccgccacagccaacacctccgccaccggtggtggttccgattggggtgtgctgtgtt

SEQ ID NO: 4893 - DNA, 396 bp, Glycine max
cgtttccggatttagttacttactcctcacactttctctatcgttttcatctctgtttcagatctgagctctcgtatattccccagccatggccgaaaaggtcaccataatgaggctcaaggttgatcttcagtgccacaaatgctacaagaaggtcaagaagattctctgcaaattccctcaaatccgagaccaggtgtacgacgagaagaataacatcgtgaccatcgcggtggtttgctgtaaccctgagaagctcagggacaaaatttgctgcaaaggttgtggtacgatcaaaagcattgaaattgttgagccttccaagcccaaaccaccacctcaaccagaaaagcccatggaaccagagaagccaaaagagccacagaagccgaaaga

SEQ ID NO: 4894 - DNA, 639 bp, Glycine max
aaaacttcaaatgaccctaccaaggctcctcctcgtgctgatgtagtgaaaggcttgaaaaatggtataatgttgaacctgttggggatgggtgctgctattcttgggatgcaagccacggttggattgttagttgctaaggctctcacttcctcggcaaacccgtattatcagggaatttctcccggtagcaccccagtgctcgcattggatgtatttttggtgcaggcttcagcgaacactattctttctcatttccttgggcttgttttctcactggagttgctgcgatcagtcacattaccaccttcagatgcaactccatttcccaaatttgcgtaatatgtgcctcgagactagataatgaaatcacacacccaaaaattgtccctcgtctcttgtggttatttgcttaattaattgtgttcagctttttgatacagcgttttgaggccctcttcctaggcaattggcctcatcgtgtatttccaattttaaaagaacctgtacaatattgctaataagaatgataactgctcaacaaatgaagatccttgggcagatgattacaatggcaggggtagatcgcattgtcttcactcagctttggagttttcacttactttcatagcttgtcta

SEQ ID NO: 4895 - DNA, 222 bp, Glycine max
ccagagggcatcctgctaatctgtatgatgtcagaatttgttataatactagctagtactggtattttagcatgttcctgcaaaacagcgacagagattgcaaaattggtaattacaagtccaagccaattagtattcaaaagagtttggtatactcatttctaactaaaacatgattgtccttttaaagacagagagattagtcatattacatattacgtt

SEQ ID NO: 4896 - DNA, 1293 bp, Glycine max
gggtgaaaattagggtttgaggtatttatttaattggcaaaagacggtgtttgggtttcacagacagacacacactcggttctgccttcacaaaaaaattatcgagatcccctttttctcctaagaaaagccatggctaagggtcccggtctctactctgacatcggcaagaaagccagggatctgctgttcaaggactaccacagtgaccagaagttcaccatcaccacctactcacccactggagttgctataacagcatcaggaaccaggaaaagtgaactgtttgtggctgatgtcaacacccagttgaagaacaaaaacatcactactgatatcaaagttgatacagattctaatctcttcacaactatcactgttaatgaacctgctcctggtctgaaggctatttttagcttcaaagttcctgaccaaaggtctggaaaggtggaagttcagtacttgcatgactatgctggaataagcaccagtgttgggttgacagcaaacccaattgtcaacttctctggtgttataggaactaatgttcttgctcttggtgctgatctttcttttgacaccaaaattggggagttaacaaaatccaatgctggactgagcttcactaaagatgacttgattgcctcattgactctgaatgacaaaggtgatgctttgaatgctgcatattaccatgtagttaaccccttgaccaacactgctgttggtgctgaagtgacccatagattctcaactaatgagaacactctcacccttggtacccagcatcagttggatccattgaccacattgaaggcacgtgtgaacaactttggcaggacaagtgctctgatccagcatgagtggcgtcccaaatcgttctttaccatatctggtgaggtagacaccaaggccattgaaaagagtgctaaggttggattgggtttggttctcaaaccctaagaattttgatccatcctggcaagagcattgagtaggtgttaggaagcgtatagtctgtgagactaaattatttccttgaagttggttctcttcttgggtaagaagtgttcatggagttttcgttgcatttgagcaattcaaccttgtaaaaataaataggctttctataaaccacatgtgactttttaaatgcccaaagcttatcaagcctcttttcttgaatggggattggcactctttattgaggttttgacatgagaaattttatatcttctgatttgatttgatggatattttctgcaatattcccttaatattttctggtttgat

SEQ ID NO: 4897 - DNA, 568 bp, Glycine max
agaagacaataagaggagacaacagatacatccttggttggctctgggtttaaggaggggaaattgattcttgttctttgggaaggataaggaatcaatctgatcgctggaagagaggaagtagtaatggaaatggggatttccaagacaacaacaagcactgaggttaccgacgacaattccaatagcagcagcaccactcatactcaaactcgcaaccatatctcctttgctgctccctacgccgtaggagaaaaggtcttaaccaatcattctgattgtctttacgaagccaaggtgaggcaagttgaataccgcaacactaaaggatggcaattcctcgttcactatcttggttggaagaagagatgggatgaatggcttgacctggatcgtttgatgaaacacaccgaggaaaatatgcgcaaaaaacatgaccttgacgagaagcttggcaatgataagaatgcaaaagtcccgcgtggttctctggcgaagtccaagcctactaacgtttcaagaggcaggaaacgaaggaatgaatctgtcatcaagggaaaacctgcag

SEQ ID NO: 4898 - DNA, 381 bp, Glycine max
gggagaagatactgagaggagacaacagatacatccttggttggctctgggtttaaggagggaaattgattcttgttctttgggaaggataaggaatcaatctgatcgctggaagagaggaagtagcaatagtaatggaaatggggatttccaagacgacaacaaaaacaagcactgaggttaccgacaacaattccaattccaatagcaatagcagcagcaccactcagactgaaactgacaaccatatctccgttgctgctccctacgccgtaggagaaaaggtcttagtctatcactctgattgtctttacgaagccaagctgaggcaagctgagtatcacaacactaaaggctggcacttcctcgttcattatcttg

SEQ ID NO: 4899 - DNA, 1376 bp, Glycine max
gtaaaatctcgccgccttcacataaaaataatctttaatgaaagaatttcatatcaggtgaaattaatttatgatctttgaggtagacccgtattatctgacctatgaaaaaatccctgcttatccacgcacgatttggaacttctgaaaacacgctgaaatagatttttttttttgggtataatattgattgtagtagtatttattttatcttctgatattatatttccaattttgctgtcaaaacattattagcgatcaatttgaaattgatacagagctgagagcatcaaggaatcgaagaatagaagattcatttttttttctttttgatatggaagctgatgtttctattatttttgttgcgttttcaaaaccctaaattggagaaatcccaatttctccttctgtctttctgctttggatgtttttcaaccaaaaaattgtgcttttcaaatcttttgctctgatgggtacttcaaatcttctcttgtttttctctctgatgagcctgtgtgctatggcggcttccaaggtggtgcttattgggaataatatcactctctcctttgatgatattgaagctaattttgccccagcagtcaaaggttctggaaaatatggggtcttatatttggcagaaccactggatgcgtgtacagaattgacaaataaagttgaacaacttcccaatgcgagttcaccttttgctttggtggttagagggggatgtagctttgaggaaaaagtcagaagggcacaaaaggctggcttcaaagctgtaattgtctatgacaatgaagagggtggcatcttggttgcgatggcaggaaattctgctggtataaaaatacacgctgtatttgtatctaaagcttcaggtgaaatactaagcaaatatgctgggttgactaatgtggaaatatggctcattccaacttttgaaaactcagcgtggtctatcatggcaatttcatttatttccctgctagctatgtctgcggtgctggccacttgtttcttcgtccgcatgcatcgcataagaagagaaaggcctcgagcttctcttgttcgtgaatttcatggtatgagtagtcgcctagtgaaagcaatgccgagtttggtatttacttctgttttggaagataactgtacatcaagaacatgtgctatatgccttgaagactattgtgttggtgagaagctcaggattctgccctgccgtcacaagttctcggctgcctgtgtggatccggggcttacttaagggaaaacctttgtccaatttggaaaccttaagccaaaaacgggttaaacggttcaacaactttaaggtccaaaaccctggtcccaataaccccaagaactcaagggaa

SEQ ID NO: 4900 - DNA, 1316 bp, Glycine max
tgtacatcaagaacatgtgctatatgccttgaagactattgtgttggtgagaagctcaggattctgccctgctgtcacaagtttcatgctgcctgtgtggattcgtggcttacttcatggagaaccttttgtccagtttgcaagcgtgatgctagaaccggcttaactgatccaccaccttcagagtccacacccttgctctcatcaaccccagcatctatggcatcctctgtcttatcttctgcaagatcatcactagcttcatcttcagcaatacaaattgcccggacagcatctatggcatcctctgccttaccttctgcgagatcatcgctagcttcatcttcagccatacaaattgcccggacagcatctatggcatcctctgccttaccttctgcgagatcatccctagcttcctcttcggcaatacaaattgccgggcagcttcacagaccccatctgtttcccgtaaccactccatagccagtacaccttatgttcagccatctcttaggtcctcctaccatcaatccccctccctaagcatcagccgaagctccgtagatcttaggaatgcatcccaaagatctctagcttctcacttgaattcaccatgttccatgggatacccatctttgtcatctcttaactcaaggtacatgtctccacacattccaagtccaagcaatgcttcagtaagctatatgggttcatccagtcatcaacaacatcctctccgttatagtgagtcggctgcaagcttctccccatttgcatcgacacactcccttccagaatgttaaattgttcaattgattatatcatatgattgagacgtccacgcagttgaactagtaattgccaagtcttgaactaaaaggtggccatgtgatgaccggtggtctagttgaatagtcctatgtgatgcttggggcattccctacctctgtcatttgacttccgtcttggcacctggtgtacattgtagcttctctctggtgttagtttcgtttacatgtgctggttgaggttcttacatttataggttggagagcttgcatacagtaacttgtgcgtattgtttgtactttgaatgttgacgttttcatggccttgatgtccaagtatagtcaactgctaacaagagaaatgttgggctgtattgacactagacacattgaagtaagaagagttctttatgctctgtctagtggatttgtccaactgaatcatgagagatcatgtgatgtatcactctagtgttatctatacttgatcatctaattgcaactctgagtatcaataatacttgt

SEQ ID NO: 4901 - DNA, 401 bp, Glycine max
atttttacatgtgctggttggcgagcttgcatacagtcactagtgtgtattgtttgtactttggatattgatgttttcatggccttgatgtcaaagtatagtcaactgctaacaagagaactgttgggctgaagtaagaagagttctttaagttctttctagtcatgagagatcatgtgatgtgatactctagtgttatctatacctgatcatctaattgcaaaagtgagtaataatacgtgtaaaattttcgtagcttgcattgctaatagattatcagttttaaaccatgggggcaaattaggtatcctatttgatctgtggaaaattcatcatatatagatacttgtaaattgaattttctagagagtgcgtgaaattttaggtttctatttcttttt

SEQ ID NO: 4902 - DNA, 709 bp, Glycine max
gccctgtcaagaatacaacccagatctttctttttctgttttggatttgaaaatgccaaactggtgagctaagaggccttgagaaaggagggacagagagcatgatgagtagcatggaggacaattagtctaggatagagggaatcaatttaaggtcatggaaaattataaactaggtcctcttgtgcattttatgctcaaagttgctctctctcttttaccatccttctctgagctctagcttttctcgaaagcttcctttttgggctatatgttcacaaacaccatttcccctgaacacccaattcctgtctaaaacacacttctcaatatctatctctagaatggctaaccatgatgcaaaagaagaacaaaggccactcaaccaatggagaagaagcaaagggggattcatggcttccatgttcatttttgtcttgtcagcattggacaacatgggttttgtggcaaacatggtgagcatagtcctatacttttatggagtgatgcactttgatttggccagttcagccaacaccctcacaaacttcatggcttcaacctacctgctttcccttgttggaggcttcatctcagatacttacttgaacagatttaccacatgcttgcttttcggatcactcgaggttctggctttggcaatgctcacagtccaagcagcttcaaaacatttacaccctgaagcatg

SEQ ID NO: 4903 - DNA, 707 bp, Glycine max
cgagaagccgacagacggggcagtggcaacgtgagagtcagagatggtagctattggctttggagcccctccttctccacttccgtttcatcttcgcctggcttcctctccttctcctttggccttcccaataatccacaaattccaaaacgcaggcaagtcagtgataacaatctgttcaaagaaaaatgcaaaatcaagggtggtcactctctgctctgcacctgtgcaagttgatatgcaggagcaggaggttagtgatattactttgagagagagaagtgtttcggttgtcctattggctggagggcagggcaagaggatgggagctagcatgccaaagcagtatcttcctctttttggtcaacccattgctttgtatagtttccacactttttttcacctggttcaagtcaaagaaattattgtggtttgtgatccttcatacaaggacatttttgaagatgcaaagggagattaccaagcagaactcaaatttgcactgcctggaaaagaaagacaggattctgtttataatggctttcaggctgttgatcctaactctgaacttgtgtgcattcatgattctgcaagacctttggtattatcagcagatgtgaaaaaggtccttaaagatggtttattgaatggagctgcagttcttggtgtacctgcgaaggccacaatcaaagaggcaaactgggagt

SEQ ID NO: 4904 - DNA, 392 bp, Glycine max
ttttcgcactcacgttctcattttgtagttcaacctccagcaacagcaagcattctcaaaccttcttttgctcctcctctggtttgtgacttcatgttggtatcattggtttggccatagttgttccctggcctggccaggccactgactcttgagtcttgagccagttcctttttcgggttgttgaacattccggattttaaagcattgccttctaccagtcatattcttgtcacttctaaaaaatggaaaactcagatacaacactgacaagttcatccctgcctccaccacctccagtatctgcggaggagccagagcccaagaagttgaagatgttcaacacaacttctgatgatgaagaaacaggcaccaagaaaagatacaagcgc

SEQ ID NO: 4905 - DNA, 653 bp, Glycine max
attaagtgcgtggatcaacgggacacatgctaatttcaactcaacttaactaccgatgaacttaaatattcagtgtttctaactggcacgaaaagaaaacaaagcacacgttgctgagatgacagagcctcctagtgtgctgcccctccaaataatgttaatccttctccttatcaaaagtggcagcagcaacaatgagtgtggggaatggtcttgcggctctggccaaccacctatcagatttcccttcaaactcatcaagggaattaaagatgaatgtggttatccggggttttgtctatattgtactcaaaaacatgagactatgcttgctctctcctccgtaaaactccaagtcagttacataaactacgaaaatcatgaaattgtgttgaatgacccggaaaattgccttccgcacaagtttctgcaaatcaacgattctcttattcatccttacaaatttgacgatgaagctaaaacaagtaagttgagcttcttcaactgttcttcagttgagcatcaacacctgagaaactaccagcagtcactgtcagactcacaagacatgatctcctgtccgatttatgttactgatcttgatgacagcgtgctcagcttggacctaacatcctgtaccaaaatgttcgata

SEQ ID NO: 4906 - DNA, 720 bp, Glycine max
  unsure (1)..(720): unsure at all n locations
ctcgagccgattctgcagagaggatgggtgcagaagcaaatggcggcgagaagcaattgaaatttctgatctacggtcgcagcggttggattggtggtctactgggtaagctctgcgaagagcgcgggatccaatatgagtacggcaccggcagattggagaaccgctcgtcgttggaggcggacatagcggctgtgaagcccagccacgtgttcaacgccgcgggtgtcacgggtagacccaatgtggactggtgcgaatctcacaaagttgaaaccatccgaaccaacgtcgtcggcactctcaccctcgccgacgtctgccatcataaaggcctcatcctcatcaactacgccaccggctgcatcttcgagtacgattcttcccacactctcggatccggcatcgccttcaaggaacacgacactcccaatttcaccggatccttctactccaagaccaaagccatggtacctactctcttcttacactaccacaagatcttatcttttctataaacatcgatattctctctatgtgatgtgacaggtggaggatctggttgggaactacgagaacgtgtgcacgttgcgtgtgaggatgccgatttcgtcggatttgtcgaacccgcggaatttcatcacttagatcactcgatacgacaaggtgtcgacattcccaactccatgnaccatattgacgagcttctcccaatctcgc

SEQ ID NO: 4907 - DNA, 492 bp, Glycine max
cggtgcagaagcaaatggcggcgagaagcaattgaaatttctgatctacggtcgcagcggttggattggtggtctactgggtaagctctgcgaagagcgcgggatccaacgtcgtcggcactctcaccctcgccgacgtctgccatcataaaggcctcatcctcatcaactacgccaccggctgcatcttcgagtacgattcttcccacactctcggatccggcatcgccatccaggaacacgacactcccaatttcaccggatccttctactccaagaccaaagccatggtggaggatctggttgggaactacgagaacgtgtgcacgttgcgtgtgaggatgccgatttcgtcggatttgtcgaacccgcggaatttcatcactaagatcactcgatacgacaaggttgtcgacattcccaactccatgaccatattggacgagcttctcccaatctcgctggagatggccagcggaacctcatgggatc

SEQ ID NO: 4908 - DNA, 1181 bp, Glycine max
  unsure (1)..(1181): unsure at all n locations
cccacgcgtccgctcccttcctcttgcagagtttgccggttccattctctctatacccactcacctctcattcgttctggtcaatcaatcattcattcattcctattccttcttctttctcttccaattccaaatcacgatccttcgttttccctctctagaaccttcctttttcctctttccgtgtctgtctgtctgtctctctctcccccatggcttccgatctcgaagcaaaagccaaagaggccttcgtcgaagaccacttcgaactcgccgtggaccttctttctcaggccattcacctcgaacccaacaaagccgaactctacgccgaccgagcccaagccaacatcaaactcaacaacttcactgaggctgttgctgatgctaacaaagcaattgaattgaattcttctctaccaaaagcatatttgcggaaaggtactgcgtgcatgaagcttgaggaatatgagactgctaaggctgctctagaggtgggtgcatcattgtctccagacaactcaaggtttgctactttgatcaaagaatgtgataagctcattgcagaagaatcttataccatacctattatagaggaaaagaccacaacacaggatgctactccaaaagatgttcagcaacaagatgatcttctagagaagccaacagttgcagtgactaaacctaaatacaggcatgaattctaccagaaacctgatcagttggttgtgaccatatttgcaaagaaaatcccaaaggaaagcattactgttgacttcggtgaacaaatactaagtgttagtattaatgtccctggagaagacgcatatgcttttcaacctcgcttatttggaaagatcgtaccttccaattgccgatatgaagttttgtccaccaaaattgaaattcgccttgcgaaagcagaacctattcactggacatctctagaattcaccacagatatcgttgttccacagagggttaatgcttcttcagttactggaagtcaaagaccttcttacccgtcctcaaaacaaacaagagactgcgacaagattgaagctcaagtcaagacagaggagacagactgaaagcttgatggcgatgctgcgttgaacaaactgttccgtganatatatcaagatgcagatgacgatacanggagggcgantgacaagtct

SEQ ID NO: 4909 - DNA, 463 bp, Glycine max
cccacgcgtccgcccacgcgtccgattcattcctattccttctttctcttccaattccaaatcacaacccttcgttttccctctctagaatcttcttctccattcaattcctactccttttttcctctctgtccctctctctctccctctctcatggcttccgatctcgaagcaaaagccaaagaggccttcgtcgaagaccacttcgaactcgccgtggaccttctctctcaggccattcatctcgaacccaacaaagccgaattctacgccgaccgcgcccaagccaacatcaaactcaacaacttcactgaggctgtggctgatgctaacaaagcaattgaattgaatccttctctaccaaaagcatatttgcggaaaggtactgcttgcatgaagcttgaggaatatgaaactgcaaaggctgctctggaggtgggtgcatcattgtctccagacaact

SEQ ID NO: 4910 - DNA, 883 bp, Glycine max
aaaggaagatggagaagcagaacgaagaagaagaagagcaaaagaagaagaagaagagttcggtggtgataagaataccttcttatcaggaagtggttgaaagttcgcaggcgaaatccactccttcgtctctcttcgttccctcccaaaccttttccgaagctttcgccttcgtcaaatcctccgacttctactctcctcctccgaaatcgagggaaactggtcaatcggacgctccatcttcaacatcgacaccatctcccgctactgctgcagcttcgtcaacaataccttcctctcaaaatcgcaattcaattcttgtcagccacagacagaagggaaatcccttgctaaaacacattaggaacgttagatgggcatttgctgatgttgtttgtgactacatgcttggccaaagctcctgtgctctctatctcagtcttcggtatcatcttctgcatccagactacttgttctatagaataagggagttgcagaagaatttcaagcttcgtgtggttttatgccatgttgatgtggaagatgtaataaagcctcttcttgaagttacaaaaacagctttgcttcatgactgtacactcctttgtggatggagcctggaggaatgtggccgttacttggagaccataaaagtctatgaaaacaagcctgcagacattattcaaggccaaatggatacagattatctatcacggcttactcattcccttacaactgtccgacatgttaacaagactgatgtagtcacccttggtaccacatttgggtctctttctaacattatgggtgcatctatggaagatcttgctcgttgccctggcataggagagcgcaaggtcaagcgcttgtttgacacttttca

SEQ ID NO: 4911 - DNA, 495 bp, Glycine max
tttttatcgcgtgggtcacaaggtagcacatttgaggggcgtggagaatctgtggatattgtcgatattgataattgggattgtagctgcaagggatggcaacttactggtgtgccctgttgtcacgccattgctgtctttgaatgtgttggtaggagcccatatgattattgttcgagatacttcacagttgagaattatcgattaacatatgcagaatctattcaccctgtgccaaatgttgacaaaccaccagtccagggtgaatctactgctttagttatggtaacccctccaccaactaagcgccctccaggtcggccaaaaatgaagcaagttgaatcaatagacataattaaacgtcagcttcagtgcagtaagtgcaagggacttggccacaataggaagacatgcaaactttcatagtatcgcaattcacaacataggaatcgttttttaatcaaaatgcacatctctgagctatttccaacaaca

SEQ ID NO: 4912 - DNA, 1304 bp, Glycine max
aaaaaagccccagcaaccttttccccttataatattatccttgcgggttgcgaggggatagggatagggatagggatggagaaagtgaaggtgcttcggcgactcctcgagacaccaggggttcaccaggggccagcctgtttcgacgctctgggtgcgaactcatagaatccgctggcttcccctactgcatcaccagtggcttctccatcgccgcttccaggttggctctgcccgacaccggcttcatctcctacggcgaaatgctggagcagggccaactcatcacccaagccgtttccattcccgtcattggcgacgccgacaacggctacggcaatgccatgaacctcaagcgaaccgtcaagggtttcattgccgccggtttcgcaggaatcattctggaagaccagattgcgccgaaagcgtgtgggcacacgcgcgggaggaaagtgataccgagagaggagggcgttatgaagattagagccgccgtggatgcgagaagagagagtgggtctgacattgtgattgtggcgcgcacggatgctcggcaagctgtgtccttggaggaagcgttgacgaggtgcaaggcttatggggatgctggggccgatgttcttttcatagacgcactcgcttcggttcaagaaatgaaagctctctgtcaactttctccccatcttcccaaactcgcaaatatgcttgaaggaggaggcaaaacgcctatacttagtcctcaagaacttgaagacgttggttataaacttgctatttatccaatttccttgattggggtttgcatacgagcaatgcaggatgcactcactgctattaaaggaggcgctgttcctcctccgggaagcatgccatcttttgaagaaatcaaggacatcgtaggtttcaactcttattataaagaagaggagcgttatgctacaagcaccaatcaccagccttaaaaattataacagaggttggagagaccaatcttaaacaacagcccttgtactgtgtgatgatatcagtctacttttattctcagctacttttaactgtctttgggatatgttcattgttcaataccgaatgatgaatatcgatcttaatgtctgtctgtttagtagtattttatcaaaataaataagacccgtctaattaatcatggagtaaatttcgtgataaatggcaaggttgctcaaccagttaacgatgacaaaattgactttttcatgcttgtcgtcaaggatgcatgtttgtggatgccgatttagactgagtgaatgaagttgaaagggattttt

SEQ ID NO: 4913 - DNA, 494 bp, Glycine max
tataaaatagaaattagattggtaatgaaagtgcagtgagcaatgaaggtttcagcggttggcactagcagtgttaccctttcttccctcttccgatttgaatctggttcggtttcgctgttatcaaaatccaaatcatcatttggcgtagcatgctctttggcttcttcttcacctgcgaaggcgcttcgcagaatcctggactccccaggggtccaccaaggtcctgcttgcttcgacgctctcagcgccaaccccgtggggaacgccgccggcttccaattctgcttcagcagcggcttctctatttccgccgccagcctcgccttgcccgacactggcctcatctcttacgccgaaatgctccatcagggacaactcatcacccaatccgtctccattcccgtcatcggcgacgccgacaacggctacggcaatgccatgaacctcaagagaactctcaagggatacatcgcagccggattcgccggaat

SEQ ID NO: 4914 - DNA, 502 bp, Glycine max
ggacaaggaaagtgaaagtgagagagagagagagaaacttcgaggaaacgaccttcaccgttcatcaacctcaattgaacaacaacatcatcatcatcaaaacatccaattcttattcttatcatttctcaatcactgccacactgatactactgacacgcccacctaccaccttaatgctcttcaactcccactactgcctctctctctctcaggcccttcagccctttctttaggataacgaatttatgggtggatcaatttcaaaacggaggcgttctaggcaacattcgtcaaatttttttcctcggtatcagcaacctcatttcccacaaagccaagataatgggtctgtggggcattatgggtattcacctcagagctatggtggtggtcgtgctccagaacaaggaaagagcttggataggaagtattcaacgataagtgatgattataagagcttggaccaggtaactgatgctctggcaaaagctggcttaga

SEQ ID NO: 4915 - DNA, 527 bp, Glycine max
ggaaaattgaaatacatctactaagcattagatatatatcccgaaacgatgaaggctattattgttttcttcttactcttggcctctgttttttttccttcccagttcaactcttgctcgacaactactgcagaaaggaggggtgactggatgtacatcgaacccgaatataccttgctatccgccaccaaaacgagcatgtcctatatatattcgtaattgctgacgaaaattatatgtttctggactctaaagtttcactcaaatcgaggggagaagcaattaatgtcatgctgctatatatatatatatatagtttttatttggtgcctcatctttttaacactattcctgtgttaaaactcggtggtgtcacatctttgctttaaaattccgtgttcttttccagtttgcagttgcaataatcttctaatgttgtactgaggcaaaggcttgcccttttagccactcaataaatatgagaacttcattaaaaaaaaaacaaatcaaaaaaagacaagaagcac

SEQ ID NO: 4916 - DNA, 418 bp, Glycine max
gatgcacacttaattcctcaggatatctacactactactgcatctaactgaaatcaaagtttcaattaactgaagcagacatggcctctcagagttgcatcattttggctttgttcatcgctattttttccttctcaagcatggacacagcatttgcagcacgccatctcttgcagaatattccagggctaccagatttctctacaccccccaccttgccacctttaacaatcccaaatgtactatgcaatggatccatattcacattcttacccatcttatgtccaccatcttcaagcaccagtactactatcccttaaggcttcacttggagttcgatacataatttatgcactaatctctacgtactcgatctgcatttcggttcaattctcattgcatgccttcctcgatctcg

SEQ ID NO: 4917 - DNA, 1031 bp, Glycine max
gccatctccattccctttccctttaaacccattccctttcaacatcacaatgagctgacacatacaaacatccatcatcattattattttactccgaacgagttgacaccgattccactcactcaaccatgagccgattcaggcgttttgagctcatagaacaaccacctttcttccactcctgctactctttcccttccttcgtcctccaagactcactctctctcgacctcgacctcttgccacttcccagccacttcgacgctttcgcagatctggtgcacgcgccgtcgttcgcttaccggcgcgtggagaggcatctcgagaatgagttgcgtttgcagagcctctctgaccgtgtggcggagctggagtcgcggttcgaccgtgtgctcggcggagatcggaagtacacgtggacagcggagatcaagggagcggagaagaacgggttcgataggaagtacaagtgggttgcggaggtcgctgaggaggaagataagaagaagaagaagaataagaagaagcaggtgaaggtgctgaaggataagagcgcgaggtggactcttcagctggagaatgaggatgctgaggaagaagaggagaagaagaagaagttgctgaagggcgttgcgaggaacgtgaaatggacggctgagatcacgggaaaaggggagaacagtgggagctcgaggaagtacacttttcaggtgcagagtggggatgctgagaagaaggagaaaaagaacaagggaaatgggaatggattgcgtattgtggagattcaggagccaattggtcatagagatgtggttttgagacaggttgggtagcttttaactcccttttttgagttttgccatgtgatcttgtttcattttcgttggctgaagtttctgaatattaaattggtaggccagtgatttggttgttgaggtgaatatcagggtcatatgacagtgatgcatttagattttcactggtaggttgtttagatgcgacgtcgtttggctattcatctcatgttttct

SEQ ID NO: 4918 - DNA, 308 bp, Glycine max
aatacctccactacttgaaaaaaggaggacttttttgccctcaaagccttttgttggtgacaatcggttccttttgccttttgtcaccttcggcttcctccctgttagtcaaattgatcataatccataagcaggacgaaaaaggacacagacaatccagatgtgacagaatgaacacaaagcacaaagcattgtgttacatcaaatcatccctgccctgcctgttactactttgaccaacaacacaaaagataaacccaagaggaagacaaaaaaaaagttagtcaatggtcatccaaatggaccaa

SEQ ID NO: 4919 - DNA, 482 bp, Glycine max
  unsure (1)..(482): unsure at all n locations
ctaaaagatagtgtcacttgtcaggcgcggcaccttgctctccaccacgattccacgacctccacgccaccacggtcccagtcggcgccggtgcagtgcggagtcgcgacctcgctcccgtcgtcactcacagtcgctggcgatttgggttgggttgggttgtgagaacgggtaaaatggaggcagaggtggtggaggcagagcttgtgttgccaagctacctcagtttcaagagagttcaaatgtatgagaaatacccaaaaggccaagccagaggcaggcattggaaacatcttaagcagattatccaagctgagaattaccagaattaccctcctgatgaaccaaattatgctaatattgagtcacccccatctatgcacccctgcaagagaatttgtgatattacaggctntgaggcaccttaccatgatcctaggactaatcttaggtatgcaaatgctgaagttttcaaaatcatc

SEQ ID NO: 4920 - DNA, 828 bp, Glycine max
ggtgcgcattttgtgaaaaaaaataaaaaatggggataggggtactatttgttgggtttttcttgctatcttgtgttgtgtgtgtgaagggtgtggagccaaaagcctcacccacttgtacatttccggcagtttacaactttggggactcaaactcagacactggaggcatatcagcttcatttgtgccaattcctgcaccttatggcgagggcttctttcacaagccttctggaagggactgtgatggccgtctcattgtagatttcatagctgagaagctaaacttgccatacttaagtgcttatctgaattcccttggaaccaattaccggcatggggcaaattttgccactgggggatccaccattaggaagcagaatgaaaccatatttcaatatggaatacgtcctttctctcttgacattcagattgtgcaatttaaccagtttaaagcacgcaccaaacaactctatgaagaagccaaggccccacatgacaagagcaagcttccagtgcctgaggagttctctaaggctctctacacatttgacattggtcaaaatgatctctctgttgggtttagaaagatgaattttgaccaaatacgtgaatccatgccagatcttctcaaccagttagccaatgcagtcaaaaatatataccaacaaggagggagatacttctggatacacaacactagcccctttggctgcatgccagtgcaactattttacaagcacaatataccagaaggctatcttgaccaatatggatgtgtgaaggatcaaaatgtgatggctacagaattcaacaagcagcttaagg

SEQ ID NO: 4921 - DNA, 438 bp, Glycine max
cccacgcgtccgattttaactgtgtgtgtgtgacaaacgtgaaaagtacttttttttatgagggtaactcaactttgctatttataatctactatgcagctgagaagctaaacttgccatacttaagtgcttatctgaattcccttggaaccaattaccggcatggggcaaattttgccactgggggatccaccattaggaagcagaatgaaaccatatttcaatatggaataagtcctttctctcttgacattcagattgtgcaatttaaccagtttaaagcacgcaccaaacaactctatgaagaagccaaggccccacatgaaaagagcaagcttccagtgcctgaggagttctctaaggctctctacacatttgacattggtcaaaatgatctctctggtgggtttagaaagatgaattttgaccaaatacgtg

SEQ ID NO: 4922 - DNA, 900 bp, Glycine max
gttgtgttactatttttcttttttaaatgtttgtcttgattttcttataattttctctgttattattggtgtcgttgctattaattaatttctggtgctaaattgagataactgtgtgtgacagagagagagagtaatcaagatagctcctttgaattttctatcagaatctgagggcccaaaatctagggttttctgttcttctctggggatctgaagacatgcagtccaagtctgaaactgcaaatcgactgagatcagatcctcattcctttcaacctggcagtgtttattctgagccttggtggcgtggtattgggtacaatcctgtggcccaaacaatggctggggcaaatgcgtccaattcgtcgtctcttgaatgccctaatggtgattctgaatccaatgaagaaggtcagtctttgtccaatagcgggatgaatgaggaagatgatgatgccactaaggattcacagcctgctgctcctaatgaaacaggaaattatgagcaagaacagcaagggatgcagcatactgcatcatctccaccatccatgcgtgaagaatgccttactcagacaccacagctggaacttgttggtcattcaattgcatgttctacaaatccttaccaggatccgtattatgggggcatgatggcagcttatggtcaccaacagttgggatatgctccttttataggaatgcctcatgccagaatgcctttgccccttgagatggctcaagaacctgtgtatgtgaatgccaaacagtaccaaggaattctgaggcgaagacaggctcgtgctaaagctgagcttgaaagggagctcataaaatctagaaagggcataacatgctcacaaacattggacagaatttggttctactattactagt

SEQ ID NO: 4923 - DNA, 1155 bp, Glycine max
  unsure (1)..(1155): unsure at all n locations
cggctcgagcctcatcctcttgttgtatcacaactgaagtgagatatcaaacattcaataccccaaattctagttctagagaaagcaaagttctttgatttgccttccacccccttaatttccttaattaaccaactgggaaatttggtctaattgtgattcattctctttggggggcttttgtggattaaggttagtatttgcttgattagggaagtctttatgtgacctgggtggaatgattctgtgtctgcatgtgtgaattctggcaagggaactagggatctgaagataagatatgcaatctaaatctgaaactgcaaatcaactgaggtctgatccacattcctttacacctaacaatgcttattctgaaccctggtggcgaagtattcagtacaatcctgtcccccaagcaatgttaggagtgaatgcatctaattcatcttcacttgaacgccctaatggtgattcggaatccagtgaagaggatgatgatgccactaaagaatcacaacccactgctcctaatcaatcaggaaattatggacaggaccaccaagcgatgcaacattcttcatcatctgcacctttgggatacactccttttataggaatgccccatgccagaatggctntgccccttgagatggctcaagagcctgtttatgtgaatgccaaacagtaccaaggaattctgaggcgaagacaggctcgtgctaaagcagagcttgaaaggaagctcataaaatctagaaagccatatcttcatgaatctaggcatcagcatgctatgagaagggcaaggggtactggaggacgatttgcaaagaaaactgacggtgagggctcaaaccactcaggcaaggaaaaggataatggtactgattctgtcctatcatcacaatcaattagttcatctggttctgaacctttacattctgactctgccgaaacctggaattctcctaacatgcaacaagatgcaagagcatcaaaagtgcactacaggttcaaagcaccctgttaccaaaatggcagtggctcctaccataatcataatggattgcaatctcagtgtaccattcatcctcaggtgaaagactggaggaaagggattgttcgggtcagcaactgaaccacaattgatggggg

SEQ ID NO: 4924 - DNA, 731 bp, Glycine max
gcatagtagagaagcaaggtgctgagtaccaagagatagctaaaatgggacttgggactctgccactgaccccttcttacagcagtttctcttcaaagtcaggagggcttttacatgacatcaccaatcacagcagggttaatagaagcatgaaattcagagtttcagccaaacaagagaagcaagaagagaagaaaaagcaatctttgttcagcagtgtgactgaagctcttgatttttctcaagtgagatctgctgaggatgctcagcttatagaagaggctagagaagccacaaaatcaggagaaagaatgagtagggaacagtatggagctcttagaaggaaaattggtggtacatacaaggattttttcaaatcttacgttgaagtggacggggcatatgttgaagagggctgggttgacaaaacatgcaaggtgtgcaagaaggacactaagggagaggcaaggcaagtggacaagtttggaagatatgttcatgtagcatgtctagagaaggccaacacagggaacttctttacaagactgttttctagataaagagcagcattccagagtcatggcatgaaatggtggggggaaaactcattttctcatatagtctttatacccaatgattctatttagtcatccaattatcacattagatattcagcttgtgtgtattcttgtatacaagagtgagaattaattatagtttccacgttggtc

SEQ ID NO: 4925 - DNA, 901 bp, Glycine max
atgatacctaaaatacgagcaattaatgttcgaactaagtagatccgatccgatgtataaataagttgtgaggtagaaaggtagtgctttgaacttcaagggcaaaaaaagttgtgctgtgccgcctcttccgtaggcagcagcaatggcctcaaatcccaaaactttgacctttgaggaggtagctaagcacaacaacaaaaaggattgctggattattatcaatggaaaggtgtatgatatcacaccatttttggatgagcatccaggaggtgatgaagttttgctgacgtcaacagggaaggatgccaccattgattttgaagatgtgggccacagtgattctgctatagaaatgatggaaaaatacttcattgggaaggttgacacttccactcttccacccaaagttagccatagtctgccacaacctacacaaacacatggcgctggcaatcaatcttctggatttgttgtaaagatcttgcaattcctgttgccattgttgatactgggcctcgcatttgccctgcagtattatggccaaaagaagcatgctagcacctcatgaaagaggaagttgagctagagccgaagtttcagtaggtttcttaattcattgcctacttcaatgcagtatcaaagtggtaatagactttagtcaatgttgtgtctctgtcatttaaactcgttaccccacccctcaccatgcaggcccttgatgctctgtggtgtctttgctcagtcatgctagctgttcatttagacaaatgaatgatttttttttgatttaatctctcatgtttgaatattttgaaatggattttattaaatcaattgattgatccctatgtttttgggtgcaaaaaaaaaaaaaaaaaaaaaaaaaaaaaaagggcgg

SEQ ID NO: 4926 - DNA, 483 bp, Glycine max
ggtagacagacaggtagtgctttgaacaagaaaaaagttgcgctcgggtgcctattgttttctgtatttagattttttcgtcaacttttccgattttttcctcacttgttgtgaataatctggcagaggcggcagcaaataagaatggcttcaaatcccaaacctttgacttttgaggaggtggctaatcacaacaacaaaaaggattgctggattattatcaatggaaaggtgtatgatatcacgccatttctggatgagcatcctggaggagatgaagttttggtaacgtcaacagggaaggatgccaccattgattttgaagatgtgggccacagtgattctgccatagaaatgatggaaaaatacttcgtcgggaaggttgacacttccactcttccagcgaaagttaaccatagtctgccacaacctacacaagcaggtggcgctggcaatcaatcttctggatttgttgtaaagatc

SEQ ID NO: 4927 - DNA, 305 bp, Glycine max
aaaatgatggagtacgtaaagtatgagcatttaatgttcgagctatctagatcggatccgatgtgaaacaataatttgcgaggtagacagacagaggcggcagcgaataagaatggcttcaaatcccaaacctttgacttttgaggaggtggctaatcacaacagcaaaaaggattgctggattatgatcaatggaaaggtgtatgatatcacgccatttctggatgagcatcctggaggagatgaagttttggtgacgtcaacagggaaggatgccaccattgattttgaagatgtgggccaca

SEQ ID NO: 4928 - DNA, 517 bp, Glycine max
aaacgctgccttagcaaatgccttaaattttaacaggtgtgggaaaggaggaggaagaagagcgagatggcgtcagtggtgaagaacgtactcaaatccgtcagagaaaagggtttcggcgctttcctcagggagctcaaggatgaaggctacctgagatgccttccggatggaaatctcttgcaaaccaagatccacaatattggggcaacacttgttggtgttgataaatttggtaacaagtattatgagaagcttggagacacacagtatggaaggcacaggtggattgaatatgcagagaagactagatataatgcctcccaggttccagctgaatggcatggttggctccacttcataaccgatcacacaggagatgagcttcttttactgaaaccgaaaaggtatggtgttgaacacaaagaaaatttgtctggggaaggtgaacagtatatctatcattccaaaggacatgcacttaatccagggcagagaaactggaccaggtaccaac

SEQ ID NO: 4929 - DNA, 666 bp, Glycine max
cgaattctcacgtgatgttccgttttaaacagaacacaccagaagagaaggccaaggccggcacactttccactcttccatcacgcggatcgcaccgcaataaacgacacccagattgatcgcgattcgcccatctgatttacaaagtggaaccgcaatggaggcagctcagagaagattgggaggaggaatggtgccgttgtcgccgtcacagactccgcgctccagcgataagcccgtgcgagatctgcgatctgcggattccaattccaacagtcacagcaagtatgataaggacaaaggtgtcaatgtgcaggtcctcgtgaggtgcaggccgttgagtgaagatgaaacgaggctgcacacgccggttgtgatttcgtgtaacgaagggagaagagaggttttagctgttcagaatatcgccaacaaacagatcgatagaaccttcgcatttgacaaggttttatccagcttcagatacctgaaaagagaagagcgagatggcgtcggtggtgaagaacgaactcaaatccgtcagagaaaagggtttcggcgctttcctcagagagctcaaggatggaggctacctgagatgccttccggatggaaatctctttgttagaggaactatcgataggtacaagaaagcatgtgctgcctcac

SEQ ID NO: 4930 - DNA, 2071 bp, Glycine max
  unsure (1)..(2071): unsure at all n locations
ggagactcaactttgagattcttaaaaccctaactggtccgaaccattggagccaccgtgcaatagttcctcctctcactctctccctcaacacaccattgattttggtttcagctttatttgacaaagatgcaggcttgtacaacgatgagttctttgcagcaacaacctatttggaccaaagggttaaatttccctgcaaaagggtatggcagcaagcgcgggtttctacctcaggtgaggttctgcaatattacgccatccaaagcttctcatgttgaagcaagtttagtcactgggaagccgtcatctgtgcctttctctgtgcctgaaattggaggcgacggaagtagcttcctggactatggcttgagtgaagctgatcctgatgttcgtgcaattattgacaaggaaaaggaccgacaatttaaaagtcttgagcttattgcttctgagaattttacatctagagcagtgatggaagcagttgggtcgtgcctcacaaacaagtactcagaaggattgccgggtaaaaggtactatggtggcaatgagtacattgatgagcttgaaatcctatgtcaacaaagggcactggctgcatttcatgtagatgaaaacaaatggggtgttaatgttcaaactttatctggttcccctgctaattttgcagtatacactgcagttcttaaaccacatgatcggataatgggtttggacttgcctcacggaggacatttgtctcatggattcatgacacccaaaaaacgtgtatcagccacatcaatttattttgaatctatgccttatcgacttgatgaatcaacaggtcttattgattatgatatgctggagaaaactgctactctgtttcgtccaaaactcattgttgctggtgctagtgcttatcctcgggacattgactaccctcgtatgagaaaaattgcagatgaagtaggtgcttttcttatgatggatatggctcatataagtgggcttgttgctgcatctgtactttctaatccctttgagtattgtgatattgtgaccaccacaacccacaagtctttacgaggtccaagaggtggtatgatattcttcaagaaagatactgtgcatggggttgatttggagcctgccattaacaatgctgtttttcctggtctacaggggggtcctcataaccacacaattggaggactagcagtttgcttgaagtatgctcagtctccagaatttaaaaattatcaaaatcaggtggttgctaactgtagagctcttgctaagcgattaattgagcatggatataaactggtttctggtggtagtgacaatcacctggttcttgtcgatctaaggccatctggtcttgatggtgctcgggtggagaaaattcttgacttggcttctataaccctcaacaaaaattcagtgcctggtgataagagtgccctagttccaggaggcattcgcattggggcaccagcaatgacaacaagaggacttggtgagaaagaattttcactcattgctgatttcattcatgagggtgtgcaaataagtcttgaagccaaaagtttggtctcaggaacgaagctccaagattttttgaagtttgtaacatcttctgaatttcctttgggagagaaggtatcagagttgcgtaggaaagttgaagctcttactactcagtatccaatacccggagtctaagtgtacccgcataatgaatacttaaaactaagacgctgttaaaaaattttgtacaataatcatgcttcgatgtgtgttgctaataatatgttgtaacattttatggcaaatgcagcagcagctttatgattatcccatttataattggaagcaaaccaatccaatccttgatccttcaaatattccttagtaattaatattgtagatgaatggaaagcaaattggtaacgagtggcccgacttcttggggttcgaaaagctttgtacttgaattgaaagaccacttcaagacttaggtcctttaaactttnnnnnnnnnnnnnnnnnnnnnnnnnnnnnnnnnnnnnnnnnnnnnnnn

SEQ ID NO: 4931 - DNA, 528 bp, Glycine max
  unsure (1)..(528): unsure at all n locations
acgaccacgccggacgggcggcnagctttaagacgacagatttgggagagggggaaaaaaaccgcaacttttgaaattcttaaaaccctaactggtccgaaccattggagccaccgtgcaatagttcctcctctcactctctccctcaacacaccattgattttggtttcagctttatttggaagagggttgtaacgctgacgtgaaatttttctgaagacaaagatgcaggcttgtacaacgatgagttctttgcagcaacaacctatttggaccaaagggttaaatttccctgcaaaagggtatggcagcaataacgggtttctacctcaggtgaggttctgcaatattaagccatccaaagcttctcatgttgaagcaagtttagtcactgggaagccgtcatctgtgcctttctctgtgcctgaaattggaggcgacggaagtagcttcctggactatggcttgagtgaagctgatcctgatgttcgtgcaattattgacaaggaaaaggaccgacaatttaaa

SEQ ID NO: 4932 - DNA, 693 bp, Glycine max
ccctcgctaccgctccactcatatttggcatctgggggggttgatggtgtcaaagttgatgggcagaatatccttgaaactcttggagcaggacatggtgggagggtgaaacttgcaaggaaataccaccaggcattggaggcatcaatcgctaggaacttccctgacaatggaatcatttgttgcatgagtcacaacactgatggattatacagcgcaaagcgttcagctgttattagggcatcagatgatttctggccaagagaccctgcatcccacacgattcacattgcatcagtggcttacaatactattttccttggtgaatttatgcagccagactgggatatgtttcatagcctacatccgatggctgaatatcatggtgcagcacgagctgtagggggatgtccaatttatgtcagtgacaagcccggacaccatgactttgatcttttgaagaagcttgcactacctgatggttctatattaagggctaaacttccaggacgaccaacaaaggattgcttatttactgatcctgccagagatggaaagagtcttctgaagatttggaacatgaatgatttttctggagttgttgcggtattcaattgccaaggagctgggtggtgcaaagttgacaagaagaaccttatccacgatgagaatccgggcactgtcacaggtttc

SEQ ID NO: 4933 - DNA, 1011 bp, Glycine max
agggggcaaaaaagaaaaatagccttaaataaaaccgccacaaatttctccatagttatgggcacttccattctcgacgccctgaacgttcgcgtggaaggttccggcgacaagtaccttgtcctggcccacggcttcggcacggaccaatccgcgtggcagcgcgtgctcccttacttcacccgcaactacagcgtcattctctacgacctcgtctgcgccggcagcgtcaaccccgaccacttcgactaccgccgttataccaccctcgacgcctacgtcgacgacctcctcaacatcctcgacgccctccgcgtcccccgctgcgcctacgtcggccactccatctccgccatgatcggcatgctcgcctccatccgccgcccggacctcttctccaaactcatcctcatcggcgcctcccctagattcctgaacgacaaggactaccacgggggatttgagcagggagaaatcgagcaggtgttttcggcaatggaggcgaactacgaggcctgggtcaacggtttcgcgccgctgtcggtgggagcggatgttcccgcggcggtgcgggagttttcccggacgctgttcaacatgaggccggacatctcgctgttcgtgtcgcggacggtgttccacagcgacctgagggggattctgggcctggtgaacgtcccctgctgtattatgcagacggcacgtgacatgtccgtgccggccagcgtggctacctacatgagggaccacatcgccggaaagagcaccatccagtggctcgacacggaggggcacctcccccaccttagtgctccttcatacctagctcgccagcttgagattgcgctctcccagtagcgcgtgggggggcgcgtgctagtcctggcgcgtgggtctgcttgttaatttaagtaatttaactctactagtactagtactaccagtacaggagaagaataggcagggtcctagaaaaacaagtgtacgaaaggctctgaaagtggacacctg

SEQ ID NO: 4934 - DNA, 570 bp, Glycine max
tggtgaacgtcccctgctgtattatgcagacggcacgtgacatgtccgtgccggccagcgtggctacctacatgagggaccacatcgccggaaagagcaccatccagtggctcgacacggaggggcacctcccccaccttagtgctccttcatacctagctcgccagctagagattgcgctctcgcagtagcgcgtgtaagtctaggcgcgtggctctggtggttaattaagtaattaactctactagtactattactaccagattaggctagaagctactgctacagaacaacaacaacaacaacaacaagtgtacgaaaggctccgaaactggacacctggcgaataacgtgtgggtgttggttctttgactgggatttttatttaaggataagaatctgcacgtggatttcacgtgatgcgtggccatttttagtattattaatcaactattattgctcttgtgcttctctccttttaaaggaaagaaaaaaaaaagagaagaaattagagagacttgtttgttagtgtgattgtttgtttttattaatattattattattattatc

SEQ ID NO: 4935 - DNA, 652 bp, Glycine max
gaaaaagaaaaatacttataaaaagaatcaaacagctacaacttgaactgttcataacccacaccaaaagttccaaaccccaacccgaaaaatcacacacaccccctttggaattgggatccatcgccatatctctgattaggttagataagattccctatgggcacttccattctcgacgccctgaacgtccgcgtggaaggttccggcgataagtaccttttcctggcccacggcttcggcacagaccaatccgcgtggcagcgcgtgctcccttacttcacccgcaactacagcgtcattctctacgacctcgtctgcgccggcagcgtcaaccccgaccacttcgactaccgccgctacaccaccctcgacgcctacgtcgacgacctcctcaacatcctcgacgccctccgcgtcccccgctgcgcctacgtcggccactccatctccgccatgatcggcatgctcgcctccatccgccgcccggacctcttctccaaactcatcctcatcggcgcctcccctaggtacaacaagtaattctcttctccctcctcaattctattctattctattctattctatgcgagcaaataggagcaattagcgcttgaatatctcagattcctgaacgacaaggactaccacg

SEQ ID NO: 4936 - DNA, 462 bp, Glycine max
cttcatcttcctccgccttagttacaagcacaaacaaatagctccttccaacttttcttctttctcttgcaatagttcacaacagactaagttgcagtgtaaaattttcaagtattgtttttttatccttttcagctgggtaagaatcatggaagtagagaaggaaaataccacatctactattactgcagaaccctcagtatctgcctctgatggtcaagatcctgtttcttctgttaatgcatctctacccgatccgatgcaacctgttattccacaggttattgcaccttttgttgcaccttctttagctccaattcctgcaattcctccgcctcgcccactggcaccgcttccagttcggtcacctgctcattacgccacctgtgccacagaatcgcgaggttggctcaggtgactctgagtcagacactgaccactcagctccacgaattaggcagg

SEQ ID NO: 4937 - DNA, 1464 bp, Glycine max
tcgttgacgcgtgggcggacgcgtgggcggacgcgtgggtttgtatcaagagaagcagtgctgccttcattttcacgaactgttaaatttgggaataccacctacaacctttacagccacagctttcttcattttggcctgaatgctgctcaggactcgttgaaagaagcacttgtattgggagaatttaacttagtgcagcttctcaatctcttcaaaaagggttgcggatagatccttgtactcctacaggatactcttataatgtcggagtcattggaagttccctcctagctcagagagtgaaaaaaaccaatatcagtccactgtacaagccaggggaaacttttcagagtgcagatctgcagcacttacgctgctacagaaagggaaagaatcatgttcctatcagcattgtgacataggatcaactttcataccaaagcttcaggggaaatttttggccacggaaaatttcttttacacatcaaagtttttcggattgaggtcaagggcctatctgtccaagttgatgagtgttgggcaagaattctgtggagaggattggttaaggttgaagaaaaaatatgtctcccatgatgaggacgatttacttcgttattgtttctcttcagcatacattgttgctttgcttcacgacagtctgggaattgctttggatgatgagagggtcaaggttgctaatcaggtgggaagtattccgcttgattgggctttgggagcttttattctgcaaacagcagctgacgcagatataaagaaccataattggatcgccaccattttcagcgatgaatcacatactctcctctcaattattggaatttttatagtgttgttaacggcatggtctatatctaggtggaggaaacctcagttgaagacaatttacgatctagaaaagggacgatatattatcacgcgagttggtagataatgcttgatggtagagcagatcgtggttcttggtttacatgtgtggaggcactgttgtgattatgatgaaaatatttatcctttaaaactcgatggccacatcatactattgaaggccacgccatcgggggctcagattgtaaatcattggattttggatgcagtatgtggagttactcttgccgaggaattagtgtagagtagcatgtttttgtgttgtttactggaatccaggaattgagtgttataccaatcgctttactggtttcagataacagtaaggccagaagtggagcaggtcagcctaggaattgttgccagggggaactagtctagatgctgcatccttcaacagaaaacaccttgttatgtggtttttgtaacaaacactgcataagaaattactcaattgatgcttacccattgctacatacaaaacgaaatcttcattccctgcctgggaagctagttttgcagaagcccattatatagtacatgatttttttg

SEQ ID NO: 4938 - DNA, 601 bp, Glycine max
cggaggatcgaagggcgcgggggggtcagtggcggagttggcggaattcgcgaagcgtggatcccgagggagagctggggggagacggagataaggctgatggccacggcggggctgaggatgctcgacgcggcggcgcaggagaggattctagcgtcgtgcaggaaggtgctgcgtgactccggattcatgtttagggacgaatgggcttctgttatcacaggttctgatgaaggagtgtatgcttgggttgttgctaattatgcacttggcactcttggaggtgatcctttggaaacaactgggattattgaacttggtggtgcttctgctcaggtgacctttgtatcaagagaagcagtgctgccttcattttcacgaactgttaaatttgggaataccacctacaacctttacagccacagctttcttcattttggcctgaatgctgctcaggactcgttgaaagaagcacttgtattgggagaatttaacttagcttctcaatctcttcaaaaagggttgcggatagatccttgtactcctacaagatactcttataatgttgaatcatggaagttcccttctagctcagagagtg

SEQ ID NO: 4939 - DNA, 1032 bp, Glycine max
gagcgttatgggttgccatctcacacaccctctcctatatattgtagcattttcctggcatagtctctaagatcatccatccatctactcataagctttacttaattagcaaatccaaatatggcactttcttcttcatcatcttcaacatccatatttgctttagctttgttcactcttttgcttataggaagttcttcagctcaactctctgagaacttctatgatagtaaatgtcccaaggttttctatgccgtaaaatccgttcttcaatctgctttggctaaagaacctcgccagggagcatctatcgttcgcctcttctttcatgactgctttgtcaatggttgtgatggatcagtactacttgatggcccttcctcagagaagactgcacctcccaacaataactctttgagaggttatgaagtcattgatgccatcaagtctaaggtggaggcactatgccccggagtggtgtcatgtgctgatatcgttaccattgctgctcgtgactctgttgcaattcttggagggccaaattggaaggttaaacttggtagaagggattccacgactggctttttcaaccttgcaaacagtggtgtgcttccaggaccgaattcttccctcagcagccttatccaaagatttgatgatcaagggctctctaccaaggacatggttgcattatcaggagcacacacaattggaaaggcaaggcgtgtcagttatagagatcgcatatacaatgaaaacaacattgacagtttatttgccaaggcacggcaaaagaactgtccaaagggtcgctgtggaacaccaaaggacaacaatgccgcaccactagacttcaaaactcctaaccatttcgacaacgagtacttcaagaacctcatcaacaaaaagggtctccttcgttctgatcaagagctcttcaatggaggatccacagattcactagtgagagcttacagcaacaatcaaaaggcctttgaggctgactttgtcactgcaatgattaagatggga

SEQ ID NO: 4940 - DNA, 407 bp, Glycine max
cccatcagccttacttaattagcaaatccaaatttggcactttcttcttcatcatcttcaacgtccatatttgctttagctttgttcactcttttgcttataggaagttcttcagctcaactctctgagaacttctatgatagtaaatgtcccaaggttttctatgccgtaaaatccgttcttcaatctgctttggctaaagaacctcgccagggagcatctatcgttcgcctcttctttcatgactgctttgtcaatcttggagggccatattggaaggttaaacttggtagaagggattccacgactggatttttcaaccttgctagcagtggtgtgctcccaggacctggttcttccctcagcgaccttatcaaaagatttgaattttggtaaaattttcccct

SEQ ID NO: 4941 - DNA, 1066 bp, Glycine max
tgggggttttggttgggattcaaaccaaccatccgcactgtgcatccctttcttccttcttcgtcttattcttcaaccctctccaaaacttccttcttactcttcttctttctgtttcgcaccctccaaacgacgttgtttctcgtcgttcagccatgtcgtacgactacctcttcaagtacatcatcatcggtgacacaggtgtagggaaatcgtgcctgctcctgcagttcaccgataagaggttccaaccggttcatgatctcaccattggtgtcgagttcggcgctcgcatggtctccatcgattctcgacccattaagcttcagatatgggataccgctgggcaagagtcttttagatccatcactaggtcttactacagaggagcagcaggagcacttctagtttatgacattacaaggagagacacatttaatcatttagcaagttggctggaagatgcccggcagcatgccaatcccaacatgaccatcatgctcatagggaacaagtgtgatctgtctcatcgacgggcagtgagcaaagaggagggagagcaatttgcaaaggaaaatggacttctgttcttggaggcttctgctaggacagctcaaaatgtagaagaggcttttataagaactgctggcaagattcttcagaatattcaggaaggtgtgtttgatgtgtccaatgagtcatttggtataaaagttggctatggacgttccccaaggtcaaccaggtgccagagatggaactgtttcagccagaggtgggtgttgcacgctgattgagagggaaacacactctgaatctaatcccttttgtgcatcgatttctgaattccctgtctcaaccgagtgtatactctttagacttagacatggaacttttgaatagcactacaatttcatgtatagatctaatctcaaaggccttcttgggacagatttcactacatagtttaatggttggctgttgtgttcaatgccagtttttatttgcctttattgatttaaaagagttccactgcaacaacagtgggcaacagctaactaatgaa

SEQ ID NO: 4942 - DNA, 1110 bp, Glycine max
gagtgcgtgaagaaaacaccaactgttttgagttttccaaccttaaaaagactctctcttctctctctctctttctctccctgaagcaaaacaacattagcatcaaaaccagagtggttctagtaatccggtgctgctagaggatgggaactagtgaatggcatatcgagcgaagatctagcttcggcactgaatcccccttagcaagagaggcaggaaatgtgcctgaaactgggtcactctctattgttgtgcttggcgcttctggggatcttgctaagaagaagacatttcctgcacttttccatctataccggcagggattcttaccaccagatgaagttcatatttttggctatgcaaggacaaaaatctctgatgatgaattgagaaaccggttgcgcggctatcttgttccaaagaaaggtgcttctccccaacagttggaggatgtagagaagtttttacagctgatcaaatatgtaagcggctcttatgattctgaggatggcttccgcctgttggataaagagatttcagagcatgaatatttgaaaaacagtgttgagggtttatctcggaggcttttctatcttgctcttccaccttcagtatatccatcagtttgcaagatgatcaagacttgttgcatgaataaatctgatcttggtggatggacacgtgttgttgttgagaaaccttttggtaaggatctagaatctgcagaggaactcagtactgagattggaaagttgtttgaggaaccacagatttatcgtattgatcactacttgggaaaggaactagtgcagaacttgttggtacttcgctttgcaaatcggtttttcttgccactttggaaccgcgacaacattgacaacgtacagatagttttcagagaggattttggaactgatggccgtggtggatattttgaccagtatggaattattcgagatattattcaaaaccatctgctgcaggttctttgcttggttgctatggaaaaaccagtttctctcaggcctgagcacattcgggatgagaaagtgaaggttcttgaaccagtgctccctattaatgatgatgaggttggtcctggacaatatg

SEQ ID NO: 4943 - DNA, 1231 bp, Glycine max
actcgagccgaatcggctcgagttccaaccttaaaagactctcttttctctctctgaactctgaagcaaaacaacattaccagagtggttctagtaattcagtgctgctagaagatggaaactagtgaatggcatatcgagcgaagatctagcttcggctctgaatcccccttagcaagagaggcaggaaatgtgcctgaaactgggtcactctctattgtggtgcttggtgcttctggtgatcttgctaagaagaagacatttcctgcacttttccatctataccggcagttgaatgaaggggatggtgcattctatggaccatagatagacatcagtgtatctgatgcattgggtaggaaattccagtgtgcaactttgcagcttgacttccagcttcctgatcgttttaagttggaattctcagctgaggatgaagccaaaattgagagacctgtaatgatacacagagccatcctaggatctgttgaacgcatgtttgccatacttttagagcactacaagggtaaatggcctttctggctcagtcctcgtcaagcgattgtatgccctgtgtctgaaaagtcacaatcttatgcactacaggtgcgagatcagatccaccaagcagggtatcacgttgatgctgatacaactgataggaagattcaaaagaaggtgcgagaagcacaattagcacaatacaactacatcttggttgttggagaggaggaagctaatacaggacaggtgagtgtacgagttagagacttggcagaacataaggttatgagtattgagaagctacttgaacatttcagagacaaagctgcagctttcgaatgatactttgcatgtgaaaactgtcgaagaaaattttcagccccaaataccttagttttacacagttgtgtgcatttttattttcaacttaagcaatttatcctgattttatttatgatttgaatgatcactgtatttcgcactagaaacataatgtgaatcttggtcatacctggagcgcactctggttgatctttatatcgtttttgtctacgttccgagctttatatcagcattagagtttacatgtcaaaaaaaaaaaaaaaaaaaactcgagactagcctaataaacaaagaccaaaccaaccctttttatttgaaagcttgtaaaggggcacacccctttctctctcctccttccccctttaatttccttttccttcttaat

SEQ ID NO: 4944 - DNA, 447 bp, Glycine max
ctcgagccgattcggctcgagaaaagactctcttttctctctctgaactctgaagcaaaacaacattaccagagtggttctagtaattcagtgctgctagaagatggaaactagtgaatggcatatcgagcgaagatctagcttcggctctgaatcccccttagcaagagaggcaggaaatgtgcctgaaactgggtcactctctattgtggtgcttggtgcttctggtgatcttgctaagaagaagacatttcctgcacttttccacctatacctgcagggattcttaccaccagatgaagttcatatttttggctatgcaaggacaaaaatctctgatgatgaattgagaaaccggttgcgcggctatcttgttccaaagaaaggtgcttccccccaacagttggaggatgtagagaagtttttacagctgatcaaatatgtaag

SEQ ID NO: 4945 - DNA, 1517 bp, Glycine max
gcgccctctcgaggacgactgccagctccagatcttcaagttcgacgacgacgaaggccgcgacaccttctggcactccagcgcccacattctcggccagtcacttgagtcggagtatggatgcaagctatgcattgggccttgcactacaagaggagagcggttctattatgatgcgttttacggggacttgggtctcaatgacgatcactttaagcagattgaggctggagcattgaaggctgttgcggaaaagcaaccctttgagcgtattgaagttacacgtgatcaggcacttgagatgttttcagataataagtttaaggttgagattatcaatgatttgcctgccgacaaaactatcacagtatacagatgtggccccttggttgatttgtgtcgtggaccccatatacctaatacatcctttgtcaaagcaattgcgtgcttaaaggcttcatcagcatattggaggggggacaaagatcgggaaagtttacaaagagtttatggcatatcttatcctgatcagaaaagtctaaaggaatacttgcatcggctggaggaggctaaaaagtatgatcacaggattttgggtgtgaaacaggagcttattcttcatcatgaatggagcccgggaagctggttttttcttccacatggcgctcggatctacaacaaactcatggacttcattcggaatcagtacagggacagaggctatcaagaggtcatatctccaaatgtatttaacatggatctatgggtgcaatctggtcatgctgcaaattatagggaggatatgtttatcttagaggttgacaaacaagagtttgggttgaaaccaatgaattgcccagggcactgcctgatgtttaaacacagggttcgatcatatagagaacttcctcttcgctttgctgattttggggttttgcatcggaatgaggctagtggtgccctgagtggattaacacgtgttaggagatttcagcaggatgatgcacatattttctgcagggagtcccagataaaggatgaagtgaggaatggcttgaatttcatcaattatgtctataagatatttggtttcacgtatgagctgaagctttcaacgaggccagagaaatacctaggagatattgcaacttgggacaaagctgaaagtgctcttaaagaagctttagatgattttggcaagccttggcagttgaatgaaggggatggtgcattctacggaccaaagatagacatcagtgtatctgatgcattgggtaggaaattccagtgtgcaactttgcagcttgacttccagcttcctgatcgttttaagttggaattctcagctgaggatgaagccaaaattgagagacctgtaatgatacacagagccatcctaggatctgttgaacgcatgtttgccatacttttagagcactacaagggtaaatggcctttctggctcagtcctcgtcaagcgattgtatgccctgtgtctgaaaagtcacaatcttatg

SEQ ID NO: 4946 - DNA, 422 bp, Glycine max
gaatatttgaaaaacagcgttgagggtttatctcggaggcttttctatcttgctcttccacgcttcagtatatccatcaggtggcaagatgatcaagacttgttgcatgaataaatgtaagatgctataatatatggttttgattgcaaatgtttcaaaaggacaaatagctgtttgctgagggagggtgggagatatgaacagcgacacagtgaaccatagctcaacaattgttgagaatgatgctttgtcagacattagtctacacatcatgacagagtccactttaagctcttctttttaacttttatttaaatgttggttacttgtctactttttgcaagatctttttcctgataatactggtgctagacatatagctgctgcttccagctggtgggattttggcttcacaagatatt

SEQ ID NO: 4947 - DNA, 303 bp, Glycine max
ggaagcaaaacaacattaccaggtacagtttcagctgactctgcttcacttgctaattgagtggttctagtaatccggtgctgctagaggatgggaactaagtgaatggcatatcgagcgaagatctagcttcggcactgaatcccccttagcaagagaggcaggaaatgtgcctgaaactgggtcactctctattgttgtgcttggcgcttctggggatcttgctaagaagaagacatttcctgcactttccatctataccggcagggattcttaccagcagatgaagttcacatttttggc

SEQ ID NO: 4948 - DNA, 441 bp, Glycine max
actcattcaagtcgctaatcctagttccttcaactcctcgctggcaacaacagcagtactaccattagccgcgtttttcaaaagtgattttcgagaattagcgatgggaattgaaagaggaggcttcaagggattcaggagcgcctggagcgtgccgcccaagccgtgcgattcctgcaagctggcctcggcggcgcttttctgccgccccgattccgcgtttctctgcatcgcctgcgattccaacattcactgctcgaacaaactcgcgtcgcgccacgagcgcgtgtggatgtgtgaggtgtgcgagcaggcacccgctgctgtcacgtgcaaggccgacgccgccgccctctgcgtcacgtgtgactccgacatccactccgcgacaccccctcgcgcaacgccacgagcgcgtccccgtggaacctttctttgact

SEQ ID NO: 4949 - DNA, 883 bp, Glycine max
cgagctaaaacaaaacaaaaagaagaggggggcgaggagaagaagatggaggttagtttatcctcaacatcatgtatacccttaagctcgaagttgaagcataagcatggccttttccactctcaaattcccattcccacagcttcaaccaaaaccagaagaacaaaacctttgtccatagttaacgcctccagacaaaccttgtcctccaactggctcgtttctccacacgatttttctgcatccaccgcttccccatggcttcccagattcgaagagctcgacgccaccaacatgcttctccgtcaaagaattatttttttgggttctcaggtggatgatatgactgcagattttatcattagtcagcttttgtttttggatgctgaagactccaagaaggatatcaagttatttataaactcacctggtggttctgtaactgctggaatgggaatttacgatgccatgaagttgtgcaaggccgatgtgtcaactgtttgccttgggcttgctgcatccatgggtgcatttatccttgcttctggtacaaaaggcaagaggtattgtatgccaaattcaagagttatgatccatcagccacttggaactgctggtggaaaagctacagaaatgagcattcgcataagagaaatggcatatcacaagattaagataaacaagatactatcacgaattacagggaaacctgaagagcagattgaattggacactgatcgtgataattttatgaatccttgggaagctaaggcatatggtttagttgatggtgttattgatgatggaaaaccaggattggttgcaccaattggagatgcatctccgccaccaaaaactcgggtatgggatcagtggaaaattg

SEQ ID NO: 4950 - DNA, 510 bp, Glycine max
  unsure (1)..(510): unsure at all n locations
gggtccacgcacgcgtccgagcngatgcgaaaaaacacaaaaggggacaaaaaaacaagacaccaaagtttcagtttctctctaacgttgttgttaaatgacagtagatctggtaggtgctgccaagatggggatggaggagaatatagcgatacaagaagctgcttccgctgggttgaagagtatggagcatctgattcgtgtgctttcttctcaaatcccttcttctgcttcgtcttcttctaacgcacaccaccaccgtcttaatctcaaccaccttgactgcaccgaaatcaccgacttcactgtctccaagttcaaacaagtcatcaacttgttgaatcgcacgggacacgctcgctttcgtcgcgcaccttctcatccttctccttctacttctcttccttctcaacctcaacctcaaccacaaccacaaccatatgcactgactcttgatttcgcaaaacctgttatgcttaaagtaaatcccaaccctaacccttcttctac

SEQ ID NO: 4951 - DNA, 442 bp, Glycine max
gatccacaccaagaaaaacaaaacaaacaagacaccaaccaaagtttcagtttctctctattctaacgttgttgaatggcagtagatctggcaaatattaggatggaagagaatatggcgattcaagaagcagcttccgctgggttgaagagtatggagcatctgattcgcgtcctttcttctcaaatcccttctgcttcgtcttcttcttctaacgcacaccaccaccgtcttaatctcaaccaccttgactgcgcggaaatcaccgacttcactgctccaagttcaaacaagtcatcaactgggtgaatcgcaaccggccacgctcagctttcgtcgcgcaccttctcatccttccccttcaatttctccccctctcaacctcaacctcagccacaaccacaaccacagacgctgactcttggatttgcaaaacctgtat

SEQ ID NO: 4952 - DNA, 1091 bp, Glycine max
gagcgacaaaacgagactagcacggaaagaaggtgcatcagcccttgacaatggcaatggtggcggaatcaccggaatctgacagtgacaacaactcctcaaaaaccaacaatcctcaaaccctcaatgaaacggcgccgtttcttgactacgctcttgcgcaggcccagctttaccacaaggccttcaacgacgccgtcgattcgacaatcgatactgcaaaatcccgtttctcccaaatccgctcaacttcttccgcccactttcaccagaccttggattctttggatgatctcaaatctcagtacactgcttatgagggtcttttgtttggaaagatcaaagagggtgtagttgttgcagcttcgcatccggtgattacatgtggggctactgcttccctggggcttctggtacttaagaggcctcgtcgggtcttgtactacaacactttgcgcctttttgttagtgaagagtccatgatttctagagcccatgctgaagtgaaagaattgcggcaatcaattgagcttttaaaggctgaaggtgaaaagttggagaagagtgcattacatgcagaagagcaattcttacatggaaggacaaaactcagacatgcaggaaagcagatccgtaacgtgattcaatcagcatataaaattgaaatacgagcagggggtttaaaagatatccttggagaactccctaaaagagaaacatctctcttccgatctcaggtttccaaacttgcttctgaggcaaagaaagaaaaaaataccatgtcgaaggagatctctaaaattagcaactatggcatctcggtttgagaaactttgcttcatcattctctaatcaggactaaagacaatcccctgttattgtcattattttaaattccttcggttcatcatgtccccagagttggaaaatgtgaatgaaaaacgcattgaggctacataacttgataacaatgattatttttttgttgtctttcttttcacaaaatataaagctcaataatagctacaattacattttactagaaaaaaatttctgtatgaaattagtccacatatctatccagaatgggc

SEQ ID NO: 4953 - DNA, 419 bp, Glycine max
ctccctgcccctgcctagattattactaccgagaaagaaagagaataaagaaaagagagaaagagagagagtgatcttgcaagttctgttccagcaagccatggcaatttcagggtcagagactcagagtcctttagtgaaaagcgtttctcaggtggaagttgagtgtgtgaaatgcgacttgtgcgggttcacagaggaatgcacccctgcgtacatcacgagggtgcgtcagaggtaccagggtcgctggctttgtgggctgtgcgtggaggctgtgaagcacgaggtggtgagatcagacagtgtcatcaccacggaagaagcgctggaccgtcacatcagcttctgcagagagttcagatcatcgacggttaccaataataaaacagagcaccccatcttcgccatgggacgcg

SEQ ID NO: 4954 - DNA, 340 bp, Glycine max
ctaacattagtttattatcataggacaacataaatctgtgttaactccctgtgtccctccctatattattactaccgggagagaaagagtgatcttgcaagttctgttctattcctgttccagcaagccatggcaatttcaggtccagagactcagagtccttcagtgaaaagcgtctctcaggtggaagttgagtgtgtgaaatgcgactcgtgcgggttcacagaggaatgcacccctgcgtacatcacgagggtgcgtcagaggtaccacggtcacttgctgtgtgggctgagcgtggaggctgtaaaacacgatgtggtgagatcagataggctca

SEQ ID NO: 4955 - DNA, 442 bp, Glycine max
gtttactcagaatagagattatattctatttctctctccttaattcccttcgtttctctctcttcgccattcattttcctccaacttgttggtctctctgtctctctctctctctctctaggatcccttccttaccattctttacttctccccttttacttgaccccttcaagttgaagtgatcacatagttatcctctaaagcagtattttgctggtgattttcatctgcaatggagttctgaatctatgatgatgggatttctcatttgaacccccagagatggacaagaaagagcatattgcaatttttactactgctagccttccatggttgacaggaaccgctgtgaaccctttgtttcgtgccgcgtatctcgccaaaagtggggaaagagatgtcacttttggtgatccccttgttatctctgaaagatcaaaag

SEQ ID NO: 4956 - DNA, 393 bp, Glycine max
ttgcaattcgcaatctttgcgagttgcgagactgagaattcagaaatttctcttttgttttgcatttttcatggcaaacgttgtattttgttgcaaatgaattggattatgaaatctagaaaggatggaggggattttgctttgttttaaataaaagaagagtgaatcgaattttgaggagtagctggtgatgaatgaattattggcatgagctgcgacaacgtttctgcgcaccgtgtattgtcacacgggttgttgttgcgatgaataatgtgccaaaatgctaatctgaggctctctctctcttttcattttaggtttttgttctctcttttatcgtttcacaagctcttcttacgattttctttctttccccaaattattgattcggat

SEQ ID NO: 4957 - DNA, 605 bp, Glycine max
tggtggatgatgtgttttatgtattgcagagttgcctgcggagggctatatccacttccaatatcagttctgttgtcgcagttttgagtggtgctagtagtttgctcggtactgaatatcatgaagccttgcagcacaaaactagagagccaaaccttggtgcaaagttgttctttggtggtgttggcgtgcaaaagacggggacagaaattgcaacagctttgaataatatggatgttagcagtgaatatgttctgaagctaaaacatgaaattgaagaacagtgtgctgaggtatttcctgcaccggctgatcgagaaaaggtaaaatcttgtttgactgagttggcagatagcagcaatgctttcaagcaagctttgaatgctggcatagaacaacttgtggcaaccattacacctcgcattagaccgttattagacagtgtaggaacaatcagctatgagctttcagaggctgagtatgcagataatgaggtgaatgacccatgggttcagagacttctctatgccgttgagtcaaatgtggcatggctgcagccactaatgactgctaacaattatgacacgtttgttcatttgattatt

SEQ ID NO: 4958 - DNA, 504 bp, Glycine max
acccttccgaccggttgcaaaaggacaacagagctagtattaaggagctagaggcaatgggaaagagcaaggttcttgttgtgggtggaactgggtatgttgggaggagaatagtgaaggcaagtttagaacaaggccatgaaacctatgttcttcaacgtccagagattggtcttgacattgagaaggtgcagatgctgctttcattcaagaagcaaggtgctcaccttgtggaggcttctgtttctgatcaccagagcttagtggaagcagtgaagcttgtggatgttgtgatttgcaccatgtctggtgttcattttcgctctcacaacttgttggtgcagctcaaacttgtggaggccatcaaggctgcagggaacgtcaagctgtttatatggatgaagatgatgttgcaacatacacagtcaagacaattgatgatccaaggacattgaacaagatggtatacctaagaccaccagaaaacattctcactcaaagaca

SEQ ID NO: 4959 - DNA, 1314 bp, Glycine max
tactcgagccgattcggctcgagacgggacgacagaaggggattgctctgaattttctgcatcatattgcacacagagatcgtgatcgaaaatggcgacgttgaaggttcctgcacaacttccttctccattggaagacagtgagcaattgcgaaaagcttttcaagggtggggaacgaatgaaggattgataatatcaatcctgggtcacagaaacgcggctcagcgtaagttgattcgtgaagcttatagtacaacccatggagaagatcttcttaaagatttagacaaagaactttcaagtgactttgagcgggctgtgatggtttggacattggatccttctgagcgtgatgcctttttagcaaatgaagccactaagatgttgacttcaaacaattgggtcattttggaaattgcttccactagatcttcacttgacctcctaaaggcaaaacaagcatatcaagcccgtttcaaaaagtcccttgaagaagacgttgcctatcatactaaaggggacatccgcaagctattggttcctcttgtgagcacattccgttatgagggggatgaggtgaacatgacattggcaaaatctgaggctaaactgcttcaccagaagattgcagagaaggcctacaacgacgaggacctgatcaggattttgtcaacaaggagtaaagcacagttaacagcgacactaaatcagtacaacaatgagttcgggaatgccataaacaaggatctgaaaactgatccaaaagatgaatatctgcaattattgagggcagccattaagtgcttgacttaccctgagaaatattttgcaaaagtcttgaggctggctataaacaagctaggaactgatgaaggggcccttactagagtggtgacaaccagagctgaggttgatttgcagcgaattgctgaggaataccaaagaagaaacagcattcctctggaccgcgcaatagccagtgacacttctggagactatcagagcattctccttgcactggttggacatgaggattaagttttctttcttaatctgttcagttgtcatgggattgcttgttaggctatttgcttttcctcttatcatgaatgtgatattgctatggatctctggacagaggaattcagtggcttgctgttaacgctgcttatgaggggtataaattatcatgctgtttcagaataatatgttttgaatgtcgaaaattcaagacatagcacttcacatctttattaaggatcaattatatgttttagaataataaaatatttgctgcgtcttttactactgtt

SEQ ID NO: 4960 - DNA, 434 bp, Glycine max
ctgcatcatatcgtgggcagagatcgtgatcgaaaatggcgacgttgaaggttcctgcacaacttccttctccattggaagacagtgagcaattgcgaaaagcttttcaaggttaccttacgaccactcattcatttctttcattttgttgacaattattttgtaattgttagatcatcgatctgttttacattttttcgatctatctcgtttgtatttaagtcttttggtgtgtccacgatctgattgcgcggttttattatatatcaactgttaataattagatcatggaatagattattgtgtctggtttatgaaatcactgttagtatttctgcttgacgagtgctggaacggtggaaccgcatccggtgcagttatatttttcatacattcacgcagtcagtaaattgtgaccgttggatgaatatcag

SEQ ID NO: 4961 - DNA, 2174 bp, Glycine max
gggcgagtgaagtagacacttgaaataatgccaagtatactaaatgtcttagtcttaagaggggggaaaaactggaattccaatgattcttaatttcttacaatccaatctgcaaactgagtgagatatataacttgtttttgatttcttcctcatcattttgcatatacaaagattaaaatggaagggttttttggaaattgcttcaatatgattttgctgatgttgtgcttcaccaacttgagcatagcttttgctcaaagtcatatgaatggatttggagagcagccactggccaagattgccattcacaagaccgttttggcgctacacagttctgcttccattatagcagtcccttttgtgctaggaactaagggtgaggatacccaatgggtgactgtagagctagagtccccaataccatctgttgatgactgggtcggagttttttctccagcaaacttcaattcagcaacatgtcctgacactgacggcattggctgggtagaggaaccatacatatgcacagccccaataaagtacaagtatgccaactactctaaccgaaactatgcaaagaccgggaaagctattttgaagttccagttgatcaatcaacgtgcagatttctcatttgcactattttcaggtggattatccgatcctagacttgtggcaatttcgaattccatatcatttgcaaatcctaaagcacctgtgtatccgcgccttgctctaggaaaatcttgggatgaaatgacagttacatggacaagtggatatgacataaatgaagctgtgccttttgttgagtggggaccaaagggaggaaagaaaacacgatctcatgctggaacattgacatttaaccgaaacagcatgtgtggtgaacctgcacgaactgttggttggcgtgaccctggttttatacacacaagtttcttaaaagaactgtggccaaattttaggtacacttacaagttggggcatatgctgtctaacggttcttatgtatggagtaagaagtattcattcaaggcatccccatatcctggacagaactctttgcaacgtgttatcatatttggtgacatgggaaaggctgagcgtgatggttcaaatgaatatgctgattatcaaccgggttctctaaacaccacagaccaactcgtcaaggatttagaaaattatgacattgttttccacataggagacatgccttatgcaaatggatacatctcacaatgggaccaattcacagctcaagtgcaagaaatttcgtcaacagtaccatacatgattgcaagtggaaatcatgaacgtgactggccaaacacaggatcattctatgatactccagattcaggtggagaatgtggagtccctgcagaaaccatgtattattttcctgctgagaatagagccaaattctggtataaagcagattatggcctgtttcgtttctgcatagcagatagtgaacatgactggagagaaggatcagaacaatacaaattcattgagcattgtcttgcaacagtagatagaaagcatcaaccatggctaatcttttcagctcatcgtccccttggctactcctctaatctttggtatggcatggagggttcatttgaagagcccatgggaagggaaagtttgcagaagctttggcaaaagtacaaagtagacattggattttatggtcatgtccataactatgaaagagtatgccccatttatcagaatcaatgtgtgaatgaagaaaagcatcactactctggcactgtgaatggaacaattcatgtggttgttggtggagggggaagtcacctgtcagacttcacaccatcaccccctatttggagtctttatagggacgttgactatgggtttggcaaattgactgctttcaatcattcatatctcttgtttgagtacaagaaaagtagtgatggagaggtctacgactcctttaccatttcaagagactacagagatgttttggcctgtgtgcacgatggttgtgagaaaactactctagcaacatgagttatgttgtgtctatgtgtagacccgatatggacttgaaataaaataaattattgtccaaataaataatggttaatttacttaaaaaaaaaataaaaaaaaaaaaaaaaagggcggccccc

SEQ ID NO: 4962 - DNA, 825 bp, Glycine max
gtcgacccactcgtcagtagagaaccaaagttccaattttttggtttggggatagatagagtgatacacatcacattttctcaaagtaatttattaattaataaataaatggcggcggcggcggcagtgacggtgctactcccacctaggattccgaccgccaccaacgttacccgctgctctgctttgccttctctgcctcctcgcggcaccaacactaaaaccactttgctcttatcttccctcaaccacttctcagtgtcccgaaaatcttctctgcttcagaccagagcttcttcagaggaatcatcctcagtagatgccaatgaggtgttcacagatttgaaggaaaagtgggatgctcttgaaaacaagtccacagtacttttttatggtggtggggctttagttgctgtttggctatcgtcgattcttgtgagcgccatcaactctgttcccttgcttccaaagattatggagttggtagggcttggatacactggatggtttgtctaccgataccttctgtttaagtctagcaggaaggagctagctacagacattgaatcactgaagaagaaaattactggaactgaatagagtggtgttagcaggtatcaagtcaagtttatcttctgagcaccatttgtttttgttgtgctgttatcccctgtataagagtcatatgtatcccttggagtagaatagaattcctctcaacctgtattgcccctgtaatgaacccatttcattgttaaaaataatgtagcaaattttatgtataaattcttggccttggctctgaatggaaaccattatcctttc

SEQ ID NO: 4963 - DNA, 524 bp, Glycine max
attgaatttgaagggagtataggaaaaccaaccaaagttccaaattttttggtttggggatagatagagtgatacgcgtcacattttcataataataaaaaaatggcagcggcggcggcagtgacggtgctactcccacctaggattccgaccaccaccaacgttacccgctgctctgctttgccttctctccctcctcgcgtctccaacaccaaaaccactttgttctcaccttccctcaacaacttttcagtgtcccgaaaatcttctctgcttcagaccagagcttcttcagaggaatcatcctcagtagatgccaatgaggtgttcacagatttgaaggaaaagtgggatgctcttgaaaacaagtccacagtacttctttatggtggaggggctatagttgctatttggctatcgtcaattcttgtgagcgccatcaactcagttcccttgcttccaaagattatggagttggtagggcttggatacactggatggtttgtctaccgataccttctgtt

SEQ ID NO: 4964 - DNA, 332 bp, Glycine max
gcgcaggttcgacgccacgcgtacgcatgggccgactcctgctacctaatgtttaagtctagcacgaacgagctagctgcggacattgagtcactgaagaagaaaattactggaactgaatagagtggtgttagcaggtaccaagtcaagtgtatcttctgtgagcatcatttctttttgccgtgctgcgtatctcatgtataagagtcatatgtatcccttgaagtagaattgaattcctctcatacctgtacatgaacccatttcattgttaaaaataatgtagcaaattttacgtaaaacaaagaaaataaaagcataagagattagag

SEQ ID NO: 4965 - DNA, 985 bp, Glycine max
gagagagtcctcgatcagaaaaaccaagaagggttctttcttccctgcgaagattcagagtgctaagtgtgagagaaagacaatgccaaagtctcaatttcgaaccccatttctggtttcttttccccttttgttattcatcttcaacctcaccccttcgcacgcactctatggagcatcctcacccgtgcttcaactcactccctctaacttcaagtccaaggttctgaattcaaatggagttgttcttgttgaattctttgctccatggtgtggacactgtcaggctctgactcctatatgggagaaggcagctactgtgttgaagggtgttgttactgtggcagcaattgatgctgatgctcacccgtctttggctcaggaatatggaattagaggatttccaactataaaagtgtttgcacctggaaagccacctgttgattaccaaggagcaagagatgtcaaaccaattgctgaatttgcacttcaacaggtaaaggctcttttgaaggatcggttaagtggaaaagcaacaggaggatctagtgacaagacagaaaccagttcttcagtagaattgaactctggcaactttgatgaattggtgatcaaaagcaaagaactctggattgtggaatttttcgcaccttggtgtggacattgtaagaaattagctcctgagtggaagaaagcatccaataatttgaaagggaaggttaaactgggccatgttgactgtgatgctgaaaagtctctaatgagcaggttcaaagttcaaggattcccaactatcttggtgtttggtgctgataaagatagtcctattccttatgaaggcgcaagaactgcctcggctattgaatcatttgcattagagcagctggaaacaaacgttgctcctccagaagtgacagagctacacagtccagatgttttggaagagaaatgtggttctgccgcaatctgttttgttgccttcctt

SEQ ID NO: 4966 - DNA, 944 bp, Glycine max
gatcaaagattttgcaagtggggaaataaagcaggcttcgagcttgtttgattgtgatgtacaacttgatgagtatctaattaagagctattacaagacagcgtcgttgattgctgccagcacaaaaggagctgcgatctttagtggttctgacagcagtgtcactgagaaaatgtatgaatatggaaagaatcttggtctatcctttcaagttgtggatgacatattggatttcacgcaatcagcggacaactgggaaagcctgctggcagtgaccttgccaagggcaacctgactgcaccagtgatttttgcactggagaaagaaccaaaattgagggatatcattgagtctgaattcagtgaggttggttcgcttgacgaggccatcaatttggtcaagagttgtgggggcattgaaagagcacaagagttagcaaaagagaaagctgatcttgcaattcaaagtctccaatgcctacctcagagtgtgtttcgtttagcccttgaggatatggtggcatataaccttcaacggattgcataagcttgtgcatgctgaggacacattgttaaagaaaaaacacaaaaagattcttttggtcctaatatagggatgagagagccttgaactttttgtcatttcaagaatttcaagcaaatctacacttgtgctacttttggggtacttttatagtcattgaagggcaaagcaagcgcgcattctcatcatttaatatatttgcagcttcctgcaaagtacaagaacataatatattccattattgtatcaatacaagtctgcagtatattctttccccccattcttcctttctgggatcttgaaaacagtaaaataaaaaatgataattgatgtttcttttttttttttttctgtttctttttcttctgcattttctgagggtagtataaaatttggcttgt

SEQ ID NO: 4967 - DNA, 402 bp, Glycine max
ggcatataaccttcaacggattgcataagcttgtgcatgcggatgacacattgttaaagaaaaaacacaaaaaggctctctcatccctatattaggaccaaaagaatctttttgtcctaatatagggatgagagagccttgaactttttgtcatttcaagaatttcaagcaaatctacacttgtgctacttttggggtacttttatagtcattgaaaggcaaagcaagcgcgcattctcatcatttaatatatttgcagcttcctgcaaagtacaagaacataatatattccattattgtatcaatacaagtctgcagtatattctttccccccattcttcctttctgggatcttgaaaacagtaaaataaaaaatgataattgatgtttctttttttaaaa

SEQ ID NO: 4968 - DNA, 1501 bp, Glycine max
atgaacatgataaggaactcacagctttgtgggcaggctatgattgcttatctacagcagaagggctttcctgaggttgcactgcattttgtgaaagatgagaaaattcggttcaatttggctttagagagtgggaacattcaaattgcagttgcttcagcaacagcaattgatgagaaagatcactggtaccgattaggggttgaggctcttcgccaaggcaatgctggtattgtagagtatgcataccagagaacaaaaaattttgagagattgtctttcctttatcttgtcactggtaacatggagaaactgtccaagatgttgaaaattgctgaagtcaagaatgatgtgatgggccagtttcacaatgccctatatatgggtgatgttcgagaacgtgtcaagatattggaaaatgtgggccatttgccacttgcttacatcactgcatcagtccatgggctacatgatgttgcagagcggcttgcaactgaactgggagataatgttccatctttgcctgcaggaaaagtgccttctctcgtgatgcctccatcacctgtcatgtgtggaagtgattggcctcttctcagggtcatgcgaggcatgtttgatggtgtgcttgacaatacaggtcggggagtcgctgatgaagaagagtatgaggctgctgatggtgattggggtgaggagcttgacatagttgatgcagatggcttacaaaatggagatgttgctgcgattttggaggatggagaagtggctgaagaaaatgatgaagagggtggatgggagatggaggatttaggtctgggcccagaagctgacactcccaaagcttctatcagtacccaatcttcagtttttgtgaccccaacacctggcatgccagtaagtcatatatggactcagaaatcatctcttgcggctgatcatgcagctgctggaaattttgatactgcaatgaggttgctgaaccggcaacttgggataacaaattttgcccccctgaaaaccatgtttctggatcttcatactggcagtcattcctatctccgggcattttcttctgctccgatcatatcacttgcagttgaaagaggttggactgagtcatctagtgcaaatgtgagaggcccaccggcacttcctttcaaattgtctcaattggatgaaaagcgtaaagctggttataagtttactactgctgggaaattcactgaggctcttaagacatttgttaatattcttcatacaattcctttgattgttgttgagtcaaggagggaagtggatgatgtgaaggaactaattgtcatagtcaaagagtatgttttgggcatgcagatggagctgaagaggagggaagttaaggacaatatagtacggcagcaggagcttgcagcatatttcactcactgcaaccttcagacacctcacttgaggttagctttgcagaatgcaatgactgtctgcttcagggcgaagaacattgcca

SEQ ID NO: 4969 - DNA, 656 bp, Glycine max
ggtggggaaaaaagatagaagaggaaaagtcataaaaagcataagaatctgcaacaaatagtcatggctgcgcttggggaccaatcagaggaacaagccatggctgcccaacctaaacctcagaaccgacccatttctaacatcgtcatcgtcgttgctatgcagacggaggcacttcccattgttaacagattccagctcactgaggaccctgacaccccgtttccgcaaggggttccttgggtccgttatcaggggacatacaaagatcttaatataagcttgatttggccgggaaaagatccaactttgggggttgatagtgtaggcacgatatcatctgctcttgtaacgtatgctgctattcaagcattacaaccagacttgatcatcaatgcaggcactgctggtggcttcaaggccaaaggagctagtattggtgatatttttgttgtatcggaatgtgcttttcatgacagaagaatacctatacctgtaagtgttattcctcttggtagttcttgattgttttgtcttttgcactcttctctacttgacttaaagtgtagttgactatggcaagtttatatttaagactgcaatgaatggaataatcttttggtagtggtggtgttctcttattatgtatgtgatag

SEQ ID NO: 4970 - DNA, 529 bp, Glycine max
aacagtcataacttgcatacgaatctgcaacatatattcatggcagctcttggggaccaatcagaagaacaggccatggctgcccaacctaaacctcagaaccgacccatttctaacatcgtcatcgtccttggtagcttatgattgtgacggtttcgacaacgggttccttgggtccgttatcacgggacatacatagatcttaatataagcttggtttggccgggaaaagatacaactttgggggttgatatttgtaagcacaatatcatctgctcttgtagcgtatgctgctattcatgcactacaaccagacttgagcttcagtgcaggcactgctggtggcttcatggccatcggagctagtattggtgatgttttcattgtatcagattgtgcttttcatgacagaagaatacccatacctgtttttgatttgtatggagttggtgtacgtaaaacctttgaagcacccaaccttgtaaaggagcttaatctaaaggtgggtaaattgtctactggtgactct

SEQ ID NO: 4971 - DNA, 1634 bp, Glycine max
gagagatctattttcatagtttttagttatttgattaattattatcttgttacaaattcagctgctagtgtttccatttttgttaattgtgaagcttgatgtattaccatattgttttcactttttttgtttcctttttaaatggttattgcttgcagagaaagacttcaaaactactgcttttgaaagttctcaatcacatagtgggtcctattatggtgccgataattccaattataatagtaattattatcaggagccagtaaccactcaagtgcagcatggtgtttctggaattcaatatcctgatagctatcaacagccatttgatcctagatatggaagaggctatggtgctcctactccaccccagcaacctcaacagcctaatttgtttgttccaccacagactactcaggttgtgcaaactccccagccgactttctcaaatactgctgttgcaccaccacctttgagaacttttgatcctcaaactcctcccatgcttagaaatgtggagcaatatcagcagcctacattgggttctcaattgtataatacaaccaatccaccttaccagcctacaccccctgttccatcacaagtggccttgagtcatggccagaacttgtcacaagttgtggcacctaccccaaatccaatgggatacatgccagtctctggttctggtggtgtccaaagacctggggtgggatcaatacaacctcccagtccccctcaagtgcaacctgtgcaaccacctgcagcaccttcaactcctcctcctactttgcagactgctgatacttcaaaagtacctgggcatcaaatgcctattgtcacaactttgacaaggcttttcaatgagacatcagacgcccttggaggttcacgtgcaaacccagctaagaggcgggagatagaagacaactcgaagagacttggtgggttgtttgccaagttaaatagtggagacatatcgaaaaatgcttctgacaagctccttcagctttgtcaggcattagacaatggtgattttggtactgccctacaaattcaggttcttcttactactactgagtgggacgaatgccaatcctggttaggttcactcaagcggatgatcaagacaagacagagcgtgagactaagttaaaaaagttacagatttctttttgctgattttggaaatttttcatgtgattagcatcttgcagtagtgattgctgatcctcctatcaatgtacacagactgttgccatctctagatttcaggtgcagggttttgatatgtgcttctacaatttcttgctgtgtctgcagctttcacatcgattgttattaaaagctgttactgaaggtagttttcaggaaatgattagaaatttttgcagattgtttttcgaccaatatttgtaatatggagaaaagtgttgtctgtctgtttgtcctaaaaatttcagatgggttttttcctcacacccctgtcgtaccatggtgacgctccaagctattctagtgttagttatagattgatgtttcttttctttttaaagagtattttgtataacactagccatataagtattgatttgatcgtcaaacaggtgaataatgtagcatcatgttttttt

SEQ ID NO: 4972 - DNA, 530 bp, Glycine max
gagactaggttaaaaaagctacagatttctttttgctgattttggaaaattttcgtgtgattagcatcttgcagtagtgattgctggtcctcgtatcaatgtacacagactactgccatctctagatttcaggtgcagggtttttgattctatgtgcttctacaattttcttgctgtgtctgcagctttcacatcgactgttattaaaagctgttaatgaaggtagttttcaggaaaagatcagaaattttagcagattgtttttcaaccaatatctgtaatatgaagaacggtgttttgcctgtctggttgccctaaatttccagatggtttttcttcacaccccctggctccatggtgacgccccaaggtgttctaatgtcagttatagattaatgtttccttttcttttatttttatttttaaagagtattttgtatcacactagccgtataagtattgatttgatcgtcaaacaggtgaataatgtagcatcatgtttatttaatcatccatcatttaatttctcc

SEQ ID NO: 4973 - DNA, 438 bp, Glycine max
gggctggcaatacattagctgcaactctgtgttatatatgtgctggaaatattgataaaactgttgaaatttggtcaaggagcctgtcaaatgagaccgagggaaaatcttatgttgaccttcttcaggatttaatggaaaagactattgttcttgccttggcaactgggcagaagcggtttagtgcttctctgtgcaagcttgttgagaaatatgctgaaattttagcaagtcaagggctgttgactacagcgatggagtatttaaaacttttgggttctgaagaactgtcgcctgaacttacaatcttaaaggatcgaattgcactttctacagaacctgagaaagacttcaaaactactgctttttgaagttctcaatcacatagtgggtcctattatggtgccgataattccaattataataggaattattatc

SEQ ID NO: 4974 - DNA, 568 bp, Glycine max
  unsure (1)..(568): unsure at all n locations
tagaaatagaaatactgaaatactagagctgaaacaagcttagccctaatccgatcgaattgagatttcaatttgtcaacagaaaaacctaatgtctcatcgagactctgattccaagcgtcgccactccaagttcgatcgagaaccaagtcccaagagatatagaagggatggtaaacaagaaagagaaagggacaggaacagagtaacctcagatggaggagatcagagaaacccaccacatcattttaggcgtgaacccttcgatgctgctcccaagaaatcgaattcaaatgatcatcatgagcagcagcccaaacattcgtctcaaccaccgagatctcgctcttatcaccagtatatgcaaactattttttctgggcttgatgtagccggatttcttgttcaatcccatgccttgaagtggcataatatataaccctcttaggcttgcctatgcttggtgtataacagcatgatgaacggngtagtactgggcaggttggtcgaagcaatggtcaaagggaagctggtggaaaagtctttactcagagtaaagagaataatg

SEQ ID NO: 4975 - DNA, 370 bp, Glycine max
ggatcggattgagatttcaatttgtcaacagaaaaacctaatgtctcatcgagactctgattccaagcgtcgccactccaagttcgatcgagaagcaagtcccaagagatatagaagggatagtaacagagtaacctcagatggaggagatcggagaaacccaccacatcattctaggcgtgaacccttcgatgctgctcccaagaaatcaaattcaaatgatcatcatgagaatccgccccaacatttgtctcaaccaccaagatctcgctcttatcatcagcacgatgaacggggtagtcataccttaaaaagaaattgaatgcttgagctgttacctgtgaaccaagttctgctcctaattgtattc

SEQ ID NO: 4976 - DNA, 683 bp, Glycine max
ccggctcgacccacccgtcaggcgaagaaaacgacagttgggctctcaaacaagctcaagttaattgctagagctcatcagctggttatggatggatttaactgggctcatgaacaaaaggtggttaccatttttagtgcacctaactactgttatcgatgtgggaacatggcttccattttggaggttgatgattccaagggccatacgtttatacagtttgatcctgctcccaggagaggagaacctgatgtcacccgtagaacgcctgattacttcctatgatgttgctgccgcatatcatactcctggcacagttacatctcattctgcacaaatttctagtactttgtgcatcctcatcctcgttgatgagattgctgtaagcacttaaaatctttgggtatgcactccaaacttttttggtgattgcccaataccgtactaatgtaaattaggcgggtaacattccagttttttgtgacgctcaagaacttgctggacaccctattggagaagtctcctagatgatggccaggtcagaatatgtattattccagcgccctgtggatatttttttgtttggtgtttccccatctctagaagcaatgactgggtctccccatttctgttgatgatttgctttgctatgttctatcaattttcagtaaaagttgcatgat

SEQ ID NO: 4977 - DNA, 954 bp, Glycine max
gcattgtagaatgttggaggggtgactgtgacaatggagttagacatgatatggttgagtctgaaatattttgtttgcatggtgggctttcaccttcaattgagactcttgataacataaggaacttcgatcgtgttcaagaggttcctcatgaagggcccatgtgcgatctgttgtggtctgatccagatgataggtgcggctggggaatttctcctcgtggtgctggatatacatttggccaggatatatccgaacaatttaatcactcaaacagcctcaagttgattgctagagctcatcagctggttatggatggatttaactgggctcatgaacaaaaggtggttaccatttttagtgcacctaactactgttatcgatgtgggaacatggcttccattttggaggttgatgattgcaagggccacacatttatccagtttgaacctgctcctaggagaggagaacctgatgtcactcgtagaacgcctgattacttcttataatgtagctgttgaatgtcatactgttatatcatggttacctctactgcactaattttaggtagtagcgcatcctcatcacgagattgccgtaaacatttaaatccatggatatacgtgttccgtgcttttggggttgtccaaagactgctttgatgcataataggcaggtaacattccactgatctgttacactctgaggaattgctggaccccttgtctggagaagtcgccaagatgatgtcagaatacatattgttccagcaaaatgtggatattttttgtttgtttttcatctttttttgtctcttatgttcagtaaaacccttttatggctttacaagctatatgactggatttttttttttgtctcgtggatgtttttgtcatgttctatcattttcagttaaagttgccccataatagtgattcatttttgttcttacgt

SEQ ID NO: 4978 - DNA, 835 bp, Glycine max
taatattaccacgttaaagtttactaacatgtcactggtgcaaaatgaacctttttgtgacaagtgtccagatactaattacttgtttatgggtgattatgtggaccggggttattattcagttgaaactgtaacacttcttgtgtcactgaaagtgcgatatcctcagcgaattactattcttagaggaaaccatgaaagccgtcagatcactcaagtatatggattttacgatgaatgcctcagaaaatatggtagtgcaatggtttggaagacctttactgacctttttgatttctttccgttgactgcattggttgagtccgaaatattttgtttgcatggtgggctttcaccttcaattgagaccctggataccttaaggaccttcgatcgtgttcaagaggttcctcatgaagggcccatgtgcgatctgttgtggtctgagccagatgataggtgtggctggggaatttctcctcgtggtgctggatatacatttggccaggatatatccgaacaatttaatcacacaaacaagcttaagttaattgctagagctcatcagctggttatggatggatttaactgggctcatgaacaaaaggtggttaccatttttagtgcacctaactactgttatcgatgtgggaacatggcctccattttagaggttgatgattccatgggccacacatttatccagtttgatcctgctcccaggagaggagaacctgatgtcacccgtagaacgcctgattacttcttatgatgttgctgctgctgcatatcatacttggggtcgagttacatctcattctgcacaaatttcaag

SEQ ID NO: 4979 - DNA, 465 bp, Glycine max
cccacgcgtccgcccacgcgtccgaaaaaaaaatcagaaaaaggaaatgagagattgttggacaccgtgcggatcaagcactttgcttgttatttcacgcgccctctctccattttgacctccctttcctcttcgttccccactcactgcaacggcgccggagatccgtcgctcgccggagatccgtcgctctcctcctccaccaccaccgcgatgggcgccaattccatgctcgccgagttctctcacgatctcgacgaccagatctcccagctcatgcagtgcaagccactctccgagcaacaggtccgaggtttatgtgagaaggctaaggagattttaacggatgaaagtaatgttcagcctgttaaaagccctgtgacaatttgtggcgatattcatgggcagtttcatgatcttgctgaactgttcgaattgacggaagtgtccagatactaactactt

SEQ ID NO: 4980 - DNA, 505 bp, Glycine max
gattacataaaacaatcaattttttttttcactaactccgctctctgctcttcttcttcccccacaccggaggagagaaaaccaaaatcactcttcactgttagggttagggtttcgattttccccttatccaatctcgcagcagcgagatgggcgccaattcgttgccatcggcggaatcaaacttcgatctcgacgagcagatctcgcagctcatgcaatgcaagccactttccgagcaccaggttagagttttatgtgagaaggctaaggagattttgatggaagaaagtaatgtccagcctgtgaaaagccctgtgacaatttgtggtgatattcatgggcagtttcatgaccttgctgaactatttcgaattggaagggaagtgtccagatactaattacttgtttatgggtgattatgtggacccgggttatttttcagttgaaactggaacacttcctgtgtcactggaagtgcgatatccctaacgaattactattc

SEQ ID NO: 4981 - DNA, 401 bp, Glycine max
ggtgcaaatcaagcattttgcttgttatttcacgcgttctctctccaatttggacctccctttccttcgttcctcactcactgcaacggcgccggagatccgtcgctctcctcctccaccaccaccgcgatgggcgccaattccatgctcgccgagttctctcacgatctcgacgaccagatctcccagctcatgcagtgcaagccactctccgagcaacaggtccgaggtttatgtgagaaggctaaggagattttaacggatgaaagtaatgttcagcctgttaaaagccctgtgacaatttgtggcgatattcatgggcagtttcatgatcttgctgaactgtttcgaattggagggaagtgtccagatactaactaacttgttatgggtgattatgt

SEQ ID NO: 4982 - DNA, 372 bp, Glycine max
ggcttctttgaagtgagttgatcatttcatcagagcgaggcttccatgttcaccacagccatgccagaatccaatgattccgtttccgttgacatggagaagatctacctcggtggaaaggagcatcatattcgaactggctgtggtactgtgtctgtcatagtctatggcgatcctgacaagccagctctgatcacttatccagatttggctctaaactatatgtcatgcttccaaggactatttttctgtccagaagcagcttctttactgcttcacaacttttgcagatatcatatcagtcctcctggacatgagagttcttgcagttgggagcagctgcaatttgtgtcaaagaatctgttccttctg

SEQ ID NO: 4983 - DNA, 1470 bp, Glycine max
cctcgagccgaatcggcacaaagcaaatattgcctattcggcaatatggcggaaaatggttcaattgagctgaacaagtttgtgttcttttgtttgttggtgctaatacaagtggcagtttctgaaatcatttttgaagagcgttttgatgatggatggcgaggtaggtgggtgaagtcagactggaaaagcagtgaaggcaaagcaggttcattcaagcacacagctggaaaatgggccggtgatccagatgataaaggtattcaaacatccagtgatgccaaacactttgccatctctgcaaaaataccagaattcacaaacaagaacagaacattggtccttcagtattctgtaaaatttgagcaagagattgaatgtggtggagggtacatcaagcttctctctggatttgttaatcaaaagaagtttggtggggatacaccatatattttaatgtttggaccagatttatgtggcacggatacaaagaagctccatgtgatactctcctaccacggtcaaaattaccccataaagaaggacctgcaatgtgaaactgacaggttaactcatttctacacattcattctcaggccagatgccacatacagtgtcctggttgataatagagagagagattctggaagcatgtatacagattgggatattcttcctccacgaaaaatcaaagatgtcaaggccaaaaagcctgcagactgggaggaaagagaatacattgaagaccctgatgatgtcaaacctgagggatatgattcgatcccaagagaaattcctgacccaaatgctaaagagcctgaaaactgggatgaagaggaagatgggaaatggaaaccaccaaagataccaaatccagcatacaaaggaccatggaaaagaaagaaaatcaagaaccctaactacaaagggaaatggaaaactccatggatagataatccagaatttgaagacgaccctgatctttatgtgcttaagcctatcaagtatgtgggcattgaagtttggcaggttaaaggcggttcagtttttgacaacgttttgatttgtgacgaccctgattatgcaaaacaagttgttgaggaggtgtttgccaacagggagattgaaaaggaaggttttgaggaagcagagaaagtgagaaaagccaaagaggaggaggaggctcaaagagcaagagaagaaggtgaaaggcgtagacgagagagaggtcatgatcgacgatatcgggacagatatagagacaaatatagaaggcatcgctatgattacgatggtcatgacgagctttgatgggataaaacgtccttctcaattatctggttgacaaatttcaagattgttatgaattatagttacattgatagtccatctcatgttactttccaagggaaactttttaattttaaataaaagtggtttatttgtcgcatatctatataggagtattat

SEQ ID NO: 4984 - DNA, 439 bp, Glycine max
gtaatcaggggtgtaatatactattatagagacttcattatagtgtataaaactatgtccagaagtaacataagacagagagcttatgcagttattttatatgcatgttattgtcatcgttttattacaggaaatctcattttgcttcacttgcattatttttaggaaactttatgtaccacatctggtctaacttcattttttgtttctttatccatgctttctatttttaccttaagagtcagaaagaaagaatgtcctgttgacacattctctatagtttaatgtttggaccagatttatgtggcacggatacaaagaagctccatgtgatactctcctaccacggtcaaaattaccccataaagaaggacctgcaatgtgaaactgacaggtcaactcacctctacacattcattctcaggccagatgccacata

SEQ ID NO: 4985 - DNA, 1305 bp, Glycine max
gtagcagtataaaccaattggagttggagagaaaagaagaagaatctagaaagctgaaatgaataggattcacagcagatatagcaaagctcacactaacatcaatttatgataacaacctcaaaatcaagttatcagtgtgtcaccctgacttttcaaaaacaattatttgttgcttcatatttcactgtgatttcataatagattttcactcatcttacttgactccaagcattctatatatctagtgcctccacgcatctctaccctcaaatcttcaccacacaacactacctcaattactcaactaaagcttcattcattcatcgtgtcgtgttgtgttctttgcaaccatgcttcttagaacagcgtcctctttctctctcttcaacgccaacggcgaccatatactactcccttcctctgttcgctactctcagggcaaacacttggttccatgcgctaccaagaactccaataaccggcccttaaccggcgtcgtatttgaaccctttgaagaggtcaagaaggagctcgaccttgttcccactgtcccacaagcttcccttgctcgccagaagtacaccgatgagtctgaggctactatcaacgaacagatcaatgtggagtacaatgtttcgtacgtttatcatgcgatgtttgcctacttcgatagggacaatgttgcgctcaagggtcttgccaagtttttcaaggagtcaagcgaggaggaaagggagcatgctgagaaattgatggaatatcagaacaagcgaggtggaaaggtgaagttacaatctatagtgatgcctcttactgagtttgaccatgaggaaaagggagatgcgctatatgcaatggaacttgccctgtcgttggagaagctgacaaatgaaaagctgcttaacttgcacagtgttgcctcaaagaacaatgatgtgcaattggcagattttattgaaagcgagtttttgggtgaacaggtggaagccataaaaaaaatctctgagtacgttgctcagctcagaagagttggcaaaggacatggtgtgtggcactttgatcagatgctactccatgaggaaggagttgctgcttgattaacattttttttctacctctcgttcgtgcatctagttagttattcggattagtattttcaggtcttttaatgctagagatgaacaaagtggatatggagtaatattggtcatttgtatgtcgtgttttttttagtaatattggagtaatatggaatttgcgtattggactaatatggaattgacgtattgttggagtaatatg

SEQ ID NO: 4986 - DNA, 283 bp, Glycine max
attccccttgttgtgttgtgttctctgcaaccatgcttctcagaacagcttcatctttctctctcctcaaagccaacgccgaccatatactccctctccccaactcttcttcttctggtattattcgctactctcagtctctggggaaaaacttggttccatgcgctaccaaggacaccaacaaccgccccttaaccggcgtcgtttttgaaccctttgaagaggtcaagaaggagctcgaccttgttcccaccgtcccacaagcttccctcgctcgccagaa

SEQ ID NO: 4987 - DNA, 396 bp, Glycine max
gtaatgcagcaaagagggaaaggtaacaaccgtagatccaggagttgctcaaggtcccgtctcgctgctgaaggcacttagccacacacacacacccaccgctttcagctatggatgagcgtcacattcagaaatcttactggcttcagcattccgccgatctctccgtcgaggcaatgatgctcgattccaaagccgctcatctcgactaagaagagagacccgaggtgctttccctattacctccattcgaaggcaagtccgttattgagcttggtgctggtattggtcgatttactggtgaattggctctgaaagctggtcaattgcttgctgtggacttcattgacactgctatcaagaagaatgaaaccatcaatggacaccacaaccatg

SEQ ID NO: 4988 - DNA, 681 bp, Glycine max
ttcgtccgcgtaaaactaaatcacaaaccaaccttagcctagagaaaattaacaagctagtttgcttgtttttcagtgaactcaaggaatacactttatctcttgagatacgtactaagattcatttaagaaattgatatattcccataattaatttgaaagaagatggaagtggtggtacaaagtcctagtagtccaaacatggatactttcgattttggtggcaacatgggttcgatctttcaaagtgttccttcttcaccaaaagggtttggtaattactacctaagcgcaccggcgagtccatctaggatgtctgaattatacaccgaatttgaatattattcttcggcttcaccctcttcattcgaagcaggcaacaaaattgatgatgacgatgaagacgaaaacaacaacgattacagctttgcgttttacgtgaatcgcgatcaatcagacaagtcgtctcgctccgccgaagagctcttcgacggtggcaaaatcaagcccttgaacgagtcatcacgtgcgacttctgttgctgaacaaaaaagaggcagagaaagagagagaagttcttcttcaacaacaacaacaaagttgtcgtcctcgaactcgggtgttcgtagggtggcacgatcactttctccttatagaaaatcatgggaagttgaacaacag

SEQ ID NO: 4989 - DNA, 376 bp, Glycine max
gaaacaaaaaaatcacaaaccaagcttaattacccaagagagaaattaagaagctagtttgcttgtttttcggtgaactcagggagtcagatagataatactgatccctcgagatattgagattcatctaagagattaatatcatcctacccaaccacaagcttagattgaaacaagatggaagtggtggtacaaagtcctagtagtccaaccatggataatttcgattttggtggcaacatgggttcgatctatcaaagtgttccttcttcaccaaaaggttttggtaattactacctaagcgcacccgcgagtccatctaggatgtctgaattattcagcgaatttgaatattattcttcagcttcaccctctt

SEQ ID NO: 4990 - DNA, 661 bp, Glycine max
caacagccactctctctctttaacctgcctcaccaactcgcatctagaagcaattatagggtctttctctcttctctctctatgttctgtcccctctactttggagtcaaaagcctataaaaccacacccaaacttcctcttgagccggcttcttaatttgttgctgcaagccaatcctaattcctattctcctatccttttacataactctaaagtaagaaaaaatagagcaatttcacaacacaactcttagaattgtgagttaagtatgggaaggtccccttgctgtgagaaagctcacacaaacaaaggtgcatggactaaagaagaagatgacagactcatatcttatattcgagctcacggagaaggctgctggcgttcactccccaaagccgccggccttctccggtgcggcaagagctgccgtctccggtggatcaactacctccgccccgacctcaaaagaggtaactttaccgaagaagaagacgagctcatcatcaaactccacagtctcctcggtaacaagtggtctttgatagctggaagattgccggggagaacagacaatgaaataaagaattattggaacacgcacataagaaggaagcttttgaacagaggaatcgaccctgctactcataggccactcaacga

SEQ ID NO: 4991 - DNA, 907 bp, Glycine max
attgattcaaggcacaggcatcgtgcattattggtgcttacgatgctgtgtctgagaacgccgttttgtctgagtttctctgccaccaaacacctccgtcaaatacaggcgcggccgtccagatcttgcatcaagatggcgtcaactaaaacggtggagcacattgtcctgttcaaggtgaaggaggaaacggagccgtcaaaggtgagtgacatggtgaacggactcggctctctggtgtcgctggacccggttctccacctcagcgtgggcccactcctccgcaaccgatcctccgccctaaccttcactcacatgctccacagccgctacaagtccaaggaggatctcgaagcgtactcagcacaccctagccacgtcagcgtcgtcaagggatacgtgctccccatcatcgacgacatcatgtccgtcgattgggtcgccgatgacctcgccaccgccagtctcgttccgccgccggggtccgcggttcgagtcagcttcttgaaattgaaggaggacgcggataaggacacggtgttgggcgtggtgagaggaattccagagagttttaagcagattagtgagttcagtcttggggagaatttttcgccggggagagccaagggtttctcgattgcttcgctcgcggttttcccggggccgagggagttagaggcagtggattcgaacgaggagttggtgaattcccagaaggataaggttagggatcaaatcgagagtgtggtcgtggttgattatgtggtgccagagcctcctcctgctcagagtgcgagcctttgatggggttattgctacgctatgctttcttcttcttcttttgataagcttaattgttattattagtttattttgttagcaggatggatgaaacccgttttcttct

SEQ ID NO: 4992 - DNA, 506 bp, Glycine max
agagaatagagaaagcgaagggaaggcccgtgagttttgcgcgtgcgagagagacagtggaaagaaaggaaagggatgacgctgggtctgatcaatgcgaatcctgtggttcacgccaagaaagagcgaatcgctcgttctgatgatcctcacgccgatgacgccgttgatcctctcgacatctatgatttcgtgagggatattcgggatcccgaacatccttattccctggaacagctcagtgttctctccgaggaatctatctccgttgacgacaaattaggccgaattctgataacttttacgccgaccgtacagcactgtagcatggccacggttattggactttgtctcagagttaaactgaagcactacttccctcctcattacaaagtggacatcaaggtttctcctggatctcatgccaacgaagaatcagtcaataagcagttaaatgataaagaaagagtcgctgctgccttggagaatcctaacctccgccagct

SEQ ID NO: 4993 - DNA, 1694 bp, Glycine max
gattcctcttcctcctgattggtgagaagatattgttttcgtgctcggttccttgttaagaatcttgttttacgccggggttttggttgcgctcacatcgtgttctctgcggcgcgagctagctagggtttagaacctcgcagttacagaaaacatggcgactgtggtgccaacctccgaagaagacgctgcactctccgtcgttcgattcgcctctgaacttgcctgggccgatgccggtcccgaggttgctgagccccaagttagcagactctgcgtggaggctgaagagttcattgttatgggaaagtggttggagctagcatcattgatgattacctctgctgaattgattttctcaaaggtttctgaaaaagatatagagtccatcttcactatcatctgcaatcttgttacaaagaccgagaatccagatgaagtgatggagattgtaaaagttataactgcaaaaatacttcagcagccaaacgaaaagcctgctgtgcgattgaagattatgatcagtctgtacaatcttttggagactccatactgccagttttatgtctacatgaagttactgaatttagctgttgatgggaaagtcacagaacacattataccttcattcaagaagattgataacttcttgaaagactggaaaattgggataccagaacagagagagctctttcttgctgtctctaatattttgaaggaaaataaaagcatgtcaaaggatgcttttaagttcctgaccagttatctggcaactttttcgggagatgactcacatgttttgagtgaagccaaggaggaggctgcacgtgcaattgtggaatttgtgagggcacctgacgtatttcagtgtgatttactagacttgcctgctgttacacaactggagaaggatgccaaatatgctctgttatatcagcttcttaagatttttcttacccagaggctggatgcatacttagactatcatgctgccaattccaccttgttgaaaagttatggccttgtgcatgaagaatgcattgccaaaatgaggcttttgtcattggtggatcttagctctgatggatctggccaaattccatatgaacttattagggacacacttcagatcagtgatgatgaggtggaactatgggtggttagaggattaactgctaagttaattgactgtaagatggaccaaatgaatcaagttgtagttgtcagtcatcctactgagcgtgtgtttggtcagcaccaatggcaagcactgagaacaaagctagtgacatggaggggaaatattgtaaatgttatcagtaccattcaggccaacaaaataacggaggatgggtcccaggcagcccaaggtttggttgttcgttgaggacgattgagtgaagcaattatctgagtatctagattttatccaggtggaattttttgatcttaaacagaggataagagtgtaatttgctttgttgcaatttatttttccatttattttagttggctggtgactctaattatgtactaaactttggcagagccattttgattgaagtttttccatttttaatttagaccagcctcatttctaaatatctttctgtcgtctaagttaaccagtgcgattgttgttgccctgattgcatagtcaattcaactatcaaattcatattagtatattttca

SEQ ID NO: 4994 - DNA, 486 bp, Glycine max
gtgggtcgcaggatttttcggtttcttctcgtcggagttcgtcagggcaaaataaaagcaggcgaaacgtagtgtcgttttccgtagcggcacgctgcgttcataacccctcattttcattgcgcaaagaagtaaaaccccaacttccctttcgtctctgccctcacctgcagaacagaacgcgtcgtctcatttctctccgcatcgccgtcgcaacaacaccgccgagaagataacctcttcaatcggaaaatgaacgctgataacggttccagagacgccaaactcgacaaccaacacgcaaaagacaaagaaaaggaggaactcaccgagaatatgaacaagttgcatattgaaggatcttcgtctgggagtggatcatctagcttcagaagaaaacctgtcatcattatagttgtgggaatggcagggagtgggaagacaacactcatgcataggttggtatgccatacacatttgaaagac

SEQ ID NO: 4995 - DNA, 503 bp, Glycine max
tgttagtcatcctactgatcgtgtgtttggtcagcaccaatggcaagcactgagaacaaagctagcgacatggagaggaaacattgcaaatgttatcagtaccattcaggccaacaaaataacggaggatgggtctcaggcagcccaaggtttggtagttaggtgagaggacgttttcaactgaagcaattttctgaagcatatagattttatcccggtgaagttttttttaatcttaaaacagagaaggaaaaaattttactccccaactttgtgacagaaccattttgttttaagcttttccattttgatgttatgtttgaccagcctcacgatagcgttgagtatattatacctgtggactgttgtccaagtagctcctaggaatcaatatacagccatttaacttttagtgttttctgaacaaattgttcactgattacacgatcgttcatagttagaccagatagacatggaatcaatatacatctttgctgaatagc

SEQ ID NO: 4996 - DNA, 478 bp, Glycine max
gtgcgtttcagtggtggaaagtggaaaccgtaatcgccaagctggaaagaaaacgctccatttctgcgccactctctgccttatcgccccatttccgttccaacattgacatgagaatgaaaaagattagtcgtagcagtgagaggcatcggagggggaataaaacatggtttcaacagcaacagaaacagagcaagattagaaagcgccagggtgcgcacgttagcaccgaaccccgtgggttcctctcccctaactcgcttcgcccccacggcattcctacgctgatccacactcaaaacgcatcacacaaaacaccgtttcgcagccctaacggacgaggggggtaaaacacacaactgatgcagatgtttcggataacgagattctcggggtttttctccgccgcagtgtttgtgactggtcgtgttactctctccccttccgtccaatccgaagccattcgatcctccaccga

SEQ ID NO: 4997 - DNA, 462 bp, Glycine max
agctaggaattcagctcgaggagacattacagtttgtattattgtagaggagagagggagagagatggagttgagcatgaaagtgttggtgaaagttgcttcgttgcttttcctattgggattcactgcaacagttgttgatgctcgcttcgatccaagttcattcatcactcagtttctccccaatgctgaagccaacaattactatgttaaatccacaacaaaagcgtgctgtaacagctgtccttgcacaaaatcaatccctccacagtgtcgttgttcagatattggagaaacatgtcactctgcatgcaaaacttgtatttgcactcgctcaattcctccacagtgtcattgcagtgacataaccaacttctgttatgaaccttgcaactcctctgaaaccgaagctcactaggaatattgagcatgttccagtgactaacatgtttgacagagtca

SEQ ID NO: 4998 - DNA, 681 bp, Glycine max
ggacgtttctcttcaaaaccctagttagcctcttcttgtttctcctgcaatcaacggcaccccccacaaaaatgacaggagagacagtgaacccaaaagcttaccctttggccgatgcgcaactcgcaataacaatcttggatcttgtgcaacaagctgccaactacaagcaactaaaaaagggtgctaatgaagcgactaagacactgaacagaggcatttctgagttcgttgtgatggccgcagacactgagcctcttgagattcttctccatcttcctctccttgctgaggataagaatgttccctatgtattcgttccatcaaaacaagcacttgggcgagcatgtggagtcacacggccagtgattgcatgttctgtaacaactaatgaaggaagtcaactcaaatcccaaattcagcaactaaaggatgctattgagaagctgttaatttgaaaatttgatattcggtatgacgggcttcttgagaggctttgactggaccagatgttgtattcaacagacaaaggtgttttatgtgtaaacctacatttatatttacttttgccgcgaaggattgtttgaaagtaattttgaagttagctcgccgttgttattaattacacttctgttataacttataaattgttcaatgctatgcatgtggggtgctgttagg

SEQ ID NO: 4999 - DNA, 720 bp, Glycine max
catgtggcctaactcaaaacgttctgtttcgctttctgttgcaatggagatatcaaaagttgcaagagattatggagcatagcctgtgggtgtatttgtggatgatgattctgaaacaattctaagagcttctgatgcagcaaaccttgaatttgttcagcttcatggacatggttctcggttagcttttccgtccttaattcaggaaaatcgtgtaatatatgttctccatgtaaatgaggatggaagccttttaaacacaatttctgatgaagagtgctctctagttgattgggtccttgtagatagtgcaaagggtggcagtggtaaagcattcaattgggaccagttgaaactgccaaacattaaaagcaagtatggttggctcttagcaggagggatccatcctgagaatgtttctgaggctctatctactctcaggcctgaaggggtggatgtcagcagtggcatttgtgcatcagatggtatccgtaaggatcaatcaagaatagcttctttcatgaatgcagtgcattcttttcagtattgatttaccttaaattattatgagtctcaagaaaagaaatattgcgattcggaaaaatcctcatgttgtattgttgcaattttgttgtcaaatccgattgtatatctgaagttcttccttgcgacctgttttctaggcatgagaatattataatggcgggggacaatgcatca

SEQ ID NO: 5000 - DNA, 494 bp, Glycine max
gtccctcacagaagctatagggacagcatggacattcatgctgtttggaattgtggccattgtggcaatcttcgttgtcaatgtttttgtgcctgagaccaaaggggtttctatggaggaagtggagaagatgctggaacaaagatctgtgcagttcaagttttgggagaagagagattctggctctgagaagcactgactcaaagaacaataaaaagaaaaaagcaaaattgtttgagtcatgttttagtttttatagcttaaaatgttgaaattaagtggcttgtgaagttatgggtatttgatgacaatggttgttctctttgggtaagatttggtgatagttagcattttagctctaatgagtatgtagctctctagctgattagttggattgctggaaatccttagaggattgaaatatgtggattggtaatacgctattatttatgatataatgaacaagaaaatactaaattattatcaattgcttt

SEQ ID NO: 5001 - DNA, 341 bp, Glycine max
atgctagaacaaagatctgtgcagttcaagttttgggagaagagagattctggctctgagaagcattgactcaaagaacaaaaaaaaaagcaaaattgtttgagtcatttttattagttttatagcttaaaatagtgaaattaagtggcttgtgaagttatggttatttgatgacaatgattgttctctctgggtaagatttggtgatagttagcattttagctctaatgtgtaggtagttgtctagatgattagttggattgatgaaaatccttatggaattccttagagggttggaatatgagaattggtaccaagctcccatttgtgttataatgaag

SEQ ID NO: 5002 - DNA, 709 bp, Glycine max
gattccaatcctctctttctttccctcttgttctatgctttcaagtagtaccaattgggcactttgtttagtgtcttcattttttttttcatcctcatcaaattaaccccctaaacatcatttagctagctagccaaattaattattaattaggcaaataatgggaaacccagaatccaatttgccacccggttttaggttccacccaaccgatgaggagctcattcttcactaccttagtaaaaaggtagcatccatacccttgaccgtttccatcattgctgaggttgatatctacaagttagatccatgggacttaccagctaaggccacctttggggagaaagaatggtatttcttcagtcctagagaccgaaagtacccaaatggtgcaaggccaaacagggcagctgcttcagggtattggaaggccactggcactgataagaccatagtgacatcattgcaaggaggagcacaagagagcgttggtgtgaagaaggctttggtgttttacaaaggaagacccccaaagggtgtcaagaccaattggatcatgcatgaatatcgccttgtagacaacaacaaacccatcaagctcaaagactcctccatgagagtaagtgtcacatgtccctactagcaataaggttttttagattacattttcatagtaattcttgatattgtcgaacttaggagaaattat

SEQ ID NO: 5003 - DNA, 853 bp, Glycine max
  unsure (1)..(853): unsure at all n locations
cccacatcaaccatcttttctcttcgctgttcctcttcagatcaaacgcacacagttacgctcttcaaatcaatctcttctcagaaatgggtgtggctcaaaacattcccgatgcggaggagggaaccttggagattggaatggaatacagaactgtgtctggagttgctgggccattggtcattcttgataaagttaagggacctaagtttcaagagattgttaatattcgcttgggagatggaactactcggcgtggacaagtgctagaagttgatggtgaaaaggctgttgttcaggtctttgagggtacatctgggattgacaataaatttacaactgtgcaatttaccggagaggtgttaaaaactccagtatcattggacatgcttggccgcatattcaatggttctggaaaaccaattgataatggtccacccattttacctgaggcttacttggacatatcaggaagttccatcaaccctagtgagagaacctatcctgaggagatgatacagacaggaatatctaccattgatgtcatgaattctattgctagaggtcaaaagatccctctattctcagctgctggtctcccccataatgaaattgctgcacagatatgccgtcaggctggcttagtcaagcgactagagaagtctgataatcttctcgagggtggagaagaggacaattttgctattgtgtttgcagctatggaggtacatgagactgcacagtttcaacgtacttgagagatgatcattgaagatgatctttctantnggcatgatctcaatgacgatatcactctgatgtttactctgtgatattgttatgatggcagctt

SEQ ID NO: 5004 - DNA, 2104 bp, Glycine max
tttccacctgagccgagaaacctacagttactctttcattctttaacgttcgcacactccgtcttcaaaccaagatccgtgttcttcacccacgtctctctcccgcttcagatcgtaaacgtctcgctgttccaagatgggtgtggctgagaacattcccgatatggaggagggtaccttggagattggaatggaatacagaactgtatctggagttgctggaccattggtcattcttgacaaagttaagggacccaaatttcaagagattgttaatattcgtttaggagatggaactactcggcgtggacaagttctagaggttgatggtgaaaaagctgttgttcaggtatttgaaggtacatctgggatcgacaataagtttacaactgtgcaatttactggagaggtgttaaaaactcctgtctcactggacatgcttggacgcatatttaatggttctggaaaaccaattgataatggtccaccaattttacctgaggcttacctggatatttctggaagttccatcaaccctagtgagagaacctatccagaggagatgatacagacaggaatatctaccattgatgtcatgaattctattgctagaggtcaaaagatccctctattctcagctgctggtctcccccataatgaaattgctgcacagatatgccgtcaggctggcttagtcaagcgactagaaaagtctgataatcttctcgagggtggaggagaagaggacaattttgccatcgtgtttgcagctatgggagttaacatggagactgcacagtttttcaaacgtgactttgaggagaatggctcgatggagagagtgacccttttccttaatctggcaaatgatcctacaattgagcgtatcatcactcctcgtattgctcttactactgctgaatatttggcatatgaatgtggcaagcatgttcttgtgatactcacagatatgagttcttatgctgatgctcttcgtgaggtatctgctgcccgagaagaagtgcctggtagacgtggttatcctggatatatgtatacagatcttgcaacaatttatgaacgagctgggagaattgaggggcgtaaaggctctattacacaaattccaattctaaccatgcccaatgatgatattacgcacccaactcctgatctaacaggatatatcactgaggggcagatatacatcgacaggcagctgtataatagacagatatacccaccaatcaacgtcctcccatcactatctcggttgatgaagagtgctattggtgagggaatgactagaagggatcattctgatgtgtccaaccagctctatgcaaattatgctattggaaaggatgtccaggcaatgaaagccgtggtcggagaagaagcactttcatctgaggacctgctgtatctggaatttttggagaagtttgagaggaagtttgttgcccagggagcctatgacacccgcaatatattccagtcactagatcttgcatggactttactccggattttccctcgtgaacttcttcatcgtatacctgccaagactcttgaccagttttacagccgagatgctggtaattgatgattaagcaagcaagttcatataccttggtctcctgctcaaccaatgcctactgtcatcagcaatttatttgtttctttgctttctcccccccaccacccaaatccacatttcttctatgcagcataaatataataaaaggattgagtctgtttgagggcctcatattttgagtcggtcggtagtcggaaagtagaccccatagatgctatatgattcctgagccattttttcttttggtgggggaaaatgagttgtgttagtttgggatggcgtcgattgcattgtgggatgttcatattccctgctgtttgaatttgtggacactgccttcccaatgtatgttgcttgtttcataattttattttttttatttatcttgtaatttgattgtttactttaggatattcataatcaggatagttgtcttttggacacatccttgatgtatttatctgcatcagtttatgaataattcaaacaaacttatctagtcaa

SEQ ID NO: 5005 - DNA, 492 bp, Glycine max
gacatacacacccacatcgaccatcttctctcttccttttcagatcacacgcacacagttacgctcttcaaatctatctcttctcagcgattcttgcttcaagttccagaaatgggtgtggctcaaaacattcccgatgcggaggagggaaccttggagattggaatggaatacagaactgtttctggagttgctgggccattggtcattcttgataaagttaagggacccaagtttcaagagattgttaacattcgcttaggagatggtactactcggcgtggacaagtgctagaagttgatggtgaaaaggctgttgttcaggtctttgagggtacatctgggattgacaataaatttacaactgtgcaatttactggagaggtgttaaaaactccagtatcattggacatgcttggccgcatattcaatggttctggaaaaccaattgataatggtccacccattttacctgaggcttacttggacata

SEQ ID NO: 5006 - DNA, 421 bp, Glycine max
tgcccattggaaaggatgtccaggcaatgaaagctgtggtcggagaagaagcactttcatctgaggacctgctgtatttggaatttttggagaagtttgagaggaagtttgttgcccaaggagcttacgatacacgcaatatcttccagtcactagatcttgcatggactttgcttcggattttccctcgcgagcttcttcatcgtattcctgcaaagactcttgatcagttctacagccgagatgccggaaactgatgatataatagcaaggtcttataccttagtcacatgctcaatcatcttgtaatgaccgtgacgattgttttatttcttagatttctcatccaacaatctttatttcttctatccacagcatattcattataataataaaaggtttgagtctgtttgagtgtctc

SEQ ID NO: 5007 - DNA, 368 bp, Glycine max
gattttactcttttatttctggagataagaataataataatttgatctgttctgttaaaaaattatggtccaatagatccgtgttgctaacccacagtccctccctcacccacgtctctccccgcttcagatcttaaacgtctttcgctgttccaagatgggtgtggctgagaacattcccgatatggaggagggtaccttggagattggaatggaatacagaactgtatctggagttgctggaccattggtcattcttgacaaagttaagggacccaaatttcaagagattgttaatattcgtttaagagatggaactactcggcgtggacaagttctagaggttgatggtgaaaaagctgttgttc

SEQ ID NO: 5008 - DNA, 276 bp, Glycine max
ttctcgtgtttttttctccatactctaataactaggcctcgagggtcaataatcactgaaacatttttgttcttgagctagtggtttggttggttcacgcgccttcctcttgccgtgccgttgaattcttagtgggtgttttcacgttttgactctttgcagcgattcttgcttcaagttccagaaatgggtgtggctcaaaacattcccgatgcggaggagggaaccttggagattggaatggaatacagaactgtttctggagttgctgggcca

SEQ ID NO: 5009 - DNA, 568 bp, Glycine max
  unsure (1)..(568): unsure at all n locations
ctgggacacacatcacattctatagtcgatgctgctgctttcatattagatgtccaacataacatgtcttatttatacacatattctttcattgagccttctcttgctgttaatttctgcacgacgtgaaagcgaagaaaaatgaagaattctaagaaaacgtgcgcgcggaagtaccacaaatcggaaaatccacgcttgcggtggacacctgaactccatgaatactttgttgaagttgtggaaggtcttggcggaaaaaacaaggcaaccccaaagagcattctgcatatgatgcatgtgaaaggactgaggatctctcacattaaaagccatcttcagatgtacaggaacatgaagggaggtacgattctcacatcaatgcaacaggaaatgggagaaaatgtgcatgttaaggatcatcacccaatctgctccaactgttcatcccaaagcataatcttcagatcacaaggaactaaatttaaattaaaggcatcaaaatatgatacggngattgtcaatcaagaaattcacccgctagaaaataaaggactttcgcagacca

SEQ ID NO: 5010 - DNA, 446 bp, Glycine max
atggtgggtcttagtgtagtcctggaagcccagaagagttgcatcaacaaaaagacacctcaagtcattaacaaatccaccatgctgatgcttagcagcatccacaacaaaccctcccctcaaccttcttctctttttcagccacccacttttcttgaccaatgctttctttgtgggaagagactcttgccagggaaagacatctacatgtacaaaggggacagggcattttgtagcgtggattgcaggtgcaagcagattttcaccgacgaggaagaagctattcagaaagagaagtgttctttggctgccatgaggcccacatcgtcgagtgcttccacctcaacggcaagtcatcaccaccggaaaggaacaagaaaccgaggtggtgcttgtttttagaggaagaaagaagaagagagcatcagaaatgggaggagaattgt

SEQ ID NO: 5011 - DNA, 468 bp, Glycine max
gaagaatcagaattggaatcggaagaagaaaggaggattagggtttgtggagatgcaagggcaaggcgttgatgaagtgagcatagaagagttggcgtcgaatctttccctctacaaagatcaactgaaccaggttagagaactcttaaacgatgaccctgcaaattctgaatatgttgacatggagagggaactttccgaggtcattgccttgaccgaggaactccttgcaactgcaaagcagaatgaaatctctgctcctcctaataatgctgctgcatctccaaccttgtccatacataacgagaatcaattgctagatagtagctctgatcatcaagagaaacttcctgttggcaccaaagttcaggcagtttggagtgaagatggggagtggtatgatgcgacagttgaggcttatactccaaatggttattatgtaagctatgacaattggggtaataaaga

SEQ ID NO: 5012 - DNA, 291 bp, Glycine max
atcgaaatcggaagaaggattagggtttgtggagatgcaagggcaaggcgttgatgaagtgagcatagaagagttggcgtcgaatctttccctctacaaagatcaactgaaccaggttagagaactcttaaacgatgaccctgcaaattctgaatatgttgacatggagagggaactttccgaggtaagctcaattcaaccccagttttgatgttttgtttccgccttgttctctatcattcattcatcatcgagtaagcagatagatccctcccattccatcggaggatg

SEQ ID NO: 5013 - DNA, 809 bp, Glycine max
  unsure (1)..(809): unsure at all n locations
gagtgtacatgataatatttttaattccacgaaggatgtgttcatctacaagagaaagataaaaatagtgaacacacaaaaaatgaataataaaattattgaaactcacacttttacatttaacagtaattcaaaacatagatttcaatttattttcttttcatttttctcatgaataattttaatctgttatctttctcaaaagaataaaaaatgacactagacatgaagaatcaaaatcctgttaaaaaattcacgaatttgttagcgtctctcctccaaatggaatagaaaaacgcactaaagattccatccatttggaacttgggagagtagagtaccattgctccactgcctctccctcttcgccggcggccaccatgtctttctcggagttccgaccactcgacgacacgtccctcatcgaatacataaagtccgtccccgccctctcctccaaactcgccgacaacctcgacgacttatcagtcaaagaagtcggagatggcaatcttaacttcgtcttcattgtttccaaccccgcaggttcttttgtcatcaaacaggctctgccgtacgttcgttgcataggggaatcgtggcctatgacgaaggagagagcgtattttgagtcgctggcactgaaagaagagggtcgtttaatccccgaacatgttcctgaagtgtatcactttgaccgtaccatgtctttgatcggtatgcgttacttggagcccccacatataatcctcagaaaagggttgattgctgggattgagtaccctctnttggctcaacacatggctgat

SEQ ID NO: 5014 - DNA, 937 bp, Glycine max
ggacttcgatgaagatgtagatgggagaacagagagaaatagagtactttcaggttcccttgacaattccattatctaccttcgcaatctccgtaaggtatattttgaggagaagcatcatgggagaaaggttgcagtagattcattaactttctcagttcaggaaggagaatgttttggctttttaggaacaaatggagctggaaagaccacaactatttctatgctatgtggggaagaatgtccttctgatgggactgcttttatttttggcaaagatatatgttcccatccgaaggctgctcgccgatatattggatattgtccacaatttgatgctctattggaattcttaactgtccgagaacatcttgagctttatgctagaataaaaggtgttccagattttgcaatagacaatgttgttatggaaaagttgacagaatttgacttattgaagcatgctaataaaccatcattttcacttagtggagggaataaacgaaaactgtctgttgcaattgcaatgattggagatcctcctattgtcattcttgatgagccatccacaggtatggatcccattgccaaaaggttcatgtgggatgtaatatctaggatctcaacaaggcgaggaaagactgcagtaattcttactactcacagcatgaatgaagctcaagccttatgtaccagaatagggataatggttggtggacgattacgatgcattggaagtccacagcacctaaaaacaagatttgggaatcatctggaactaggggtcaaacctactgaagtgagttctgcagacttgcaaaacctctgccaagctattcaagaaagacttcttgatgtcccttctcatcctagaagcttacttaatgaccttgaaatttgcattgggggcactgactccgtcacatcaggaaataca

SEQ ID NO: 5015 - DNA, 773 bp, Glycine max
ctcgagccaaaacaatctccgttgcttaccgtttcttgaaagcgaagacacctgaacaaagggctgctgttgacttggacacccattactctcaagaatatcttgaagaatatgttggaacagataagaggagagccatcttatatcagcaatatgttaaaggtatatcaacaactgggatgcaatctaactatggtttcgatggtcaactcaatgcatgttggacacataaaatgactgaaacagagattgaggtgatcaaatctgcaggttttcttgtttcagtcatccatggcaggcatgatataattgctcagatatattatgcaaaaagacttgctgaaaggcttcatccagtggctagaatggtagatcttcacggaggtcatttagtaagtcatgagcggtctgaagaggttaatcaagcactatttgacttgatcaaggcatcaaaagtgaatatgagcccacatgattggactaatttgccaaagaaagagtcttgtaagtattccccattgaatgttttagattttcttgcacttggcaattcaacatgagctcgcatgactgttttctgtagcttggtgggctgccaatgtgtggtaataatctctaagctccaagcagagacatacccacgttggtggataagggcagtgtccccactcaaatttactactaccatacatgatttgctattttttacctgagcctaagaaggttttccccgaaacaaggttcctgggtaaattccaatttttactaaccac

SEQ ID NO: 5016 - DNA, 803 bp, Glycine max
ctcgagccgaatcggctcctggtcatcgttgggatctccatacgccggatctgctaaaatacgcttgatccatatgggcctcctcgaccacttgtgggacgacaccgtcgccggcccaaggccggaaaacggtctcggcaagctccgaaaacaccacaccttcactttccgacctagctccggcaaggaaacggagggcgggagcgtgagatcgtacggagacgaatcgtcggaggaagcgacgagagtgacgcgtagtatcatgatcgtgaaaccgcccgggtaccagagtggatcgcctccggtttctcccgccggttctactactccgatttctccgttttccggaggaaaagattcgtttcggtttcgaagaaggtcggcatcagatgcgtacgagaagagagggcagaacagatcaggcccttcttctcctttcgatgtgtgagaaatgagagtcgcattttctcgtacccgaaagctgaggatgtagtcttttggcctatgctgtattcatttttgtttagatctccgtttgcatgtatgaatgtatgtaaggaatgagttgaggttaaggttgtgccacagttctgccagttcacgcgaggtagctttttggtttagcttctttaagtctttacttaggtgagctgcgtagtggctggcaaattgtaagtaagaaagtgtaagggtagagtagcggtgtatcttattattatgtaatgtatatttataattaataagccattctgcgtttgttggtaaaaaaaaaaaaaaaaaaaagggcggccgccgactagtag

SEQ ID NO: 5017 - DNA, 518 bp, Glycine max
tcgttgacgcgtgggcggacgcgtgggctggtcatcgttgggatctccatacgccggatctgctaaaatacgcttgatccatatgggcctcctcgaccacttgtgggacgacaccgtcgccggcccaaggccggaaaacggtctcggcaagctccgaaaacaccacaccttcactttccgacctagctccggcaagggtacgccctgcctcgttaatcatactcatataattcaccaacgattttcgttaactacaagtccacaactacaatcgttaactcaactcttatcataattatcattcttttataatctaaccactcgtaccttcgaatcggagaccgatttgtgtgttttaggttgcatgctgtcagatctacaccctaaacatgcttttcaagctcgaatcctccaagttccgaatcttctaaatcatttccacatgatctatatgcataatagtaaaagatgatatagtttgggagatgaaataacctgaacataacaactttaatttg

SEQ ID NO: 5018 - DNA, 543 bp, Glycine max
  unsure (1)..(543): unsure at all n locations
acgaggggatctccatacgccggatctgctaaaatacgcttgatccatatgggcctcctcgaccacttgtgggacgacaccgtcgccggcccaaggccggaaaacggtctcggcaagctccgaaaacaccacaccttcactttccgacctagctccggcaaggaaacggagggcgggagcgtgagatcgtacggagacgaatcgtcggaggaagcgacgagagtggcgcgtagtatcatgatcgtgaaaccgcccgggtaccagagtgatcgcccccggttctccccgcggttctactactccgatttttccgttttcccgaggaaaaggatccgtttcggtttcgaagaggtcggcatcagaagcgtacgagaagagaagggcagaaccgacaggcccttcttctccttttcgatgggtagaaaataaagtccattttctcgaccccaaagccggagagaggagctttggccctggcggttcaaccttttggtttaaccccctgccgtgtaaaatatttttgaagagaaaggannnggnngg

SEQ ID NO: 5019 - DNA, 249 bp, Glycine max
tcggtacgagacaatgcgactctcatttctcacacatcgaaaggaccagaagggcctgatctgttctgccagttcacgcgaggcagctttttggtttagcttctttaagtctttacttaggtgagctgcgtagtggctggcaaattgtaagtaagacagtgtaagggtagagtagcggtgtatcttattattatgtaatgtatatttataattaataagccattctgcgtttgttggtagtgttcaaaa

SEQ ID NO: 5020 - DNA, 567 bp, Glycine max
gttgggatctccatacgccggatctgctaaaatacgcttgatccatatgggcctcctcgaccacttgtgggacgacaccgtcgccggcccaaggccggaaaacggtctcggcaagctccgaaaacaccacaccttcactttccgacctagctccggcaaggaaacggagggcgggagcgtgagatcgtacggagacgaatcgtcggaggaagcgacgagagtgacgcgtagtatcatgatcgtgaaaccgcccgggtaccagagtggatcgcctccggtttctcccgccggttctactactccgatttctccgttttccggtaaggtcgttatttcttttctactactctgtttactgtcacggtaaaaaaatatatatgcttgcgcggtccagtaaaagtaaacaacgcccccacaatttcgggtagcggatatcttgtcctttgcccggcatgataaagcagtgtttggtgggagtagttatgcatgaacaatgatatttggttgttaaattgacttgcccacataagtagcaccttcattggtcacacagtatatatgaccaca

SEQ ID NO: 5021 - DNA, 512 bp, Glycine max
atgatcgtgaaaccgccagggtaccagagtggatcgcctccggtttctcctgccggttctactcctccgatttctccgttttccggaggaaaagattcgcttcggtttcgaagaaggtcgggatctgatgcgtacgagaagagagggcagaacagatcaggcccttcttctcctttcgatgtgtgacgcattttctcgtacctgaaagctgaggatgtagcagcttttttggcctttgctgtattcatttttgtttagtctttgtgtgcatgtataatgtccggaatgtctgtaaggaagttctgccaagttcatgcaaggtagcttttggtttagcttctttaagtctttacttaagtaagctgcgtagtggttgccaaatcgtaagtagaaagtgtaagggtagagtagcggtgtatctttactccttatcatgtaatgtatatttataattaataagccattctgcgtttgtttttggtaaaaaaaaaaaaaaaaaaaaaagggggggc

SEQ ID NO: 5022 - DNA, 872 bp, Glycine max
agcccacgcgtccgcccacgcgtccgcccacgcgtcgggccagtgggcattgatccaaagtcgcatcttttgcttcactcgtcatcactacgcagatcgcagcaaaccagagattgaactccgacgatgcctcccgtcgctcctcgatccggcgatgccatattcgccaacgtcgaacgcgtcaatgcggagctgtttactttgacgtatggcgcaattgtgcgtcaattgctcacggatctggaagaggttgaggaggttaacgagcagcttgatcaaatgggttacaatattggaatccgattgattgatgagtttttagctaagtctaatgtctcaagatgcaacgatttcagagagacgactgatgttattgcaaaggttggttttaaaatgttcctcggtgttactgcatctgtgaccaattgggatgctgatggaacatgttgtagtattgttttggaggataatcctttggtagattttgttgagcttcctgacaactgccaaggtttgtactattgcaacatcttaagtggagtcatcagaggagccttagatatggtgtcaatgaaaactgaggtaacttggcttcgtgatgtgcttcgcggtgatgatgtgtttgagttgcaggtaaaacttctcaagcatgtcccagaagagtatccatacaaggatgacgagtgaatttgtttttgtagtattgtatactccaggttttcattacttcatcatctctgcattattagattatcatattctgactggtcctgtgtgtattatgataaaacactaaatacaacagaacatctttaatccaatccctatcatattgaatttgtcagcgagctacgatctattaagaaaaaaaa

SEQ ID NO: 5023 - DNA, 385 bp, Glycine max
gaaaaattatccaagaatcaaaactattgttaataaagttggaaccattacaaatgaatttcgtgtgccagagtttgaaattttagcaggagagcataatatgattacagaagtgaagcaatatggtgccacttttaggcttgattacagattggtttattggaactcgagattggaacatgaacacaaaaggttagtctcaatgttccaagctggacagaccatttgtgacatgtttactggtataggcccttttgccattcctgctgcacagaaaggatgcatagtctatgcaaatgatttaaatccggatagcattcactatctgaggattaatgccaaaatcaataaggttggtgattgcatttatgcatacaacatggat

SEQ ID NO: 5024 - DNA, 881 bp, Glycine max
cattaacatggaccaaaatgattaacattcaggtaaagactcgaaaatgattaagaaagaagtgagaatacgaaagaaggggtttaattgccaaatgaagaaggctcacgagacacgcatggggtcagccacatgctatccctcctcctcctccttctctctccggtggtggtgactcgccggaaaacacccactgccacctctaacgccgccgccggcgaacacccttctcaaaatctcacccgacccaattcacctttctcctctctcttctcaattccccatctgggtatccctgtttccctcaaagttctcttctttttcgtgattcagaagtgctcagtgatacccttttcttagaacaatgagagcggggaaagggagtcaggaagaggatgagtacgaggaagaagagtttggttcttccaagaaacagggcacttcctctgcccctaacaccaataaagatggaaaagccatcgataaggctagtgcgataagatcgaaacattctgtgactgagcagcggagaaggagcaagataaatgagagattccagatattgagggatctcatacctcatagtgatcaaaagagggacacggcatcatttttattagaggtgatggagtatgttcagtacttacaggagaaggtacaaaagtatgaaggttcatatcaaggttggggtcaagagccccctgaagttgatgccatggagaaatagtcattggcgtgtccagagctttgctggtcaacctacagctgtaaagaatggtttgggtccagtatcaccttttcctggagagtttgacgaaagcaatgctagtatctctccaactatgcttagtggcaccagaatacaatagatcttatcagag

SEQ ID NO: 5025 - DNA, 250 bp, Glycine max
gggtttattgccaaatgaagaaggctcacgagatacgcatgggatcagtcacatgctagcgctcctccttcttcttctctctccggtggtggtgactcgccggaagacaccaacttccaccttcaacgccgccgctgaagtgctcagtgataccctttgtttagaacaatgagagcagggaaagggagccaggaagaggatgagtacgaggaagaagagtttggttcttccaagaaacagggtacttcct

SEQ ID NO: 5026 - DNA, 577 bp, Glycine max
gcgggtcgtgaagaaactcaattctcactgaaagaaagttgctaactcttggcaccagttatcagcttaacatagttgataacaccaaaggcacaacaacattgagggaatgaggcttgtcatatcagctgtatgtgttattgtgctattttcttatgctgctgcgtatgatcctttggatccaaatggaaacataacgatcaaatgggatgttgtgtcatggacaccagatggctatgtagccgtggtaacaatgagcaatttccaaatgtttcggcacatcatgaatcctggatggaccttgggatggacatgggcaaagaaggaagttatatggtccatggtaggagctcaaaccacagaacaaggagactgttctaagttcaaaggcaatgtacctcactgctgcaagaaaactcccacagttgtagacttgctccctggtgtgccttacaaccagcaattctcaaactgttgcaagggtggagtggtggcagcatggggccaagacccttcaccagctgtctcatccttccaagtgagtgtaggccaagctggtacctcaaacaagacagtt

SEQ ID NO: 5027 - DNA, 263 bp, Glycine max
caactctagatcttaaaaacttttgtcactgaaggtgtcttggagccaattgtagcagttggtaacatcaaacacatattcagacaatgaggcttgtcgtctcagctctttgtgttcttgtgttattctcttgtgcagttgcttatgatcctttggatccaaacggaaacgtaacaatcaaatgggatgtaatgtcttggacaccagatggctatgtggctgtggtaacaatgcacaacttccaaatgtttcggcacatcatg

SEQ ID NO: 5028 - DNA, 1040 bp, Glycine max
gtggtaagatgtgcaattgtacatatagctcttaatgtttgctttgactttgtttcataggctcctttttgattacgaaaatgtggaagagaacgggttttgaagaagaagcagttcaattgatcaactcagatttcagggacctaagtctagctgctaatagactcgcccatcatgccatcaaacttggtggcattggctttggagcctcttttttcggattgtttgctgccattgctgctatttatctgttgattttggatcgtacaaactggaaaacaaatattctcacagcactactcattccatacattttcttcagcttgccttcattaattttcgacgtcttcaggggagagcttggaaaatggattgctgcagttgctgttgtattacgccttttccttccaagacacttccctgattggctggaattgcctggtgctctgattcttcttatcgttgtagctccttctctaattgcaagcacctttagagacaacattgttggggtggtagtgtgcctcatcattgcatgttatttgctgcaagaacacattcgggcttctggtggtttcagaaactccttcactaaagctcacggcatatcaaattccattggcataatacttctgttggtttatcccatctgggcgctggtggtcatacttttttaggcaccaccatttggacttggttgatatgtgagaattaaaccaagtgtcttctgtatcattcatttgttgcaacttgatatctataaacacccggccattgttttgtgattcatgtttgtcctaagacctaaagttagcatgtgttaaaaagtggaataaaatctcagtttaagtcctctggtttcatagaatgtagaaaacaaaagatgaagaggattgatgtggtgtctttctagctgtcgtgtattcataaatcatgtatgatttgggaaatcgttgtatttttacctgtgggatataatataaatttacatttgttgctgctctgtattattaaaaaaaaaaaaaaagggcggccgccga

SEQ ID NO: 5029 - DNA, 663 bp, Glycine max
agcgttcgtaagataacgagaccagattctgctgaatttgtgggatttggctcttaagtctaaacttatttctcaagtttgtttgtcatgagttaaatagttacactatttttgccttctttttttttttaaaaaaaaaaaaaattcattcgtaagagagcgagctccatttctatagtctccgtctagaaaatcaattcaacagtactttggctgtgctggtcgtgggaatttttgggtaaacaataatagtttttgtatttcactagtgggtacattataacatgttaccttgatctgaagttcccgcaaacattgacaagtgatattctattgtgatttttttgttcttttgcgaatctcgcttgaattagctgattacgaaaatgtggaagagaacgggttttgaagaagaagcagttcaattgatcaactcagatttcagggacctaagtctagctgctaatagactcgcccatcatgccatcaaacttggtggcattggctttggagccttttttttcggatggttggctgccattgttgttattaatttgtggattttgaatcgaccaacctgaaaaccaatttttttaacagaattattatttcattccttttttttaacttggctttatttaattttaaactttttaaggggaa

SEQ ID NO: 5030 - DNA, 740 bp, Glycine max
gggagatttcttactcgatattggaaaagaagagtttagagaaagcaagagcagctggtgtatctatctctctgtgttcattattggtaaagcattaatctccacgtggccttgccttatcatgtgcaattgttgtgcatatagataagcacatccaaatgtctgctttgacttagtttcatacactccctcctgtttgattacgaaaatgtggaagagaaggggatttgaagaagaagcagttcaattgataaactcagatttcagagacctaagtctagctggcataggctttggagcctctttcttcggattctttgctgccattgctgctatttatctgttgattttggatcgtacaaactggaaaacaaatattctcacagcactactcattccatacattttcttcagcttgccttcattaattttcgacgtcttcaggggagagcttggaaaatggattgctgcagttgctgttgtattacgccttttccttccaagacacttccctggtatggcataactgcttacagcataagttagtgtctcctagagcaatgtgcttttacccatggcttaaacttgaagacatgcaactattttgctgctatccttattgatgatcagtgacattctagaacaaagtacaaccaacttaacatttctttaggacaaaacttggatatattttagtttcgcttcccaatcaaaattgaattttcacttcattacttcgc

SEQ ID NO: 5031 - DNA, 544 bp, Glycine max
  unsure (1)..(544): unsure at all n locations
cgaaaatgtggaagagaaggggatttgaagaagaagcagttcaattgataaactcagatttgagagacctaagtctagctggcataggctttggagcctctttcttcggattctttgctgccattgctgctatttatctgttgattttggatcgtacaaactggaagacaaatattctcacagcactactcattccatacattttcttcagcttgccttcattaattttcgacgtcttcaggcgattagcttgtcacgctttattgttatcaattttgcaccatcatttttctgtaatagtaattttcctttttattatcattctacttatgcaggggagagcttggaaaatggattgctgcagttgctgttgtattacgactnttcattcctagacacttccctgattggctggatattgcctggtgctctgattcttcttatcgttgtagctccttctctaagtgctaccacctttagagcaggagctacaacgatatgtagattcagagtcgcaggcaattcccggctcgagcggctcgag

SEQ ID NO: 5032 - DNA, 358 bp, Glycine max
gataactgtctccatgcactttctttcatggccgttcttttctccaatctcatctgcatcaccaacaacaccaaacccggcttcgctttcacctcaaaacccataatttgtggggccaagaacctcacttccaaacggagcctcatccttcaaactcctctggtctgcattggcattggcctaactcctcaagtctcagttgcgcaagaatcgccgtccaaatcgcttctttctagcattgaatacacgacatcctggtttcagttctacggtgatgggtttgccattcgagtctcaccggagtttaaggatatcacggaacctgaggatttggatgctggacagtccctttatgggg

SEQ ID NO: 5033 - DNA, 582 bp, Glycine max
ccacacgaaatcaaagcgaagggtttagatttccggaatcagaaatgaaagcatccgcactgcttaacttgaaatctttcactctcagccgccattctcccacttccaactccttcttccccccctttctttgtccatcccacccccgccaccgccgaatccaccactctcgaaatccaatcatgtctgccacatccgtcaactccgaacgagcacgcgcccctcccgccattcccttgccccctccccctctctccaacttcaaaattggcctctgtcaactctccgtcagccccgacaaagacagcaacatcgcccacgctcgcaccgccattcaggatgctgcatcaaagggcgcccagcttgttcttttgcccgaaatttggaacagtccttattccaacgatagttttcctgtctacgctgaggatattgacgctggtgcttctccttccactgccatgctatctgaactctctcgtctcttgaaaatcaccatagttggtggttccattccagaacgctctggaggtctcttgtacaacacttgctgcgtgcttggcaccgacggaaacctactag

SEQ ID NO: 5034 - DNA, 1112 bp, Glycine max
gaccaacacttgtagccacaaatccaaattatagtaatatttcatgcttctctatcactcttgtcaaattccacaaaaaccaagtactactacaagggaagaaaaacttagctacaagctaaggaaggatcaaagagaatggctcaagcaatggcatcaatgactagcttacgtggttcctctcaggctgtgttggaaggtagccttggctccacacgcttgaatgtggggagtggaagcagggtggcctcagtcacacgtgcagggttcacagttagagcacagcaacaacaagtgaatggtggtgaggtacaaagtagccgtagggcagtgctttcacttgttgctgctggtttgaccactggctcttttgttcaagctgtgcttgctgatgccaaacctatcaaagttggaccacctcccccaccttctggcggattacctggaacattgaactcagatgaaccaagagaccttaagctgccattgaaagataggttcttccttcaaccattgtctccaactgatgctgcacaaagggcaaaggaatcagccaaggagattgttggtgttaagaagttgattgaaaagaaggcttggccatatgttcagaatgatctgcgtctcagggccgagtatttgcgctttgatctcaacactgtcattgctgcaaagcctaaggatgagaagaaatcactcaaggaactcactggcaagctcttccaggatatcagcaatctggatcatgcagcaaaaattaagagcagcccagaagcagagaagtactatgctgctactgtatcttctctgaacgatgtccttgccaaacttggttaatgtgattaatttcttgctttcttgtgtaagctttgtgcatcattttctcagacactttgttgactgatattttaagaaaatcaaatgatgagggaaaattttctataaataagatcaatatatctagacgacttctctcctgcatgtccaaaactgaaaggtaattaaggggtaatgtaattgtagaagttagaagtttaattataatttcctgagcacaaaactagaatagttataatgatactataatcttagtacacagtatttggatcata

SEQ ID NO: 5035 - DNA, 358 bp, Glycine max
cggctcaatctgtcgtccggaagcagggtggcctcagtcacacgtgcagggttcacagttagagcacagcaacaacaagtgaatggtggtgcggtacaaagtagccgtagggcagtgctttcacttgttgctgctggtttggccactggctcttttgttccagctgtgcttgctgatgccaaacctatcaaagttggaccacctcccccaccttctggcggattgcgtatgtctctctctctctccccccccccctcttctcttacaattcaattcaatccattttgaagaaatgatgattagttgagagtgtaaaaatctctactgatagtgcatgaaaattgatctctctctctct

SEQ ID NO: 5036 - DNA, 662 bp, Glycine max
gtagaataacttcttattacaagtaagatgttttggttttatcacctttataatactaaaatgacattttaaagagtatccaaactacaggcatgtaatggtgtatcaagatgaaggattaacagtagaaaaattgcaggtctgcagcattagtaggaaaagaatataacttcatagctaacttgaaacttcattgtatttgaatacacagtcatacaaacgtccaccgagaaattgtgctacctcgggatgtttcaccattccaatcttaagggtagcacatttaaattgagcatagagatttgtttctattccacgacccatcccttctaagatgacaagatctgcatcgctggcaaggtaagcaagctcctgtgacactcttgtaagatcaatgacaggtaaatcattgccagagttcgcaattaagagatttgaagtactgacacccacaagctgtccatcttcatccttttgctgcagacctgcaatttttctactgttaatccttcatcttgatacaccattacatgcctgtagtttggatactctttaaaatgtcattttagtattataaaggtgataaaaccaaaacatcttacttgtaataagaagttattctacatacatgacttggtctcactctaacgaaaaggtaatat

SEQ ID NO: 5037 - DNA, 726 bp, Glycine max
cttggaaagttggaggcatatgcagttgaaacaataagcctggactaattgcaaatgtagtgttaggtatttatcaaagtaaagaatcagcgttaattttaagctctaaagttcatcatatttgatcacgcaatcatacaaacgtgacccaagaaattccgcaacttcaggatgttttaccatagctatcttgagggaatcacatttaaattgagcatagagatttgtttctattccacgacccatcccttctaagatgacaagatctgcatcgctggcaaggtaagcaagctcctgtgacactcttgtaagatcaatgacaggtaaatcattgccagagttcgcaattaagagatttgaagtactgacacccacaagctgtccatcttcatcctttaactttgatataatttcaactagctcagaacaagtcacatcattgatggatggtaagtcattagcagccaatacaacctgactcccacgccgaagtagttctcttgcaaatggcataatacccaaaatgatatctgcaccagagttatcaacaaatatgataaccttcttccatgacttcttgctccatttcaatttgaaagtgtcaagatcatcaatgacccaaggtcgaggaacgagattttgacaactagccataaaggacattccatccttagagaaaacctctgcaagctgtgcagaaccaagatcaaatatcccttctgtcgt

SEQ ID NO: 5038 - DNA, 391 bp, Glycine max
ctttggaagaagaagaaaatggaggaggaacaaaacggcggtcgtttcgacctcataatcctgggcgcctcaggcttcacaggcaaatacgtcctccgcgaagccctcaaattcctcaacaccccatcctcccccctcaaatccatagccatagcgggccgaagcccacaaaaactaacccaggcccttcagtgggcctccaggcccaaccctcccccctccctccccatcctcaccgcggacaccgccgacccctcctccctccgttccctctgcgcccgcacgggcctcctcctcaactgcgtgggccccttccgcctccacggcgagcccgtcgtggccgcctgcgccgcagcgggctgcgactacctcgacatctccggcgagcccg

SEQ ID NO: 5039 - DNA, 688 bp, Glycine max
tttactttgggcggacgcgtgggtcgctcctcagatggcaacaaaaggattcgcacagcacttgttaactgcagaactaatttgggccaaagttgagggaacatatgcagtactgtgttgatcatcctgaagagataagcaagcttgctaaggtgaaagctcaggtttctgaagttaagggtgtcatgatggagaatattgaaaaggttctggacaggggtgacaagatagaacttctggtggacaagactgagaaccttcataaccaggcacaagatttcaggacttctggaaccagaatccgtcgaaaaatgtggctgcaaaacatgaagataaagctgattgtattgggaatattgatagcacttatcctgataatagtcctatctgtgtgtcgtgggttcaactgtggaaaatagcaccattctccgaggccttttatcatgttatttcaaccttgagattatcggagaaaagatactaatgaatggcatgagtttgtatgtaatatagatatagatatagtaaaggtcgtatgttggtcactttgatctacttataaatgcttttgaaaatataatttgggttgtcaaattgaaatttgatttccattttattcatattcatgaatcatgtaaatgtgtttcttgatcatattctttaatgattccagttacagcattttggc

SEQ ID NO: 5040 - DNA, 894 bp, Glycine max
cgtacgcgtccgcccacgcgtccgcccacgcgtccgcttcctttctctctctacaaagagtgcgtgtgagagtgagagagagagagagagggatttggaactttggatatctatagcgaaagcgtgacaccaccaaaaaccgaactgttcccagatctctctctcactcttccaacaatcgaaatccaaaaccctaccgacaccacactcaatcgaaattcttcattctcttctcatcgatggggcagaagtctctgatctacgcgttcgtgtcgcggggaacagtgattctcgcggagtacaccgaattcagcggaaacttcaactccatcgccttccagtgccttcagaagctccctgccaccaacaacaagttcacctacaattgcgacgcacacaccttcaattacctcgtcgacaatggctacacatattgtgttgttgcagatgaatcaattggaagacagttacccatggcttttctagagcgtgtcaaagatgaatttgtgtcaaaatatggtggtggaaaggctgccacagctcctgcaaacagccttaacaaggaatttgggccaaagttgagggaacatatgcagtactgtgttgatcatcctgaagagataagcaagcttgcaaaggtgaaagctcaggtttctgaagttaagggtgtcatgatggagaatattgaaaaggttctggacaggggtgacaagatagaacttctggtggacaagactgagaaccttcataaccaggcacaagatttcaggacttctggaaccagaatccgtcgaaaaatgtggctgcaaaacatgaagataaagctgattgtattgggaatattgataggactattatcaggctctctcctcctcctgttctcactctgcatcg

SEQ ID NO: 5041 - DNA, 531 bp, Glycine max
  unsure (1)..(531): unsure at all n locations
gattctttttgttccatcttccatgcttcaatttgaatgttttcccatttcaattctctctcacaccgctttagaaactttcctaaaccctgctctccattttcccttgtctcttcctttctctctctacaaagagtgtgtgtgagagagagaaggatttggaattttggataactagagcgaaagcgtgacaccaccaaaaaccgaactgttcccagatctctctctctctctctctcttccaacaatccaaatccaaatccaaaaccctaccaacaccacactcaatcgatcgatggggcagaagtctctgatctacgcgttcgtgtcgcggggaactgtgattctcgcggagtacacggaattcagcggaaacttcaactccatcgccttccagtgccttcagaagctccctgccaccaacaacaagttcacctacaactgcgacgcacacaccttcaattacctcgtcgacaatggctacacatattgtngttgtgcagatgaatcaattggaagacagttacccat

SEQ ID NO: 5042 - DNA, 450 bp, Glycine max
cttgctaaggtgaaagctcaggtttctgaagttaaagatgtcatgatggagaacattgaaaaggttctggaccggggggaaaagatagagcttctggttgacaaaactgaaaatcttcatcaccaggcacaagacttcaggaattctgggaccaaaattcgtagaaaaatgtggctgcaaaacatgaagataaagctgattgtgttggcgattttgatagccctgatcctcataatagtcctttctgtctgccgtgggttcaattgtggaaaataaggcatcgttttccgacgaggagtcattttaccttgtgattattatatgaggaaaagatatcgaatgaatgcatgattttgtatgtagtaaaagtatcagatcgcttatactgttcattttaaaggtttcacagtatgatataagaatgcttttggaagtatttttttgtttgtc

SEQ ID NO: 5043 - DNA, 505 bp, Glycine max
tggacgcgtgggcggacgcgtgcgatcacgcgttcggttctttctctctcaaaggaaagaaaaggaaagaaaagaaaagaaaaagaagagagtgtaggtaaacagaagcacacactacacagttaccaaaatcaggttcaaacgcacagatctgggagaagagaagaagaagaagaagaagatgggacaggatcagaaccagagatcgctgatctacgcgttcgtgtctcgcggcacggtgattctcgccgagtacactgaattcagtggcaacttcaacacaatcgcgttccagtgcctccagaagctccctgcctccaacaacaagttcacctacaactgtgacggccacaccttcaactacctcgtcgacaacggattcacttattgtgttgttgcggatgaatcgattgggagacaggtgcctgtggcttttctggagcgtgtgaaggatgactttgtggcccaatacagcggcggaaaggccacaacgtggctgcgaaca

SEQ ID NO: 5044 - DNA, 1207 bp, Glycine max
  unsure (1)..(1207): unsure at all n locations
ctctcgagccgattcggctcgagcttttccctctctctctcattgcctcctctgattcattcacccaattttttttttctgtcctcttttcctctcagaggagcctctgagtctgctcaggtgttccttgtcaagagatccttttgtttttgaggtgtgaagggaaagagaaaaaagatgaatcagtgtggttatcagcagaagaaggccttgacaagctgtgaggagatgaggatggaatctgtggtgtgccctaaacctcgaagattgggcctgttgaaccactcaacctttgataaccacatcagacccttgaggccaccctttatcaactaccaatcagaaattgaagattcaggagttggggctgagcttatggacattattctccccaagagatctggggggcaagtggcttcatcaccgccatttttctgtggatctccacctagcagggcttcaaaccctgtgatccaagatgagcaatttggtagtaatggtaatgagagttttggttcattttccttggcacccccttcaccatcttcctcagcaagaggctgtgttaggatgaagtttggtcacaccccagcagcagtgaggattgaaggttttgattgcctcagcagggataggcgcaactgcagcatttctgctgttgcttaattcaattttaaacaaagaaaaagaaaagaaaagaggattaaagaatcaccaaagttctaagagcagaggagatttttggaactgaggagctaatcttaatttcaatcttattgtattatatgtatataccgttgttcacgagttaatttaaggtgtcatgtataattgagagaaggtgggaattttatattcttagttttatcctttttgaagaagaataaaaaaaaggggacacaccaaggagaaagaaaaaggcaagcaaaaagtcttgttcttctctcttgttaggtttatatgatggggtattttagattgaaactttcatgtgagtttcatcgagagtctgtaactttcatgtaatttggaactcagctcctccttttgtaattgtaatggtggaggaaattgaggatttattatctttggaatcttgtaagatatattttttgtgggtgccctatttgcaggtgtcgcctatttgattatatgaatagaaatgttgttcatactaaannnnnnnnnnnnnnnnnnnnnnnnnnnn

SEQ ID NO: 5045 - DNA, 860 bp, Glycine max
  unsure (1)..(860): unsure at all n locations
ctcgagccggtcttcgcctcattttctggctaaccaaccctgacactccttcttctccgcttcctcttcgatcatcgcttcagaatgccgccgaagttcgacccctcccagatcgtcgacgtcttcgtacgcgtcaccggcggtgaggtcggcgcggcgagttccctcgccccgaagatcggtcccctcggtctctcccccaagaagatcggagaagatatcgccaaggaaaccgccaaggactggaagggcctccgcgtcaccgtcaagctcaccgtgcagaaccgtcaggccaaggtcacggtggtcccatccgccgccgcgctcgtcatcaaggccctcaaggagcccgagcgtgaccgcaagaaaacgaagaacatcaagcacaacggcaacatctcgctagacgacgtcatcgagatcgctagggttatgaggccgaggtcaatggcgaaggacctcagcggcagcattaaggagattctcgggacgtgcgtctccgtcggatgcaccgttgatggaaaggatcccaaggacttgcagcaggagattaccgatggtgatgttgaggtccctctcgattaaggaggaaggctttgttactctctttctctctttttcttttgtctttcttcagatcgtttcgtgttctttttaatataaatttgggggaactatcgaacgttttgtttaaggttattttaccgctttggataatttagatgatggtttcgagagatattattattatgggctgattagtttctttctctgctcacattatgatattttttcgatacaattttgttaatggattttagcatttatgcgtatatttgtttnnnnnnnnnnnnnnnnnn

SEQ ID NO: 5046 - DNA, 749 bp, Glycine max
cccacgcgcccgcgcattttctagcttccaaaccctaacactcctcttcctcttcgatcatcacctctccacaatgccgccgaagttcgacccctcccagatagtcgacgtcttcgtccgcgttaccggcggcgaagtcggcgcggcgagttccctggccccgaagatcggtcccctcggtctctcccccaagaagatcggagaagacatcgccaaagaaaccgccaaggactggaagggcctccgcgtcaccgtcaagctcaccgttcagaatcgtcaggcgaaggtcacggtggtcccctccgccgccgccctcgttatcaaggccctcaaggagcccgagcgcgaccgcaagaagaccaagaacatcaagcacaacggcaacatctcgctcgatgacgtcatcgagatcgctagggttatgaggccgaggtccatggccaaggacctcagcggctccattaaggagattctcggaacatgcgtttcggttggttgcaccgttgatggaaaggatccaaaggacttgcagcaggagatttccgatggtgatgttgaggtccctctcgattgaggaagaagactttgtttctctctctttttccttctctcttatgtttgtttcgtgttttttaaatataaatctggggaaactattgaacgttttgtttaaggctattttactgttttggataatttagatgatggtttcgagagggattattatgggctgattagtttatttctct

SEQ ID NO: 5047 - DNA, 418 bp, Glycine max
  unsure (1)..(418): unsure at all n locations
ggcctcattttctagcttccggaccctaacacttctcttcctcttcgatcatcacctctccattaaggagattctcggaacatgcgtttcggttggttgcaccgttgatggaaaggatccaaaggacttgcagcaggagatttccgatggtgatgttgaggtccctctcgattgaggaagaagactttgtttctctctctttttccttctctcttatgtttgtttcgtgttttttaaatataaatctggggaaactattgaacgttttgtttaaggctattttactggtttggataatttagatgatggtttcgagaggtattattatgggctgattagtttatttctctgctcacagtatgatatgttttttgatataattttgccaatggatttttaacaaanaaaaatnnnnant

SEQ ID NO: 5048 - DNA, 593 bp, Glycine max
  unsure (1)..(593): unsure at all n locations
agaaaatcctcgccacatttttgcccgacaaacaaacaatagaaaagcgaaaacaaatgtcattttcgaggttattgagagtccagaatcctggtctctgtctactcttcaattattcccaacctctcacctcttcatcttcttcttccttacctttgaccagagacagagcagcactcacattcacaacgaaggtttcctattcatcagacatggtgaaggcaatcagagttcacgaactcggtggccctcaagttctgaagtgggaggatgtggaaattggagatccaaaagaaggcgaggtccgtgtgaggaacaaagccattggggttaatttcattgatgtctactttcgcaaaggagtttacaaagccccttcttttcccttcactccaggtatggaagctgttggggttgtgacagctgtgggtgctggactcactggtaggcaggttggagatcttgtagcttatgcaggtcaaccaatgggttcatatgctgaagagcagatacttcctgcaaataaagtagtccctgttccttcgtcaattgaccccagctgtgcagcatccatcattctcaagggcatgacn

SEQ ID NO: 5049 - DNA, 550 bp, Glycine max
  unsure (1)..(550): unsure at all n locations
ggcttagacccatctcctctaaaatcagggtcccctcaatcaaaaaacttcttcttgttctgttgtgtccatatgttatattttattttatgatatacatagaagcttgttcttctgatctaattttatgagatcaagtgttggttctttctccatctagtactattatttttcccctgtaatatatatatatatatattattctaattaaactaattcacaggctacttgatccgtttgttttgaagaagatcatcgcctgtttttggttaactgtttaatccaaatccagtttcattttacgtgatccgttaaatctgaatggaagctgttttgacgcctcacgcgacggcacataaacaaccgtttgctcctaacaagaacatcagaatgaaaaccccgaagaaaaacggacgaggtaatttcatttgtgctaataaccggtctgagaattttgacacgtatgcaggtctcttgaatcctccttcacgcgccatgtccttctnctactctcacccgctctcagcttcttcactcttcactcatcact

SEQ ID NO: 5050 - DNA, 1377 bp, Glycine max
gaaaaagattaccaaggaaaatcacaccatgccaccgctagtgacaatcaagagaactccttcaagaagggttctgctcgctctgccagtaaaagtcaggagaacaagtcatctggattatcaaagtcatcgactaatgcaaataattatggttcagtttcttctcaaagttcaagtgtacctgcaaacagtactgaggatgacatggatgattttgatccaagaggaacttctaccaaaacttcagctggaaactctaaccaggttgatctctttggacaagatttaatcggtgacctcatggatgctccaacatctgttcctgtagaaaagccagcaactagtaatgtaccagaggttgatctttttgcagatgcagcatttgtatcagcagaacctcatgtggacaaaggagccatttctcaaccacaggctgaggtggatctattttcttcacaaccagccattcctacagttacaccaacagttgatttgttttccattcctgaaccggcagtgcagccagacaccaagtcagagaagtctgttcctatgaataacagcactattgatccctttgctgctgttcctcttaataattttgatggatctgatatttttggtgactttacttctcaatctgattctgtgtcttcccagccctccaataatgttgtcagtgatggcaagcatgataatgtgactggtaaatctttagcagactctaaagtttcccctaaaaaggatgcttttcaggtgaagtctggcgtctgggctgattcactaagccgtggactgattgatctcaatataactgctcctaaaaaagtatcccttgtggatgttggaattgtgggtggattgagtgatggatccgatgaaagggagaaaggccctccaccttcattttacatggggagagctatgggttcaggatctggtcttggaatgggtaggtctggattcactccttcacagccaatagctggagacgactttttctcaaaccttggaaaccaacaatatcaatttggtgggttccaaaagtaaaattctcagattttatactcttcccatcacattttcacccattctttgtgtgtcggcattaccaagcttgttaagctttttggcatggttttgttcatatatatttctcctaatattgtgattatattattttaaatattaagctactaccgattgcaaacatcctgcggactaaagtgccgaaatgtatggtggcagcgtggcactactttgagttgttcccatgtgcctaacttcaacatataacctctgtcttgctttctttatgctgctgttaatgtcaaattgtttaaactcaaatgtgcaagctgcttaagcagtgctaag

SEQ ID NO: 5051 - DNA, 480 bp, Glycine max
attttacatggggagagctatgggttcaggatctggtcttggaatgggtaggtctggattcactccttcacagccagcagctggagacgactttttctcaagccttagcaaccaacaatatcaatttggtgggttccaaaagtaaaattctcagattttatactcttcccatcacattttcactcattctttatgtcggcattaccaagcttgtgaagctttttggcatggctttttgttcatatatatttctcccaaatattgtgattatactatgttaaattttaagctactatcgattgcaacatcctgcggactaaagtgccaaaatgtatggtggcactactttgagttgtaaaaatatacgggtcaccaattaaggttgctgttgacatgtttgtcgtcattagagatcaacctgtcaaacctggcttttatttgccttgtttgttcccatgtgccaacctctcttgctttctc

SEQ ID NO: 5052 - DNA, 451 bp, Glycine max
caacatgctcgtcttactctagaagggtctaaggattacccctaccctcgtaggggaagaactagtagaccaccggccaaatcagatcctaaatgtgagagtaggctgaatattgcctcgagcttagacatctatcgtccaagggatgaaagattcggtcacttgaaaatggcggattttcttgcctatgcactgaaatccatagttcaagttctcaaaccggagtttgaatctctattcgacagcacccctaatgagtttgacaaatttgaagatgtacttaaactctatgaaggtgggattgaggtgcctgagggtatacttacggaagttagggataacatccctgcagagatgcttaaggaaattttccgatctgacgggcaaaggcttctcaaatttccggtgcctcaagtgattgcagtggataaatcggcatggcaaactgatg

SEQ ID NO: 5053 - DNA, 444 bp, Glycine max
tcgccttttcgtccgcccacgcgtccggatgaatccaaaagtacttgtcactgccagtcttcttgataaacgggtgcctactggggcagggcttggcggtggaagtagcaacgctgcaactacactatgggcagccaatcaatttagtggctgtcctgcctctgagaaagaactccaagaatggtcaagtgagattggatcagatattcccttctttttctctcagggagcagcctattgcactggtcgaggagaggttgttcagaatattcctccaccagtatctctagatgttccaatggttctcataaagcccccagaagcatgttcaactgccgaagtctacaagactagtaatgttgaacctttaacattgctggagaagatctcaaagattggcatctcacacgatgtttgtattaatgatttagaaccttcagcatt

SEQ ID NO: 5054 - DNA, 944 bp, Glycine max
gaacaaaaagcacattacatgagttgacatttttccatgtactcatgttaggtatctgcagctgaactcaagtttcaatctttcacctatccatggcttcctctctctttctttgcagtaactacgtcttccccacttcccaaaaccccttcagaagcaaccatttagctcaattcagaccaaatgggccctccaattttcactcaaagcttcggtttcagagaccccacttggtcagagccatggtttctgattccaacacttccaggagacaaatagagattgtgtatgaccccgaaggaaggattaacaagttggctgatgaagtggacagggaaactcccctttcaaggcttactttgttctctccttgcaagataaatgttttcttgagaataaccaacaagagggaagatgggtatcatgatttggcatccctttttcatgtgataagtctaggtgacataattaagttctctttgtcaccttcaaaaaccaaggatagcctgtcaaccaacgtgtctggggtgccccttgatgatagaaatttgattattaaggcgcttaatctttacaggaagaagactggcagtgacaagtacttttggattcatcttgataaacgggtgcctactggggcagggcttggcggtggaagtagcaacgctgcaactacactatgggcagccaatcaatttagtggctgtcctgcctctgagaaagaactccaagaatggtcaagtgagattggatcagatattcccttctttttctctcagggagcagcctattgcactggtcgaggagaggttgttcagaatattcctccaccagtatctctggatgttccaatggttctcataaagcccccagaagcatgttcaactgccgaagtctacaagcgtctacggtgggatcagactagtaatgtcgatcctttaaca

SEQ ID NO: 5055 - DNA, 570 bp, Glycine max
gaagaaaaacaacatttgttttctttctgtccaagcaaattttccctcatttattctcctctccttctcctctcctcacaaatcacttcccttattcaataccaaatcaaattattccttctcaatcgattctcttcggccatgtttgcttacagggttttgtcccgttcctctgccaccctttctcgaagcttcacccttttctctgtttcacgaaattcccaacctttctccaccaacctctccaataacttcaattccctccttcacccatctcccaacaagctgattccagttcaaaccaattttctgaattcaatgaatccatcattgacttcgagatttggattttcttcaacggcctcacatgaacatgcaagtgaaggagcaaaggtatctgatcagtctgaacaagctgaagctgcggatcaaaccaaagaatcagatgtagagagtgaatgtgatctgtccagggatgatttgataaagcttgttgctgagaaggaacaacttttgaagttgaagcacaaggagatgagaaaatgcaggataaagttctgcgaacttatg

SEQ ID NO: 5056 - DNA, 556 bp, Glycine max
gcctcgcgttcgagaaaacgtgccaagaggggaattaaatattaatcttgtttttcttcagttttcttccatgtatcatgcttggagatgttcatgcacgtacgttaagattttacaagaattttttttgccttgctcttttccgaaccatcatccatgtcacgagtgcttgacaagaagcaggaaggtggaagggaagaatatgcaggattgtgtaagagttgtcaaatctgtttcaatactgttatagtcgttttctttgaataagagacacatcaaaggatgcttcactatcattatggcaattgaaacattatttttaaagttttacatataatcacaaggttgaggcctaacaaggagcagcagaagtcagcagcaagcttctttggctatagaacatagctactatccccagtatatagtgaagagattcattaactttcctgacctggatatacattgtattctattttatcggctggatattcattgtattgtcgcaaccaatactaaagcattctgtttcactgcttcatttttcatgatgaagtgt

SEQ ID NO: 5057 - DNA, 982 bp, Glycine max
gttaaggatcaaattggaacttacttctactaccttaccaccggcttgcaacgcgcagtgggtggcttcgggggtttaaggatcttcagccgtctgttgatcccagtgccctatgctgatcccgccgatgagtactgggtgctcatcggtgactggttcggcaagagccacactgccttgaaacaaacattggacagcggacgcagcattggcaggcccagtggggtccacatcaacggcaagaacggcgggctcgaggccctctacaccatggagcccggaaagacctataagtacagaatctgcaacgttgggctcaaggaagccctcaacttcaggatccagggccaccccatgaagctcgttgagaccgaaggctcccacgttgttcaaaacacctatgactccctcgacgtccacgtcggacagtgcttcaccgtcctcgttaccgccgaccaggagcccagggactacttcatggtcgcctccacgcgcttcacgaagaaggttataactgccacgcgcgtgattcgttactcgaatggcgtcgggcccgcatcccctcttcttccccctgcaccccaccaaggctgggcctggtctcttaaccagttccgctccttccgttggaaccttaccgccagcgctgcaaggcccaaccctcagggctcataccactacggtcagattaacatcacccgcaccatcaagttggtcggcacccgaagcaagatcggcggcaagctccgttacgcactcaacggtgtctcccacgtcgaccccgaaacccctctcaagctcgccgagtactacggtgtcgccgacaaggtcttcaagtacaacctcatctctgacgccccagacgccgccatcgcctcccgcgaccccatcatcgcccccaacgtcatcaacgccaccttccgcaacttcatcgaagtcatcctcgagaaccccaccaaggtcacccagtcctacaaccttg

SEQ ID NO: 5058 - DNA, 447 bp, Glycine max
  unsure (1)..(447): unsure at all n locations
gaaaaagaggcaaaagtgtaacatctcaaccattatgcttgagatggatcggatgctaagaccgggaggacgagtgtatatacgcgacaccacacttgttataggtgagcttcaagaaattgcaactgcattgggatggtcaactaccataaatgatgtacgagagggtccctattcaagctggaagatattaacgtctgataaacggttctgaattgctcaattgcgtcagtaacttatggaacaccatatatggtactcccaactgaaatctcattttgtgccagaaatgttggccaaaactaacccataatttgccagaaacggtagtcgtaattacaatggtcaatcccaactaacaggtttttctctaaacactttanagaaactggctttnaatcaatctctacagaattaactggatatggttagatgaatttttttttt

SEQ ID NO: 5059 - DNA, 589 bp, Glycine max
gaaagggctaatgttgagcatgaggccactaaagatggtaaatatgatgattctcatagagaagatgaatcagaaactttatctgatattgatgatgaagaagttgatttgtacattcatgatgaggaggggaagcatatcagaagttactatgggaaacagcgaatcgggagtatcttgaggagcaggcagccaaggaagcagctgcagcagctaataagaaagcttttgaggcaaattttgaaaactgttcggaggatttactagcagcaagagagcttgctgcatcttctgctgaagccgtggcaaaatccagaaaggaaatgagacagaaacgagcctatgaggcaaaaaatacaaggccagctcaatctgctgcagaggcctttggccaaatgtctaataaaaaaaggaatttgcagggtctcaaatctaaagtcaattttgaactcctgaatgaattgtttgatgaaatggaaaataccgatgatctcaagaaaccgaagaaagtacggtttgatctgcccctagataatgatgacaatataccgtccaaggttgaggacaaaaatgaagatgagatgggatt

SEQ ID NO: 5060 - DNA, 847 bp, Glycine max
ccctcgcttcccgcccacgcgtccgcccacgcgtccgcggactcgtgggctaaggaggaatcctggaacaaaagagctgatggtccagatagaagcaaacttgttcgcgacttgaatgatcttgctggggaaggaaatattgagagtatgctctcagttgagatgggtttgagggaacttgcctccttaaaggttgaggatgctgttgtgctcgcattagcccaacacagacggccaaattcggttcgacaatccgttttagattccaaatcacgtggtgatgccaaatattcagaagcatttgaattaagtgaagaggaagcagaagatgttcttttcaaagaggcatggttaacttatttctggagaagagctttgtttcatggtgtggaagaagatattgcagaagaacgccttcagttttggattgcccgcagtggacagtcaccaagttcacatgatgctgttgatgttgagcgaggcttgttggagttgaggaagctgagtatagaacagcaactttgggaagcatcacggaagggaattgatcagcttcaggggtcagcagatgctaatcataagcatgcctctgactctgatgcctcatcctgattgtctgagcccccattagttcttaatcgattctttgtcctatatgtatacttttgttttggtttcgtctcaagttttccaatctgtaaacatttcaaaacactgtattcgggaatacaaagaaagcaagaatctttacgttgcacgagacatagtgggctgtaataattaacaatctacataagactggatttttccctattcttttaaattaattttttgtaatttgggaatc

SEQ ID NO: 5061 - DNA, 438 bp, Glycine max
gttgtcttgaagagatgttggctagcccgctactggggtcttgctgtaaaacatggcatatgtgcagatatagcacaatccaagcatgagcattggtcttctctagctcctcttccttttgaacttgtcatctctgctggacagaaggctaaggaggaatcctggaacaaaagtgctgatggtccagatagaagcaaacttgttcgtgatttgaatgatcttgctggggaaggaaatattgagagtatgctctcagttgagatgggtttgagggaacttgcctccttaaaggttgaggatgctgttgtgctcgcattagcccaacacagacggccaaattcggttcgacaatccgttttagattccaaatcacgtggtgatgccaaatattcagaagcatttgaattaagtgaagaggaagcagaagatgttcttttc

SEQ ID NO: 5062 - DNA, 1185 bp, Glycine max
ggatcacatgctggatacaaacttgctatgcaggagtttatggttcttcctgtgggatgttcctcgatccagaagccatgaacatgggtgtagcagtgtatcacaatctgaagtctgtgattaagaagaaatatggtcaagatgcaatagatgatggtcgacgaaggtggctttgcccctaacatccaggaaaacaaggaaggcttggaattgctgaaaactgccatcgccaaagctggttacacaggcaaagttgtcattggaatggatgttgcagcttctgaattctacaaggaagacaaaacatacgatttgaacttcaaggaagataacaatgatggctcccagaggatctctggagatgctttgaaagatctgtacaagtcatttgtgtcagagtacccaattgtttcaattgaggatccatttgaccaggatgactgggagcactatgctaagctaactgctgaggttggagccaatgtacaaattgttggtgatgatctcttggttaccaaccccaagagggttcagaaggcaattgatactaaagcatgcaatgctcttctcctcaaggtcaaccaaattggttctgtgactgagagtattgaagctgtcaggatgtccaaaaaagctggatggggtgtcatggccagtcacagaagtggagagactgaggataccttcattgctgacctttctgttggtttggctacgggtcaaattaagactggagctccatgcaggtctgagcgtcttgctaaatataaccagctcttgagaattgaggaggagcttggtgctgaagcagtgtacgccggagctaacttccgtacccccgttgaaccctactaaagttttcaagtggaaaaaacctggagatccacacgagtttgagcattgagatttggatgcgcggtttttggtgtgatatataagttgatagttggaacattagtcttggtatgataaagaccttgccaataatttgagttctgattcacagagctaggacagttatgtcttaagactttgaaaggtgtttaatgatatttagctttaatacttgaagcctacttacagtttatttccaattttatgggctatccccaaatatttcttactcgttgctaagttattttcattccttgatccgtgatatccccaatgctacgattttcagac

SEQ ID NO: 5063 - DNA, 495 bp, Glycine max
cgtcgcatgcccgcgtaggcaagctaggaattcagctcgagtaaatataaccagctcttgagaattgaggaggagcttggtgcggaagcagtgtatgctggagctaacttccgtacccctgttgagccctactaaagttttcaagtggaaaaaacctggagatccccacgagtttgagcaatgagatttggatgcgcggttttagttgtgatcaataagtcgatagttagaacaatagtcttggtataaggaccttgccaataattttttagttctgattcacagagctaagacagttccgtcttagactttaaaagttttgatatttagctttaatacttgaagtttacttccaattttatggggtatccccaaaacatttcatactctttgctatgttaacttttttccccttgatccgtgatattcccaatactacgattttaagacttgcgaccaaaaaaaaaaaaataaaaaaaaaaagggggggccccc

SEQ ID NO: 5064 - DNA, 633 bp, Glycine max
cacagccccgttttgcacggattttgcacggaacagaatctgaaaactgcagaaacttctcaatggcagccatttcagctgaagtatttggcaaactcaactgatgggccaaaggagcatgagtctgtcccgtttcattctgagtctcaaccgcatttaagccagaaaatggttttgaatcttcttcactaaatcttttgagaccaccaacgttgtcagacatcattgcagtatcatcccaatgaccaacttggaaaccggccataaaatcgttaccatcagcaaaagcttcactgtctggactactttctcgattccctttgtccccaatttcagcattggacgacattctccccgacgaagaatagttcggttgattcttcaacctcctcgaactagaaaatttcgcatcctcgatactgttgttaacagcccccaaactccccatgcctctcacaccagcatacactgccaattaagctttcataacatcattatggcaacccatacataaacccattcacgccctaaacaaacatgaagcctaatagtaacccccaaaataattagtctttttttttttatctctaagttgacaacataattgtactaccctacagctcaaattaaaaa

SEQ ID NO: 5065 - DNA, 448 bp, Glycine max
ggtatgtgttagtacatggaacgtaggtgggattgcaccggatgaagatttgaatatagatgatttgttggagacatgcaacaactcttgtgacatctatatactagggtttcaataaatagtgcctctaaaagcatcaaatgtattggggtccgaaaacaatgagatttctatgaaatggaattccataatcagggaagccttgaacaagaaaataacacatcaaagggacaaagatgctaaaaaacaggagctaaagaataattttcccaataagaaagaaaatccagctaagtgctgtgatgccccacatgatttccaatgtatcattagcaagcaaatggttggattattcatatctgtgtggattagaagagatctttgtccattcattcggcatccaagcgtgtcatgtgtaggttgtgggataatgggctgcttaagaaac

SEQ ID NO: 5066 - DNA, 831 bp, Glycine max
ggtgcccctcttctaattcttctctcaaaaggactgaacgaaaaaaccttagggttcctctgttcttcttcgccccccaaaaaattttctggctcagagaaattcaaccgttctcgccattgccgaagctccaactcctcgcatttccaactcttcacccaaaaccctttttgttggaacagagtttcagagagagacccttcacaacatggcaaaaacgaggccaggcagaaaagacttggattcctacaccatcagaggcaccaacaagatcgtaagagctggggactgtgtgctgatgcgcccctctgatacgagcaagccaccgtacgtggcgcgcgtggagaagatcgaacaggatagtaggaacaacgtgaaggtgcgtgtgaggtggtattataggcctgaagagtctattggaggacgcaggcagttccatggagcaaaggagctgtttttgtctgaccattatgatgttcagagtgctcacacaattgaagggaagtgtgttgtgcactcttttaagaactataccaagcttgagaatgtaggtgctgaggattactattgtaggtttgagtacaaggctgctactggggctttcacgcctgaccgtgttgctgtgtattgcaagtgcgagatgccttataacccagatgacctcatggtgcagtgtgaagggtgcaaggattggaaaaccagtatattctgcttttttttgtttactgtattacatttggggagaggggtttttgtgctgtctctaattttagattaaaaaccgtgtgcttttgatgaaggaaattggtcctgagagccgctaaaggctgc

SEQ ID NO: 5067 - DNA, 420 bp, Glycine max
ccgggccccccctcgagatctatgaagcttgatatcgaaggactggtaccatcctgcttgcgtgggcatgactattgaagaagcaaagaaattggaccattttgtttgttcagaatgttcatctgatgatgacatgaagaaaccccaggctacatttcctgtatcaccaggatctgatggcaaggttgagccaaagcggcggaagagatgaccatcatgctgaattaactcatcttgcgaatgcacctcttgctgaatttcacgggctatgtggtagctgttgtgggtgtattgtacagcttctaccagaggctataaacatcattttatgtatttgactccggctatgtatgtattcgtcttagatttatgacagacattgatctgtttcccttgtgtccagaaagagtaactcctgtc

SEQ ID NO: 5068 - DNA, 354 bp, Glycine max
gattctggatttctttgtttctatttatcaatatgtgtcagccaatccaaattgaatgatgcaggggctgatttcttgtgctctgataagctttgacctaatttggctacaagaattcatccattgtaaaagattgttaaatttaacgagtatctgagaagtagtgctacttttatttattttttttctgtttgtgaccctattgattttatgaaagaaacactggttcaattttggtacgttttttgtaggtaccatcctgcttgcgtgggcatgactattgaagaagcaaagaaattggaacattttggttggtcagaatgttcatctgatgatgacatgaagaaaccccat

SEQ ID NO: 5069 - DNA, 1560 bp, Glycine max
cagtcctttgctccacttccttcaaatgaagtgcatgaagaaaagtccatgcaaacttcctctgtaacagacttgaagacgtttgatacttctgcctcaataaatcttaaacccccacctattgaccgtcataaatcatttgatgatgaagaattctccaagaggcccacaattgtgaagaagactgtaacagctcctgcaaatgtgaaatcatattctattgctgaactgcagattgctactggcagcttcagtgtggatcaccttgttggcgagggatcttttgggcgtgtttaccgtgctcaatttgatgatggacaggttcttgcagtgaagaagatagattcatctatccttcccaatgatttgacagatgattttatacaaatataatatcaaacttctccaatttacatcatccaaatgtgacagagcttgtaggttattgctcagagtatggacaacacctcttggtctatgagtttcataaaaatggatcactgcatgacttccttcacctacctgatgagtatagtaaaccattgatatggaattctcgtgtgaagattgctttggggattgctcgtgctttagagtacctacatgaagtttgttcaccatctgttgttcataagaatataaagtcggccaacatattgcttgatacagattttaatcctcatctttctgacagtggattggcaagctatattccaaatgcaaaccaggtattgaacaataatgctggatctggatatgaagctcccgaagttggcttgtctggtcattatactcttaagagtgatgtttatagctttggagttgtcatgttggaacttcttagtggacggaaaccgtttgatagctcaaggccgaggtctgagcaggcgttggttcgatgggcaacacctcaactccatgatatcgatgccttggctaaaatggttgatcctacattggaaggattataccctgtgaagtccctttctcgatttgcggatgttattgctctgtgtgttcagccggagccggaattccgaccacctatgtcagaagtggttcaagcgctggttcggttagtgcagcgtactaacatgagcaagaggacgtttggaactgatcaaggaggatccaacagagggggtgatgaccaagatacacaagacatgtaaatgggaacaaaaaaggcttgtgttgatagaatggcagaaaaggaaatgatattcttcagatttttatcacttctttctaacccccttcagccagtttatgttctgagttagaggattgcacctttgattattgaagctagagacaatttcttggtgtatgattttgcgctatttcttctattggtggtataaatttcaataatttaacctttttgcgaaattgaagctgggttacgattgatggttgcaatcttgttgtaataactaggaatcataacaagctttttcatcgtattttgtgattgtatgggtccaatattttgtattagtctaaataaatacacctgtgttggggaaaattttaaaaaaaaaaaaaaagggcggcccc

SEQ ID NO: 5070 - DNA, 512 bp, Glycine max
tcaactccatgatattaatgcattggctaaaatggttgatcctgcaatgaaagggttatatcctgttaagtctctttctcgatttgccgatgttattgctctttgcgttcagccggagccagaattccgaccaccgatgtcagaagtggttcaagcactggtgcgactagtgcagcgagctaacatgagcaagcgaacatttagtagtagtgatcatggaggatcccaacgagggagtgatgagccagttctgcgagacatctaaatcccaaagcaaatgtagttatatttttctcccaagctagttcggttatttgtaatataatttccaatagttgcaaatttgaattgatgggttccatattctgttgatacctatgtaaacctgtccaaatcagcttattacaatgacagtaacggttgcactggcaatgtaaccagcctttcacactaagtaccagcgatagatgccaataaaattcaatacagggcaatactaactttgattcgag

SEQ ID NO: 5071 - DNA, 520 bp, Glycine max
gtatgtacggtattcggctcgagcttagctcgatctcttgggctcgtcgaattcgaaatctgatctccaacgattgatctcggtagaggctagtgcactctccaatctgcaaaaatgcctctcagactcgaaatcaagcgcaagcttgcgcaaagatcagagagagtgaaatgtgtggatctgcatccaacagagccatggattctggcgagtttatactctggaactgtctgcatctggaactaccaatctcagaccatggccaaatcttttgaggttaccgagttaccagttagatcggccaagtttattgcacgcaaacagtgggttgttgctggagcagatgatatgtttattcgtgtatataattacaacacaatggataaagtcaaagtatttgaagcacatactgattacattaggtgtgtggcagttcatcctacccttccttatgtgctttcatcatctgatgatatgctcataaagctctgggatggggaaaaaggctggatctgtaccc

SEQ ID NO: 5072 - DNA, 577 bp, Glycine max
ccctttcgccgtttcgcgtccgcccacgcgtccggccacgcgttcgatcatatttgcactctcaactctgcactgcaaacctcgtcacgttcctctctctctgagctcgatctatcgggctcttcgaattcggttcccgatttccgacccataaaagctagcaagttccttcacttcaatcttcagaaatgcctctcagactcgaaatcaagcgaaagcttgcccaaagatcagagagagtaaagtctgtggatctacatccaacagaaccatggattctagcaagtttgtactctggaactgtctgtatctggaactaccaatctcagaccatggccaagtcttttgaggttactgagttaccagttaggtcagccaagtttattgcacgcaaacagtgggttgttgcaggggcagatgatatgtttattcgtgtatataattacaacacaatggataaagttaaagtatttgaggcacatacagattacattaggggtgtggcagttcatcctacccttccatatgtgttgtcatcatctgatgatatgctcataaagccttgggattgggaaaa

SEQ ID NO: 5073 - DNA, 2467 bp, Glycine max
  unsure (1)..(2467): unsure at all n locations
ctataatgcattaatgctctgttgtcttctcttttcagatttggaatcttggctctcctgatcctaattttactttggatgctcatcagaaaggagtgaattgtgttgattactttacaggtggtgacaaaccatatctaatcactggttctgatgatcacactgctaaggtatgggattatcagaccaaaagttgtgtccagaccctagaaggtcacacacacaatgtatctgctgtatgctttcatcctgaacttcctataatcattactggttctgaggatggcacagtacgcatatggcactccacaacttataggcttgagaacacattaaactatggtcttgaaagagtctgggctattggatacttgaagagttctcgtcgggttgtgattggctatgatgaaggaacaattatggtcaaacttggtcgagaagttcctgtggctagcatggacaacagcgggaaaattatttggtctaagcataatgaaattcagactgtcaatataaaaagtgtaggagcagatgtagaggttgctgacggagaaaggttacctttagctgttaaggagttgggtacctgcgatctctaccctcaaaatttaaagcacaatccaaatgggaggtttgttgttgtgtgtggagatggtgagtacattatatacactgcattggcatggagaaataggtcatttggttcagcactggaatttgtttggtcttctgagggagaatatgctgtcagagaaagtacatcaaagattaaaattttcagcaaaaatttccaggaaaagaggagtgtccgaccaacattttcagctgaaagaatatttggtggcactctactggcgatgtgctccaacgatttcatctgcttttatgactgggctgaatgcaggttgatctatcgcattgatgtcaatgtgaaaaacctctactgggctgacagtggtgatctagtaacaattgctagcgatacatcattctacattctgaagtacaatcgtgatgttgttgcatcatatttagatagtggaagccctgtagatgagcaaggtgttgaagatgcctttgagctccttcatgaaatgaatgaacgtgtcaggacagggatctgggttggggattgctttatctacaacaattcttcttggaggcttaactattgtgttggtggtgaggtaactacgatgtttcatttggaccgccccatgtacttgttgggatatcttgccagccaaagtcgggtctatttgattgacaaagagtttaatgttatgggatacacactgcttttaagcttgattgagtacaagacacttgtcatgcgtggtgatttggaaagggccaatgaaattctaccatcaattcctaaagagcatcataacagtgtggctcgtttcctggaatcacgagggatgatagaggatgctcttgaagtagctactgaccctgactataggtttgatctagccatacagcttggaagattagaggttgctaagggtattgcttctgaagtgcagagtgagtccaaatggaagcaattgggagaattagccatgtctactggaaagttagaaatggctgaagagtgtttaaaacacgcaatggatttgagtgggttattgctgctatattcttctttaggagatgctgaaggaatatcaaaacttgcaactcttgctaaagagcaagggaagaataatgttgcattcctttgcttattcatgttgggtaaattagaagactgccttcaactgttggtagaaagcaatcgaattccagaggcagctttaatggctcgatcttatctcccaagtaaggtctcagagatagtggcaatttggagaaaagacctcaataaggtcaatccaaaagctgctgaatcattggctaatcctgaagaatatccaaatttgtttgaagattggcaagttgcactagctgtcgaatctaaagctgtggaaacaaggaatgtgtaccctcctgcggagcagtacgtcaaccatgctgacaaatcacacattacccttgttgaagcctttagaagcatgcagattgaggaaggagaggagcatctggagaatggggactctactcatgagttgacagaacaaagtggagaagagcactacacagaggagcaggaggaacagaatggagaggaaggaagccaagaggaggcagttgtagtggatgcagattctacagatggtgcagtactcgttaatggtaacgaggctgacgaagagtggggtacgaataatgaaggagccccgtcagcctaaaagcaattggttggggtggtgtgaaaatcgaaattttgtctctgtgcttgcaccacatcactaggttccatcaagacagtctattccagcttctgggatattntatgaggtttatcaatcgattaacagtttttggttattattatgatcttattaccacccggatagac

SEQ ID NO: 5074 - DNA, 499 bp, Glycine max
ggaattccgctcgcggcaaagctcgtcgcgttcgtctctctctctctgagctcgatttattgggctcttcgaattcggttcccgatttccgacgagttctatcattcgcttcaatcttcggaaatgcctctcagactcgaaatcaagcgaaagcttgcgcaaagatcagagagagtaaaggctggggatctacatgcaacagaaccatggattctagcaagtttgtactctggaactgtctgtatctggaactaccaatctcagaccatggccaagtcttttgaggttactgagttaccagttaggtcagccaagtttattgcacgcaaacagtgggttgttgcaggggcagatgatatgtttattcgtgtatataattacaacacaatggataaagttaaagtatttgaggcacatacagattacattaggtgtgtggcagttcatcctacccttacatatgtgttgtcatcatctgatgacatgctcataaagcttt

SEQ ID NO: 5075 - DNA, 633 bp, Glycine max
ggagaagagcactacacagaggagcaggaggaacagaatggagaggaaggaagccaagaggaggcagttgtagtggatgcagattctacagatggtgcagtactcgttaatggtaacgaggctgacgaagagtggggtacgaataatgaaggagccccgtcagcctaaaagcaattggttggggtggtgtgaaaatcaaaattttgtctctgtgcttgcgccacatcactaggtcccatcaagacagttggttccagcttctgggatttctatctgaggtcttctcaaggtgccacgaagagattttatggactggttgtttgtttcctggtgttgtggttttgtagtgccctgaattttgtcattttgcgcgtggtatgaacaatattccttagggtcagttacaatttactagagtttatatatagcacattcttttggggcttttacctcaatatactcgtgccattgtgaatgtagaaaagcggaactagggacgggtgcctgtttaaattttagatagttatttttttttaatattttttcttgatcatttttttaatttttatattttcctggattgtaaacatggatggttaatagagaaaataatgattcttcccaaggatgctt

SEQ ID NO: 5076 - DNA, 402 bp, Glycine max
gtctgaagtaaatccttttgatgggcaggaggctaagccatacaagaatgaccctgaacattttggcaatgacaaacttgatagcagcctatcagcggaatgaaatattggaatttgagaaaatcttgaagagtaacagaagaaccatcatggatgatccatttatcagaaactacattgaggatctgctaaagaatatcagaactcaagtcttgctgaagctcatcaaaccatatacaaggatcaggattccgtttatatccaaggaacttaatgtgcctgagcatgatgttgagcaattactggtatcacttattttggataacagaattcaaggacacattgatcaagtcaaccggctcttagaacgatctgataggtcgaaaggaatgaaaaagtaca

SEQ ID NO: 5077 - DNA, 1853 bp, Glycine max
ctcgagccgattcggctcgagcttgctcttgttctctgattggcctagccagtagtagccaatttgttggagctggttgggaatggcgtcgaaaccgaaatcaaatggaaattccaaatgcaacaaaggattcgctgacagctatatgctgttgaatcctgaagacgctcatttcttcgatcttgttcatgtgctgtattcccgtaacttgggaaaccgaaaatttgtggacagcaatgctgagggatcttatgagggaagcttccgccaaagatggcttatattcgtctctgtggtgctccagaagcttctgttgctcatcgctaagccactttcgttctttggctcttgcgttgagttcttcatcaacctccttgtcctcaacggtggcttcatcatgatcgttattaacttcctcacaggtcacctggtcgtccccgatcgtaatgcaccaaattatttgtcttgcatcggaaatttggacgcgagagtaaagttggatgccatcacgcgtgatgactgcaggtactatgtttcattagctatgatggcttcaaaggcatcctatgagaatgcagcttaccttaaatctctaataaaaaaccactggaagatggaattcgtgagattttttgattgctggaatgattttcaagaaaaggccacaacccaagtcttgattgttttggacaagcatgagaaccgcgatacttatgtggtagctttccgaggaacggaaccctttgatgcagatgcatggtgcactgaccttgacatctcatggtacgggattcccggcattggaaaaatgcatggtggcttcatgaaagccttagggctacagaaaaatgtggggtggcctaaggagattcaaagggatgaaaatcttcccccgttggcctactatgttattagggacattctaaggaaaggtttgagtgaaaatcctaatgcaaagtttatcattacgggtcatagtttgggtggagcactcgcaatcttgtaccctacgatcatgttcttgcatgatgagaagttgctgattgagaggttggaagggatctacacgtttgggcaaccaagagttggagatgaagcatatgcacagtatatgagacaaaaattgagggaaaattctatcaggtattgcaggtttgtttattgcaatgacatagttccgaggttgccctatgatgataaggacttgctcttcaagcactttgggatctgccttttctttaacaggcgctatgaactcaggattctcgaagaagagccgaataagaactatttctcgccatggtgtgtgatacccatgatgttcaatgctgttttggaactaataaggagctttaccatagcgtacaaaaatggacctcactatagagaaggatggtttctctttagtctcaggttggttggtctgctgattcctggcttacctgctcacggtccacaagattatattaattccactcttctgggatcaattgaaaaacattttaaagcagattgatgtgtccgtatacatgatcattccataccactacgtacatgtgtatggtcatgcagactaaaatttacataatcaagatttttagttttagaaaaaatggtaataacacttgattatgtatcatgtgaagaatagttatgtatcataatgatcatgaataatataacagtttgtcgtcagtacgagttattgtatagtaattaataagctaggtttaaagttgtttcctttggtgcatggatttatcattaatgagatcaatgtgaagtttgtttatttcccggcgggaatcgatcggcggccgccgaccagtcagatccgggaattaattccggac

SEQ ID NO: 5078 - DNA, 314 bp, Glycine max
cttttgtcccttgctcttgttctctaattggccgagccacaagccaatttattggagcttgttgggaatggcgtcgaagccgaatgccatatgcaacaaagggttcgctgacagcttcatgccgttgagccctgaagacgctcatgtcttcgatcttcttcgtgtgctgtattcccgtaacttgggacaccgaaaattcgtggacagcaatgctgagggttcttatgagggaagcttccgcaacagatggcttatcttcgtttctgtggtgctccagaagcttctgttgttcatcgctaagccactttcgttct

SEQ ID NO: 5079 - DNA, 748 bp, Glycine max
cttatctgtaatgctactgggtgttgggagttgagagtgaagctcctgggtgtggtgtggtgtaggtgaagtgcaatctgtgttgatgcgttccacgttttgctgtcacttgaacctttcacccgtcatgattatgaagggcttctctgctcccatttcatcatatgtttcgcctcgagctcaagccgtcactgagccaccggcgcggattggctttttgggcctcggaatcatgggctccccaatggcccacaatctccttaaagctggtgttgatctcactgtttggaataggaccaagagcaagtgtgaccctctaatcagcctcggagcaaaatataaaccatctcctgaggaagtagcagcatcttgtgatgtcacctttgccatgctcgctgatcctcaaagtgcagtggatgtcgcttgcgggaagcatggggctgcaaatggaatgggtccagggaaaggatatgtggatgtttcaactgttgatggggacacttctaaattgattaatgggcacatgaaatccactggagccttatttttggaggctccagtttccggatcaaaaaagccagcagaagatggacaattgatatttcttacagcaggggacaaaaatctttatgaagcagttggttctctcttggacatcatggggaaatctaaattttatcttggtgatgttggaaatggagctgcaatgaaacctgttgtcaatatgatccatggcagtatgatggca

SEQ ID NO: 5080 - DNA, 321 bp, Glycine max
gacaactgtggttgagaaaactgggaagagtgaagacaaagtgaagaagatcatcactattatcatttcaatggctacccaaacccaaacacagtcacatccaaacaccaccactatcgacccaaacagcggcttctgttctcattccagaaccttccattccctccgtccaaacgttcctctccctccgccctcccgacccctctccctcaccgactacgtcttctccctcgtaccctccgccgccaccgccaccgcctcctcatccatcacctccgccatcatccacgccgccaccgtccgccacctgtcctactccct

SEQ ID NO: 5081 - DNA, 967 bp, Glycine max
cgaccttctcatggctcggcattgacttggcacatgaggatgaagattgctcttgacacagcaagaggattagaatatctgcacgagcactgtcaccctgcagtgataccatagggatactgaaatcttctagtattctcttagatgcaaacttcgatgcgaagctgtctgatttaggtcttgccttaactgatgggtcccaaagcaagaagaacattaaactatcgggtaccttgggatacgtagcaccggagtatcttctagatggtaaattaagtgataaaagtgatgtctatgcttttggggttgtgctattggagctcctactaggaaggaagccagtagaaaaactggtaccagctcaatgccaatctattgtcacatgggccatgccacacctcacggacagatccaagcttccaagcattgtggatccagtgattaagaatacaatggatcccaagcacttgtaccaggttgctgctgtagctgtgctgtgcgtgcaaccagaacctagttaccgtccactgatcattgatgttcttcactcactcatccctcttgttcccattgagcttggaggaacactaagagtttcacaagtaatttgatacatgctaaacagcgtgaaacaaggatattatttgagattatgatgctgccaaaacggattggcttttaccaaatactcgaattacagatagatccacgtcaaacgtactagacattcattcgggaagaatgatagcttaaataggcgagaagagcattagattgttaacaacaaatgtaaagaagaaattagtttcactttggataagatagtcttccattccccctactttttaggtgaatgaaattcagtacataagcaaaaatattactagtaaactctttaagtcaatcatacatcatacatacaacatattgtgatgagaattcagaagtcgaaaatttatggtttggc

SEQ ID NO: 5082 - DNA, 506 bp, Glycine max
gggttcagttattaagttttttttttaaaccaaacgcaaagaattccaaaaatacttttaaaaaaaggtgaccaacaccaccattagtctgaactacaataagttccttacacaatatagtcttggaacaaaatgcaaaatattaaaaactccaaagcattgtttttggctcaagaaaataaaacactaattaattggataaactgaaccgaggcaaagcaagcacctcagaatccaagcttggtgcgacgccagtgacggcgcttcgcgttgtacctgatggtgttgtcggtcctcatgcggatccagtaggggatgggcctgttctgcctcatcttcttcgccaacttcttcttgattctgaatgtcttgtgcgacggcattttcgctttttcttcgggaggctcgactgcacaccggtgagcgaaaaccctaataaccaaaccctacggaggtgcactaactctccttcttttatacctaaatagtgggttttattgttattc

SEQ ID NO: 5083 - DNA, 445 bp, Glycine max
aaaacaaggatttaatttgagattatgatgctctgccaaaaccagattggttttgccaaatactcgaaattgcaaatagacccacgtcaaacgtactacaataaattccttacacaatatagtcttggaataaaatgcaaaatattaaaaactccaaagcattgtttttggctcaagaaaataaaacactaattaattggataaactgaatcgaggcaaagcaagcacctcagaatccaagcttggtgcgacgccagtgacggcgcttcgcgttgtacctgatggtgttgtcggtcctcatgcggatccagtaggggatgggcctgttctgcctcatcttcttcgccaacttcttcttgattctgaatgtcttgtgcgacggcattttcgctttttcttcgggaggctcgactgcacacgggtgagcgaaaaccctaatacccct

SEQ ID NO: 5084 - DNA, 446 bp, Glycine max
  unsure (1)..(446): unsure at all n locations
nnnnnnnnnnnnnnnnnnnnnnngaatccgaaaatactttaaaaggagttgacaacgccatgcgtatgacactacaataagttccttactcgatatagtcttcgatcaaatgggtgatgttcaaaactcaaaaccctcgtgtctgcctcaagaaaatagtacgctaattacttggatacattgcacctagccagagcatgcacctcagaatccaagcttggtgcgtcgccagtgacggcgcttcgcgttgtacctgatggtgttatcggtcctcatgcggatccagtagtggaatgggcctgttctgcctcatcttcttcgccaacttcttcttgattctgaatgtcctgtgcgacggcattttcgattagtcgtctatgtaggctccactgcgcaccggtcgacgctgaaaaccctaataaccaagccctgccccgtctgtcgtc

SEQ ID NO: 5085 - DNA, 450 bp, Glycine max
gacagcgatggtggcagcacgagtggctcgcgaagatgttaggcataaagggtggcttcttgatgggtaccctcggagttttggccaagcccagagtctggagaaaatgcagatacggcctgatgtgtatatcgtattagatgttcctgatgaaattctgatcgacagatgtgttggtagaaggctagacccagtgacagggaagatatatcatctaaagttttttccaccggatacagaagaaattgaaagcaaggctgataactcggcctgatgacactgaggagaaggtcaaatctcgcctaaacatatacaagcaaaatgcagaagcagcatcttcctcttactccagcataacacataagattggatggaagtcattcaaaagaagcagttttcaaagaaattgaatctttattatctcaattgcaacaggataaagtgaaaata

SEQ ID NO: 5086 - DNA, 1003 bp, Glycine max
cttttgttgtaactcaagagttgctgttttttttcctcgtgacttctgatttgatttccaccttcactcaagttttaattgggaatctgatataggctttggaggttcttccacttccaaggatgctttcaattatacactacagaggatttttcagtgattgagtgagtggatatgaacatggaaggatcttatgattcatcatgcaatggagaagctggtaacgaaagccttcagatcattaaatactctccttataaaccctgcaccatgatatcattatcatcaccttggtttgttctaagagtgttttatgtgagagtgtgtggcattcaggttgatgaatccaccccagagtttctctctctcaaccatattcctcttagtcctgatacccttttagaggtgaatggtgttaggagcagcatttactctgatggagaagagtcttcagttctgagaagggatagagtggataagaaatctgaggaagctacctttgtgaacactgatagtatacgttttaccgggagcatgaagtttgaggtttatgataaggagaattgcattctctctggggttctggagatgtctaatagcaatggttttgttggtggatcaagaagttgtgtgaagagatggagtatgatttgtcaaacagaaatgtcacctggttgtggctttttcaagaggaaacatgttgctgtgcccgaattaccttgtcctgaaattgaggtttatgttgctggttgcttctcaggaacacctattatcttaactaagacactgcaactcaattgccggaagaagcataacaggaaatgcgccttggattccattccagaatatgaaacaactgagtgccagaaagatgtttctgatcatggacttgatttgcaggtagttgactgtagaagcttcaaactggaacaagatgaggactactacagcatgtattgaccaagaacactatatgcagatggggaagatggcgaactatcat

SEQ ID NO: 5087 - DNA, 452 bp, Glycine max
gatgctttgtaaagatcacgaggttgttattattattgcaaatagcaaacctgtcacgactacggggcaggagatagatgtattgtatcaaaaggtggacaacatcaacgatctgaaaggtttcaattgggaatctgatgtaggctttggaggttcttctacttcccaggatgctttcaatttatcaattataccacaccacagaggattccagtgattgagtgagtggatatgaatatggaaggaccttatgatttatcacgcaatggagaagctggtaacaaaagccttcagatcattaaatactctccttataaaccctgcaccatgatatcatcatcaccttggtttgatctaagagtgttttatgtgagagtgtgtggcattcaggttgatgaatcaccccagagtttctctctctcaatcatattcctcttagtcctgataccctt

SEQ ID NO: 5088 - DNA, 264 bp, Glycine max
agcggatcgagctcaagggttgctgtttttttcctcgtgacatgatttgatttccaccttcactcaagtttcaattgggaatctgatgtaggctttggaggttcttctacttcccaggatgctttcaatttatcaattataccacaccacataggattcgcactgattgagtgagtggatatgaatatggaaggaccttatgatttatcatgcaatggagaagctggtaacaaaagccttcagatcataaaatactctccttat

SEQ ID NO: 5089 - DNA, 907 bp, Glycine max
ttttcttagttccatggctttgaagatgaaagacaaatttgacaggtactggagcaagtgcagtttacctttagctgtagctgcagtcctggatcctcggtttaaaatgaagttggttgagtactacttctccctaatttatggtagcactgctctggagcatatcaaggaagtttctgatggtatcaaagaactttttaatgtgtattctatctgttcaactatgattgatcaaggctcggccttgcctggcagcagtttacctagtactagttgtagttccagagataggctaaaaggctttgacagattccttcatgagacatcacagggtcagtctatcatatcagacttagacaagtacttagaggaaccaatctttccacgcaattccgattttaacatattgaactggtggaaagtccacatgccaaggtacccaattttgtctatgatggcacgtgacgttcttgggactccaatgtcaactctggcgccagaattggcatttagcactgggggcagagtgctagattcttctcgtagttcactaaacccggacacgcgagaggctttgatatgcacccaagattggctccaaaatgaatctggaaatctaaatccatctccaatccattctgctctacctcttctcatcgaatgaagttaattttttcaaggtcttattgaagaagcatcttagaattgtcgaggtctcctttgaagtgatctagcccttgcaaatattctgtgaagatgcattgtatattctagaataacaatgtagatttttaatatttatagatctcttttctattagttgtttttattggactagcacccggctgaatctgattttggaaaaaggggttgcgtgcccccgatatcaaaatctttccttgtctgg

SEQ ID NO: 5090 - DNA, 1544 bp, Glycine max
ggggtggggcgtcgtagggctttccagttgtgtgctctgccaatgataattggtgcttctatgagtgcggcaacaaacaacttgtttggcatgcttgtaggaaggttgtttgttgggactggcttgggcctgggccctcctgttgcctctctgtatgtgacagaggtttctcctgcttttgtgcggggcacctttggagctttcatccagattgccacatgccttggtctaatgggagctttatttattggaatccctgtcaaagaaatatctggatggtggcgggtttgtttttgggtatctaccattccagctgctatacttgccacagctatggtcttctgcgcagagagtccacattggttatacaagcaaggaagaactgctgaagcagaagctgagtttgagaggcttcttggtgtatcagaagcaaaatttgcaatgtcagagttatccaaggcagatagaggagacgatagtgatagtgtgaagctgtcggaattgcttcatggtcgtcattctaaagctatctggtataaatgctgtgttttatttctcttcaactgtttttaaaagtgctggagtgccatcagacattgcaaatgtctgcataggaattgccaatttggcaggatctatcgtttcaatgggtttgatggataagcttggaaggaaggttctacttttctggagtttctttggcatggcaatagcaatgatccttcaagccacaggagcaacttcacttgtatcaaacatgggagctcagtacttttctgttggtggcatgttcctgtttgtcttaacatttgctctcggagctggcccagttccaggtctccttctaccagaaatctttcctagtcgaataagagccaaagccatggcagtctgtatgtcagtgcattgggtgataaatttctttgttggactactgttcttgcgtttgctggagaaacttggtccacagctgctttactctatgtttgctaccttttgcatcatggcagtaatttttgtaaaaagaaatgtggtggaaaccaaagggaagtcacttcatgaaatcgagatcgcacttctaccccaagactagagcatcttatgaagctctattcattgattgctctaattctgcatacttccagctgagcagattgtgtttcatctattatggttgaccttaacagtacaaggggaagctcaacgcaggaactatgcattgttttgctgcaatatttgtacgaaagaggtttaggtattatggctagctgtgatgtagtaggtggtactattagcggcttacttacgacacgacacccttctgttgttactcgagccttgtgattctctgatttggcatccacttaaagggagacataattcatcaagggggatctatgcatcccataatatttccttaaatgtactactttatgtaatattatatacgcttctgtacgtgacattatttttaatcgcttcaattttgtcgcattttggatacgagtagtctagcatgtagattctgttgcagagtatatcga

SEQ ID NO: 5091 - DNA, 390 bp, Glycine max
agccatggcagtctgtatgtcagtgcattgggtgataaatttctttgttggactactgttcttgcgtttgctggagaaacttggtccacagctgctttactccatgtttgctaccttttgcatcatggcagtaacttttgtaaaaagaaatgtggtggaaaccaaagggaagtcacttcatgaaattgagatcgcacttcttcctcaagactagatctctattcatttgattgctctaattttgcatagtttttcggctgagcagattgtgtttcgtctattttggttgaccttaacattacaaggggaagctcaggaactatgcattgttttgctgcaacattagtacgaagaggcttaggtattatggctagctgtgatgtagtaggt

SEQ ID NO: 5092 - DNA, 419 bp, Glycine max
tttggagctttcatccagattgcaacatgccttggtctaatgggagctttatttattggaatccctgtcaaagaaatttctggatggtggcgggtttgtttttgggtatctaccattccagctgctatacttgccgcagctatggtcttctgcgcagagagtccgcattggttatacaagcaaggaagaactgctgaagcagaagctgagtttgagaggcttctgggtgtatcagaagcaaaatttgcaatgtcggagttatccaaggcagatagagcttgacgatactgatactgtgaagctgtcggaattgcttcgtggtcgtcatcctaaggtggttctttctggatcaaccctatttgctttacaacagctatctggtataaatgctgtgttttatttctcttcaactgttttta

SEQ ID NO: 5093 - DNA, 636 bp, Glycine max
gacagttaatttatcataacatttgtttttggtgcattcaaaaaatggctgggattgtagtgatttttgactttgactcaacaatcattgagtgtgatagtgataattgggtgcttgatgagaccggtttaactgaaaagttctatcagcttcttcctagcacgcattggaaccctctaatggataagatgatgaatgaacttcattcacaagggaaaaccattcaagacattgtacaaattctgagtaggacaccaatgcatcctcgcattgtccctgctattgaggcagcttattctcttgggtgtgacctgaagattgtgagtgacgcaaatattttctttattgagacaattctgaagcatcatggagtgtggaactgtttctcagatgtcattgccaaccccatccatgttaatgaagggaggctcaatatttgtccataccatgattatcttaaatcttctcatggatgcaatctttgcccaccaaacatgtgcaaggcaataattgcattgattcccaagatctatttacttatggccaagcaattaattctcatatttattctagtaatatatagttaaccacttaagcttttattatgcctttgaaccccaggtctagtattttact

SEQ ID NO: 5094 - DNA, 1486 bp, Glycine max
ctacaccgaaacaggtttcctataaaatcccgcacgtgccgttgcagatgagctgaaaacgagaagaagaagatggagatgtatcagatctggagcaggagaatagcgttgggagcgttcgcgtttgttctgcttttcctatcggcctcagcagacgacgtcgttgtgctctctgaagataacttcgagaaggaagttggtcaggacagaggagctctcgttgagttctatgctccttggtgtggacactgcaaaaagcttgctccagaatatgaaaagcttggtagcagcttcaagaaagccaaatctgttttaatcggcaaggttgactgtgatgagcacaagagtttgtgcagcaaatatggagtctctgggtacccaacaattcagtggtttccaaaaggatctcttgaacccaaaaagtatgaagggccacgcactgctgattcacttgctgagtttgtaaatacggaaggaggaacaaatgtgaagattgctacagctccttccaatgtagtggtgcttacatctgaaaattttaatgaggttgtcttagatgaaaccaaagatgtcttggttgagttttatgcaccctggtgtggacattgcaaaagtcttgctcctacttacgagaaagttgccacagcatttaaattggaggaagatgtagtaattgcaaatctggatgctgataaatataaggatctggctgaaaagtatgatgtgagtggatttcctaccttgaagttcttcccaaagggcaacaaagctggtgaagagtacggaggtggaagagacttggatgactttgtggcttttatcaatgagaaatctggaacaagtcgagatgtaaaaggacaacttacttcccaagctggtatagtagaaagcttggatgtcttggttaaggagtttgtagctgccagcgatgaagagaagaaattcgtgtttacccgaatggaagaggaagttgagaagctgaagggttccgcctcaaggcacgggaagatttacttgaaagctgccaagaattacttggaaaaaggttctgattatgctaagaacgaaatccagcgcctacagcgcattcttgacaagtccattagtcctgccaaggccgacgagttaactctaaagaaaaatatcttgtcgacatatgcggcttgactttttggtgcatcattaaccatctctcatggaagctcgtgatccaccgcagctgccgatgattgtttgactttgatatcgaaattgctgggagatattcaacgtggatacttgtagtgcttaatttgagtctgtactattgaccttatcttgcatggcgcttttggggttaaaaattccgaacttacgattcttctccccattgtagtcttacctgagcggtttaaaattttgggagacgatagcttttgtctttataccatgtgtttcgttcgttatttgatggtagccggatatatatatatatatatatatatat

SEQ ID NO: 5095 - DNA, 485 bp, Glycine max
ccgaaacaggtttcctataaaatcccgcatgtgccgtagcagttgagctgaaaccgagaagaagaagatggagatgtatcagatctggagcaggagaatagcgttgggagcgttcgcgtttgctctgcttttcctatcggcctcagcagacgacgtcgttgtgctctctgaagataacttcgagaaggaagttggtcaggacagaggagctctcgttgagttctatgctccttggtaacttaccaatcttctcgatctcttcctctctgtttctatcaactattccttattccatcgttactttgatttcttgaaatcgttatcagggtggggttttttattaaccgattctgatgttttcctttttagcctcgttctgatcggattgcatgtgttctttgcgtttaacggttcaacttgtcgttttaccttctgttgatttgtacttaaatgacttcttgttgtagacgatacaatacgatacc

SEQ ID NO: 5096 - DNA, 405 bp, Glycine max
tttttgtattgtttctatttttatctttattttgttttggactaaaatttggtaaaacttagtttacattgcacactgtattgtgaaaacactcataccgctagatcttaaattttgggattctgctaggtgtggacattgcaaaagtcttgctcctgtaagtatatctttgaggttccttgttatcaatttaaggttgggacctttaattttcataaaaccaatattgtggaacctgactatgctcttttttccctccagacttacgagaaagttgccacagcatttaaattggaggaagatgtagtaattgcaaatctggatgctgataaatatagggatctggctgaaaagtacgacgtgagtggatttcctaccttgaagttcttcccaaagggcaacaaa

SEQ ID NO: 5097 - DNA, 608 bp, Glycine max
tttacttgaaagctgccaagaattacttggaaaaaggttctgattatgctaagaacgaaatccagcgcctacagcgcatacttgacaaggtaatattctctttcagtcgaagcaaaccttgaaagttttactcactcgtgaaataattatgaatattctttttttgtggtaaatttcaattatttggttgtaaagtgagattaagaattgaatgcataatcgtgctactcacttgcctatgttgattgattgattgatgcaggccattagtcctgccaaggccgacgagttaactctaaagaaaaatatcttgtcgacatatgcggcttgactttttggtgcatcattaaccatctctcatggaagctcgtgatcaatcgcagctcctgatgattgtttgactttgatatcgaaaatgctgggagatattcaacgtggatacttgtagtgcttaatttgagtctgtactattgaccctatcttgcatggcgcttttggggttaaagattccgaacttacgattcttctccccattgtagtcttacctgagcagtttcgatatcaaagtgaaacaatcatctgtctttataccatgtgtttacttcgct

SEQ ID NO: 5098 - DNA, 532 bp, Glycine max
gtaagaatgcactggttcatttgctaaattatgtctggccaaacatttttgaaacttctcctcatgtgattaatgcggtgatggaagcaattgaagggatgagggtagcgttgggagcagctgttgtactgaattattgtctacaaggactcttcccaccctgcacgaaaagttagggaggtatattggaagatctacaactctctctatattggagcccaggatgctcttgtagcatcgtaccctgccttggaggatgagcatgaacaatgtttacagcaggccagagttaatgatgttcatctagtgtggattttgattacttagttcatttctgtctccagtgtatttggcagttttctgtacttcctcgcatcaatgtaaagctcagttgtttgaacattattcgtgtcttgttacatagataacaggttcctctcttgatgacatttgtttgatttgtatctcaccagatgatatgcttatagtagctaaccgttgaaggttgaatgaaagcctttgattagtcatt

SEQ ID NO: 5099 - DNA, 1206 bp, Glycine max
caagccctcacttgaattgaaggaccatcctgcctttaatttctcatcaccacttcagtcaacaaaagatggtgatgatgaaatctctcccacttcttctaatagtactcttttcccactctaccaccaccttagcccagtccccggccgcggcaccgaccgccccggccacgccctccaccgcagccgccccggccccagcaccctccgcacccccgacagacatcataagaatcctcaaaaaggcaggagggttcacaaccctaatccgcctcctccaggccacacaagtctccaaccaaatcaactcccaactcctcaccacaagcggcggcctaaccctatttgcaccaaacgacaatgccttctccagcctcaaaccgggtttcctcaactccctgaacgaccaacagaagaacgagctcatccagttccatttgctccccacgtacgtttccgtgtcgaatttcgacactttaagcaaccctgtgagaacacaggccggtgaaaaccctgataggttggcgctgaacataacaagctccggagggaaccaagtgaacatgacaacgggcgttgttaacgttactttgggtggcaccgtgtacaccgatcaccagctcgccgtgtatcaggtggacaaggtgcttcttcctcgggacttctttgaagctaagcctcctgttccggctccggcgccggaaaaggcgaaagggtctaagaagaaatctgcggacagcactgctactactgcagatgatgctgaatcggatgctatcagtgtgaaacaaaggcatgttatgtgggttgcagttcttgcacttttcattgcagcatttacgtaatgaagcattgaactgaaactataccattggggtggatgaaaggtgaatatgagcaacattttgcagatacatacagtgattttaaataattgttctctctctctctctctctctctctctctctataatgattcaagtttcaggttgtatgtggtggaaattctatttgatttatgaaggctttcttcgttctactagttctcttcgatccccctataagaaaaaacttcatatcttgtgtattacttacgagaaatttgtgtataagttgcaacgaagatatcttaatagaaaaatgatacagaagttttgtttaaaaaaaaaaaacaaaaaagggcgccgctcgcgatctagaactagt

SEQ ID NO: 5100 - DNA, 571 bp, Glycine max
  unsure (1)..(571): unsure at all n locations
taaaggatctaagaagaaatctgtggacagcactgctactcctgcagatgatgctgaatcagatgctgtcagcgtgaaacagtggcatgttatgtgggttgcaagtgttgtacttttagtggcagcatttacgtggtgacaatgaggggtttgagaatgtaatatgaagcatattgaaggcttatcatattgggtggattgaaaggtgaatgatcaacattttgcagatatgattttaaataattgttttttttcttaatttctctttactctctctaatgattcaagtttcaggttttggtggaaattgtatttgattttatgaaggctttcttcgttctactagttctcttcaacccccctataagaaaaacttcatatctcgtgtattacttatgagaaatttgtgtataacttgcaaacgaagatatttgatctaatagaaaatgatacagaagttttgtttacctttattattgtacacagccaataattttagaggtctagctattattttatattgtnnnnnnnnnnnnnnnnnnnnnnnnnnnnnnnnnnnnnnnnnnnnnnn

SEQ ID NO: 5101 - DNA, 456 bp, Glycine max
ctgatattttctgggatgctctcggtggaaaggcagagtatccaaagggcaaagaaattcaaggattcatagatgatccacatttgtttgcattaaaaatagcgagagggaaaccatgtctaattgatgattctgtttctcacgctcatttgttggagttttaactcaggagacttcaaggtgaaagagatatacaattatacacaggatgacttaataactgaagacatcttattgcttgattgccaaagagagatttatgtttgggctggcttacattcggctatcaaatcaaaacaagaagttcttcatcttggcctgaaatttctggaaatggatgtccttgttgaaggcctatcaatgaacatccctatttatattgtaacggaaggtcatgagccaccatttttcactcgtttcttttcatgggatcactcaaatgaaaatattgttggt

SEQ ID NO: 5102 - DNA, 561 bp, Glycine max
ccacaccaaaattttgacccacaccactgcatttgtcatatatatatatatccctccctcacccttgtttggagacaacaaaagaacacacattactagaaagttagaaaacatggcagcggtggccggagcatcctcgtccgtgattaaggtggctgcactttccggatctttaaggaaaggctcttacaacagagccctcattcgttctgctattgagctaagccaaggtagagttgaaggccttcaaatcgagtacgttgatatttcgcctttgccccttctcaacaccgatcttgaggtgaatgggacctaccccccacaagttgaagcctttcgccagaagattctcgcagctgatagtatcctctttgcttcccctgagtacaattactctgtcgcaagtcctttaaagaatgcacttgactgggcatcaagggcaccaaatgtttgggctggtaaacctgctgccatagtgagtgctggaggaggctttggtggtggaagatcacaatatcatctacgccaaattggagtgttcctcgatcttcatttcatcaa

SEQ ID NO: 5103 - DNA, 868 bp, Glycine max
  unsure (1)..(868): unsure at all n locations
attcncgggtagacccacgcgtcagactcaagcacaacatctctatcgagtaaattaactatgaagcctaccctactattatccctttccttcctgcctctctttgctttcctggctctttcagaagatgttgaacaagttgtggacataagtggcaaccccattttcccaggtggcacatattacattatgccatcaacttggggcgctgccggtggtggattgaaactaggccggacaggaaactcaaactgcccagttactgttttgcaagattactcagaaatcttccgtggcacaccagtcaaattcagcatacctgggataagccctggaatcatctttacaggtactccacttgaaatcgagttcgcagagaaaccttattgtgctgaatcctccaaatgggtggcgtttgtggacaatgaaatccaaaaggcatgtgtgggtattggtggtcctgaaggtcatcctggtcaacaaacatttagtggcacatttagcattcagaaatataaatttggatacaaacttgtgttctgtatcactggctcaggcacttgtttagatattggaaggtttgatgccaaaaatggtgagggaggaagacgtttgaatctcactgagcatgaggccttcgacattgttttcatagaagcttctaaggttgatggaattatcaagtccgtagtttgaatcaaatcaaataatgtcaagggtagctagatagtgttgagttaatgcttaatcatatgtttgtcgttgtgatatgcattaagtactctgctcccggttgctaacaaaaccccaatgcaaaaataagtgataaaataatggttttgctttattgtaaaaaaaaaaaaaaaaa

SEQ ID NO: 5104 - DNA, 369 bp, Glycine max
cggctcgagcctcactctcttttctttctttctttcttttattctattcctctctagcacagcccttgtgttgaaacatcttcaacctgagagtttacttttgtttggtttttcattatagcattattattatggctcagaagtacttgcacgagctacttgaggaggatcaagaaccgtgctttctaaacaagtatatttccgataggcgaacccagatgaagaggccttccccgaagacgagtctgcgagtgaggaggggcaaagtcaaccagtccaaacacaaacttcccgagagatcggggcggaagcgcttgtcgtctctctctcacagacaccccagacctcagacgggcaccactcttcgaa

SEQ ID NO: 5105 - DNA, 517 bp, Glycine max
cctcacgcgtccggaccttcaatggattcagaaaactggaaacactctctcctctacatcactttcctcctcgcaattctccacctcacgcagaaccatttctgccacaagctcttcttcgccaacgaaacggtgcgcgtcaagaagaaccccgacctccccctccggttccgttccgacggtaccttcaagatcctccaggtggctgatatgcactacggcactggaactagcgtgacacggtgcagggacgtgttggcctccgagttcgagttttgttccgatcttaacaccactcgttttttaaagcgtatcattctagcagagaatcctgattttcttgcctttactggagataatattttcggatcaagttcacccgatgctgcagagtctctgtttagagcctttggccctgttatggaatcaggacttccttgggcagcagtgttgggaaaccatgaccaagaatcaactatggatcgtgaagagttaatgtctttaatctctcttatgg

SEQ ID NO: 5106 - DNA, 700 bp, Glycine max
ggatgaatctcaatctacttcatctctcagttccaagtctgccttatctgctgttctagtttattggcattgggatcagtaactgcaattcccaatgcaaattttcatcgggcgccaaggagcactagtgtgcttctggttgttgtctgtgttttttgtggtaacaggattcaacaatgaagagcacaggacagtggaggtagttggcctaggagaatgcgcagactgcaggcagaacaatattaagaataaccacgctttctcagggttacgtgtgacggtagattgcaagtcacgacatggacacttcagaacgagaggggcaggtgcgcttgatgaatatggaaacttcaaagtatcacttccacaggacatggttgaagatggtgagctaaaagaagattgctatgcccagttgcatagtgcatctgctgaaccttgcccttcccacggaaactccaaaattgtgaccaggtcagtctctgaagacacacacacccttgcacctgctgctggaaaactcagattctcatcagcattgtgcacttcagccttcttttggcatttcttcaaacaccacccagaattcccttaccctcctaaagatgactactctctccctccccctgtgccagtctataaggaacctcttcctccagtgccagtgtataagacacccccagcaccatattagaaacct

SEQ ID NO: 5107 - DNA, 647 bp, Glycine max
  unsure (1)..(647): unsure at all n locations
nnnnnnnnnnnnnnnnnnnnnnnnnnnggcggccgccctttttttttttttttagaggacaaactgattatgagaattttattcgctggatacaggtgtggccactaaatggacgtgaccgataagcagtagtacacatggttcagtgaaattaagcatacatgacatatattatagtaatgacacacaattatacatctttaaaagtattttttttatcacaaaattaaagaaggatgctaacatctcaaatattcagccatagagtgggtgttttggtggtggggtatatcctctaggagcggccattggatggggtatttccacgaacagggacggcggcgctgccgcattggaaaagttttcggccgagttgaagaataagactaggttgggcagcacttgcaagctcaggagagatgagtagtaaaagtattgcaaaaagagcagcaaatgagatccatttggccattgctaaaatgcaagtttgagaggatggaactatattagtttaagaagtggtatttatcaagatccatcttttagacgcgttaaaatccagtcgtcgttgactcttcctcgccccgcaccctacgctaatgtggttggacttggactaatgcccccaacattattttttttcctcc

SEQ ID NO: 5108 - DNA, 692 bp, Glycine max
taagcttggatcttataaagcggccgcataatattttaattaaaaatttttttttttgaaaaccataaaagttttttatttatagtaatctgtagtacaaaagcaccattttctctcttataattttgatttacattcacaaagaaataagtatgatgctcatgatgacttggccacatcattaatgctacgaaggattgaagtgcatgcaagagtcaagaatatgcattgctacgaagttgtaaatcacaatgctagaaaacacaaagcagttcctcttatttattaagtagataatagacctcattgcttgctttaggcatgggtgttgtcctctactggagggtactttccataaggtggtttcttgtatggtggcttcttatatggtggcttgtaaaccggtggtttcggcttgtaaaccggtggttttggcttataaaccggtggtttgtacactggtggcttgtacactggaggcttgtacactggtggcttcttaattggtttgtagtaagtagcaagcccttgaggcatgaggataagggctgcaagaagcagcactaggaaggatacaaaggaagccatcttagtgggtttgttttggtgttggtgtccccctgtctgacctttaagcatataggcccccccgcgtgtttgtatgtttgttcgaacgggtaccttttggtgtg

SEQ ID NO: 5109 - DNA, 738 bp, Glycine max
tccctcgcgtccgccaatgggtgttgtcttgttggtaaagaaagagaagagaagagtggaatagaaatcgaagacgaagatggaggacgcatcagcatcaaagttcattccacaccaaatcggaggggtccaaaacgacgcgcttcgattcggtctccatggagtcaagagcgacatcgttggttctcaccctcttcaatcttcactccaatctacaaggagaatggatgaagcgatgaagaggcaatgcaaagttaacctgtacggaactgcttttcccatgaaggaggagcttgacaggcaaatcctgtccaggttccagcggcctcctggaccaattccttcttcaatgctgggtttggagactgttacaggaagtgttgatcactttggttttgaggattgtctaaatgacccccgtgagtcagagactttccggccattagacatgcatcatgggatggaagttcgccttggtctatctaagggaccagtgtacccaagtattatataattaaatttgactgttattctagtaccagaaaacagtattttgtgatcgaagcttcttgttattcattaaaatggaagtgtccgaggattctccatatgtagtcgtggaagcttgttgttttcctaatgctctggatgctagaaatgttatggatccatataaccacagcatgtctttcaaattaaagcaaaaaatatgcatgaggcatttgagttgagcatcaa

SEQ ID NO: 5110 - DNA, 719 bp, Glycine max
ctggattggagatcacatatctgctatagctgccggagccttttagtttcattttcacttggtttgctgctgttcccctcattgtgtggatagctctgtcactgacaaatgccattgtaaaagactttgtgattttaaagggtccttgtccgaactgcggtactgaaaatacctctttctttgggactatactctcaatttcaaatggtggttccaccaacactgtcaaatgctccaactgtggaactgcaatggaatatgattcaactacaagattgattacgttaccggaaggaagtaacgcctgagttgaggtatgcctgaaaatcatatttattgttccagcaatgggagatcattaatagcagttcttgtgagagtgacaaatttatcatttagcaaattgtgatgttcttccacaaatgatcttgaagtcatatgtaatcactatcacacacaattggtgtcatctcaatttatgtgtcaccatcctacttgtaagtatatgggctttgtatacttgtaagtaatatggactttgtatagcatacactggattgcctctacttgaagagttgagttatgagggtgcttaacaccatcgatgagtctaacctagaataacgtgtttttattgcacacttttgcaaaattttctttctattgcctaggccagatcctatgaacaccaacaacaataaggaaaattgagaatattt

SEQ ID NO: 5111 - DNA, 1449 bp, Glycine max
gtgttcgtgagctttacccggattattgccctccattagcagcctcttctggaggtagtggatctatggtaatcaatgattgcaatgagtatgatgtcgaaggcggtgacgatgagccaaactttgacgtcgaagatcgcaaacctgagaatcttcatgcaccgaatcttgggatggacagaatgatgggaagactgccttctttcccaatcaagggagaggctgttacaaatttggatttcattcggaagaggaagatctctggtgacttcaacatgataatggatcagaaaatttacacatgcgaacaacctcagtgcccttacagtgaaattcaccatggttttgctgacagaaattctagggacaaccatcgattgagttgtccttatagaggcagtgcttcaacagattatggaggttcaaattttcatgttaatgaggcaaagccggtcatattcccccaacagacggagtagtagtaggttttggttgaacaaaggactgttgggggaatatgacctactactactccgtctgttgttaacttggttccatctgttattgatctaaccggactcggagttccagaagatggcaagaaaatgatcactgaccttatgtcaatctatgatacaaatgttcaaagcaacaagaatctaagttccagtaaccatgtagctgcagaaaatcccagccttcctcagccaggcattcggcagcaacaggacaacttctttcgcagtcaaggaatcactatggaaggaaacttctatgaagaagccaacatgcccaacaacaatcatcacatgtttgcaagggaggaaggtcaatttgaccggttcaaagctttgaatgcaccaccctttgagaccaatcacaacaacaacaacttccatttgatgtttggttccccttgtgatttggcatcctttgatttcaaggaggatatgcaaggaggagtagtagggatggatgctcttcagaaacagcctgatatctctatttggtaccagtgaaaatgacagcttaaagcttgaaacctcctcatcatcttcatctatcatggactcttttattttccttctaaaagggttggcacccccctaatcatgtgaagttcctttggccgaaaaagggtttcactgcaattttcttcacatgtaatcctgtaggcccagtagaactaaataatattttaagcttggcaggtctagtatgtgttatatacataataataataatatataataaaaacttgcatgttacccattatatgtagctttgtgaattgtgattgtgtgtttctatatcagtgtagccatcttgttgttacttaaatattattactcttatgtaagactgtgacataaataagatttgaatttctcttctaaattttatttagagggtaaaataaaattgttggatagatgaatggttttgtcc

SEQ ID NO: 5112 - DNA, 526 bp, Glycine max
atccaatcttgggatggaaagagtgagggtaactctgccagttcaacagccctctttttcaataaagggagagactgttacaaatttggatttcattcggaagaggaaggtttctaatgacttcaacatgatggatctgaaaatttacacatgtgaacaccctcagtgcccttacagtcaagttcgccttggttttgctgacagaatttctagggacaaccatcaattgagttgtccttatagaggtagtgcttcagattatgggggttcaaattttcatgttaatgaggtaaagccggtcatattcccccagtcctttgttcaacccaaatctactactcagtctgttagtatggttccatctgttattgatctaaccggactcggagttccagaagatggccagaaaatgatcactgaccttatgtcaatctatgacacaaatgttcgaggcaacaagaagccaagttcctgtaaccatgtagctgcagaaaatcccagccttcctcagccaggcattcggcag

SEQ ID NO: 5113 - DNA, 776 bp, Glycine max
cacctttctttttcctttccacccatggctgacccctactccaagttcttctcttcctcttcacccttgttccgtttcaaccacaaccaatatttcccttcttcaaacccttcgccacaacaccacaaccacaacttcatcaaccacacaaaaaccaacgacaccaccaccaccaccgcctttttccactaccaccaacaccaaactactactgctttttcttcttttccaccctcaccgcctttgagagaagaactacccctcttgaagctgagtccaacaaagcaagatgaggaggaagtagaggacttggtgtctaattgcactggtggagccatggacgtggaagagaggatccaccttaaagaggaattagaagaggagaaaaggaagtactatgtcactgtgcactccacatagggctgccaagccctagtgctgctgagatggcttctgtcctctcttcttcctctcatgagatcactgacaaagaccaacatggagatcatggtgctgctgaggattcttcttctgctggcttcagactcaacacgggccagaactggatccctaccccttcccagattctcattggccctacccagatctcttgccctgtttgctgcaaaaccttcaacagatacaacaacatgcagatgcacatgtgggggcatggatcacagtacagaaaaggacctgaatctctgaggggaacccaaccaacaggaatgttgaggcttccttgctattgttgtgccccagggtgcagaaacaac

SEQ ID NO: 5114 - DNA, 946 bp, Glycine max
ggatacccaactttccgtgccacaccttccatcaagagtactgaaaccatataaaaccttaggccacattcatagttgtagagaagcttgcaatggccaaagactacggagaagttgagttgtttggtgtggggggaagcccttttgccagaagggtgcagattgccctggaactgaagggagtccaatacacttactttgaagaagatcttaggaacaagagtgatcttcttatcaaatacaaccctattcacaagaaggtacctgtgcttgtccacaatggaagaccattggctgagtcccttgtgatccttgaatacattgatgagacatgggagaaccaccaccccatcttgcctcaacaaccttatgatagagccttggctcgattctggtcaaggttcattgatgacaaatgcatgcctgcaatatcaaaggcagcatttactgcagacaaggaggaacgtgacaagggcactgaggaatcactcgagtctcttcaaattcttgagaatgtactcaaacacaagttctttggaggtgagactactataggcatagtggacatagccgctggcttcatagctttctggctccctgcgattgaagaggctgtggggttgaaattgctgaccaatgagaagtttccaaaactctacaaatggggtgaagactacaccaaccaccctgttgtgaaaaagaatcttccccaaagagatagggttgtggggttcttcaaagctcgatatgcatccatcactgcttccaaatagaccaattgtgggtgtgatagagactcatgattttgggaaattgttgtgtaataaatcttgtaaggagtaggtggcttcttgagggagggtctacatgatggaatttcgagtaaaattgtagtgtttgtgcactttgtgttcaatttggtatttaagtaattatgttctaatat

SEQ ID NO: 5115 - DNA, 944 bp, Glycine max
ctttgaggagggccctcattctaattttgctggaccaacttcaggaagcactgcatgtgttgcaattattagaaacaacaaactttttgtagcaaatgccggtgattcacgttgtgtggtatgtaggaagggtcaggcgtatgatttgtcgatagatcataaacctgatcttgagattgagaaggaaagaatcgtaaaagctggtggttttattcatgcgggacgagttaatgggagtttaagccttgcaagagcaataggtgacatggaatttaagcagaataggttcctttctgctgaaaagcaaatggtgacagccaatccagacatcaatactgttgaactttgtgatgaagatgaatttatagtgctggcttgtgatggcatatgggattgcttgtcaagccaacaattggtagattttgtacgtcaacaactgctcttggaaactaaactttctgccgcttgcgaaagagtactagatcaatgtttggcaccaacaattactgttggtgatggatgtgataacatgaccatgattttggtgcagttcaaaaaactggcccaatcaagtgcaccggcataacataagagctatcatcttcaaatgaaataagctacatctgaactaagactagagagcagtgaaagttagtaaattttgagcagcaacactacacacatgtagacacatgagtctagatgatcattttcacttcaactagcatttgtttccaaatttctgtgtttattttcacacctagaatctgttttgcttgttcaataagaggctccaaatgttaggtttttatagctattagcaacaatctgcaggcattttgtgatgtttagctacttgctatcaactgcaaggatattggccccaacttattagaacattgtgtatatatatagtatatctcatcaaataaccttgttatgtg

SEQ ID NO: 5116 - DNA, 805 bp, Glycine max
  unsure (1)..(805): unsure at all n locations
cccacgcgtccgcccacgcgtccgcccgcctataaactgaactgaattgagtctcaacaacccagttgagtaactaagatggcgcaagtgaggaacaagcaagtgcttctaaaggactatgttaccggttttcccaaagaatccgacatgaatattgtcgaaagtaccataacattgaagcttccacaaggttccaatgatgtcttgctcaaaaatttgtacttgtcttgtgatccgtatatgaggaatctcatgaacaagcccgaaggccctcccaatagtcgtgcttacactcctggctctccattaataggatatggtgtgtctaaagtcctggaatctgggcacccagattataaggaaggtgatttagtgtggggctttaccaaatgggaagagtatagcttgttaccctcagctcaaatactcttcaaaattgagcacactgatgttccacttacctactacactggaattcttggtatgccaggagtgactgcatatgcaggtctatttgaagtaggatctcttcagaaaggagaaaatgtttttgtttcggctgcctctggcgcagttggtcaacttgttggccaatttgctaactgacattgggtatgagtgtaatgctgatttaaaaagaaggatctgtgacaataaattgatttgttatgagttactacagagagccgacttatcagtttaanagcctttcagaagccctttggtacttttaatgttggcaaacattgacgcgatcctaacaaagattcgggncaaccgttgggatgncacgattattctttca

SEQ ID NO: 5117 - DNA, 1067 bp, Glycine max
gaacttgcccgatggccctcccaatagtcgtgcttacactcctggctctccattaataggatatggtgtgtctaaagtcctggaatctgggcacccagattataaggaaggtgatttagtgtggggctttaccaaatgggaagagtatagcttgttaccctcagctcaaatactcttcaaaattgagcacactgatgttccacttacctactacactggaattcttggtatgccaggagtgactgcatatgcaggtctatttgaagtaggatctcttcagaaaggagaaaatgtttttgtttcggctgcctctggcgcagttggtcaacttgttgggcaatttgctaaactgaatggttgttatgtagttggaagtgctggatctaaagagaaggtggatctgctgacaaataaatttggatttgatggaggttttaactacaaggaagagcctgaccttgatgcagctttgaaaaggcactttccagaaggcattgatgtttactttgagaatgttgggggcaagacacttgacgccgtactcctgaacatgagagtccgtggtcgcatacccgtctgtggaatgatctcacagtataatcttactcaacatgaaggtgtaacaaatttggcacagatcatatataagcggattcgtttgcaaggctttaacttcatggatttcgttcacctatatcccaagttcttggagtttctcctgccaaatatcagagaggggaaggttgtgtatgtggaagacatagctgaggggcttgagaatggaccttcagcattggttggcctttttagcggtcgcaatgttggaaaacaagtgctcgttgtttctcatgagtaaaaagcatttgtttcttgtgttcaatgggaagttatcagttttatttctggtttttttgctgaaaaattggctgtcttgacatcacctttgcagtcaccttcgtcaactgtatgatgatgctctttgttcttgatagtcctgagagcagtatcaaatgtaatgcacagttgtttctcttgaataaaagcatttgctttttctatatgtagtt

SEQ ID NO: 5118 - DNA, 550 bp, Glycine max
taattcccggggcggcccaagacaaacaattaacacacacaaacagaggctacgtacgatcaaattaattaagatggcggaagtgaggaacaaacaagtggttctgagggactatgtgagtggttttcctaaggaatccgacatgaacatagttgaaggaaccacaatattgaagcttccacaaggttccaatgatgtgcttctaaaaaatctctacctttcctgtgacccttacatgagaatgctcatgaccaaggtggaaggcctcgacgtgtttggcacctatacacctggctctccattaacagggtatggagtgtccaaagtcctagaatctggacacccagattacaagaaaggtgatttagtgtggggatctacaaaatgggaagaattcagcttggtgtccccaactcaaatacttttcaaaattgagcacaccgatgttccgctttcatattatactggtattcttggtatgccgggaatgactgcatatgcaggtttctttgaagtaggctctcccaagaaaggagagaaatgtttttgt

SEQ ID NO: 5119 - DNA, 666 bp, Glycine max
ggccaatttgctaaattgactgattgttatgtggttggaagtgctggaagcaaagagaaggtggatcttttgaagaataaattaggatttgatgaagcttttaactacaaagaagagtcagacctcaatgcaactttgaaaaggtactttccagaaggcattgacatttactttgagaatgttgggggcaagacacttgatgcagtactcccaaatatgagagttcatggtcgcatacctgtctgtggaatgatctcacagtacaatcttactcaacctgaaggtgtaacaaatttggcaaatcttatatttaagcgggttcgaatggaaggttttattgttactgaattctatcacttatatccaaaattcttggagtttgtcctgcctcatatcagagaagggaaggttgtgtatgtggaagacattgctgagggccttgagaagggccctgcagccttggttggcctctataccggtcgcaatgttggtaaacaagtggttgttgttactcacgagtaaaattatataaatatattgtacattgctgtcttttttcattcaaagtttgtgttctatttttgtattgaatattaggcatctttgtgccctaaaaaaaaataaaaaattaggcctctttgtatggcttttgcgatcaaaaaaaaa

SEQ ID NO: 5120 - DNA, 409 bp, Glycine max
tcccggcgctacgacgtacgcgtaagtatggctgcggctgccaaaagaacacaaaaaggggaaagaaatggcgaaaggccttgaaaatggcccggcaaccttggttggcctctatagtggtcgcaatgttggtaaacaagtggttgttgttgctcgtgactgaatgcagatgctttcgttggacattgctgtctttttttatgattttggtgttgaatattcagggctctttgtatgttttttgcaatcattttcaattgtggtatttgtgatagcagtgtaacttaagcaactcttagttgaaacgtattccctgagtggtatcatatggtaaagccttttgttacgtaatcttgttgtgaacatgaggatacaatttcgttacgaaaacaaaaaaattaaggtaatc

SEQ ID NO: 5121 - DNA, 555 bp, Glycine max
attactccctatattaacccaacaatgcaaaacaacacactgaactctcttcactgaaacgacacacacaaaaaaaagctttagtttaggatgacccaagtgaggaacaagcaagtggttctaagagattatgtcaccggattccctaaagaatccgacatgaacattgttgaaggcaccataatattgaaggttccagaaggttccaatgatgtccttctaaaaaatctctacttgtcatgtgatccatacatgcgactcctcatggccaaggaccgttctttcggagatggctccttcacccttgcctctccattgaaaggatatggtgtgtctcaagtgctggaatctggacgtccagattacaagaaaggtgatttagtgtgggggattactaaatgggaagagtatagcttggtcccctcatctctcatacatttcaaaattgagcacactgatgtcccactttcctactacactggaattcttggtatgccaggaatgactgcttatgctggtttctttgaggtaggttctcccaaaaaaggagacact

SEQ ID NO: 5122 - DNA, 540 bp, Glycine max
tggagaattcgccgccaatagaggaactttcatcttcaccacataccgaaggtgccggggatgcttcaggcgtggtggtagtagcagtgccggcaggtgaagggaatgaatccatgtcctcagtctgttgttgcaggctccaatacattatactggctgcaagagtgagaatcatcttctgattaacctccataatatcctcaggtaacaaaaatatggaacaaccgagcttccgtgcaacactgattatataagtggcattcaacctcttctcatcattgctttcacccttggtgacaaggttccaattgacaatcctaggctcaacagcactcagaagctcaaggaaaaagagtccacatgacaggctcttatccttgaagctctctatgtgagaagttctgccagtgctcttcacttttctgttcacccatttcaggatatcagcatcagtgatctcctttccttgggaatgagatctcaaatttttcaacagttgaagcattgtgaatcgcatgagctgccaccggacgcgataag

SEQ ID NO: 5123 - DNA, 546 bp, Glycine max
ggggagagagccaaatcgaaccgaaaagtttcgaaattacatacataaagagggagagagaggggatgcaaattccatgagagcagaagaggtgcctcttactccgttacgagttcgacccctcctctcgctcttctcttctcttctcttctcttcatagcaaagcaataatcctattagaatatggaagagagcttcgttttccagtggagcgttatcagatctctcttgtccatccttcagtggtgggccttcaatgtcactgtcatcatcgtcaacaagtggatctttcagaaattggatttcaagtttcccttatcagtttcctgtgtccactttatctgttcatccattggagcttatgtggtaattaagttgctgaagcttaaaccactgataactgttgaccctgaagatcgctggagaagaatctttccaatgtcatttgtgttctgtattaacatagttctggggaatgtgagcctacgatacattccagtttcttttatgcagacaataaaatcattcacacctgccaccacagtt

SEQ ID NO: 5124 - DNA, 572 bp, Glycine max
  unsure (1)..(572): unsure at all n locations
cccacgtgnccgggaatagcgtgggaccgacgaagcaaagcagattgaaacataaaatttccatggcgtgacgggggagagagccaaatcgaactgaaacgtttcgaaattcattttttttttctaacatacttaaagagagagagagagagagagagagaggggagggttgcaaattccatgagagcagaagaggtgcctcttactcgtctcgtctttcaccgttacgagtgagttcgacccctcctcttgctcttccttctcttctcttctcttctcttctcatatcaaagcaataaccctagaacatggaagagagcttcgttttccagtggagcgtcatcagatctctcttgtccatccttcagtggtgggcgttcaatgtcaccgtcatcatcgtcaacaagtggatcttccagaaattggatttcaagtttcccctatcagtttcctgtgtccactttatctgttcatccattggagcttatgtggtaattaagttgctgaaacttaaaccactgataactgttgaccctgaagatcgctggagaagaatctttccaatgtcattt

SEQ ID NO: 5125 - DNA, 495 bp, Glycine max
gactgaaagaaacatatgaggagacaaagagaaaaaaacgtagtgtcccaaatcacccaatattcagagtgcaagaaggttcttcttcctttttttcttcatcgtaagccaacaccgattcgattttctctctctgcgtgaaaattctgaggttgtggaggctccgaaaccatctgggtcgggtgatggaagaagaggttatttgccaatggagcgtgtttagatctctcttggcaatacttcaatggtgggctttcaatgtcactgtcattatcatcaacaagtggatcttccagaaattggatttcaagtttccactgtcggtatcatgcatccactttatctgctcagccattggaggatatgtggtgattaaggtgctgaagcttaaaccactgataactgttgaccctgaagaccgctggagaagaatctttcctatgtcatttgtgttctggattaacattgtgctagggaatgtgagcctaagataca

SEQ ID NO: 5126 - DNA, 328 bp, Glycine max
ctaattaccacattaaataaaaagttatttgtgtcccaattcccaaatcacccaatattcagagtggaagaaagaagagttcttcttcttcctttgtcttcaccgttaccgaacacagattcgtttttctccgaggtagtgggggcaccgaaaccatctgggtcgggtgatggaagaaggggttatttgccagtggagcgtgtttagatctctcttggctatccttcagtggtgggctttcaatgtcactgtcattatcatcaacaagtggatcttccagaaattggatttcaagtttccactgtcggtatcctgcatccacttcatc

SEQ ID NO: 5127 - DNA, 345 bp, Glycine max
attatcctctcttctctttctctctctctctctctctcttttatcccttgacatgtcttctgccggcggcgacagcggcggcagcgctacttccggcgagcctcgccaatacttctgccaccagtgcaaccgcaccgtctcaatttccccttctccctcctccgatcttcctctgccccacttgcaacggcggcttcctcgaagaactcgaaatcccaatccccgacctaaccctaaccctcctaatccttttttctccgacttccccctcggcggcgccgccaccattcccctcgtcctccccggcgctgccacctaccctcccttcggcgatctctcagccct

SEQ ID NO: 5128 - DNA, 462 bp, Glycine max
atttgatttgttgaacaagcttctaacttatgaccctgaaaagcggatcacagctgaagaagctctaaaccatgagtggtttcgtgaagttccccttccgaagtcgaaagaatttatgcctacattccctgctcaaaatgctcaagacaggcgaatgaggagaatattaaagagtccagatccattagctgagcagcattggaaggagatgcagcagggtgaatcagggactggtggtacttttggttaagaatggtgcaatttaattttttgttcacaataatcattctaacatgctctgctgaatggttgcacacttgaggtgagagtaagcgctggatggatgctgctaattttgattgttagacaatcacttttgtggtttttttatcaggcgcttcttgttggtttgtgtcgagatatgtattctttacttccttggagccagatctatttcaggtt

SEQ ID NO: 5129 - DNA, 2232 bp, Glycine max
gtggtcatttttgacctccgatgtttctcgggaggagcctatacatatattacaataccatgatcaatccaatcatcctaaaattaaccagaaataaaaaatagaaatattgggcgaaactaattgtgtggagatctgtcggagaagaaagaagcgaaaattatcctctttccattcgtcggttcaccttcacttctggtgagcgaagagagagagagagagagagcagagcagaggggaagaagctgatgagaggagatcgccggatgaatatataatataaattgggttgcttgatgggcaacacatgccgcggatctttgaaagggaaatatattcagggcttcagccagcccgaagaccattccaagcgctccaccacccattctgatccctcctcaaccaagcagcaagacgacaacgacaacaacaacaacaacaacaacaacaactatcttcccttcaacgccaagagagagtccatcatgcgccgcggcctcgacaaccaagcctattatgtcttgggccataagactcccaacattcgtgatctatacactcttggccgtaaattgggacagggccaatttggtaccacttatttatgcaccgagaatgctacctccattgaatatgcctgcaaatccatctccaaaaggaagttgatttccaaggaggacgtcgaggacgttaggagggaaattcagataatgcatcatttagctggtcacaagaacattgtcaccatcaagggtgcttatgaggatcctctctatgttcatattgtcatggagctttgttccgggggtgagttgtttgatcgcatcatccagaggggccactataccgagaggaaggccgcggagttgaccaaaattattgttggggttgttgaggcttgccattcccttggggtcatgcatagagatctcaagcctgaaaactttctcttggtcaacaaagatgatgatttctctcttaaagcaattgactttggcctctctgtattcttcaaacccggtcaagttttcactgatgtagtcggcagcccatactatgttgctcctgaggttctcctcaagcattatgggcctgaagcagatgtgtggacagctggtgtcatactgtacatattgcttagtggcgtgccgccattttgggcagagacccagcagggtatatttgatgcagtattgaagggacttatagattttgactcagatccttggcctctaatatctgacagtgcaaaagatctgattagaaagatgctgtgttctcggccttcagaacggttgactgctcatcaagtgttatgtcatccttggatatgtgagaatggagttgcccctgacagatcactggaccctgctgttctttctcgtctcaaacagttttctgctatgaataagctaaagaagatggctctgcgagtgattgctgaaagtctatccgaagaggagattgccggtttgagagaaatgtttcaggctatggatactgataacagtggtgcaatcactttcgatgaactcaaagctggtctaagaagatatgggtctacccttaaggatatagaaatacgtgatcttatggaagcggctgatgtggacaaaagtggaaccatagactatggggagtttattgctgcaacagttcatctcaacaaactagagcgtgaagaacatctcattgcagcattccaatattttgacaaggatggtagtgggtacattacagttgatgaacttcaacaagcttgtgcagaacaaaacatgactgacgcttttcttgaagacatcattagagaagttgatcaagataatgatggaaggattgattatggtgaatttgctgccatgatgcaaaaaggcaacgctggaattggtaggagaactatgcgcaacagtctgaatttaagcatgagagatgcaccaagtgctcaatagcttatgattgtgctcattatgtacaggtacttttggctttgggtaaaatagaaattttatcccctgtatgaaatactatttgcccactttataatttatattcttatgaatttttaagatgttagaggtcaaaaggcatcacaaatggtatatcttgtaatcaccaacatacttctaatattatgtggtaggccatctctagtggttggaaaagacatttagccaacagatgttagtctctcactcttggatgttaaagttccgagtcattggtacatataca

SEQ ID NO: 5130 - DNA, 954 bp, Glycine max
  unsure (1)..(954): unsure at all n locations
tntcatgctatgggatactgataacatttctctcaaacacggcaatngaactcaaagctggtctaagaagatatggttctacccttaaggatatagaaatacgtgatcttatggaagcggctgatgtggacaaaagtggaaccatagactatggggaggttattgctgcaacagttcatctcaacaaactagagcgtgaagaacatctcattgcagcattccaatattttgacaaggatggtagtgggtacattacagttgatgaacttcaacaagcttgtgcagaacaaaacatgactgacgcttttcttgaagacatcattagagaagttgatcaagataatgatggaaggattgattatggtgaatttgctgccatgatgcataaaggcaacgctggaattggtaggaggactatgcgcaacagtctgaatttaagcatgagagatgcaccaagtgctcaatagcttacgattgtgctcattatgtacaggtttgtatgcagcaaagccagaaagagaaaaataaagtataaatctttccaaaaaattgttcatatcttgctgaccggtcctatccctgaagaacaatcaggattgtgggtgctctcgcatgaggattcatctagtgttacatttatgtgctgtatgagtggaaaaattgtttctcgctttgtaaaccttagtgttgggtgttacagctacttcaagttggtcttctatttttctgtgctttcatgtaggggcattctgtctatagtttaagtagaaggattttgatctttcaagttcttgatttcacggatgtaaagtttcacacgcatgacatgatgtattgggcctactaagaagcctttgtggagtatgatgcattgtgttaaagtgacagtgctgaagcattttatttctcagctggcttttctttccctaaacaaataccctgttattctagcag

SEQ ID NO: 5131 - DNA, 564 bp, Glycine max
gggcgtagctggtcagcactgacctccgatgtttctcggcaggagaagagccaatacaaaaatgcaataccatcaccaattaatcatcctggaattagccagaaaaatgggatggaaatatttttcgaaactaattttgtggagatctgtcggagaagaaagcaaataattatcctctttccattcattcgctgttcacttggttctggtgagcgcagcagaggggaagaaagaagctgatgagaggagctcgttggatgaatatataatataaattggtttgtttgatgggcaacacttgccgcggatctttgaaaggtaaatattctcagggcttgagccagcccgaagaccattcaaagcccaccaccacccattctgatccctcctccgaccacccctctaccaagcaatctgcagaaaactacaacaacaacaactatcttcccttcaacgccaagagagagtccatcatgcgccgcggcctcgacaaccaagcctattatgtcttgggccataagactcccaacattcgtgatctatacactcttggccgtaaattgg

SEQ ID NO: 5132 - DNA, 442 bp, Glycine max
ttaaaatagaaatatttttcgaaactaattttgtggagatctgtcggagaagaaagaagcgaaaattatcctctttccattcgtcgttcaccttcacttctggtacgcttatttcgtaattgtttattattgtattgtattcttttcttctgggtctgggtggctgttgaaagattatagattagatgatgtgatgtgaaagaaatgaatgaatagtttttttggattgatttgtttgtgaggtgagcgcaacagagagagagagagagagagagcagagcagaggggaagaagctgatgagaggagatcgttggatgaatatataatataaattggtttgtttgacgggcaacacatgccgcggatctttgaaagggaaatatattcagggcttcagccagcccgaagaccattccaagcgctccaccacccattctgatc

SEQ ID NO: 5133 - DNA, 593 bp, Glycine max
cgtcgactgcacgcgtgcctaagctaagaattcagctcgagcttctatctataaagcaaagagagaagaaattacggattttccatcattccagaaccgtaatctccaaaccccacttcgtcagatactaaaaagaaaccaacagtttccatacttagtatttcttctctgactgactgatcaggttgacatcttgacattgcaatcctgccttttggttccccatttccatgtttgtggattcttcctgattcaaaggcaatatattgtgtcttcatagctcagtttttgagcctcatcagttgcaacttgcaacacaaactttatctataacttggtatctctaaaggactctcagcattgatcaaaatgggcctctctagtctcccagcaccatctgaaggagtattatgtgtccttctggtgaacactgtattgtcaatttccatattcaaaggcattgtaaggacaatcctgcacattgttggcatccatcttccatcatcctccacttcaccctcttcaccagatccctcccaagccgcacctgagtcatttgaattgcatcttagtccctcggagagtaacattga

SEQ ID NO: 5134 - DNA, 1219 bp, Glycine max
cgagaaactttctcaattggaagaagtaatagaaacaggatcggaggcagagtattttcatatattactttgaaaaaatcttaatgctgtgtgtggacgactttgtgagacagagagagattttgaaacagaagaaaaaacagagaaaaattacatacaggataaataatagtcaaacattaccggtggcgccggtcaacggttgataaacctctctctctaaagctcttctctccttctctctcttgcttggtctttgaattctgaggaggagcagcttcttgggttggttctctgagtttttacctcctctgggtctgatccaaaaaggcttaattttctttgttccgaggaaaaaattctgcttttgaatttgttggttttcaagcttggtgtagaaggaaatggcacaacgttctcatgtacccaaatttggcaattgggatagtggagagaatgttccttatacagcatattttgacaaggcgcggaaaggtcgaactggggcaaggataataaatccaaatgaccctgaggaaaatgctgatttaagtctggataatccatcatctgatcacctacctcctaccagacccagagctaattcagaggatcaatccggaaaaggatcattgcctttggaagatgatcctaagcattttgtcgactctccagctcgtcatgacaatgtaagcagtaggagtggcagtagaagccatggagtaggttctgctgataaccgtagaagacattcaacgcaaagtactgggtctgagtacagcattgaacgttcaccgcttcatcgccaggctagagccccaggcagagacagtccccagtgggaaccaaagaattcatatgacagcagtcagggaacaccagggaggtctcggttaagaccggctaatcgaggagatgaaacaccggataaaggtgcagctgttccaaagtttggtgactgggatgtgaataaccctgcatcagcagatggctttactcacattttcaacaaagtgagggaggagagacagggcggcccaggacaagtgccgggaacgcctaatgagagaccacaacctattaggggcctatctaacgatgacaaagtccagtgttgctgcttcgcatgggggggcaaaaaatgatttcttggattagaagtgtgaatgataatatttgaacaaaaatgatggaaaagatagcgttgtgaatgatcatg

SEQ ID NO: 5135 - DNA, 466 bp, Glycine max
ggatgctaatagaataggtttcacaccacactaaagccaattagtccctctcttctccctttccttttctctatccaataatagagctttagaagaaagaaagaaagccatgcaagcatgttcctcctcagacgctccactctccaagaggttagatggcaaagtagcactcataaccggcggagccagtggcatcggtgaagccaccgccaagcttttccttcgccacggtgccaaggtcgtcatcgccgacatccaagacaacctcggacactccctatgccaaagtctcaattcctccgacaaaaacaacaacgacgacatttcctatgttcactgcgacgtcaccaacgacaaagacgtcgaaaccgccgtcaacgctgccgtctcgcgacacggcaagctcgacatcctcttcagcaacgccggcatcacgggccgttccgactgttctaactccatcacg

SEQ ID NO: 5136 - DNA, 325 bp, Glycine max
cagagaagcgtcttaataaacgctaacctctgtacccttcgctaaaatgagagagtgcatttccatccacattggccaggccggaattcaggtcggaaatgcttgctgggagctctattgcctcgagcatgccattcaggctgatgggcagatgccaagtgataagaccattggtggaggtgacgatgctttcaacaccttcttcagcgagaccggtgcaggaaagcacgtgcctcgtgcagttttcgtagatcttgagcccactgtcattgatgaagtcagaactggcacataccgccaactcttccatcctgagcagctcatc

SEQ ID NO: 5137 - DNA, 1782 bp, Glycine max
atcgagccgctcgagccggaaaattaatgcccctttcattttctctgcatctgtagtatctatcaccaatcaattccactcttcttcccatcaaacaacaaaaaatcaatctgggaaacaaaaacaaaatgccgtcattagaggaggaactcttcccatcaaccccaggaaagttcaagatcgagcggtcccaccacatgaaccgccaactctatcgctgtttcgcctccaccagcaccatgttcctgtgggccctcttcttaatcgccctcaccgcttcctatctcagcttccaaggcttcgtcgattccggcagccgctacctcaccgcctcctggggcgggatccagtgggagaagcaggtccgcacctccgcccagatccaccgtcaaggcggcatgtccgtcctcgtcaccggcgctgccggcttcgtcggctcccacgtctccctcgcgttaaaacgacgcggagacggcgtcgtcggactcgacaacttcaacgactactacgatccgtctctgaaaaaagcccgcaagtccctcctcgccaagcatgacgtcttcatcgtcgatggcgacctcaacgacgccaagctcttggcaaagctcttcgatgtggtcgctttcacccacgtgatgcacctcgcggcgcaggccggggttcgctacgccatggagaatccccactcctacgtccacagcaacatcgcgggcctcgtcacgcttctcgaggcctgcaaatcggcgaaccctcagcccgcggtcgtttgggcctcgtccagctccgtctacgggctcaacgagaaggttccattttccgaatcggaccagaccgaccggcccgctagcctctacgccgcaaccaaaaaggccggtgaggaaatcactcacacctacaatcacatctacggtttatccatcaccggtttgagattcttcaccgtgtacggaccctgggggaggcccgacatggcttatttctctttcaccagaaacatcttacaagggaaacctatcaccgtttaccgcggtaaaaaccatgtcgacctggctagggatttcacctacattgatgatattgtgaagggttgcgtcgggtcgttggatacttcggctaagagtaccgggtcgggtgggaagaagcgtggacccgctccgtatagaatatttaacctggggaatacttcgccggttactgttcctactcttgtgagtatattggagcggcatttgaaggtgaaggcgaagaggaatattgtggacatgcctggaaacggtgacgttccgtttactcacgcgaatattagttcggcccggagagagctcgggtacaagcccacgaccgatttgcaaaccgggttgaagaagttcgtcaagtggtatctttcctattacggctacaatcacggcaaacctgtaaattaataaattttgttttgtttcctttttattcgggaagggttttttttttctttttcttttttagtgtggtaggttttaagtcacagatagaaaaaaagaagaagaaagaacctggtcaagaagaagaagggaaactggattaaaaggaagatagaaaagaggggaaaaaaaagagaaaagaaaagaaaagaagagaaggagaagatttacattctttacttgggaggccagctaaaacagctgttgttcattcgttgatttcttttcttttttggtattaattggtgttttttgtattttattttttacattttcttattctgtaaagaaagaaagttcgagttctccttcgatttattta

SEQ ID NO: 5138 - DNA, 832 bp, Glycine max
aagggttgcgtcgggtcgttggatacttcacaatatcatcaatgtaggtggaatccctagccaggtcgacatggctagggatttcacctacattgatgatattgtgaagggtatgcgtcggggcgttggatagttcggctaagagtaccgggtcggtgggaagaagcgtggacacgctcgttgtagaatatctaacctggggaacacgtcgccggttactgttcccactcttgtcagtatattggagcgccatttgaaggtgaaggccaagaggaatattgtggacatgcctggaaacggcgacgttccgtttactcacgcgaatattagttcggcccggagagaactcgggtacaagcccaccaccgatttgcaaaccgggttgaagaagttcgtcaagtggtacctttcctattacggctacaatcacggcaaacctgtaaattaattttattttattttgtttccccccccttttttttttctttttcggaaagggtttttttctttttttagtgtggtaggttttaagtcacagattaaaacagacagggaaaaaaaagaagaaagaacctggtcaagaagattagaagaagaagggaaattggggctaaaaggaaggaagaaaagaaaaagaaaaaaagaaaagagaaaagaaaagaagagaaggagaagaatacaattctttacttaggaggccagctaaaacagctggtgttccttcgttgatttcttttcttttttggtattaattgggtgtttttttgtattttttttaacattttctttttctgtaaagaaagaaagttccgagttcaatctcgatttattt

SEQ ID NO: 5139 - DNA, 523 bp, Glycine max
ggcaggaggtgcaggaaaattaatctccctttcattttctctgcatctgtactctccaaaatgccgtccttagaggaggagctcttcccttcaaccccaggcaagttcaagatcgagcgggcccaccacatgaaccgccagctctaccgctgcttcgcctccaccagcaccatgttcctgtgggccctctttttaatcgccctcaccgcttcatatctcagcttccaaggcttcgttgattccggcagccgctacctctccgcctcctggggcgggatccagtgggagaagcaggtccgcacctccgcccagatccaccgtcaaggcggcatgtccgtcctcgtcaccggcgctgccggcttcgtcggctcccacgtctccctcgccttaaaacgacgcggcgacggcgtcgtcggactcgataactgctgccacttatacgatcgcgtcgctctgataagggcgcaagtcgctactggccacgcatgctatcttcatcgtcgaaggggatatcaacgacgcg

SEQ ID NO: 5140 - DNA, 406 bp, Glycine max
ggaaaattaatctccctttcattttctctgcatctgtactctccaaaatgccgtccttagaggaggagctcttcccttcaaccccaggcaagttcaagatcgagcgggcccaccacatgaaccgccagctctaccgctgcttcgcctccaccagcaccatgttcctgtgggccctctttttaatcgccctcaccgcttcatatctcagcttccaaggcttcgtcggctcccacgtctccctctcgttaaaacgacgcggagacggcgtcgtcggactcgacaacttcaaacgactactacgatccgtctctgaaaaaagcccgcaagtccctcctcgccaagcatgacgtcttcatcgtccatggcgacctcaacgacgccaagctcttgggaaagctcttcgatg

SEQ ID NO: 5141 - DNA, 456 bp, Glycine max
gagtgtgtggcattttcaaagtgcagtcacctgagagacatcatttctctctctaactttctctctcctctccgctccggcgagaaagaaaaatgcagcatttcgtggatttgcaagcgaattcggagttgggtgagtcgaattcatggctttcagcgaaagagcagtccggtgcggcacccaacaccaatttggatcgcgtcctcttcaacgacctcgtcgagattgtccctctcgttcagtcactcatcgatcgtaaagcaagccgttcattcacgcggcgtggttccatgatctacaccaagacacccacaagagaatcattgtccaaaagaacaacagattcaaaaagtaggaatgttgcccaatctattcttgccaaaaagaaaagggaccacggagaaaaagaacaaggaaaaaatggcagcaatgatgctgataactattccatgtttt

SEQ ID NO: 5142 - DNA, 466 bp, Glycine max
taacagcatgccaccacctccgtcatatgaagaagtgaatggtgtctttgcttctcaggcacacaatggatcaacagatagcatgggttacttcttaggagaggttttatttccatattctgctgtatctgaagtggagctaaatctatcagttggtgattacgttgttgttcgaaaggtgacaaacagcggatgggccgagggtgaatgcaaaggcagggcaggttggtttccgtttagttacattgaacggagggagcgggttcttgcgagcaaggtggctgaagtgttttaacttttaagattttcctgttgggttggtttcttaacctgcgaattttgtatgtatgttttgattttgtaaaacaaattgatttgagatatagatgccaacttttccttttgtgatcatcttgtagaatttataaatcatttttttgttatccatttttattttattgcactc

SEQ ID NO: 5143 - DNA, 1264 bp, Glycine max
aaaacaattcttgagaaacaactgcgtcccccacaatccagtacctgaaaaatccactgcctctctctctctctcctaaccccccccagcaaatatatacccttccttcccacaattctatgatcacaatcttctctttctctttctctccttcaaaatcgttgtcaatttcgcctctttctttctcaactcccttagattctctccatcgggtcttcaaaaatgcggatgagctgcaatggatgtcgagttctcagaaaaggttgcagtgaaaattgcagcatcagaccctgtttacaatggatcaaaagcccagaatctcaagccaatgctactgtgtttcttgccaagttctacggccgtgctggtctaatgaacctggttaacgcaggccccgaacatcttcgtccagcgatctttcgctcgttgttgtacgaggcatgcggtcggatagtgaacccgatttacgggtctgtcgggttgttatggtccgggagctggcagctatgtcaagccgccgtggaaaacgtcttgaaaggcgcaccgattacgccgatcacgtccgaagccgcggctagcgggcggtgcccaccgctcaaggcttacgacatacgccacgtgtccaaagacgagaactccgccgccgcgtccaacgaaactcagcaccaacgagtcaagactcggtctcgagtgaagcgacccctcgccaagcccaaatccaccgccaaccaaaacaacaacattaacactaagaatacgggaaccgaattcggatcggatgaaccgggtttggtggcatgcgattggaccgaggaggcgttgaaccggtctggaagtcacgattcgacgctgagccaccagtcggaggcggcgaatgcggtggaaagtgagagcattttgtctgctgagacttcgatcctcttccgagatgaaccggaatccaacccgaagcgcttggaccggaccgatgatgttggtttagagcttacgctagggttcgagccggtatcaggtgcgcagcacgtggttccggtgaagaagagaaggattgatttgaaggattttagtggctcgtcgtgcaagatggagctggggcttgaatgctcggcttgaggactagtggctcggctcagttttgactcatcggctttctgtgtttgatataagagaacagaagtacagaaccgttttagtgttgttgttgttgttgttttttttttgtaatttggttattgttaacccctttgtgaatgcggtgctgtac

SEQ ID NO: 5144 - DNA, 644 bp, Glycine max
ctcagttttgactccatcatcggctttctgtgtttgatacttattacaagagatcagaaccgttttgggttcagctgaaccgagtttggtggcatgcgagtggaccgaagaggtgatgaaccggtctggaagtcacgattcgacgctgagccaccagtcggaggcggcgaatgcggtggagagcgagagcatgctgtcggcggagacgccggagacttcgattctcttccgagaagaaccggaaacgaacccgaagcgtgtgagcgatgatgttggtttagagcttacgcttgggttcgaaccggtttcacgtgcgcggcccgtggttccggtgaagaaaagaaggattgagttgaaaaattttagtggctcggctgagagtggctcgtgcaagatggagctggggcttgaatgttcggcttgaggaactcgtggctcggctcagttttgactccatcatcggctttctgtgtttgatacttattacaagagatcagaaccgttttgttgttttttaattactttttttcttttttggtaatttgggttattgttaacccttcctttatttttttcgtcggttgtgaatgcggtgctgtacaaactcaaacatgaatggtaagtagatgaagaggtgcattccc

SEQ ID NO: 5145 - DNA, 582 bp, Glycine max
tggacgcgtgggcttttttgtaccgaataaacgtttaattgattatgttttgggcattttattttgcagctatttttcgatccttgttatacgaggcatgcggtcgaattgttaacccaatttacgggtcagtgggtttgttatggtccgggagctggcagctctgtcaagccgctgtggaagccgttttgaaaggtgagccgatcacgccgataacatccgaagccgcggctaatgggcgggccccacctctcaaggcctacgacatacgccacgtgtcaaaagaccagaactcggcaaatgaaactccaaagaccaagacccggtcccggttcaagcgaaccagcggcacgcttattaaaccgaaggccagcaaaggaaccgggttcgttccggttgagccggagatggcgaaccggactgcgagtcatgagtcggggctgagccacttgtcggaagccacggcgatggtggagggggaaagcaaagagagcgaaagcgtggtgtcgatggatacctcaaacctaattcacgaagcccggagtgggttgcgaaacgagtgatggaaccggtgagagcggc

SEQ ID NO: 5146 - DNA, 1003 bp, Glycine max
tttcataagaaacccacaacatgttagaaacccagcagcgccggaacccccaacaactatatttatctccctctttctcacacttccacaattccaatcacaatcttctccaattaacctcctctctcactattccatcttcttaattactcatcactcttcttagaaactagtctaacaattaggttttgaagggcacacaaatatattccaaggttgtgtgaaaatgcgaatgagttgtaacggatgtcgtgttttgcgcaaagggtgtagcgaagattgtagcataagaccgtgtttgcaatggatcaagaacccggagtcgcaagctaatgccactgtgtttcttgctaagttctatggccgtgctggcctcatgaacctcatcaacgctggtcctgaaaaccttcgtcctgctatttttcgatccttgttatacgaggcatgcggtcgaattgttaacccaatttacgggtcagtggggttgttatggtccgggagctggcagctatgtcaagccgccgtggaaaacgtcttgaaaggcgcaccgattacgccgatcacgtccgaagccgcggctagcgggcggggcccaccgctcaaggcttacgacatacgccacgtgtccaaagacgagaactccgccgccgcgtccaacgaaactcagcaccaacgagtcaagactcggtctcgagggaagcgacccctcgccaacaacaacgccaagcccaaatccaccaccaacgaaaacaacaacaataagggaaccgaattgggttcagctgaaccgagtttggtggcatgcgagtggaccgaagaggtgatgaaccggtctggaagtcacgattcgacgctgagccaccagtcggaggcggcgaatgcggtggagagcgagagcatgctgtcggcggaaacgccggagacttcgattctctttcgagaagaaccggaaacgaacccgaagcgtgtgagcgatgatgatggtttagagcttacgcttggg

SEQ ID NO: 5147 - DNA, 385 bp, Glycine max
cccatgcgtattttcacgcgtccgcttctttctccaatttcctctctcacatcacgtcacatcacatataaccatcttcttctttgaaaccttaaattgtgctcaaaaatactatatagttaattaaggttgtgtgaaaatgcgaatgagttgtaacggatgtcgtgttctgcgcaaagggtgtagcgaagattgtagtataagaccgtgtttgcaatggatcaagaacccggagtcacaagctaatgcaactgtttttcttgccaagttctatggtcgtgctggcctcatgaacctcatcaacgctggtcctgaaagccttcgtcctgccatttttcgatccttgttatacgaagcatgtggtcgaattgtgaacccaatttat

SEQ ID NO: 5148 - DNA, 365 bp, Glycine max
acgcgtccggaaaaatccactggctatctctctatctactaaccccccccagcaaatatatacccttccttcccacaattctatgatcacaagcttctgtttctcccccgcgtccccgcctccttcaaaatcgtcatcaatttcgcgtctttctttctcaattctcttagattctcaattgggtcttcaaaaatgcggatgagttgcaatggatgtcgaggtccgagaaaaggttgcagtgaaaattgcagcatcagaccctgtttacaatggatcaaaagcccagaatcccaagccaatgctactgtgtttctcgctaagttctatggtcgcgctggtctcatgaacctcgttaacgcaagccc

SEQ ID NO: 5149 - DNA, 645 bp, Glycine max
gtccttcatattacacacatttcaccaacattaattcccccaatctgaaatgtcaacctttgcattcacttctttattccaaatcacagtctcatcttcatcttcatctttgcatgctatcagagcctcagcttctgagtatgttccctcccaacacacccttagaagggaattcttgaagggtgttgctgctttgatgcctcttccacttgttgtgctgatagagccacccccttcagatgctagagaagttgaggttggctccttccttccaccttcaccctctgacccttctttcgttctcttcaaggcctctgccaaggacactccagcccttcgtgcaggaaatgtgcagccatacaagtttatcctccccccgacgtggaaacaggctcgtgtagcaaatatactatctggaaattactgccagcctaaatgtgcagagccctgggtggaggttaagtttgaagatgaaaaacaaggaaaagttcaggtagtggcttcgcccttgatacgccttaccaacaaaccaaatgcaacaattgaggacattgggagcccagaaaaactgattgcttctcttggaccatttgtcactggaaacacttttgatccagaagagctccttgagacttcagttgaaaa

SEQ ID NO: 5150 - DNA, 341 bp, Glycine max
caccttcactgattcatagattatagtcaatagtagttatgaggttatccccatgcatctacaattctaaattgcaccctttttggaaaatggtccataaagttatcggcttctgatgaattttactgttgacctttttatatgttctttgtatatatccaaacttgtttatatttaagagatcaaaccatatctcatgcaattgatcttgtctgctcttgttctgtgcaattgatactctagatttagttctttgcaggaaatgtgcagccatacaagtttatcctccccccgacttggaaacaggctcgtgtagcaaatatattatctggaaattactg

SEQ ID NO: 5151 - DNA, 491 bp, Glycine max
aagaaacagtgactcagattctaacatcaactttaaaccttgtcctttcatcatacacacatttcactaacatcaatcccctcaatctgaaatgacaacctttgcattcacttccttgctcccacttacagtctcatcaccatcttcatcttccaaagtcgcagcttttcatgctatcagagcctcagcagattctgagtatgttgcctcccgacacacccttagaagggaattcttgaagggtgttgctttgatgcctctgccacttgttgtgatgagagaatcaagaccttcacatgctagacaagttgatgttggctccgtccttgtaacctctcgctctgagccttcttgcgtactcttcagagtcactcccaaggacactccagcccttcgagcagttctttgcaggaaatgtgcagccatacaagtttatcatctccccgacttggaaacaggctcgtgtaacatatatattaactggaaattac

SEQ ID NO: 5152 - DNA, 1279 bp, Glycine max
aatgaactggttccaaggaacagcagatgctgtgaggcaattcacttgggtatttgaggatgccaagaatacaaatgttgagaatgtattgatcttggctggagatcatctatatcgaatggattacatggaccttgtgcagagtcacgttgatagaaatgctgatattacagtttcatgtgctgctgtgggtgacagccgtgcatcagattatggattggttaaagtagatgacagaggccgcatcattcaattttcagaaaaacctaagggtgatgatctgaaagcaatgcaagcagatacctctctgcttgggttgccaccccatgatgcattagggtcaccatatattgcatctatgggggtttatgtattcaagacagatgttttactcaagcttctgaaatggagatatcctacatccaatgactttggatctgaaatcattcctgcagctgcgagggaaaacaatgtccaagcgtattttttcattgactattgggaagacattggaacaataaaatcattttacgatgctaacttggctcttactgaagagaatccaatgttcaaattttatgaccccaagacacccatttacacatctccaagattcctaccaccaacaaagattgacaaatgccggattgtggatgcaataatctcccatggatgtttcctgagagaatgcactgtccaacattccattgtgggtcgaacgttcacgtttggattatggtgttgagctccaggacactgtaatgatgggagctgactattaccaaactgaatccgaaattgcttctctgctggcagaggggaaggttcccattgggattggaaggaacacaaaaattaggaactgcataattgacaagaatgcaaagatcgggaaagatgtcatcatcatgaacaaagatggcgttcaagaagcagatagaccagaagatggattttacattcgatcaggaatcacagtcatattagagaaggcaacaatagaagatggcactgtcatataaataaatgggtggaagtacttatttcatggactggtgtagtggctagcagtactagctcgaagaagcattccaaggaactttggggacagaaggatccaattgaaaaatcagcactccccttttgctatatatgcaacacataaggctctcccactgcatgtaaaaataaaatgaataaacagtgtatgaaatcaagatgcataaacgtaaataaaatgaaaatgtgaatgtgattgtgaaaaaaaaaagaaaaaaaa

SEQ ID NO: 5153 - DNA, 463 bp, Glycine max
tctcgagccgattcggctcgagaagaagcagatagaccagaagatggattctacatccgatcaggaatcaccatcataatggagaaggcaaccatagaagatggcactgtcatataaatggatagggctcatttctgggctgattacccaaatgcgctggaagaggaatgctcccatctttggacagaagggtagctgtttgcaatgctgtgttacaatgcagaaagcagcagaacaccccatgtgctatatgatatgtaaaatagtagctcccccccaccaatacatgtaaaaatagaatgaataaaaccacgaaaatcaagatgcatgagagtatataaattgaagggctgagcccgaggtagctagctacaaagttgcttgaaccccttgtaaaagacactttctaaattatttgtatcgctaaggtatcagtgtatggctaaatggattcgttagaatc

SEQ ID NO: 5154 - DNA, 479 bp, Glycine max
  unsure (1)..(479): unsure at all n locations
cctaagggtgatgatctgaaagcaatgcaagcagatacctctcttcttgggttgtcatcccaagatgcattagagtcaccatatattgcatctatgggggtttatgtattcaagacagatgttttactcaatcttctgaaatggagatatcctacctcaaatgacttcggatctgaaatcatccctgcagcttcatattttttttggagactattgggaagacattggaacaataaaatcattttacgatgctaacttggctcttactgaagagaatccaatgttcaaattttatgaccccaagacacccatttacacatctccaagattcctaccaccaacaaagattgacaaatgccggattgtggatgcaataatctcccatggatgtttcctgagagaatgcactgtccaacattccaaatttttgnntgggcgnaanaccgnntntcccaacnngtttggattatggtgttgaa

SEQ ID NO: 5155 - DNA, 336 bp, Glycine max
ctcttctctatcgctttctcttcttccttcttacttaattctatcaccaacatagccacagacacagacatacgcactacttatttctcttcttaggccttattatcatcatataccacatcatcaaagcacttgccatcatagagtaccatgttagccaataacttatctccatcgtcagttcccacttctgagccttttccctgcactgaaaatggcactgccaccattaagaggaagagaaggcccgcaggaacaccagatccggatgcagaagtggtgtccctctcgccgaaaacgttgctggaatcggatcgttatgtgtgtgagatctgc

SEQ ID NO: 5156 - DNA, 497 bp, Glycine max
  unsure (1)..(497): unsure at all n locations
gactcagtgtccaattccgacaaattgaggctctactcgacagaacaactacccatgatttcgattcgaccttcgaattcctcttccgcttcgactctgcgttcctcgttcgctgtccatttcgccgcaatcttggttcttgcgttttctttttctctctcctgaatctgggtgctttcaatttcggtgcaaactggctatggaccacgaaccctacgatagtagcggaactgatgatgatcttccaccaacacatccaaatagaatccccagaggggcacgtcttgcaggaaatggaagattgccagcaggttcaattccatacccaaggatgcatggtgaaattgatatggaaactcaaattcaccaacttgagaaggaagcatacagttcagttctacgggcctttaaggctcaagctgatgtcatntacttgggagaaggaaagttgactacagaacttagaaaagagctaagattatcaaatgaggaactca

SEQ ID NO: 5157 - DNA, 386 bp, Glycine max
tttgagagtaaaaaggactacaagtctgctctaaaggcatttgaagaagtcctactatttgatcctaacaaccaggttgcccggcctaggagagattctttgaagggacttgttgatgcaaccaaaggagttactgtcatcaagtcaacagagaagaagtgagtgtcattgtatcaactcactatgaatatggcattgttaaatacatagttttcaataacttggttgtgttggaaggaattttggctctattggtgtagttactgcttactagctgaggcatactagtgctgcgaaatgtagttgaaattgaaacttgaaagtgctcgattctccaatgggttaccaaagctttgctctggtgctgatggtgtattcacttgtga

SEQ ID NO: 5158 - DNA, 427 bp, Glycine max
gagtattctgctcttgtgcactatatacaggttggtcgagatgactttaagctgaatgttaaacttcagctttttgcccttgttgcaaagcaaccaacctttcatcagctgcgatcagttgagcagctggggtacattactgtgctcatgcagaggaatgattgtggtatacatggactacagtttattatccaatccacagtaaagtctcctggaaacattgagcaaagggtcgaggcatttctccaaatgtttgagaccaaactcctcgagatgacagttgatgaattcaagagtaatgtaaatgctttgatagatgtgaagctagagaaacacaaaaatttgtgggaagaatcatcattcttctggcaagagattaactatggtactttgaggtttgataggaaagactatgaggttgaagcat

SEQ ID NO: 5159 - DNA, 2698 bp, Glycine max
  unsure (1)..(2698): unsure at all n locations
accggnctcggaattacccgggctcgaccccacgcccgtccgtacccggctgtcgagaagaccgacagtaagggggtatacganggtgggatgagcctattcaagatcgcgcgaggattcggaaggagttgagatgacttcaggagtttatggggataatgggtctctactttatcaccatggatatggatatgcgccttatggcccctattcgccagcagggtctccagttccaaccatggggaatgatggtcagttgtatgggcctcaacactatcagtaccctccatatttccaaccgttaacaccaaccagtgcaccattcacacctactcctgctgtccttcctcagggtgaggtttccacctctgttgctgctgatcaaaagcctctccctgtcgatgcagccaatggaaattctaatggtgttgcgaatggtgggaatgcaaaaggtaataatgctgctgctcctattaaacaggccaatcagaattcatcttttagttccaaagcatcgaatgaaagggttgctatgccaggtcggggtccaacttcaggttatcaggatccaagatttggttttgatggagtacgctcacctatcccctggctagatgccccactattttcagatgggcagccaaggcctgtaagtagcacaaccatcacttcttcgatatcaggtggcaacaacactgcctcaaggaacccaactttccgccctaattctcagtttatgggcttgcaccacccaagaccaatgcctgccatgggagccacccatagcttcataaataggatgtacccaagcaaactatatggtcaatatgggaacactgtcagatctggaatgggttatggtacacatgggtatgattctcgcactaatggacgggcttggttagctgttgacagtaaatacaaaactaggggaagaagtggtggctactttggctatggcaatgagaacgcagatggcttgaatgaactgaacagagggcctagggccaagggtggcaaaaaccaaaaaggttttgcaccaactattttggcagtcaaagggcagaacttgcctgcaagtttaggcaccgatgaagagaaagacaagactagtaccgttccggaccgtgatcagtataacaaagctgattttccagaagaatatactgatgctaaattttttgtcatcaagtcttacagtgaggatgatatccataagagtattaagtataacgtgtgggccagtacccaaaatggcaacaagaagcttgatgctgcatatcatgaggcacagcagaaacctggtggctgccctgtttttctctttttctcagttaataccagtgggcaatttgtggggcttgctgagatgattggtcctgttgattttaacaagagtgttgagtattggcagcaagacaagtggaatggctgctttcctcttaagtggcacattgttaaggatgttcctaacaatttgttgaggcacattaccttggacaacaatgagaacaaacctgtcactaacagtagggatacacaagaggttatgttggagcctgggctgaaattaattaaaattttcaaggaatataccagcaagacatgcattttggatgattttggcttctatgaggctcgtcagaaaactattttggagaagaaagcaaagcaacaattcccaaagcaggtatgggaagggaaacctgctgatgagaagattgagataaatggggaagtcaatactcaaaaatctgaagttagctcggaagtgctcaaggagtcccttgctgagaaggatagtgatgaccacaaagttcccgagaatggatgtgctacaaaaactggagatgccccaaagggtgctaaaccagttgttcctgagagcaagattgtagccaatggggttgtttctaatggtgtctaagctctactgtgtttgaaggaggcggtccaatacacctcagtggcatatattggtgttcttagaagtatatttatcagaaatcttggtaccggccggattttatctttcttgcctcttctcttgcagtctgaagatagagattggttgcctagtgaagataaagatctgtatattgagattggctgggcggagttacttcatagaatgctagcaccaatcccttctcattgggttttgtttacagtggttagctcctaacaggctttactcctctagggtttttggggttttttagggttttctgcctaagatgcttatatcttttggtttttgttcgggtttatccttctctaagccttttttttttctctctttttaattttactttgttggtcgtttcctgtcttgtaaatttagatctactttgttgcagagcagctttactttgttactttcaacaggggtagaagcaaggtgggaaatactgaaaaatatagttggattttaagtttgagtttttcgtcttaatttagtcttctgtttattttctatctgttgattgacttgggcatagtggaaaaagaattatattttgtggacaatctgttatgtaatagggtgtttttctggctatgaaggtcacaatattttttagttaaattagtccttcctgttcttattagatatttttcaccgttaattttagctagtatgatctagttccttagttaacttaacagcatacttcaattaaatcaaataacatttgtt

SEQ ID NO: 5160 - DNA, 1087 bp, Glycine max
ggcttttggaggaacaaaaccctctctccccaaaaacccaaacccttggcggctgcgagacccgttgtgttctctcttctctctctcttctttttttttttctctttccctctcttcttcgccgctctttttagggttttctcaactcttcgatttggggcttaaaccctcgctccgattcagattcggatttagggcttccctttctctattccgcctccaaagaaaaacagatctcgtggttggttattcatcatggccaccgttgctaatcccgcggatcaagcaactgatttgctacagaagctatcgttagaaactcagcccaagcccttggagattcctgagccaaccaagaaggccactgggaatcagtatggatcagttgattcaggaaatgctgcgaatggccagatcccatcgtatgatcggtctgtaaccccagtgttgcaggattttattgatcctactatgtgttacctcccaaatggttacccatctactgcctattattacggtggttatgatggaactggtaacgagtgggatgagtattcaagatatgtgaattcggaaggagttgagatgacttcaggagtttatggggataatgggtctctactttatcaccatggatatggatatgcgccttatggcccctattcgccagcagggtctccagttccaaccatggggaatgatggtcagttgtatgggcctcaacactatcagtatcctccatatttccaaccgttaacaccaaccagtgcgccattcacacctactcctgctgtcctacctcagggtgaggtttccacctctgtagctgctgatcaaaagcctctccctgtcgatgcagccaatggaaattctaatggtgttgcgaatggtgggaatgcaaaaggtcggggtccaacttcaggttatcaggatccaagatttggttttgatggagtacgctcacctatcccctggctagatgccccactattttcagatgggcagccaaggcctgtaagtagcacaaccatcacttcttcgatatcaggtggcaacaacactgcctcaaggaacccaactttccgcc

SEQ ID NO: 5161 - DNA, 578 bp, Glycine max
  unsure (1)..(578): unsure at all n locations
gactgcttttggaggaacaattccctctctccccaataacccaaacccttggcggctgcgagacccgttgtgttctctcttctctctctcttctttttttttctctttccctctcttcttcgcgctccttttagggttttctcaactcttcgatttggggcttaaaccctctccgattcagattcggatttagggcttccctttctctattccgcctccaaagaaaaacagatctcgtggttggttcgtcatggccaccgttgctaatcccgcggatcgtatccttctctgctatgcaatttctctctttttgtttgtattttcttgatctgttgtattgaatcgtttattggatccggtggatttttgtttctgaaacttgatttttgggttcgggggagggtgatcttttagggtttgttgtgtggcttgctgattttttatgttcgggcgttggagtatttctgttcttgtgttcttgttaatctgcttgagttttttacggtgttgactttatggtagattgactcgtttggggttgcggngtgttggttcttttaggttttttgaatttttat

SEQ ID NO: 5162 - DNA, 1547 bp, Glycine max
ttttagaactttaatctcaaaatgtattcaatattcttttgaaaatataattcataaacgattttgaagcaccacctcgccgaggccgccatgggaaatgccttcctcctccagggcggagactgtgccgagagcttcaaggagttcaatgccaacaacatccgtgacaccttccgcatcatcctccagatgagcgtcgtcatgatgttcggcggccaaatgcccgtcatcaaggtggggagaatggcggggcaatttgcaaagcctcgttcggattcgtttgaggagaagaatggcgtgaagcttccgagttacagaggggataacattaacggagactctttcgacgagaagtcgaggattccggatccgcagaggatgattagggcttattgccaagccgcggccacgctgaatcttctcagagcttttgccaccggtggttatgctgctatgcagagggttactcagtggaatttggacttcacggatcacagcgaacagggagataggtaccgagagcttgctaaccgagttgatgaggcccttggattcatggctgctgctgggctcacagtggaccatcccataatgagaacaactgaattctggacatctcatgagtgcttattgttgccttatgaacaatccctcaccaggttggattcaacttctggtctctactatgactgttcagcccatatgctctgggttggggaacgaaccaggcagcttgatggtgcccatgtcgagtttctaagaggagttgctaatcccttgggaattaaggtaagtgacaagatggatccaaatgagcttgttagactcattgagatcttgaatccccaaaacaaaccagggagaataactgtgattacgaggatgggagctgaaaatatgagggtgaagcttccacatctcatcagggcagtgcgcagagcagggcaaattgtcacctgggtcagtgatcctatgcatggaaacaccattaaggctccatgtggtcttaaaactcgccccttcgatttcatcagggctgaagtgagagcattcttcgacgtacacgagcaagaaggaagccacccaggaggggttcatctagagatgacgggtcagaatgtgaccgagtgcattggtgggtcaaggacggtcacatttgatgacttgagctcacgttaccacacacactgtgacccaaggctcaatgcttcacaatctcttgagcttgctttcatcatcgccgagcgtttgagaaagagcaggatcagatcgcagcaacctcttgcccctctaggagtgtaaaagtgccttcaaaaccaacaagagaaagatatttttgttcttttttttttttgtcctacatatttattattaatcgatggttgtcactttgattttgtgttgtgtttgtatgtgtatactacctagtaatgcgtttggactggcaaggacaagagtacttttattgataataaagaaacgaaaacgtttcaaaaacgttggcaaaacaaaaaacaccttaggcagaaaaagacactctaaagaaa

SEQ ID NO: 5163 - DNA, 603 bp, Glycine max
cgttttcttataaaagccttaccaaagacagctctcacaatcccttcgagtgtgactccaaacaaagcccacacaccaactgcatttgcattaccattcacaatggcaatctcctccacttccaactccctcattcccaccaaatctctaatcccccaatcccaccccctcattcccaacaccaggcccgccctccggcccaagcccggcccatccccttccatcctcgccgttcacgccgccgagcccgccaaaaaccccgtcgtcaccgacaagcccaagccccaagcccaacaatctccatccccggcctcggcccgggcaacgaaatgggccgtggacagctggaagtccaagaaggccctgcagctgcccgaataccccaaccaggaggatctcgaggccgtcctccgcaccctcgacgctttccctcccatcgtcttcgccggcgaggcccggacactggaggagcatctcgccgaggccgccatgggaaatgccttcctcctccagggcggagactgtgctgagagcttcaaggagttcaatgccaacaacatccgtgacaccttccgcatcatcctccagatgagcgtcgtcatg

SEQ ID NO: 5164 - DNA, 2119 bp, Glycine max
cggctcgagttttgcactgatcacttcacacagtaacttggacaccaactcactctctcaccaacaaaacaaaatccaatggcgccgtctttcgcaatcaacggtggtttccccggcgccagagtcactcctccttccgtcaccggccgcttcgccgccgtctacagcgaggtccaaaacatccgcatcgaccacgaactccctctcccctccgttctcaaaaaccctttcatcatcgtcgacggtccccaaagctccgccgccggcaaccctgaggagatcgcgaagctgttcccgaaactgttcgggcaaccgtcggcggctttggtgccgagtgattcccacgcgccgcatgcaaatcggaagctgaagattggcgtggttctgtccggtggccaggctcccggcggtcacaatgttatttctggaatcttcgattacctgcaagaccttgcagaaggaagcacattgtatggtttcaggggtggtccagctggcatcatgaagtgcaaatacgttgaacttacctcagactatatttatccttacagaaatcagggtggctttgacatgatttgcagtgggagggacaagattgaaactccagagcagtttaagcaagcggaagaaacagctaagaagctagacttggatgggctcgttgttattggtggtgatgactcaaacaccaatgcatgcctccttgctgagaacttcaggagcaaaaatttaaaaacaagtgtaattggatgccctaaaaccattgatggtgatttaaaatgcaaagaagttcccacaagttttgggtttgatactgcttgcaagatatattctgaaatgattggaaatgttatgatagatgcccgatcaactggaaaatattaccattttgtgcggcttatggggcgtgcagcttcacacattacgctggaatgtgccttacaaactcatccaaacattactattattggagaagaggttgctgcaaagaagctgacattgaaaaatgtcactgactatatcgtagatgttgtttgtaaaagagctgaaattaattacaactatggggtcattcttatccctgaaggtctaattgatttcattcctgaggtccagcatcttattgcagaactaaatgaaattcttgcccatgatactgtggatgagggtgggttatggaagaagaaactcactgatcaatcattgaagctttttgactttttacctcaagcaattcaagaacaattgatgcttgaaagagatccacatggaaatgttcaggttgccaagatagaaacagagaaaatgcttattcaaatggttgaaactgagttggagaagagaaagcaagaaggcaaatacaaaggcgaatttaaagggcaatcccactttttcggttatgaagggagatgtggcttgcctactaattttgatgctacttattgctatgctctgggttatggtgctggagccctccttcatagtgggaagactggattaatatcatcagttggcaatttatgtgctccggtagaagaatggactgttggtggaactgcactcacctcactgatggatgtggagaggaggcatggtaaattcaagcctgtgatcaagaaggcaatggtggagcttgaaggggcacccttcaaaaagtttgcctccttgcgggatgaatgggccctgaagaattgctacatcagtccaggtccaattcaattctctggcccaggatctgaagtaattaatcacactctactcttggagcttgaagcactagcttaggcataatatgaggtctttgttttgacggtggcaattcatattttctttttgggatatttcaataatatatttgatctgtgactagctagtgagtttacttttgaaattaaccggctaatgattcttgggttggttgatgagtataaattggtcaacacaaaagttgcattcaacatcggcaatttattttcatgacaagcattccgactttgcctattatacaagtaactaaaagctttatcccaatgaggtcagttacattggatagctacgtagattgcattaatgcaattgagtttgaataaagaccaaaatttcaagaatactatttact

SEQ ID NO: 5165 - DNA, 1615 bp, Glycine max
aggtgaacgcttggcacaattcattaaaaaagaaatttctgaagtgaataaaaatggccgtatctaagaaaattccagatacatagtttgtcatcactctaaagcgtaaaaacagcctgtttccaaccaagttaccatgtctctaggtatgcaggcatagaactaacaatttctaagccaagtacaagggactgctctttccagcaatcattcaaaaagcaaatgaagcatataaagttagctacattcattgcccatgtcacttggaagtctcttcatcttttgtcgccttaggatgtattcccttcaacttaagaaattgttacaaagaacagaaaccaaattaaagaaaaatcacgatccaattagatcaggtgtttcagcctcaatggacagcaatgcagtgtgaacttttccagtccaactgtccagtcgatcccgtaaggatttgatctgttgaatacccagaactcttggctgcacccaggaaacatgcactgtgccctcaacttgatcaattataccctcaattagatgaacagataggcttttcataaggagatgctccacattctctatagaaagttttgtgcgctctgcaattacactcaagggaatagttcgatcttccgaaggccgactgaatataatctccatcagacacagaatgttgatcttttccaacaacttttgctcattttgaactagtgctggttgggctcttaaagcagcattatgcacccgacataattcttgatatcgtaataaatcaccagcattgaatgcctgcagaatgtagtaaagccattccacctttgtccccagaaggctcttaattataggatgggcaagtagctctccaaagttgtagatgttatccccaagaagggcagagagggacaaatcaaatgccagatccagcttgaatgaatctgagagagattccactgatgtgtatgccaaatagagaagggcacttttgtagaactcagcaaattcttggcatgtcttatgaaactgagatgatacccagtaatagctagcatatacagatggatcaatatctgtcatgctgtcgagtgtactcttcccatcttctagaagtttcttgcattccttttgatcaccttgctcaagcttgaatattgctatttgcatcttaatgtaaagaataggttcttctatgcgctgctctctagtgtcttgaagtttctgaatgacccctccaagataaccaacagcagcttctttttcagaatactgccgagaaactataacagcaaaatgtgcaagcttgagaaggttgattttcgtctcaaagtctgtgatgaaattgtgatataattgtattaaagcatcaccagcctggaagacggcgagagccacaaactgctcgagcttgagagtgagctggtgccagagcttcttctggtacagatccgccagcgaattgtaccaatcggagagctcagggtgcgaattgcgcagcgattccaagtattgcagagcagccatagcagagcggttcttgattcacaccaacacgcaataccactggtgtaccttctttcttctctttttcataccctaactccttttttcttgtttctttttt

SEQ ID NO: 5166 - DNA, 497 bp, Glycine max
cttcactcacagttacttacgcgtccgcccacgcgtccgccagtcaccaacaaaacaaaatccaatggcgccgtctgtcgcaatcaacggcgctttccccagcgccagagtcactcctccttccgtcaccggccgattcgccgccgtctacagcgaggtccaaaacagccgcatcgaccacgccctccctctcccctccgttctcaaaaaccctttcatcatcgtcgacggtccccaaagctccgccgccggcaaccctggtctcgctccctcccattcactacttcaattttccgtcgacaattagttctacgtaattttgatattggtatgaatattattatgtgccaatagagctgtgcactcttaggtccattatcctttatttgtcttttaacaataatagataaatatgtataatagtttagggacattctagaatgtgattgttataattctatcagaggaagatgtgagtatctccctatatatactat

SEQ ID NO: 5167 - DNA, 609 bp, Glycine max
ctccaaacacatttctagattcacgcttctaccactacactacttcccttcactctctctctctctctctgcaaccaaatggcaccttctaccaccgtacctaacggtaccctcccctccggttccgtcaccggacgcttagcctctgtctacagtgaggtccaaaagacgcgcgtggaccacgcgctccctctcccctctgtcctcaagcatcccttcaccattctccacggtcctccaagctccgccgccggaaatccagacgagatcgcgaagctgtttccgcatttgttcggacaaccttccgctgcattggcgcgtagcgatgcggcgcagacgcagaagaagctgaagattggcgtggttttgtccggtggccaggctcccggaggccacaatgtcatttctggaatcttcgattacctgcaagagcgcgcaccaggaagcacgttgtatggtttcaaaggtggacctgcgggcattatgaagtgcaaatacgttgagctcacctctgaatatatttatccttatagaaatcagggtggctttgacatgatttgcagtgggagggacaagattgaaactccagagcagtttaagcaagcggaa

SEQ ID NO: 5168 - DNA, 615 bp, Glycine max
gagacatggtaaattcaaacctgtgatcaagaaggcaatggtggagcttgaaggggcacccttcaaaaagtttgcctccttgagggatgagtgggccctaaaaaatcgctacattagtccaggtccaattcaattcactggcccaggatctgatgcaattaatcacactttactcttggagcttggtgcacaagcttaagacattctgaggcctttttgatggtggcaattcatgttttttgggaactactacaaatataatagaccggagattagtcaagtgattgtgtttttcactttggaactttgctagagaatagtttatgctttatcaacatcatcgacttatatttatgttttgggaatatgtcgttccatgatcttttagttcaatgtttaatcgtctcgtcatttaggtacggtaatagtgatgtaaataggaggttgagacatgagtacctgagtgagaaaattttaaggtggattgtgtttgcataagatatggaaaaccaaatggtcctgtttcagtgctttgtatattggaactctgcgaggttgaccacggtaaccacagtaacgagtaatgtttctcgcaatttactcgttcttttgtcc

SEQ ID NO: 5169 - DNA, 595 bp, Glycine max
ttggagtttggtgcacaagcttaagacatactaaggcctttttgatggtggcaattcatttttttcgggaactactgcaaatataatagaccggagattagtcaagtggttgtgtttttccctagagaatagtttatgctttagtcgatgtgtatttattggtaaactcgtgttgtgtcaacatcatcgacttatgtttatgttttgggaatattttgctgcatgatcgtctagttcgatgttccctagtctcatcatttaggtcccgtagtagtgatgcaaatttaggaggtggagacttgagtacccgagtgacaaattttaaggtggattgcgttttgcataagataaggccccccaacggtcctgcttctgtgctttgtgtattggaactctgcgagggtgaccacagtaacgagtaatatttctcgcaatttactcttgttttatttttctccatagctaactactagatttttgtaggagtttttgaaaagtttaatagtttgttttctagaaataataatttacatacatttgttcaatgtagaactctggctgttatggtttatacatttacttcggctttaattca

SEQ ID NO: 5170 - DNA, 571 bp, Glycine max
  unsure (1)..(571): unsure at all n locations
tcaagctttaatattgctatntgcatcttaatgtaaagaataggttcttctatgcgctgctctctagtatcttgaagtttctgaataacccttccaagataaccaaccgcagcttctttctcagcatactgccgagaaactataacagcgaaatgcgcaagcttgagaaggttgattttggtctcaaagtctgtgatgaaattgtgatataattgtattaatgcatcaccggcctggaagacggcgagagccacgaactgctcaagcttgagggtaagctggtgccagagcttgttctggtatagatccgccagcgaattgtaccaatcggagagctcaggatgcgcgttgcgcagcgattccaagtattgcagagcagccatggcattaagaaaaaaaaactcgatagcactgcgtcccctcttctatttttttttataccctagtttctttttttctttattcttttgaataaccttcctttatttattatagtttatgggttttgtttgtttgctttcctctcgcagaaacccattgagctagagtctggtttgcttgggcttaactt

SEQ ID NO: 5171 - DNA, 377 bp, Glycine max
ggaaaaaaaaagacttcttaagtgaataaaatggccgtatctaagaaaattccagataaatagtttgtatcactctaaagcgtaaaaacagcctgttcccaaccgagttaccatgtctctaggtatgcaaaagcatagagacaaccattcctaagccaaggggctgctctttccagtcatcattcaaaaagcaaatgaagcatgtaaataaaaatgaagccaagacaagttggctacattgcccatgtcacttggaatttctcttcatcttttgaagccttagggtgtgttccctttgacttgagaaattgttacatagggcagaaaaaaaattaaagaaagatcacgatccaattagatcaggtgtttctgcctca

SEQ ID NO: 5172 - DNA, 279 bp, Glycine max
ctcatccacagtatcatgggcaagagggtgggttatggaagaagaaactcaatgattgatcagtgagtttcttcttccataacccaccctcatccacagtatcatgggtgggttatggaagaagaaactcactgatcaatcattgaagctttttgactttttacctcaattattcaagaacaattgatgcttgaaagagatccacatggaaatgttcaggttgccaagatagaaacagagaaaatccttattcaaatggttgaaactgagttggagaag

SEQ ID NO: 5173 - DNA, 310 bp, Glycine max
cccttgtttccgcacatttctagattcacgcttccaccgtttcacacactcttctttggaggcaaagcaaatggcacctactaccaccgtacctattggtaccctcccctccggttccgtcaccggacgcttagcctccgtctacagtgaggtccaaaagacgcgcgtggaccacgcgctccctctcccctccgtcctcaagcatcccttcaccattctcgacggtcctccaagctccgccgccggaaatccagacgagatcgcgaagctgtttccgcatttgttcggacaaccttccgcggcattggcg

SEQ ID NO: 5174 - DNA, 1424 bp, Glycine max
acttcctcagccacttccccaatactcttgcgggagtggctccagacatccttctggacttgacctggtttctggattcatgaacgggatgtatccaagcaacaggatgtacagccaatatggaaacacatttaggcctgattctcgttttggatctgctgggtatggatctagaatgggctctttcgatagcaaatttaatggcacagggtatggctgcggtttaaaaaaaagcatggatggtttcagcgagctaaataagggacccagagctgccaagagttctgataataaaaatatcaaaagtcttggacctgtcacattattactcaaaggacagaaccttccagtgaagagtgataacaaagaagttcctccagttcctgacaaggaacagtacaatgggaaagattttgctgagaattattctgatgcaaagttttttgtcatcaaatcctatagtgaggatgatattcataaaagcataaaatatagcgcatgggcaagcacccctaacggcaataaaaagctggatgcagcatatcaggaagccaaggagaagcccggtggctgtcccatatttttgttattttcggtcaacactagtgggcagtttgttggttagcagagatgttgggtcctgttgattttggtaaaactgtagattattggcagcaggacaggtggactggttgtttttctgtgaagtggcacgtcataaaggatattccaaatagcgtgttgaggcacataacgcttgaaaacaatgaaaacaaacctgtaacaaatagcagggatactcaggaggttaagtttgagaagggtgttcaaattgccaaaattttcaaggagcattcaagccaaacatgcatcttggatgattttgggttctatgaggctcgtgaaaaggcgactcaggagaaaaagtccaaggaacagcagttaccaaaacaggtcagcaagcccagtgatttcacatttgggacagttacatttccaaagtctcttgatgcaaccttgatgaatgaagctgctactgcaaatgcagcagatggaagaatgaatgcagaagggctgttagaagggaatggatcgactacagcacttgaagatgcttctaagagctgttaaagcaatgatagtcattggctgatttttgtttttgtttgtttattccctattgctttagtcatgtagtgagtggtggtgtttttcagtttcaaattatctgttatgtgatcttggtcttggtttggagtggagcatctaattttagcgtttttctttggtctcgttcaataaaatgtgattgtttttagtagtcataagtttcatggtgggccaaaggaaagttttaatcaaattatattgtgttattgtagtaattgaggtctttttaagtgttttttaaaaactaaaatgtt

SEQ ID NO: 5175 - DNA, 410 bp, Glycine max
  unsure (1)..(410): unsure at all n locations
ctgggaggctacaaaattacacacaacggatagagagagtgcagcggagcagaaagaagcaaagggggaagaaaggtggtgtgtgttgtcgcaatggacatcactgccttcaaatccctcaacattccatttccaacctttccatcaaaattttctccttttcgtccattcagtttctttcacttcaaaccttttcgcactccttcctcacctcgcttcatctcccattgctctctcaatgggtcagcagagataacaagcaaggaaggtactttgcctcgtggcgttggagaggcagtgaatgaagcgtcaagttccaagattcttcaggttgtgctcgtgtcncctcagattccaggaaacactgggtgcattgctagaacttgcgcagcatcagctgttggattaca

SEQ ID NO: 5176 - DNA, 740 bp, Glycine max
gaagacgacagaagggggtggtgtagactgtcgagcagagaataccagttgctccagtagccggcactaaacaacatggcggacaaggcagtcaccatccgaaccaggaagtttatgacaaacaggcttctctccagaaagcagttcgtcgttgatgtccttcatccagggagggctaatgtttccaaggctgaactgaaggagaagctgggaagaatgtatgacgtgaaagacaccaacactgtatttgtcttcaagttccgaactcattttggtggtggcaagtccactgggtttggtttgatctatgattcagttgagaatgccaagaagtacgagcctaagtacaggcttatcaggaatggacttgatactaaagtagagaaatcaaggaagcaaatgaaggagagaaagaatagagctaagaagattcgtggagttaagaagacaaaggcttccgatgctgccaaggctggaaaaaagaaatgagttttcaaacatcctgtcttgattttaaggttcttttgctattggtattttctaatggttattttactttctattagcttcctagaatgagatattttgctgtaagtgttacattaattgatgttcagtagttatataacttgagatctagtactggcacgatcaattttgagaattcagttgaatgctttgttttcaaatatttactattgtgataatgaattccagtgttgcttgatttggtatggccc

SEQ ID NO: 5177 - DNA, 450 bp, Glycine max
aagtccactgggtttggttggatctatgattcagttaagaatgctaagaagtatgagcctaaatacaggcttatcaggaatggacttgatcccaaagtagagaaatcaaggaagcaaatgaaggagagaaagaatagagctaagaagattcgtggagttaagaagaccaaggcatctgatgctgcaaaggcgggaaaaaagaaatgagttttcaaacatcctgtcctgattttaaggttcttttgctatcggtattttctaatagcttcctagaatgagatattttgctgtaagtgttacgttaattgatgttcagttataactagagattgggtactggcatgatcaattttgacaattcagttgaacactttgttttcaaatatttagtattttgataatgaattctggtgtttcttgatttgggatgaaccagcagattattgtcac

SEQ ID NO: 5178 - DNA, 928 bp, Glycine max
  unsure (1)..(928): unsure at all n locations
nggtactttatctaatgcggatgagatgctagttataaccttcacctgtccgatgttatgtaccttttgtcagtagtattttcaactaatttagagtactgatttttggatattattttaaacagtttcttaatgacacttttggttactgacctttctttattctttatgccaaaatggtttttaagcatatagtggtgctgtctgtctctcctggatgagtggatgagaagaatgttattattattaggctgagtcatttagctagcctaagacttgattgattgttggaagatcttctgatggactcagtacacatttccatatttatcacttaagccttggtatatagtaaaaaaataacaacaacaataaaaatgataaatgtgttggtggtggaccccatcattaattaagcaagcttgaaatgtcatcatttgaatggaacggagcataatcctacctggtgcttagaacttgccataatttctgttttctcatatggagtatgtttgcgacttgtattttttttcccatttgtaatgctgttgagcctgtttgctgttaaatgcagtgctgagaaagtggaagatgaacctgatcaaaaaaaggaagtggaagatgaacacgttgaaaaaaattgaagagctattaatttcttttggtccctgcagattgatcgataagagagttggaaacgaacactgaacctcgaaaacttattttttgtttcccattgaagttttgtccgtctttatcttttcatgttttattgtgagagattaatactgaaagagttaagagacattttttgtagcagtgttggtagcttagtaagtcgttattatgaatatgtttgttgctaaatgttaccgtaatttcctccccccacatcattcataatctatataagtaagcttggtgatgg

SEQ ID NO: 5179 - DNA, 813 bp, Glycine max
ggctgaagaaaaacgcaagctgcttgtttgatagggaagagaagaaagagagaaaacaaagggcggtggtgagtgcttctgcttcatcatcatcagagaatggcggctactgtgtcttctgcttggtcaaagcccggcgcgtgggccctagattccgaggaacacgaagccgagctccttcaacagaacaacaacaaccccaacgacaagcctaaaggtgttaatccgttcggagaggcgaggccgagggagcaggttttggcggagaaagggcaggattggaagaagattgatgagcagcttgagagcgtcaagattaaggaggcaagtggtggtgatgggtttggaaagaggggttttggctcttccaacggtggtggaggacgtgctactttgcctgaaagtcgcactgagaggagttggaggaagccccaatttgatgatgatcgtcctaaaagtgctgagaaagtggaagatgaacctgatcaaaaaaaggaagtggaagatgaacacgttgaggaaaattgaagagctgtcaatttacttttggtccctgcagattgatcgataagagagttggaaacgaacactgaacctcgaaaacttattttttgtttcccattgaagttttgtccgtctttatctttttcatgttttattgtgagtgattaatactgaaacagttgagagacatttttggtagcagtgttggtagcttagttagtcgtttttatgaacatgtttgttgctaaatgttgccgtaatccccccacccccaccactcattcaaatctatatagtattttcgtgatg

SEQ ID NO: 5180 - DNA, 1362 bp, Glycine max
ttttcattaaaaggaaataatttttattaattaacaaaacaagaggtaattggcaccgttaagaaacattatggtctgatgtcatatatataagtgtccaccgcgtggctgaggtttgctgaagaaaaacgcaagctgcttgtttgatagggaagagaagaaagagagaaaacaaagggcggtggtgagtgcttctgcttcatcatcatcagagaatggcggctactgtgtcttctgcttggtcaaagcccggcgcgtgggccctagattccgaggaacacgaagccgagctccttcaacagaacaacaacaaccccaacgacaagccactcgccgacttcccctcccttgccgccgccgccgccaagcccaagaagaagaaggcccagacctactccctcgccgaattcaccgccaaacccgacacctcctttgccgaccaagatcccgtcgtcctccccaccggcccccgccagcgcaccgccgaggagctcgaccgcacccgcctcggtggcggcttccgcaactacggcgaccgccccaacaggaataactcctccggcggcgacgagtcttccaattcccgctggggttcatctagggtttctgacgagcccaggagaaacggttttggggctagggattccaatcgcgagcttcccccttcgcgcgctgacgaaactgataattgcgccgccgcgaagaaaccctccggggggtttgaaaggagggagagggacaaaggagggtttttcgattcgcagtcgcgcgctgatgaatctgacagctgggtttcgaataagagtttcgtgccttctgaagggcggagattcggttccaacggcggcgggttcgagcgagagaggagggttgttgggttcggctccagcggcggcgcggattccgacaattggaacactaagaagaagagcgagtccaacattggtagcagcgagagtgttggtgctggtgggaggccgaagcttgtgttgcaacctcggacactgtccgtgagcgatgaaggggttgatggcaataatgcggggaagcctaaaggtgttaatccgttcggagaggcgaggccgagggagcaggttttggcggagaaagggcaggattggaagaagattgatgagcagcttgagagcgtcaagattaaggaggcaagtggtggtgatgggtttggaaacaggggttttggctcttccaacggtggtggaggacgtgctactttgcctgaaagtcgcactgagaggagttggaggaagccccaatttgatgatgatcgtcctaaaaggttcgcccttgataccaacagcaacccaacacggtagtagtagtggtagttccctctatttgctt

SEQ ID NO: 5181 - DNA, 263 bp, Glycine max
actcgatgccgattcggctcgagcggggttcgagcgagagaggagcggtgttgggttcggctccagcggcggcgccgattccgacaattggaacacaaagaagggcgagtccaacgttggtagcgagagagttggtgggaggccgaagcttgtgttgcaacctcggacagtgtccgtgagcgatgaaggggttgatggcaataatgcggggaagcctaaaggtgttaatccgttcggagaggcgaggccgagggagcaggttt

SEQ ID NO: 5182 - DNA, 521 bp, Glycine max
tgttcttccactgtgtttctctcatactatttacttcactctttcactcttcttgtatgatggagaagatccagcacagtgaggtggaagtgaagggactgaagcttcacgtggcagagattggaagtggctccaaaacagtggtattcttgcatggattcccagagatctggtacacatggaggcaccaaatgatttctgtggcaaacgctggttatagggctattgcctttgatttcagaggctatggactttctcagcaaccagcagagcctgaaaaggaaaccatgtttgatctggttcatgaaattgtaggccttttggatgctttgaacatctccaaggccttccttgttggaaaggattttggtgccattccaggacatcttactactgcagtgcacccagaaagagtagctggtatcataactttaggcattcctttcatgcttccgggtccctctgctgtggagaaccaccttcagcttcccaaagggttttatattactagatggcgggag

SEQ ID NO: 5183 - DNA, 318 bp, Glycine max
ccttgatattcacaacttttctcttccctttgcacttcccttaccgtttcttgttcttccactgtgtttctctcatcactatttactctttgataagctcatcattgtatgatggcgaagatccagcacagtgaagtggaagtgaagggactgaagctgcacgtggcagagattggaagtggctccaaggcagtggtgttcttgcatggattcccagagatctggtacacatggaggcaccaaatgattgctgcggcaaatgctggttatagggctattgcctttgattccagaggctaatggactcctctgagcatc

SEQ ID NO: 5184 - DNA, 1156 bp, Glycine max
gttcagctccaagactcgctctttttgcagtgatcaaatcctcatcttctttctcaatcctcaaccagtaacctttcaatttctctctcttctgctctcactctcactctctctcacttggggttgaagatgagaatttgtggagcagcaatcagcagcagctacaccaccacgtccaattcccttttagtgtttgcttcctcttccctctccagtcctgcaaaaaccaagttcctgccctcactttctagattttctgtcaagcgtccgtacttcctttcccaaacttatccgcgcattgctgtgaacaagccctccatgaacctgttgaacagactcgggtttggcagcgcaagagcaacagagaacatggattcatccattcctcagggtccagatgatgacataccagcaccaggccagcagtttgccgagtttggtgctggctgtttttggggtgttgagttggccttccagagggtgcctggggtgaccaagacagaggttggctacacccaggggcttgtgcataatccaacctatgaggatgtgtgtacagggaccaccaaccactcagaggttgtaaggattcaatatgatccaaaaaattgcagctatgagactctgcttgacatgttctggtctagacatgatcctaccactctgaatagacaggggaatgatgtgggaacacagtacagatctggaatatactactacacgccggaacaagagaaggcggccaaggagtcgttggaacaacagcagaagcagttgaacaggaagattgtcactgagatccttcctgccaaaaagttctacagggcagaggagtaccatcaacagtaccttgagaagggtggccgatttggtttcaagcaatctgcttctaaaggctgcaatgatccaatccggtgctacggttaattgtcataagtgaattgccatcaaagatcaatgtgaccggttctttagacgttgaaattccatagttttgttagtaagtatttgttaatatatcaacaaagcttgtgcacattgtatttgaggttgaagatggacatagccatatattcagttgtagagttgtatattgtctttgatatataatatgactttgctttggaataaaatatattattttttaatcttttat

SEQ ID NO: 5185 - DNA, 439 bp, Glycine max
ggggtacgtatgttgtgttcttcattttccaattgcatgttatctctcatttctcaattcaatttctcccctttccctcttccccttaatctgtgaggaaaagggaattatgggttctctttatttcagttcaatttttccttttagtgttaaaaatattacctttattattattattattattgtgtggagattgattcatgtaatttgttgaagggttgaagatgagaatttgtggagcagcaatcagcagcagctacaccaccacgtccaattcccttttagtgtttgcttcctcttccctctccagtcctgcaaaaaccaagttcctgccctcactttctagatttttctgtcaagcgtctcgtgcttcctttcccaaactcgtccgcacatttccgtgaacaagccctccatgaacctgttgaacagactcggg

SEQ ID NO: 5186 - DNA, 479 bp, Glycine max
aggtctggaatatactattacacacctgaacaagagaaggcagccatagagtctttagaacaacaacagaagaagctgaacaggaagattgttactgagatccttcctgccaagaagttctacagggctgaagaataccatcaacagtaccttgagaaaggagggagatttggttccaagcaatctgcttctaagggatgcaatgatccaattcgatgctatggttagattaatatgactagatgtttaaagcagggagttttcttgataagtatttgttaatataccaataaagtaagtcacaatctacctactctctgtattctatttatagggtgaagatcactatagaatccgaatcagttttagagttatatagtattttatatgtatagttctctaataagctggttttataacacctttaattagtggcacttcttgagttaaaatatcgttattttgttgggtttttcatc

SEQ ID NO: 5187 - DNA, 413 bp, Glycine max
ctctctctcacttgggtacgtatgttgtgttcttcattttccaattgcatgtgatctcgcatggctcaattcaattgctcccctttccctcttccccttaatctgtgaggaaaagggatttatgggttctctttatttcagttcaatttttccttttagtgttaaaaatactacctttattattattattattattgcgtggagattgattcatgtaatttgctagaacggttgaagatgacaattcgtggaccacgtatggtttgatattagatctcctttaatttatttggtggacttatttcctgcatgtttctgcacccaattctattaacaattcttggtcatgtgagtttggtttatttttatgtgattctggggcaattctcaatttatgtaaagcattggagcaa

SEQ ID NO: 5188 - DNA, 298 bp, Glycine max
cagaacctttcaatttctctctcttctgctctcactctctcacttgggagcattttgaagttgattatttcatctagaaaaggactctcatgttactcaaatgcttagcagcaatcagcagcagctacaccaccacgtccaattcgcttttagtgtttgcttcctcttccctctccagtcctgccaaaaccaagttcctgccctcactttctagattttctgtcaagcgtctctgcttcctttcccaaactcgtccgcacatttccgtgaacaagccctccatgaacctgttgaacag

SEQ ID NO: 5189 - DNA, 831 bp, Glycine max
  unsure (1)..(831): unsure at all n locations
gttatttaaggggttaagctgttcacaatgaatgatgcggctattcagttgactgataatattagtgaagcaaatgctttacttgccttacaatccaggcttaaaatgaatccagggatccaggctgcacgctaaatctcatgatattcccatgtatgtgacaaagacaagttctttggagcatgtaccaaaagccatacgggcattagtaagtgatcatgaagatggtataaaggattctgaactaacggacaagataaaatcctcagagatgattgatgctttggaggaggcgcgaatggctatagagcatacagtgattctaaagggagaacctgtggatctactcccaagatcatcacacataatatctctgcagctggaacttgttcgcaaataccaactagaaacaaggagaatcagtggagattcaggtgtacatttgcgcatacttccatcccattatgaaacggatgaagtaaaaactagtgaaacttctgagtttgatagtgaattattagatgactttgcctccaatggcagtgtgaatggctcattcaacagcttggatagattgcccctgctacccgagtaataactacgttcacttaattgtatactcataatggagattagatataaacacgtgtcgcaagggtgatgtgaaattgtacaagtcatgtaatttttaaacatatagaaaaacattttttaatgctttttgaagcgttaagcaataagatgtacaacataccaaattatgatgtcactaatataatgtgttattatttcatgtacaaaataatagtgttaagttgacttgatcaaaan

SEQ ID NO: 5190 - DNA, 775 bp, Glycine max
ccgctcgagccgctcgagcagttcgagctcgagccgcaaaaacaaaaggttgaagaatttgacagagtgagagtgtaaggtagagtcagtcagagatatagaaatggcttcgtggtgcggtgctcggagcttccagattccggcgatggaagacagcgcactgcgcaaccgtgcttcattggccgccggagtagggtgtttgtcggtggccggcacctccttctggcgctcctcttcgtcaccgaagcgctctttgccattcacatgcttgagcatttcttccgatactcgtattaaggaaagtgttcaaactgaaggtgcacctgcggctttgggaccatattctcaagcaatcaaatccaacaaccttatttttgtgtctggtgttcttggccttgttcccgagacagggaagttcgtatctgatgatgttgaagaccaaactgaacagcttcttaaaaacatgggggaaattcttaaagccggtggtgctagctactcgtccgttgttaagacaacaattatgttggctgacttgaaggactttaagaaggtcaatgagatctatgctaaatacttcccttcacctttccctgctcgttcaacttatcaagtagctgcattgccattggatgccaagattgaaattgagtgcatagcaactatataagcaccaagagtaatagtatatctggctccttcagcaaactcaggttaataacacgggaagggacatatcttagtattgaagttttacttgttttgttctttggat

SEQ ID NO: 5191 - DNA, 683 bp, Glycine max
cacgcgcgcgtaagctcgcaatccggctaaagaaacagtgtttcatcatttgggtttcgcagaagagagagaaacccatttctagagagagaaactcgcagtcgcagacatgtcttccttcgatgccttcgccgacgacttgaacgtcaactcttcttccactcgccagcacgacgatgacgaggacaacttctctggctacggcggctactcctccttcaccggaggattctccgccgacggagatgtcgccgtcgatcactccgccgccgcgtcgccggagatctacggcttcactgattcgaatcccgcttactctcagtctcccttcgaatcggccaccgtagagaacgaaaacggaaacggatacggcgacggcgacggtgtttttgtctccgacggtccggtgcttcctccgccgacggagatggagccggaggaaggttacgctcttcgcgagtggcgccgtcaaaatgccattcagctagaggagaaggagaaaagggaaaaagaaatgagattgaagattattgaagaagctgaggagtataaggtggctttctatgagaagaggaagcttaatgttgagactaacaaggttcagaatagagaaagggagaaggtaagttgcatcatgacatcatctttggccagatatatatatattttcctgttcccttaat

SEQ ID NO: 5192 - DNA, 1317 bp, Glycine max
cactgctttctctctgtctattccgttcaaagcgttgcgtagaacagagaaaaagaaagtaccaatttcttgagagagaaaacccgaagaagagtcatggcttccaccttcgacgccttcaccgtcgacgacgaccacttcgccgccccctccgccgctgacaccttctccggctacggcgacttctctactttcccctccgacgatgtccccgtcgaccacgccgccaccgcggcgtcgccggagatcttcggattcagcgatcccgatccaggctactccccgtctcccttcgagcaagtgcacgagaatgggaacggaaatggaaccgtaaacggctacggcgacggcgttttcgtctccgatggaccggtgcttccgccgccggaagaagtggagccggaggaaggtcacgcacttcgggagtggcgccgtcaaaatgccattcagcttgaggagaaggagaaaagggaaaaagaaatgagactgaagattattgaggaagctgaggagtataaggtggctttctatgagaaaaggaagcttaatgttgagactaacaaggttcagaacagagaaagggagaagttattcgtggccaatcaagagaagttccacaaagaggcagacaaagcttattggaaaaccattgcagagctcattcctcgtgaggttcccaacattgaaaagaaaagaggcaaaaaggatcaggacaagaagccatcaattacggtcatccaaggcccaaagcctggcaaacccacggatctgtctaggttgcggcaaatactgttaaagctgaagcatacaccaccacctcacatgattcctccaccaccggctcctgctaaagacgccaaagataataaggatggaaaagagaaagcagcatcaaaagcaactggatctgcagcagaaggtgcacctgattcacagccaaaggatgccacctctaatggcctcacagaagaaccccagaaagaagctcctgccactgaggagcagcctgctgcatgattttgtctatgatactttggttccccctcaatctttcttctgccacccctttctccaccctgcagtctttaatgaatctttttgccctgctattagtttctaatgcttatcggttgcattttattattattaactttaaggttttgtatgaattaaatccattattaacaattatgacgtggagattcaatgatcatgggtttaaatagtacatccttttagacagagtatatgttggaataattgctgtctgccggtgtcaaatagacaaatacaatgtttaatatttttcagttgttt

SEQ ID NO: 5193 - DNA, 460 bp, Glycine max
ccgctcgagccgctcgagcggctcgaggttcatagcgttccgcggaacagagaaaaagaaagtaccaatttctttagatagtcatggcttccaccttcgacgccttcaccgtcgacgacgaccacttcgccgcccccgccgccgccgacaccttctctggctaccccgacttctcctccttcccctccgacgacgtccccgtcgattacgccgacaccgcggcgtcgccggagatcttcggattcagcgatcccggtccagtttactcccagtctcccttcgagcaagtgcacgagaatgggaatggaaatggaaccgaaaacggctacggcgacggcgttttcgtctccaacggaccggtgcttccgccgccgggagacatggagcctgaggaaagttacgttcctcgggagtggcgcggtccaaatgtcacccagcttgaggagaaggagaaccggga

SEQ ID NO: 5194 - DNA, 524 bp, Glycine max
gaaagcaaaagtgttcccatcatttgcgtttcgcagaagagagagaaacccatttctagagagagaaactcgcagtcgcagacatgtcttccttcgatgccttcgccgacgacttgaacgtcaactcttcttccactcaccaccacgacgaagacgaggacaacttctccggttacggcggctactcctccttcaccggaggattctccgccgacggcgatgtcgccgtcgaccactccgccgccgcgtcgccggagatctacggcttcactgatccgaatcccgcttactctcagtctcccttcgaatcggccaccgtagagaacggaaacgaaaacggaaacggctatggccaaggcgacggcgacggcgacggcgtttttatctccgatggtccggtgcttccgcctcctacggaaatggagcccgaggaaggttacgctcttcgcgagtggcgccgtcagaatgccatcagcttagaggagaaggagaaaagggaaaaagaaatgagattgaagattatt

SEQ ID NO: 5195 - DNA, 583 bp, Glycine max
aagtgcgacgacgatgcacgcccgcgtaaggctgggaattgggctggaggaaacccatttctagagagagaaactctcagtcgcagacttgtcttccttcgatgccttcgccgaccacttgaacgttaactcttgttccactcgccagcacgacgatgacgaggacaacttctctggctacggcgggtactcctccttcaccggaggattcttcgccgacggagatgtcgacgtcgatcactcctgcgccgtgttgccggacatctacggatggactgatggtaatcccagttactcttagtctcacttccaatcgtacaccgtagataaccgaaacgaaaacggaaacggctatggccaaggcgacggcgacggcgacggcgtttttatctccgatggtccggtgcttccgccttctacggaaatggagcccgaggaaggttacgctcttcgcgagtggcgccggtgaggggttgtttgcaatttctcttccgatcgtgaattctttggatctcgcttgaatctgcttagatctgtgatgattttgctataatccagaagtttgctagcgaagtttctctag

SEQ ID NO: 5196 - DNA, 839 bp, Glycine max
  unsure (1)..(839): unsure at all n locations
tataaaccaactgaaacactctataccgaatccaagttctgtatttccttctcttttccaattgtttgagcgtgaatttttgcgttaatgaagtctgaaacctatgataaggggatatctgttgatgactggaaaatactggtaaagtggtaataggcaaagaagtgaagaatcacaattggtttggaggcccatcgcattgaggcaagtagaaaattgacccgcccaagtggagattcaagtcgggtaccgaacgtgcgactataaagggaatgaacgtggacaccccacgctttcttcacggcaacagaagaataatcaaatttctcagatctatccgacgtcgtcgcagatccaccaaccgttatggctgccttcagcggtgatgaaacggctccgtttttcggcttccttggagccgcagctgccctcgtcttctcctgtactccttccactctcttcaattcccccaatcacttccattagatccgtatttaccgtttcattatttatgtaatccgttcctaaaattgactttgaatccaatttcatgttccactgctcagaaccgtatatgattttaggtgttgaatttggaaccattgatgttggagattcaattagttactgcaaatcgttaagtttgatatatgaaatctgaaatttgattgatctgtgtctgtgaggaaatcggaataatttcactcatgtgaaagtgattgatcgatcgaatcttaatcttagggttgtttgaagtgataaaatctgtgaggaatttcatttgtatttgaactgttgataggtatgggagctgcctatggcacagcanagagtggtgt

SEQ ID NO: 5197 - DNA, 974 bp, Glycine max
acgaggtggagaccccacgttttcttcacacggcaacagaagaataatcgagacacagatcatagtgatcattttttaatttctcagatttatccgacgtcgctgcagatccaccaaccgttatggctgccttcagcggtgatgaaacggcaccgtttttcggcttccttggcgccgcagctgccctcgtcttctcctgtatgggagctgcctatggcacagcgaagagtggcgtgggcgtggcttccatgggtgtaatgagacctgagctggtgatgaagtcgattgttcctgttgtcatggctggagttttgggtatttatggccttattattgctgttattatcagtaccggtattaatccaaaggccaaatcttattacctctttgatggttatgcacatctctcctctggtcttgcctgtggcttggctggcctttctgctggcatggctattggtattgttggtgatgctggtgttagagccaatgcacagcagccaaaactttttgttggaatgattctcatcctcatttttgctgaagctcttgccctttatggtctcattgttggtattatcctgtcttctcgtgctggccagtctagagcctgactaagaaaggagttgtgctgcaaaatattctttgaccacccatctgttttaacctccttttagagggggtgagggaggtaattattagtttttccgagcttagcaatgttcaggcagcattttcaggctttagcaattgtgtgaaagttcaattcaccatttgtggtgtttgtttgtgtaattaggtttatgtttacttaataaagcttcttaagcttcctcttttttatactttattgattgtattttgccatatcatccgacttttatatgtattttttgggctgctgaaactggtgcatgtaatgatttggctagcaatgcagtgtatttcatgggtcttttcatgttggatgttgg

SEQ ID NO: 5198 - DNA, 508 bp, Glycine max
caaaggtcttagatccagttgcatctatcaaatctaaggcagtctctgtgaaacatgaactgaaggtagaggaatatcatcagagatcggagcgtggaacctctctctctctctctctctctctgcggaaaccggaatatctcagttctctgatcagatccatccgacgtcgtttcagtgataatggctccgttcagcggcgatgagacggcaccgtttttcggcttccttggagccgcagctgccctcgtcttctcctgtatgggagctgcctatggcacagcgaagagtggcgttggcgtggcttcgatgggtgtgatgagaccagagctggtgatgaagtctattgtccctgttgttatggctggagttttgggtatttatggccttattattgctgttattatcagtactggcattaatcccaaggccaaatcttattacctctttgatggttatgcacatctctcctctggtcttgcctgtgggctggctggcctctctgctg

SEQ ID NO: 5199 - DNA, 401 bp, Glycine max
ctgctggcatggttattggtattgttggtgatgttggtgttagagccaatgctcagcagccaaagctttttgttggaatgattcttattctcatttttgctgaagctcatgctctctatggtctcattgttggtattatcctgtcttcacgtgctggtcagtctagagctgattaagaaagatgtggctgcaaaatattctttgatctcccatctgttttaaccttcttcttattgtgaaggcaaggggggtaaattgttagttgtgaggttaatgatgttgggataccacttgcaaggtttaacaaatgtgaaagcagttgctgcatcagtcatttttgtgtttgtataagtagtctttctttgcttaataaagctttttaagcgtcttttaccctatgt

SEQ ID NO: 5200 - DNA, 386 bp, Glycine max
gggacgcgtgggcggacgcgtggccggaacgtggaactgcggaaaccggagtgtctcacttctcagatcagatcaatccgacgtcgttgcagttataatggctccattcagcggcgatgagacggcaccgtttttcggcttccttggagccgcagctgccctcgtcttctcctgtatgggagctgcctatggcacagcgaagagtggcgtgggcgtggcttcgatgggtgtgatgagaccggagctggtgatgaagtctattgtccctgttgttatggctggagttttgggtatttatggccttattattgctgttattatcagtactggcattaatcccaaggccaaatcttattacctctttgatggttatgcacatctctcct

SEQ ID NO: 5201 - DNA, 981 bp, Glycine max
acggacgcgtccgcccatgagtccggtcgtggtctttagcatttctcaccgactgcgaagggagagcgaataaaaaaaggcaaatcaaattcgagagaaggagagaatttagagagagaaaggatgaagatcacggcattgttggtgcttaaatgcacaggtgagggttccgatcccgttattctggcgaacgcttccgacgtcagccacttcggttacttccagcgttccagcgtcaaggagttcatcgtcttcgtcggtcgcaccgtcgcccgtcgcacccctcagggccaacgccaatccgtacaacacgaagagtacaaggtgcacacatacaacagaaatggtctttgcgcgttgggatttatggatgatcattacccgattcggagtgcgttttctcttctcaaccaggtaatagatgaatatcaaaaaaactttggcgagtcatggagaaatgctcaggaagacagtactcaaccatggccctatttgaatgaagctctggcaaaattccaggatcctgcagaggcagacaagttgatgaaaatccagagagagttggatgaaaccaaaatcatccttcataaaactattgatagtgtgctggctagaggggagaagctggacagtttagttgagaagagttctgatctgagtgccgcttcgcagatgttctacaaacaggccaagaaaaccaatcagtgttgtaccatattgtaagcaagctttcaagtctgtcagtatgcagcgtgctcgtcttgaatcctgttccgacatggagactgttggataggagaaaatagcttcatatgtctatatcactccattgtttgcttggttaaaattatgtgattgtaccacgatacatgtactgtcttaccgtgttggcaaatgcagattcccatttaccgtgttgtgaggttgactgagaatttatagtatgcataaattattgttttggtggagtcattccatgtt

SEQ ID NO: 5202 - DNA, 481 bp, Glycine max
aacaagattcgggatatgcttacctgtgtttctctcataaaattctacaaggaagttaagaagttttggtccatgatatctcaccctagatgtctggttcaccagtaagattgcaggtaagctatggattccatattttgaatataagctgggcaaagcagatgattgctcaagtgctacatgttgtacttgaggaaacatggaactaagaatctcaactcccttgtagaattttatgagagaaacacaggattagaagccaaggacaatgctgttgttggtcaaccgagcaactttttgagtgatgaacattcaactatgaagggcttctccctcaaagaaatatttaacagggaaccttacttggcattatctatattgtttctctgtttaaggattattctctttgtatttcccacgattatgccacgcctcaaagcattctggacttcctatgcttctcatttgaacttgcaaatat

SEQ ID NO: 5203 - DNA, 1127 bp, Glycine max
atcagcattcagcatcgcttttttctattcaacgactccgttccgttctctttcttcttcttcgaaaccctaataagcttctgcacttccttctgattccacttttggtaatataagcccctcctcttcttctcagatctgaaactacttgttttaactttttctattcaacgactccgttccgttctctttcttcttcttcgaaaccctaataagcttctgcacttccttctgattccacttttgcttcaactgggaagatactgtagggcctgggccacctaatgatgagatatccaatttctacataagttgccattgatacttttttaatcaaatggattcagtgcctgctgatgtgtctaattcacatactattaatgacccgtcgaagtcacctccggctaaagagactgacagacaagcttctgcttctgtagcctccgggcaagataattctccacatgaggcatcacctaggctatctcccacgggcatatcatcctgggccaaaaacttgaaaatttctcagccattttctggctcccaagacgactcatcaagtggaaatgttgggaaatcaacttttgcacgcatcacaagtaatttcggattgaggttgtctccaaagtctcctgtagaagatgacagttccagtgaaacagctggacaatctaatttgtttggaactattacgaaaggcctggtcgactcttctaagaatgcagtgaaagctgtgcaggttaaggcacgccatgttgtttcacagaataaacgcagataccaggaaggaggttttgatttagatatgacatatatcactgaaaacattattgcaatgggattccctgctggcgacatgagctctgggtttttcggctatgttgaaggattttacagaaatcacatggaagacgtgattaagttttttgaaactcaccataaggataaatacaaagtttatcatctttgttctgagcggttgtatgctgcatcattgtttgaggggccggtggctagcttcccatttgatgaccacaattgcccaccaattcaactgattatatcattctgtcaaagtgcttactcatggttgaacgccgacattgcgcatgttgtggttgtcc

SEQ ID NO: 5204 - DNA, 577 bp, Glycine max
cggacgcctacggcagaagcgagatctcctagaaagcgagtttctcttttctctctctctttcaattttcacatagtcagcgaaaacaaacaaactattggagatttggagcacgaaacacaacacaagcagcagccacctcgtttcattgttttgaattcaactgagaaaaacgacaacgaggatgtttcaggagagcagcgtgacgcggtggccgactcagtggactcgctaccacgacaagctattcgagcgggcccttctggtcgtgccggaggatctgccggaccggtgggagaagatcgccgaccaggttcccggcaagtcggcggtggaggtaagggaacactacgaggccctcgtccacgacgtcttcgagatcgactccggccgagtcgaggtcccgagttacgtcgatgactcggtggcgatgccgctcagtggcggtgctggaatttctacgtgggacaacgctaatcagatctcattcgggtccaagcctaagcaacaaggcgacaacgaaaggaagaagggcacgccttggactgaagaggaacacaggctgtttctcattggg

SEQ ID NO: 5205 - DNA, 470 bp, Glycine max
ctcgagccgattcggctcgagcggctcgaggaagaagcgaaatctcctagaaagcgagtttctctcttctctctctcaattttcacatagtcagcgaaaacaaacaaactattggaacacgaaacacaaacatcataacataagcagcagcagcagcaccacccaccttgttcattgttttgaattcaactgagaaaaacgacaaacgaggatgtttcaagagagcagcgcgacacggtggccgactcagccgactcagtggactcgctaccacgacaagctcttcgagcgggctctgctggtcgtgccggaggacctgccggaccggtgggagaagatcgccgaccaggttcccggcaagtcggcggtggaggtcagggaacactacgacgccctcgttcacgacgtcttcgagatcgactccggccgagtcgaggtcccgagttacgtcgatgactcggtggcgacac

SEQ ID NO: 5206 - DNA, 612 bp, Glycine max
agaaaatgaaatgtctagaaatggctcttgtctcagtcaccaccgcaaattcttcgaagttcattctcttacgcactctctctcgttctcacgctttctccttcgctctccaccgtcaattccaactactctcgtcttcctccgctgtgctccgccgtcttccccggttcctcgccgcctcccccggttctccgctcccaccttccgaaaacgattccagcaggcaccttgaagggacttttggggctaataaagtttctgaagagataagatgatcgttgtgctgagcatggttattgatgggtagcagaagtagaacagtaaacgttaacactaaggacactgacaaggttctgaacgggatgccaagctacgctcctccattgccttcttcttccaattccatggccatggaagcaactaatgctcatccttcccgtatttctgaatttggaaccctggagcaatctcttggatttcgtgttgaagataccattaatcttagcagaagtatgttgctcatgttttgatcttaatagttggaccccctttttttgggggggatttattcgttcctggtattaggaatttaataccaggtcccatactccc

SEQ ID NO: 5207 - DNA, 1326 bp, Glycine max
cccacgcgtacgggtaaggccttttctgttaattgtagatgaacttggaaaattattgtgatataacttggcatatgtgcaacaactagagagcagtaggttgaaactgatatcgccagcagggaatatttatttcaagtactggagatcaggcacagtcaatgagtggaaatggcgctatggcatttgatgtagagtacgcacgatggttagaagagcataatagacaaaccaatgagctaagggctgcaataaattctcatgctggagatattgaacttcgaaccattgttgacaatttcatgacacaatttgatgatatcttcaggctgaaaggtattgcagcaaaagctgatgttttccacattctgtcaggaatgtggaagactccagctgagaggtgtttcatgtggattggaggctttcggtcatccgaactcctcaagcttcttctaagtcagttggagcctttagccgagcaacaattgatgggcatctacaacttgcagcaatcatcccagcagactgaagatgctctttcccaagggatggatgcattgcagcaatcactatctgagacattggctaatggttcgcccagctcatcaggctcctcgggaaatgtggcaaattacatggggcaaatggctatggccatgggaaagcttggtacacttgaggggtttcttcgccaggctgacaatctgcggcagcagacattacaacaaatgcttcgaatattaacgaccaggcaatcagctcgagctcttctcgccatcagtgattatttctcacggctgcgagctctgagttctttgtggcttgctaggccaagggagtgaagcatttcacagccccattagtggacttctttcatgcctgactcccttaaacaccgatgatcattgaatcttgtgctctgaatgagttcaatggaagctggtgtcttttgacaatgaattcctcttgaagcctagttgtgatgctataaacattaaatgctatgatttttctactctgccaactgctggtgtggtgcaacatttttctttaagcttttgtggttttaaaatagtctcaataatttgattatataggtgtatgatagatagaagctgttgaagggaaaaatgtagaaatagtgtatctgtatttttaggttatagctgttcattgtatttcagaaatcagcttttatttgagggggtatttacctctctttagtttcatttcctgcttaatggtttgtggttggttgcacataaggctccatggtgtatgtatttatacgttctcttttggtatattagaaagacattactaact

SEQ ID NO: 5208 - DNA, 1034 bp, Glycine max
atcggtttcttcttctgggtgtgttgctttaatccgtggaaagttcatttttttttccgattttcatgtgaccagggtcttttggggctaataaggtttgtggagagagaagatgatcgttgtgctgagcatgattattgatgggtagcagaagtagaacggtaaacgttaacactaaggacactaacaaggttctgaacgggatgccaagctacgctcctccattgccttcttctaattccatagccatggaagcaactaatgttcatccttcccgcatttctgaatttggaaccctggagcaatctcttggatttcgcgttgaagataccattaatcttagcagaaatccgatgtttaatcaaatgaaatcaaatagccaagctctaggtgctgatattcaatttggtgctttaaataagtcaattgcaacatcagatataaacctctctgctgctattgctgggtctcaagcactggtattccaaaaagattcacaaccaactctggcttcaacatctgctggtcgtgagaactggggagagaccaacttggctgatgctagccctaggactgatacttcaacagatgatacagaagacaaaaatcaaaggcctgaaaggggtgaatccagtggatcaaaagataaatcagatcaaaagacattaagacggcttgctcaaaatcgtgaggctgccaggaaaagccgactgaggaaaaaggcatatgtgcaacaattagagagcagtaggttgaaactgacccaacttgagcaggagctccagcgagcacgccagcagggaatatttatttcaagtactggagatcaggcacagtcaatgagtggaaatggcgctatggcatttgatgtagagtacgcacgatggttagaagagcataatagacaaaccaatgagctaagggctgcaataaattctcatgctggagatattgaacttcgaaccattgttgacaatttcatgacacaatttgatgatatcttcaggctgaaaggtattgcagcaaaagctgat

SEQ ID NO: 5209 - DNA, 629 bp, Glycine max
  unsure (1)..(629): unsure at all n locations
tctcgagccgctcgagccgctcgagccgctcgagccgctcgagcacgctcacggctgcgaattctgagtactttgtggattgcaangactaagtagtgaaacatttcacagctccattagtggacttctttcatacctgacccccttaaagactgatcgttgaatcttgtgctctgaatgagttcaatggaagctggtgtcttttgacaatgaattcctctagaagcctagttgtggtgctataaacattagatgctacgatttttctactctgccaactgctgctgtggtgcaacacttttctttaagcttttgtggttttaaaatagtctcaataatttgattatataggtgtatgatagatagaagttgttgaaggggaaaaatgtagaaatagtatctgtattttaggttatagctgttcattgtatttcagaaatcagcttttatttgtggttggttgcatatatggctccatggtgtatttatgtatggatgtatatatacgttctctcttggtatattagaaagacattaccaactagtaaaaaaaaaaaaagaaatgacatacaaaaatgaaacaataaaaacataatataactaaaaaaaataaaaggggcgcccgtttt

SEQ ID NO: 5210 - DNA, 351 bp, Glycine max
agagaaaatgaaatgcctggaaatggctcttgtctcagtcaccaccgcaaattcctcgaagcatattctcttacgcactctctctcgttctcacgctttctccttctctctccaccgtcaatttcaaccactctcctcttcctccgccgtgctccgccgtcttccccggtgccacgccgcctcccccggtcccccactcgcaccttccgaaaacgattccagcaggcaccttaaaggagcagatgttgctacatctttatccaaaattcaagatagaatacagatcttctttgctgttcttttctggatgtctctagtcgtttgggcttccgcctgggatgggaggaatag

SEQ ID NO: 5211 - DNA, 751 bp, Glycine max
ccaccctatgtgtaccatagtgtgggattcctttttgctccaattgtgttggcatggctgttgggcatcagcacacttggtttttttaatatattacaaatggaaatccgcatgtttgttaaagactctttcgccgtatgtatatgttcaagttcttgaagaagacaaggataagtggatggatgtctttgggtggaatattgctgtgcataacaggctcagaagctatgtttgctgatcttggacatttctcatatatggctattcagattgcattcacctttctggtatatcctgcgcttatattggcctatatgggtcaagctgcttatttgtcgcatcatcatgattccgaactccaaataagtttctatgtctcagttccagaaagtgtgaggtggccggtgcttatcttagctattctagcttctgttgtgggaagccaagcaatcatcagtggaacattttctatcataaaccagagccaatctctgggttgcttcccaagagttaaggttgttcatacatctgacaagatacatgggcaggtctacatccctgaaattaattggttactcatgatcctctgcattgctgtgaccattggatttagggacacaaaacacatgggaaatgcttcagggttagcagtgatgaccgtgatgctggtgacaacatgccttacttctttagtaattgtagtttgttggcagaaaccccctataatagctctttgcttcctgttgttctt

SEQ ID NO: 5212 - DNA, 431 bp, Glycine max
ttcacgcgtccgaagaggttcacctactcagaaatcaaagctgccaccaaagatttctccaacttaataggcaaagggggctttggagatgtgtacaagggtgagttacctgaccatagagtggtggcagtgaagtgcctcaagaatgtcacaggtggagatgctgagttttgggcagaagtcacaatcattgccagaatgcaccacctcaacttggtgaggctgtggggattctgtgctgagaagggccaaaggatacttgtctatgaacacatccctggtggatcattggacaagtacctcttcagggtcaataagtctcataacaataaccatctcaaggagcaatcaagtagtttgaatccaaacacaccacaacaagaaaggcatgttttggattggagcatgaggtacagaatagcccttggtat

SEQ ID NO: 5213 - DNA, 490 bp, Glycine max
atttcattttatcacaccaaatttgaccaattccaacctcgcttgaaaccatggctctctgcacatcttacttcttcttcaccttctttttcaccttctacttgttgctcttgaatctccaaccttcggtttcccaacaacaattcacatccttcaacatctcacactctccatggctcccagcacagaacataacccttctctctccaaacaaaaacttcactgcacgcttctttcccctgccaaactcttcaaatgtcttcactttctccatttggtactccaaagtgcctccaagtgcaaacccttttgtttggaatgccacactccaagtcaccaccgttgcctccctgcaccacctcaacttggtgaggctgtggggattctgtgctgagaaaggccaaaggatacttgtctatgaacacatccctggtggatcattggacaagtacctcttcagggtcaataagtctcataacaataaccatct

SEQ ID NO: 5214 - DNA, 522 bp, Glycine max
ttcattttaacgtcagcattccaaacaatctgacagagagacagcgggaattgattgaagagtttgccaaggaagagcaaggagattttgataaacagagagttgcatctgcttctggttgaaaacattgcaagagttattatcaaaatcatatgctcaactaggcggttgttgaagttttgtaggattaaggattggtaattcttttcttaattccttccactttttcgagtgtatgtaatatttatttctcgtcccaagggatgatcacaattcaaaattttttttgttagaacttagaaggcaatcccctcatgctcctctaggctagaattctagtcagtgctgtatatagtttccttataacataagaaagggcgcaagtcactcaatgtgattctttttcctactatcacgtcacataaaggaggagcctttatcattggaccatgggtaaactagaatataatttctgcatagtgtcaacatgaaactatatatatattcatctgtctattgatc

SEQ ID NO: 5215 - DNA, 671 bp, Glycine max
ttccattcgtgttgtttctcagcattttactaatttttttttcaactcacaattcatgagtgatgacaaattgaagaagcacttccgtgagtcttaattaaagagattaaagagacacaccattcattcgctcactcatttcatttcaaacaatgtcaatcgctgcttcagcttcttcacatgcttgtatttcctcaatccccacatgcatcccctcttcctcttccaaattctcttcttcgctgacactttcttcactccaaagaggctcaaataagagatcgggatgcagagccatggttcaacaagccgttcagggtgcccctgctgcgtatgccaaagaaatggaacgcctttctgccaaagaatcgcttcttcttgcttttaaagatgcagggggttttgaggccttggtctccgggaagactactgaatggcaaaagattgatgtgaatgaaaggataactggtcttgagcggctcaatccaacacctcgccccacaacgtcaccctgcttggaggggcgatggaactttgagtggtttggttctggaagtccaggcttgtttgctgctaggtttatatttgaaatctttccttcaactttggctaatttgtcaaaaatggattttgttattaaggatggaaatgcgaagattactgcgaacatg

SEQ ID NO: 5216 - DNA, 644 bp, Glycine max
tcgcttacgcgtggcaaacggacgcttttgttattcttcgtgtcttgttgtgtttttcatctgagatgtgtggaggagctatcatctctgatttcattccggcggcggcgatcgccgggtctcgccgcctgaccgccgattacctgtggccggatttgaagaagcggaagtctgacttggacgttgacttcgaggctgatttcagggattttaaagacgattctgatatcgacgacgacgacgacgatcaccaagtcaagccctttgctttcgccgcctcttctcgtctgtctacggcagcgaaatctgtggcattccaaggtcgggctgagatatctgcaaatagaaagaggaagaatcagtataggggaatccgtcaacgcccttggggaaaatgggcagctgagattcgggatccaagaaagggggttcgtgtctggcttggaaccttcaacactgctgaagaagctgcaagagcttatgatgctgaagcacggaggattcgtggcaagaaagccaaggtgaattttcctgaggcaccaggtacttcttctgtaaaacgttccaaggtaaatccacaggaaaatcttaagactgctcagcccaatctgggtcacacagttcagtgctggcaacaatcacat

SEQ ID NO: 5217 - DNA, 451 bp, Glycine max
ccaaaactgacgcttttgttattcttcgagtctctgagagagatgtgtggaggcgctatcatctctgacttcattctcctttttgagacttctaatatcctcagggttttttgggagaattggctaaaaaatggttatatgatccgtgtttgtgctatgatgttatttttattttttctttgtttaatggttctgaatgtctctgttcttactgcgatttttacacttttccaattatattaaagggtctaccacagcgaaatctgtggcattccaagttcgagctgagaaatttgcaaataggaagaggaaaaatcagtatatgggaatccgtcaacgcccttggggaaaatgggcagctgagattcgggatcctagaaagggggttcgtgtctggcttggaaccttcaacactgctgaagaagctgcaagagcttatgatgctgaagca

SEQ ID NO: 5218 - DNA, 810 bp, Glycine max
acgagctcgtgccgaattcggcacgaggaccgccccaccagcgtccgcaccttcaaggagcacgcctactgcgtctactccgccgtctggaacccccgccacgccgacgtcttcgcctccgcctccggcgactgcaccctccgcgtctgggacgtccgcgagcccggctccaccatgatcctccccgcccacgagttcgagatcctcgcctgcgactggaacaagtacgacgagtgtgtcattgccactgcctccgtcgataagagcgttaaggtttgggacgtgaggaactatagggttcccctttgtgtgctcaatgggcacgggtatgctgttaggaaggtgaaattctcgccacacgtgcggaatttgatggtgtcttgctcctatgatatgacggtgtgtgtttgggatttcatggtggaggatgctctggtgagtaggtatgatcaccacacggagttcgcggtcggggtggatatgagcgtgcttgttgagggcctcatggctagcactggttgggatgaacttgtttatgtgtggcagcatgggactgaccccagggcaccttgaaggtgaagggtctaccacagcgaaatctgtggcattccaagttcgagctgagaaatttgcaaataggaagaggaaaaatcagtataggggaatccgtcaacgcccttggggaaaatgggcagctgagattcgggatcctagaaagggggttcgtgtctggcttggaaccttcaacactgctgaagaagctgcaagagcttatgatgctgaagcacggaggattcgtggcaagaaagc

SEQ ID NO: 5219 - DNA, 877 bp, Glycine max
ggtttcggagaagaattaagcactcggttgcagaacagaacaaacttctttcactctttcgcttctgaatcttcaacaatggtgctcgaggcgacgatgatctgtatcgacaattctgaatggatgcgtaacggagattactctccttctcgatttcaagctcaagcagacgctgtcaatctcatttgcggtgctaaaacgcagtctaatccagaaaatacagtgggagttctcacaatggctgggaaaggcgttcgtgttttggtcacccctaccagtgatctgggcaagatcttagcctgcatgcatggactagatataggtggtgagatgaacctagctgctggcattcaggttgcacaattggctcttaagcatcggcaaaataaaaaacaacagcagaggattattgtctttgctggaagccctgtcaagcatgaaaagaagatgttggagatgataggaagaaagttgaaaaagaatagtgttgcacttgatattgttaattttggtgaagaagatgaggggaagacagagaagctggaagcactccttgcagctgttaacaataatgataccagccacattgttcatgttccatctggtccaaatgctctttctgatgtacttataagtacgcctatttttactggtgatggggaaggtggaagtggttttgctgctgctgccgccaccgctgcagctggtggtcgtatccggatttgagtttggcgtggatccaaacttggatccagaattggctcttgctctaagagtttcaatggaagaggagagagccaggcaggaagcagctgcaaaaaaggctgcagaggctgctgccaacctagagacaggagatgagcagcaagcaagctcc

SEQ ID NO: 5220 - DNA, 339 bp, Glycine max
  unsure (1)..(339): unsure at all n locations
gaattttgtttggaaataattgaggactacgttgttacggtcccaaagaacaacccttctagcaagtaaacccgagttcccttctctctctttacgattacattgctctctctctctctgttcgcattcaatctttcgcttctgaatctccaacaatggtgctcgaggcgactatgatctgtatagacaattcggaatggatgcgtaacggggattactctccttctcgatttcaagcccaagcagacgccgccaatctcatttgcggtgctaaaacccagtctaatccagaaaatacggtgggagttctcacgatgnngcgggaaggcgttcgtgttt

SEQ ID NO: 5221 - DNA, 494 bp, Glycine max
attcactgaaactgctgttggtaagacaaggtctcctacaacagaagcagactctagaaagcaaattgatctgaacttgagtatgagtgaggacgaaggatctttcacaactataccaagtgacaatgtaaaaatgaaggcacaaatagatttggaagcccctgctcctcccgagacagaggaggatgctgttcctgaagaaaagctgcttgaaactgctctagcatcaccgcaagtcccacaaggcacagttgaactgccaaaggatgatgaacttatgacaaatgcagcagaggcaattgttgtcctgtcatctcttacctgggatcaaggggatgatggtgtgatcagcaaaagtccatcagaaagtccaaaggtggacctgctaagttggtttgcagatgttgtttcctcctcatgcaaagataatgtagagggaaactgtgatgtttcaagggaaaaagatggcgaagacaacgaagggcattcctctg

SEQ ID NO: 5222 - DNA, 1506 bp, Glycine max
gctgttctgagtacctgcaatcgaatggagatatatgttcttgccctgtcccaacatcgtggtgtcaaagaagtcatggaagcgcgggcaaaaacaagttctgtccctgtttcagagcttagccagcaccggtttttactttacaacaatgatgccacacagcatctttttgaagtatcagcaggtcttgactctcttgttttgggggaaggtcaaatcctttctcaggttaagcaagttgttaaagttggacaaggagttaacggctttgggagaaatatcagtgggctattcaagcatgcaattactgtcgggaaaagggttagaactgagactaatattgcttctggggcagtttctgtgagctcagctgccgttgagttggcctatatgaagttacctgaagcctcacacgataatgccaggatgttggttattggtgctggcaagatgggaaagcttgtgatcaaacatttggtggcaaaaggttgcaaaaagatggtggttgtcaatagaactgaggagagagttgctgcaatacgtgaagaactgaaggatattgagattatctacaaacccctttcagaaatgctcacctgtgctggcgaagcagatttagttttcaccagtactgcatcagaaaacccattattcttgaaagaacatgtcaaggaccttcctcctgcaagtcaagaagttggaggccgtcgctttttcattgatatctctgttccccggaatgtgggttcatgtgtctcagaccttgagtctgtgcgagtttacaatgttgacgaccttaaagaggttgtggctgccaataaagaggatcgcctaagaaaagcaatggaagcacaggcaatcattgctgaagaatctaagcaatttgaagcttggagggactcactggaaactgttcctactattaagaaattgagggcttatgctgaaagaatcaggcttgctgagcttgagaagtgcttaggtaagatgggtgatgatataccaaagaaaacgcggagagctgtggatgaccttagtcggggtatagtgaataagttgcttcatggtccaatgcaacatttaaggtgtgatgggaacgacagccggactcttagtgagacactggagaacatgaatgctttgaataggatgttcaaccttgagacagaaatatctgttttggaggagaagattcgagcaaaggtcgaacaaaaccagaaatgaaatctaacaccaatcagactgatttattttctcctttagaataagaggaaacatcctcaccttttagtattaatcatcctgcaatatttagttgcatagttgaaacagctgaagtcctccatgctgcgtctgcttggcctaactcgtttgcgttttttgggtcatgcgttttccctgtgttcttccgcatccattggtctttgtattatccaaaattaagtgttttggtgagcttcgtatttacatcaaataatattgttataagattgtccccgtatcggg

SEQ ID NO: 5223 - DNA, 430 bp, Glycine max
ctcgagccgctcgagccgtgagaagaacagaacaaaattgcgaagaaccctaattgattgattgattgattgattcccatggcgtcccgaagaggtggagtctcactcccagaaagaccaagcaacaactcaggctccgtcctggcgaagatctcgcgctcctccatcgtcacccgcggcaaggaagccgccgtcgacgccgcattcgtcgccaagaagctcctccgcagcaccggcaaggccgcgtggatcgccggcaccaccttcctcgtcctcgttgttcctctcatcgtcgagatggaccgcgagcagcagctcaacgacctcgagctccagcaggccagcctcctcggcacccccgcccccaaataaaatttgaggttttctctctgatctgattatccctgtttggacactctgctatatgaac

SEQ ID NO: 5224 - DNA, 1175 bp, Glycine max
caaggtagctgcttctgaagctggtgggatcacacagggaattggggcctataaagtggaagtacctgtggatgggaaaaagttgccgtgtgttttccttgacactcctgggcatgaggcatttggagcaatgagagctcgcggagcaagtgttacagacatggctattattgttgtggctgccgatgatgggattcgtcctcaaacaaatgaagctatagctcatgccaaagcagcgggagtacccataatcattgcaataaacaagatagataaagatggagcaaatccagaaagagtcatgcaagagctttcttcaattggtttaatgccagaagactggggcggtgacatcccaatggttccgataagtgctctcaaaggaaagaacatagatgatcttttggaaactgttatgcttgttgccgagttgcaagaactgaaagctaatcctgatagaagtgcgaagggaactgttgttgaggcggggctagataaatcaaagggaccattcgcttcatttattgtgcagaatggcaccctcagacggggagatatagtagtttgtggagaagcttttggaaaggtgcgggctttatttgatgatggtggaaagcgggttgatgaagctacaccctctatacctgtacaggttattggattgaataatgttccaattgctggtgatgaatttgaggttattgaatcccttgatactgcacgtgaaagggcagaaactcgtgctgagtcattgcgtaatgagcgtatttcagcaaaggcaggggatggaaaggtcaccctttcttctttagcttcagcagtttcgtcaggaaagctgtctggactagatttgcatcaactaaatattattttgaaggttgatcttcagggatctattgaagctgtcagaaaagctctggagattctaccacaagacaatgtcactctgaagtttttgttggaggcaacaggtgatgtaaccacaagtgatgtggaccttgcagttgcaagcaaggccatcattttgggatttaatgtgaaagcaccaggctctgtgaaaagctatgctgagaacaaagctgttgagattagattatacagagtcatttatgaattaattgatgatgtacgaaaagcaatggaagggctactagaaccgttgaggaacaagtaac

SEQ ID NO: 5225 - DNA, 585 bp, Glycine max
ataaaaataaaaacttttctttgtttctcttttctttgtattagccttttgttgtagatggcattggggagaaggagtggactctttgctcttgaaaagcattttgctttctatggagcataccacagcaacaaaattaacatagcaatccacgtgttgtttgtttggccaatttttttctcggcccttcttattctctattttgtccctctccctcccttattcaaccttcaaaacttggagttttccatgtgggagaactatgtgatattggtttggaatgttgggtttttggttgctttgctctactcagttttctatgtttctttggatctgaaagctggctctttggctgctttgctttgtgctctttgttggattggtagtagctttgttgcaagccgacttgggttgtctctagcttggaaggttgttcttgtggttcagatagtatgttggacagggcagttcattggtcatggagtatttgagaagcgagctcctgctcttttggatgacctcattcaggcctttgtaatgggtcctttctttgtattgctagaggttctccaggctttctttggt

SEQ ID NO: 5226 - DNA, 584 bp, Glycine max
gatagaagtgaggggtgatcgatcttttccacactcaaacctaaagagtctcataaaaaaaactatgcaagcttctctcatccgaaccggctccgtgccggtccagaacacggttctccccggttcaccgcgagtctcactcacgcgccaagcctccttctccggcgacaagagccacgcgcattctcccaggttttcaatccattcttcccactccaacaaccgcagatcctcgtcggagcgcgacgacgagaatttcggcgttcgccgggatctgaaccgaaccggatcgccctcgttttcaccaatcgtacctcacgaagaagacttcctctccgacgccgctccgcgcaagctcggaatccggccggaggatctaccattcggagaaggagaccgtggattccaccgcggtgcgcctctcaccggcggaaacggcggcgagaggatgaaaatccgcgcgtactacgaggaaatgttgaggtctaatccgacggacgcgcttctgctgagaaactacggcaaatttctccacgaggtggagaaagacacggtcagagcagaggaattttacggaagagcga

SEQ ID NO: 5227 - DNA, 1793 bp, Glycine max
gtaagacacgaaccggtgacttgataactcacgcatttcatttatttatttttctgcgataaaacggagaaaagaaaaaagaaaaatgtaagtggaagaagagaaagtggcatcgcttaggtacagatacagacacaacctggtaaaaatcccgaccccagtgccgcacaattttccttcactcgcagcggaggtttacttttgatctagtacctgctatccctatgtataagcatggacttctagcatactattgtttgattaaccaagttcttccatattggttgaggaagcctcgagtcaatatttagtttttgctgccatctgtgggtttctgatggatgatgccgggcatcgtgaaaatggaaggcacaaagcagcagatcaatataaatctgctcagggacagtggttgatgcaacatcagccttccatgaagcagattatggcaattatggctgaaagagatgtagccattcaagaaagaaatctggccatttccgagaaaaaagcagcatatgctgagcgcgatatggcattcatgcagcgagatgctgcaattgctgaacgtaataatgcaattttggaacgagataatgcaattgcaactcttcagtatcgcgaaacctccttaagtagtggcagtatgccatcatgccctccaggatgccaaatttcacgtggtgtcaagcatgtacatcatccccagcaacaggtgcaccatatacctaacatgggtgatgcctcttacaacacaagggaaatgcacacaacggaggtcctccctgcagcccccatcccttctgagactgggaagtcaaggcgggccaagcgaccaaaggaaccaaagtcagctccacctaataaaaagacttcaaaaccctcaaaaaaagtcaagaaggagagtgaagacttgaataatatgtttggcaaggcacatgagtggaagagtggtcaggaaatggtcaatggaggtgatgatcttaacaagcagttaactgtgtcaaaggctgattggaaaggacaggacttggggttaaaccaagtggcgtatgacgagtcaaccatgccagctcctgtgtgctcttgtactggtgtcctgaggcagtgttacaaatggggtaatgggggttggcagtctgcctgttgcacaactactctgtcaatgtatccacttcctgcagtgcccaacaagagacatgctcgggtaggcggccggaagatgagtgggagtgctttcaacaagctgcttagtcgacttgcagcagaaagtcatgatctgtcaaaccctgttgacctcaaggaccattgggcaaaacatggaacgaaccgatacatcacaataaagtagagggcgagacattgtttctggggcagcattacacgaatagaaactgcttttagtgatcaattatggattctcaagtcgaatgagaaaaataatgttaagtgtaaaggccatccgggaaagctaatgatttagagtatgcccttgcttatatttaggatgcataagcctggtggaggctggctaaatttaggggttgaagaagtgactatatagtcatcctcggcatttgtcgcacttaattttcttagatagcctgatggcaccgatggcatgtataaaaagtctgcatgatggatggataaatagctgttagatagtcttggttaatgcatttagtacttaaaccctaataattgtagactcgtgtcctcagtcatcctggaaccctatctgcgttaatatgtaaaatcaactatgtatgctaattttttccctgtttcaa

SEQ ID NO: 5228 - DNA, 404 bp, Glycine max
gatttttaagaagagaaagtggcatcgcttaggtacagatacagatacagacacaacctggaaaaaattccgaccccagcccttcactcttctctctgcagcggaggtgtacttttgatctagtacctgctatccctatgtataagcatggcaagtatttttaaacgttgtgacatccattcttgttaggagttgttataaagctattcatccctgctcaatattctacaccccaagacagagaaggacaatagagatcaactaactatcccaacttgccaatataaactgtgaagagtttctataaatgcaggacttctagcatactgttgtttgattaaccaagttcttccatattggttgaggaagcctcgagtcaatatttagtttttgctaccatctgt

SEQ ID NO: 5229 - DNA, 416 bp, Glycine max
gaagtggaagaagagaaagtggcatcgcttaggtacagatacagatacagacacaacctggaaaaaattccgaccccagcccttcactcttctctctgcagcggaggagttgttataaagctattcatccctgctcaatattctacaccccaagacagagaaggacaatagagatcaactaactatcccaacttgccaatataaactgtgaagagtttctataaatgcaggacttctagcatactgttgtttgattaaccaagttcttccatattggttgaggaagcctcgagtcaatatttagtttttgctaccatctgtgggtttctgatggatgatgctgggcatcgtgagaatggaagacacaaagcaggagatcaatataaatctgctcagggtcagtggttgatgcaaca

SEQ ID NO: 5230 - DNA, 307 bp, Glycine max
ataaaacggagaaaagaaaaaagaaaaatgtaagtggaagaagagaaagtggcatcgcttaggtacagatacagacacaacctggtaaaaatcccgaccccagtgccgcacaattttccttcactcgcagcggagatttaggagtgtggtcttcctgtcttggaagtgctgcttgaaagaggaccttggtcatatggttgcttgtcatcattatttgtgtggtatttatccatgcattatgtggtcagaacataataatcaaataaggattctttctacccactcatctcacctctctttttatttt

SEQ ID NO: 5231 - DNA, 523 bp, Glycine max
ataaagtacagcatgagaaattgtttgtggggcagcattacatgaataggatcagcttttagcgatcaattatggattctcaagtcgaatgagagaaataatgtaagtgtaaaggtcatctgggaaagctaatgattagagtatgcccctgctatatttaggatgcataagcctggtgttaaagtcatcctcgttcgtcatttgtacgcacttaattttcttagatggtctgatggcgccaatggcatggatagaaagtctgcatgatgggatggataaatacctgttagatagtctggtttaatgcatgtagtccttaaacctgaataattgtagactcgtgtcctcagtcatcctggaacctctctgcggtaatatgtacaatcaactatgtatgttaattttttccttgtttcatgtttgtttttcctccacattggaacccaatctatgagtttagtttttattagtgattgctacaggaggtggccaatatgagccctatgaacctattccttggttt

SEQ ID NO: 5232 - DNA, 411 bp, Glycine max
gaaaaggaacacacattctcattctctcacactttctttctccaatcccaattccaaaccctaaccaatttccatggcttcctcggagatcgaggtggtttcatcatcatcatcggtctccaaacccaacaacgaccagcctccaatcctcgacatcttcaccgcctctgctcacggcgacttcaacaaattgagaaccttcgtcgaacaagacggcgcctccgtctctcttcccgattctaacggctattacgctcttcaatgggcctcgcttaacaactttcacgacattgcgcactatctcattcagcatggggcggatgtcaatgctaaagacaacatgcaacaaacggcattgcactgggcggcggttcgtggttcaactctagctgctgatgtgctcgtggagaa

SEQ ID NO: 5233 - DNA, 982 bp, Glycine max
  unsure (1)..(982): unsure at all n locations
cataaagtgtaacaaacaaaatcacaccacagatctgcacaacatgattcatgacacattagatctgtgtcattagtccttggtttatcaaaccaccacaattacaccgatcaaaaacacaaaacactactcatcacatcttattcacatcacatccactttcattactacatcattttccacttcacaatcttcacaccacacacacacacacacacaacacaacacaatcatggaaattgatggtaggtttctgaacactggcctcctccttgtggccacaatccttgtggtcaagctcatctcagccttcatagtgcccaaatccagaaagagggtacccccaattgtgaaggggtggcccttaattggaggactcatccgtttcctcaaaggtccaatctttatgctccgtgacgagtaccctaagcttggaagtgtcttcactctcaaactcttccacaagaacatcaccttcctcattggccctgaggtttctgcacacttcttcaaggcctcagagactgatctcagccagcaagaggtgtatcagttcaatgtgccaacttttggacctggggtggtctttgatgttgattactctgtgaggcaagaacagttcaggttcttcactgaggctcttagggccaacaagctcaagggttatgtcaatcagatggttgcagaagctgaggactatttctcaaagtggggaccaagtggtgaggttgatttgaagtatgagcttgagcatctgatcatcttgacagccagtagatgtctcttggggcgtgaagttcgtgacaagctctttgatgatgtctctgcattgttccacgaccttgataatgggatgcttcaaatcagtgttctcttnccatacctgccaatcccagctcacagccgccgtgaccaggcaccgcagaagcttgctgaaatctttgccaggatcataacatctgccaaaagtgccagcaaatca

SEQ ID NO: 5234 - DNA, 480 bp, Glycine max
cacacacaacttcataaagtgtaacaatcaaaatcacgccacagatctacacacaccacatcatgacacaatagatctgtgttagtcctttggttttatcaaaccacacttgcaccaatcaaaaccacaaaacacaactcgtcacatcacatcacatcacatctattttcattacttcatcattttcactgcaattttcacaccacacacacaccacaatcatggaagttgatagtaggtttctgaacactggcctcctccttgtggccacaatccttgtggtcaagctcatctcagccttcatagtgcccaaatccagaaagagggtacccccagttgtgaaggggtggcccttaattggaggactcatccgtttcctcaaaggtccaatctttatgctccgtgacgagtaccctaagcttggaagtgtcttcactctcaaactcttccacaatagcatcaccttcctcattgggcctg

SEQ ID NO: 5235 - DNA, 728 bp, Glycine max
actcgagccgaatcggctcgagtgggtgctagtgagtgatggcgatgagggtgtgaattctaaaaggaaagaacagctgagctggtcagaaaatcaatggcatcatccttgggttttgagttcctgacgaagaagccttacagtcctccatcctgggcatcccatctccaccctttaccttcccacttcttctctcttgcccatcttcccactccaattcacagatggaaccttcccaatctgcccaccaataccgagctgtggatcaagcgagacgacctttccggaatgcagctgagtggtaacaaagtgaggaaattggagttcctgatggccgatgccattgcgcaaggcgccgactctatcatcacaatcggaggcattcagagcaaccactgtcgcgccaccgccgttgccgccaagtatttaaaccttgactgttttctcatcctccgcacttctgacctcctcgtcgatcaagatccaggacttactggcaatcttctcgtcgaacgtatggttggagctcacgttcacctcatctccaaacaagaatatgccaaaattggcagcgtggtctgtttagtgttacttcattacttcttcttttctgtcagctatattattattattattattattatagttattcttcttcttcttcttattatttatctattcatctttttcttagacactcaccaatgtcctaaaagaaaaattgatca

SEQ ID NO: 5236 - DNA, 469 bp, Glycine max
ctcgagccgaatcggctcgagcccaaaccctagttttgtcagtagcacacttcacccatggcagtagcagcagctcgccctatcgtctccgtccaaaccctatagggcgatgcaacccccaccgttcctcttcccgacgtcatgaaagcctccattcggcctgacatcgtcaatttcgtccactccaacatttctcgcggccaccgcatcgagtccgtcccggaactccccctcgtcgtccgcgacaccgtcgaaagcgccgagaaatccaaagaagccgtcaaaattctccagaaaatcggcgcattcacagacgcggagaaagctaaactcagtcacggaattcgtcccgggaagggaaaaatggcgaaccgcagtatatctctggcaagggtcctctcatagtgtacggaacagaaggtgctaaggccattaaagccttcaggaacattcccggtgtagaggtggc

SEQ ID NO: 5237 - DNA, 983 bp, Glycine max
tcgtccacgcgtccgattttatttatgcatgtctctggaattcctgcaatgaggacttaatatggacatgcatgaggttttcccagtcaaatttgtgctctgataattgatttcgcccagaattttcatttttgcaagtgcattagttgttacttgtaccgattcctcttctttgcctgcaggtctaagaagtgcaggtcaaatgcatgcttcattcaccactgacgggaaacatatcatctcagttagcgaggattcacatgtatgtatctggaattacaccggccaagataggagtacctccaaagcaaagaaaatttggtcttcagagagttttctctcccacaatgcagccattgctgtaccttggtgtggcattgagtcaatgccaggagcactcttatccccatcgctaggagaggatgtaaatcagaggtgttctctgccttctcctgattgcttcttcttgagtcgcggatttctgtctgagttgatcccaaaggtttctgcaacatggcccgaggagactcttgtggactcatcgtgtcaaactcaaactgttgtttctcctacaatgtgtaaatcagagtacaagttcttgagaagtgcttgcaagggaatgtctaattcccacttgtggggccaagtaattgtgacagcaggatgggatggatacataagagtgtaccagaattatggattacccgttcgtggctgaaaccaaggcttaggctcatttgttggggaattataaggttatttgctatgctcacatagcattagagggttcttggatacaatagaatttgcttcaatgcaaaacttcattgttttcaagcataatagtatagcagccagggaaattcttcagtagctgattggtgattgccctcacataataatattctttatactaagtcgatatcaattatatgattctgttaatttttaaggactgttggttgaaagaatgtaagtttcag

SEQ ID NO: 5238 - DNA, 375 bp, Glycine max
tctcactaggaggtagtagaggtaacaccaatccccaagaggaaatccctcctccggataccttattctggtgtaacaagaatgatgacgtttcctcttaccaccgaggtagtagcggctttgagctatggaaccagcaacagcttcaacatcagcaacaacagctcatgggccatgaccctcctccgcagccgcgccctctctttcaccaagatctctactccgcgttgggcgttgggcccagcaggcccatctctgacgatcagtcgtcttcgagatccagtttccttcttggagcaagcggtggcggtagcgcatgatgagggattagctgtcaggactgcgggaaccatgctaagaaagactgccctcaca

SEQ ID NO: 5239 - DNA, 615 bp, Glycine max
  unsure (1)..(615): unsure at all n locations
gaaataagaagaagcattttgtgactgaaaaaaggttttagatcgtaaaaactaatcactacgaaaacaagagatatcgaagatggctctgcccaaagctaaggagatcgtgtcgtccaattccgtcgtcgttttcagcaaaacctattgccctttctgcgtcgatgtgaagaagctcttcggtgacctcggtgccaattacaaggccatcgaactcgacactgaatccgatggaaaagagctccaagcagcattagttgagtggacggaccagcgaaccgtgcctaatgtgtttattggtggaaaccacattggtggctgtgactcaacaactgccctgcacactcaggggaagctggttcctctgctgatatctgctggagctgttgccaaatcaactgcttaaaggatctcccatttctaggttatgcagttaaataaaaataaaaacccaagtagttgggtcggttatataattcaggtcccagaaactaatgtgtgtattcctgtgtgattctctttaaactacaactctgtcaaacaagtctattgctgaatgaagttatttttgtttacannnnnnnnnnnnnnnnnnnnnnnnnnnnnnnnnnnnnn

SEQ ID NO: 5240 - DNA, 1676 bp, Glycine max
gattgacatgcatgcagtttcaaatttctgttctggaaagtgcaaaattcccgagggacagtgcccgactggaacaggacctggatggatatgctgcttggattgcaagaccatcaccacaacacggtgggatgatcctccatacaaaattaatgcctcaggaataaaagctcctattggcttcaaaacaatagccactagtgcataccactataacggcgtcttggagtatgatgctcacagtctttatggcttctctcaatccgttgcaactcacaagggccttcaagggcttcaaggcaaaagaccctttattttgtcccgctccacttatgtcggttcaggcaaatatgccgcacattggactggtgacaatcagggcacatgggagaacttgaggtactcaatatccacaatgctcaattttggcatatttggggtgccaatggtgggttcagatatatgtggcttctatccacagcccactgaagagctatgcaatagatggattgaagtaggggctttctaccccttttcaagggaccatgcaaactactactcccctagacaggagctttaccaatggcagtcagtagccgagtctgcgagaaatgctttgggtataaggtataagctactcccattcctttacaccctgaactatgaagctcatgtcagtggagccccaattgccagacctcttttcttctcatttccaacttacaccgaatgctatggccttagcacccagttcttgctaggaggcagtctcatggtttctccagtgcttgagcagggaaaaacacaagtgaaatcactctttcctcctggtagctggtacagtttgcttgattggacacacaccattacgtcaaaggatggagtctatgtcaccctcgacgctcctcttcatgtcgtcaatgtgcatttgtatcagaatgccattcttcctatgcagcagggtggaatggtctctaaggaggctagagcgacacccttcaccctcatcgtaaccttcccatcgggcgccacccaaggagaggctaaggggaacattttcgttgacgatgatgagttgccagacatgaaccttggaaatggctattcaacctatgttgatctccatgcaactgtggaccaaggagctgtgaaagtttggtcagaagtccaagagggcaagtttgccttggataagggttggattattgattctatatctgtgttgggattagaaggaagtggagcagtgtcttcactcgagatagatggaaagcctctaatgggtggtggctcaaatgtgaatgttactacatcagcacatgagcacttgaacaatgagggagaaggagaaaagaagactgtgatggttgctttgaggggcttgaacatcgttgtgggtaaaaactttgccatgacatggaaaatggggtgataggttgtgtggtctcatcttatttttatcatcttgtaactttgtgttctttttctttgctacaattcttgtaggtgtttgtgagggagaagagatgagctagaattatgctcgtccttttccaatttaacaagccgatgcaacactggcttatgtgttgaaatcttcaatgttatgttagtttttttttggggtacgtaaagttgaaacttatcgttatccaagttattttaagattaacaaa

SEQ ID NO: 5241 - DNA, 727 bp, Glycine max
tttcttacgcgtccggatttctctctctacactcctttcagcacagcacaacacaacacaaaaccctttcccaaaaaaataaaaaataaaaaatggaggaatccaaattcggccaaaccgacaagcgaaagcgagttcgcgacgagtcggactcggccctcaactcgcccgactcgttaaagcatccccgagccgagtctaactcgttcgagtctctccgagttgactcggacgagtttgaactcgcccggctcgacccggttcttctcaacatgctgaatgacgcggagaatgtggcggagcgtgaacccaccgtgcttgactctgttattaagagtttcgaagaagaaatactttctccggttccgaacccgaacctagcatccgaggcagatgtgtttaagccgaacctagggtacttattggaagcatccgacgacgagctagggttgccgccgacggtggcgccaagcgaggatgtgttgaaacccgaaacagttgattcggatcgtgttggaccagaaggaatggatctgactgggtttttggggtttgaagatgatattcgtagctacgaaggttttgggtttgtggggtatgatgtgggagataacggtggtggttatgtgacgatagatgggttgtttgactatgcggaacccggtgccgatattttgtggcggtcggagtcgttgcaggctttgtagttggttgggaagattaatta

SEQ ID NO: 5242 - DNA, 958 bp, Glycine max
tctcgagccggaagggagggcgaggaagccacatagagacacaatacagagtgagttgttgctccttcgccacaactctctgccaacatgggtatctccagagattctatgcacaagaggcgtgccactggtggcaagaagaaggcctggaggaaaaagagaaagtatgagcttggtcgccagcctgctaacactaagctgtcaagcaacaagacagtcaggaggatccgtgttagaggtggaaatgtgaaatggagggcattgagattggatactggaaattactcctggggaagtgaagctgtaactcgcaagactcgtgtactagatgtggtttacaatgcctcaaacaacgagcttgtgcgtactcagactcttgtaaaaagtgctattgttcaggttgatgctgctccattcaaacagtggtaccttcagcactatggtgttgagattggtaggaagaagaagacagctgccaagaaggaaactgcagaggagggtgctgctgctgttgctgctgcagaagaagccaaaaagagtaatcatctgcagagaaaattggagaagcgccagaaagatcgtaagcttgatgctcacattgaggagcagtttggtggtgggcgtttgcttgcttgcatttcctctcggcctggtcaatgtggcagagctgacggctacattttggaaggtaaggagttggagttttacatgaaaaaactccagaaaaagaagggaaagggtgctgcttgattttagtgtttcccagatttttatatggctttagttgcttttatgtgttgctggtacaatttaaggtgatgttttgagccacaggacatcgattagtgcaaattatcttgttagtcctttgcaaattgacatcttaattttgttttgaactgtttttttgccaccgacgagttacaatttttattaattgaatgtaatgcaatcctct

SEQ ID NO: 5243 - DNA, 916 bp, Glycine max
cacacttaaaaagggcaaaactaagcaaagcagaaagatcccgtcgtcgcaggcgcagagtagagcagcacagaagagggaaaacggcaccgccgccgtagaagaaaacaaccatggtgcacgtctccttttacaggaactatgggaagacattcaagaagccgcgtcgtccgtacgagaaggagcgtctcgacgcggagttgaagctggttggtgagtacgggcttcggtgcaagagagagctgtggagggtgcagtacgcgctcagccgcatccgcaacaacgcgcggaacctcctcaccctcgacgagaagaacccgcgccggatcttcgagggagaggcgctgctccgaaggatgttccgttacggtctcctcgatgagacacagaacaagcttgattacgtcctcgccctcaccgtcgagaactttctcgagcgccgcctccagacccttgttttcaagtccggcatggccaagtccatccaccatgctagggttcttatcaagcagagacatatcagggttgggaggcaagtggtgaacatcccatctttcttggtaagggttgactcacagaagcacattgacttttcacttacaagtccccttggtggtggtcgccctggaagagtgaagagaagaaaccaaagggctgctgctaagaaggccgcaggtggagatggagatgaggaagacgaggattaaacttttaatcatgtctttttctagtgctattagaccttatgccaccttttactttgcgtacctagtttattgtttttttattgttatacattttcatccttccgttccttgtttgagataatattgagtgacattatgtttttgtgaacttagatattttaaagtatttaagattttcattaaataaaaaaaaaaaaaaaagggcggcc

SEQ ID NO: 5244 - DNA, 752 bp, Glycine max
acgaagccgacagaaggggagagcggctgcgaaatccttgtgcaccgtaagggttgtgaagcaggcagagaagagccatggtgcacgtttctttctaccgaaactatgggaaaacgttcaagaagcctcgtcgtccctacgagaaggagcgtttggacgccgagttgaagctggtcggtgagtacgggcttcgctgcaagagggagttatggagggtccagtacgccctgagccgcatccgtaacaacgccagaaacctattgacccttgatgagaagaaccctcgccgtatcttcgagggtgaagcccttctccgaagaatgttccgttacggactcctcgacgagacacagaacaagctggattatgtgttggctctcaccgtcgagaactttctcgaacgccgcctccaaaccctcgtcttcaagtctggcatggccaagtccatccaccacgccagagtcctcatcaggcagaggcacatcagggttgggagacaggtggtgaacatcccatcgttcatggttagggttgattcgcagaagcacattgacttctcactgaccagtcctcttggtggtggtcgtccaggacgcgtgaagcgaaagaaccaaagggctgctgctaagaaggctgctggtggagacggagatgaggaggatgaagattaaattattaatggcttctgatatttatagaccttgtgctcgtttttttatctgtgtcggtagacattttagatttttgaaatg

SEQ ID NO: 5245 - DNA, 596 bp, Glycine max
tagatcgcgagcggccgcccgcgatctagaactagcggctcgagcgagaactttctcgagcgccgcctccagacccttgttttcaagtccggcatggccaagtccatccaccacgccagagtcctcatcaggcagaggcacatcagggttgggagacaggtggtgaacatcccatcattcatggttagggttgattcgcagaagcacattgacttctcactgaccagtccacttggtggtggtcgtccaggacgtgtgaagagaaagaaccaaagggctgctgctaagaaggctgctggtggagatggagatgaggaggacgaagattaaattattaatggctactgatatttaggccttgcggttgttattttttttatattatctgtgttggtagacattttagatttttgaaatggtctgacttgttataattttgccatccttgtttcttgttttgaggtaaagctgtgcctgagatatcatggttttgaactgttctttctaaactattcaagttttgttccaatgcctgtggtgatcaatggtattcttgcaacttgattcaactgctaatatattggtggttttaggct

SEQ ID NO: 5246 - DNA, 325 bp, Glycine max
gcggcgcacacttggcagaactgaaccgacttcgaattatacctcagccgtcgtgcacgtagtcctatagaggaactatggtacgacattgcagaatccgcgtcgttcgtactagaaggatcgtatcgacgcggagttgtagctggttggtgagtacgggcttcggtgcaagagagagctgtggagggtgcaggacgcgctctgtcgaagtacccaacatcgcgcggaacctattcaacctcgacgagaagaactcgcgccggatcttcgagggagacgcgctgctccgaacgatcgttccgttacgggaatactcgatgagaca

SEQ ID NO: 5247 - DNA, 964 bp, Glycine max
atacaaaaatgtctcctgtggaggtagcaaggaatgccagtgaggatgcacgtgcctatatgttgtcgcgaatatggaagtgcccctgatgtccatatttatggagatcctgattttacttttccgtatgttccagctcacttgcatcttatggtatttgagttggttaagaactcactgcgtgctgtacaagagcgttttatgaattccgataaagttgcacctcccattagaataatagttgctgatggaatagaggatgttaccataaaggtctcagatgagggaggtggaattgcaagaagtgggttgcctaaaatttttacatatctatatagtactgccagaaacccattggatgagcattcggatcttggaataggtgataatgtgacaatggctggatatggatatggtcttcctattagtcgtctatatgctcggtattttggaggtgatcttcaaataatctctatggaaggatatggcactgatgcatatctccatttgtctcgtttgggagattcacaagaacctttgccttgaaagtacttttcagtcagttaccgtaagtaactcagtaacattgtgctagggaaaacaccattgctagcataaaaaacaaaaagtactatttgctgtcaattttttacattctaataatttgacagatttcctgtaaatatgtggtacaaaagattgtgcatggtgatgaccccccttctttgccttcagatccagctttgggaatttgttctttttatcttctgaaaaaaaaatgaatatgcccttttatcctaaagtattgatgcgtatgggggcaggttaaagatggagatattccacatgattttaaaaataaataaggtcatgctactgtgccttagcatgtgccccttattgagtaggggaacatttttgtgtggttccccagcaatccaaataaattgcatctagatccctc

SEQ ID NO: 5248 - DNA, 680 bp, Glycine max
  unsure (1)..(680): unsure at all n locations
caagacctgcaggtgtaggtcttgcaggtgtaactgcctgtccgttgcggaggattccggagtcgtagacgggagtgaaatcaggttggaagacctacacctacaagacctgcagctcctacaaaacctgcacctgcagtaggaggtcaaaaatggtgtgtgccaaaggcagatgctagcaaccaagctttgcaagcaaacataaactatgtgtgcagccaaggagttgattgtaggccaattcaaccaggaggagattgctttgcagccaacaacgttaaggctcttgccacttatgccatgaatgcctactaccaggccaatgggcgccatgatttcaactgtgacttctctcaaactggtgttattactactactaatccaagccatgataaatgcaaaatctgagcatgtttatttaaaggttataatcagaggcaagaaaggaagatagagaaaagcccattgtcatggtgtcaatgtggcttagtggtatctgtgactctgagattatgcattcatgtactcaaaattatttagtttgtatattgttctggaagaagaatgttggcatggtatttcgtgccttgactagatatgatggtccatcgactactaaataggaactttgcattaatattaacatcattcgtagctgnnnnnnnnnnnnnnnnnnnnnn

SEQ ID NO: 5249 - DNA, 1268 bp, Glycine max
cccacgcgtccgcccacgcgtccgcggtcctaaaaaatagttcacaatccctatccctcctctcttgttatatatagacacaaacgtaagaccttttgtttcttacttgtaataattcttataacacaacacaacccatggccaccacctccgcattcctcctccttcccctcctcctgctgctccacctcgccatcgccgctcacggcatcggcatcaactacggcacgctcggcgacaaccttccaccgcccgcggcggtggcgaacttcctgaagacgaagacgaccatcgaccgcgtgaagatctacgacgtgaacccggacatcctgcgggccttcgccggcagcggcatctccgtgacggtgaccgcccccaacggcgacatcgccgccttaaccaaaatcgactcggcgaggcagtgggtggcgacgcacatcaaaccctttcaccctcagaccaaaattaattacatcctcgtcggcagcgaggttctccactggggcgacaccaacatgatccgcggcctcgtccctgccatgagaacccttcactcagccctcctagccgagggcataaccgacattaaggtaaccactgctcactctctggcgataatgcggtcatcgataccaccaagtatgggcaggttcaggcccgggtacgcaaagcacgtgttgggcccaatgctgaagtttctgagggagacgagaacacccttgatggtgaacccgtacccgtacttcggttacaacgggaaaaacgtgaactttcttctgttcaggcccaaccgaggcttgtacgacaggtacacgaagaggagttacacgaaccagttcgacgctctgatggacgcggtgcactcggcgatgaatgctttggggtacggtgacgtggacatcgccgtcggcgaaacggggtggccctccgtttgcgacggttgggacgcgtgcagcgtggcgaacgcgcagtcctttaacagggaactggtgaagcacctggcgacggggaagggaacgccattgatgccaaaccgaagcttcgagacttacatcttcgcgctcttcaatgagaaccaaaagcccggcccaatagccgaacgcaactggggcctcttccaacctgatttcactcccgtctacgactccggaatcctccgcaacggacaggcagttacacctgcaagacctacacctacaagacctgcagctcctacaaaacctgcacctgcagtaggaggtcaaaaatggtgtgtgccaaaggcagat

SEQ ID NO: 5250 - DNA, 482 bp, Glycine max
gaacgccattgatgccaaaccgaagcttcgagacttacatcttcgcgctcttcaatgagaaccaaaagcccggcccaatagccgaacgcaactggggcctcttccaacctgatttcactcccgtctacgactccggaatcctccgcaacggacaggtttaatcttttttttttaacttttcaccttaacactaataatgataagtgcaggtaccacacccctattaaaaagagagtcattaaatattagtaagacctaaagaaatatgatttttgtgaaattagtgttttatttattagttttttacgtataaaataatggaaaaaaagagataattatgatctctttgtccttttactttttgctttttcagtttttctctccaagatggagtacaatacacaattcgagatgcaccggcctgtaaagccgtcgattattgtgaaccttttgtggttgataatttaaatagcacccccctc

SEQ ID NO: 5251 - DNA, 396 bp, Glycine max
acaaaatgtgtcttgttgtaaaggagaaatccatagtaatttggagcaatcagatcagaaattatgcttggtatcacttttaaggtattagttattataaacaccaccaacaaagggctacataattatcatccacgacaatttttaattggttgcacatgtgaaaatccttgagactgtttgtacgtatgtagtatttgcttaataatattacatttctactcagataaatttcttaccatcatgtaatgttgttgttgagacatttttgaatgaataaatgcaggcagttacacctgcaagacctacacctacaagacctgcagctcctacaaaacctgcacctgcagtacgacgtcaaaaatggtgtgtgccaaaggcagattgcaaccatcc

SEQ ID NO: 5252 - DNA, 948 bp, Glycine max
tgaagaaaaagaaaactagtaatatggcttcaagaactatatgttttaccattcaagtgactcttgtagtagcttttctaacaacaaaggttgttttatctgatgacactgtgccaattcccgcgaacaaagcacaattaggtgaatggtataatactaatgtggggcctttagatcaaagaaagagcaccgtggacccagcattggtgactgctgaagaaggcgctaaggttgtaaaggtgatgcaagatggcagtggggaattcaagaccatcactgatgccattaaaagtatacctagtgggaacactaagcgtgtaattatttacattggagctggaaattataatgagaaaatcaaaattgagaagacaaagccttttgtcaccttgtatggggtaccagagaaaatgccaaacttgacttttgggggcactgcacaacaatatggcactgttgatagtgctacattgattgttgaatcagattattttgtggcagctaacatcatgatctcgaacactgcaccgagacctgatccaaaaacgccaggaggtcaagcagtggcattgcgtatttcgggtgacaaagcagcattttataattgcaagatgtatggattccaggacacaatttgcgatgataggaatagacattttttcaaagactgcttaattcaaggcaccatggattatatttttggaagtgggaagccactatatctgagtactgagctaagaacgcttggcgacactgggattactgttatagtggcgcaagcaaggaaaagcccgacagaggacaatgcctactcatttgtacattgtgacgttactggaactgggactggcactgtcttgggcagagcatggatgcctcatcctagagtggtctttgcatacagcaccatgagtgccgttgtgaaaaaagaagggtggagtaacaaca

SEQ ID NO: 5253 - DNA, 2398 bp, Glycine max
cgttctcataaacacaaaaacagatagacacgaagatactcacaaagagggagattgaaggagggatatcagatccctatttgtatttggggttgtctttctgaacaaccccatcatatatcattaagaggggtatcaagatcaatccttgattagcaagatcataaattttcattcatatacacaatttacatatcgtaacaagatcacatttgttttgttttgtgttgtttgtgttgttgttgtgttgttgatctcataataacaacatggagggtgagaacaagaagtacatcacatctgaggagctgaaggagcacaataagccaggggatttgtggatttcaatccaagggaaggtttacaatgtttcagattgggcaaaggaccaccctggaggagaggttcccttgttgaaccttgcaggccaggatgtgactgatgcattcgtagcataccatccaggctcagcatggaagtatcttgatcccttcttcacagggtaccacctaagagatttcaaggtctcagaggtgtcaaaagattacagaaagcttgtgtctgagtttgtcaaaatgggtctttttgagaagaaagagcatgttactctttacaccctgtcctctgttgctgtcatgttttcaattgttgtttatggtgtcatagggtgcagtagtgtgtgggctcatcttggtgctgcccttttgttgggcttgctttggatgcaaagcacttacgtgggtcatgactctggccactatgaggttatgtctagccctggctacaacaaattggcacaaatcctttgtggcaattgcatgactgggataagcattgcatggtggaagtggactcacaatgctcaccacatctcatgcaatagtcttgactatgatcctgatctccagcacatacctgtctttgccgtgtcgacacggttcttcaattcaatcaaatcttgtttctatggaaggaaattggtgtttgattcattatcaaggtttctcatcagctaccagcacttcacattctacccagttttgtgctttgcaagggtcaatttgtacctccagactttgttgctgttgttctctaggagaaaggtgccagatagagcctttaacataatggggatccttgtgttttgggtttggttccctctgttgatctcttcactaccaaattggggagaaagggtcatgtttgtgttggccagttttgctgtttgttcaatccagcaccttcaattttgtttgaaccatttctcagcagatgtgtatgagggcccaccaaatggcaatgactggtttgagaagcaaactggtggcacattggacatttcttgctcctcatggatggattggttctttggtggcttgcaattccagcttgagcaccatttgttcccaaggcttccaagggcacaattgaggaaaatctcacctttggtgattgatctttgcaagaagcacaatttgccttacaggagtttgacatttgttgaggccaatctttggactcttaagaccctcaggactgctgctcttcaggccaggaatctcagtaacccttcttcccagaatttgttgtgggaagcttttaacactcatggatgatttttgtgaaaagattgatgatcatcaatcaagtttctctcttttttttcccacccttttgaaaagcttttaatcaacatcttagttgtcaatttgttagatctcacatttcttaattgggcatggaatttttaatctcccttttcttgggtaaggaataaaatgatgatcacttgttattatgcaaaattcatatcagattcagaggctattctggtgggttcagcaagaaatctattacttggttaatctcccttttcttgggtaaggaataaaatgatgaccacatgttattaagcaaaattcatatcagattcagaggctattctggtgggttcagcaagaaatctattacttggttaatctcccttttcttgggtaaggaataaaatgatgaccatatgttattatgcaaaattcatatcagattcagaggctattctggtgggttcagcaagaaatgtagtacttggaggagcgcaactcggatgacttgttttggggtactaattgctttgcttattttatgtttttatgattttgtatttgtattcttttatggtgaattttttatgatattgttgtaaacccaacatatgtagaagaatcttttcatttaggtgtgcaacttcgtgctgagtagtttactacgaagttgggtccacccgtggttgcttccacgtgaaaatttcgtacataataatacttccaaattcgtgttcaaaaattcataacccagtaaaagggcggccgccgatcagtgagctcgtccacccgggaat

SEQ ID NO: 5254 - DNA, 689 bp, Glycine max
atagacacaaagatatacacatatagggagaggctgaaggaggggcatcagatccctactttgtataaatggggttgtctttctaaacaaccccatcacatcattaagagggggggatcgatccttgatttgtgaatttgcttgcattagcaagatcatatatattcattcatatacacaattacatatcaagatcacattttttttggtgttcttgatctcataaacaacatggagggtcagaacaagaagtacatctcatctgaggagctgaaggagcacaacaagtcaggggatttgtggatttcaatccaagggaaggtttacaatgtttcagattgggcaaaggaccaccctggtggagaggttcccttgttgaaccttgcaggccaggatgtgactgatgcattcatagcataccatccaggctcagcatggaagtatcttgatcccttcttcacagggtaccacctgagggatttcaaggtctcagaggtgtcaaaagattacagaaagcttgtgtctgagtttgtcaaaatgggtctttttgagaagaaagagcatgttactctttaaaaaaaaaaaaaaaaaacaaaaaaaaaaaaggggcgcccccgaacaaaggaactcttcaacccgggatttatttcggaacgggaactttaggggtttcgattttccccaaaagg

SEQ ID NO: 5255 - DNA, 1292 bp, Glycine max
cgaggagttagagcatcagattttggtcccaaagcaagcttttggatggattttcctaaagaaggttctcaattaacacctactcatcagtcagatgattttaaatggaaagattattgtcccatggtgtttaggaatttgagagagctggtcaagattgatgctgccgattacatgatgtccatttgtggaaacgatactctgagggaactatcttctccggggaaaagtggtagtgtcttcctcctgtctcaggatgatcgtttcatgatcaagacactgcgaagatctgaagtcaaggtccttctaagaatgcttccagactatcatcatcatgtgaagtcatatgaaaatacacttatcacaaaattttttggtctgcacaggattaaaccttcaagtggtcaaaagtttcgctttgttgtaatgggaaatatgttctgcacagaattaaggatccataggagatatgatttgaaaggttcatctcttggacgttcttcggacaagatagaaattgatgaaaacaccactcttaaagatttggatctgaactactgcttctacttggaaccatcttggcaggagtctttattgacataatggattacagcctcctcctaggtgttcattatcgagctccccagcagctgcatccatacaaccaaaatagaactgcagatggattgccaatgcttgcagaggaagaccctctagaggatgaaggatccaactatccgcaaggccttgttctggtccctcggggtgcagatgatgatagtgttgttgtagggtcacacattaggggtagcagattgcgagcttcggctgctggggatgaggaggtggatctacttctacccggtacagcaagactacaaatccagctaggtgtgaacatgcctgctagggcagagcagattcctggaaaagaggaagttcaaatgttccatgaggcttacgatgttgtactttaccttggtataattgacatattgcaagagtacaacatgactaagaagattgaacatgcatacaaatctattcagtttgattcattatctatctcggcggtggacccaacattctactcgcgtcgcttcctggattttattcagaaaatgttccccccacatgaaatggcaagataaggtttgggggttaaattcaaccagttggtttattcagaaagtgtgtacattgtcacattgcctccttttgtgcatgctgtataattgacttgaatatgtttagattttatataaatatgctaaatggtcttttctattttc

SEQ ID NO: 5256 - DNA, 574 bp, Glycine max
ctcacacatgaggggtagccggttgcgagcttcatctgctggtgatgaggaggtggatctacttctacctggtacagcaagactccaaatacagcttggtgtgaacatgccatcaagggcagatcagatttcaggaaaacagatacaagaaaagcaaatgtttcatgaagtgtacgatgtggtgctgtaccttggtatcattgacatattgcaggacttcaacatggctaagaggattgaacatgcttataaatctcttcagtttgattcattgtctatctcagctgtggaccctacgttctattcgcatcgcttcctggaatttattcagaaggtgtttccaccaaatgcgacgacaggttaatcaagataattttggggttatatttaaccagtaagtttatttagaaagtgtgaatattgcacttttcatgcttgctccagaatttttatagtaggtggccacgtgggcaccttgttgatggtggtaataggaatcaagtgaataatgaggtaaatagatttatctcatgtaaagtgagtaaatatataataaaaaaaaagtgttatattt

SEQ ID NO: 5257 - DNA, 611 bp, Glycine max
tccttccggcctaaggatgatcgtttaatgggcaagacactgcgaagatctgaagtcaaggtccttctaagaatgcttccagactatcatcatcatgtgaagtcatatgaaaatacacttatcacaaaattttttggtctgcacaggattaaaccttcaagtggtcaaaagtttcgctttgttgtaatgggaaatatgttctgcacagacttaaggatccatcggaggtttgatttaaaaggttcttcccttggaagatcatcagacaagatagaaattgatgagagtactacgctcaaagatttggatctgaactacagcttctacctggaaccatcttggcgagagtctttactaaagcagattgaaatagacagcaaatttttggaagcacagcacattatggattacagccttcttctaggtgttcactatagagctccccagcatctacgttctcacgtttcatacaaccaaagtagatgtagtggatggattagcaatgcttgcagaggaagatcctctagaggatgaagtattctatccgcaaggccttgttctagttcctcgaggagagagtgatgacagtgttgttgttggctcacacatga

SEQ ID NO: 5258 - DNA, 376 bp, Glycine max
cttccatttctctcgcggtctctcttgtcttccatgccgtgacttgcttcaacgtctatatgctgtgactgtcactgctatagcgacacactttcacacaaatggcgtgtggctataagtaccagtttttgtttcttcactctcattccttctggaggaagcttccgttcccgcgccacgttaccgcctcgggtttcacttgcaatcttcaaaccccgtcgctgcttctttcttcgcgctcgcgcgcgctactctctaagagctacttcagaatcgccgggagccgttcccgcaactccgcgaagtgccgccgcgtcggggacgttgattcccgaagccggaatcggaatcggaaccggaaccgctcaagcgctgc

SEQ ID NO: 5259 - DNA, 1078 bp, Glycine max
  unsure (1)..(1078): unsure at all n locations
gcttgactccatgccgcgtcgtagctcgaatcgctcggctcggccgtgggaaaagacgaccttggagagcgttcttgttgtacggaccgccggggacggggaaatcgtatttggccaaggccgttgccacagaagctgattctacgtttttcagtgtttcttcatcagacctggtttcaaagtggatgggagaaagtgaaaagctggtctcaaatcttttccaaatggctcgcgaaagtgcaccttctatcatattcgttgatgaaatagattctctatgtggtcagcgtggagaagggaatgagagtgaagcttcaaggcgtattaaaactgagcttctggtgcagatgcagggtgtaggacacaatgatcagaaagttcttgttcttgcagctacaaatacaccttatgctctagaccaggcaataaggcggcgtttcgataagcgtatatacattcccctacctgatttaaaggctcgccaacacatgttcaaggtgcacctaggagatactccccataacttggctgaaagtgattttgaacatttggctcgcaagacagaggggttttcaggttcagatatatctgtctgtgtgaaggatgttttatttgaacctgttcgcaaaacccaagatgccatgtttttctttaggaatcctgagggtatgtggatcccatgtgggccaaagcaacagggtgcagtgcaaactacaatgcaggatattgctgcgaaaggacttgcttctaagatcctcccacctcctatatcgagaacagattttgacaaagtacttgctagacaaagacccaccgtaagcaagtctgaccttgatgttcatgagagattcacaaaggagttcggagaggaaggataattctgacggaatttttcttcaatcatctgcactagcttaaacatgttatgatttgtaatttacagtgctattggatcaagtgaaatgcatatttttactaatcataatttgtgtataaaaacagactgatgaaatgatcagaaaaataaattttatgtgaatatgtgattccagttactcnnnnnnnnnnnnnnnnnnnn

SEQ ID NO: 5260 - DNA, 984 bp, Glycine max
ccctcgcgtccgcccacgcgtccgcccacgcgtccgccctcgcgcaaacaaaacaccctttccttcttcttcttcttcttcttcgttccgatcagattcttcgaattctgaatcaaaattcatcgaagaagaaggagaaggagatgtatagcaatttcaaagagcaagcaatagagtacgtgaaacaagcggtagatgaagacaataagggaaactacgcgaaagcgtttcaactttacatgaacgcgttggagtatttcaaaacgcacctcaagtacgagaagaaccctaagatcaaggaggccatcacgcagaaattcaccgagtatctccgccgggccgaggagatccgggccgtcctcgacgatgggcccagcggcccggcctccagcggggacgccgcggtcgccacaaggcccaagacgaagcccaaggacggaggcaaagatggagacggcgaggatcccgagcaggccaagctccgggccgggctcaactccgcgatcgttagggaaaagcccaacgtgaagtggaacgacgtcgcggggtttgagagcgccaaacaggccttgcaggaggctgtgattttgcctgtgaagttccctcagttctttactgggaaaagacgaccctggagagctttcttgttgtatggacctcctggaacgggaaaatcatatttagccaaggcagttgcaacggaagccgagtccacgtttttcagtgtttcttcatcagaccttgtttcaaagtggatgggtgaaagtgaaaagctggtttcaaaccttttcgaaatggctcgagaaagtgccccttctatcatatttattgacgaaattgattccctgtgtggtcagcgtggagaaggcaacgagagtgaagcttcaagacggattaaaacagagcttctggtgcagatgcagggtgtaggacacaatgatcagaaagttcttggtcttgcagcaacaaatacgccctatgcct

SEQ ID NO: 5261 - DNA, 1055 bp, Glycine max
tccccttctgtcctcgaatttccgatcaattccgatttcaacaacagctagggtttcgaaatcgaccacaccttctcctccctctttccccaacacacacgatcgcgatgcacctctagggtttctccctctccctggttcgaaatttcgattctcgtacatgccatcggtggtgaccggaggagcaagacgatgtatagcaatttcaaggagcaagccatagagtacgtgaagcaggccgtgcaggaagacaatgcgggaaactacgcgaaagcgttccctctctacatgaacgccttggagtacttcaagacgcatctcaagtacgagaagaaccctaagatcaaggaagccatcacgcagaaattcaccgagtacctgcgccgggccgaggagattcgggccgtgctcgacgatggcggccccggcccagcctccaacggggacgcggcggtggctgcaaggcccaagaccaagccgaaggacggtgaaagcggtggcggtggtgacggcgaggaccccgagcaggccaagctccgggccgggctcaactcggccatcataagggaaaagcccaacgtgaagtggaacgacgtcgcagggttggagagcgccaaacaggccttgcaggaggctgtgattttgcctgtgaagttccctccgtgcgtttctgggaaaagacgaccctggagagctttcttgttgtatggacctcctggaacgggaaaatcatatttagccaaggcagttgcaacagaagctgagtccacgtttttcagtgtttcttcatcagaccttgtttcaaagtggatgggtgaaagtgaaaagctggtttcaaaccttttcgaaatggctcgagaaagtgccccttctatcatatttattgacgaaattgattccctgtgtggtcagcgtggagaaggcaatgagagtgaagcttcaagacggattaaaacagagcttctggtgcagatgcaggtaatagttttaatagtttgttagtttacatttgaattgcaatatatagcatatgcacatcaagttgtcaagacgcc

SEQ ID NO: 5262 - DNA, 769 bp, Glycine max
gggtttttctggttcagatatatctgtctgtgtaaaggatgttttatttgaacctgttcgcaaaacccaagatgcaatgttcttcttgaagaatcctgagggtatgtggatcccgtgtggaccaaagcaacagggtgcagtacaaacctcaatgcaagagcttgctgcaaaaggacttgcttctaagatccttccgccccctattacgaggacagattttgagaaggtactcgctagacaaaggcctacagtaagcaaagccgaccttgatgttcacgagagattcacgaaggaatttggagaggaaggttaaatactgatggaattttcactttgaaggtccacactggtttcaaatatattgttataatttgtaatttattagccgttggatgcaaatgaaatgcatctatttcattttgttttggggatgtaaagtccccttttgtatcgaggtggatttataaaggtcgatactcatttttcttcttctaaattgtgtataacagaatctgaaatgatttgaaaaaataacttgtgtgatgctgggttcttatttttgtctcctttggatttaggatagccatagatttgggtgctttttagtttcgagatggatcagatactcagcaaatgtgttgcactaagctactgcggatgggactaacgagactcatcataaaatatgcctcgcagattagggtattaggcttaacataaaaaagtgtttactaaatgtgataatagaatggttttttattcacctgct

SEQ ID NO: 5263 - DNA, 320 bp, Glycine max
gttctgcttacttttttatttttattgagtcaatgggatgccgttttggttaatcaacttgatttaaaggctcgccaacacatgttcaaggtgcacctaggagatactccccataacttggctgaaagtgatttcgaacatttggctcgcaagacagaggggttttcaggttcagatatatctgtctgtgtaagtttgacttctatatttaaacctggttagaataatgatcattttatttggattagtgttaaaggtaattggacctattctacaggtgaaggatgttttatttgaacctgttcgcaaaacccaagatg

SEQ ID NO: 5264 - DNA, 645 bp, Glycine max
cccacgcgtccgatttgcatacaccccattcattggacgatccgagagggtcttctccgtccctgatttctccccacagaccttgcactgatgtcgcaggagaaatagttgagatcggaactcaagtcaaagatttcaaagttggcgaccaagtccttgctaaactcactcatcaatatggaggtgggtttgccgagtttgctgtggctagtgagagcttaacagcagccagaccatctgaggtctcagccgctgaagctgcagcattgccaatcgccgggcttacagctcgtgatgccctcactcaaattgcaggagtcaagcttgatgggactggccagctcaagaacattttagtaactgctgcttcaggtggtgtaggtcactatgctgttcaactagcaaaactaggcaacacccatgtcacagccacttgtggggctcgcaacattgactttgttaagggcttaggtgccgatgaggttcttgactacaggactccagagggggctgcactgaagagtccatctggtaggaaatacgatgcagtgataaattgtacaactggaatatcttggtcaacttttgatcctaatttgactgaaaaagcggtggtagttgatttaacacctaatgcaagttcat

SEQ ID NO: 5265 - DNA, 564 bp, Glycine max
  unsure (1)..(564): unsure at all n locations
cttacttaaactcaggaattcggcccaaaagataaggcaatgaatctgatgcaggcggttcgctacgacgcctacgggggaggtcctgccggcctcaagcacgttgaagttgccgttcccagtccaaaggcaaatgaggttttaatcaaactggaagcagttagcattaaccctattgattggaagattcagaagggtcttctccgtcctttatttctccccagaacctttccccacataccttgcactgatgtggctggagaaatagttgagatcggaactcaagtcaaagatttcaaagttggcgaccaagtccttgctaaactcactcatcaatatggaggtgggtttgccgagtttgctgtggctagtgagagcttaacagcagccagaccatctgaggtctcagccgctgaagctgcagcattgccaatcgccgggcttacagctcgtgatgccctcactcaaattgcaggagtcaagcttgatgggactggccagctcaagaacattntagtaactgctgcttcaggtggtgtaggtcactatgctgttcaactagca

SEQ ID NO: 5266 - DNA, 660 bp, Glycine max
gagaaatcaaattctttcatcatcaatgatataaactccttgctcctcttgactcattcaattcactcccaatatgatggaattggaagccaccgccgctacttctccaccttctcgcgttctcctcatctccgccggtgccagccacaccgttgcccttctctctgggaatgttgtgtgctcgtggggtcgcggagaggatggacagttaggccatggtgacaccgatgatagactcttacccactcatctcagtgcattggatgctcaacaaattgattctattgcatgtggagctgatcatacccttgcgtattccgaatcacgcaatgaactctatagttggggatggggtgattttggaaggttgggtcatggcaattctagtgatttgctcattcctcagcctattatagcattgcaaggtctaaggataaagcaaattgcctgtggggatagccactgtttggcagttaccatggaaggcgaggttcagagttgggggaggaatcaaaatggtcaacttggacttggcacctcggaggattctcttgtgccacaaaagattcaaacatttcagggagtacctatcagaatggttgctgcaggtgcagaacacagtgtagctattactgaaaatggagaactgtatggaggggg

SEQ ID NO: 5267 - DNA, 845 bp, Glycine max
aatttttaaaaatattcttattttaaaaaattcctaaaatattttttgttgaaaaatactactgaagagtgaagatttatcaaattgcccacgggtatttgactcgtgcgtttggtcgagatctgaactgaaaccgctgctccgatctgaggccatggctgggtctgggagttccatgctgtattcctttcttctcttcacagtcattctctcacttcaagaaatgtaccgagggaaactagcatcatcagaattatacactatacttggagggtttgttagctctatcctatttcttgtgctcctaaccttcattggaaatttgcaggaaacaattggtgcaagaactggttggggagctgtcatagttgcagaagcagttgctctgattgctgcaagcactgtccaccgagtttgcatcactacatgtttcctgttctcggctgcattgctgtatgaagttaacaagatctctgggtcagcgctttcaacaagtgactccaggattaaaaagcaaagtggaagagcttaagcctttgtatgcttttactataaaggcctctttagaaaattttcccaggagcattagttttataactctagcatcataacttctaagaagagtgttttaagtttgtctgactttgtacaatttcaatgatatgatttgaattttgaaagaggtgcgtctaacgaaaaatcagtcagtcatttttttttctcacaggtggccctctctgcttaatcaaaaataatgcaaaaacgagttacgagggatctaaacttttgatggatccaacttaaatatattgaatggttctggattttgtacaaaaaaaaaaaaa

SEQ ID NO: 5268 - DNA, 973 bp, Glycine max
  unsure (1)..(973): unsure at all n locations
nnnnnnnnnnnnnnnnnnnnnnnnnnnnnnnnnnnnnnnnnnnnnnnnnnnnnnnnnnnnnnnnnnnnnnnnnnnnnnnnnnnntaaaaaaattcttttaaaatccttctaaaattctaattcagtacatcccattaaacttttattgctttcacagatatgtcaagacatcctaataatggagtggaaactaaagaaacacgcataacaaaacgattcagacagatacaaagtgattcatacttgatctcatataagattactttcttaggtacatgccaaacgtttttctctaataaacttagcaaaagccaccattttctcatggtctgggaggttttctttaataactgcaacatccttgaaattattataccatgaatgcaagtgagggaatttctcatcttccaggaccttcgcgtcaagaatatcttctgcaaccacaagaattttgaatatggacccaaaagctatgtccataatgttaataatgtctcccccaaaaaatttcttctgatcaccaaaacactgattctcaacaaccctgagatgctcccatatcttctctatgctcttttctcgctcttcatcattattgctaaggaagaatgcaataactgcagaaaacatgtcatcatcagcatatttaacccaaaaccttgccagagctctctcgtagggatcagcaggaagtaatgaattatgtgaccaaatctcatcaatgtattcaacaataagcatggactcacataagggttttccattatggacaagcactggagttttcttgtatactgggttgtattcaagaagttgaagactcttattgtagcggtcttcttctatgttttgatatggtatatcctttaactttaaggtccataccaccctcaaagtgtagggactataccaaaatccatgaagcttcacctctgccggcgcctggctcggaaatgcagattccggtacgagc

SEQ ID NO: 5269 - DNA, 772 bp, Glycine max
atgagaaccagttatgcagtgatgatcctgaaagtgatgatgaagccaaagatagtgatgttatatcagacgatgacgacgagagaagttctgatgacgaagctgatgttagtgatgctgatgaagttaagggggatgacattgaagacaatgaacaagctgatggagaggatagtgatgtttcagaacatgaagaagatggtgatctgcattctttaagtgatgatggacttgtgacaaaaagtacaatgaaagactcagcaaaaaagaggaagtttactgattttaatggtcaactgatagctgctgatacaagtctccgggctctgaagaaattagctgggagacaaatgggggatgtcataaccagaatctaacgacggaattctttctaacgaggacttcaagaggatcaaagaactgaaggcaaaaagtgaggcaaaaaatgcgttggctcagcaagggctagcgaagtcagctgcaactaaggttccaagctctggtcaactaaatctaaagcgagtggatggtaccatgcttgaagctcacataaggaaaaagttgaacaaggatgaaaggttggcattggttagagcaggaagggaggaaagaggaaaataccaagctcgaactgctgtgaaacagaataagacgggtgggttaagcaacagacaaaaggaacacaagaagaaaatgcccttggctgcaaagagagataaagtatcaagaactcggatagagaaaaagaggaaaaatcagcgatctggcaaac

SEQ ID NO: 5270 - DNA, 2501 bp, Glycine max
aaagcggagaggttatatgaatctcagggtggtccaataattatgtcccagattgaaaatgaatatggacctatggagtatgaaattggtgctgctggtaaagcttacactaagtgggcagcagaaatggctatgggacttggtactggggttccatgggtcatgtgcaagcaagatgacactcctgatcctcttattaacacttgcaatggcttctattgtgattatttctctccaaataaggcttacaagccaaagatgtggacagaagcttggactggctggtttactgagtttggaggtgcagttcctcacagacctgctgaggacttggcattttcaattgcaaggtttatacagaaagggggatcatttgtcaattattatatgtatcatggcggaacaaattttggtcgaactgctggtggcccctttattgctacgagctatgattacgatgcgccccttgatgaatatggattggccagacagccaaagtggggtcatctgaaggatttacatagagcaataaaactctgtgaacctgctttagtatctggagatcctactgtacaacggcttggaaactacgaagaggctcatgtttttagatcaaagtctggggcttgtgctgcattccttgcgaactataacccacaatcttatgcttcagtggcatttggaaatcagcgttacaacttgcctccttggtctataagcattcttcctaactgcaagcacactgtttataacactgcaagcggttggttctcagagcacaacaatgaagatgactcgtgttcctattcatggaggactatcttggaaagcatttaatgaagaaacaaccactactgatgatagttcgttcactgtgactggcttgttggagcagataaatgcaaccagagatttatctgattacttgtggtactccacagatgttgtgatcaattccaatgaaggatttttgaggaatggaaagaatcctgttcttacagttttgtctgctgggcatgctttgcatgtttttatcaacaatcagctgtcaggaactgcatatggaagcttagaggcccccaaactaacctttagcgaaagtgtgaggctcagagctggtgttaacaaaatttctcttctaagtgttgcagttgggcttccgaatgttgggccacattttgaaagatggaatgctggtgttcttggcccaattacattaagtggtctcaatgaggggagaagggacttaacttggcagaagtggtcatacaaggttggtcttaaaggtgaagccttgaatcttcattctcttagtggaagttcctctgttgagtggcttcagggctttttagtttccagaagacagccattgacttggtacaaaactacctttgatgccccagctggagttgcaccattggctttagacatgggcagcatgggcaaaggtcaagtgtggataaatggacaaagtctgggccgctattggcctgcttacaaagcatccggttcttgtggttactgtaactatgctggaacttacaacgagaagaaatgtggaagtaactgtggccaggcttctcaaagatggtatcatgttcctcactcatggctgaagccaactggaaatttattggttgtgtttgaggaattgggtggggatccgaacgggatctttttggttagaagggatatagatagtgtatgtgctgacatctatgagtggcagccaaatcttgtaagttatgagatgcaagcttctggcaaagtcagaagtcctgtgagaccaaaagcacatttgtcatgtggacctggacaaaaaatatcatcaatcaagtttgctagctttggcactccagtagggtcttgtggaagctaccgcgaaggaagttgtcatgctcacaagtcatatgatgctttcctaaagaattgtgttggccagagctggtgcacagtgacagtgtctcctgaaatttttggaggagatccttgtccaagtgtcatgaagaaactctcagtggaagccatttgcacctgatcattttcaatctccgaaaataagtggaataaagtttccatattgatttattctgcaattgaatacatggtctttgggtcaaagtttacacctgtagaccaccagaggcattaatttggctttaccaaggtgaaattgcaaatgagcataacacaccatgtggttgaaagcctgctgggatgattgttgtggttttatgtgtatatatattggtgttgtggttgttatactgaggtggaggagagggtgaaaaagatacctgatgcacattgagacgacatcgattgagtccatgtgcaaattggtttttgtttgtgtggaagtctctagcttcctgtgatgtaatgttataatattaccttgtagtagttgtaaggagaaagcaatttagtgcttttttattataagaaaacaacccaatgtaataacatctggtatattgattcaatcatgttttgctttt

SEQ ID NO: 5271 - DNA, 1106 bp, Glycine max
ttcctcgcgcctactcgggcgtgtcaacgaaatcgcgaacagaacagcaacgttaacaatgggttctcgctacgaggtggaactgaagctctcatcggcacgcgctctcaagaacgtgaactggcgccatggcccgaaccgcccatacgtcgtcgtttgggtcgacccaagcaacaagctctcgacgcgcgtggacgaaagcggcgacactgacgcgaattgggaccaaacgctcacaattccgttgccaccaaagcctctcgaggatcaaacgttgtacatcgacgtggtccacgccggctcggaggaggacaccaagccgcttatcggctcggctcggctcaagctggtggacattctcgacgacgttggaatcggcgagcgcgtgagccgcacgctctcgctgaagcgtccctcggggaggccgcacgggaaggttgaggttagcgtgacaatcagggagcccagctaccgtgcgcagggtgggtacaacgcgcctccttacggcgtgagggattattcccctgcgccgcaggggtatggtgggtatcctccatatggggccccaccacaacaggcgtattattccgctccaccaggtgggtatccttataatgcgccaccgcagccttataatgcgccgcctcacagtggctacggctataatgcgctgccgcaaacggcgtcgtatgggcaggggagcggttacgggtacgcgccacaagaggagaagaagaagagtaagtttggtgggatggggacgggattggctgtgggtgcggttgctggggctctaggtggaatcgcactcgtggagggtgctgagtatgttgaggacaagattgaagatgacgtggcggaaagagtggaggatgatcttggttacgatggtgatgacttctagagagtggtgtgatgtttcaggaggaggaggaggaaaaaaaaaacaaggaataataatattttaagttttttaattgatttttctttttttcagtttctttggcgttcgagttatatcttttagtgttttcttaatgatatcgttaatgatcttatcgatgcttaaaaaaaaaaaaaaaacatataaaaaaaaaatggggggg

SEQ ID NO: 5272 - DNA, 1237 bp, Glycine max
ttaatactcactaataaaaagcgaaggggtttccgagttttgaaggagagagagagagacgcatttgtaacgacaaagaagcagaaggtgtagtaatactgagtggtcaaattaaggatcgggattcaggaatttccattctgagacacacagaagaacagaaagaaactccttttaattttcaatttcaagtcaagatcgatctgacatcatagaaaatgaccatggatgtcgttcagctgcagaggaagctgcgcgaacaccaagccgctatgtttcaacagggttttttggatgatcagttcagccagcttcagaaactgcaagatgagagcactccagattttgtgattgaggttatcactatgttctttgatgattctgagaatctcctaaaaaacatggcacgttgtctagaacaagtgccagctgatttcaaacaaatagatgctcatgctcatcagtacaagggaagcagtgccaggtgtcatactacattacttttttttttctagtaaattatacggagattcctgtgttatctcacgagtgaaatttacttttctttttaatcctgtggaaatttgcttatgtgtgatattgtttaatttgttcaacagtattggtgctgctagagttaaaaatgtgtgcgccaccttcagagctttttgtgaggctaagaacctggaaggatgtatgagatgtctatcacagttgcaacaggagtactctctactgaagaacgctctacagtacttattcaatctgcagcaacaaatcaaggctgctggtggttccattcccacacaatagagtagatgagtgataaaaaagtgaagcttttgatggagctgctgattttgttctttttttatcttttcctggattactcgttcagaattacgtccaaggtttgaacgatggattatggtgctgatatgatgaataaacatttcttgcctagtttgtcgcatacatacatgatattatattattcttctccactaaactgtagttaagtttgaagtttcctatgtttactcgttagggtgataatgtttatcgttcactcatttgttaaagtaaatgcgtatatttgtagtgtttagctctttgaactcttctgttcacttcaaagaatttatttggaaagtgtggaattaatagcccttcaactgtaagagatatgtttgtaaggttattagtttgaaaacagcggtacgcaaattcttgtact

SEQ ID NO: 5273 - DNA, 2054 bp, Glycine max
ggacatccattcaattattatttattcgttacgaccttccacctttttcttgtgtgtgcgttcctaacattattgtttcctaccaagttctctgtctggggagttcttagcaccaccaccagcttctgcagtagctttaagctacgaaagattttccttgaccatggggcaaaagcatttagtgacggtgttctgtttatgggctttaacatgttcccttcttccatctttctcctttggaattctgagaattggtttgaagaagagacctctagatcttgatagtattaatgctgctagaaaggcaagagaaggtctaagatctgtaagaccaatgatgggtgcacatgatcagtttattggtaagtcaaaaggtgaagatatagtacctttgaagaattatttggacgctcaatattttggtgagattggaattggcacacccccacagcccttcactgtagtgtttgacactgggagttccaacctttgggttccatcatcaaagtgctactttactcttgcttgctatacccataattggtacacggctaagaaatcaaagacacatgtcaaaaatggaacttcatgtaaaataaactatggaactggatcaatatctggtttcttcagtcaagataatgttaaagttggcagtgctgttgtcaagcatcaggatttcattgaggctacccacgaaggaagtcttacctttctgtcagcaaagttcgatggaatactgggacttggatttcaggagatctcagttgaaaatgctgtgcccgtatggttcaaaatggtggagcaaaaacttatcagtgagaaggtgttctctttttggcttaatggggatccaaatgcgaaaaaaggtggtgaattagtttttggtggtgttgacccaaagcacttcaaaggaaaccacacttatgttccaattactgaaaaaggttactggcagattgaaatgggagattttttcattggaggtgtttcaacaggtgtttgtgagggtggctgtgctgctattgtggattcaggaacatctttgcttgctggtccaactcctgttgtggctgaaatcaaccatgctattggagctgaaggagttctaagtgtagaatgtaaggaagttgtttctcaatatggagaattgatatgggatctcttggtatcaggggtacgacctgatgatgtatgctcacaggttggtttatgtttcaaaagggctaaatcagagagcaatggaattgagatggtgaccgaaaaggaacagagagagttgtcagctaaagatactgctttgtgcacttcctgtcagatgcttgtggtttggattcagaatcaactaaaacaaaagaagaccaaggagatagtattcaactatgtaaatcagctgtgcgagagcttgccaagtccaaatggagagtcagtagtagactgtaatagcatttatggattgccaaacatcacgtttactgttggagacaaacctttcaccctcacccctgagcagtatattctgaaaactggagaaggcattgcagaagtttgccttagtgggtttattgcttttgacattcctcctccacggggtcctctctggattcttggggatgttttcatgagggtatatcacaccgtctttgactatggcaatctccgagttggttttgccaaagctgcctaacaagacatgttggagattatatagggcatgttttaataagctcgttattgtattgtaaataagctttctgtaactactatggcacaggtttacattatagatcttgtgaatgtacttgtgaaactatgcaccttgatgtattgtgtgcttgcatttgaagggaccattttcattaaatgtcatgtagaaccgtagattatatattatacccttatgttatatgccatgtcattgtggatagaaatggatgacctaaaatttctgctctatttaaattctctggccaatgatgatgctaatggaatatgatgcacaaagcatctgattatgaaacctatttaaccattactgattttgagacattaaa

SEQ ID NO: 5274 - DNA, 1006 bp, Glycine max
actgaaaaaggttactggcagattgaaatgggagattttttcgttggaggtgtttcaacaggtgtttgtgagggtggctgtgctgctattgtggattcaggaacatctttgcttgctggtccaactcctgttgtggctgaaatcaaccatgccattggagctgaaggagttctcagtgtagaatgtaaggaagtcgtttctcaatatggagagttgatatgggatctcttggtatcaggggtgaaaccagatgacatatgttcacaagttggtttatgttcttccaaaaggcatcaatctaagagtgctggaattgaaatggtgactgaaaaggagcagggagagttgacggcaagagataatcctttgtgttcttcttgtcagatgcttgttctttggatccagaatcaactaaaacaaaaggcaacgaaggacagagtattcaactatgtgaatcaactgtgtgagagcctgccaagtccatctggagagtcagtgataagctgtaatagtctttccaagatgccaaacattacgttcacaattggaaataaaccttttgtcctcacaccagagcagtatattctaagaactggagaaggcattacagaagtctgccttagtgggtttattgcttttgatgttcctcctccaaagggtccattgtggattcttggcgatgttttcatgagggcatatcacaccgtctttgactatggaaatctccaagttggctttgccgaagcagtctaattacgctttctggaggattttctttgtaaatttgttaagcgtgttgtaaataagctgttataattgtagctctggttactttttgaaaccacgaatgtatttatccatttaagacgtagaagtatcccacttgcaagtgttgtgtgctttttatatgaaaaaaccatcctcatttcattctattttattccgtgttgggcagaatattatgccttttctgtccctttcaaaattaggatacttgtaatgtgcc

SEQ ID NO: 5275 - DNA, 754 bp, Glycine max
aaaagaatgtaactggcatctaccactactggcaggaaaagaacatagaccgaacattgtgggaactcggtaccttgccacctggactgctgacattttatggattaactgagcccttggatccatcatggcatgttttgggttttggctacaccaatgttgatcctcagttgatagagaggggagctgtattacacttcaatgggaactccaaaccctggttgaagattgggattgagaagtacaagcccctatgggaaaaatatgttgaatactctcatcctttgttgcaacagtgtaacttccattgattttgaattgcatttaaattgatacttcaaaccttggtggaagattcagattcacggctagcctctgttggtggggtaggagaatatattattggccgtttgtaggtctggcaggcttggtgattcttaccagaaagtgaattcaggtcttgatttgtagtcagaaatgcttgtacaatttgaaaaggtcaagcatgtctggtggctttaacttggtgccttcattgaatccggatctacttctgtagcatatataattatacacgctcatttgtcaagtattagactgaatcagttcatagttttcaagtgtagtcaaggatgagatctgctgcaaacttcttattgttcattactgctccttgcaagaacagatgttctttcctgtgacattcatttgctgaaactttattctgctattcttgttgccatttttttaaaag

SEQ ID NO: 5276 - DNA, 675 bp, Glycine max
tacagaagacgacagaaggggacaacaaaaaaattcttcagttcactatatctatggcaatgtcttaccaaattagaaattctggtgtcttctttttcctttgtgttcttctctttggtgtgtctgctctgggtcgaccagccacttttctgcaagactttcatgtcacgtggtctgactcccacatcaagcaacttgatcaaggcagggcaatccaactcagacttgaccaaagctctggatgtggatttgcttccaaggtgaagtacatgttcgggcgtgttagcatgaagatcaaactcgtccccggagactctgctggcacggtcactgcattttatttgaactctgacacgaactacgttcgcgacgagcttgatttcgagttcttgggcaaccgtactgggcaaccttacacagttcaaacaaacatctacgctcatggaaagggtgacagagaacagagggtcaacctctggtttgaccctgctgcagacttccacacctattcaattctctggaaccatcaccatattgtattctacgtggatgattttccaatcagagtatacaaaaacaacgaggctcgggggattccatacccaaagatgcaggcaatgggagtgtattcgacattgttggaagcaaattactgggccaaaaagggttgaattg

SEQ ID NO: 5277 - DNA, 824 bp, Glycine max
cctctcaagtggagcattcaggttgttagagcgtccattgagctttcaatctgtggctggattttgatctctctgagtttaaaatggatccaaaaggaagcttatgtgctacaaggaaaattgtccactgagtgactcctcacataccagtaaactccaagattggaatccaagtgcgatgttgaataacctttccttccttgaagtaaagattcatcagcttcgggatctagtgcatgtaattgttagtaaaaagtgccaaccttttggacaacctcatgaactagtgactcaggaacaacagctcatcacagccgatcttacatcaattattgttcaattgatctctactgctggtagtcttctcccctctgttaggcacaccctcacaaacgcaaatcccttggttggccagcttgaccagcttcatgggattaacctcccttttgaatcagaaccaagtagtggtattaggccacaaaataacagtggaaataaactgtttgatcagtccattcagaatgatctaccaaataaattggaaatggagcaaaactacaatatggaagagcatgagccaaaagatgaagaagatgtggatgagggagagaatcttccacccggttcctacgagattttgcaattagaaaaagaagaaatcctcgcccctcacacacatttctgtacaatatgtgggaaaggattcaagagggatgcaaatctccgaatgcacatgcgcggccatggtgacaagtacaaaactcctgcagctcttgcaaaaccacacaaagaatccgggtctgaaccaaagctcatcaagaggt

SEQ ID NO: 5278 - DNA, 419 bp, Glycine max
cttcgcataagcattcactcacctccccctcccatgttctcttcctcatcgcaatttttttttttttttcttttaattttcctctcaagtggagcattcaggttgttagagcgtccattgagctttcaatctgtggctggattttgatctctctgagtttaaaatggatccaaaaggaagcttatgtgctacaaggtcctcttccttaacctctcctgggaatggactacaaacaaatttgtcgtcagatcctccctctttctatggggtcaggattgaatcacctttcgaagaattcatccaaccctctcctccaacccaatctgtacttccaggtgaatctaacacagatattgatatccctgaccaggaaaattgtccactgagtgactcctcacataccagtaaactccaagatt

SEQ ID NO: 5279 - DNA, 317 bp, Glycine max
ggcatttaagaaactcaagagatagaaagacgataaagagaaggagaaggggagaagagagaaaggttgtattgagagatatggggaggggtaagattgagatcaaaaggattgagaactcaagcaacaggcaagttacctactcaaagaggaagaatgggatccttaagaaggcaaaggaaattagtgttctatgtgatgctcaagtttcccttatcatctttggtgtctctgggaagatgcatgagtacatcagcccctccactacgttgattgacctcctggacagataccacagagcctctgggaagaccctg

SEQ ID NO: 5280 - DNA, 509 bp, Glycine max
tgaagacgacagaaggggatcttagatttgactcttggttgagagtgagtttggaacttgaaagaaactagaatggccactttagacgaacgcccttctgcgaaaaggtggcttcctcttgaagctaaccctgaagtcatgaaccagttcctttggggtcttggccttccactggacgaggcagagtgctgtgatgtgtttggcttagatgaagagcttctggaaatggttccgaagcccgtcctcgccgtgctttttctttatccaattaccgcaaagtccgaagaagaaaggttgcaacaggaaaacgaaaaaaaggattatagcagcaaagtgtattttatgaagcaaaccgtgggtaatgcttgtggtacaatagggttgcttcatgcacttgggaacataacctccgaagtcaagcttgttgaggggtcattctttgataagttttttaaatctactgcaagcatggatccattgcagcgggctgtatttcttgagaatgacag

SEQ ID NO: 5281 - DNA, 1171 bp, Glycine max
aaataagtttatttttctttgtgaccctcttctcctctcttctctgcaaacaaccttcaaatttccttttgcttcttaccaaaaagaaacacttcctggaagcttctctctttgcacttccatgatttgatctccgccgtggatatgatggaacttgctcctctttccttttctgattaatattattttttatatttaactggagagagagagagagagagagagagtcatccttcttcattttttgatacctggattcgagacatgagatgaggccgatgcagatccaccgggaaatccagatcctccgtgacgtgaacgatccgaacgtggtgaagtgccacgagatgtacgatcagaacagcgaaatccaggtgctgctggagttcatggacggagggtctctggaggggaaacacatcacgcaggagcagcagctggcagatctgtctcggcagattcttagggggctggcgtacctgcaccggcggcacatcgtccacagggacatcaagccgtcgaatctgcttataaactcgcggaagcaggtgaagatcgctgacttcggggtgggtcggatactgaatcagacgatggatccgtgcaattcgtcggtggggacgatcgcctacatgagtccggagaggatcaatacggacataaacgacgggcaatacgacgcgtacgcaggggacatatggagctttggggttagcatactggagttctacatgggaaggttccccttcgcggttgggaggcagggcgattgggccagtctcatgtgcgccatttgtatgtctcagcctcccgaggctcctccttctgcttcacctcacttcaaggatttcatcctccgctgtttgcagcgcgatccctctcgccgctggtctgcttccaggctcctcgaacaccccttcattgctccaccgctgcccaaccataatcagactcctcccaacctccatcagctactccctcctccgccaaggcctcttccttcctagtattctccatccatgcctagctagccctgtttgctgctttcttttctttttttattttccatacataatcaaatctctataatattggattttctgccatacattacatgccctgtttgttttgccatgcttttcttatactattatcatccttttctttttct

SEQ ID NO: 5282 - DNA, 976 bp, Glycine max
acgcgtaagctttatttctgcaaacaaatcaaccctcaaatttccttttgcttcctagaaagagttagttcccggaagcttctctctttgcacttgcatgatttgatctccgccgtggattcgtgatggtgattttatgaacttcctcctctgccccctctttccttttctgattatcattatttttatatttaactagagagagagactcatccttccttcgagacatgagatgaggccgatgcaactgccaccgccttccgcttccggggccaaccctgcccctgcaaccaccaacaacaacaacaaggagcagcgtccccagcgccgccgcaaggacctcacgctgccgctgccgcagcgagacaccaacttggcggtgccgcttcctctgccgccatcgacggcgcctgctgcggcggcgagcggcggagcgagccagcaggcggcgcagcaggtgatccctttctcggagctggagagactgaaccgcatcgggagcgggagcggcgggacggtgtacaaggtggtccaccgcacgagcgggcgcgtgtacgcgctgaaggtgatatacggtcaccacgaggagtccgtgcggcggcagatccaccgggaaatccagatcctccgtgacgtgaacgatccgaacgtggtgaagtgccacgagatgtacgatcagaacagcgaaatccaggtgctgctggagttcatggacggagggtcactggaggggaaacacatcccgcaggagcagcagctggcagatctgtctcggcagattctgcgggggctggcgtacctacaccggcggcacatcgtgcacagggacatcaagccctcgaatctgctgataaactcgcggaagcaggtgaagatcgctgacttcggggtgggtcggattctgaatcagacgatggatccgtgcaattcatcggtggggacgatcgcctacatgagtccggagaggatcaatacg

SEQ ID NO: 5283 - DNA, 713 bp, Glycine max
ggatgatcgaacgatgtgtaattggtccacgttccccacgggccctggaggcgcgtggactccatgccctcttttgatagttaccaaataagtttatttttctttgtgaccctcttctcctctcttctctgcaaacaaccttcaaatttccttttgcttcttaccaaaaagaaaccttcctggaagcttctctctttgcacttccatgatttgatctccgccgtggatatgatggaacttgctcctctttccttttctgattaatattattttttatatttaactggagagagagagagagagagagagagtcatccttcttcattttttgatacctggattcgagacatgagatgaggccgatgcaactgccaccgccttccggttccggggccaaccctgcccccaccaacaacagcaaggaccgtccccagcgccgccgcaaggacctcacgctgccgctgccgcagcgggacaccaacttggcggtgccgcttcctctgcccccatcgacggcttctgctgcggcggcgcagcaggtgatccccttctcggagctggagagactgaaccgcatcgggagcgggagcggcgggacggtgtacaaggtggtccaccgcaccagcgggcgcgtgtacgcgctgaaggtgatatacggtcaccaaggagtccgtgcggcggcagatccaccgggaaatccagatcctccgtga

SEQ ID NO: 5284 - DNA, 413 bp, Glycine max
ttgggccagtctcatgtgcgccatttgtatgtctcagcctcccgaggctcctccttctgcttcccctcacttcaaggacttcatcttgcgctgtcttcagcgcgatccctctcgccgctggtctgcttccaggttgctcgaacaccccttcattgctccgccgctgcccaaccacaatcagactcctccaaacctccatcagctactccctcctccgccaaggcctcttccctcctagtatgatggatccttctacatgcctattgcctattgcctagctagctagccctgtgtgccgctttattttcattttcattttcattttcatacagaatcaaatcttaatattggattttcagccatacattacagtgtttttcttcttaccataacatgccctgtttgttttttcc

SEQ ID NO: 5285 - DNA, 1331 bp, Glycine max
tctcgagccgattcggctcgagaccttgcaacatttgagaagccgctccggaagcttacttttgcggaccttcttgacgctaccaatggttttcacaacgacagtctcattggctctggcgggtttggggatgtgtacaaggctcagttgaaggatggaagtgttgtggctatcaagaagctgattcatgttagcggacaaggggacagggaattcaccgctgaaatggagactattgggaaaatcaagcacaggaaccttgttcccctgttgggatactgcaaggtaggggaagagaggctcttggtttatgagtacatgaaatatggaagtttagaggatgttctacatgatcagaagaaagctgggatcaagctgaactgggccattaggcggaaaattgctattggagctgctaggggattggcttttcttcaccacaattgtatcccccacatcattcatagagatatgaagtcgagcaatgtgttacttgatgaaaacctggaagccagagtctctgattttggaatggctaggcttatgagtgctatggatacacatttgagtgtgagcacattggctggcacaccggggtatgttcctcccgagtactatcagagcttcagatgctccacaaaaggtgatgtctacagttatggtgtggttttgttggagctgctaactgggaaaaggccaacggactcggctgattttggagataataatcttgttggatgggttaaacaacatgccaagctgaaaatcagtgatatttttgacccggagctcatgaaggaagaccccaatctggagatggagcttttgcagcacttgaagattgcggtttcctgtttggatgatcgaccgtggaggcgtccgacgatgattcaagtgatggcaatgttcaaggagattcaggcgggatccgggattgattctcagtcaaccatagccaatgacgaggaaggtttcaatgcagttgaaatggtggagatgagcattaaagaagcccctgaattgagcaagcattaggcattaaagtgtcgtgtggattctttgggaaacagacaagaagagaggaggagatgacggattcagctcccctcagttttttccttctttgccgcttcaaattatttcagacataagggaaaacggttaaaaggggaatgaatgcttttgatgtatgtattcttgttattttatacataaaaaaaagttgtttaacttgtatataaacagcttcagttgttaccatctgtgttttcctagaattttcaaagtacttttctcattcaaatataatcctgaaaaggttctctgttcaa

SEQ ID NO: 5286 - DNA, 436 bp, Glycine max
  unsure (1)..(436): unsure at all n locations
gtttcactacctcctctgtttttcttcatttcgcagtgagttggaattgataatctagagagtgactactgatcgccgacagcgagcttcttccgtgtaatggcgacctccgtcgcagtcgccggcgctttgacggcgcacgatcgccgggttctgacggcggtgaacgccggagcctcgagcctgtcgttggccggttccagcttcattgtagtgtgctacctcctcttcaaggagctccgcaagttctccttcaagctcgtcttctacctcgctctctctgtatgcttcttttttctctctttccgtgttcctcttcttcagatctaaaacttgcgtttttactttttaacgttccttcgaattgactcattcgttagtttagtaacacttatcagtaatcacgattggcagaaacgatacggntaaacgcgct

SEQ ID NO: 5287 - DNA, 422 bp, Glycine max
ggcggtgagttagaactgataatcaagagagcgacccctggtcggcgacagcgaactacttccgtgtaatggcgacctccgtcgcagtcgccggcgctttgacggcgcatgatcgccggattctgacagcggtgaacgtcggagcgtcgagcctgtcgttggccggttccagcttcattgtagtgtgctacctcctcttcaaggagctccgcaagttctccttcaagctcgtcttctacctcgctctctctgatatgctttgcagtttcttcggcataatacgggacccgtccaaaggtttcttttgttatgctcagggctatagcacacatttcttttgtgtggcatcgtttctatggactacaacaattgcttttacccttcaccgcactgttgtaaaacataaaacagatgttgaagat

SEQ ID NO: 5288 - DNA, 611 bp, Glycine max
ggttaattaatgtagagaaccaaccatgggtcaatactcaattcatcatcagcttgtggccatagtctcattatttatccttttgcttccaaatatccatgggtggggagacgatgggcatgtcattgtttgcaagattgcacaggctcgcctcagtgaagcagctgcagaggctgtgaagaaactgctgccaatatccgcaggaaatgatttgtccacaaagtgttcttgggcagatcatgttcatcatatctatccttgggcctctgctttgcactacgcaaataccccagaggccctctgcagttacaaaaacagcagggattgtgtagattacaaaaaaggaattaaggggcgatgtgttgtggctgcgattaacaattacacaacgcagctccttgaatatggcagtgacactaaatctagatataacctcacgcaatctctattcttcctttcacattttatgggggacatccatcagcctctacattgtggctttctctcagacaatggaggcaatgcaattactgttcgctggtacaaaaggaagcaaaatctccaccatatttgggatagtaccatacttctgacagaagtcgacaaatttt

SEQ ID NO: 5289 - DNA, 1479 bp, Glycine max
ggcgtgtcagcgatttttgacatcgggaatcggatcggtcaggccggggcggatttcggtgccagcttgaacgggctggttcagcagtttttccggtcgttgccggtgccgatgccattcaagcacgaggagagttcagtgagggtggagggtggggataaggggtggcagagaggaggggttgtggttgctgtgcaggaggatttgggattgcttagtgagaggttgaagaatcgtgggtttgctgagagtgttagtggcagtggtggtggaagcgcggaggaagagggtggtggagggtttaaccttgggtctattggtcttctgggcaggcgacagggaatcataaattttacatcaacttatgatagtagaactcaagaagtggaaggttctttagttgcaaggggagatttgtggagagtagaggcatcacatggtggttctgcgtctagaaatgaaaattcatctcttttcctggttcagcttggacctcttctctttatccgtgattcaactctcctcttgcctgttcatttgtcaaagcagcacttgctgtggtatggctatgatagaaagaatggaatgcattctctttgtccagcagtgtggtcaaaacacagaaggtggctgttaatgtccatgctttgcctgaatcccctagcttgttcatttgtggatcttcaattccctaatgggcaactaacctacgtatctggagagggtctaagtaccagtgctttccttcctgtttatggaggtcttcttcaagctcagggtcaatatcctggggaaatgagattcagcttttcgtgcaagaataagtggggaacaagaatcacaccaatggtacaatggcctgacaaatcattttctttgggtcttgctcaagccttggcctggaagcgatctggtctaatggtgaggccatctgttcaattcagtgtgtgtcctactgttggtggaagcaatccagggttgcgggcagaactcattcattcagttaaagagaaacttaatctaatttgtggatgtgctttcatgacatatccttctgcctttgcttcagtatctattggaagatcaaagtggaatggaaatgtggggaactcgggtctagttctaagagttgatgttcctctctccaccgttgggcgcccttccttctccgttcagataaatagtggcattgagttttgatagcattctggtgtttggtatcatcagttttatattttgcatgaagtgtacataggtttggttccttgacagtacttgcaggaaattaaaaaaaaaactcctaacaacaaagcttagtctttttatgtgaatagaaaatcctattctggtagtgtattagttttagtcttgtcattttctatggtacatcccaaatcattttggagcctggtgtacttattgaatttctaattattttgaaggcgtaatttgtaaaagttagattcaaattgtgttgtg

SEQ ID NO: 5290 - DNA, 2194 bp, Glycine max
cttccatctccaattccaattctcgtgaactccattcattcattttcttttcttttgtcttctgcacatccatcatctccacaaattccattcaaacaacataggcattaattgatttgggtgatgagcgcgtgaaaaagaagaagaagatgatggcagggaagaataaaggggtggcgccggaagacgccataagggccattggcttgggttacgatctcaccaacgatctgaagctcaaatcctgcaagaaccactccagattgatcgctattgacgatgacaaccttcgaactgtcgaactccctcctcggatttccatccctaatgtccccaaatccatcaagtgcgataaaggtgaccgcatgagattgtgctccgatgtcctctcttttcagcagatgtcagagcagttcaaccaggacttgtcactgtctggtaagattccaacgggccatttcaactctgcgtttgggtttaaaggagtttggcaaaaagatgctgccaataccaagactcttgcttttgatggtgtatccatcacactctacgactttgcatttgagaaaacccaggtagttcttcatgatcatgtcaaacaagctgttccttcgtcctgggatccggctgcattgaccagattcattgagaagtatggaactcatgttatagttggggtgagaataggaggaactgatataatctatgcaacgcagcagtactcatctactgtcccacctgctgaagtacagaaaaaattaaaggacatggcagacgaattcttcattgacaaagctggacagtataacagtaggtttaatgcaaaggaaaaggttatgaaggataatgcgctaaatttcatggatattcaaaccagatcctactatgaatcagaggcgcaggatatcaagttcatgtgcaggaggaaaggtggaaatgggaaaagatctttgtcccatagtgagtggtgccaaactgttctgtctcaacctgatgtgatatcaatgtcatttgtaccaattacatctctacttggtggaataaatgggagtggatatttaactcatgccatgaatctctatttacgctataaaccacgaattgaagaactgcatcaatttttggagttccagcttccaaggcaatgggcccctgtatttggtgagcttgcccttggtcctgaaaggaagccacaaaatactgcttctttacagttcagtttcatgggtcccaagctctatgtaaacacaacaccggttgatgtgggaaagaagcccgtgacaggccttcgattgtatttggaaggaaagagaagcaactgcttggcaatccatttacagcacctctcttccctgcccaaaactttccaactccaggatgagcctaacgggaatgcgtctaatgactcttcagaacgcaagtactatgagaaggtccagtggaagagtttctctcacgtttgcacagctcctgttgattcagatgatgacaatgctgtcgtgactggtgctcactttgaagttggagatactggccttaagaaagttctattcctaagacttcatttctgtaaagttgttggtgcaacccgtgtgaaagtacccgaatgggagggttctcctggcttgacccagaaatctggaataatctcaacattgatcagcactaccttctcaagtccacaaaagccaccaccaccacggccatctgatgtaaacatcaactctgctttataccctggggggcctcctgtgcctactcagtcacccaaacttctaaggtttgttgacacaactgaaatgacaagaggaccacaagatactcctggctactgggttgtgtctggggcaaggctttttgtggagaaggctaaaatatcactgaaagtaaaatattcccttttgactgtgatacctgatgaagagagggtaagtttttgaaattatcaaatgagggttgttggaagataatctcatcaggtaaagttcaatgagatgggcgtgtgtatatataatagtctctgattctttttctttgtacattttccattaccattatttgtgtatacctgcactgcagaaacttttggggaattccttgtagttttgggaaaggcttgtgtagtcatgcccgttacatttttgttttgttttgcctgtatgtttgaatgcactcttattttaatgacctcttc

SEQ ID NO: 5291 - DNA, 311 bp, Glycine max
attccattgcttctcttcttcacaaattccattcctagagagagacagaagcaacaacatcataatcggaatttgattgaattcgatttgggtgatgagcgcgtgaaaaaagaagaagaggaagaagatggcagggaagaaaggggtggcggcagaagacgcaataagggccattggtttaggttacgatctcacaaacgatctcaagctcaaattctgcaagaaccactccagattgatcgctatcgacgatgacaaccttcgaactgtcgaactccctcctcgtatttctatccctaatgtccccaaat

SEQ ID NO: 5292 - DNA, 358 bp, Glycine max
aaaattgagtgagtctaagattggagaatgtcaaagagacatatcagaggcaaaagccttggtggaggaagcagaacgctctctgttggtaaatgtgggaggtcctgaaaatggcgctacatccatggggatgaaaagtgaagacatcgatagagatgaagagagatgggagtcagtcaaagcagcatcaatttctgcccttgttggtactttttcagggctccccatatgcttcactcaggtcaccaacacaactcagctgcttctcccgttagcaatcaacttcatttgctgtgcattcgttggagtgactattcggtacactataatgagaaatatggatgatgttcaacttaag

SEQ ID NO: 5293 - DNA, 659 bp, Glycine max
agaatgagtcattggttaacccgtcgcgagggagaagtagccgataataaaaacactcgtgccgcaccttcgtcttccccaatgcttctttccacacgcatctcggaagcccttctcttcatcacatagatactttcgctatcccaccaagtaacccttattattccaatccaccctcgccactccttcgatccgaatcatcttttccgcccacacacaagttgggtttttttgatataattgataatgggtgatagcagtgttccatctgggtctccaaatgcaaaatcagatcttgttgacagagacttggcggtttccaacaacgcgtcgtcgttggaaaccattgtgcaaagtttccaagattcaatgtctcttggtaagagacacaagttctgggaaactcagcctgtggggcaatacaaggatgttggggactcaagtttgcccgagggcccgattgagcccccaactcctttatctgaggtcaagcaggagccttacaaccttcctaatgcttatgagtggacaacatgtgacatggactctgaggaaatctgtgatgaagtttatgttctgctcaagaataactatgttgaggatgatgagaacatgttgtccactcataagcattaggaaggttgtaagcctcctgcttt

SEQ ID NO: 5294 - DNA, 651 bp, Glycine max
cgcatctcggaatcccctttcttcatcgcatagatactttcgctagcccaccaagtaacccttattccaattcaccctcgccactccttagatcgaaatcattttttttcgcccggcacagtgagttaatcttattttcatccactctctaacctgtttcacctttcataactcgattttaattagccactgattgcattattgtttcatcttctgtttccggtggatcgagatcctctcttgtttctctgtttcaatttggattcgaatttgaatttcagttaatctcgttttcactgccagggttgtgttttatttttatttttttgatttgatatttctgcagagttgggtttttttttatataactgataatgggtgatagcagtgttcaatctgggtctccaaatgcaaaaccagatcttgttgacggagactcggcggtttccaataacgcgacattggaaaccattgttcaaagtttccaagattcaatgtctcttggtaagagacacaagttctgggaaactcagcctgtggggcaatacaaggatgttggggactccagtttgcccgagggcccgattgagccctcaactcctttatctgaggtcaagcaggagccttacaaccttcctaatgcttatgagt

SEQ ID NO: 5295 - DNA, 445 bp, Glycine max
aagctaggaattcagctcgaggctttctcccctgaatctcaccactctccgatctttcattctcccctcttttctagctcccgtggagtctggaagcgttctcgagccttctcgctttccacgtgttttgcttttttccatttctctctctcccgtggagtttagaagtgtgcgttccggagccttttcgctttccatttctctctctcccgtgctttctagagttggtgctctgggaggagtaacgattcagcggttgaattgcgagaatggaaagcgttttagagagtgtcatgggggcacaaaaaaagttttatttttgttgataaagggttttactcagttgaaatgttgctgcttctgctcgctcttaaggattaaggtcctaatggtaattaaagagaccatgagttgatttcagatggggaacaactgaagatgggga

SEQ ID NO: 5296 - DNA, 430 bp, Glycine max
ggcgggaaccgtgacgaacccgttcaacgaggggttctatcagggtcctcccacggcgccgttggaggccgtttcggcctgcacggggattttcgggagcggggcgtatccgggttatccgggtcgggttctgctggacaagacgacgggggccagctacaatgcgtacggcgccggcaacgggaggaagtacctcttgccggccatgtgggacccgcagacctccgcatgcaagacgcaggtgtaaacgaaatacttgggtcaacgtgtaaattcttgttttctacatagtcaatgttttagcatattgatatcaataaattgtggaaatagaatattattacttttatttataacttttgagaccaagaatgtttgccctgtacatgtattattatttttgattaagagttgttcgttttgagggttt

SEQ ID NO: 5297 - DNA, 871 bp, Glycine max
acgagcccagttctcacctcaccgctgcatcttcacgtcgtctctaacggtaataccctttcatcctctatgcatcttcttcttcttctatttcgccaaaaacaaaggcaaattagggttttcaccgtattttattcccttttccaattacttaagatatttgaaggtttcactacttattgactcgattttcaaaatcgattcccattaaagttcaattaacgacgtgttaaatcgcataagccgttctcatctctcttcccagttctcacctcaccgctgcatcttcacgtcgtctctaacgagggaaaatgagtcgaggaggtgcagcagcagcgaagggaaagaagaagggtgctacattcaccattgactgtgcaaagccagtagaagacaagatcatggacattgcttctctcgagaagtttcttcaagagaggatcaaggttggtggcaaagctggtgctcttggtgactctgttaccgttacacgtgagaagactaagattattctcacctctgactgtaacttttccaaacggtatttgaagtacttgacgaagaagtacttgaagaaacacaatgtgcgagactggctcagagtgattgcttcaaacaaggatagaagtgtttacgaactgaggtacttcaacattgctgagaatgagggagaggaagaagattagttgtctgatagccttatttgcttaagtgttttgtttacccttttcctatacctagcttcctttttggcaaatattgcttgagatacgatgctttgttttgatcggttgcaatttaacggttttgatcatttaagaattgcggtactattggtgttgaattgggaacagagattacaaattattct

SEQ ID NO: 5298 - DNA, 506 bp, Glycine max
ggagcatgcttacggttctggaatccatcgtgtaaaagctcaaatccaaaccctaaaataccaccgccgttctcatctctcttcccagccctcacctcaacgctgcatcttcacgtcgtctcacgaggtgcatatagtagagagggaaaatgagtcgaggaggcgcagtagcagcagcgaagggaaagaagaagggtgctacattcaccattgactgtgcaaagccagtggaagataagatcatggacattgcttctctcgaaaagtttcttcaagagaggatcaaggttggtggcaaagctggtgctcttggtgacagtatcactgttacccgcgagaagaccaagatcattgtcacctctgacagtaacttttccaaacggtatttgaagtacttgacgaagaagtacttgaagaaacacaatgtgcgagactggctcagagtgattgcttcaaacaaggatagaagtgtttacgaactgaggtacttcaacattgccgagaat

SEQ ID NO: 5299 - DNA, 1723 bp, Glycine max
gaacttgttaaaattcgacaagaagttgcctctctgcagaatgcagcttctgttgaagacaaagataatgatgaggaagacgatacaggagagaagctagcagagctatatgaaaaactacagctgatgggatctgatgctgctgaagctcaagcatcaaagatattagctggtttaggttttacaaaggatatgcaagcccgtcctacaaaatcctttagtggtggctggaggatgagaatttctttagctcgagcactttttgtgcaaccaactctattattgcttgatgaacccacaaatcatcttgacctgagggctgttctctggttggaagagtatttgtgccgttggaagaaaactctggtggttgtctcacatgatagggattttctcaatacagtgtgtactgagattattcatctccatgatttgaaacttcatttctatcgtggaaattttgatgattttgagagcgggtacgaacagcgtcgtaaagagatgaataagaagtatgatatttatgccaagcaattgcaagcggctaagaagagtggaaaccaggctcagcaaaaaaaagttaaggatcaagctaagtttgcagcagctaaggaaaaaagcaagggcaagggcaagggcaaggttgatgaggatgaggccccaccagaggcacctcagaagtggagggattacagtgtggagtttcactttcctgaacctactgagctcacacccccacttctgcagcttattgaagtcagctttagtacccaaaccgggaagatttcaggctctcaaatgttgatgttggcattgatatggggactcgtgttgccattgttgggcctaatggagctggaaaatctacgttgttgaatcttctagctggtgatttggttccttctgagggtgaagttcgaaggagtcagaagttgaggataggaagatattcccaacactttgtggaccttctaacaatggatgaaacagctgtgcagtatcttctgcgtctccatccagatcaggagggacttagcaagcaggaggctgtccgtgcaaaacttggtaagtttgggctaccaagtcataaccatcttactcctattgccaaactatcaggagggcagaaagctcgggtggtcttcacatctatctccatgtcaaatccacacattttattgttagatgaacccaccaatcatctggacatgcaaagtattgatgcattggccgatgcactggatgaattcaccggtggagttgctcttgttagtcatgattcaagattgatatcacgtgtatgtgaggatgaagaaaggagtcaaatctgggttgtcgaagatggtactgtcaaaaatttccccggaacatttgaggattacaaggacgacttgctgagagagattaaagctgaagttgatgattgagcttccttttctgaaaaaaattcattttagtgacaatttgtcctcatatatctacatttttggcttcctgtattttgctgataaagattacttgcctcccgccaatgctggactttgtcctccccttctccttgttcattttcttgtattctgcaactctgtaattttaggttgcgggaaatgctattaatacactagtgagacttgtggtttttggattaccaaagtttgagttaagaatatataggaacgtgtaatttaaactgttacgactaaataaacatctgctctgttcc

SEQ ID NO: 5300 - DNA, 668 bp, Glycine max
cggacgcgtgggtggttccacaatagaatgcaccctcgcgtgtgcttcttcctgtctaccgttatatataaagccacgcacgcacgacactttcatcaattaaccgctcattcatccaaatttctcaaactcaagctagcctttgggggatatgatagagaagaagacacagtgtgagaaaaaggaaaaaatggaaggtgaagaaactgagatgaaacaacaatccaggttcaaaaggatttgtgtgttctgtggcagcagccctgggaacaagagtagctataaggacgctgctattgagcttgggaaagagttggtgtcaagaaatattgatctggtttatggaggaggaagcattggtttgatggggttggtttcccaggctgtttatgaaggaggtcgccatgtaattggagttattcccaagacactgatgccaagagagattactggagagacagtgggggaagtgatggcagtagcagacatgcatcaaagaaaagcagagatggctaagcactctgatgcctttattgccttgcccggttcgtacaacatggttccaccaatattccctcttaaaaagtcacgtatcattagacatcaattcaatattatgcactatctaatctacataaatttggcacattaaataaaaattacatcat

SEQ ID NO: 5301 - DNA, 626 bp, Glycine max
ggcgactgctgctagaaccttcttttgttatctcgcaatggctgacttaagccccaagccattaccaaacctataaatacacgccttctttttattcttcttcttcaattcatattcataatccacatttattcatcagtttttcgttcccttcacaaaactcagaaccctaactatatccatggcatcgggtggaacagaagcttttccagatttgggtaaacactgccagcaccgcgattgcaaccagctcgattttcttcctttcacctgcgacggttgccaacagatcttttgtttggaacacagatcctacaagtcccacgcgtgcctgaaatccgaccacaacagcagaaaggttgttgtttgcgaagcatgttccatgtccatcgagaccaccggccatgtgggacaagacgaggaggcaatcttgcagaagcacctcaagtctggtaattgtgaccctaccaagaagaagaaaccaatttgtcccgtcaagcgttgcaaggaggttttgacgttttccaacaccagcacatgtaaaacttgccacattaaggtgtgcctcaagcatcggttccctgctgatcatgcctgtagcagaggagcttcagcttcttcatcag

SEQ ID NO: 5302 - DNA, 398 bp, Glycine max
ccacgcgtcaaggaagagagaaaagagggcttttaaacctgagattttgatcagagttagagacgcctctgtttctgaagccgaagctgccaccattgctgctgaggttttgtggggttccagcccatgaaaactgaacttcctcttccaagtataaaagaacttcaattcgagaccaccggttaaactcaacaattaatcgattatgtatactataggtttaatttgtcctgtgttgtatcatgtatgtacagattgggttttacgaacggggagttcaattcatcaaatgtgtaattattgattctttcttcacccactggtcactggaggtgaataatgcatgtgaagaatcgagtttgtcatgttgatatgtcattgatggcttgtcaccttta

SEQ ID NO: 5303 - DNA, 1714 bp, Glycine max
  unsure (1)..(1714): unsure at all n locations
cacaggaagaagaagaaggttggttgattggtcccattgattccgaagagaaaagaaaagatgtttgagccacaacagctatacactcgcgcgaagaccgaggaattcgacctcgaatcaggagaaaccctctacccagggctgagcgtcggcgagaaccagctccgatggggtttcatccgcaaggtctacggcatcctctccgcgcagatcgtcctcaccaccctcgtctccgtcaccaccgttttctatactccaatcaatgacctcctcaagggcaattccaccctcctcctcatcctcctcttccttcccttcatctttttgattcccctgttgaagtaccagcagaagcatcctcataattacatcttgcttgcactcttcaccgtgtcgatcagttccaccgtcggagtcacttgcgccaacaccgacgggaaaattgtgcttgaggccttgattttgacctccgctgtggtttcatctcttactggctatgccttttgggcgtccaagaagggcaaggattttagcttccttggcccaatattgttcacctccctcattactctcatcctcactggcatgatgcagatgttcttccctcttggacctactgcccatgctatctatggtgcaattggtgctatgatattctctggctacattgtgtacgacactgacaacctgatcaagcgcttcacttatgatgagtacattggagcctccgtcactctttatcttgacatactcaacctcttcctttccatcttgaggatcctccgggaagcaaataattagtcatcttgaggttgagaggttgagttatgaatcaaattcaaaagactatgtacgagaaattcaaaagactatgttgcttctttatagtataccgtaggggaagtattgtgaaatatctgtgcttctcttgtactcctttacagcttatgatgatacttttaatgacatgaaatttaaagctttacaattggcagcttggccaggttaacaggcgtgcattggtcactgatgaatggctaagggtggaaggatctgacaacatctatgctctaggtgattgtgctactataaatcaacgtagagttatggaagatatagccgtgatatttagcaaggctgacaagaacaattctggaaaattagatcttaaagaatttaaagacgttgttggcgacattattgagagataccctcaagtagacatttatttaaagaagaaccaaatgagagacatggccagcttgctaaagaaatctcaagagagcaatattatagtggacattgaatactttaaagaagcccttccaaagtagactctcagatgaaaaatcttccctgcacagctcaggtagctgcacaacaaggagtctatcttgcagactgtttcaaccgcatggaggagtgtgagaagtatccagaaggcccctctcaggttcacggggagtggacgccatccgttccgtcccctcagtaccagcatttgggacaatntgctcctctaagagagagcaaactgcagctcaacttccaagagatggattccaattgtcagagcacccaatggctctgggtatcgtgtatccaagccacaaatgagctgagggcaaggtttttgtggtgggacactggaagcgattctatttgcagggctaagtaaaattaaaatctatttatgatttctggctgggccaca

SEQ ID NO: 5304 - DNA, 494 bp, Glycine max
tatagaagagctatggacgtcgcatgccccgcatcacaaaccggaatttggctcgagcttttttaacaagaagacacaagaagaagaagaagaagaagaagaagggttggttggtcccattccataggaagagatcaaagagaagagaaaagatgtttgagccgcagcagctatacactcgagcgaagaccgaggaattcgacctcgaatcaggggaaaccctctacccagggctgagcgtcggcgagaaccagctccgatggggcttcatccgcaaggtctacggcatcctctccgcccagatcgtcctcaccaccctcgtctctgtcaccaccgttttctatactccaatcaatgacctcctcaagggcaattccaccctcctcctcatcctcctcttccttcctttcatctttttgattcccctgttgaagtaccagcagaagcatcctcataattacatattgcttgcactcttcaccgtgtctatcaac

SEQ ID NO: 5305 - DNA, 278 bp, Glycine max
gtctctgtctacctgatcaagcgtttcacttatgatgagtacattggagcctctgttactctttatcttgacatactcaacctcttcctttccatcttaaggatcctcagggaggcaaataattagtcatatcgaggttgagtaataccaaacaaattcaaaaagactatgttgcttctttatttttattttttgtgactatgttgcttctttatagtataccgtaggaagtattgtgaaacataataacaccgtgcttctcttgtactcccttacac

SEQ ID NO: 5306 - DNA, 522 bp, Glycine max
cggctcgagcggctcgagggacgacagaagggggaagaaaaaaagaaaaaaagatgtaagcggtaccacaaaactactaacagagaaaactttcaatttctggttttctgaatttcggatggttgactctaattttaggagctggaaaaggtactaaatctaaagttggacgaaatgtggatccaaggattcagtttttggatcaaaggtttctctttgctggccttaatatctgtaatttccgctctggaacccgaactgggatcgacccgcgtcgtctttcagacaaagtatggagatattgaatttggtttctatccaactgttgcacctaaaactgtggaccacatttataagcttgtgcgacttggaggctataacactaaccatttctttcgggtggataagggattcgtggcccaagtagcagatgttgcaaatggaagatcagctccaatgaacgaggaacaaagaatggaagctgtaaagactgttgttggtgaatttactgaagtcaaacat

SEQ ID NO: 5307 - DNA, 639 bp, Glycine max
gaggagtgcaacagagaagaatcacattcgcattctcaatcacatccattcattcactcatccatatcccttctttccactaacttctctctctagttgatacaaataaaaaacaaagtttcatactttacgacacccttttctgcaactgatgatggaaggaagctgaaacagtgaaaaacagcaacaacgaccaccctgtctttgttttttgtttgttgagttgaaactttagagaaagtgaatagtgatatggaggcaaagggtgtgcggttcttagcgtatcaatcaatattttcgagcgttggatctggggacttcgatggggtgaagaaactggtggaggaagtgaagaaggaagaagggtcatcgctctctgatgtgatgtctcttcagaacgatgctggagagactgcgctatacatcgctgcagagaataatctgcaagagatgttcagcttcttgctcagcatctgtcactttgaggtcgtcaagattcgctccaaggctgatatgaacgcctttcatgttgctgccaagcgtggcaatctaggtttttttattgtatttttcatggaataagttcttcttacggatgttgctattaattcagttaaatcatttacatatgatagaatc

SEQ ID NO: 5308 - DNA, 638 bp, Glycine max
gccaagttacagttcagaatgtcaggatccttgctcctcatgattcaccaaacacggatggaattgatccagattcttctgacaacgtatgcactgacgactgttacataagcactggtgatgatctgattgccatcaagagcgggtgggatgactatggcattgcatacggtcgcccaagcacaaacattatcatccacaggctacttggtagaactcaaacaagtgggattgctattggaagtgagatgtctggtggtgtatctgaagttcatgcagaagatattcacttctatgattcatatcatgcgatcacaatacacacttctcctggcaggggtggttacgttagaaacatctatgtctctaacgtgaccttggctaatgtagatattgctattacgttcactggtttatatggggagcatccagatgatgcttataacccaaatgctctacctgtaatagaaaagattacaatcaaggatgtggtaggagaaaatatcaaaactgcaggtcttatagagggtatagaaggtgacaattttgtcaacatttgcctatcaaacatcatccttaatgtgacctcaaactatccatggaactgctcctacgttaaaggatattctgacttggtc

SEQ ID NO: 5309 - DNA, 438 bp, Glycine max
ctctcttcaacgattccaaggaattcgttagcttctcccttgccattctgtctcaggtggcatcggctctttcaacaatccaaacactagcacgcggcagccgttcgttgctgtctgagaacagcaactccccagttgcttctctagacaaagctgatggccttccttcttggatgaaccatgaggaccgaagggtattgaaggctatggataacaaacctgcacctaatgtcaccgtggctaaagatggcagcggagacttcaaaaccatctctgaatgtttaaatgctgtccctcaaaattttgaaggacgttatgtgatttttgttaaagaaggagtatacgatgagactgtgaccataacaaagaaaatgcaaaatataaccatgtatggtgatggatcccaaaagagcatcatcactggcaacaaaaacttta

SEQ ID NO: 5310 - DNA, 625 bp, Glycine max
  unsure (1)..(625): unsure at all n locations
gtcacaagcgacaaccatggaccgtcacatangaaaaacatttcaaatgcccgcggcatcaatgaccgttttcttaattggaacaattctcctaactgtccccttctacgaccgtttcattgttcccgtggcaaagaaagtgctcaagaatccacatggtttcacccctttgcaacgcattggagtcggtttagtactctcagtggtttccatggtggtaggagcactgatagaaataaagagactaagatatgcccaatcacatggtttggtagataagccagaagcaaagatccctatgaccgtgttttggttgataccacagaacttgtttgtgggggcagggaacgcatttatgtacatggggcagttggactttttccttagagagtgtcccaaagggatgaaaacaatgagcacgggattgttcttgagcacactctctttggggtttttctttagcaccttgttagtgtctatagtgaacaaaatgacagcacatggtaggccatggctcgcagataatcttaaccaagggaggctctatgacttttactggctcttggctatattgagtgctataaatgtggtcttatacttggtttgtgctaagtggtacgtctac

SEQ ID NO: 5311 - DNA, 1019 bp, Glycine max
gagagagagagagagagagagagggaaggggatgagagagggaggatgaggggcggtgaggagcgatcgacagggattcgaaagaagggaagcggagtgagacaatggctggtcctggacggcagaggagagacggaggtggtggaggccgggaagcacgccatcatgaggaggacgggactccccgcgcgtgacctgcgtatattggaccctctcttgtcatacccttctacccttctgggtcgtgagagggccatcgtcatcaacttggagcacatcaaggccatcatcaccgcccacgaggtcctcctcctcaactctcgcgacccctccgtcacccccttccttcaggagctccaggccaggatcctccgccaccaccaccagactctggccgatgccaaccccaaccctgacgacgccatcaagattctccccttcgagttcgtagcccttgaggcctgtctggaggccgcttgtagcgtcttggaaaacgaggctaagactttggagcaggaggctcatccggccttggacaagctcacctccaagatcagtactctcaatttggaacgcgttcgtcaaattaagagccgattagtcgccatcactggccgtgttcagaaggtcagggacgaattggagcacctgctcgacgacgacgatgatatggctgagatgtatctctctgaaaagctagccgaacaagatgacttggagaaggcggaggatacctcttctgccgacgatgttgatgatcacattgacaggaccgctcctgaaatatcgctggacaatgttgttggtagggacagccatggaactcgcgatagcgccacctacagcgccgtcaccaagcaacttgatgtcgaggagcttgagatgctcttggaggcttactttgtgcagattgatggcaccttgaacaagctctctacgctgtggatgctgcatcctcctcttcatcatcatctttgtccttggaaactagggactcggttcagttggtccctataaca

SEQ ID NO: 5312 - DNA, 1184 bp, Glycine max
caaatttcttggctccaatctcaactctcgcgacccctccgtcacccccttccttcatgagctccaggcaaggatcatccgccaccacaaccaggctgatgctgaccccaaccccaaccccaacgacgccatcaagattcttcccttcgagttcgtttccctcgaggcctgtctggaggctgcttgtagcgccttgaaacgagttgaaacattgtggaagaaggtcattccgccttggacaagctcacctccaagatcagtactctcaatttggaacgcgttcgtcaaattaagagccgattagtcgccatcaccggtcgtgttcagaaggtcagggatgaattggagcacctgctcgatgacgacgaagatatggctgagatgtatctctctgaaaagctagccgaacaacaggtcttggatggcgacgtcgtcgtcgtcgacgacgacgatgacgacgacgatacctcttctgccgacaacggcgatcttcttcaacctcacaggaccgctcctgaattatcgttcgacaatgttctcggtagggacagcgcctccttcagtgccgtcaccaagcaacttgatgtcgaggagcttgagatgctcttggaggcttactttgtccagattgatggcaccttgaacaagctctctacgctgagggagtacgttgatgacacagaggattacatcaacatcatgctggatgacaaacagaaccatctcctccaaatgggagtcatgttgaccacagcaactctggtagtgagtgcctttgttgttgtggccggtatttttggcatgaatattcacattgagctatttgatgaccagaaagctgggatgacacaattcctctggactgttggtggtagcactgcagggaccatattcttgtatgtggttgccattgcctggtgtaagcacaaacgcttgctagagtgaccaggcgtcaaatagtgtttcataaacaaatgtaatttaacttgaaaatcaccttttgttcatgtgctataaattttagtagcagacagtgcagtatcttgttgcttcttgtactcgtatgatccttcagcttcaacgatgttgctcatcttgtacattattccgtgcttaaaaacattaatttctatggacacttgtctttccaataacagttttgttatttgcccaaaaaaaaaaaa

SEQ ID NO: 5313 - DNA, 1175 bp, Glycine max
ctgtcgcgagcgggtacgcgtggacgacagaagggggggtgccattgttgttgctattatcatccgcagctgcttttattcgcaccgcaaacagtgagccatggccgtcggaaagaacaagcgcatctccaaggggaagaagggtggcaagaagaaggcagctgatccctttgccaagaaggattggtatgacattaaggctccttctgtttttcaagtgaaaaatgttggcaaaaccctcgtctctcgtactcagggtaccaagattgcttctgaaggactcaagcatagagtgtttgaggtctccttggctgatcttcaaggggatgaggatcatgcattcaagaagattaggttgagagctgaagatgtgcaagggaagaatgttctgacaaatttctggggaatggatttcacaacagacaagctgaggtcattggtgcgaaaatggcaaactctaattgaagcccatgtggatgtgaagacaactgataactacacattgaggatgttttgcattggatttaccaagagaagagctaaccaagtgaagagaacctgctatgcacaatcaagccagattagacagattcgtaggaagatgagggagatcatgaccaaccaggcaacatcctgtgatttgaaggagttggtccgcaagtttattcctgagattattggaaaagagattgagaaggcgacatctagtatttaccctctgcagaatgtgtttgttcgtaaagtcaagatcctgaaagctcctaagtttgatcttgggaaactgatggaggttcatggagattactccgaggatgttggtgccaaggtagacagacctgctgatgaaatagtggcagaggaacccactgaaattgttggagcttgatttcgtgataatgcattcagtttgttctaggttttctttttcttatgttatcattgaaaatttaagttacaaacttactgttctgtcaaatgtttctgtgtaagccgagtgacacagttttgtttagacaacgagaagacatttttggtgcgtaatatatatctgggttttgttcagaacccaaaatcagatttgcttgcttatatagataacattatattgttattatgtattttttattacactatgacttgttaaaaaaaaaaaaaaaagggcggccccgactatt

SEQ ID NO: 5314 - DNA, 590 bp, Glycine max
aataaatgctcacaaatcaatcaaagactgtccttattagttattacctttttctctctgtccatgtccttccctcaaaactcaaatgcagtccatgcgaaaccttcgtgcaactcatggccttccactttgtctctctggaattactcaccctcgtgctctccctaaagagatggcagatcatgagcgtaggaggaaggccatgaagaggcaaagaggtgctatgcacacaaatcaacaaaagggtatccacagaaacaactttgaaagtgattttgtggaatatggagatcttgatgacgtcatcctgcatgatctgtttcatacttacctggatttaactgcaaaagctgcatagcgccatagcctgttaattcttcaccactattaatttctggactctattatgttactatttgtgttgtattattgtcgcgggtgggttgtatttcgaaaatttgctggaattatagtaggcctccaagtttaaaaaaatatttaggagtactcacaacctatcaacaaaatcatcatatcgttggtgtgattcaaacacatatccttataggatatgaatttgatttttatca

SEQ ID NO: 5315 - DNA, 1057 bp, Glycine max
aggggaagatccaaaagcgctaaattactttctttccattttccttcgttttctctctctttctcagtttctcagtttctcagtcatcaccatcgcagcagcaagatgtggaaccaaccattcggaaaaaccgatttggaaagcggttctcggcctctgtatccgatgatgctcgagagccctgaactgcggtggtcgttcatcagaaaagtgtactccataatcgccatacagttgctcgtaaccatcgtcgtcggcgccgtcgtcgtcaccgtccgcccaatcagcgtcttcttcgccaccaccggcgccggattggctctctacatcgtcctcatctttgtccccttcatcacattgtgtccactttactactactcccagaagcatcccgtcaattacttgctcctagcagttttcaccgtgtctcttggttttgtcgttggattgagttgcgcctttactagcgagaaagttattctggaagctgtcatattgactgctgtggtggtgattgctctaacactctacacattttgggctgcaaggagaggccatgatttcaacttccttggccccttcttgtttggtgctgtgctagttcttatggtctttgctctgattcaggttctgtttccactgggtaaattgtccgtgatgatctatggttgcttggcagccattatattttgcggctacatcatctatgacacagacaacctgatcaagagatactcgtacgatgaatacatttgggcttcgatctccttgtatctggacatcattaacctcttcctgtctctgctcactattttcagagccgctgatagttagatcattgtgtcatattcaaatattccgttccttgcctgcacattatttgttttctgtgatgagggtgggttccgaaaacaaattcttgtcaattaataaatctttggggcttgctttgtcgcaaggtgtcttgtgtatacaatggattattgtcaaaagttgttcataaatagtggattagcgatgaaattttgtacttgattataaacacgactttcccttt

SEQ ID NO: 5316 - DNA, 1009 bp, Glycine max
agaaattcgtaaacccaaaatattaccatagacagagtgtagcatcctaaattaagaaatcaaagagacagaaagttgagagagaagtgttcacgtctttgagaaatgggtgcttcggcatcggtcacagaaaaatccatccatgaattcatggtcaaggatgctaagggcagagacgtgaacctcagcacctacaaagggaaggttcttcttgtagttaacgtcgcttcaaaatgtggatttacaaattccaattacacccagttaactgagctttacagcaaatataaagacagaggtcttgagatactggcatttccatgcaaccagtttctgaaacaagagcccgggagtagccaggaggcagaggaatttgcctgtacaaggtacaaggctgagtatcccatttttggaaaggtacgtgtcaatggacctgatacagcacctgtctacaaattccttaaagcaaataaaacaggatttctgggtagtaggataaagtggaatttcactaagtttttggttgacaaggaagggcatgtcctcgctcgttatggtccaaccacctcaccgttgtccattgaaaatgacatcaagacagcattgggggaggcttgaaagactctacaatcacttcaaattggtgctcttgttgaagatgattgaaacataaggaatgtatatttgtagatgtttcttctagtgattatttcttacatatttcatgcctaggtttttttgtgtttgttgtattagaattctgttttgtttgtgattttagtcgttatttaaaaattaattaatgggcattagtttgagttgtgtgttagaagtgtgttttcatgtatcatttaaaatgcatgtaatggtcatggcctcatgtgtattagtgtcgaggaagttgcatcacttattataatgctagggaacagtccctaccaagtctatcaagactcaagagtctatatatatggatgatatgaaaaacctatgtactgcatttcaccag

SEQ ID NO: 5317 - DNA, 397 bp, Glycine max
ggtgagaagagtggtgtgatggcgcagagagctcaaccagtattggccacagatgttttccagatgggaaacatccaatggaagcaattcaatgtggatacatccagtgcttccttctcacctccaaaaccattgctaatttttacaccaactgttcctggcgcataccctgtaatattgttcgtccatggctttttcattcgcaatttctactactcaaagctcctagcccacatagtctcacatggattcataatcgttgctcctcaactgttttccaatgggcttcctatgtatggacccactgaagtggaatatgcaggaaaagttgcggattggatagctgaggagcttcaacatttgcttccagagaacgttgaagccaatttggacaaac

SEQ ID NO: 5318 - DNA, 586 bp, Glycine max
taaataaataataatggagttgtgagagaaagagatagagaagaagatggatagtgaaattgaaaagaagaagaacctgttttcggaactaaccgacgacatcgttctgaacatcttctacaaactcgaagacgatcctcgccactgggctcgcttagcctgtgtctgcaccaaattctcttccctcgttagggatttctgttggaagaccaaatgctccctcaccatcccccaagacctcctctccgctcgaacagatgccggaaactttgttgaaggatgtcgagggaacgtcgatcgtggagtatcctcgtgagtcgcgacggtgatgactaagtggcgattgggaagggaacagagtaaagtgagcaagagacaaaaaacgtgcgaggcgtgagcaagagaatgagagggtagagtgaattaaaatttaaccctagaatcagatagtatatgtgatccaatctcagctcttcagactctgcaaacaccaggcttctcaaattcataccgcaaccaccaaatactagacgcggatcctctcctgcagctgcatctcgagccttctccaaccaccaaatggaga

SEQ ID NO: 5319 - DNA, 393 bp, Glycine max
acgcttgccccgccaccaccacgggatcgccgcccccaaaagggaccaccaaatttcacccatttcgaacacacaacaaattaccaaattcgcctcctcttcctatgattcacatgctcgaacagacgccggaaactttgttgaaggatgtggagggaacgtcggtcgaggagggcgagtctccccgtgagtggcgacggtgatggctgagcggcgattgggaagggaactgagtagagtgagcaagagacagaaaacgtgtgaggcgtgagcgagagagtaagagagtagagtgaaggggaatttaaccctagaatcagatagtatatgtgatccaatctcagctcttcagactctgcaaacaccaggcttctcaaattcacatcacaaccc

SEQ ID NO: 5320 - DNA, 823 bp, Glycine max
cgcgtacgtaagctcggaattcttttcgaggatggtttgtttttattgaaaagaagaagaacctgttttcggaactaaccgacgacatcgttctgaacatcttctacaaactcgaagacgatcctcgccactgggctcgcttagcctgtgtctgcaccaaattctcttccctcgttagggatttctgttggaagaccaaatgctccctcaccatcccccaagacctcctctccgccgccgcctccgacccccctctctccctccacaaactctccttctgctgccccggcctccgccacgccggcctcctgttcgacacctccgatttcggcctcgaacgcgacctcggccccggcaacttcaacgtcatcaccgatgattctccttcgaacaccactccaccaccaccaccaccaccaccacaacaacaacaacaacaacctcctcaatccgatgattgttcttcctcttgttggtccctttacgatgacctctactacgacacgctctacgtcccaaccgagtccgagtcgccgcgattaacggaatccgttagcgtaagagcgggcgtggatgtggcttcgatcagcgcgtgcagcaagaagcgcaagctctcccgcgcgtggagctcacacctggcttcgggaagctggacactaagccgtgaacaaggaagcaagctcctggcgcgtaagttccggtacgattgcttgtacgtgtgcgagtggccagggtgcgtgcacaaggaggagaagcgcaagtactgcctcttcagaggggttttcaagaacttcaggcgaactatggtttggaggactattca

SEQ ID NO: 5321 - DNA, 525 bp, Glycine max
aaaagatatccataatttaggggccacactttggtgttcttctttgcaattccccatcctgtgcctcatgactctgactactcaatcaccatggtggtccaaactttgtcccttcccctctagtaaattttttagctggaccctcctccctcgctttgtcgcatcgcatcgggatatggtctctttaacatgtatgtatgttaatgttaatgtcatcactaaaaaaaaaaacagaggcttcgagccattttatatatagtgtgagatcatgaaagtaacccttagttattattctctattctatgatctattcaagccaagagttagacaacttctgttccaagataaagggggaaaagatagagaaaaaaaaatgcaagtgagtctcaaggggttttggtttcttcttcattttgtgatcgagcattgtattgtctctaaccccatgaggaatgttgatgatggtgtaaagtttccttggctcgtgtgggaataaaaaaaaaactcaaaagagactttgcttcc

SEQ ID NO: 5322 - DNA, 497 bp, Glycine max
ctcacgcgtccgcccacgcgtccgctctgatggggcatcgtatatgattggtcggtcatagcagcgcttgctcatccactccacccttgaaaggaaacaaaattcacacacagaagaatagaagggtagttaagcttgcttaagcaacgcagagagaaacaaaaggagcttttgtttatccaggccaaattgtaattaatcaaactttctgggatcttcttctttctcttgccatggccgcgtcgccgtcgtcttccgccgcggcaaacatcatgctggcgatcttcgagaagaaaacgaacagcgtagatctctaccgccctctccgcaactacgtggccttccactactccgagcgcgaggcgcagaaccttgaggacgatctccaaaccctgaagcaactccgctccgacgtggagcgccactccgatccgtcgctcccgacgcgccgtgaccttctccaaacctactacaaatccctctgtctcgtggagacg

SEQ ID NO: 5323 - DNA, 449 bp, Glycine max
cgttccatgaatcataataatccttataatagtgtaatgtccgaagatcaaaaccctctgatggggcatcgtatttgattggtcggtcatagcaattagcaactccacccttcaaacttgaaaggaaaaaaggactttggttatccacgccacaccacgctgtaattaactaaactttctagaatcttcttctctcgccatggccgcgccgtcgtcctccgccgcggcaaacatcatgctggcgatctccgagaagaagacgaacagtgtagatctgtatcgccctctccgcaactacgtggccttccactactcggagcgagaggcgcagaacctcgaggatgatctccaaaccctgaagcaactccgctccgatgtggagcgccactccgattcatcgctcccggcgcgccgtgatcccctccaatcctactacaaatctctctgcc

SEQ ID NO: 5324 - DNA, 987 bp, Glycine max
cattcaatgacattcacagtcccgagtgctaacctgagttgtgtctcaagttgctcttcttctttttttcttttctttcaccctcaaaatttctcactctctttatcttcaccttttcagtttaaagcttcagatcacaacagatccaccattcacctcaccactttctcttcacaaggcaaatctaacaagaaaaagtagtctctgaagccgatccagtgtcttgtgaatttggaattggtagtgaatttagatctaaaaagccatagcaatgtcttttatcggtacccagcaaaagtgcaaggcttgtgagaaaacggtttatccagttgatcagctttctgctgatggcactgcttatcacaaagcttgcttcagatgttctcactgcaaaggaacattaaagctgagcaactattcctcaatggaaggtgttctttactgtaagcctcactatgagcagctcttcaaggagagtggcgtccttcagcaagaacttccagtcacctgcaaagctagctgataagacaactcctgagctgacaaggtctcctagtaaagctgcgagcatgttttctggcacacaagaaaagtgtgccacatgtggcaaaactgcttatccattagagaaggtaacagtggaagggcaggcctatcacaaatcatgtttcaagtgttcacatggtggatgtcccataacgccatcgaattatgcagcccttgagggcattttgtattgcaagcaccacttctcccagctttttaaggagaaagggagctataatcatcttactaagtctgcatcagtcaaacgggcagccgcagccacagcagcagcaacaacagctgcctctgttccagaatcttgaatgttggttccttcaattgccttttctttttcaaatacattttggtttgtgaagcacgtgtttgtatgtgtggcctttttggttattgattgttctctcgtgactttgatcatttctg

SEQ ID NO: 5325 - DNA, 572 bp, Glycine max
aagaagccactctcctgaagagctgctcatagtgaggcttacagtaaagaacaccttccattgaggaatagttactcagctttaatgttcctttgcagtgagagcatctgaagcaagctttgtgataagcagtaccatcagcagaaagctgatcaacgggataaaccgttttctcacaagccttgcacttttgctgggtaccgataaaagacattgctatggcttttagatctaaattcaccaccaattccaaattcacaaggcactggatcgacttcagagactacttttcttgttagatttgcctgtcagtaacttgagcttgtgaagagaaagtggtgaatggtggatcggttgtgatctgaagctttaaactcaggttaggactcgggactgtgaatgtcattgaatatatattgataacagatcatatcttggtcaccataatgaaaatgtaataaagagagaaaaatgaagagattttaattgcaaataataactactactattaggaaccaggatacaaatatccttgctgtctccattaacacttttttattcgtttggtagaa

SEQ ID NO: 5326 - DNA, 278 bp, Glycine max
tttctcacaagccttgcacttttgctgggtaccgataaaagacattgctatggcttttagatctaaattcaccaccaattccaaattcacaaggcactggatcggcttcagagactacttttcttgttagatttgcctgtcagtaacttgagcttgtgaagagaaagtggtgaatggtggatcggttgtgatctgaagctttaaactgaaaaggtgaagataaagagagagtgagaaaatttggagggtgaaagagaagaagaagagcaagttgagac

SEQ ID NO: 5327 - DNA, 317 bp, Glycine max
aaaatctcttcatttttctctctttgttacattttcattatggtgaccaagatatgatctgttatcaatatatattcaatgacatacacagtcccgagtgctaaacctgagtttaaagcttcagatcacaacagatccaccattcacctcaccactttctcttcacaaggcaaatctaacaagaaaaagtagtctctgaagccgatccagtgtcttgtgaatttggaattggtggtgaatttagatctaaaaagccatagcaatgtcttttatcggtacccagcaaaagtgcaaggcttgtgagaaaacggtttatc

SEQ ID NO: 5328 - DNA, 1168 bp, Glycine max
ccaaccaccacacaattcctacacatttctactctttagtttctccaattttctttctcaattctcaacaatggccactacaacacaacttcacttaccccctggattcagattccatccaacagatgaagaactcgtcatccactacctttgtcgcaaatgcgcttcgcaacatatcgcggttcccataatcgccgaaattgatctgtacaagtacgacccttgggaccttccaggaatggctttgtacggagagaaagagtggtattttttcacgccgagggaccgcaagtacccgaacggttcgcggccgaaccggtccgcgggaaccgggtactggaaggcaaccggagcggataaaccagttggtaaaccgaaaccggttgggatcaagaaagcgttggttttttacgctggaaaagcgcccaagggagagaaaactaactggatcatgcacgagtatcgtcttgcagacgtggatcgttccgttcgcaaaaagaacagcttaaggctggatgactgggtgctgtgccgaatttacaacaagaaaggtgcaattgaaaagcaacaactaccaccaccgagtggggtccgcaaaattgaatgttccgaaatggaggacgagaagccggagattctgccgccagatccgccgtatacggcggcgacggtggcggattgcctgtacttcgaggcttccgactcggtgccccggctgcacacgacggactcgagctgctccgagcaggtggtgtcggcggagtttgcgagcgaggtgcagagcgagccgaagaggggcagcaacaacaacaacgagtttgcatataattacgtggatgccactctcgggaataatcagatgtcgccgctccaggatatcttcatgtacctctccaggcccttctgaaatcaacacgcacgagacggcacgacgtcgttctttgctttgtgtgtgcatgatgcatttttgacgtgcctgctgcattgcatggaagcacgagactgagtgaatgtccgtgagtgtgtccgtgctggtgcgcgtagatgattattattataaaaaatcaaaaaaacaaaaaagagaagcattcatatatgaacatgatgaatcccactgtttacatgatctagtcgcaattaatagtttgatattaaataaattgtgtgg

SEQ ID NO: 5329 - DNA, 994 bp, Glycine max
cacaatttcatttcatttttccttttcacttcactttcccccaattttctttctcaacaatggccgcagcaacacaactccacttaccccctggattccgattccaccccaccgatgaagaactcgtcgttcactatctctgccgcaaatgcgcttcgcaagaaatcgcagttccaataatcgccgaaatcgatctctacaagaatggctttgtacggagagaaagagtggtattttttcacgccgagggaccgcaagtacccgaacggttcgcggccgaaccggtccgcggggaccggatactggaaggcaaccggagcggataaaccggttggcaaaccgaaacctgttgggatcaagaaagcattggttttttacgccggaaaagcgcccaagggagtgaaaactaactggatcatgcacgagtatcgtctcgccgacgtggatcgttcggttcgcaaaaagaacagcttaaggctggatgactgggtgctgtgtcgaatttacaacaagaaaggtgcaattgagaagcagcaaccagcaccgccaccaccgagtggtgtccacaaaattgaatgttacgaaatggaagacgtgaagccggagtatacggcggcggattgcctgtacttcgaggcttccgactcggtgccgcggctgcacacgacggagtcgagctgttcggagcaggtggtgtcggcggagtttgcgagcgaggtgcagagcgagcggaagaggcagggcaacagcgagttttcgtataattacatggatgccactctcgggaataatcagatgtcgccgctccaggatatcttcatgtacctctccaggcccttctgaaatcaacacgcacgagacggcacgacgtcgttctttgctttgtgtgtgcatgatgcatttttgacgtgcctgctgcattgcatggaagcacgagactgagtgaatgtccgtgagtgtgtccgtgctggtgcgcgtagatgattattattat

SEQ ID NO: 5330 - DNA, 449 bp, Glycine max
ccaccacacaatttcatttcatttttccttttcacttcactttcccccaattttctttctcaacaatggccgcagcaacacaactccacttaccccctggattccgattccaccccaccgatgaagaactcgtcgttcactatctctgccgcaaatgcgcttcgcaagaaatcgcagttccaataatcgccgaaatcgatctctacaagtacgacccatgggaccttccaggaatggctttgtacggagagaaagagtggttttttttcacgccgagggaccgcaagtacccgaacggttcgcggccgaaccggtccgcggggaccggatactggaaggcaaccggagcggataaaccggttggcaaaccgaaacctgttgggatcaagaaagcattggttttttacgccggaaaagcgcccaagggagtgaaaactaactggatcatg

SEQ ID NO: 5331 - DNA, 733 bp, Glycine max
gatatatatgtaatagaaggtgtcaaaacacttcaactttaggctccatctcaaaaaaatgggtggtttagctagcaatcttcctctaattgttatggtgggtctgcaaattcattatgcagcacttgctatattcacaagagccgctttgttagatggattgagtacgacggtctttgtagtgtacaggcaaggcatagccactttggctttggcgcctatgtttttctctcctaagcggagacaatcagtgaaagattctttgggattcaggagcttctttttgatgtttgtgaccgctcttgttggagtcacagcaaatcagaatgcatactttaaaggtttattttatgcatcctctactgcagctaccgctatgagtaatctgataccagcattaacgtttgtaattgcggcaattgcgggatttgagaaagttgacataagcttaagaagcacggccaagatattagggacagtttgttgcgtggctggagccttaaccatggcattggtcaaaggacagaagctgttacacacggagttccttccttctatacatctcaccggcagtcaaggtgatgattggctgctgggttgcctattgctcttagcaagcagtgttttttggtcatgttggatgatcctgcaggtaccaatcacttcgtgctgcccagaccatttattatcaaccttttggatgtgtctgttttcaacaatacaggctgcccta

SEQ ID NO: 5332 - DNA, 589 bp, Glycine max
ggaatgacaaaatatttttagttaaaaatattgagagaagtataataattttgagcatccaaaacggttatcggtaattcccagcttcacaaaatactgttacaaccattctggcgtagaatccggttccagacaaacacacactcccacatccaaatccaaatagaaaacacaaacacactctcactttttctcattcacaccgacacacgcattccccccatacgccgtcgttttccaaagcttcgcgccttcaaatccaatccacattcccatcaatcagcactggagtcgctccaagtgctgaagcctccctccccctccgccgccggccagattcgcttccgctccccttcctccgccgaactcctcgccaccgccgagctggatctcgaaaccaccaaaatgctgaaacgctccggccggcccccgccgccgacgccggagtcgctcaccgacaagatctaccacctccggggtgcgtttctgatggtggcggtgccgctcctcctcgtcacgctcgtgctctacgccatgccttccgcctcctccagcgagtccgtggaggactacgccctcacgcaaacgc

SEQ ID NO: 5333 - DNA, 550 bp, Glycine max
gtcgacccagcgttcgagcgagaatctacagagggggagggttattggacacattcttcagcgactgcgtttttggatcggaacctcttctgcggcgtagcaatgggacactccaacgtttggaattctcacccaaaaaactacggtcctggttctcgcacttgccgagtgtgtgggaatccacatggactgatcaggaagtatggccttatgtgctgcaggcagtgcttccgtagcaatgccaaggaaattggcttcatcaagtatcgctaaaagagctgttgtcacctacggaccaatattgtgttctggcactaggatgttttgaggatgttatgtttgaagaaacttgagactttttttttttcatctaattaattatcagacataatgtgtggaacgaagaatacttttatataaattgtttttgaaccaaaaaaaaaaaaaaaaaaactcgagttggcctctctgtttgatcctttaataattctgcattgcatgtgcatgcgtatcacacaggtgcaagcttatgctaacttgcattcgcatt

SEQ ID NO: 5334 - DNA, 507 bp, Glycine max
cgatgatggctttcccatcatggtcaaagtgagagagcatacacaaggaaaagaactgcagaatgatggctcacggagaaagatgtagatagctcaaaacaattatataaaaaacaaaaatattcttagttccacaaattgagttttgataattaacttcactaaatgtcacaaaaattcttaggttcttcagacagtaaaatcaacccagcctaatgcaagaatccaaaccgaatggggcagttggacactaatccttcagcgatacttaatgaagccaatttccttggcattgctacggaagcactgcctgcaacacataagcccatacttcctgatcaatccatgaggattcccacacacacggcaggtgcgagaaccaggtccgtagttctttggatgagagttccacacattggagtgccccatgcttttgaattgccaagattaaaacgcaagaatccggaaactcctagcctccaatgctcgagccgattcgctcgtagt

SEQ ID NO: 5335 - DNA, 400 bp, Glycine max
cttgaggctagggttaccggattcttgcgttttaatatctgcaattcagaagcatggggcactccaatgtgtggaattctcaccctaagaactacggacctggttctcgcacttgccgtgtgtgtgggaatcctcatggattgatcaggaaatatgggcttatgtgttgcaggcagtgcttccgaagcaatgccaaggaaattggcttcatcaagtatcggtgaaagattagttttccacctgccccacccggtttggattcttgcatcaggctatgatgacgtggggatgattttactgtttgaagaacttaaaattttttgtgacatttagcaaagttaattatcaaactcaagttgtggaactaagaatatttttgttttttatataattgttttga

SEQ ID NO: 5336 - DNA, 291 bp, Glycine max
cttgaggctagggttaccggattcttgcgttttaatatctgcaattcagaagcatggggcactccaatgtgtggaattctcaccctaagaactacggacctggttctcgcacttggtatgttactcatcttcgccaaatggtgattcaggatgagttgatccttttccctctttgttccttctcaatttgattatgcgattattattaaggtttttgcttttaatttgaagcttttaattgtatcccccatatgagtactttgaaactgtgttttttctgataacaagtat

SEQ ID NO: 5337 - DNA, 439 bp, Glycine max
cgggagttgaaggatatctctctcattacatgatcgatcattcatagcatagtgtgaaatgggagcgataccctaagaagaagaagaagaagaagaagaagatgccgaagaagatgggggtgaacacgaaggcggaggcggcgagggctcgtaagagcgcggcggatacggagcggaaggagaaggagagtcgagagaaggaggaccagtactggcgagaggcggagggttcaaagtcacgcgccgcgaagaagaaggaggaagaggccgaaaagagggcggaggcagccgcgcggaaagcggaggcgcgacggttggcggagcaggaggagaaggagctggagaagtcgatgaagaaggtggacaagaaggcgacacgggtgtcgatcccggtgccgaaggtgacggaagtggagctgatgaggcggagggaggagga

SEQ ID NO: 5338 - DNA, 501 bp, Glycine max
gtcgagccgagaaaatagattgtgttggacaagaagtgggccgaagcccatggatgatggtgtctggcttaaaggttaaacgaagatgattgaggatgtcatgatgcaagcgaggaagggaatcgaaggatctctctctctcatcacatgatcattcagcgagcaatagcatagtgtgaaatttgagtgagcgagcgaggaatcggaagaaaacgaaaccctaagaagaagatgccgaagaagatgggggtgaacacgaaggcggatgcggcaagggcacgtaagagcgcggtggatacggagcgcaaggagaaggagactcgagagaaggaggaccagtactggcgagaggcggagggttcaaagtcacgcgccgcgaagaagaaggaggaagaggccgaaaagagggcggaggcagccgcgcggaaagcggaggcgcgtcggttggcggagcaggaggagaaggagctggagaagtcgatgaagaaagtggacaagaag

SEQ ID NO: 5339 - DNA, 1030 bp, Glycine max
tttatgtttttgaaagagaagctatctttgacatttgatgagatccttcaagctaaaaatccgtgcaaaggagttgcaagattagaagcatctggtgttgcggtggatgtttcatcattactcctttctccaaagatggagctgccaatcaacaattttgcgaatgataaaccgtggcattatcaggatccaactgggaaggttcaaggacctttctctttattgcagctgtataagtggaatgcttgtggatattttccttcagatctcagaatatggagggtagacgagacacaaaataactctatattcttaactgatgtgctgaatgggaagtgttcaaaaaatgtgtcattgccaaacaacagccaacagctgtctttgggaaccaatagtacattggaaaataaagaaaatagtcaggatggtggtgagaatgagaacaatgcgacaaggaatggaaattctgcaaaccatcaaattgttgagcagtgtgaggagcaaaaagtggctgatacttgtacacaatctaatggtaaagatgaatctgttaggagcaatggttggaactctcagtctccaggtttgactatacaagcagatgggaataacaatgaggggcaaagtggaaattctgaaaggagggaggagtcccccaaatgtgaaatttcttgtcatgatgtcccccatgtatacgcttcactgccttcaactgtattttcagagaaactgaatgagaatccttctgataaattaacagaagttcataagattgaagtaatgtctgaagataatggaaattctgtcttgaacagagtttctgagggtcaaagtaatagtgggcaaagttgtcagaaacaatcagacagtgaggagaattcagggctatcttctggtcagaactggagatgccctgatgtaaccaatccagtgtgtaacatatctacatggctatcaatctttggtgaaccaaatgatttggatgagtcagtttcagatctgctggctgaaagtgaggcaatggagtcac

SEQ ID NO: 5340 - DNA, 253 bp, Glycine max
aaaattttgtttctttgtgtgtgtatggtgatgataacttaattagtgttcaaaaaatgtgtcattgccaaacaacagccaacagctgtctttgggaaccaatagtacattggaaaataaagaaaatagtcaggatggtggtgagaatgagaacaatgcgacaaggaatggaaattctgcaaaccatcaaattgttgagcagtgtgatgagcaaaaagtggctgatacttatacacaatctaatggtaaagat

SEQ ID NO: 5341 - DNA, 2041 bp, Glycine max
cgtttattcgtttccctgcttctgtgagaattttgctgacgatcatacgctttctctttctttggctttcggtttcttggtgctgtttgagtgtttgtgcattgtacattattatctctacatgttctgatgttattttccttgcaggttgtgaattatttgcaaatctgattcaactacagtgtctattttgactcccaagattgcaagtggcagttatggggcataggcacttacataacacatcttcattgttcgatggtgagcctgaccagaactggaatcatttgcatactgatcaacaatatgtgcaccttggtaggactaacacttcagagaatagttcatttatttatcctgctgaaaatatgtccatagatagcatatctttcccctctcattggaattcttcctcaaggtcaaatggatatgcatcctctagtcacaacattgttgtacctcctcaccagtcagatgcctcaggcacttctaatgatcattttgtgcattcgtctagtgctggaccattctttacagtgtcggtcatttttggacgccgaaggttggtgtaaatatgacagacaaacatttcatgttgatgctggttttattgatcttacaatgggaagtggacaagggcatcacaagcgtaagagccctggaattccttcagtctacgagggaggcagtactagtagatactttaatgctgggagttcaactgatcttcctatatcttcagaattgtggcaggagaagccaaatattgattctcaatatatgccctgggatcattttactatgacacccacattcagaggtactggcctttcaattaagggtgagggttctttgcggaatgtgaggagccgttctacacttgatttggattccaatctggctaggacccattcatcaagtaatcattcacacaattcctaccctactgtcccaccagttgaccattctagcacggtggatctttctggtcagacttctgttacattgacaagggcttggagccaaatgaacatatctccagctaatggaagggtgtgattatcagatacaggtgcttttggtcttgaaacaagtcacttccttgttggaagtggtgctactgctagcaatgctgcttctgtagatgttgggggattccatcatgaatttggtacaagcagaaatcctactgctccttaaaggttttcataatactcaaactcaaactgctaggggaattagaagcaactattctcagagatccacaccagcttttagggcttcttcaagcttgcgcttgggacatgtgacatctgatgatggattgcctatggtagctgaaagttactcttctagacttccaaggccattgagcaccattggctggaggaatggtgatagaaatgggaggtcaagaatttctagtgaaagatatcgatcattggctgagagtggtctgcatgatcgtttctcctctgagggtttcatggttgttgagcgtgcatcagtgtatggttccaggaatatgcttgatcagcaccgagacatgaggatggatgtagataacatgagttatgaggaactacttgcacttggtgagaggattggctatgtgaacacaggagtctctgaggatttgctttccaaatgtttgacggaaacaatatattgttcatctgagcaaagtgaagacgaaggaaactgcgtaatatgtctggaagagtacaagaatatggacgatgttggaacacttcaaacttgtggacatgactaccatgtgagctgcattaaaaagtggctatctatgaagaaattatgtcctatctgcaaagtatctgctttgcctgaggatacgaaggataaataacttctgtaatataaattaatcccattttgtgtatatatttggacatccctaaaaaatgaggaaacgaacctgtttttggaaatgttgtaacaggaatactgctttatgtcaatgaatttgtttccggcttcgatctcaataacgcgaagccttgaaattatgtagttaatttat

SEQ ID NO: 5342 - DNA, 525 bp, Glycine max
cttgataactcagtttttggcagagttaaagaagtcagattatcttctttcttgaagaatacactacatgcttcctcaccttctcctgctcctgctccatctccacagttaattgatcactctgagccatcaacttcaccacatcgtgctagtccttacactccaatatcaccagcagctgctgaacaacctccttgtttcgattgtgaagtaccctcacctgcaccttctatggtgcctgcgcatcctccagatccctgtctatatagtggcttccttcatcatccaatcccttcgccaaaatcttattctaaaccatcctttccccctgattattcacctgctgctgcccctacctcaaattctgctagccacaccagtgaggaagcttctgatccgtctcgtgaagccgaggtgtcccatggatccaagcttcggcagggtgaagagacgtctaataaactggtgtctcatctacttgctccatcctctttatcttcagcgagtggtgatttccgtggggaa

SEQ ID NO: 5343 - DNA, 442 bp, Glycine max
gaccacttggataaacgaacttggacttatatctttggagcttgctgtgccacctctgtgttcataccttcttttcacaattaccgtatttggtcttttctgggacttggaatgaccacttacactgcttggtacttggcaatagcagcccttattcatggccaggcagaaaatgtgacacacacgggtccaacgaagctagtgctgtacttcacaggagccaccaacatactgtacacgtttggtggacatgcagttactgtagagattatgcacgccatgtggaagccacagaagttcaagtacatatacttgctggccactttgtacgttttcacactaacgattccttctgctgctgccgtttactgggcttttggtgatgaacttctcaatcattccaatgcattctctctcctccccaaaaatcgatttcgtgatg

SEQ ID NO: 5344 - DNA, 567 bp, Glycine max
ctcgagccgcggatcttgcccctctcttctctgtgccctctgtgtttctgtctctctgttcctttctttcttttcttattttccatacacatattatatataatatatcctctctgcttatactcctagtattatataaggcctagagacaacattcattgcaattggcagcacataattcaaagggcaatggcctcttggaagaagaccatcacaactccattcaaaaaggcttgcactgtatttaaacagcagcaaccaccaagggatcaaaagaagtctcaaacagaccaagagaggcaagtaatggatctgcagggtgaagtgatggcatgtgggtatgaagatgttcaagtgatgtggtctattctggataagtccaaatcctcaaactgcaatataacctcttcaacctgacccaaccaatcaaaaacaagaaagtggcacttcagcaattagcgaatgtttttgtatgctaatgtttaaggtcataattgcatcataccagcatatcattatctggtatgaaaatataaaacattctcatagtaaaaaacaaaaaaaaaa

SEQ ID NO: 5345 - DNA, 410 bp, Glycine max
  unsure (1)..(410): unsure at all n locations
tgcccctctctcttttcttatagagaccacatttattcattgcattcaaagggcaatggcctcttggaagaagaccatcacaactccattcaaaaaggcttgcactttctttaaccagcaaccaacatctgcaagggatcaaaagaagtctcaaacagagcaagagaggcaagtaatggatctgcacggggaagtgatggcatgtgggtatgaagatgttcaagtgatgtggtctattctggataagtccaaatccacaaactgcaatataacctcttcaacctgacccaataaaaaaacacgaaagtggcacttcagcaattagcggatgtttttgtatgctaatgtttaaggtcataattgcatcatactaacatatctatttgtatgaatgtanatctcattctcat

SEQ ID NO: 5346 - DNA, 557 bp, Glycine max
gctctacaattgattcgatgctctaatctatctcgctattcctcattctccttcttaaaattcatcttcaattcaattctctctctctgtctctgtcaccgttcctcattcgcatggagaacgacaccgccgccgccgctaacaataacaccaccgccaccgccgccgcgaaagcaggttccggaggagtgaaatcgaacaaccataacctagaagaggagcattccaatttgaatggcgaggagcagatggcagaacaagtggaggcagaagaagaagaagaagaagaagaagatcgacaagccgatgaaggcgaaggagaagaaactggatctgctgcgcccaacccgcgccaaccttccagaacccctttcactaatctcagccaggtcgatgctgacctcgctctcgctcgaacccttcaggagcaggaaagggcatatatgatgctgagaatgaataatgatggaagtgattatggaagttgggaaggtggaagctatttgcatgatgatggggatgattctgatgatctacatgatggcactgatgtggat

SEQ ID NO: 5347 - DNA, 550 bp, Glycine max
ctacaattgattcgatgctctaatctatctctttttcttcttatttaaaatttcatcttcaattcaattctctttctgtcaccgttcctcattcgcatggagaacgacactgccgccgccgttaacaataacaccaccgccaccgccaccgctaaagcaggttctggaggagtgaaatcgaacaaccataacctagaagaggagcattccaatttgaatggcgaggagcacatggcagaacaagtggaggcagaagaagaggaagatcgagaagccgatgatggtgaaggagaacaaactggatctcgtcaaccttccagaacccctttcactaatctcagccaggtcgatgctgacctcgctctcgctcgaacccttcaggaacaggaaagggcatatatgatgctgagaatgaataatgaaggaagtgattatggaagttgggaaggcggaagctatttgcatgatgaaggagatgattttgatgatctacatgatggcactgatgtggatgaggatgaagatgatgatgatgatgaagatgatgatg

SEQ ID NO: 5348 - DNA, 503 bp, Glycine max
agagctatgactgcgcatgcacgcgtgcttgagcttcggctcgaggttgagatagccggcttggcctggcagggtcgtgcacattgcgggcttgatgatgccaaaaatactgctcgcctgttggcgcttctcatgcaccggggttttaaattttccattaccaattccataatgtggcagacagctgatcgaccactgatgtggaaacagtcaccagaacaaccaatcgttttccctcattgcccctacaaagcaaaggatatcactacccccgttgttcagtatcaccctttctgcttctgtggggtgaaaagcagcaggggcatggtgaggaagccgggtcccaagcaagggagcctcttctttggatgtggaaattggactgcgactagaggtgctcgctgccattacttcgaatgggcttctaactgaatgcaccttttgatctactatgatcaaaatcctaagttttcttatatgttctatggtaaaaaaaaaattaa

SEQ ID NO: 5349 - DNA, 653 bp, Glycine max
gcctcacgtcaacgctgttgggtctgggcctggacacgggcccgggccaggacccgggccaggcggacttctccttgtccccaagtctgaagaagtcggtcggcccatggactttgtcggctcacgaattggactcaatctcggaggacgaacttacttctcgtcctctgaggatgacttcgtgagccggctctaccgtcggtctaggcccgtggaaccgggttcgactatctcgtcgaactcgccgcgatgccaggccgagggttgcaatgctgatctgtcgcaagccaagcactatcaccgccgccacaaggtgtgcgagtttcactccaaagccgccaccgtcatcgccgccggcttgactcagcgattctgccagcaatgcagcaggttccatcttctttctgagtttgataacggaaaacgtagctgcaggaagagattggcagatcataatcgccgcagaagaaaaactcaacaaccaactcaagaaattcagaaatctcagccttctttggataatgttgcaagatctccaccggactccggagctcagtcttcatcgtcagtaacggtggcagtgtcgccaccggattatttccggcagaggccataccaaagcacaaacaacccttcatcgatttcaagctcac

SEQ ID NO: 5350 - DNA, 655 bp, Glycine max
cttaaacaagaaacctccttagattacttatgtaatttgccacctcataggtgagtccgtttttctcctttacttaacataggttatcatgaggggattattatggcagataaatgacatctgcatatagaactactttgattacttaaacaagaagcatcctttgattacttatgcaatgattttgtaggagtaagataaattggtctcattatatgtttttggatcattattatgctttacattatattgacgttttcaattttttcatcaacttgcccttttagataatagtaccaccccttaaatcttgaagttaacatattattcgtttttatttgcagatttgtgactctttacgctaagacaattcctgagtccattgtcggtgagacatttttggagcaatatcaaaatcataatgatcctgtcactactattgatccgaagcgtacttacggagttagagctcccacaatgcatcccatatttgaaaatttccgagtcgtgaccttgaaagcacttttaacatctgcagcttcaacctatcagcttacagccttaggagaattgctatatcagtgccaccacagctacggtacttgtggacttggctctgatggaacagataggcttgtaaacttagtgcaagagt

SEQ ID NO: 5351 - DNA, 465 bp, Glycine max
tttggaataagacacagtgttggaggtgcagactatggttctgttagaattggcgcctttatgggtatgaagatgataaaggccaaggcatctgaggaattgtctgagagttgggctgctaatgggttgaactatgatgaagtggaacaagatgacatagaactacttaaacaagaaacctccttagattacttatgtaatttgccacctcatagatttgtgactctttacgctaagacaattcctgagtccattgtcggtgagacatttttggagcaatatcaaaatcataatgatcctgtcactactattgatccgaagcgtacttacggagttagagctcccacaatgcatcccatatttgaaaatttccgagtcgtgaccttgaaagcacttttaacatctgcagcttcaacctatcagcttacagccttaggagaattgctatatcagtgccaccacagc

SEQ ID NO: 5352 - DNA, 482 bp, Glycine max
ttgtcattcattattttactacagagcttcaagagagttgaagaagctctctctcttggggctgaaattcaatagtaggagaaaaatcctgtcgaggttatctatttttcttccaaaacggccccgtttcaggatttttccccttgctattttacttgatttctgagttcactatcaagcaagctagtttggtttataatggaacaaaaaccattattagcctgcgtttgttttgaaagatttttctgaagttcactaagttaagccaagtcaatgatttgctgttgcctatggttgaagttgtttctttctgagggaataattagagatgatctgcactgttgaatatttacggcagataaatgagatagtgaagtttacattgttcttcctgttaagctgtgttaccttgaattgtactggttatatatatccatttcgtttctaattcaaatcaaatgtaatgtttttcttttcttgtc

SEQ ID NO: 5353 - DNA, 523 bp, Glycine max
aaccttcaagtgctacaaagacgtcatgcgcatgttcttcctcgtcgtcggccccctccaactcatctcttacccttccatccagatgattgggatcaggacgggcttgccattaccttcgtggcgggagatcctctcgcagcttctggtgtactttctcgtagaggattacaccaattactggatccacaggtttctgcacaacgattgggggtacgagaagattcaccgcgtccaccacgagtaccatgcgcccattggattcgccgcgccctatgcccactgggccgagatcttgatcctcgggattccctcctttcttgggcctgccatggttcctggccacattatcaccttctggctctggatagccttgcgccagattgaagccattgacacgcacagcgggtatgactttcctaggagtatcacaaaatatattccattttatggtggtgctgagtatcatgattaccatcattacgttggaagacacagccaaagcaattttgcttcagttttc

SEQ ID NO: 5354 - DNA, 646 bp, Glycine max
ggagggttatttataaggcacacatctcatcgttttctctgtgcctggccatccggtttcccagatctgctccttccgtcaccccacagaagtcagttgaagagcatgggtcgtggagttagcagtggtggtggtcaaagttccttgggttatctttttggcagtggagaggcccctgccgcaaaaccggcaacaaacaatgccccagcccaacctgaagtgcaggctgtaaataatgcgcctccttcaaaagcatctcctcctactaaaacaatagaccctaacaaggctgctggtataaacagtcattctactgatggccagaacaccggcaacttcatcacggaccgaccctcaaccaaggtccatgctgcccctggtggtggttcttccctaggttatctctttggtgaacctggggaggggaaatgataccttgtttgcaaagcttttgctcgatgatgaatgatttattttgaaattcaggtcgtggaaacataatggaagatatggtgtattataggttatggttgctacgataagtgagtcaagagtgctatattttggatgtgctaaacatctattacagaactgtgtttgacagatacaaatatctctattaagtattaagtgcacatttgcttcc

SEQ ID NO: 5355 - DNA, 414 bp, Glycine max
ggagtgtgagggttatttataaggcacacatctcatcgttttctctgtgcctggcgatccggtttcccagatctgctccttcctcaccccacaggctgatactagactgtaactttcagaagtcagttgaagagcatgggtcgtggagttagcagtggtggtggtcaaagttccttgggttatctttttggcagtggagaggcccctgccgcaaaaccggcaacaaacaatgccccagcccaacctgaagtgcaggctgtaaataatgcgcctccttcaaaagcatctcctcctactaaaacaatagaccctaacaaggctgctggtataaacagtcattctactgatggccagaacaccggcaacttcatcacggaccgaccctcaaccaaggtccatgctgcccctggtggt

SEQ ID NO: 5356 - DNA, 1089 bp, Glycine max
aaaagggacaacattgaagacaacgatccccttctttgcttttctttgaatggaacaagctgggaagcaaggaattatggtggcgtctcagagtcaaaaccccattgagcaaatccaagcgcgcttcaaggacttggaaactggattccgcctctggctctccaagcagtccctccccgtcgaggccgccgtcgtcaccaccaccagcgccgcccagggcgccgccatcggcgccttcatgggcaccctcaccgccgacgcctcctccaccttccccacccctcctcccaacgcctctctcaatccccaagccatggcgtctcttaaacaagcgcaggctctagctggaggtcctttaattcaggcgcgaaactttgctgtgatgacgggagtgaacgctgggatttcctgtgtcttgaaaaggataaggggaaaggaagatgtccagtctagcatggcggcagcttttggttcaggggccttgttttcattagtaagtggcatgggtggaccaaatcaagcaacaaatgcactcacttctggacttttctttgcacttgttcaaggtggacttttccagataggacaaaagttttctcaaccacctgctgaagatactcactatgctaaaacaagacacatgttgaacaatcttggccttcagagttacgaaaagaatttcaagaaaggcttgttaacagacaacactctgcctttactcacagacagtgctctcagagatgtgaggattcctcctggacctaggcttttgattcttgaccacatccagagggacgcggatttgaaagataagcgaggaagccgaaagtgactgatatgaagagtttgctgcctttgaactttgaaatccattgaaaaatggatagtagaaagtttgtgttccaaatgaattttgtctttttttgtttgttagctctgttcaattgttgttgcagtgtacttgatacaatttggttaaccaatcagttattttagttgtgccatgacacgtaaatggcttgaaagtaaattagggagcacgaatttgttaactctaaaataagaaaagttattgcttccttgtgtagg

SEQ ID NO: 5357 - DNA, 869 bp, Glycine max
aaggacacggaggggacaacacaacgcaacacaacgcgcactctctcttttctctcttaacacaaaaaccctatcgttcttcgcggtttcgccgattctcgccatgccgaaagccaaatccgacgccaaagccgccgatagccggttgaagcgcaagggcgctggtgctggaaggaagcaatcgaagaaagctgctaaggatcctaacaagccaaagagacctccaagcgctttcttcgttttcatgtccgagttcagagagcagtttaagaaggagcatcctaacaacaaatccgtcgctgttgtcggtaaagctggtggtgacaaatggaaatcgctgtctgatgctgaaaaggcccccttcgttgccacggccgaaaagaagaaacaagagtatgagaaaactattttggcttacaataagaaattggaggggaagaattcagaggaagacgagtctgacaagtcaaagtctgaagtcaatgacgatgaggaagatgaggaggaggaggatgatgatgacgacgagtgaagatggtgatacaagatgaagcgtaggaggatgtgggaaaagaaaattgttttgcatagtagttgttgggtttagaatttcataggatggttcccaacccacatccctttatgataattagtttctgaatttttattttgtcctcccttactagggttagattagcgcacaatcgtaattagggttcagtatcatgatcatgtacttaaaagtcaatgctatgatacgtttcaattctattctcgaagaaattccacagcctctttcaactttcccttttaaaaaaaaaaaaaaaaaaaaaaaaagcgaccgccctacaggatgcagctacgtacgc

SEQ ID NO: 5358 - DNA, 452 bp, Glycine max
gttttctctacactgcccttcctcgcaacccttcttatcccctggctcgcgcgctcaaacctcacaacacaacacaacgcgcactctctctttttctctctgttttttgttctctcttcgcttaaaccctatcgttcttctcgttttcgccgattctcgccatgccgaaagctaaatccgacgccaaagccgccgatagcaggttgaagcggaagggcgctggtgctgggaggaagcaatcgaggaaagctgctaaggaccctaacaagccgaagagacctccaagcgctttcttcgttttcatgtccgagttcagagagcagttcaagaaggagcatcctaacaacaaatccgtcgctgttgtcggcaaagctggtggtgaaaaatggaaatcgctatctgatgctgaaaaggcccctttcgttgctactgctgagaagaagaaacaggag

SEQ ID NO: 5359 - DNA, 920 bp, Glycine max
gcctcagctcactttttgcaccttgattccatttttccaacaactcactggcattaacgttgtcatgttctatgcccctgtccttttcaagactttgggctttggcaacgatgcttcccttatgtcttcagttatcaccggaggtgtaaatgtggttgccactcttgtttccatcttgactgtggacaaggttggaagaaaagttttattccttgaaggtggtgttcaaatgttgatttgccagattgctactggagtcatgattgctatgaagttcggggtgagtggcgaaggctcgttttcctccggagaagccaaccttattttgttctttatatgtgcatttgttgctgcatttgcatggtcttggggtccactagggtggttggtgcctagtgaaatatgccctcttgaggttcgttcggcaggtcgagcaccaatgttgccgtaaacatgttgttcacttttgctattgctcaagttttcctagccatgctttgccacttgaagtttggccttttcttcttctttgctgcatttgtgctcatcatgaccctcttcattgccctgttgttgcctgagacaaagaacatccccattgaagaaatgcatttagtgtggaggtcacattggttttggtcaaagattgttccacaggttgataatgatcgcaagccaactactgctcagagttgaatcaaggatgcccattatactgtatgtatatgtgtatgtatatgtgtatgtatatatgtatatgtatatatatatatattgtatatatatgtgtgtatatatatatatataaggactgaaaatgaaaagaaaaaatagagcttgagtccctatgtatcaaaagaaatgttgaattattgattaaaaaaatcatcacctgctttcactcacgaaaattttattaa

SEQ ID NO: 5360 - DNA, 444 bp, Glycine max
tagggtggttggtgcctagtgaaatatgccctcttgaggttcgttcagcaggtccagccatcaatgttgccgtaaacatgctgttcacttttgcgattgctcaagttttcctagtcatgctttgcgacttgaagtttggccttttcttcttctttgcggcatttgtactcatcatgaccatcttcattgccatgttgttgcctcagacaaagaacatccccattgaagaaatgcatacagtctggagatcacattggttttggtcaaagattgttccacatgctgatgatgatcgcaagcctgaggctgcccaaagttgaataaagaatgccaatgatatataaggagtgaaaatggaagaagaaaaaaaaaaagaggttgcattcctatgtatcacaagaaatgttgaattattgattagggaaagaatgctctttttcactc

SEQ ID NO: 5361 - DNA, 1213 bp, Glycine max
tttctttctcgtccgctcactcactcactcacctccatttccattgtcactgctccttattcggatctatctcacaccctttctctcttttcttcttttctttcgttttcccttcgcaagtgagagatggcgcaaattctgcttcatgggactctccacgccaccgtcttcgaggttgataggctcaatgctggtggtggtggcggcaattttttcagcaagctcaagcaaaactttgaggagactgttggcatcggaaagggagttactaaactctatgcaaccattgatctggagaaagcaagagtaggaaggactagaatcatagaaaatgaacatactaatcccagatggtatgagtcttttcacatttattgtgctcatatggcttcaaatatcatattcactgtgaaagatgataatcctattggggcaactttaattggaagagcttatgtgcctgtttcggaggtcttggatggtgaggaaatagataggtgggttgaaatcttggacgaggaaaaaaacccaatacaagagggttcaaagatccatgtgaagctgcaatattttgatgtcacaaaagaccgcaactgggctcgaggcattagaagtcccaaattccccggcgttccctatactttcttctcacagaggcaaggatgtaaggtatctctgtaccaagatgctcatgtgcctgataattttgtacctaaaatacctcttgctggaggcaagaattatgaggctcataggtgttgggaggatatatttgatgcaatcactgatgctaaacacttcatatacattactggttggtctgtttatactgaaatttccttggtgagggattctaggaggccaaagcctgggggagaccaaacacttggtgagcttctcaagaaaaaggcaaatgaaggggttaaggtattgatgcttgtttgggatgatagaacatcagttggtttgttgaaaaaagatggactgatggctactcacgatgaagaaactgcacagttctttgaaggcactgaggtgcattgtgttttatgcccccgcaatcctgatgatggtggtagcattgttcaggatttacaaatttctaccatgtttactcatcaccagaagatcgtggtggttgacggtgcgatgccaggtgaagggtcagataggcgaagaattgtgagttttgttgggggtattgacctctgcg

SEQ ID NO: 5362 - DNA, 422 bp, Glycine max
ggcgaatagattgcaatattatgcaataatgtgaaaaaagttgaaatatgcatgcttttcatttttcaatcttcccttgttaaaaggagagactcactcacttccattgtcactgctcctttctcggatctctctcttcttcttcttcgttttctcttcgcgagtgagagatggcgcaaattctgcttcatgggactctccatgccaccatcttcgaggttgataggctcaatgctggtggtggtggcggcaattttttcagcaagctcaagcaaaactttgaggagactgttggtattggaaagggagttactaaactctatgcaaccattgatctggagaaagcaagagtaggaaggactagaatcatagaaaatgaacatactaatcccagatggtatgagtcttttcacatttactgt

SEQ ID NO: 5363 - DNA, 1615 bp, Glycine max
gcctcatgtttcaaccggtccattcacaaaaaatggggttcctgaagaacctatcacttctgaagcaagagctcaacagatcccatctgcagactcggcttccaatgccactcaacatgtggaggcaggagtcgccactattgatctcaatgcccctccttttgatccctttttagctcagttcacttgtgaaaataaggctccactttcatcagaagctcctaatggtcatggcaagaagggtaaaatgccgactgtcgatagttctgctggtaagggtgacagtagtgggatatcctcaagttttgctgcccctaataattcaacccagactacatcattgacttctggtgctttcattgaatgcccatttgctgggacatatattaattcttggacaccacttcctggaaactctcaaatgcccccatttaaaaggagccatagtcacactgatgcaatgtctggtatgttccataagggggtccgctgtgatggctgtggtgtctatccaataactggacctcgtttcaaatccaaagtaaaggaaaattatgatctttgcaacatttgtttcaatgaaatgggtaatgggacagattatatcagaatggaccgccctgcatctgctcgggcccctcgatacttacatggacatacaaaaaactttccaacattaccaccacatatttttaagaaaggtgccattttgaagcatgcaaagccaaaactagatagtaggtttattttggatgttaatgtgatagatggtacaatgatggctccatctactgcatttacaaagatctggcggatgcgcaataatggcactatagtctggcacaagggaactcaacttgtttggattggaggagacaagtttagtgactctcattcagttgacttagaggttcctgaggatggtgtccctttggagaaggaacttgacattgccgttgacttcacagcacctccattacctggtcgttacatatcatattggaggatgacaactccatctggacataaatttggccaacgtgtttgggtccttatacaggttgatgcctctctccagtctcatggactcattttatgatacctctcaaggtctgaacttgaatattcccctcgatatcagtggctctaaaggacctcatattatagatatcaatgtccagcctactgaggatgatactgttcttcaaacccgcaagcctaatgctcccattgagcctttgaatcaaatggttgatgaggaaccaaggttggagctggaaaacgaattccctataaatgaagctacatttgttgcccctgttgcctcagccccagctgcaacctctgtggcatcttcatcagtgccttgtcctataattgatctgtctgaaacaaccccagctgttccatctaatcagcaatccccaaccgtggatgtgccatcgtcatctatgggtactggtggaggaattaattctgtggaggagaatctacttaaagagcttgaggagatgggttttaaacaggttgatttgaacaaggagatcttgaggaataatgagtacgatctggaccaatccctatactctctctgtggtgttgatgtctgaggtgt

SEQ ID NO: 5364 - DNA, 600 bp, Glycine max
gcctcatgtttcaaccggtccattcacaaaaaatggtgttcctgaagaacctatcacttttgaagcaagaggtcaacagatcccatctgcagacttggctttcaatgccactcaacaagtggaggcaggagttgcccctgttgatctcaatgtccctccttttgatccttttttagctcagttccctgatggtgatggcaagaagggtgaaatgctggctgtcaatagttctgctagtaaggatgacaatagtgggatatgctcaagttctgctggtcctaataacaattctacccagactacatcattgacttctggtgctttcattgactgtcctgggtcatattattcttggccacctccacttcctggcaactctcaaatgcccccatttaaaaggagccatagtcacactgatgcaatgtctgaaaggaaaattatgatctttgcaacatttgtttcaatgaaatgggtaatgggacagattatatcagaatggaccgccctgcatctgctcgggcccctcgatacttacatggacatacaaaaaactttccaacattaccaccacatatttttaagaaaggtgccattttgaag

SEQ ID NO: 5365 - DNA, 747 bp, Glycine max
ctcgagccgattcggctcgaggattatactctgaaagctgttggtggaagtttaacggctattcctggaatctcagatatgattgatgatactgtgaactcaattgttactgacatgctccaatggcctcataggattgtggctccacttggtggcattcctgttgataccagtgaactggagcttaaaccccagggaaaacttgcactgactgttgtcaaagcaactgctttaaagaatatggaaatgattggaaagtcagatccttatgtagttgtgcatattcgaccattatttaagtataaaaccaaggttattgataacaacctgaatcctatttggaatgagaaatttgagttgattgcagaagacaaggagacccaatcactaattcttgaggttcttgataaagacattggacaagataagcgattgggaatagcacagttaccccttattgatctagaaatacaaactgaaaaggagattgaattgaggctgctgccctcacttgatacactgaaggtgaaagataagaaggatcgaggaaccttaacagtaaaggtcatgtattatcagtttaacaaggaagagcagctggttgcactagaggcagaaaagaagatactagaagaaaggaagaaactgaaagaagctggaatgataggaagcacgatggatgcactagatggagcagtatcagtggtaggctctggtgttggactggttggtactggtgttgttgcc

SEQ ID NO: 5366 - DNA, 462 bp, Glycine max
ttcggtgtttctttctctctcatgttgtagtatctcactagtgtttttcattcgtttctgaaccacacaaacatcaccaccgaacaatgccgacggggttaccggcggcgaattccttagtggcgccggacgaagaggggtgggtgtgggggcagatcaaggcggaggcgcgccgcgacgccgagtcggagcctgctttggcgagctacctctactcgacgatcctctcgcactcgtcgctcgagcgttctctgtcttttcacctcggaaataagctctgttcctccacgcttctctcgacgctcctttatgacctgttcctcaacgcgttctccttcgacccctccctccgctccgccgccgtcgccgacctccgccccgcccgcgaacgcgacccccggcctgcgttcctactcccactggcctcctaattacaaaggcttcctcgcttggcaggccaat

SEQ ID NO: 5367 - DNA, 987 bp, Glycine max
ctggagtaaaaaattaaaaaaaaataagaaataataaatattattaaataaataaataaataaaaataaaacggaagtctcaagtctcaagtctgaaatagttgagttgacggaagttgaaaattttggttgagtaagaggcttgtctttgttccgttccgcgaccatgtctcatgagacatgcccttctgtaaagaacgtccttcttttggattccgatgggaaacgtgttgcggtcaaatacttctctgaagactggccgacaaatagtgccaaggaaaattttgagaaagttgtattcaacaagactcagaaagaccaatgcccgcacggaagcggaaatagcaatgtttgagaataacattgttgctttacaagtttgtccaagatcttcacttctttgttaccggtggtgattatgaaaatgagcttatcttagccacagttctgcaggcattttttgattctgtgggccttctgctcagaggcaatgtagacaagaaggaagcactagagaacttggatctcattctattgtgcattgatgaaattgttgatggcggtatcatacttgaaactgatccaaatgttatagctgggaaagttgctagtaatagtatagattctggagctcctttgtccgaacagactctaagtcaagcattggccccagccagggaacatcttgcaaggtcccttcttaaatgattcatatggcatttcacaatgacggaggaaacttgtctttaggtttttcctataaacgtttataagaaagaccctcattgcattctcgagaagtcgaacctggatgttgatgttccttgcgtagtgaaagttaatattgacatgctaatacaggctattctaccagtacttttcttctggcgatttgttattttagttccctattaaatttcaggatggtggcatattccgtatgttccaaaaatttcataggaaccccccttagtgccccctatttct

SEQ ID NO: 5368 - DNA, 1590 bp, Glycine max
tttggagttaaagaggtggtgctggcgatggaaactatgctcacaacaagtgacagagacagagtagaaccaaaagattcataataactaacattagaaactaggtgaaagtaactgcacagacacacaacacatcttccttaatttctccgtccatttccctcccataaataaatctttcatttccatctttcttgggtgatccaatggcgacccttttccagggattgggagttgtgaacccatcattggcttcttcaaactccaacaagttccatcttccttctcgtacatccctctcagagaggaaagatggcatttttgtggtcagatctgatgcaagggtaagcagcaaggttctgaaggctggagctcgtaagcatgaattgttggttactaatgcagtcgcaacaaaggaaggcagttctgcggcttctacatcaaaatctgggcatgaacttctcctttttgaggccctacgtgaaggtttggaagaagaaatggagagggatccttgtgtatgtgtcatgggcgaagatgtaggtcactatggaggatcctacaaggtgactaaaggccttgccacaaagtttggggaccttagagttttggacacccctattgctgagaactccttcacggggcatgggcattggggctgccatgactggtctgaggccagttgttgagggcatgaacatgggatttctacttctggcatttaaccagatctctaataattgtggcatgctgcattacacatctggaggccagttcaaaataccaattgtcattcgtggacctggtggagttgggcggcaacttggagcagagcactcacagcgattggagtcatattttcaatcaatccctggaatccagatggtggcttgctcaaccccttacaatgccaagggcttgatgaaagctgcaatccgaagtgagaatcccgtgattctttttgagcatgttttgctttataacctcaaggagagaattccagatgaagagtatgtattgtcactcgaagaagctgagatggttaggcctggggagcatgtcacaatattaacctattccaggatgaggtatcatgtcatgcaagctgctaagacactggtgaacaaggggtatgaccccgaagtgatcgatatcaggtctttgaaaccgttcgatcttcacacaatcgggaattcagtgaagaagacacaccgtgtgctaattgtggaagagtgcatgcggacaggtggaattggtgctagtttgacagctgcaattaccgaaaatttccatgactatttggatgcccctatagtatgtttatcctctcaggatgtaccaactccttatgctggaacattggaggaatggacagtagttcaacctgctcagattgtcactgcagttgagaaactctgccagtgattgctacaaaacactagcaattgtgcttgttaaattaagctagaattttcatcatggctttctctttaccttttatttcttaagtctcccataacgtaaattgttatttaacttttgttaatctttgcattttttttcttaaaaaaagaatatttagaacccccc

SEQ ID NO: 5369 - DNA, 344 bp, Glycine max
cacaaactatggtgttccttaattgctccgccccttggcgcatttccctcctataaataaattcccattctttctcgtctgcatctttcatttttcatttcttcatctttcttgggtgatacgatccaatggctgcgacccttttccagggattgggagttgtgaccccatcattctcttcttcccactccaacaagttcatgctttcttccctctcagagaggaaagatggcatatttgtggtcagatctgatgctgatgcaaggattctgaagactggagctcgttagcatgaattgttggttactaatgcagttgcaacaaagggagccagttctgcggcc

SEQ ID NO: 5370 - DNA, 290 bp, Glycine max
aggatgtgccgactccttatgctggcacattggaggaatggtcagtggttcatcctgctcgaattgtgactgcagttgagctgtctctgcaagtgattgctacaacaaccctagcaattaggatatggtttttggtaaagctattgtgcttgtcaaattaagcttgaattttcatcatgactttcttttccttttatttctgaagtctatagcccgtacctttagattgttgtttaatttctgaccatctctgcaattttttttaaagagtatttaaaacagccaccccc

SEQ ID NO: 5371 - DNA, 535 bp, Glycine max
ggtaatatgggcagttggaatcttggacaaggttgtcctacgatggaggagaaaaggagctggtttacgaggtttccgacaagagatggacatcaacgaaaatgaaaatgcagatgaagatattctcaaggtgttccgaaaacagaaagttgatgtagaaattgaagaggctgtttcaagggtgctgtccatggtcgactcaccagatgctcgtgagcaatatcatcgcatgcttgagaaatatcgtcaagctaaggctgaacttgcgggtacgagtgacgaggcatcattatcaacttctgtaggagatgacttatttattgatgatttttatccatttccctaggagcaaacgctagccttggtaatcttcattcttctgaacgatcaatttgtggcacaaccatttcgatggtctttgtatctagatgcctagaacaagctgacttattagtttgagacagtctagattgtatagtgaaaataacaatgaacattgttactttgtaaaatatgaaatggtcttgaatgcaaa

SEQ ID NO: 5372 - DNA, 619 bp, Glycine max
gtgggggaagggggaagaagaaaacccagaatcaaatcaaaaggtaaaaaagtagaagtatacgcagaagaggtggttcaagttcaatggctgagaagaaggaaatgattcccaaacaatatgacatcgatgccaaatgggacgcctgcattgatctcaccgtccgtcgcttcgtctactccgcatctgccggtgcatttggcggtctcctattttttaggagtcctgttactcgatgggcatctattgcttttggcgctggagttggaattggatctgcatatgcagaatgttctcgtctgtttgatggacctccaacaaatttacccctacctaaggtctctgaaactgctactcagaatgtgccggattctgagtagaagctacaacggatcctggttcctggttcctggacagtggtgaatcagaattttcttttgattgttgatggttccatacagcattattgctcttcaaaatgttgcactaccatgatttcgtaaatgaacgggacgtatattttattcccaagcttttacgcttttgatctcctgtgatcttacgcaatgtttatgtggagaaggattaaaaaggaagctttcttcagatgtaatttccc

SEQ ID NO: 5373 - DNA, 459 bp, Glycine max
ggaagaagaagacccagaatcaaatcaaaaggtaaaaaacaaattaaaagaaaaagggaaaagtatactacgcagaagaggtggttcaaagttcaatggctgagaagaaggaaatgattccgcaacaatttgacatcgatgccaaatgggacgcctgcattgatctcaccgtccgtcgcttcgtctactccgcaaccgccggtgcatttggcggtctcctatttttcaggagtcctgtgactcgatgggcatctattgcttttggtgctggagttggaattggatctgcatatgcagaatgttctcgtctgttcgatggacctccaacaaatttacccttacctaaggtctccgaaactgctactcaggactctgattaggagccataagggatcctggttcctggacggtggtgaatcagaattttcttgtgattgttgatgttccttacagcattat

SEQ ID NO: 5374 - DNA, 1318 bp, Glycine max
ctgagaagacgacagatggggatccacaacaaaaaactacttctcaattcagttaacacaccaaccccacatccaaagcttcagttcaatatggcaaccttgtcaagttttgctcctttggccattctaagtttagttctagtaattagtgccattgtctttgaggctgaagctaggccaaggacattctttgtatttggagattcacttgttgataatggaaacaacaattacttggctaccacggcacgtgccgatgctcccccttatgggattgattaccctccaagtcatagaccaactggtcgtttctccaatggctacaacattcctgatcttatcagtcaacgacttggtgctgaggctacattgccatacttgagtccagaattaagaggaaataagctccttgttggtgcaaattttgcttcagctggaattggaatacttaatgacactggaattcagtttataaacgtaatcagaatgtataggcagctagaatattttaaggagtatcaaaaccgagtgagtgctataattggagcttcagaggctaagaatttggtgaaacaagcactagtgctcatcactgtagggggcaatgattttgtaaacaactacttcttggtgcccaattcagcaaggtcccgccagtacccactacctcaatatgtcaagtatcttatctctgagtaccaaaaaattttgcagaggctatatgatttgggagcacgcagagttcttgtgacaggcacaggacccttgggttgtgttccatcagaattggcccaacgtggtagaaatggacaatgtgctcctgaactgcaacaagctgcagcattgtttaacccacaactcgaacaaatgttgctacaactcaacaggaaaattggaagtgacgttttcattgctgcaaacacaggaaaagcgcacaacgacttcgttactaacccccaacaatttggatttgttacatcacaagtagcttgttgtgggcaaggaccttacaatggtcttgggctatgcacagcactctccaacctttgctccaacagagagcagtatgcattttgggatgcattccatccatctgaaaaggccaataggctcattgtggaggaaattatgtcaggttctaaagcctacatgaacccaatgaaccttagcaccatcttagcgttggacgcaaacacatgaagataaacaaacccaaatttcctagaacaaaattaattgtattcaccttccttgctagttcatgacatttctctgtctacatgttttagtttattaattgtaaggaaagttatatgtt

SEQ ID NO: 5375 - DNA, 558 bp, Glycine max
tctcgagccgattcggctcgagaaaactaactagctagctagtctcagttcagttagcaaacaaccaccaaccccacatccaaaggttcatttcaatatggcaatcttgtcaagttttgctcctttgaccattcttagtttagtcttgttagtggttggaatcattgtgtctggggttgaagctaggccaagagcattctttgtgtttggagattcacttgttgacaatggaaataacaattacttggccaccacggcacgtgccgatgctcctccttatgggattgattaccctccaagtcatagaccaactggtcgtttctccaatggctacaacattcctgatcttatcagtcagagacttggtgctgagtctacattgccatacttgagtccagaattaagaggagataagctcctagttggtgccaatttcgcttcagctggaattggaatccttaatgacactggagttcagtttgtaaacgtgatcagaatgtatagacagctagaatattttaaggagtatcaaaaccgagtgagtgctataattggagc

SEQ ID NO: 5376 - DNA, 493 bp, Glycine max
ccctcaacaatttgggtttatcacgtcacaaatagcttgttgtgggcaaggaccctacaatggtcttgggctatgcacaccactctccaacctttgccccaatagagaccaatatgcattttgggatgcattccatccatctgaaaaggccaataggcttattgtggaagaaattatgtcaggttctaaaatctacatgaacccaatgaacctcagcaccatcctggctttggatgctattaccacatgaagacaccaataagtctatgcacctcgcatgctagtttcattatgtcccttttttattattgtaattgtgatttaatttcgtattcctcaatatctaattggggaattagaaagttaaagggaggaagaaacttccctttttgcataaaattacaacgaagaatatatatatatatataaatggtgggaagtactaagtgattcctgagtctcaatattaaaaaaatgttacttaattttctaa

SEQ ID NO: 5377 - DNA, 1009 bp, Glycine max
acaggacggagcggcgcgggttctggatcggttttttgcgccgctacttcgaagcaccctgcccttttcctcctcctccgccaccctccgtcctcctccccctcacgtgccgccgtggcggcttcatcccctcctgcctctccgacgacgctgtctccacgtgcaacttcgaccgtggcttcaccgtgatcgtcgccatcctccaccgcatcgagcccctcgacaactccgccatctcgaaaggtgtgtcccccgccgccagagactccgcgaagcagaccatttccaccatgcttggattgttcccctccgaccacttttctgtcatcgacactgtctccaaacaccccctccaccgcctcctcttctcctcccacaggacgaggtgaatacagaaacaatgggaatcaggacgaacatcctagtggagtgcctcgtccatatggtggtggacgaggacgtggtcgtggccgaggttcttataataatagaggagacaactccaataatgaaagacaggactctggttatgggggcagatggggttctaataatacaaaggattctgatgatggtttaagcaattttccaggggccaaggttcagaattctcctggaagagaagcttttcctggtggttggggtggtggtgcaagccgtgcaaggtggagctagtaacagtgacaatggtggctgggaacaagcaagtggtggtgctggtccaagtgatggtgaacaaggaagctctggctggggatctgccacaaagaaagcagcatctgggaacggatgggggtctggaaattctggcggtggttggtgaactcacctcacctctgagaacttagattagctttacccgcagtaggttgatcctgaagtaatccttttttccccctgaaatgaatggattatgatacttgggtaatttctttttgcaatgaaatgaattctgactgtttctttgaaaaaaaaaaaaaaaaaaaaaagggcggccgctcgcgatcta

SEQ ID NO: 5378 - DNA, 515 bp, Glycine max
ccataataagttgggttcaccgttcaccctcaccagcagcaccattccaatttccatggcactctcctttcgccccgtcatccacccccgcgtcaccgaccggtcactctttcagttcctcccacccaagcctccccctcttccaacttcgccacctccctccgttctcctccccctcacgcgtcgccgcggcggcttccttccctcctgcctctccgacgacgccgtctccacccgcaacttcgaccgcggcttcaccgtgatcgccgccatgctccgccgcatcgagcccctcgacaactccgccatctccaaaggcgtgtcccccgccgccagagactccatgaagcagaccatctccaccatgctcggattgctaccctccgatcacttcgccgtcaccatcaccgtctccaaacaccccctccaccgcctcctcttctcctccatcgtcaccgggtacactctatggaatgcggagtacaggatgtctctgacaaggatttggatatatc

SEQ ID NO: 5379 - DNA, 470 bp, Glycine max
ctgggaacaagcaagtggtggtgctggtccaagtgatggtgaacaaggaagctctggctggggatctgccacaaagaaagcagcatctgggaacggatgggggtctggaaattctggcggtggttggtgaactcacctcacctctgagaacttagattagctttacccgcagtaggttgatcctgaagtaatccttttttccccctgaaatgaatggattatgatacttgggtaatttctttttgcaatgaaatgaattctgactgtttctttgaacttgggtccctgcatggtggatggtggttagggtttgtcatgtaaagcgccacatttgttcataactgtgacacacccggagaattaatgctttggatatcaggggagcaatttccattcctgaaacccgagcatatttgtatgcacccgacgagcgaacagataagttatacagggacccagttcccgttgag

SEQ ID NO: 5380 - DNA, 1225 bp, Glycine max
  unsure (1)..(1225): unsure at all n locations
ntccgcaaaagctattggtatggggaactcatttcaaaaaaagggggcactacttttttgacttgggcctgctttggaagaaaaggtggatgggtcaaatccaaggggaccaaaacaaaaaaccgaagctttggctggcttatctaatgcatttggttcatcttctgagaaagcatccggtttggcacaagatagattgaatgggttaggccaagggggaccaaggcaaagggcagaagctttagccgctttaaactctgcatttaattcatcatctgggacgaagacttttactcctaggccatctggaagaggtcaaggatcacaaagagctgcagcagtagctgctctttcacaagttcttatggctgaaaagataaaatcaccggatggttctcctgttgctagcaggagtcctatcactgaaggtagcgctactgaaactaaaagtgactcctctgaagttgaagaagttgcagaagccaaggaaacagaggaactcccccctgagacaggtagcaatggggatttggaaccaaaacaagaaaatgcggaggaaggaaatgatggtcaaaggacgttcagttatgaacaattaaagactaaatctggtcataatgtgcctggagttgatcttaaacggagagaggcctatctgtcagaggatgagttcaacactgtatttggaatggcaaaagaagcattttacaagttgccaagatggaagcaagacatgctgaaaaagaaatacgaattgttctaaacttgaaatgaaagagtgacgtctgcttctttagctgctatacctttcctcagttatctttaaaatgctcttatctgttgagatagtgtggttttattgggtatataccatagtttgggttcttatcatagcgttttgctttcggcctatataatgggcgtagctgtggttagtgtccaagtttgaatgtgacgccgcatgcatggagagtgttttttagtttctccttttagattttgctgttgcctcttgcaatgtttgcatattgtagcaatgaagacactagacagtgggcaggtccaattctttcattttatcaagtttgtattttatatctgtggcttttttttctctctcttttttaatgttattggttagaaaggcgggtgtatatgtattattgtttttacacttatctcaatataatgaaaaccaaaaaataagaatgttatttttaacttt

SEQ ID NO: 5381 - DNA, 413 bp, Glycine max
gtgttacccctccaaatgcaaggagttgaggagtttccaccaagcaatttctcaggttatacttctggaaacgtctcacaatggcccattgaagaatttctcggattaaatgaactcagtcagtattataattacatggatggatcatctaaggctgacagtggtaaacttggggattctgattcttctgttttgaggtctggtgaagaggatatggatgatgacggcttcttgggacgtgttccagattcatcctggacagttcctcagatcccttcccctcctacagcttcgggtttatattggccgaaagtccctcaatatacatctgacagtgccatgtctgttcctgacatatgcttttctcatgtgcgacagccccaccatgcccagcataaatctaatgtttcaaa

SEQ ID NO: 5382 - DNA, 528 bp, Glycine max
tgaggacatgggggtcatttatccgatgctccactatccacacagcttcccagctcagcccccccatatggtgctggtccttcccctgtaccttctatgggaccattcccagctcaggtgaattacaactatggacagccacaatgccaggattatggtcatcagacaacttattctcaggcaggacttccccaacaaggttatggacagggatatgatgagtcaaagtatgaaaatcgtgctcctactcaacattcttatggaggacatgtaaattctcaatcgacctaccctcaggctggtgctcagcctaattaccctgcaccgcagcagtttggcaagccaccattatatggcatgccatcgggacagcctccacaatcttatggtccccctagagctactcaaccaggggatatgccatatcaaggttccactcctgcccagtcatatggcacgaatatgccaacacaacaaccatacccatatgcactatctgggccatcacaaacagcatatccaagttat

SEQ ID NO: 5383 - DNA, 1323 bp, Glycine max
gtgaacactatactcttcttctgcgcaacttcatgaaaaaaatggttcatcttggcttcttccttctggggtgtctctccatgatctcatatgctaatggttatgtcagcaatgggggttggaccaatgcccatgctacattctatggtggaagtgatgcttctgggacaatgggtggggcttgtggttatggaaacttgtatagtcaaggatatgggactaacacagcagcacttagcactgccttgttcaacaatggcttgagttgtggctcatgctaccaaatcaaatgtgcaaatgacccacaatggtgcctccgtggcaccattgtagtcactgccactaatttctgcccccctggtggatggtgtgaccctcccaatcaccattttgatctttctcaacctgtgtttcagcaaattgcccaatacagagctggtattgtgcctgtagtttacagaagggtacggtgcatgagaagaggtggaatcaggttcaccatcaatggccactcttacttcaatttagtccttgtaaccaatgttggaggtgctggtgatgtgcattctgtgtccatcaaaggttcaagaactagatggcaagccatgtcaaggaattggggccaaaactggcagagcaactcctaccttaatggacagagtctttcctttttggtcaccactagtgatggtcgcagtgtgctctcatacaatgctgcaccaccaagttggtcctttggacagacctacactggaaggcaattccgctactaatttatcaacccttttcatggagggtgcattttctctcaggtacagaaactttctagtaggagaaagaaacacaaagaaaattgtattttttttctctctctctctcctactgaacgacagtttcagtaaccagagacaaggcagaggagccaattcctttcatggaacatcaatttcataatgttggttacccacatgataatatggttgcattataaaaaagaactaaagccgtaatttaatagtgtacatgatgtgtcaatattgggccacaaaataggtggcttagtttagtccctttaatatattttggtttgtgttgcaagtttttttgcagatgaattgctggtaccttagtttatgctaagctatagtctcaagggtacttctgtttgtttgcctgctgaaagaaaagtaggttagaggtgggattttgtgagccttattgcactttggcaaatgggattcttgccttgttcagaaagatcaacttaaataataattgagtatattcttgttgtgctttaaaaaaaaaaaaaaaaaaggaaaa

SEQ ID NO: 5384 - DNA, 524 bp, Glycine max
tctcacagttttcagcatttgcatggtcccaacagctcaaatattgtgtctatctgtctgtcaggttgatgttgagtcacctctatttattccttcccaatttcctcctccatttccacaaacaacttctttcaaggaaaatggctcttcttggatttcttctgggacttttcttaatggtcactcatgtcaaggggtatggttttggaggttggaccaatgcacatgccaccttctatggaggtggtgatgcttctgggacaatgggtggggcttgtggttatggaaatctgtatagccaaggttatggaactgatacaacagcactgagcactgctctgttcaacaatggcttgagctgtggtgcatgctatcaaattaaatgtgtgaatgatccacagtggtgccttcctggctccatcatagtcactgccacaaatttctgtccacctggtggttggtgtgaccctcccaatcaccactttgatctgtctcaaccttgtttccagcacattgcttaatac

SEQ ID NO: 5385 - DNA, 783 bp, Glycine max
ctcgagccgattcggctcgagcgaacccagactacttcgacaacataggtgctggtacctactcgccatcttgcaagagcttcaggtgcaatcttgcatcttcgttggccactctctctccgctatggtgggcctcctcgcttccatctctcaccctcatctcttcaccaaactcatcctcgtctctgcctctccaaggtttctgaatgattcagaatactttggagggttccagcaagaagatctgacccaactctacgatggaatccggtcgaattacaaagcatggtgttcggggttcgctccgctggtgatcggcggcgacatggactcggtggcggtgcaggagttcagccgaacgctcttcaacatgcggccagacatagccttgagtttggcgcagaccatattccagttcgacatgaggccaatcctatgccacgtcacggtgccgtgccacatcattcagagcaccaaggacctggctgcgccggttgtggtggcggagtatctgcagcagaatttgggagggaagaccatcgtggaggtcatgcccaccgagggccacttgccgcagctgagctcgccggatattgtggttccggttttgctcatccacatccgccacaatttggcagagggcaaataattgataataatgcatcagtcattctgccttttaaacgctttattaagactttttgctgttttctattttcacgtattcttatatttttattttctgtatgttgaatagcacgttaagttaatcgaacattttcc

SEQ ID NO: 5386 - DNA, 460 bp, Glycine max
caacacttccaacagtaaaaaccactctctctctctttctcactttgtccacgtgaagtgaaagaagaagaaactcataaaccatggcaaacacaaataacttcttaacccaacttcacaattgcacccgcaaaaaacctaacaccctattcaccaacctctaccttctcacctttgctacctttctttgtacccttttctacttcctcggcctctggcgccactaccccaccaccaccgccgctgccatcgccgctgtcgcagaatcctcctccctatgcttccaccccaacaccaccgccacaacccaatcatccaccaatctcgacttcgccgcccaccacctcctcccggacctgcctcccacggtggcgcgtgggccctacctccctccttgcgcgtcccccttcaccgagcacaccccctgcgacgatcaacaacgattcctttcattcccgag

SEQ ID NO: 5387 - DNA, 957 bp, Glycine max
ggaagcagaaaaacagaaaaagaaaacaattatcagcaataataaaattataggcacgattctggcatgtccaattctcaacagaatgagcttcattattcaaccgccaacggggacgagaggtcaaacccttgtttagccaacacgcgctgcagcttctgctttccctgttgcttcggttcccgtcgcgactcggccaccctcgggttcgggtggtgggagcgcgtgcgagccacgtcgtcatggtccgagtcgcgctccgaggcgcaaccggtgaccgggagtcccggtgggcggtggtggtctggcggcgtgagggcctttatgaaggtgcgcgagtggtcggagctcgcggcggggcctcggtggaagactttcatccggcggttcagccggagccggagtggcgggtcgcggcacgcggcggggaagtaccagtacgaccccttgagttactccttgaacttcgacgaggggcataacgggtatttcgatggtgacggttacgacggcttacggaatttctccgcgcgttacgccgcgcctcctccgtttaagcccgtttcctcggattccattcaagacgccgccgttttgggataagaaatagggattgccatgtggtgtcgattttgggaattttgcttcgactagcttacaagtgcggttatttgtgtattaattttattctatcatatcaatatcaatcaatagttacaggattttaatttttcttattgtatattccttaccttggcagtatttctttatttatttaattaatatattgtttagatgttggtaataatcagaagtgcgttgtgcgcatggattaccaatggatgaatcctgataatttcttatactatttactaattaggtttgtcaaataatgtacaaccataagtggatgcaaagttttcattttaaatgatgttcattagaggtgctttgagt

SEQ ID NO: 5388 - DNA, 634 bp, Glycine max
atccaatcaccaacgtcacgaaaaacagtaaaaccacagttgtatagtattgtattgtgggcgctgactgagtcttagtcacggataagcatgaatgattgattggggttggcaactagggttccaaatccattaccatatatattacccactgtgactgaaactctgaaacagaaaaaaaaaggtagggttctgaatgtcgaattctcaacaaaatgagattgatttaaccggcgacggggaagagaggtcaaactctctcttagcgaacacgcgctgcagcttctgctttccctgctgctttggttcccggtgccactcggtcagcgtcgggttcgcgtggtgggagcgcgtgcgagccacgtcgtcatggtcggagacaagccctcactctgaggcgcaaccagcaaccgggagttccagtgggagttggtggtctggcggcgtgagggcctttatgaaggtgcgggagtggtcggagctcgcggcggggcctcggtggaagaccttcatccggcggttcagccggagccggagtggctgggcccggcacgcggcggggaagtaccagtacgaccccttgagttactccttgaacttcgacgaggggcataacgggtatttcgatggtgac

SEQ ID NO: 5389 - DNA, 375 bp, Glycine max
ctacaacgtgttgcttcaggccttcatcatcaacaacatcatcatcatcatcatcatcccaatgaagctttctatgattcaagttcttcaactttgttctcatcatcgtccactacttcttctatggctgtgtctgatcaacagcagattggagatgagacgagtactgctcccaaaaggggagaatattatgactcttgcttttttagagggaatgattttcatgacaagaattgaacattatgttaagtgtaagtatgatgttttctgttcaaaacctactttttttctgtctatggttttcataattcacataatacttcttaaacttcaggtaaactcacatttcttcacatcagaagtgatatgtttccg

SEQ ID NO: 5390 - DNA, 357 bp, Glycine max
ttgatgttgaagctgggatctttgctctccatgcatggatgttaccaacatcttaaaaaagctagtggtgataaggttgggaatgtagatggagatgcagaacaaggaatttatgatgcttctacacccccacagggttctaatccatcaaaccatgagaaaggtttaggagctccacaagaacatcttgttcgccaacctgcaagcacctggggttatatctttcaaatattattccagatgattgcaggcgctgtaatgctcacagattgtgtgttttggttcataattgttccgttcctaagcatcaaggattacaacataaatttgctaataatcagtatgcacaccatcaat

SEQ ID NO: 5391 - DNA, 1175 bp, Glycine max
gatcatgttttctctggtattccaagttggctgaagcctccaccacccagtcgaaaaagatctgaaccatgctctagttcaaagtctattaatgctagtggccggggagttgaagctattggcagtcatagacagaaatttattgttgcttctatgaggccaatccctcactctaatagacacaagattctccccttttctggattgtctgagggtacaagatatgatggagaccatggaaaatcaaatctaccacttgctcttattaagcataatgtttcaggccctacttcagttacaaataggaaatctgtgtcgaactcatttcaagctcaccagattatttctttgaatccactacctatgaaaaagcatggttgtgacagagctccaatacgagcttgctctgaggaggaattcttgagggatgtaatgcagtttttgatacttcgggggcataatcgtctaattccgcctggtggacttgctgagttcccagatgccattttgaatgcgaaacgccttgacctgttcaacttgtatagggaggtggtttcaagaggaggctttcatgttggaaatggtatcaattggaaagggcaagttttctcaaagatgcgcaatcacactatgacaaatagaatgacaggtgttggcaatacactcagaagacattatgaaacttatctcttagaatatgaattatctcatgatgacgtagatggagagtgctgcttgatgtgtcacagtagcgcagcaggtgactgggtgaactgcggcatatgtggtgaatgggctcattttggctgtgataggcggcagggacttggagcatttaaggactatcgctaaaaccgatgggctggagtacgtttgtccccgctgcagtgcgttaaaattcagcaaaaaatcccaaaaaaactgcaaatggtttttaacaactaacacaggtcaaacattgctggcccagagcaaaatgtacattgcaagtgctagatagatttatttacacatccattgtgcttggacccttgtctcaattggtaagggtaggtttctaaggactgtaattgtttcacttatgttaaagctgtagagttttgacatgctatggtcacctcacatctcaaacttgcctattttattttgtcaaaggtactcatacctagtacaaa

SEQ ID NO: 5392 - DNA, 887 bp, Glycine max
tcgccctcgcgtccggttgtgaagtccttcttacatagtatagacattctcaagccatgatttgtagacttttcaccatctacttcactttcttcttatgtttgctttttaccttcttcgttccttatgttcatagcaataaccagcttgataccaatttctatgatggatcatgccccaatttggccacgattgttagatatggtgtttggtcagccattaaaaatgacaacagaatggctgcgtccctccttcggttgcactttcacgattgcatagtaaatggttgtgatgcttctgtgcttcttgatgataccccatatttcacgggcgaaaagaatgcttctcctaatcgcaattcacttcgggggatggaagtgattgataatataaaagaacaagttgaaaggcaatgtccatcaacagtttcttgcgctgatatcttatccttagcagttagggaagctattgatctggttggaggaccttcttggcctgttgcattaggccgaagagatgcaacaaaagccaatcggatggaagctaatcaacaaattccttcaccgttcgagcctctagataacatcattgcaaagtttacttcaaagggtcttaacttgagagatgttgtagccctttcaggggcacatacaattggttatgcccgatgcttgaccttcaaaaggagactttttgattttcaaggctctggcagacctgatcctgtgcttgcctcttcacttctctcaaaattgcaaagcacgtgtccaaatggagacacttcaaacagctacattgcacctcttgattctaatactactttgaccttcgacaatgagtattatagaaatcccttatacaacaaagggcttctagaatctgacatg

SEQ ID NO: 5393 - DNA, 602 bp, Glycine max
attgtcaagtccttcttacttagtagacattctcaagccatgacttgtaaacttgtgatctacttcactttcttcttctgcttgctttttaccttggttccttatgttcatatgtatccctcgtacccctatagtggaaattaccagcttgacctcaatttctatgatagatcatgcccaaatttgcaaaggattgttggatatggtgtttggttagccttaaaaaatgacaacagaatggccgcgtccctccttcggttgcactttcacgattgcatagtaaatggctgtgatgcttctgtacttcttgatgatacaccatattttacgggcgaaaagaatgctcttcctaatcgcaattcacttcgggggtttgaagtcattgatgacataaaagaacatcttgaaaggatatgtccatcaacagtttcctgcgctgatatattagccttagcagctagggaagctattgatcagattggagggccttcttggcaagttcaattaggccgaagagatgcaacaacaacaagtaaggaagcagctgagcaacaaattccctcaccaattgagcctctagaaaacattactgcaaagttttt

SEQ ID NO: 5394 - DNA, 298 bp, Glycine max
gaaattctcagatgaaagttccttaattaaaacaacctttttgcctaggttggaggaccttcttggcctgttgcattaggccgaagagatgcaacaaaagccaatcggatggaagctaatcaacaaattccttcaccgttcgagccgctcagataacatcattgcaaagtttacttcaaagggtcttaacttgagagatgttgtagccctttcagggtcttacttttttcaccaaatatttgaagcttttttaatacatgacatcatacatagttaaattcaatttgatacaataatg

SEQ ID NO: 5395 - DNA, 661 bp, Glycine max
gtaaattaatttctcgtatcgaaaatcatttccaccaccacaatttttttttatttccgtttactaaagattagtaattgtttgacactaacacagattttgattcgattcgattcgattcagtcgaggttttaagcagcagcaagatgtctgggcgtggaaagggaggaaagggattgggaaaaggaggagcaaaacgacatcgtaaggtgctccgcgacaacattcagggaattacgaagccagcgattcgtcgtttggctcgcaggggtggcgtgaagcgtatcagcggtttgatctacgaggagactcgcggtgttctcaagatcttcttggagaatgtcatccgtgacgccgttacttacacggagcacgctaggaggaagaccgttacggctatggacgttgtttatgcgcttaagaggcagggaaggaccctctacggatttggtggttagggtttttgcttgattttcctcgccagggaaaagtcttgctgtcaagaaaaacaaacgaggcatggattggggtagtttttttttattttttatggtggtgtttgtagtgaatggggaaaattaggagcaattttatgcttacttgttggtgtcaattatgtgatgtaactactccgttgccatgtagaattattttggctttc

SEQ ID NO: 5396 - DNA, 1130 bp, Glycine max
ctgcacgtgtatgaagagcttcttcttatgtacggactggcaaacacatcgaagctgtgggtatggtgagacctatggctatgctggagggaacctcacctacacacaatgccattggtcctcttaccttctctggcgtaatgatcatcctacttggttccgagaaagctttgtagtgagcagatataatggctgttgaaaggtccggaattgccaaagatgttacggaattgattggtaaaaccccattagtatatctaaataaacttgcggatggttgtgttgcccgggttgctgctaaactggagttgatggagccatgctctagtgtgaaggacaggattgggtatagtatgattgctgatgcagaagagaagggacttatcacacctggaaagagtgtcctcattgagccaacaagtggtaatactggcattggattagccttcatggcagcagccaggggctacaagctcataattacaatgcctgcttctatgagtcttgagagaagaatcattctattagcttttggagctgagttggttctgacagatcctgcttagggaatgaaaggggcagttcaaaaagcagaagagatattagataagactcccaacgcctacatacttcagcaatttgaaaaccctgccaatcctaaggtacattatgaaaccactggtccagagatatgggaaggcacaagagggaaagttgatgcacttgttagtggtataggcactggtggtaccataacaggtgcagggaaatttcttaaagagaagaatcctaatataaagctctatggtgtggaaccagttgaaagtccagtactctctggaggaaaacctggtccacacaagattcaagggattggtgctggttttgtccctggagtattggaagttagccttgtagatgaagtagttcaaatatcaagtgatgaagcaatagaaactgcaaagcttcttgcacttcaagaaggcctatttgttggaatatcatctggagctgcagctgcagctgccattaagatagcaaaaagaccagaaaatgctggaaagcttcctgttgttattttcccaagctttggtgagagatacctatcctctgtgctgtttgactcaaac

SEQ ID NO: 5397 - DNA, 493 bp, Glycine max
gcctgcaggtactcggtgcctcgatcccaggcgtgcgctttgtagttcgtagatagccgatgtgcttgtcttagtgtgtcagtcattcctgttcctcaagtcaagctttgtagtgagcagatataatggctgttgaaaggtccggaattgccaaagatgttacggaattgattggtaaaaccccattagtatatctaaataaacttgcggatggttgtgttgcccgggttgctgctaaactggagttgatggagccatgctctagtgtgaaggacaggattgggtatagtatgattgctgatgcagaagagaagggacttatcacacctggaaagagtgtcctcattgagccaacaagtggtaatactggcattggattagccttcatggcagcagccaggggttacaagctcataattacaatgcctgcttctatgagtcttgagagaagaatcattctattagcttttggagctgagttggttctgacaga

SEQ ID NO: 5398 - DNA, 468 bp, Glycine max
aaaacaagcagtgtcacgcagctgaatcatattcactccaaaaaattaaaataagctcagagagagagaatgggggggagacaaatcccagaccctccgaactttaagaaatacggcgttccttgtctactccgttgcgtggattccccaacacgttgtcaaatcgcgccaaatcgaaaccgccggtaactacctgctgttcgccggcggcggcggagcaggccacagcggtatccccaatgcttcggttattgcgcacttcgatgtcgcgtcgaattctctctctgatcaaccggtgtgtaagctaggaactgattctgaattgccttataggatggcacttaactctaatggtgatggccttatttgtgcaatggaaacgcccatggtttgcagatggtttgactgggatcaaaacaagagctctgaaattcataagttgagtctgaagctgtcagagaaagtgct

SEQ ID NO: 5399 - DNA, 472 bp, Glycine max
cgcagcgggatcatattcactccaaagaaaaaaaaaaagctcagagagagagaatggggaaaagacaaatcccagaccctccgaactttaagaaatacggcgttcctttctactccgttgcgtggattccccaacacgttgtcaaatcgcgccaaatcgaaaccgccgatgagtcctcggactccgatcacagcacttcgccggcgaccgaggcggagaaggaacccgcgacggtcgccggtaactacctgctgttcgccggcggcggcggagcaggccacagcggtatccccaatgctttggttattgcgcacttcgatgtcgcgtcgaattctctctctgatcaaccggtgtgtaagctaggaactgattctgaattgccttataggatggcacttaactctaatggtgatggccttatttgtgcaatggaaacgcccatggtttgcagatgggttgacggggataaaac

SEQ ID NO: 5400 - DNA, 986 bp, Glycine max
cgcgtccccacccccaccccctccacgcccacgcacacctccaccatgtgcatcccgtcacgcgatacctcctcctccgcgcgcgcatcctcctctgtgtccccgcgtccttcttccagcgcgtggagcacctcgtcctctggctcgccggctccgtccaaagcctccggtctggaaaacacgtcggccgcaaaatcttcctcgccctcatcttcatgctcgtcatgtcggtcttcctcaaggtttcgcttctcggaacgggcgttgagatgaacgggaaaagcttcaagagcatcgagaacgggcaattgatactgcagcggttcaaggaggattgggcctcggcccagagggttgtctccgaggccaggaccggaaccgaaacctccatgcccaaacgcgtcctcgagaggttaacgactccagaaatatggatgaagccaaacagtgacaaatattacaaatgcgtttctcgacccaggaatgtaataaggctaaaaaagacaaatggctatcttcttgttcatgcaaatggtggattgaatcaaatgagaactgggatatgtgatatggttgcagtggcaaaaataatgaatgccacccttgtgcttccctctcttgaccatgattcattttggactgatccaagtgactttaaagatatctttgactggaggcacttcgtgaaagttttgaaagacgacattgagatagttgagtacttgccggtccagtatgcgtcgctgacacctcttgtgaaggcccctgtttcctggtcaaaggctagttactacagaggtgagattcttccattgttgaagcgacatacggttgtacagtttactcacacagattcccggctcgccaacaatggccttgcttcctctttgcagaagctgaggtgccgtgccaattaccatgctctcaagtacacggcagaaattgaagagcttggaaaggtcttggtgaataggctaagaaacaat

SEQ ID NO: 5401 - DNA, 407 bp, Glycine max
gcgagcaacctttgcttctctcattaattaattcacaaactaacttagcttccaaattcatatggaccgggcgacaaagatggtatcagagaggccagtggtgatattcagcaagagctcgtgctgcatgagccacaccataaagaccctcttgtgtgactttggggtgaatccagcggttcatgagctggatgagatcccaagaggcagagacattgagcaagctctttcaaggcttggttgttctccatctgttcctgctgtcttcatttctggtgagcttgttggtggagccaatgaagtgcatgagccttctcctgtctcgccaagctaaagagagcttggtaatgaaatattatgactctcaatatacactattgacacaactttgggtttatatatatctg

SEQ ID NO: 5402 - DNA, 353 bp, Glycine max
gatcatcagccacaccaacaactcaattcctaacttgcctccatagcaatctttgcttaattcttctgttcaattaccacattcattatagctctctcattcacagactttcaatttctgcttccaaatctgaattcaacccatttggcattattgttacatataattaattaaggaagatcgaatggagagggtgacaaagatggtatcagaaaggccagtggtgatcttcagcaagagctcgtgctgcatgagccacaccatcaagaccctcttctgtgactttggggtgaatccagcggttcatgagctcgatgagatcccaagaggcagagacattgagcaagctcttt

SEQ ID NO: 5403 - DNA, 628 bp, Glycine max
ttgacgcgtgggcggacgcctggggcaacacagcaatagcttctggtgatctcgttttctcacattgctctcttccccctttctctctcctctttctctctcttccattgcttctccataagcaacgccacgcgaggtcaattgcgcaatcgccatgactgtgatgactcctgctcccattgaccagcagcaggaggacgaggagatgcttgtcccgcacacggatttggctgagaataatcaccaacccatggaagttgtggctcaacctgatgctgccaacactgtggagagtcagcctgtcgaggatccttcaacgtcaaggttcacatggaaaattgacaacttttctaggatgaatacaaagaagctctattcagaaatatttgttgttggtggttataaatggcgtgtacttattttcccaaaagggaacaatgtggactatttgtccatgtatttggatgttgcagattcagctagtttaccctatggctggagtagatatgcacagtttagcttggcagttgttaatcaaatccataataaatactctgtgagaaaagacacacagcaccaattcaatgcgcgggaaagtgattggggtttcacatctttcatgccgctt

SEQ ID NO: 5404 - DNA, 531 bp, Glycine max
gctctttctggtgttgttgatctcgttttctctctcaaactctcacctctctccccctctctctaacaataaccctcgctgtcgctggttccaattcaccatgaccgtgatgatgcccgctcccattgatcagcaagaggacgaggacgtgctcgtgccggacgcggatttgcctgagaacaatcaccaacccatggaagttgtagctcaacctgaaaatgccaatactgtggagagtcagcccgttgaagatcctccgtcatctagatttacatggagaattgataacttttcaaggctgaatacaaagaagctctattcggaaatatttgttgttggtggctataaatggcgtgtgcttattttcccaaaaggaaacaatgtggactatttgtccatgtatttggatgttgctgattcagccagtgccctatggttggagtagatatgcacagtttagcttggcagttgttaatcaaatgcataataagtattctgtgagagaagacacacagcaccagtttaatgcac

SEQ ID NO: 5405 - DNA, 1099 bp, Glycine max
ggcgttgttgcagggcaatgtgattgaggcagatagtgaaatcctaagattgtttagttggaagatggaggcagtggaatcaatagcggttccggaaccggacgaagacgatccttcatcgacgcttctggatctctcgagttaccagctccacgaccttgactcggtcgagttgccacccagcctcaccgagttggacctcaccgcgaatcgcttgtccacgctggacccgcgcatagggaacctctcccatctcaagaagctctccctccgccaaaacctcatcaccgacgccgccgttctccctctctcttcctggaacgccatttcctctctcgaggagcttgtgctgcgcgataatcaattgaagaacattcctgatgtcaccgtatttaagaaacttctggttttcgatgttgcgttcaacgagattagttcgctacatggcttgtccagggtctccgataccctcaaggaactctacgtgtccaacaacgaagttgccatgattgaggagatcgagcacttccatcagctccagcttcttgaactcggctccaataaattacgggtgatggagaatttgcagagcctcgagaatttgcaggagctgtggcttggacggaatcgaattaaagttgtgaatctgtgtggtctcaagtgcattaaaaagattagtttgcaaagcaatcgtctcacatcgatgatgggatttgatggttgcgtactctagaagaactgtacttgagccataatggtattgcaaaaatggaggggttgtcatcgttggtcaatcttcgggttttagatgtatcatcaaataagataacttcagtggatgacattgtgaacctgacaaaattggaagatttgtggcttaatgataaccaaatagcatcacttgaaggaattgctgaggcagtctctggttcaaaagagaagcttaccaccatctacctaaaaaataacccatgtgctaagacgcccaactatactggaatcctacgggaaatcttccccaacattcaacaaatagattctgatatattttcttagaagtttcttggcttcagcctttttgaaaacagttgcttcgaag

SEQ ID NO: 5406 - DNA, 863 bp, Glycine max
ccgcttcttggtttcattcactccatccaaggaagaatcgtctattgagtaatttgttatggggttctcccacaatagcacatttattggaatttaaccagttcagcaccagcaacttaacaaaagaaacaatatggaaagatagcccagtatgtaattccaactcaaaacaaacaactgggtcaacaaaagagtgatccactctttcctatcaacttgaaatgtcttcgatcttaaaagtgcatacattaacaattatgcatcagtactgggtcttttctttgtggtgtaagccgcatactccttcccagcatcatgttttattgtctgatcaccgaaatcaaggaatgcagatgtgaatgccaatgctgatccagcagaaagtgcagttttgatgctccttcctctgtaacccagaatagttgcacctgcaacaaatccgccaacagctccattgactaaatccctcttcatcctatagttctgcaccaactgctctacacctatgtagactcctcctatggcagcaaaggtcaaaccatagttgcccatcatcctgatagtcctaatcagccctggaagagcaacatttctctcgacacgggggacatcataccaggtggcaactacagtaccccagatagttccagccactaaaccagttgttgcgcccttgatagttttcatgagagatgaatcatcatcctccaagtatctacgttctgctgcgtccaccatgattttctcggcacacttgagaaattgagaagagaaaatgggtactcgtgtgtaaactgtggtgaacactgaacgccctcgactcagcgctgctgcagttacttttgcctacactattcttgttc

SEQ ID NO: 5407 - DNA, 2105 bp, Glycine max
tctcgagccgctcgagccgctcgagccgaaaaatttaaggatagagctggaaggaggcgcatgttcactattaataacatacactctcccacaccgaaatggcagccattgctagcattttcgtttctatcatacccacttcgccttctccgtttctcactagactcacatcgcgcctccatttcgctgcattccctctgcgttctccaacgaggaaactcatgtcgcacactcttgcacgtgccactcttggtctcacacacccttctaatatcgaaacccccaagatctcttttggtgctaaggatgttgatgtgacggaatggaaaggggacattctggcagtgggtgttacggaaaaagatttggctagagatgcaaactcgaagtttgagaatgtgattttgagcaagattgactcaaagttgggtggtttattagctgaagcctcttctgaagaggatttctctggcaaagttggtcagtcaactgttcttagaattacaggacttggatcaaagagggttggattgattggtcttggtcagtcaccttccactcctgcaccttttaagggtcttggcgaggccgttgtggaggctgccaagtcttctcaagcaagcagtgttgctgtcgctcttgcctcttctgaaggactctccgctcaatcaaagcttagcactgcttatgcaattgcttctggggctgtgctgggattatttgaagataatagatacaagtcagaagcaaagaaatcaacacttaggtccattgatattattggtcttgggactggacctgaattggagaagaaactgaagtacgcaggagatgtttcttccggaattatctttggaagggagcttgtgaattctccggctaatgtgctcacaccaggggtgttggcagaagaggcagctaagattgcttcaacctataatgatgtttttactgccaaaatattagatgctgagcaatgtaaagaattgaaaatggggtcctatctgggtgttgctgcagcctcggaaaatcctcctcattttatccatctgtgttataaaccaccaagtggacctgtcaatgtcaagttggcattagttggcaaaggtttgacttttgacagtggtggctacaacatcaagactggacctggctgttcaattgaactcatgaaatttgatatgggtggttcagcagcagttttaggaacagcaaaagctcttggtcaaatcaaacctcttggggtggaggttcattttatagttgcagcttgtgagaatatgataagtggaacaggtatgaggcctggagatattgtcacagcttcaaatggaaagactatagaggttaacaacactgatgctgaaggtagacttaccctggcagatgctctggtatatgcttgtaaccaaggtgttgaaaagattattgacttggcaaccttgactggggcttgtgttgttgctcttggaccctcaattgctggtgtgtttacaccctgtgatgacctagcaaaggaagtttttgaagcttctgatgtgagtggggagaaactatggcggctgccattagaggaaagttactgggaaacaatgaaatcaggagttgctgatatgttgaacactggtggtcgacaaggtggtgctattgttgctgctctcttcttaaaacagtttgttgatgaaaaggttcaatggatgcacattgacatggctggtcctgtgtggaatgacaagaagcgctcagcaacaggatttggcattgctactttagtggaatgggttttgaaaaatgcttcaaatgccaactgaaatttcaaatcttgttacatcgtatgtgaaacacaggatgagataagctcatcttgtgatgtttgtgcttcaatggggtttggttatatgaaataagttatttaaagggatggaaaatgtggtaaaatgaggcattttttagtgtattcaaacttttttctagatacaaaaaacaaccttttatgttttttcacatttaccaataattcactttgcctgtgatcattcgtcttacttatattgacacgtagactttcccagtagtgatactaatatactatattaaaccgtttc

SEQ ID NO: 5408 - DNA, 766 bp, Glycine max
tcgccttagttgcttcctcctcctcattctcctctattctcaccactcaatttctcactccctcttcattttcttctctctttctcaaaaccctcactttaaggtcctccacgccgtttcagcgtctttcttttgcgtcacaaccactgcgcaggctcatggctcgcgccaccctcggcctcactctcccagccaacaccgaatcccttaaggtttctttcgcggcaaaggagcttgacgtggcggaatggaaaggggaccttctcgccgttggcgtaacggagaaggacgtcgcgagaaacgtggaatcgagattcgagaacgcgattctgagcgcgttggactccaagctgggcgggttgttgggccaggtctcgtccgaagaggacttcagcggcaaacttgggcagtccacggttctaagaatcgcttccggactcggattcaagcgcgtcgccttgcttggcctcggcgcctccgcgttcaccacattcgcgttcaagtccctcggcgaggccgatgccgctgccgtcaagtccgcccaggccggccacgtcgacgtcgcgcttgcctcttccgacgcactctacaccgagtctaagcctaaaacagcgtccgcaatcacatctgggactttgctgggaacttatgaggatatacaggtcaagtcagagtcgaagaaatcagtgcttaattctgtggatattatcgggcttggaactggacctgaattggagaagaaactaagtatgcagctgacatttct

SEQ ID NO: 5409 - DNA, 512 bp, Glycine max
  unsure (1)..(512): unsure at all n locations
taccttaagaatcatgattcaaattgtattgagaatctcagccttaacaccaatctctacaattttccgcttccaaatttcattcactccatccaaggaagaacatcaactattgagtaatatacggttatggagaacttatgtaatatagattaacccacaatagcacatttattggaatttaaccagttcagcaccagcaacttaacaaaagaaaaatatggaaagatagccgagtatgtaattccaactcaaaacaaacaactgggtcaacaaaagagtgatccactctttcctatcaacttgaaatgtcttcgatcttaaaagtgcatacattaacaattatgcatcagtactgggtcttttctttgtggtgtaagccgcatactacttcccaactgaaatgaaatcttgttcaattgtagtgtgatatatatactaataacttatctgaagggatataaaaggtgtgtgccccgaggcagattntagccaaaaaaaaaaaaaaaaaa

SEQ ID NO: 5410 - DNA, 545 bp, Glycine max
aattggtcttggatcctcaattgtagttgtgtttacaccaagtgatgacctggcaagggaagtttttgatgcttctgaagcgagtggggacaaactatggaggttgccgctagaagaaagttactgggagtcaatgaaatcaggagtagctgatatggtgaacactggtggtcgaccaggtagtgctattactgcggctcttttcttaaagcagtttgttgacgagaaggttcaatggatgcatattgacatggctggtccggtgtggaatgaaaagcagcgctgtgcaacaggatttggtgttgctactttggtggaatgggttttgaggaacgcatcttaaatgcgaactgaaatgaaatcttgttcaattgtagtgtgatatatatactaataacttatctgaagggatataaaaggtgtgtgccccgaggcagattttagccatatttcagtgtatttaaaatgtttttattaaaaaaaaaatattatttttctcttgttatttaagaaaaattatctttatataatatctttatttttta

SEQ ID NO: 5411 - DNA, 466 bp, Glycine max
agaatagttgcacttgcaacaaatccgccaacagctccattgactaaatccctcttcatcctatagttctgcaccaactgctctacacctatgtagactcctcctatggcagcaaaggtcaaaccatagttgcccatcatcctgatagtcctaatcagccctggaagagcaacatttctctcgacacgggggacatcataccaggtggcaactacagtaccccagatagttccagccactaaaccagttgttgcgcccttgatagttttcatgagagatgaatcatcatcctccaagtatctacgttctgctgcgtccaccatgattttctcggcacaattcagatcgagggcgtgtgctactttaaaagaggtaatcagattgaaaaccctaaaaagatgtatgatgaaggtttgaatgggtttaagagaagagaaattgacgcagaaatgcgatgtggatgaag

SEQ ID NO: 5412 - DNA, 2556 bp, Glycine max
tgcgtgtgtttttttttttttttttcatctccaaacccaaagagaaccgtttactcggggattttaatccccccaaaaattcccattttactccttttagagagagaaaagaaagattgagctttcaggagagaggaagagagagaaaaaaattggatttttttttggggtgttccaatggttgaactggaaatccaaagaagggtgtgagaaaaaaaaattgcatcttcttttggtgggtgtctctgaaactatgatcttgtgaaaacccagaaaggaaaccttcggtgcgcgttggtagatagatagagagagattattgctgttgggatattctgagaaccgttgattgagaaatgaacggtggtgatgaggtcgtggcagctccggcgggtccaccgcagccgctggagtggaaattctcgcaggttttcggggaacgtacggcgggggaggaagttcaggaagtggatataatttctgctattgaatttgacaagtctggtgatcatcttgctactggtgatcgtggtggtcgagtagttctctttgagcggacagatacaaaagatcatcgcggatcaagaagggacttggagaggatggactattctattagtagacatcctgagttccgttataaaacagagtttcagagtcatgagccagagtttgactatcttaagagtttggaaattgaagagaaaatcaacaaaatcagatggtgccaaacagctaatggtgccctgttccttctttccacaaatgataaaaccatcaaattttggaaggttcaagaaaagaaggtcaagaaagtttctgacatgaatgttgatcctaaatcaatgggaaatggctctattgctagttcaagtaattcaagtagctctaaatcatatcttgcaaatggagtatctccagatggatacaattatttaaacaacgatttctcatttccaccaggaggcgtaccttcactaagattaccattggtagtaaccagccatgaaaccagtttggtggctcgatgtcgtagagtatatgcccatgctcatgattatcatattaattctatttcaaataacagcgatggcgaaactttcatatcagctgatgatttacgaataaatctttggaacctggaaattagcaatcaaagttttaatattgttgatgtaaagcctgcaaatatggaggatctgaccgaggttataacatcagcagaatttcaccctacacattgtaatacattggcatatagcagttcaaagggttcaattcgtcttgttgacttgcggcagtcagcattatgtgattctcatgccaaactatttgaggaacaagaagcccctgggtcccgatcatttttcacagagattattgcctcaatctcagacataaaatttgggaaggatggaagatatatacttagtcgtgattacatgaccttaaagttatgggacatcaatatggattctggtccagttgcaacattccaggttcacgagtatttaaggccaaagctttgtgatttatatgaaaatgattcaatttttgataagtttgagtgttgtctaagtggtgatggattgcgtgtttcaactggctcttacagcaatctattccgtgtgtttggttgtgttcctggaagtactgaggctacaactttggaagccagtaaaaatccaatgagacgccaagttccaaccccttcaagaccatctagatcattgggaaacagtataacaagagttgtaagacgtggagcagagagcgccggtgttgacgcaaatgggaattcttttgatttcacaacaaagttgctgcacttagcatggcacccaactgagaattcaattgcttgtgctgctgcaaatagcttatacatgtactatgcttgaggaagaaagatgattgaagaacatgtatttgctttggttgacctgtttttgggttgctgtggagaaggcttctttacccttcttaccaaccaatgagttggaggctacattaactcacactacaaagtgcccttcaaaatctttagcaggagcttttagaaaaaagatccagaagtggctgtttcaaaattcctgggtaggcagaaccttattttgtttctggatgatgagcagcatctctttttttgttcaatttttccaccttcttccaaccctaatattctttccccctttttctgtatcttcttataaaaagagaaggtgcagtcaatgcttcatattgtgtttggcttgcaaatgaagaagaaaatgtgattgtagctctcctacaacaaatactaaaggatgttcaatatctgcccctaggataaaaagataaaatgtagttcttttcttcttttcccagcccagatgtcttgtgggatggagcagtggaaacctgcagtgcatcattttttcattgattatttttgtgttgggaattaatttgacactgtttcaaactctaatttttgctgcacttggtcaatttttgtgtaaaatgtcaaaagaggaagtaataattctaggttgcaaggatgtaggataaactgga

SEQ ID NO: 5413 - DNA, 450 bp, Glycine max
atacatatacactattaactctcacactacaagtgcccttcagagagcttttagaaaaaggatccagaagtggctgttttgaaattcctggattggcaggagaccttattttgttactggatgggcagcatctctttttttttcctcttcccctcctttcaatcctaatattctttccctctatttctgtatcttcttctgaaagagaaggtgcaatcaatgtttcaaattgtgtttggcttgcaagtgaagaagaaaatgtgattgtagctctcctacaacagatactaaaggatgtttcaatatctgccaccaggattcagattaaaaaatgtagtttttcttttctttttttgcccagatatttctgtgggatggagcagttgaaacctgcagtgcatcatttttttattgattaattttgtgttggaatttaatttgacatgtttc

SEQ ID NO: 5414 - DNA, 387 bp, Glycine max
tgggaacccaaagagaagagaaaagaaattttatttcttttttagacgggtctttgtgaacctatgatcttgtgaaaacccagaaagcgatctttgatgcactcataggattggccgattcagttgcgtgttcggtggccgttgatttcgtgacaaatgaacggtggcgatgaggtcgtggcagctccggcgggtccgccgcaccctctggagtggaaattttcgcaggtcttcggagaacgcacggcaggggaagaggttcaggaagtggacataatttcagctattgaatttgacaagtccggtgatcatcttgctactggtgatcggggtggtcgagtggttctctttgagagaatagatacaaaagatcatggtggatcaagt

SEQ ID NO: 5415 - DNA, 378 bp, Glycine max
aaaatttgggaaggatggaagatatatacttagtcgtgattacatgaccttaaagttatgggacatcaatatggattctggtccagttgcaacgttccaggttcatgagtatttaaggccaaaggttagattcccatgtttggatgagcaatgaatttctgctgctttatcaagttatagtactggctcttttttttttggccagctttgtgatttatatgaaaatgattcaatttttgataagtttgagtgttgtctaagtggtgatggattgcgtgtttcaactggctcttacagcaatctattccgtgtgtttggttgtgttcctggaagtactgaggctacaactttggaagccagtaaaaatccaatgagacg

SEQ ID NO: 5416 - DNA, 1165 bp, Glycine max
ttggtttagaataatgggtccctccgtgttcttagttagatgtcgtgtttgggacaagaaaaagagaaatgaggtgcattcctaccaccacatgcgtttggaacgctgaattaattttcgcctaaaaggacaattcggtgggatctaggttagcaaccagcgatctgggacttttctttctcccccacaccacacccagattcaaaaactcgctctgctctgctctgcaattccccttccgtttcgtttcgatctcaaaacatgttcttcttcgattggttctatggcattctagcttccctcggtctctggcagaaagaagccaaaattctcttccttggtctcgataatgcagggaagaccacacttcttcacatgctcaaagacgagagattagttcagcaccagccgacccaacaccccacttcggaggaattgagcattgggaagatcaagtttaaggcttttgatttggggggccatcaagttgcccgcagagtctggaaagactattacgcaaaggtggatgcagtagtttacctggttgatgcctttgacaaagagaggtttgcagaatcaaagaaggagcttgatgccttgctttcagatgaatcattggcaaatgttccatttcttgtgctaggcaacaagattgacattccatatgctgcatcagaagaagagctacgttatcatctaggcctgaccaatttcaccacggggaaggggaaggtcaacctcacggagtcgaaccttcggcctctagaagtgttcatgtgcagcattgtacgcaagatgggatatggagatggcttccaatgggtctctcaatatattaagtagattctggcatcatttcccccctttccttgatctaccagcactgtctgcagttacatcagaagaggttttttctgtttttgctattgatgatttcattttgattggattatttaatacaactgcagttatgttatgttatgtgtcaaaatttgtatctttagatattttctcttgtggggtgggggatattctgtttgaaacactggattctgttgcacgcgggttatgtatgaccggggagaaacacaataataacactggaaaaattttattccactttcttcccggaagattttgactggaaactgagctttttcttatc

SEQ ID NO: 5417 - DNA, 993 bp, Glycine max
attcccaccacatgcgcagacacgtgatctaggatctctctctatctgggatctgcttccttctcttctctttctcaattctcattcataattctaattcattcctccgatctgcgactttctatttctccctcaacacaacacgagacaacatgttcctctttgactggttctatggcattctcgcttccctcggtctctggcagaaagaagccaaaattctcttccttggtctcgataatgccggcaaaaccaccctccttcacatgctcaaagacgagagattagttcagcaccagccgacccagcaccccacttcggaggaattgagcattgggaagatcaagtttaaggctttcgatttggggggccatcaagttgctcgcagggtctggaaagactattatgccaaggtggatgctgttgtgtacctggttgacgcctttgacaaagagaggttcgcggaatctaagaaggagctcgatgccttgctttctgatgaatccttggcaaatgttccatttcttgtgctaggcaacaagattgacatcccttacgcagcttcagaagacgtgctgcgatatcatctaggcctgaccaattgtcaccacaggcaagggaaagatgaacctcacagactccaaccttcgaccccttgaagtgttcatgtgcagcattgtgcgcaagatggggtatggtgaaggcttccagtggctaacccaatacatcaagtagagtccttattcattcttagttcccctttctcttgtcaactagccctgtctgcagttacatcagaagataattgacctttgtttttgcttttgatgatttttgattggattatttgatacaactgcagtgatattacatgataaaatttgtatcttcaaagattttttggggggaatgttctcctttgaaatacttaattctgctgtaggatggtatggcttggaaggaacaataataaatctggaagaatgttagttc

SEQ ID NO: 5418 - DNA, 451 bp, Glycine max
agtccctccgtgttcttagttagatgtcgtgtttgggacaagaaaaagagaaatgaggtgcattcctaccacggcatgcgtttggacacgctgaattaattttcgcctaaaaagacaattcggtgggatctaggttagcagcaaccagcgcaatctgggacttttctttctttctccccacacccagattcaaaaactcagctctgctctttcgtttggatctcaaaacatgttcttcttcgattggttctatggcattctagcttccctcggtctctggcagaaagaagccaaaattctcttcctcggtctcgataatgcagggaagaccaccctccttcacatgctcaaagacgagagattagttcagcaccagccgacccaacaccccacttcggaggaattgagcattgggaagatcaagtttaaggcttttgatttggggggccat

SEQ ID NO: 5419 - DNA, 1278 bp, Glycine max
ggtaagtagttcttaagaaattaacaatcactttccattaagtgctgtttggtttgagggatgattaattgcgatggagtttttggattggtgatcgaaggtgttccttggacggaggaagagcatagattgttcctgttagggttacacaaagtcggaaaaggagattggagagggatttctagaaacttcgtgaaaactcgcacgcctactcaggtcgctagtcacgctcagaagtactttctccgccgccacaaccagaatcgccgccgccggagatctagcctcttcgacatcaccaccgatacggtgatggaatcttctactataatggaagaagaacaagttccgccagagacggtggcggcgcctctccccgccgcatatccgccgtcgcattacggggcttttgccggcgcgggttttccgatagctccggtggtgttgccggtgagtggcgagagactaaccaagccgatcaggccgacgccgattttgccagtgcctccgtcttcgaagatggctaatttgaacttgaaagagaaagcttctccgacaaatctcattgagcctttgccgttgtcgttgaatctgccatcgccgacgccgcggtctcaggatcagtcgtcggcgagtagtgggcactcgtcaccgtcgtcgtcgtcatcggcggcggcttttcaggctatgtctgcagcgaagttcggcagcgggggggatagtatcatcagcgttgcttgaaaagaaggaaacaaggaacaaatgagtgtcattaacttattaattaagtatggtcttagtagttaatttgggtatgtaaattaatgttacaaaatcgggcatgtatccaacagggaaaaaatctaagagatatgtgttggagatttgtttattacgaaagatgtatgatataggtaggagggagaggatattagaattaaatgagtatgatggtaattatgattagaaaaaaataaaataaagagatatgtatggtaattaggttatgtaggtaattaggcaatttaattgctggtttcagtgtacaggtttagttgaattaaaaaagatgggttgtcatattctctagctgttgagggattcttgtttctatatgtatgggggagtgtgaccgtgaaatgatagggcaccgggtactcttgataagcgattggtctgtgtaatgccactggggtcattaaaatattgcttagattagacaaaaggaatatttcatgctcaaaaaaaaaaaattatgatgcataagaagagctatat

SEQ ID NO: 5420 - DNA, 635 bp, Glycine max
aacaagaaaaaaattagtgtcattaagttattaattaagtatggtcttagtcgttaatttgcgtgtgtaaagcaatgttacttaatcgggcatgtatccaagagggggaaaaattgaagatatgtgttggggatttattgattattacgaaagataatcataatataggtaggagggaggggatatttgaattaatgagtataatggtaattaattatgatttggaaaaataaatatatactatgggtttaggttatgtaggtaattaggcaatttaattgctggtttcagtgtacaggtttagtagaatttagaattagaaagatgggttgtcatattctgtagctgttgagggattcttgtttctgtatgtatgggggagtgtgagcgtgaaatgatagggcaccgggtactcttgagatgcgactggtctgtgtaatgccactggggtcattaaaatattccttagattagattagacaaaggaatatattatgcttaccatttttttttagatttagtttctgtgttcttggacttgggttgaaccaagaagtattcgaatgcaacacaatctaggaccactattacgttggaatgaaaagaatacaacaaaaaaactcttggttgacgaa

SEQ ID NO: 5421 - DNA, 534 bp, Glycine max
cggcagaaagaaaaactcagcacaacacccctcccaaccctctttttctcttaatttctcatcatatcatatctattaatcttacacatatattaagacatagatataatttttttcgttttatttttccttgcatgggctgttaagataagatgtctcgcacgtgctcacagtgcggcaacaacggccacaactcgcggacatgcaccgacggtggcgccgccgcttcctgcggcgggtctcccagggagaacggcatcatgctgttcggcgtaagagttatgaccgaagctaactcctccttccggaagagcgccagcatgaacaacctctcacagtacgacgcggaatccaacgccgccgacgccggctacgcctccgacgacgtcgttcacgcctccggccgcacgcgcgagccaagcgaggtgttccttggacggaggaagagcatagattgttcctgttagggttacacaaagtcggaaaaggagattggagaggaatttctcgaaacttcgagaaaactcgcacgcc

SEQ ID NO: 5422 - DNA, 557 bp, Glycine max
actcgagccgaatcggctcgagcccaaaccaacccaagtctcattcgctttcactccatcagaaaagaaaaactcaacacaacaccccctctccaccctctttttcttttaatttctcatcttatctattaatcttatatacatatatataaagacatagataatagtcatatagatataattatttcgttatattttccttgcatgggctgttaagatgtctcgcacgtgctcacagtgcggcaacaacggccacaactcacggacatgcaccgacggtggcgccgccgggtctccgagggagaacggcatcatgctgttcggcgtaagagtcatgacggaagctaactcctccttcaggaagagcgccagcatgaacaacctctcacagtacgacgcggagttcaacgccgccgacgccggctacgcctccgacgacgtcgttcacgccttcggccgcacgcgcgagcgcaagcgaggtgttccttggacggaggaagagcatagattgttcctggtagggttacacaaagtcggaaaaggagattggagaggga

SEQ ID NO: 5423 - DNA, 2599 bp, Glycine max
acaccgacaagatgtcaaagaaagcagcaaattattgcatctatggtaaataaaattcatttcttggtgaaaaaatgacaaataacatgaattagaagcgcatttttatccaccacattattgggctcagactaagcaaacctaaaataaaaggactcacgaaatatataactataaaatctcacaaaacaatctatgcaaacaaaatcacactgtctcacttaatttctaaggctctaatttaaccactttttgtttttggtacatcttcatagctgcccttaagcctgtgtaatgcaattctagtaataacagcactttgcctgtgatgatttgtatcttcttgatgatggatgacaatgaaattttggaaaggactttttttttctttccgaattgaaaattatttgagctaaactagctgtagatgatttggtacagagtttgttgcttgaagaaatcagcctcttttgatgtatttttttttaggagaaactagaaaaatatggacacaacattgatgaaacttaagtaacttgagaaatttggctcaacgaggtttacacgatggtgccaacgtagccaaatcctacaattgagaatgttaaggtctgaaggaagagatagatgaagtagttgtgtttcccatgaacataatcatagcatccacatacgaagaggaagacagcaaatcccagctccagtaaattaagtctttcaacaaatttggatcgagtctttttgggggtggccttgatggcattattcttcttggcagcatctcctgatttattcttattattattgttgacagagtcaccaagtttttcagtcacaacccattcattagccctcccatactctaagagacctataaatgttgccttggtacggtgcaaagacatcacattctcaaagaggatccaatagaacagaaggtgaatggaccttggtgttccaactgaattgagaatggtgatgacagaaggaatataaacagctccccagattggaacatgaacctctgggaccaagattgtaaggggaatcacaacacagtagaagaagaaggtgaccatgtgggcgatgattttgcgaacaaagaaaaagctgtatataacatacactttcttccaaaacctaactttcttgttcctcacaatctccatcaccattttgcggaacaaattagcaggaccacaagaccatctgtgctgctggaatctgaaggctctcaaagtactaggaagctcacttttggcctggaggtctccaaggtacaaaaatttccatcccctaagactagcacgaacagcaaggtccatatcttccactgttgttctgtctttccaccctccagcttcattgatagcagctattctccaaatgccagcagttccgttgaaaccgaagaaagcgtgagtggctgatccaacttcttgctctactgtgaaatggtaatccagggacatctcttgcattcttgtcaataagcactcgtcagaattcacaaatctccaacgagcttgaacaagagcaatgtcggggttgcccaccaagaaaggaatggaacgtctgagaaaatctggctctggcctgaagatctgcatcgaaaattgccacgtactcacagtgtttcacatagttacgttttaggccttcttttagagcacccgctttgtaccctcctcttgtttctctgatttggtacactatgtttatgcccttacttgcccatctattgcattccatctccaccatttgcttgatggtagggtcagtagaatcatcgagcacttggatcacgagacgatccacaggccatgaaagattgcaagctgctccaatcgacaccttgtacacctctttttcattgaacattggaatctgcacaagcacgacggggtaattagagttcccgagttcctcgtcgtcttggagtggctcgaacttgtagcgctggtggggcttcttccagaagagcttaacgaggatgatgacaatgcccatgtacaccctctccatgaagagcatgagtgccatcgctagggaaatgtacactgcgaggttcagcagtggcacgatcaatggcgccttgatcacttcccacaccatcttaatctgcgccgccacgtcgaaattcactccattgatcgagtcggggatgaagaacttgggctgagattcaaccattttggttttttattttcttttctcttagcagagaaaagagtgaagttttaggacaatggggtgaataagtgaattggggttgctttttgtatgggattgaaatggcaataaaaatgcaatgcccttcttgttttaactttgctgagtgagaagcaaggcaaagcaatgacacttatggtgaagaatcagatctctctcccccaaaaaatggaaaagtagaaaaacacaaacttgtctctctgctttgtgtactctctctctctctctctctcacacacacacacacacgctattggcgcctatgaatgctttctattctctattatctttctatcgctgtgtgaccgacagaggagaatagaggcattctagacagagagagtaagagagttaaagaaagagagag

SEQ ID NO: 5424 - DNA, 346 bp, Glycine max
ctttcttctttcttctcttagcagagaaaagagtgaagctctaggaaaatggtggtgaattggggtgtgtgctttttgtatgggattgaaatggcaatgcccttcttgtcaacttgtgctgagtgagagaagcaaagcaatgacagttatggtgaagaatcagatctctctctctctatctctcccaaaaaaatggaaaagtagaaaaaacagaaacttctctctcactcacaattggcgcctatgaatgcttctcttctctattatctatctatcgctgtgtgtgaccgacagaggagaatagaggcattctagacagagagaaagagagaaagagagatagagt

SEQ ID NO: 5425 - DNA, 556 bp, Glycine max
ctcatgtttgacaggcctaaatttcatgatgaattgaaattatgaatataattacggttaaaattatttcctatcagttttgtgtttatgtttattcctaatttttctgcagacatgtttcttgctcttgataaagatacaaatgggacattaagcaagcaggagctgcgagaatatgcagatgcgactctggctgatatttttattgagagagtatatgatgaacatgttcgacgtggaaagagtggtggtgggaacgcccgagagatggatttcgagagttttttcctggactttgttctggctttagaaaacaaagacacccctgaaggcttgacatacttgtttcgatgccttgatcttcaagggaggggttacctcactactgctgatgttcactcccttttcagagatgtacaccataaatggattgagggtggtaactacgaactttgtatcgaagatgtaagggatgaaatctgggatatggttaagccagctgatccactcaagataacattggcagacctactggcctgcaaacagggtgtaactg

SEQ ID NO: 5426 - DNA, 495 bp, Glycine max
ttcaagaattgatatgagtgagcttgatgaggattctgatggtttccttcagccacatgaaatggaggcctatatacgaggtctgatacccaacttggcacagttacgtgacatgccagctgcctttgttcaaatgtattgtcgtattgctgcacacaaattcttcttcttttgcgatcctcatagacgaggaaaagcttgcatcaagaaagttttgcttagtaattgtctccaggaactcatggagcttcaccaggaaagtgaagaagaagtcacggacacagagcaagccgaaaactggttctctttgacttctgctcaacgcatatgtgacatgtttcttgctcttgataaagatacaaatgggacattaagcaagcaggagctgcgagaatatgcagatgcgactctggctgatagtgttattgagagagtatatgatgaacatgttcgacgtggaaagagtggtggtgggaacgcccgagagatggattt

SEQ ID NO: 5427 - DNA, 1344 bp, Glycine max
ttcctttcgtccgcccacgcgtccgcccacgcgtccgcccacgcgtcctattcattaattattagctcataatggaagtggaaagaatacaaaccttgtctttgaaccagctcaaggagcttccaccccagttcatccgtccagccaatgaaaggccagagaacaccaaagccatagaaggtgtcattgtgcctctcatctcactgtctcagtcacatcatcttttggtgaaggaaatagctgaagctgcttctgagtggggatttttcgtcataaccgaccatggtatgtcacaaacattgatccaacgtttgcaagaggttggtaaggagttctttgccctccctcaagaagagaaagaggcttatgcaaatgactcttccgaaggtaagtttgagggatatggcacaaaaatgaccaaaaaccttgaagaaaaggtggagtgggttgattatttttttcatctaatggctcctccttctaaggtcaactatgacatgtggccgaaacacccttcttcctacagggaagtgacacaagaatacaacagggagatgttaagggtcacaaacaaggttttggagcttctgtccgaaggcttgggcttagagaggaaggttttaaagtccaggctgggagatgaagaaatagagttagaaatgaagataaatatgtatccaccatgtccacagccacatctagctttgggagttgaacctcacactgacatgagtgcccttaccatactcgtcccaaacgaagttccaggcctccaagtttggaaggagaatagttgggttgcggtcaattacttgcaaaatgcactcatggtacatgttggtgatcaacttgaggtgttgagtaacggaaagtacaagagtgttctgcatagaagcttggtgaataaggaacgaaatcgcatgtcatgggcagtgtttgttgcgcctccacatcaggcagtgatagggcctcttccttctctcatcaatgatcagaacccacccaagttttcaacaaaaacctatgctgagtatcgttatcgcaaattcaataagctttcccaataagggaccaaaacatcatcacttgtgttgtcacggtgaaataaatttgtaagccatgatggaggataacaaagtaggagctaactctccattttggttaacaagtgtagctaatttctattatgcttttgaagtaaacagggctttgtccccttggcatttggtacatgccatattccttaagaatacaataaggctatattcctgttctacttcattaagagtcactgagtgagattcgtatgcacttttttgatggcctaattttacttttgttatc

SEQ ID NO: 5428 - DNA, 604 bp, Glycine max
ctaactctgtatatataaactgattttctgcactgggtgcatcagaggctggatcatttggggcgggctgtttttgtacccatgaaaagcaagttccctaatgatatgctaagtagctgcaagagatccatgtattggatgcgactgaagaaatcccttcttggatttgttcttgttgcatccttaatatttctgatattttgtttcatatttcctcaaaccactgcattgggcttcttggatttctcttacaagagtgatgataacttggttcacaccaccttaaaaagtgctgagaaaacccctatgctacatcatgaccagggaaagagtaagctctctatatctagtgagatgaatcatctaatggaggcctctagtggcaaatattcctatggtcaaggcaatccatctgaacgggaaatatctcagcatttgacacaaaaatctgaaaatcatgaacagactaatcatgcatgggatattcaaagtgaaagaaaattgtcatcctcagcagttcagtgctctgacccaatgaaagcatctcagttgggttatctcacggtcaaaactggtagagaaaagggtagaagaaaaaagagga

SEQ ID NO: 5429 - DNA, 584 bp, Glycine max
acaaaatattgggctgttcaacaagcccagcatccgaactgaagcggatacctcgtttgtgcgccagttccagtgtgtgcaaagtgcagtgatagatagctagctcgctagctagggttagggttagggttagggtttctgcgtttatgcgaagatgactaagttcaggaaattgggtcgacccaccggtcaccgaatgtccatgctcagaaccatggtctcgcagttggtgaagcacgagcgcatcgaaactactgtcgccaaggcgaaagagatcagaagactcgcggataatatggtgcagcttggaaaggagggatcccaacatgctgcgagacgtgctgctagttttgtgcgaggagatgatgtccttcacaagctgtttacagaactggcttatcggtacaaggatagagctggaggatacaccagattgcttccggacccgtattcgagtgggtgatgctgcaccgatggcctatattgagtttattgacagagaacatgagcttaggcaagccaaggcaccaactcctgagacaccacagagagcaccccttgatccctgggcacgttctcgtctc

SEQ ID NO: 5430 - DNA, 273 bp, Glycine max
agctctccagaactgaagcggaacccttcttctgcgccagttccagtgtcccactgtgtgcagagtgcagtgatagaaatctagctacctagttagggttaggggttctgcgtttctgcgaagatgactaagttcaggaaattgggtcgacccaccggtcaccgaatgtccatgctccgaaccatggtctcgcagttggtgaagcacgagcgcatcgaaactactgttgccaaggcgaaagagatcagaagactcgcggataatatggtgcag

SEQ ID NO: 5431 - DNA, 622 bp, Glycine max
aaaaccggtgcgaatgcctccatttagaactcctcaggctaacagctcaggctcaggctctaaatatccgagaccaagggatgtagggtccaattcaccctttgatttgccattgaaggatgatgacagcctcacaagctgcccaccattttcagtgccaaactacatggctccaaccctttcagcccgggccaaagcacgtgctagtagtaatcctagagaaaggcttggtggaactccaactagtactgattcaaagaggaggctctcattccctttgtcacaaggaattgggtctttcaagtggtctaaagggttctcaaacaaggatcaaagagtcccagataaatttcagtcacttgaatctataggaaacgtgagtgtggattcaacggtgtctttgcccgcaagggtggtgggaagaaagccttttacaagatttgtgtgatttattttgttttattcttttttttaaccattttattttgtcaatgctggtggtgttatcagttacattatgattatgatttcagtgtattggtgatagtttgatgacaggtatacccgttgtaaactaataaaaacaaaataggaaatgatggtttggtaacttccattggac

SEQ ID NO: 5432 - DNA, 524 bp, Glycine max
gagaaaaaggttggttgggcattcgccgtaaacagaagagagagagagagagagagagagtcctgaaacttgggtgcgattccttcactcacaacaacaacacatcactatggctcttctgagtcgagcctcttcacgcttccctcagctggtttcccctcaaagggtagtttcactccacacaacgctcccatctctgaacgcatccccatccacagccacgcctacaccatatgccccgccaccgcctccgtccgcttcctctcccgccggcgtttcgaaggcggcggagttcgtgatctcgaaggtggacgatctgatgaactgggcccgccgcggctccatctggcccatgaccttcggcctcgcctgctgcgccgtcgaaatgatgcacaccggcgccgcccgctacgatctcgaccgcttcggcatcattttcaggcccagccctcgccagtctgattgcatgatcgtcgccggcactctcaccaacaagatggctcccgctcttcgcaaggtttatg

SEQ ID NO: 5433 - DNA, 438 bp, Glycine max
gagaacaaaacacacagagtcttttctgtttttatacaaacctcatgtaggtgggagagagagtgtctttcttggctcatagcatagcatcactatggctcttctgagtcgagcctcttcacgcttccctcagctggtttcccctcaaagagttgtttccctccacacaacgctcccatctcttaacgcatcaacatccacacccacgcccgccccatatgccccgccaccgcctccgtccgcttcccctcccgccggcgtgtcgaaggcggcggagttcgtgatctcgaaggttgacgatctgatgaactgggcccggcgcggctccatctggcccatgaccttcggcctcgcctgctgcgccgtcgaaatgatgcacacccgcgtccgcccgctacgatctcgaccgcttcggcatcattttcaggcccagccctc

SEQ ID NO: 5434 - DNA, 629 bp, Glycine max
gattcttaggttgggaaaccgaaacaagtaacgagagaccaaagtagccaagaacgaagcttgacgttgtcttgaagtcattacaatttcatacccacattccgctttctttggaacactctcgctttcgccttcttccttcacactcagcaaatgagtcgctatccagaagttctgtgggcacaacgttctgataaggtttaccttactgttgctctacctgatgccaagaatgtttctgtgaagtgtgagcctcagggtttgtttactttctctgcttctggggttcaagaagaagcctacagctttagcttggagctgtacggatgcattgaacctgagggttgtaaaactaaatctggcttaagaaacatactatgctcaattcagaaaggagaaaaaggttggtggaagaggctattgaagtctgaagagaaacctgctccatacttgaaggttgattggaacaaatggtgtgatgaggatgatgaagagtcaacctctgatttggtatctaatgatgatgctcagtttgttggtgaagatgacagaagcagtgatgatgaaggaatgttgtatcttcctgatctggaaaaggatagggcatagcagctcttactgtactgaga

SEQ ID NO: 5435 - DNA, 817 bp, Glycine max
  unsure (1)..(817): unsure at all n locations
gtatgcttatgctttcgtttttaaatcatgagtggtgtggattggactgttgttgattctgaaaacacataaggaaatcctgttgtaactctggagctgaaggatggtccttatagttgtactgtgtgggatttcagcttccatgctttattcaaggtcacactaaatgctaaaagtctagcgactgagttaacagttaaaaatacagacaataaagcattctcatttagtaccaccttgcacacatattttcaagcttctgtgagtaatgcatcagtaaaggggttgaaaggttgcaaaactctgaacaaagatccagatcctaaaaatccagtgtagggtaaggaagaaagggaagttgtcactttccctggatttgtagattgtgcttatcttgatgcttccagtgagttgcaacttgacaatggtttgggtgatctgatatctatcaagaacacattgatcagatgctgtgttgtggaatccttaccttcaaatggaagcatgttacaaagattttgtttgcgttgaaaatgctaagattggaagtgtccagctagagccagaacaaacttggacagctgtgcagcaccttagcatagcttgaactgtaaatgtgtttctacatcagcaattatttttgtcatatttgataccccaacaaatatgtatcttctgtattaataattttctatgccactactgtcgagggaaggatagtgtacaagagttaaacctcattacattcgtaacattatcgtaacaacaataaggaataataatttttttttaaaaatatnnatttttnttttttttt

SEQ ID NO: 5436 - DNA, 534 bp, Glycine max
cggctcgaggtagaatagcagatggcgatggtttccatggcattcggtgtcagcactgcgacttttccgaatctaaacaggtgtcgtggagtggcatatgcaagtttgagcaacaaagcaagtactacatctttgggagtgcgagttacagagggagaggggaatttgccgaagcttgttctcacttccccggccggtagtgaggctgagatatacctgtttggaggttgcattacttcttggaaagttcccagtggtaaggaccttctctttgttcgccctgacgctgttttcaatgggaacaaacccataagtggaggtgttccgcattgttttccacagtttggtcctggtccaattcagcagcacgggtttgcacggaatatggattggactgttgtcgattctgaaaacacagaaggaaatcctgttgtaactctggagctgaaggatgctccttatagtcgtgctatgtgggatttcagcttccatgctttattcaaggtcacactaaatgctaaaagtcttgcgact

SEQ ID NO: 5437 - DNA, 499 bp, Glycine max
gactgagggagaggggaatttgcccaagcttgtgctcacttccccggccggtaggtgcgtaatttgctataaagctatttttcccttaacaatcacaaccacaaccatgtgagtgcgtactttgattgattgaatatgtgggtgtgcagtgaggctgagatatacccggttggaaggttcattacttcttggaaagttcccagtggtaaggacctcctctttgttcgccccgacgctgttctcaatgggaacaaaccgataagtggtggtgttccgcattgttttccacagtttggtcctggtccaattcagcaggtacgtgtgcatctttaatccacgctattttctgcacttcttcttgttcttttttcctgtatattttactttttttatggtatatctgctgaattaaaatacaaaaatctgagtatttttaattaataaaacttacttctcttcagtgaaatcatgagtggtgtgatgacttcattatgctgac

SEQ ID NO: 5438 - DNA, 733 bp, Glycine max
cctacgcgttttaggacgcgtggggaggaagaacacctatatgggcttgcaaaagatatgggaatcacggatgttactaactcacaacgtcctgctttaataccatttcattccatggaactgcggctgattgatggtgaaggtaatgggaagcttcgattgatcgagcagtgagttcactaaagcagcgttgctgcatggactcggtataccatttgagatgttgacgagtctatcacacgctggctgtttgcgagcataaattaggtttgccaacaaagccaaaattgttgataataagttcgagcacacaaccattgcataatctctgcagtgtataggtgatcaagatgaatcatcaggaaagaagggcccttggagctaatttgttgccttcaaaaactcccatgctgttgtgtaagattttttcttatgttctttactcttgtgccacctgaactgctttcacctcatcccttggcgttgccttaattgttcccatgtggtcatgttgtatgactgaattactcgggcaataatacgaaacttacaatacaaaaaatctatttcttagttaaattttggagattgtgctagagtaggacctaagcattccattttcagttagatcttctggcatactaatttgtgtttgtactttttgttggttaattagctatttgtaatttggagtacttgatggtttgtttaacatgtatttttgttttctttt

SEQ ID NO: 5439 - DNA, 360 bp, Glycine max
tatattaggcatggcacgcttgttcttccataggcctaaatttggtatcctggacgagtgtaccaatgcaacaagcgttgatgtggaagaacacctatatgggctagcgaacaaaatggggatcacagttgttacttcctcacaacgtcctgctctaataccatttcattccatggaattgcatctgattgatggtgagggtaattgggaacttcgttcgatcaagcaatgactttgcaggattctcattgttactattagatgttgcccaagtcttgaacatacagaatgattgcaagcagattttaggcttgccatggtggccattcctttattttttttttctttttcttttcattt

SEQ ID NO: 5440 - DNA, 388 bp, Glycine max
aattcagctcgagtgggaatcacggttgttacttcctcacaacgtcctgctttaataccatttcattccatggaactgcggctgattgatggtgaaggtaattggaagcttcgattgatcaagcagtgagttcactaaaacagtgttgctgcatggacttggtataccatttgagatgttgtcgagtctatcacaagctggctgtttgcgagcataaattaggtttgccaacaaaggtcaatcctatatgcttttattttaagttttccatattctccaagattcaatgtttactacgggactaacaaacagctgaaacagccaaaattgttgataataagttcgagcacacaaccattgcataaactctgcagtgtatacgtgggga

SEQ ID NO: 5441 - DNA, 486 bp, Glycine max
gatctcatcacaatagcaactagctagctagaggccctctgatctgatgagacaaatttcttggagggatatggacaataacgaggaaataccctcaacacccgcaacaccaggcactcctggtgcacctctttttggtggcttcagtaatggtaggaacaataatagcaagaagtccctcctgaagagttgtaggtgcttcagtgtggaggagtggagcttagaagatggagggctaccggcagtgtcatgctcattgccactgccatcgcctccaccggtagtccctcttgcaagaaagattggagcggagttcatagggaccttcatcctcatgttcgcaggcactgccgctgccattgtcaaccaaaagacaaatggctctgagacccttattggctgtgctgccaccactggtctcgccgtcatgatcgtgatcctcgccaccggccacatctccggtgctcatctcaaccctgctgtcac

SEQ ID NO: 5442 - DNA, 693 bp, Glycine max
cccacgcgtccgccacaacgatgagcgtaccgaaggcagtggcagcgacgatccggctcacggtgccggccggaggagctcggccggcgccaccggttggaccggcgctgggtcagtaccggctgaacctgatggcgttctgcaaggacttcaacgcccgcacccagaagtacaaggcggagacacccatggccgttacgataacggcgtacaaggacaacaccttcgagttcaccgttaagtcgccgccggtgtcgtggtacctgaagaaagccgccggcgtggaatccggtagcagccggcccggtcacgtgaccgcgtcctcgttgtccgtgcggcacgtgcacgagatcgcgaaggcgaaacagtccgatccgtaccttcagaacatgcctctcgagtccatttctaagtccatcattggaaccgccaacagcatggggattaagatcgtcaaggacctcgattgaatcaatctttaatatatcaattgctttgttgtgttgtgctattaggattagggttagggtttctcttttaaacctcttttgaatttgctttgaagaggagccaaagcttgcacatatggtttggttattttgctaatgatgttttgatttgacaaatcttatcatatgaataaagttgttagcaacccggtgacgcttgttaacaagatcggttatgtgcccc

SEQ ID NO: 5443 - DNA, 774 bp, Glycine max
ctcgagccgctcgagccgtttagcacaaccctctctctatattccattgccacccagttttgaatatatttttattccttctttgtttcttcactttcttccatacacataaccatgtcttctcagactgttgtcctcaaagttggtatgtcatgtcaagggtgtgctggagcagtgaacagggttttgggaaaaatggaaggtgttgagtcatttgacattgatctgaaggagcagaaggtgacagtgaaaggaaatgtggagccagatgaagttctgcaagccgtttccaaatctgggaagaagactgcattctgggtggatgaagcaccacaatctaaaaacaagcctttagaaagtgcacctgttgcctcagaaaacaagccttcagaagctgcaactgttgcctcagctgagcctgaaaacaagccttcagaagctgcaattgttgattcagctgagcctgaaaacaagccttcagatactgttgttgaaactgttgcttaaggcatttgtggttctatttttctatgtggaagtaggtctgtttcatatagtatttcatgtgctttgtgcatgtcagctattatatttggtgtgttgttactggtatctaagctacaataacttgtggcctatttttcacatgagatacatttcatgggtgctataatttagaatttgaacctgtcactcttgttactactgtttttgttcagtcttttatattcttaccacaacttgatcatattggaaagagcttattttccgctt

SEQ ID NO: 5444 - DNA, 449 bp, Glycine max
gagtcgccacaaccctctatatgccattacaaagaaccagtttggaatatatttttattccttctttgtttcttcactttcttccatacacataaccatgtcttctcagaccgttgtcctcaaagttggtatgtcatgtcaagggtgtgctggagctgtaaacagggttttggaaaaaatggaaggtgttgagtcatttgacattgatctgaaggagcagaaggtgacagtgaaaggaaatgtgcagccggacgaagttctgcaagccgtttccaaatccggaaagaagacggcattctgggtggatgaagcacaaccacctgaaaacaagccttctgaaactgcacctgttacctcagctgagaatgataacaaggcttcagaaagtggacctgttgcctcagaaaacaagccttcagaagctgcacatgttgcctcagctgaccctg

SEQ ID NO: 5445 - DNA, 743 bp, Glycine max
cggacgcgtgggatgaaatgcatcaacttgtcattttttgacattgcgacatgcatgccatgtaaacatatatcatttccctagcaaggcgacatgcattagcatatgcaaaatccgcaccaactctaaccataactgttttgtcgatttcctctaactgaatgaaaaattatactccaaattatttgcactgttaatatcaaaataacggtgttcatatttataggtgttgagtcatttgacattgatctgaaggagcagaaggtgacagtgaaaggaaatgtggagccaggatgaagttctgcaagccgtttccaaatctgggaagaagactgcattctgggtggatgaagcaccacaatctaaaaacaagccttttgaaagtgcacctgttgcctcagctgagaatgataacaaggcttcagaaagtggacctgttgcctcaaagaaatcaagcctccagaagctgcacatgttgcctcagctgaccctgaacccaagccttcagaaactgctgttgaaactgttgcttaacgcatttgtggttctatttttctatgtggaagtaggtctgtttcatataggataggatgtgctttgggcatgtcagctaatatatttgcattggtgagctgtgacagtgtaacgggtttctaagcttcaataacttgtggccgatttttcacatgagatccatttcaagtgtgcaataatttagaatttaacttgtcgctgttcttatt

SEQ ID NO: 5446 - DNA, 488 bp, Glycine max
gtggagagagggggaaatgggtgggtctccaaagagagtttgagcaaagccattaagttagtgatggatggagacagtgaggttggtgctagagtgaagaagaatcacatggagtggaagaaaactgggggcagtcctaatttaatgaatggttacatggataggtttgtccaaaatcttcaagattttcctctccatgggtgattgaaggatttttttcagagggatggaattcatcgtttgcccaccaaatgaaaatgaaattgtttagaaaataagttaagagataaaatatctagagtttaatgctcagtctactttatgaatggtgcagtttgactcttatttagtagttgaattcagtagttcatgtgatactttatatttaaatatattttttatttttaataaatatttaatgttatgtttgtcttgttaataaaaaaattttgtcatgaatttttaataaaataataattttatttttg

SEQ ID NO: 5447 - DNA, 476 bp, Glycine max
tccttgcgtccgcccacgcgtccgggcgaccttccacacagaaaccgtgcaatcagggttggccttgagcagactccacatcctattccactcggtggcactcttgtttctctattactaccgcataagccacatcttactggaaccaagctttgtatggattttcatgaccatagcggagcttatcttcggcgagctctggctcttcaaacaggcgttccggtggcggcccgtgtcgagggccgtcatgccggagaagctgccgagcgacggcaagcttccggcgctcgacatcttcgtctgcacggttgaccccgaaaaggagccgacggtgcaggtgatggacaccgtcatctccgccattgccatggactacccctccaacaagctcgccgtgtacctttccgacgatggcgggtgtccggtgactctgtatgggatcagagaggcttctcggttcgcaaaggagtgggttc

SEQ ID NO: 5448 - DNA, 420 bp, Glycine max
  unsure (1)..(420): unsure at all n locations
ccacctttcagcaaatagacttgaataaagattacagtactatttatcttagtcttggaaccaactttgattaactaacagccactcaggcacccttgcgatagaataggccaatccacacgttgcctttcgttggttctttcagtgcattcatgcggaggaaactaaaaaatttgatcagaggctgtctcctcttattcaagccccttgtaaaaatagcacccactgtacacttagcttttattacttctgtgtacaggatcaagttcattttttaccccacttttgccatctcaactggtggcttaacctcgcgccataaaactggcgtttcttgtattatgacattaccatcttagctcaatgaaaatttgataattcagaattcgtgattaananaaaaaaaaaaaaggggcggcg

SEQ ID NO: 5449 - DNA, 935 bp, Glycine max
  unsure (1)..(935): unsure at all n locations
aatatataagaagatgataaggggaagcgaagcatctaggttcgatggagcagaagaaggcaaagatagtggcagagctccaagctgtgaagcacaacagtggcaagtcctacaatcagttagcggaggagactggactcaccaacgtctatgttgctcagcttctcaggagacaggctcagctcaatccccaaactgcccctctacttcgggcagcgctgcccgacctgccccaagaccttgtttctgagatgatgagaccccctttgaggtcttatgaccctaatctcatccaagaccccactgtctataggttgaatgaagctgttatgcattttggggagagcatcaaagaaataatcaatgaggagtttggtgatgggatcatgtcagcaatagatttctactgctcggttgataaaattaaaggagtagatgggaaggatcgtgtggtattgacatttgatgggaaatatttgccacattcagaacagaaatctgagcacatggtttcaagaacaaggccactgggaaaacagtgagtatcttcattggaggaccaactacgcaatcttcaacaccagtctacctgcacatgaattatcattgatctgtaacaaccacaagttgtatttgatcagtgctattttgtgttgtctatagaaaaacattggaagagaaaaataaaagtgtttaagatttataaataataaaaagtagttggccatgcatatttatacaatgttttatggctttggatatttcatgacacttgcaccatgtattttaatgccagttaattataagatggagaagcttgtattgtgcttggttgagcaagtcaaataaacataataatattcattttatccatctttnnnnnnnnnnnnnnnnnnnnnnnnnnnnnnnnnnnnnnnnnnnnnnnnnnnnnnnnn

SEQ ID NO: 5450 - DNA, 769 bp, Glycine max
gaattaacagcagacacacagaaagagaaagaaagaaaaagagaaaaagaaaaaggagaaagacctaattttgtcactgtaattcttcttcttcaaagaaaaccccaatttcgaacgcttcaaattcaattcaggaaaccctagtgattaatttcgttgcgaaacggcgattcaagattatcgtgagccagaagatggtagcggaagcggaaattatctgtcagcagaacattccgatgttggacgtgaagtatcatatttgcgtggctcaagaacacaacgtgaaggttgaggtttcacccaaatcaccttcaccttctgttccgatctttggccaagcagtgagttgctctgagatcattaaagattccattttggaggcccctgcgatgaattttttcccaaatgtgcgttctggtagctatgccgagattggaccgcgcgtttctatggatgatgaacacatttgtattgatgatctgggagctcatcttggatttgtgttcaagtgtccgataccgagtgcattttatgcagtttttgatggccatggggggcctgatgcagcagcctttgttaagaggaatgctatgaggttgttttttgaagatgcagacatgctgcagtcgtatgatgctgatgcgttttttctacagaaattggaggattcccatcggagagcttttctacgggcagatcttgccttggctgttgaacaaactgttggtagttcttgtgggactactgcattgactgcccttgtgcttgg

SEQ ID NO: 5451 - DNA, 721 bp, Glycine max
cggtcgcgtgggtgacgaccaagtccctggtcttcaagtccgaaaaggcaacaattggattacggtgaagccccctccccatgcttttatcgtcaatatcggagaccaaattcaggttctaagcaatgcaaactacaagagtgtggagcacagggtgctagtaaattcaaacaaagagagagtttccctagccttcttctacaatcccaaaagtgacatacccattgaaccagtaaaggaattggtaaagccagacaaacctgcactctacacgcccatgacctttgatgaatacaggctcttcattagattgagaggaccatgcggaaaatctcatgtggaatcgttaaaatctccaagatgatcgatatatcgttatcaacaaggacattgcttgcaatattatataattaatagtattgtaaatcctgttcctagatatgtacttgtctgaacaaattgcctaatagttaaaccacaaaagcaattggataatatagatatgaaattgatgtggaaaaactgtttatgttaatggatgaatttgggaggtccgcaaagatcattcctatagctttgtaattattagagatttgtgtccccacattcccaacagatgacggtgataagtgcaccataatcttaggggcaatatttgtatcatatagtaatagtatgtactgtattaattgtatgatgcaatgcttgacaagcctgcttc

SEQ ID NO: 5452 - DNA, 1463 bp, Glycine max
tctcgagccgaatcggctcgagccattttccatgacccaagtagtactataataccattctttcaattgcttaccagaacaagcatggaagctacgggggaaaaagcatggcattctctgcatgtggttcggaatatggaagcaaattctatgctatttatggcataacaaccaccttgggtcttcattaatccctatgcaaatccaatctagaagattaaccatgtccctatgtaagtaccctgaggctgaaatagtaaccctttatatacctttcagatctattgacatattcaccctccaagcaaaacatttttattcttattttgctccatctctttagatcatcacaacttcagaggcttggttttaggattcaacttccaaaggcttactctaacatatctctgattgaaggggttctgtgagtttcttgttttagtttgagctttgtttggtaaacttgtcaagggggaattgcagtttctgatttgtgaaactacaaaaaattgaatttagaactgataaagggtctaatagaagagttaccaccatatcatgttataccaaactagcattagaatttatcatgatccttatggatatttgttagtaatgttcttagttcttatatagtactagaaagtggtgcttgaaatttcaactactattattggtgtagaggctcaatcgagttaaaagtgagaaagcaattaaaagtctttgaagtgaatttggatcaatggtttcttctgtgtttacccttatgtgtgttcttcattctacaatagctctaacttgtggagctttgatgatattctactccaaagagatctctgtgctaggccatggatctgagaccgctagcaagcttcaagggacaacaccccatgatcagcttctgattgacacctctgattccttctctggattgttgttgctcacaatagggttccttctgttgatggttgcttttgttaaggacagagaatttcagagtttctttgccctagggtgtgtgatgcttcacatctccatggcagtgtggagattcttctttgagaggaagcttggggatcttgcacatgagtggcctaggcatgctgttggggacattgcattggccatttcatgggtcttctttcttgtgtacacatggagagagaaatatgattagttaatttatttatttatttttagcaaagttatggtgcttgtggttgtggaaacaacatggcttcaagaaaggtcaattgttttgttttagttggaaggaaccaatattttcagggttgtttgggcatttcaaaagggacaaattgagctcaaattggccttgtgaatgctcaaattcttgacataaatggagaaccattacatgagttctggtcttcttcaaagagagaatggaagagcttgttgagtcaactttctggttctgaggtgcacagattcattattta

SEQ ID NO: 5453 - DNA, 664 bp, Glycine max
ctttcaattgcttaccagaacaagcatggaagctacgggggaaatagcatggcattctctgcatgtggttcggaatatggaagcaaattctatgctatttatggcataacaaccaccttgggtcttcattaatccctatgcaaatccaatctagaagattaaccatgtccctatgtaagtaccctgaggctgaaacagtacccctttatatacccttcaaatctattgacatgttcacccttggaggaaagcatttttgttcttattttgctccatctctgtatatcatcacaacttccaaaggcttacttactctaatatatctctgattcaagtggttctgtgagttttcttgttttagtctgaggctttgagttttgtttaatagatatgccaagggcaaattgcagtttctgatttgttgaaactgcaaagattgaatttagaactgatagaagagttaccatgtgtatcaaactagcattagaattggtcatgggtgtttgtttttcaagttcttatacactactagaaactagaaagaagtgattggaatttcaactaccattgttggtttagagggcagaggctccattgagttaaaagtaagaaagcaattaaggcctttgaagtgaattcggataaatggtttcttctgtatata

SEQ ID NO: 5454 - DNA, 642 bp, Glycine max
  unsure (1)..(642): unsure at all n locations
tgttggttggtnncagaacctggtctctggctagaaccatttttatactctccatctttttattttgctgttgcgtcgccactctttgcaactcgacgttgtcgttaacctgaacagaacgcattcgtcttgttccaaaacggtgcagttttgaaaggatcgttgttcttctctctttctcctcttcagtgaaaaagtggattcatttgatcatttaaagggttgcaataccctagatcaaatgatggagactggagacattaatcagcctgaaccactgaaacaggtgtggtgtgagaaaaaacaggctgccgttcatgaagaaatgaatagaatgaaccaactgcctgcaaacagtgcatatgctacacatcgtatgaaggttctaaataaaattttgcaactcatgtcagttcagagaactgtatcacaagagcaggaattggagttgctttttgctggcctttctttgtgaaagtattattactggcgatggtatgttgtggggaatcaatagtaggtttataactatttgcaatgtggtttgtgattgtgcatatgagctctacatgcatgttattttggctctaaatattgctcctgactgtcataattgcagttgtcttttcatcaatttaattt

SEQ ID NO: 5455 - DNA, 436 bp, Glycine max
gtagggcacaatccctaattccccaaaattttctctgaagaagaagcaacaatgtctggtcgcggaaagggaggcaagggtttgggaaagggtggagcgaagaggcatcgcaaggtgctccgcgacaacatccagggaatcacgaaacccgcgattcggaggctagccagaagaggcggcgtgaaaagaatcagcggcttgatctacgaggaaaccaggggtgtgctcaagatcttcctcgagaacgtcattcgcgacgccgtcacctacaccgagcacgctaggagaaagaccgtcacggccatggacgtcgtttacgcgctcaagaggcagggaagaaccctctacggtttcggaggctgagggcttgggctttttctgggcctggatttgttcttcgctgggctttaaaatgttgttgggaatttgtgttttg

SEQ ID NO: 5456 - DNA, 697 bp, Glycine max
cggctcgaggcccgtaaaggatcagaagctaccagaacacaaaggggatattgttgacaacaacaatgaaagcgttattgctccaacagtgaatggtgaaaaacaagaacaagaagtgaagcctcagggtggaattatagagactggggagaagaaggaagagaataataagcaagatcaacaacaacctgaggagaataagaagtttgaccaagttgttcatgaacaaacgaaactcaacaacaagaatacaaacaacatcaacgacgatgacaacaacaaaacaggggaaagggtgatcagttgcgaagtttgatggaattggaagatcagtgttgttgtctcaatctctatctctctctattttacgtgtaaaattagtaaaacgtgcgaaaaggggcagagacggtgtagatatcgttgcctagttatttctatctctacagttattttaacttattttggttcactgtttatctaatttctgttttgtttacccacactaattaattgtgcccctaaatatagggaatttcatggaaagagaatcctatatggtgatatattactattattataacatgaattttagttgtaaaagtttaattattccaagcatgaagcacctttcatactcaagcgctgatcgagtttgcatgaagacagtgataatgtattttcttcttttttatgagcc

SEQ ID NO: 5457 - DNA, 701 bp, Glycine max
ctctatgcaatgtacagaaacaacggatttataaaggagcagaagctttctttacacaagggggatattgttgagagtgaaaacgtttttgcttcaacagggaatggtgataaacatgatcaagaagtaaagcctcagggtggagatatagagattggtgagaagaaggaagagaataataagcaagatcaacacccaatctgtggagaataagaagcttgaccaagttgctcatgaccaaacgggactcaacaacaacaacatcaacaaaaacaacaacaaaacagaggagagggtgggttgcgaagtttgatggaattggaagatcagtgttgttgcctcaatctctatctctctatattttacgtgtaaaattagtaaaacgtgcgaaaagaggcagagacggtgtagatatcgttgcctatactagctatttctatctctctctacagttattttaacttattttggttcactgtttatgtaatttctgttttttgtttacccacgctaattaattgtgcccctaaatatagggaatttcatagaaagagagtcctatatggtgatgtattgttattatatggactatagttgtaaaagcttattccaagcatgaagcacctttcatactcaggcgctgatcgagtttattgcatgaagactgtgattatatatgtattttcttcctttttatgagt

SEQ ID NO: 5458 - DNA, 650 bp, Glycine max
cccacgcgtccgccaccctttattctcttacgtctccaactaatcatacagatcgataatcataatcatatctatagctaattaacttaattattttcatccctctactcttcttctctcctctaaactctcttttccattcttgcttcctttgtgggttgtttgagttttctttccttcaatttaattgaaagatggcttgcttggtatctcgctcgggaagggaattgcagaggtacaacaacatgggtggccggcaagttgttgggtgcataccttatagatataaacaagacatagagggtaaaatgagcaacgaattggaagtactagtggttagttcacagaaaggtcaaggattgatgttccctaagggaggatgggaacttgatgaatccgtagaagaagcagcttatagggaatcccttgaagaagcaggagtaatgggaatgattgagcgtgaactggggcaatggaatttcattagcaaaagatatggcatatactatgaaggacacatgttccccatgtttgtcaaggaacaacttgatatatggcccgagaaaaatctacggagaagaatatggatgactgttgctgaaactagaaaagttgtcagcattggtggatgaggaagcattagatatact

SEQ ID NO: 5459 - DNA, 456 bp, Glycine max
ccctcgcgtccgatctccaactaatcacacagatcgatcataattatatctatagctaattaattaacttaattattttcatccctctactcttcttcttttctatattcttgctttctttgagttttcttaattgatttgaaagatggcttgcttggtatctcgctcaggaagggaattgcagaggtacaacaacatgggtggccggcaagttgttggttgcataccttatagatataaagaagacatagatggtaaaatgagcaacgaattggaagtgctagtggttagttcacagaaaggtcgaggattgatgctcccaaagggaggatgggaacttgatgaatctgtagaagaagcagcttgtagggaatcccttgaagaagcaggagtattgggaatcattgagagtgaactaggacaatggaatttcattagcaaaagatatggcatata

SEQ ID NO: 5460 - DNA, 717 bp, Glycine max
  unsure (1)..(717): unsure at all n locations
ttggacgcgtgggcggacgcgtgggcggacgcgtggggcatgttgtacgtgtaatcttgtgtatatatattcggcgcaatcaatcatttattttctttgtttccttaattgattcggctattataatgtccatttccgcaggtgcataccttatagatataaacaagacatagagggtaaaatgagcaacgaattggaagtactagtggttagttcacagaaaggtcaaggattgatgtcccctaaggtacttttgttatgaatatatcatttcatttgaacatatatgctcaatttggtattcaatggtcaattaatttcgtacaacattaattaacatcctattcatgatctgatctcagggaggatgggaacttgatgaatccgtagaagaagcagcttatagggaatcccttgaagaagcaggagtattgggaatgattgaggtatatattttcttcatatcttttgtttgtttgtttgttttttcttctgtttgcttcaaatgattgaggtataattttgttattcatatgcagcgtgaactggggcaatggaatttcattagcaaaagatatggcatatactatgaaggacacatgttccccatgtttgtcaaggaacaacttgatatatggcccgagaaaaatctacggagaagaatatgggtatgtttgggccccactcttactctntgcacatattaattgatttttt

SEQ ID NO: 5461 - DNA, 657 bp, Glycine max
cgatggcgcactttttctatgtatctcccgattttttgttttggcattgaaaagggtcatagatccaaatattagatatattaattgattactctatcatgcatatgcatgttgtgtactgtatatatcttcagcgcaatttatcattcatttttgtttgtttccctaatttactcggttattataatgtccatctccgcagttgcataccttatagatataaagaagacatagatggtaaaatgagcaacgaattggaagtgctagtggttagttcacagaaaggtcgaggattgatgctcccaaaggcacttttgctataactagatgtattcatttgaatatatatatatgctcaatttggtattcattggtcatttaatttcgtaccacattaattaacatcctatttatctgatctcagggaggatgggaacttgatgaatctgtagaagaagcagcttgtagggaatcccttgaagaagcaggagtattgggaatcattgaggtatatattttcttcatcagattttttttttcttttctgtttccaaaagatttggttatacattgaaacttaaatgtagttttgttattcatatgcagagtgaactaggacaatggaatttcattagcaaaagatatggcatatactat

SEQ ID NO: 5462 - DNA, 727 bp, Glycine max
ctcgagccgataataataactccattttccctctgtcttccccccctcctctacacaaaaatatattattagcatggagaaggtgaattttgtgaagaatggagagcttagattgcctccggggttccgtttccacccgactgatgaggagctggttctgcaatacttgaagcgcaaggtcttctcctgccctttgccagcctctatcattcctgagcttcatgtttgcaagtctgatccttgggatttgccaggtgatttggagcaagagagatacttctttagcaccaaagtggccaaatatcccaacggaaatcgctccaacagagccacaaattcgggttattggaaggcaactggcttggacaaacaaattgttacttcaaaaggcaacaaccaagttgtcggaatgaagaagacacttgttttctacagaggcaagcctcctaatggatccagaactgattggatcatgcacgagtatcgcctcaacatccttaacgcctctcagagccatgttcccatggaaaattgggttctatgtcgcatatttttgaagaagagaagcggtgctaaaaatggggaggagagcaacaaggtgaggaactctaaggtggttttctatgacttcctagcgcagaacaagactgattcctcatcctcggccgccagtggaattacacatgaacatgaatcagatgaacatgaccatgaagagagcagtagc

SEQ ID NO: 5463 - DNA, 450 bp, Glycine max
gacccttttgctttctttatccaataataataaccccctttttccctctccatacccttttgctttctttatccaataataagaacttcccacgagtggctttaactggtctggtctggtctggtcggacacacaaaaatattagtatggagaaggtgagttttgtgaagaatggagagcttagattgcctccggggtttcgtttccacccgactgatgaggagctggttttgcagtacttgaagcgcaaggtcttctcctgccctctgccagcctctatcattcctgaggttgatgtttgcaagtctgatccttgggatttgccaggtgatttggagcaagagagatacttctttagcaccaaagaggccaaatatcccaacggaaatcgctctaacagagccacaaattcgggttattggaaggcaactggcttggacaaacaaattg

SEQ ID NO: 5464 - DNA, 454 bp, Glycine max
caataataataactccattttccctctgtcttccccccctcctctacacaaaaatatattattagcatggagaaggtgaattttgtgaagaatggagagcttagattgcctccggggttccgtttccacccgactgatgaggagctggttctgcaatacttgaagcgcaaggtcttctcctgccctttgccagcctctatcattcctgagcttcatgtttgcaagtctgatccttgggatttgccaggttcctttctattttccattcacacccatcatcccctttctctttctctaatttcaattccatgcccccatttttaggtgatttggagcaagagagatacttctttagcaccaaagtggccaaatatcccaacggaaatcgctccaacagagccacaaattcgggttattggaaggcaactggcttggacaaacaaattgttacttc

SEQ ID NO: 5465 - DNA, 959 bp, Glycine max
gtcgttgttttctatataatagggactcaatcccaaaaccctaagtttcagatccttaatcggccagcaccaaacagcatcggcggcagcgacagtcaccctccgacaacaacacttccgcggcgaaaaatgtctctggtggcgaacgaggatttccagcacattctgcgtgtgctgaacaccaacgtggatgggaagcagaagataatgttcgctatgacctccatcaagggtattggaaggagattcgccaacatcgcttgcaagaaggccgatgttgacatgaacaaaagggctggtgagttgagtgctgctagagttggatagtgtgatgactgtggtggcgaaccctaggcaattcaagatcccggactggtttttgaacagaaagaaggattacaaggatggcaagtactctcaggttgtgtctaatgctcttgatatgaagctcagggatgacttagagagactcaagaaaatcagaaaccaccgtggtttgaggcactactggggccttcgtgtccgtggtcagcacaccaagactactggccgcaggggaaagactgttggggtctctaagaagcgttaagctattatgttttggcttggagattagattttgtttaggaggcatgtttgaagtacactacatgttttgcatcataccaactttgtatccgttgttaaatggcttgacaatttcaattttgtttgttatttgcatctgagattccgattagttaaatgatgttggttttcttagttgtagagaaccttgaatagtatttttgaaattacgaattcagtttgatcctggaaaaaaaaaaaaaaaaatgaggagagaaaagagagaaaaataaaaaaaataaaaaaaaaaaaaggaaaaaaaaaagaaaagtgagataaaatgaaagaggaaggtggaagtagaaaaaaaaagggggggtcgcccaaagggt

SEQ ID NO: 5466 - DNA, 682 bp, Glycine max
ggaggttttagcctaggaaccgtgttcatctactctgagccgcatcacttcccggaatcgtgcatccctacgttcaatatgtcgctggtggcaaacgaggatttccagcacatacttcgtgttttgaacacgaacgtagatgggaagcagaagataatgttcgctcttacctcaatcaaaggtattgggaggcgatttgctaacatttgctgcaagaaggctgatgttgacatgaacaaaagagctggtgaactgagtgctgctgagttggatagtgtgatgactgtggttgccaacccccggcaattcaagattccggactggtttttgaacagaaagaaggactacaaggatggcaagtattctcaggtggtgtcaaatgcactggatatgaagttgaggaatgacttggagagacttaagaaaatcaggaaccatcgaggtttgagacactactggggtcttcgtgtacgtggccagcataccaagaccactggtcgtaggggtaaaactgttggtgtgtctaagaagcgttgagctttcactccctttttcttctgtttttttaagaatgagatatattatttttttgttaaagccgacaaatattttattgtgggaatggatttggattttgttgcatttgaacgttgattgtgatcccgttggttgatcttattta

SEQ ID NO: 5467 - DNA, 287 bp, Glycine max
cgcaacaccaaagattcacttgcttgtttcgtctttcttgttgtgtggtaccttcctgagcttgttccactgcacattgtcccttctgaaccctgaggatggggttggcattctggtgcaagctgatgatgatgttagcatggcccaaagcaacagagattctaggaagagatgtgacatttctgttggaaaatgggtttatgatgactcttaccctctctatgactctagttgtccatatctcagctctgcagttacttgtcaaaggaatgggagacctgattctg

SEQ ID NO: 5468 - DNA, 279 bp, Glycine max
ggagagtacagaacgcggtaaccctagaatcccaaatccccaatcaatcgaccaagagcaggagcttcggtggcgatcttcatccgcctcggtgaaaaaaatgtctctggtggcgaacgaggatttccagcacattctgcgtgtgctgaacaccaacgtagatgggaagcagaagataatgttcgctctcacctctatcaaaggtattggcaggcgattcgctaacatttgctgcaaaaaagctgatgtcgacatgaacaagagagctggtgaattgag

SEQ ID NO: 5469 - DNA, 663 bp, Glycine max
gaaaaatattaagagagaaaataatcaatacgacaactttgcaattttggtggtagaccaaggtaggtcaattgccatggacattggtggtggagtggaagagcccgtgagagagttgaggcaatacttcaaaactggaaaaaccaagagtgtgacatggaggaaaaaccagctcacatctctcatagaccttgttcatgagaatgaagatgctatatttaaggccctccataaagatcttgggaagcaccctgttgaggcttaccgtgatgaggttggaggggtagaaaaatcagccagcaaagctttgagctgcgttgagaaatggatggcccctaaaaagagtgatatcccttttcttttcttcccagctaaaggagaagtgttgtcagaaccacttggtgtggttctcatattttcttcttggaacttcccaatcatactgacattggatccaataattggggcaatatctgctggaaatgttgtagtcataaaaccttcagagcaagctccagcatgctcttcttttcttgccactaccattcctcgctacttggactctaatgccatcaaggtgattgagggtggaccagatgtctgtgaacaactactgctacaaaaatgggacaaaatattcttcactggaagtccacgtgtggc

SEQ ID NO: 5470 - DNA, 476 bp, Glycine max
  unsure (1)..(476): unsure at all n locations
aaataaaggagaaagaaaaaggaggtttgagagactagaagaggattgggatttggcaagagatttagattagcatggaatcaagaatggagtgtagtagtcatcaacaacctcagtcactgtaaatttttttggttattatttatctctctcaaatgcatatgcaatcgcaatcaattgcaaagcatttcggatccagagggagagaccctttgtgacagcctgtatcctctccatcgtctgatagattcttcattttttttccatttctcgcggcaagatctcacactctgcacctagggttagggttttggttcttgcggcatggcgacttcttcgagttcttcgagctggcgcgagggcatgtcctccgacaacataaagggactgtgcctcgctctctcttctagcttcttcatcggcgccagcttcattgtcaaaaagaaaggtttgagaaggccngtgctagtggaatc

SEQ ID NO: 5471 - DNA, 506 bp, Glycine max
cttgttatggattcaataatatgggcgtttcggcatacagaaaggaatattgctgaaactgggctgaacctgttgttggagatgttgaaaaagtttcaggcatcagagttctgtaatcagttttatcgaacatactttttgacaattgaacaagagatatttgctgttctgacagacacttttcataaacccgggttcaaatttcatgtcttggagcatcaacatttgtactgtctggcacaaactggtgccctaaccgagcctctttgggatgctgctacaaatccgtatccatacccaagtaatgacagcttttgtacgcgagtttactataaaccttttaagcacttcatttcccaacatgactgcttccgaggttactcaatttgttaatggccttttggagtccaccaatgacctccccacatttgaaacccacatacgagattttcttgtacaatccaaagaattttcagctcaggataacaaagatctttatgctgaag

SEQ ID NO: 5472 - DNA, 496 bp, Glycine max
aggtaaaatagttggttgggcaccccagaagaagatattgaaccaccctgcattggctagcttcattagtcactgtggttggaattctaccctagaaggtatatgtgccggtgtacctttcttgtgttggccatgcgccactgatcaatatcttgacaagtcatatatatgtgatgtgtggaagattgggcttggactagacaaggatgaaaatggaataatttctagggaagagataaggaagaaggtggatcaactgcttgttgatgaagacatcaaagctaggtcattgaaattgaaagacatgaccataaataacatactagaaggtggtcagtcatcaaagaatctcaacttctttatggattgggcgaagtaattatgcttaatttggttctatattgaaaagtcatgtgtaatttctacatgtaagaatttaatttctatgtagatcttaatgtaatctatttaaaaattaataagctttattataaaa

SEQ ID NO: 5473 - DNA, 411 bp, Glycine max
ggggaagagaaatgggaggaagaatgcacacgatatcagactcggaggtgacgagcaacagcatggagcagtcgtcgccggcgcgttctcctccgcggcggccactctactacgtccagagtccttcaaaccacgacgtggagaaaatgtcctacggctcaagccccatgggttccccacaccaccatttccactactacctctcttcccccatccatcactctcgcgaatcctccacctctcgcttctccgcttccctcaaaaaccctcgcaacttctcctcctcctcctcctggaagaagctccaccctcaccccaactcgcgacgttgaccccgacgaccatgacgacgccgaccaccacctcaagcagtcctcccgcaacctccgcttgtacttgtggttcttcctc

SEQ ID NO: 5474 - DNA, 476 bp, Glycine max
ccaaaaccacttgacacaccttgccaacttgcccttccttcaaaaaccaaagccagaccgaccctgagaagaaaccaacaaacatgggaagcaacaaaacctacgaggaagaagaaagcacggctctattttcccattcccaaacacaaacagacttgctgttacccttcaacgagaacgacccgcaggacatggtcatataccaagtcctccacgaagccaatgctctcaccaacacatttctccctccctcgagcccaccagaaacataacaaagaagcactacagaggagttcggcgccgcccctggggaaaatacgccgctgagattcgcgactcggcccgccacggcgccaggatatggctcggcaccttccaaaccgctgaagaggctgccatggcttatgaccgagccgcgttcaagatgaggggctccaaggctttgctcaatttcccagctgaaattgttgctgcaa

SEQ ID NO: 5475 - DNA, 467 bp, Glycine max
cttacttactttttcaatggttcaattcctgaaagccttggacaattgacatcgttgcaaagactgaaccttaatgggaacttcctgtctggaagggtcccagcaactcttggaggaagacttctgcatggggctagcttcaatttcactgataatgcaggcctatgtggcatacctggattacctacttgtggacctcacctttctgctggtgctaaagttggcattgggctaggtgtttcttttactcttctacttcttattaccggttcagtttgctggtggaaaaggcggcagaatatcctccgggttcagcaaattacagcaagggcagctccatatgcgaaagcaaggacccaatttgcacgtgacatccagatgcacaaggcataataataataataatgcggagaatggacctattttgctttcacgataataccccatgtttctggtatcttttgggg

SEQ ID NO: 5476 - DNA, 487 bp, Glycine max
  unsure (1)..(487): unsure at all n locations
gaataccggnccgaccacgcgtccgacgtacgggcggcgctgtggcggacgcgccggcggtggttgaggagaagacggagttcgacgtggtgatcgaggaggtgccgagcaacgctcgaatcgcggtgattaaggcggtgagggcattgacgaacctagcgctgaaggaggcgaaggagttgatcgaagggttgccgaagaagttcaaggaagggatttcaaaggacgaagctgaagatgcgaagaagcaactcgaagaagctggtgccaaggttaccattgcttaaacactgtttagctgcagcatatatgttctgcttcttcttttgttggttgtagttgagttcaccagtacactgtaatttcatttccattttgtctggatttcaatcttttatttgtaatgaggaaatatgagttcttatttttatattattttttttaatgcgtatgaggtgtttgttggaaaaaaaaaatcttttaatat

SEQ ID NO: 5477 - DNA, 564 bp, Glycine max
cccacgcgtccgcctccctcaaatcccaaaccagcaaaaacctttcttcacaaaatggcctcaacaactctaacaaccctcaccctccgcacgctatcttatcctacaccctcctcttcttaccctacgcacctctccgccaaaccctcctccctccaattccccaatctctcccaccgcgccgccaccacgcgccgcccccgtgtcgtcgtctccgccgttgaggcgccggagaaaatcaccaagctcggcgacgaaatcgccggactcacgctcgaggaggccaagaacctcgtcgacttcctccaggacaagctcggcgtctccgcggcggcgttcgcccctgtggcagtcgccgcgggtgccggcggcgctgtggcggacgcgccggcggtggttgaggagaagacggagttcgacgtggtgatcgaggaggggccgagcaacgctcgaatcgcggtgattaaggcgggaaggccttgaccaaacttacccttaaagaagccaaagaatttatccaaaggtttcccaaaaaattcaaagaaaggatattaaaagaccaaa

SEQ ID NO: 5478 - DNA, 574 bp, Glycine max
tcgatactcgtgggagcgcccaggacatcactggcgattattgaattgaaggctctcagacgcacaaatacaaggagccaaccgacatcctcaaccttacattccatttccctacatttcttccctctctttcttttccattctcccttcacaattttcccacaaccttttttttcctttcatttttttaatttttttttttaaattcttccatcgtttttttccttccttcagagaaaataaaccataacgattttgtttcagctcttcttagctcaccccaaaccaaatccaattccatcactgcattgatccgtttccttcaaattattcagcaatggacgagttcggcgttttgaccgaaaagttcggtctcaaaccgcaaggaaaatccgctccaatggcaagggcaaagcgacctccgaatgtcgctgattcccaaacacgccccaatcccaaattcccccttaacggatccccgtctcaccaaaattccaccttcgatttcgattacggagttttcagcaacagcaacaccgacaacaaaacgcagcgtttcgacgacatcttttgc

SEQ ID NO: 5479 - DNA, 1784 bp, Glycine max
acggtgcgagatgacgacagatggggaggcgagaaaaggcttttgagttatgatgatgaaagaaatcatgattatctatctgaaactaagggggttgagtgtgaggcaagttgtgcttttacgagatttagtctaggagaataagaaacccggattgttcacgtgccaaccaagaatctcgaagctcccaaaatccaacagctaaaaaattcacagctgtgtcatccatgaccatgattcaatcccatccaaatccctctctataatgccttcatcaagatccagtagtaggaacgaaacaacgattgagtaatcctcacttgatgatactactagtcctgagatgataacatcaaacttcgcaataacaacgaaacttccttataatttatctttctctctttctttctttcttccttccctctcttctattctcttcttgtctttacatcacaccctctttccccctttgccaaagctctgatcttttccctctccaatccccgtttctccacttttcttgatcagggtgcctcgttttctcagtttctgaatcattttttgttctgggcctctctccacttcggaaaaagatctgatttttcgcccccttttttttgtttcgaatccctcgtgaaccctcttttctcgatctggggtgtgaaggaaaccgctttttatcgtttcaattatgaggaaaagggagagggagaatccttgtggcgtgtgtggccactatcacaaatacgaagaaggggaagtgtgttcaatttgcggtcaccggattccggttggatcggagaaaacttcgatacaagtcagtgcttttccttccgttgtcctgccggaatttctttacctaggaagctacgacaatgcgtcccgctccgagcttctcaagactcaggggatttctcgtatcctcaatactgttccttcttgtcaaaatctctacaagaactcgtttacctatcactgcctcccagatgacaaaactttgccatttgatgaagcaattcagtttcttgagcaatgtgagaaggataaggagcgtgttctggttcattgcatgtcaggaaagagtaggtctccagctattgtgattgcatacttgatgaagtccaaaggatggagacttgtacacagttatcagtgggtaaaggcacggagaccttctgttgaattaactcaaggtgtgtaccagcagctgcaggagtttgagcaaaagatctatggaccgattgatagtggcagctctgtgccgcctggtttcttgcctacagcaccttcaattagctttggtttcccaaagatcaatgatccagctcagcttccttccttcagcactgctggaactccttcaatctttgcgcgagcacccctagatattgctccaaccgagtttacattcggtgccggtcagactcagaagaatgtggctggaaacccctataatgcaaatccagcaaatccaaatggcactgatatccaaatggatggttcttgatccttcaccagccacatgtgtgattaagctgcttgacaatttggcttgtggtgaagcttgcaaggtaccaggctgccatatttcaagtcaagtttgcaataatcataagtgacttgtctattctacaccaacttcttttttcccttgtatttctcaaatcttttcatagttatctctggttgtagtattgagttccagcataatattcttactggcctcagtagatctgcgcgacaatatccagtttttaatattacaagcaaaatcttgtctataa

SEQ ID NO: 5480 - DNA, 552 bp, Glycine max
aaaaactttttttttgagaagggaaaagttcttagtgccaaggtttcacgggtccctggtacctcaaaatccagtggatatggggttgttacttttccgtcagaagaggatgtagaagctgcaatctcatctttcaacaattctttgttagaaggccaaacaatccgtgtgaacaaggcatagagaattagcaatgttgcagagcatgtttgaccacgtgtcgtctagccggaacaatgtatactttgtgtgaggctgaaaccactagcaaatttccttgtctcttgtatagcataaacctaatcattttcagttgataaggttctacgaaaaaatagtgcttcatgcttctgttgcaggcattgctcctttagtccaggatattgagacctcactttttcttcatgatcatgttgttgcacctttctactctgcttcagtgttgcaactcttgttgatatatgcatgtattcaattccatttttttccaaaaaaaaaaaaaaaaaaaaaaaaaaaaaagcggccgcactagaggatcctagcatacataca

SEQ ID NO: 5481 - DNA, 818 bp, Glycine max
taataacgaaccttggggattaattgataatattagtttattatttgggaaagattcctgtgaaatgaaagatttcattaactcctaagtcatgtcgagtagaccttgttgtttcgagaattcttaattcatgagttgtagggagggatttatgtcaccacaaacagagactaaagcaagtgttgggttcaaagctggtgttaaagattataaattgacttattatactcctgactatgaaaccaaagatactgatatcttggcagcattccgagtaactcctcaaccaggagttccgcctgaagaagcaggtgccgcggtagccgccgaatcttctactggtacatggacaactgtgtggaccgatgggcttaccagtcttgatcgttacaaagggcgatgctacggccttgaacctgttgctggggaagaaaatcaatatattgcttatgtagcttatccctcagacctttttgaagaaggttctgttactaacatgtttacttccattgtcggtaatgtatttgggttcaaggccctgcgtgctctacgtctggaggatttgcgaatccctactgcttatattaaaactttccaaggtccgcctcatggcatccaagttgagagagataaattgaacaagtatggtcgtcccctattaggatgtactattaaacctaaattggggttatccgctaagaattatggtagagctgtttatgaatgtcttcgtgggggacttgattttacccaaaaaaaaaaaaaaaaaaaaaaaaaaaaaagcggccgcactagaggatccaagcatacgtacgcgt

SEQ ID NO: 5482 - DNA, 824 bp, Glycine max
cctccaccccttagtccttttcctcaaagggactaccataatttttctctcccaaacaaacccaagagaggaagaaagaaagaaaagagtataaacacacaatatctctttaaactcttgacccttctcttggaggcatggctttcccaattctcttccttctcttcatttcccttcccttctcctccgcaaagctcaacgtcgattactacaaaaacacatgcccagacttcgaaaaaatcgttagggaaaacgtcttcaccaaacaaagcgctagcgtggccacagcaccgggtctccttcgcctcttcttccacgattgcatcaccgatggctgcgacgcttccctcctcataacttccaatgcatacaaccctcatgcagaacgtgatgcggacctcaacctttctctctccggtgatgccttcgacatcatagttaaaatcaaaaacgcattagaacttgcatgccctggtgttgtgtcgtgttccgacatcgtggcacaggccacaagagaccttgttaagatggtcggtggtcctttttaccccgtgaggctggggagaaaggatagcactgaatcagatgctgcgagagtgagtgcaagccttccaacaccaagcatgaccatggaccagatcattgagaagtttacctcaaagggtttcactgttaaaggagatggtggctttgactggggcacacaccattgggttcacacactgcaaggagttcatccacaggatctacaacttcagcaagacctctgatgctgaccctatgatgcaccctaagctggtccaagggttgaggtccgtgtgcca

SEQ ID NO: 5483 - DNA, 720 bp, Glycine max
tctcgagccgcttccttcatagaaattttctattccccaaatctcctccttagactgccaacccaatatagccattggatcgaattcagtctgaattcggtctaatggtttgggagttctaattaagtctaaggaacagaaattctgtacatatatatatttagaagatcacagggtgcttgatcagtggtgtatcaggatggacaaggtgacgaggttggcttctgaaaagggtgtggtgattttcacaaagagctcttgttgcctctgctatgcagtcaacattctgtttcaagaacttggtgtgaatcctgtggttcatgagattgatcatgaccctgaaggcagagaaatggagaaagctctattgaggcaaggctgcactgctccagttccagctgtattcataggagggaagctaatgggatccaccaatgaaatcatgtccctccacctaagtggttcactcactcagatgctgaaaccttaccaggctttgtcttgaaaagaagcacaagaaacagttcctgacacctgctggaagaataagctggcttgaattagtagagtagtgaccatagtattgatattctagtgtttttatgtctgaaattgctcctagcatttaattagctataatgtaatcacataaatattcttaatgaaagtttaatttatatacttgtactacaaaacaaaaagaagaagaaaaacgaaaaa

SEQ ID NO: 5484 - DNA, 662 bp, Glycine max
ctcctcctacttagagccattagatcgaattcgatgcatttcggatttgatctgatggttttggacttctaattagtctaagatggacaaggttacgaggttggcaacagaaaagggtgtggtggttttcaccaagagctcttgttgcctctgctatgcagtcaacattctgttccaagagcttggagtgatccctgtggttcatgaaattgacaaagaccctgagggcaaggaaatagagaaagctataacaaggttggggtgtcctacacctgttcctgcagtcttcatcggagggaagctggtggggtccaccaatgaagtcatgtccctccaccttagtggttcactcactcaactgctgaaaccatatcgagctttgtcttaaagaagggtgcacatgcaaattaaattaaaacatgttcctgctaccttaattggaagaataaacatgcagtatagtagtgtaactactaagtctataatattggatagtctatgcagtgatgcatgtgtgatgtagttaattaatttctagcatttgattattagctatatataattaatgcaatgtcataattattcttaatgaagttctatttatatacttgtactgatgtacgtccaagcaaatcatgttattgaaagtttaatttatataa

SEQ ID NO: 5485 - DNA, 261 bp, Glycine max
catagttttctcctccttagagccattagatcgaattcgatcatttcggatttgatctgatggttttggacttctaattactagtctaaggtaatctaaattagagtcatatctctctctctctctctctctcatttttttacatttctttattttcttgctgtactttttgtctcttggaaaagaattttaatttctatacactatattcccagatgggaaagggtatgagggtggcaactgaaaagggggtggtggttt

SEQ ID NO: 5486 - DNA, 727 bp, Glycine max
acaaaaggggcggacagtttgtaagattgatgaacgggccttttggatgaactatgtattctctatatctggtccattagcaataccacttgtgtatcctaggatgatggctatccatgatcttgactcaaaggaagatgatgactctgttattcctccctttcttcctctttctagtgaacacatcagtgatgatggaatatatcttcttgagaatggtcatgattgtttgatatatgttggagactctgtgaatccagacatcgtgcagaaactgtttggtgttgctacagttgacaaagtccctaccctgtttgtattgcagcagtacgacaatccactatcaaagaagttaaatgaagtggtaaatgagatacggcggcaaagatgttcctacttccggttcaagctctgcaggaaaggagatccatcaggaatgctattcttctcatatatgatagaagacaagagcgcaggtggcttctcctatgtagaatttcttatccatgttcataggcaaattcaaaataaaatgtcatcataacgagtatatggcagcttcatttttgcaagcttttagacctaaatgatagagcaagccccaaagtataggtgagattctgcataattatgtgcattcaaatgccttgagtttgtcaaaggaataccagacgacacaagtttttgacaagttttgttgatgtacatgtataagttaattaatgtt

SEQ ID NO: 5487 - DNA, 687 bp, Glycine max
ctcgagcggggatagcaaaatcgtttctccaatttaatcaccattgtacaacccaattcccttcgtcgttttcgattaagagagcaatggcacgtaccaagcaaaccgctcgcaagtccaccggaggaaaggctccgaggaagcaattggcaaccaaagccgctcgcaagtcagccccggcgaccggcggagtgaagaagccccaccgcttcaggccaggaacggtggctctgagggagattcgaaagtaccagaagagcaccgaacttctgatccgaaaactcccattccagaggctcgtcagagaaatcgctcaggatttcaaaaccgatctccgctttcagagcagcgccgtttcggctcttcaggaagccgcggaggcttatctcgttggactcttcgaggacactaacctctgcgctattcacgctaagcgagttaccattatgcccaaggacattcaactcgctcgcagaatcagaggcgagagagcttaagtttagggtttcgtgtcatttgacattaaaattaggttactgcttattgtaattcgtgttttcttcaaatgcctctttattgtaagattcatcttatttcatcaggtatattcccatatggatctgcacaactgagtttatgttgaaaaacgagataattctctaattttatatatccttcggtgatgat

SEQ ID NO: 5488 - DNA, 357 bp, Glycine max
tacggacagcaaaacaattttcaaactcaattaccattccataacctaaatctcctctttgtttccgagtcagagagcaatggcacgtaccaagcaaaccgctcgcaagtccaccggcggaaaggcgccgaggaagcaattggcgactaaagccgctcgcaagtcagctccggccaccggcggagtgaagaagccccaccgcttcaggcccggaacggtggctctgagggagatcagaaagtaccagaagagcactgaacttctgatccgaaaactcccattccagaggctcgtcagagaaatcgctcaggatttcagtacagatcatcgtttcgagagcagcgctgtgtctgcgct

SEQ ID NO: 5489 - DNA, 1111 bp, Glycine max
tttttggtaggtcgcgagcgagcatcttcgagttgcatttcgcagtgtgtgtgagaagaagagaaaaatggagaaaatgatgcgactgagaccactgttccgatcactgagttgcagatcttatcatgccttcccattcatcaaccatgtcgttcttcgaccttctcttatctctcgctctcccaatcctcttccttctccttcacactcagaatgcatgtctcctttctcgatgggtttagggagcatgcgattctatagtgaagatttgacccacgtgcccaatattaaggaccctgcactttacaatgctttcaaggatttgatggcagtaagttggagtgagcttccggattctgttgtatctgatgttaagaatgtgttgtctaaaaacactgatgacaaagctggcaaggaggctgtggaaaatgtgtttcgcgcagccgaggctattgaggagtttggtgggattctagtctccttgaaattggaatttgatgacagcattggattaagtggcgaggatgtaaagccattgcctgatcatataaaaaatgctctgtgtaccacttttgatcgctactccacctatttgaattcctttggacctgatgagaactacctgcggaagaaggtggagacggaattgggtgcaaagatgattcacctaaaaatgagatgcagtggccttggtgctgaatggggaaaggttacggttcttggcacctctggacttgcaggttcatatgttgagcaaagagcatagaagcaacaatttagaaacattgcatgtaattgtttgtctctgtttcatatccatgcttttgatgatgccggtagactctttgatttgttttctcctgacctttttgttgtcaagcgttgaatggcatggaaataagagagcgcttaactttgttaactgtgattatccttaaacaatgttttgtttcgttctcaatgtcattttccgaagttaacaagtaacaatgttggtgaagttctaaggacttgtatatatcttattgatcatatgaaaatgacaagtcaagaagttaattaattatattgttctactcatttgtatctaaaaaataaaaaatatttttaa

SEQ ID NO: 5490 - DNA, 493 bp, Glycine max
tttgtttcttacttgtgtatgaaaaaaaaggagacgaaaaggaaaaaacagaagaacagtgttcgaagatggagaaaatgatgcgactgagaccattgttccgatcactgagttgcagatcttatcatttcgttcttcgtccttctcttctctctcgctctcccaatcctcttccttctccttcaccctcagaatgcaggtctcctctctcaatgggtttagggagtatgagattctatagtgaagatgtgacccacatgcccaatattaaggaccctgtgctttacaatgctttcaaggatttgatggcggtaagttggagtgagcttccggattctgtcatatctgatgttaagaatgcactgtctaaaaacactgatgacaaagctggcaaggaggttgtggaaaatgtgttctgtgcagccaaggctattgaggagtttggcgggattctaatctccttgaaattggaatttgatgacagcattggaat

SEQ ID NO: 5491 - DNA, 401 bp, Glycine max
atttgaaaatgccatgtgaatcgctagaaacatgtaaagtgtgtggctaacccaataacgaaagtttcgtaagggaactggagcaggctaccatgagacaaaagattttctttctaaagaaattcgattcggaactacgatatgtccaaggtccaatatggaaagaatttcagaggttttccttgactttgtccgtgtcaacaaacaattcgaaatgcctcgacttttttagaataggtccgagtcaaatagcaatgattcgaagcactttacactattttggaaacccaaggactcaatcgtatggatatgtaaaatacaggatttccaatcctagcaggaaaagggggggaacggatactcaatttcaagtgagtaaacagaattccatactagatatc

SEQ ID NO: 5492 - DNA, 666 bp, Glycine max
agaattttcatcaattatcagcataaattacaaggagaaattctaatttcattggatacctgcatctaaaaccccaaacctccctcatttcttcttttccccaaccaacaactccactcttttgtgttcttgtaaattcttttggctaaaatttcagcttccagaattgaaaaaaaaatgatcaaacaagttcttcttcttgttctgctcttcttggcctctggattggccctctcagtctcagagtctgagtctgtttctcttctgcctcacgccgctgattccttcaatgttagctatatccagatgaagaacgctgggacttgctcttactcggtggttataactactagctgttcgtctcctaggtatacaagggatcagatcagtatttcttttggggatgcttatggcaaccagatatatgcgccaagactggatgatccagcttcaggtacattcgagagctgttcttcagatacatttcagataactggtccgtgtgcatatcagatatgttatgtgtacctatatagatctggattagatggctggaagcctgacagtgtgaacataaatggttataacggcaagcctgttactttctattacaacacatatatcaccagagatacgtggtatggatttaagttgtgcaacggtgct

SEQ ID NO: 5493 - DNA, 281 bp, Glycine max
aaaacatctaacaaatgaccttaaagatacatttacccttatcgagttttgcctatgtcttatgacttacgcacacaacaataaaaggttgaattttcaacgaaggcgtccaaaccccaaacctacgcattttttcttttccccaaccaacagctcctctcctttatgttcttgtaaattcttttggctaaagtttcagctttcagaattgaaaaaaaaaatgatcaaacaggttcttcttgttctgctcttcttggcctctggattgaccctctcagtct

SEQ ID NO: 5494 - DNA, 372 bp, Glycine max
gagaaaacgaaacacgtctagttagtactgtggcattcccacaggagcttcatgggaaattgtctattactggcagttctagccatgccatcgggcttggtgatcgagtaactactccagcaggggcacaccacggaagcgtttttgcatctgatacaagaactttggtccagccaccagatcccagttctgaagacacatgactcacagtgatactactttgaggccgagacatttttgtcttcctatttactggaaggctcatcctgattcctgttggcgtatcatcccctttgacaatttctctttcaactccacccctcccaattcggtcttttcttccccttttttcaatgtatgcggggagcaaga

SEQ ID NO: 5495 - DNA, 422 bp, Glycine max
aggagattgctaatccaaccacacggaaaactccgcagactgctttatgcagtctaatggatattccctagcgcaagataatcatggatgcttcggttgcatttcaggaactgggggtaccatggagctaaagtgcccaccaaatggtcagatgcagatgcataatgagtttgatggggctctccctttggtgacagttcctgctgctgctgaatttagcaaggaaaatggtgtctgggcatgctctcctgatcgtcttgaactgccttcaaagccattccaccattcaaactgctcagattcaccatgtgtatcagaatctggttctgatatttttagtaagcgggaagtcatacagaaactgccgcaacagttgaagagaagagatgatatgatactagaaatgcaagatcaaatggctg

SEQ ID NO: 5496 - DNA, 1463 bp, Glycine max
agttaattgagttgggtcttgaggattgtgtggatgaaattgatgctcagcaagtctttggctatgctctgtataaggatggcaaaaataccaagctctcttatcccttggaaaatttcggctctgatatttctgggagaagctttcacaatggccgtttcatacagagaatgcgagaaaaggcttcgtctcttccaaatgtaaaattagaacaaggaactgtcgcatctctacttgaggagaaaggaaccatcactggggtgcactacaaaaccaaaagtggtcaagagttcacagcaaaggctcccctcaccatagtatgtgatggttgtttttccaacttgagacgttctctttgcaatcctaaggttgaagtaccctctcattttgttggtctggtcttggagaattgtaatcttccatatgcaaatcatggacacgtcatcttaggtgatccttcacccgttttgttttatcccatcagtagcactgagattcgctgtttggttgatgtgcccggcctaaaattaccttccctaggtggtggtgaaatggcctgttatttgaaaactgtggtggctcctcaggttcctccagagctgtatgattcttttatagcagctattgacaaaggaaacataagaaccatgccaaatagaagcatgcctgcctcaccttatcccacaccaggtgcccttctaatgggagatgccttcaatatgcgtcaccctttaaccggaggaggaatgactgtggctttatctgacattgttgtgctaagggacttacttaaaccccttcatgatctccatgatgcttctgctctttgcagataccttgaatcattctacaccctacgcaagcctgtagcatctacaataaacacactagccggggcattgtacaaagttttttgtgcatctcctgatccagctagaaaggaaatgcgccaagcatgtttcgattacttgagccttggaggtgttttctcagatggaccaatagctctactctctggtctaaatcctcgtccattgagtttggttctccatttcttcgccgtcgctatatatggtgttggccgcttgctcataccatttccttctccaaaacggatgtggattggagctagattgatttcaggtgcatcaggcatcattttccccattattaaggctgaaggggtgagacaaatgttcttcccagcaactgtgccagcatattacagaacccctcctgtccatccattgaacacacatgaaggaaatacatggaattaatatataatggttcccttttcccacattctttccacctgtagtattccatttctgccatcaagaataagagagggaactcattccataattaggatactcattttgtgcaactgcaaccaatattatagtataaaaaaaacttgaatttgggacccgagaaagaagttccaaaactaatcgtgc

SEQ ID NO: 5497 - DNA, 702 bp, Glycine max
gcactcataataattaaaacaaagaaaaacaacacatacctgttggtacatgccaacaacttgcgttagcctttaaccggaaggagaatgactgcggcttagtctgacattgaacagataggaaccttcttagacccctgcatgatctgcatgacgctaatgctctttgcaaatatctagaatcattctacaccctacgcaagccagtggcatctacaataaacacattagctggggcattgtacaaggtgttttgtgcatcccctgatccagctagtaaggaaatgcgccaggcatgttttgattatttaagccttggaggtgttttctcagatggaccaattgctctactctctggtctaaatcctcgtccattaagcttggttctccacttctttgccgtggctatatatggtgttggtcgcttactcataccattcccttctccaaaacgaatgtggattggagctagattgatttccggtgcctctgctatcattttccccattatcaaggccgaaggaattagacaaatgttcttcccagtaactgtgccagcgtattacagaacaccccctaccaatttggaagattaaatacacatcttggaaggaaaggcatgaatacaaaacataatctgtgcccgcattctttgtaactgtgattagtcctaccaaaattaaaggaataagagagcctagc

SEQ ID NO: 5498 - DNA, 510 bp, Glycine max
ttgtttggttccattttataacttcagggaaggctggacttgacacatttgtgccactatcttggtcctatagattgaaaatcatgaaaggaactgcgaagggattgctctatcttcatgaatttagtcccaaaaaaatatgtccatggagacctcaagccaagtaacatacttcttggacacaacatggaaccccacatttctgactttggagttgggcgccttgcaaacattgccggagggtctccgaccttgcaatcgaaccgagtggccgcggagcaactacagggaaggcaaaagagcatatccactgaagtcacaaccaatgtgttgggaaatggttatatggcaccagaagcactgaaagtggtgaagccatcacagaactgggatgtgtactcatatggtgtgatattgttggaaatgatcacaggaagatcatccattgtcttagtggggaactcagaaatacaccttgttcagtggattcagttgtgcattgaggaaaag

SEQ ID NO: 5499 - DNA, 509 bp, Glycine max
ggtcctccgatagttataatataaccatgtaacgttcaaattctacgccaatctctgtctcattctctttcctctttcctttttccttttccttagaagaatcgaaaacgtcttcaaaaaaccaagccattattaatggctgtcgattccttcttccagaaagaacatcaaattcgggagtttgtggacgggaatggaaacgtagctgtcggtttgaagttgcataataaaccaagtaatgatggccttaaccgacagtttcctctagagattccgccgattctatttgaagagacttcacttccagcaggattgcacggttcacatactaaagatgtttatagtatttcagtgttgcctgaggaagatgaaaatgcaaattgcgcttcaccactacctttcttgagcatcctaggggttcctaatcaagttaaaagcccaatgtgcttagatgatcccataaattgtcaaaactgcattgattttcaaatgaagaatgcgggtgtgta

SEQ ID NO: 5500 - DNA, 523 bp, Glycine max
actcgcctcgagatccaaacagagcctttgattcccaaatccctcgtcccattgaacagtgatcagttatattcgcgttgcgatctattccaattccatgacgacaccaccgtcttcctcctcagcttcgcactcgcaattcgcctattcaaacccctcctcctcctcctcctacttccccgttccctttcaccttcagcaacccgcaaccactcactacgctgcgccctacgtcgccgccccctccgtgcaaatccccgctcctccagtcgtcggccccgttgcgcccgcccctgtacccggcgtatactccgccgtgccgcaatatcaggcacagcagttatttgagagggatgcgcagataataacgccggaggctcttgagaatgtcaaggcagcgattgcaagcagcgacgtggagcacaaaaccgatgccaaaaagaaagcggttcctcgcaaagctgctggccacgcttgggaagatcctatccttgcggagtggccagaagatgattatcggctc

SEQ ID NO: 5501 - DNA, 446 bp, Glycine max
acgcccacgcgttcgaagacgcgggtttggctcgagcattgccttaagcctttgattaccaaatcctcccttcctctcccattgcacagtgatcgttgcgatccatgacgacaccaccgtcttcctcctcagcttcgcaatcgcagttcgcctattcaaacccctcctcctcctcctcctacttccccgttccctttcaccttcagcaacccgcaaccactcactacgctgcgccctacgtcgccgccccctccgtgcaaatccccgctcctccagtcgtcggccccgttgcgcccgcccctgtacccggcgtatactccgccgtgccgcaatatcaagcacagcagttatttgagagggatgcgcagataataacgccggaggctctcgagaatgtcaaggcagcgattgcagcagcgacgtggagcacaaaaccgatgccaaaa

SEQ ID NO: 5502 - DNA, 522 bp, Glycine max
ttcttcttcattcaggcgccggctccctttctctccgatcaatccaaacccttttcttgttcttcacaaatttccagttctccggcgccgcttcgccctcgaggtcctcggcaaaaacggctgcctcgtggagggcgtcctccacctccccggcaacccccccgtcaagctcgattcccaagatctcctccagattggggacaaggagttctactttctcctgcccgttcgcagcatccttgttgggcccgtcggcccgaggcattaccctaaccacgccgcacccgggcccgtcgtgccgcactataataattaccatttgggccccggcccggtgaagaaggcgccgcgacgggagtactacgaggaagagtttgatgatgaggatgatgttggtgggaggaagatgcggagggatgggtatgatggatatggctacgctggtggcaagtcttcgctgtccgcacctatggataagaagtctgaaggtagatcccgagtagatcgagatgctgataatct

SEQ ID NO: 5503 - DNA, 456 bp, Glycine max
ctttttcttcactcacacacacgtgctccctttctctcccatcaacccaaatcccttttctcgttcttcccaattccaatttccaattctccggccatgtcaaccgcggcagcggcggggggcgacatggaggcgggtttcgcgaagctccagggcgaggactttgagtattacatgcagacctactccatcgtcctcggccgcaactccaagaagtccaccgtggacgtcgacctatccagcctcggtggtggcatgaacatctcccgccaccacgctcgcatcttctatgactttgcccgacgccgcttcgccctcgaggtcctcggcaagaatggctgcctcgtcgagggcgtcctccacctccccggcaacccccctgtcaagctcgattcccaagatctcctccagattggggacaaggagttctattttctcctgcccgttcgcagcatc

SEQ ID NO: 5504 - DNA, 588 bp, Glycine max
cttaatccctcacaagctgagaaagaagaaggaattattcctcttacggattcattgcccattatttctcagtcctacattacgcattcccttaaagtggaaggtcttcgaggcattgtaactgtgcctgccaagctggagtctacatctctcgtctttgcctatggagttgatctattttttactcagattgctccttctaggacttacgattcactaactgaagatttcagctatgctttgcttcttctaacaattgttgcacttgtagctgcaatatttgtcacttgggtattatcccagaggaaagatctacaagagaaatggagatgatctgtcctccatttttgccttataatttctaattttgaagttttaagtagttttatctctgttttctttgttagttattagttcggattttgaaatcttttgtagcttgaattgcaaaagtaatgcagaattccattaggttgaatggaggatgttttcattttaatgatgtaaattgaggagtccgaaagataatcatgaaattccgatgtttgacatgaatgttttatcattgttgtcaaggttaaatattca

SEQ ID NO: 5505 - DNA, 767 bp, Glycine max
ctactgttgcacattaatggatatgttgaacgtgttgccaattgtaaatgggaagtaaaagagctcggcatggagcataacggatatgttgatttgttgctgggggagtttaagcactataaaacacgacttgctcatggaggaattcgtaaagaggttcaagacctattattggattatgggcttgaaattgtggctgaaactcttgttgaaggactttcacgggtgaagagatgtagtgatgaaggacgagcccttatgtcattagatctgcaggttttgatcaatgggttacagcattttgtggcgctgaatgtgaagcccaagctacaaatggttgaaactttcatcaaggcttactaccttcccgagacagaatatgtgcactgggcacgagcacacccggaatacagtaaaagccagattgttggactggtcaaccttgttgccactatgaaaggttggaagaggaaaaccaggttggacatactggaaaagattgaatgagcaactgtcttttgttgtgtatcaagtcaggcatatagaatcttctgctccttttcccctttgtctttcttttttggcagggctccgtgtaaaggtagtgtatattgcttggcgtttgatcccctattaattatggagtattttccaaatctgtgtgcgttggtgtcttgtagatagtcctttgaaaataagctgttattgtactataattttaccttcacataatatttttcctcacgtaattcaggttactgatcgct

SEQ ID NO: 5506 - DNA, 1035 bp, Glycine max
ggaacctagattttacactaaggtatttaaagagtgccatataagtgatgacaccaggaattcctttgaactttcccttgttggctgtaaatgtattggagcttatgtccgaaataagaagaatcaaaaccagatttgctggttatggaaaaaagttagatcacaggatgatagggggttccagaggttcttagatagtgttgagtataatcataaggatatattactttatgagagtgtgtttggccaaggctttgtgagcacaggaggacttgaaacaacaaaggaatttgtggcaaagttgggattaaaacctggccaaaaagtactggatgttggttgtggtacaggaggaggtgacatttacatggctgaaaattttgatgttgaggttgttggcattgacctctccataaacgtgatttctcttgctattgaacgtgctattggactcaaatgctcggtagaatttgaatgtgccgattgcactaaaaaaacataccctgagaatacatttgatgtaatctattcccgtgacacattgttacacatcaaagataaaccaccactattcagatcattttacaaatggttgaagcgtggaggtacacttattattactgattactgcaaaagtgaaggaagtccatcattaggatatgctgagtacataaaaaaaggaggatatcatatccatgacatgaaaacatattgtcagatgcttgagaatgccggatttgatgacgttgttgccgaggatcgaactaatttgttcatgaaaaccctacagcaggagttaaatgcccttgagagcaagaaggatgatttcattgatgaattctcggaggaagactacaatggaattactgaaagatggaaggccaagcagatgcggggtgcagatggtgaacaaatatggggcttgttcgttgccaagaaagaataatgcttcttattatatgccttactatgcctctatattttgttcagtgtgaacagttttccaaatgatagtttggataagtattttgtttc

SEQ ID NO: 5507 - DNA, 391 bp, Glycine max
  unsure (1)..(391): unsure at all n locations
attattttaggaacagcaatggtgaaaatgctgctattgtgaaaccaactgatgaggagccttatgcaccaaacaatcctaaaggttttgttggcaaagctcttggacaaccaggactgaaacgttcagtgagggttggggagacaggtttcagagaagttgcagcctaccttcttgaccatgatcattttgccaatgtaccctttactgcccttgtaaaggtcacacattctatttttaatgttaatgacagggtcaatggtagtatgcatcataacaaaaagcaaataagcaagattgcatctctgcagcagtttattcctcatgattttgatgcaagtgatcatggaacttctagtttccctgttgctgctgttcatangattgggat

SEQ ID NO: 5508 - DNA, 933 bp, Glycine max
  unsure (1)..(933): unsure at all n locations
gaagagctangacggcgcatgcacgccgtcctaaggctcggaattcggctcgggtctgtagcgaaaagtcagcgccttcttttgtctctctctctctcaaaaaaattccacacactgcagagtttttgtctctctatggcggaagattgggatctacatgcggtggttagaggctgctccaccgttacatcatcctcagtgtcttcttcttcatctccttcttcctctggttttgcctcttcttacttccaccctgaagctgcagtttcttcttcttcttcttcctattctggcttcaacatcttcaagggtgaacaaggaataagccaagttttgtcgctctctgcgtacccctttgaggcaaggagctccattgaggaattgcatgagctttgcaaacctttcttctccaaatctcagcctctaacgttgcaagcctcttcacctttgtcctcactctcttcctattcctctgcgccacccaaatctgtttcaacgcaagagaaacaacaacagaggagcaagcaggcacatgctgtcaccaccccacgatctaaaagaagaaagaaccagcttaagaaagtttgtcaagtgccagttgagaatctctcctcagacatatgggcatggaggaaatatggccagaaacccataaaggggtctccatatccaagggggtactatagatgtagcagctcaaaggggtgtttggcaaggaaacaggttgaaagaaacagatcagacccaacaatgttcatagtgacttacactgctgagcacaaccaccctgcacctactcacagaaactctcttgctggttccacacgccagaagccattggcacctcaaacagccaccaccactgaagaagactctgacaagagcaagagcctcacaaaacccacttcccctgccacctcaggggcagaagaa

SEQ ID NO: 5509 - DNA, 566 bp, Glycine max
ggatctgaactgaagcacactccgttatgtacgaggcatcataatagcattgaagcaacggcggcggaaaccaccgttcgacgccggagacacgatctgtttctacctctgatttcttctcttcagtgtaggtatgggaatcagtaaaacagaagtaaacttgaggaggttgcttgcagctgctcctcaacagcaaaatcaagcaaaacttgtgcattatgttgctactttgcgtgaacaattagaacaattggctgaagaaaggacactggaaggcttacccaggatttcaaaggctatgttgaatgattattcagagaagattgaagccattgcttccaaattggttaatcatgtgattgacacacaagtacccgggaaggacttcgaaaggaattttgttaaagaaaaacattctgaaattgaggaaaaaaagcagatactcctttcttctggattgagaagaaggcctgtacctgcctcaagtacagaagatagagcgcatgagcctgctgagactgaccacacatcacctattaaactggatgctacagcacatgcacaca

SEQ ID NO: 5510 - DNA, 433 bp, Glycine max
tttggatctgaactgaacctctctccgttgcgtacgacgcatcataggcatagcaatagcattgaagcaacggcggcggcaaccaccgttcaacgccggagataccatctatttctactgtattcttctcactctgatttattctcttcagtgaacactgtagctatgggaatcagtaaaacagaagtgaacttaaggaggttgcttggagctgctcctcagcagcaaaaccaggcaaaacttgtgcattatgttgcgtgaacaattggaacaattggctgaagaaaggacactggaaggcttaccaaggatttcaaaggctatgttgaatgattattcagagaagattgaagccattgcttccaaattggttaatcatgtgattgacgcacgagtacctgagagggacttctaaaggaattttgttaaggaa

SEQ ID NO: 5511 - DNA, 400 bp, Glycine max
gaccttagaaagagaaggaaaaaaaaaaacttgtgtttcttgggaagccatgagcaccaccgagagtcaaagatataagggcacagtgaaatggttcaacgaggagaagggtttcggtttcataactcccgaagatggtggctctgatctcttcgttcactacagtgcgatccaaaccgacggcggcttccgcaccttgtcggagggtcagtcagtagagttcctcgtcactcaggacgacagcgggcgagccgcggccgtcaacgtgacgaccaccacggttaaatctagtgacagcggtaacggggaaaactctggtggtgatgctgccaatgttgagaaataagtgagaatgaattattggagtttcctgaattgcgagtatgatatttatattgat

SEQ ID NO: 5512 - DNA, 497 bp, Glycine max
aagagacttattgtcaaccagattcttccaccatctacatctgattgcaagttttgtgctatgaaaagaaaggatcaaatgcgtgctcttgatatagttcagaatgatccagaactctccagtttatcaatgatccaggcaccactcgtagatgttgagataagaggtgttccagctctcaaatttcttggtgacattatttggaaatgatttacacagttactcaagcaatgattaggttaaatttagtaatttgctgaagttggtagttgaaaccatagacacatggcatgacatcaaggctcatcagattttatatgatgaatttgtggagcacttgagatgttcagattccggtactggcagttcttaaagagatactggcttccaatattcacacgctagagtttcaagacaccagacaacttttttgatttttcacattatacatattgttattgtaaatttatttctccagtacttgtatctgactattt

SEQ ID NO: 5513 - DNA, 423 bp, Glycine max
agcaaggagtaaccaccaaattcattccaaacaggagagaaaaagcaaagctcctcctgttatttcttggtggttggaggaggttcagaggaagaagaagatgagttaggagaaattaatattaactcttcaattttgtagtccaattgatccatccatggtgggggaatcaagaaagtgggtgatacttttggcatcaatatgggtgcaggcattcacagggacaaactttgacttctcatcatactcatctgagctcaaatctgtgcttgacataactcagcttcagctcaattacctctctgtggcctcagacatgggaaaggcctttgggtggtgctctggggtctcactcatgtacctccccttgtgggtggttatgttcatggctgcttttatgggactttttggctttggcttcca

SEQ ID NO: 5514 - DNA, 881 bp, Glycine max
taccaacgaaagcaactactcacgcagtttcttcttcttcttcttctcctgcgcttcgtctcaatctcaagcgtcaattctccatcgccaatcctctctttctgctgatttcggactcgtcacttacttgtgaaatgatgctctcagcggcaataattacttttggacgctggacataaggcgtgatgggcggttgctgttgttgttgttgttctgctaaggagactgtgttgagcgctccacctgcgtactattattatccaagagcatcagaagagcatgttcctctatcatctcaccagggtgctgcttctgctttctctgggcggctcttggttgatactaatctagatacttcatctcctgatacttatagacctccccctgctcctatccctttcaatgttaccttgggtaccactcaaactccacctgcggctcaagaaattcgtagtgacaagaataatacttccttgccttctacaaattctaatgcaattcaagaaccagttgctagagacattcatgggacctcagctaagttggaagagccgaaggaatccgagtgcatagttcagactgatctggagctagattctgcaaagggttccgaaattgaacttgctaagtcggggaaacctatagatttagtggaagaggaagatgcatgcccaatctgtttagaagaatatgatgcagagaatccaaaactcgcaacaaattgtgaccatcattttcaccttgcatgcattctggaatggatggaaagaagtgaaacttgccctgtgtgcgatcaggtttcccccaatcattaccaatttctcatctacctttagatctgtgtgaagatacccttgtgaatatgacacttaaagcaattc

SEQ ID NO: 5515 - DNA, 380 bp, Glycine max
gtcaaataccaatgaaagcaactactggcgcattttcttcttcgtcttcgtctcctctttctcaatttcgatttctcaattctcaattctcaatctcaaggtgaaatgatgcactcagtggcaataattacttttggatgctggagataaggcgtgatgggcggttgctgttgttgttgttcttctaaggagactgtgttgagcgctccacctgcgtactactattatccaagagcatcagaagagcatgttcctctatcttctcacccgggtgctgcttctgctttctctgggcggctattggttgatactaatctagatacttcatctcctgatacttatagacctcctcctgctcctatccctttcaatgttacctt

SEQ ID NO: 5516 - DNA, 505 bp, Glycine max
ggagtgcgtaagtgcttgcgttcgtgtgtgtgctgtctgttgtgtttctttttgtcattcttcaatttctctgtgaggatgaacaaattaacttgccttccatgacgtatatgaggtggaagagaaaccggcgtagactagagaggaaaaattctagggtttgagtttcacagtgagagaagctcgtggtgtcgtggattccatttccagctagaaattagaatggggaaaaaccagaagacaggggtaggaagagcgtcggtgaagcagcacaatcaacagagcaaggaaaatgggcgtttacagaagaagaatgttctcgaatcgttcacagagatcagcgacatcgatgccataatcgaacaagctgaacaccctcaacaacccctcttctccacccctcaccggcccatcaatctggatctgagctccggcattggcaaaaatgaaatgacacttgaagaaatgaggaaacagctgaagagggaggatgctttgcatgcta

SEQ ID NO: 5517 - DNA, 581 bp, Glycine max
gtcaccgttgcttactagatgtcaaaatccagttacaaagtttcaacaatgtccacttttgaacataagttactgtcctgcatcagaagttgatctggttcaaggaaagaatttggttattgtagtttacaactctctaggttggaggaggaatgaagtgattcggattccggttattgaggccaatgttagagttcatgactctaatggtatagaaatagaatctcaacttcttcctcaggctgagaaatatgtagacttaagaaattactacgtgaaggcatatctaggacaaactccacccaaggcacctaagtactggcttgcatttacagtttctgtaccgccacttggttttagcacatacactgtctcaactgccaaaaggacagggtccacaagatcatcagtagatatatatatgagtagtgaaaagtctaaatttgatgttggtcaaggaaatttgaagcttacattttctatggatcaagagaagtgtaccaattatgttaatataagaaacctggtcgaggaacaggttgaactaagttacctatactattctggatacaatggaacta

SEQ ID NO: 5518 - DNA, 888 bp, Glycine max
atgccacttggatttgatttgtgtgcgcttataagaatagccaactaaggtggggcatggcctacacccattctacactcgcctccttccaaaaccgcaccctccacacacctcttcctctttcgccccctcagattcaaaagacctgtccccccgctgaaagcgtcgatggcggagaccaacaacaacgttgccgtcgaggtccttgaaaaagaggatcttgccgtgtccctggccaaatacgtcgccgatctctccaacaaattcacttccgaaagaggggctttcactgtttgcctgtctggcggctctttgatcaactatctccggaagctgctggaaccgccttatgttgatactcttgaatggtccaaatggcacgtgttttgggtggatgagagagtcgtgcccaagactcacgaagatagcaactacaagcttgctttggatggacttctctccaaggtgccaattcccccgggcaatgtttatgcaatcaatgatgcgctttcagccgagggagcggcagatgattatgagacgtgtctcagacacttggtcaagaacaatgtgatagcttcatcaccagccaatgaatttccaaaatttgatctcatgctgctgggcatgggccctgatggccacatagcttctctgttcccaggccatcctcttgtggaggagaaacaaagatgggttaccttcattaaggactccccaaaaccaccaccagagagaataactttcaccttaccagtgattaatacttctgcttacgcagcgcttgtggtgactggcaacggtaaagcagatgcagttcactctgtgttaggcaaatctcaaaattttgctaagcttcctgttggattggtttcacctgaaggagag

SEQ ID NO: 5519 - DNA, 592 bp, Glycine max
ggaagagttggaagcgaacgaaatggtgggcattgtcactgccactttgatttgattcgtgtgcacatataaggtggggcatggcctacaccctttccaacactctcccactctcactcgccttcttcccagaccgcaccctccttcatccaccctccacacacctcttcctctctcgccccctcagattcaaaagtctttgcgtcgtcaatctcaagagacctgttcccccgctaaaagcatcgatggcggagaccaacaacaacgttgccgtcgaggtcttcgaaaaagaggatcttgccgtgtccctggccaaatacgtcgccgatctctccaacaaattcacttccgaaagaggggctttcactgtctgcttgtctggcggctctttgatcaattatctccggaaacttctggaacctccttatgttgatacccttgaatggtccaaatggcacgtgttttgggtggatgagagagtcgtgcctaagactcacgaagatagcaactacaagcttgctttagatggacttctctccaaggtgccaattcccccgggcaatgtttatgcaatcaatgatgcgctttcagc

SEQ ID NO: 5520 - DNA, 502 bp, Glycine max
cttatttttgcaagtaaatacttgctaccagagctgactagtatagggaaaatgttctccagtgagatgactttagcatcagcttggattcaccttttggttatggatctctttgctgcaaggcatgtttttcttgatggattagagaatcagatagagactcggcattcagtttctctgtgcttgttcttttgccctattggggttcttagtcatgccatcaccaaagaaatgactaaaagtgccagaaaaaacaagcacagcttatagagggcacctacttgctttcccacataaccaaaaaagaaatttaattgaagtttaagagtttcagaaattcatgttcaagtttttaaattaagttacttgtaattttgtttggaattgttttcccctcaatcaaaatactattagtattttgttccatctcaagtgtataaattattttgacttgatgttcattacatttttacttcaattgcaaagaaagctttccattttc

SEQ ID NO: 5521 - DNA, 570 bp, Glycine max
actcgagccgctcgagccgaatcggctcgagctcgacagatggccactgcagaggtgtattttctcacttctcagcactcagcagcgatatcagttgaagaaacagaaacaaacaaaagaggcagaagatgttgtgggtggacaaatatcgtcccaaaaccctcgaccaggttatggtccacaccgacatcgctcgcaatctcaagaaattggtaacggaacaggattgcccccatttactcttctatggcccatctggctccggcaagaaaaccctaatcatggctcttctccgccaaatgttcggacctggtgccgaaaaggtgaaggtggataataggacctggaaagtggatgctgggagtagatctcttgatttagagctgacaacattatcaagtgccaatcacattgaaatgagtccgagtgatgcaggctttcaggacagatacattgttcaggaagtaatcaaagaaatggcaaagaacagaccagaggagatgatggggaagaaaggatgtatagtacttgtgctcaatgacggagataaacacgctagataagcccaac

SEQ ID NO: 5522 - DNA, 588 bp, Glycine max
ggtgagaatcggaggggccgttttttgaaggtgtctgaagcttctgtcagcagaaaccgtagcactataattgttcctgctggaagctccagggatgaaggatgggcagcattcaggaacgttttggcagagatcaatgaagcctcaaggcttttcattctgcccaatcagcaaaattctgaatcctcagagcgtcttgttggactttcggatgatgttggtgctggcttcatatctggtcatagtactcaacctgccacttcttctgagttgaatgtggacaggtctgttgatttgccgcctcaggatgaaattgggaacttgggggtctcaaaagtgatcagggctgatcagaaaagattcttctttgatcttgggagcaataataggggtcatttcttaagaatatctgaggttgcgggctctgatagatcctccattaatcatcccctgtcagggctcaatcagtttcatgagattgatggtcactttgtcgaaatcacaaaggaccggattgagggaatcgcggttgctaatgttcgcacgattggtccacctcaaggatgaatactaacttgggataagaat

SEQ ID NO: 5523 - DNA, 510 bp, Glycine max
aaatagacaaagcaaagtggatagttttatgaacatctagtacaatgaggatcatattaaatcaaaaacattactacatccccaacgtacatttccgatcatcagaggtaaaatgaaacaggagatcctcaattgcgacaaatcctagctgtaggattggtgacacaaaccggggcatactttttcttggcttctgaggttcctggtttaggctcatctgccactgccatcccagcaacagagaaaacagcagcagcagccacagcgaacatcaagttcctccttccattgctatcattgttgtcataactgaccttttccccttcagctttggcagcactcactacgagtaatctcctctgcgcagccactgccgaccgtttggtgacagctgggcagccaaagatagaagctgtcatggtgaatgatgccatttttgcaatgtaatctgaatacagaactagtctccttgctacttgctatggtccccttctgtcgtcttcagccgta

SEQ ID NO: 5524 - DNA, 788 bp, Glycine max
ttttctgatccttcttattagcatttcatgaagcatctacaaacgccctaggaccactgggctccattatattatcaattattcaacgtggcaataacttattggtcatttcatgaaagagataagatattgcatggtcataccaccatgtcctttttttttgtgatttacgttccatatattcatcctttggtccattctttggttcagtattcagattacattgcaaaaatggcatcattcaccatgacagcttccatccttggcagcccagccgtcaccaaccggtcggcagtagcaacgcagaggagatcactcgtagtgaatgctgccaaagctgttgaagcagaaaaggtcagttatgacaatgacatggatggtagcaatggaaggaggaacttgatgttcgccgcggcggcggctgctgtttgctctgttgctgggatggcagtggcagatgagcctaaaccaggaaccccagaagccaagaaaaagtatgctccgatttgtgtcaccatgccaactgctaggatttgtcgcaattgagggactttggtttttattttacttctgatgattggaaatgtacaatggggttgttgtaatgctttgatgatttcatttgatcctcactgtactagatgttcataaaactatcgactttgctttgtgtcttgggtgaacattaaactggcgataccaaagagacatagcaaagctcgatagttttatgaacatcttgtacagtgaggatcataagactttagaactttgcttcctgtcactgg

SEQ ID NO: 5525 - DNA, 504 bp, Glycine max
ggaattaccgggtcgacccacgccttcgttccggttgcaaaaaaccaacaaaagggttcagttttaagattattatacattgcaaaaatggcatcattcaccatgacagcttccatccttggctgcccagccgtcaccaaccggtcggcagcgacgcagaggagatcagtggtagtgaatgcagccagcaaatctgttgaaggggaaaaggtcagttatgacaacaatggtagcaatgcaaggaggaacttgatgttcgccacggcggcggctgctgtttgctcttttgctgcagggatggcattggcagatgagcctaaaccaggaacctcagaagccaagaaaaagtatgccccggtttgtgtcaccaatcctacagctaggatttgtcgcaattgaggaacttttttggttcacttttggaatttggaaatgtacaatgaatttggtgtaaggctttgatgatttcatttcatcctcactgtactagatgttcataaaagt

SEQ ID NO: 5526 - DNA, 1575 bp, Glycine max
tcatctcttcactactattaacctttcacatcacaacacaatctcatagcaccaaaaacatagtactatacagccccactttctctttctctttctcttcactctaaagtctaagcatccatggccatggcgtctgcaaagctcaacaccttgtcttcccagtggatcgcccacaattccttctctcctcgccgtggatcctcttctcgccgagtctctcttccgatccgcgcttcttcttaccaacacgaactcgtccaaaccgccaaatctattgcatctcccggtcgtggaattcttgcaattgatgaatcaaatgccacatgtgggaagcgtttagcatccattggattggacaatactgaggtgaatcgccaggcctataggcaacttctgctcaccacacctggccttggtgaatacatctctggtgcaattctttttgaagaaaccctttaccagtcgacaacagatggaaataaatttgtggattgcctccgcgatcagaacattgtgcccggcatcaaagttgataagggtctggtccctctgccagggtcaaacaatgagtcttggtgccaagggctggatgggttggcttctaggtctgctgaatactacaagcaaggtgctcgatttgccaagtggaggacagttgttagcattccatgtggtccttctgcattagctgtcaaggaagcagcgtgggggcttgcacgttatgctgctatctctcaggacaatggtcttgtgccaatcgtagagcctgaaattcttcttgatggagaccacccaattgagaggacgctggaagtggccgagaaggtctggtcagaagtcttcttctatttggctgaaaacaatgtcctttttgagggaattttgctcaaacctagcatggttacacctggggctgaacacaaggaaaaggcttctccagaaaccattgccaaatatactctaaccatgcttagaagaagagttcctcctgctgtccctggaatcatgtttttgtctggtggacaatccgaagtggaagcaacactaaatctaaatgccatgaaccaaagtcccaacccatggcatgtttctttctcatatgcacgggctcttcagaacactgtgcttaagacatggcaaggacaccctgagaatgtggaagctgctcaaaagtcccttttggtgcgtgctaaagcaaactccttggctcaacttggaagatactctgctgagggtgagagtgaagaggccaagaagggaatgtttgtcaagggctatacctactaaaacttttggagtcttttggtttcagttttgttttagctatttatcatcattccttcttagcagtgaattcgaaggggacttagatgttgtatttttattttttttcaacttctagcaaatgagagtttgaataaattgaaaagctagaaagaaaggttttcttggtaaaatggaagttggggattagtaaaaacccaaatgggaaaagaacaggagaaaagaacagaagaaaaacaaagtttactgcatagttattgtttatttgcctgttcagatttcgctcttggc

SEQ ID NO: 5527 - DNA, 559 bp, Glycine max
tcgccctctcgtccgcccacgcgtccgcccacgcgtccgcctcactattaagtattaaactttcacgacacaacacaaaatgcatagtactatacaacaccactttctgtttctcttcactctaatggccatggcagcgtctgcaaagctcaacaccttgtcttcttcccagtggatcgcccacaattccttctctcctcgccgtggatcctcttctcgccgagtctctcttccgatccgcgcttcttcttaccaacacgaactcgtccaaaccgccaaatccattgcatcacccggccgtggaattcttgcaattgatgaatcaaatgccacatgtgggaaacgattagcatccattggattggacaataccgaggtgaatcgccaggcctataggcagctgctgctcaccacacctggccttggtgaatacatctctggtgcaattctttttgaagaaaccctttaccagtcaacaacagatggaaagcaatttgttgattgcctccgcgatcagaacattgtgcctggcatcaaagttgacaagggtctggtccct

SEQ ID NO: 5528 - DNA, 338 bp, Glycine max
caaataggaaaaagtgggttgttgttggtcatgtttggcattgccgcttgagagctgtctcacatcacctaccgcggagtcgccaagaaaaccaaacctcatttcttttcatctcacctcactattaagtattaaactttcacgacacaacacaaaaagcatagtactatacaacaccactttctgtttctcttcactctaatggccatggcagcgtctgcaaagctcaacaccttgtcttcttcccagtggatcgcccacaattccttctctcctcgccgtggatcctcttctcgccgagtctctcttccgatccgcgcttcttcttaccaacacga

SEQ ID NO: 5529 - DNA, 707 bp, Glycine max
cgaagatcatcctcgtttatctccagttgcttctttagagtctgagaaaaaggttaccaaaagaagctttgacaaattggacgagctgtcacctgaaagagagaggcttgtggatgattgtgctcaaacagaccctatgcctatggacagttccgagtctgatgcagatatccaggagcatttaggaaaggattttagtgcgctagcagatatgtattggcctgattccttgggacctttggatttggatatatcatcatcaactaaataccatagcgaagatctaatttttagtgatagtcttagtggactgaatcgcttgatagccagcagcctggatgcattccagaattgctccttttttgggtttgacaagaaggaagcaccatcaacagttgaggctcgagaatctgccactctttcagattttaaaattggaagtggcatctgagactcgtcatgatcggatcttggtaatggttttccatttctggcacgaacacaattggagtttgttaagatttaacattttttcttatactgactggaggtgtgcatgctaaagaattggattgagccacttccaactcttcctgtatatgtttctctaatctgcgtctctttccttttgtacaaaaaaaaatgatcatggaaggatcagtctcctgtagaaatattccttttttaggtgaacatatatccttttt

SEQ ID NO: 5530 - DNA, 1764 bp, Glycine max
ctctagttcattttcttagtccaccaaaatcttataagtagtgccaaggcaaaccgcagagagttacaacacatatttctttttcttttccctttttcctaggcacagcacacgccctctcaaatagaaactgagagatgaattctgatcagtttcagaagaacagcatgttcgtagaaacccctgaagatggtggcaaaaacttcgacgatgatggacgagtcagaagaacgggtacatggataactgcgagtgcccatatcataacggcagtgatagggtcaggagtgttgtcacttgcatgggcaattgcacaaatgggttgggtggctggccctgccgttctctttgccttctctttcatcacttacttcacttccactcttcttgccgactgttatcgttcacctgatcctgttcatggcaagcgaaactacacctattccgatgttgtcagatccgtcttaggagggaggaaatttcagctgtgtggattagctcagtacataaatcttgtcggtgtaactatcggttacacgataacggcttcaattagtatggtggcggtgaagaggtcgaattgttttcacaaacatggtcatcatgttaagtgctatacgtcaaacaaccctttcatgatcctctttgcctgcattcaaatcgtgcttagccagataccaaatttccataagctctggtggctctccattgttgcagcagttatgtcttttgcttattcttccattggcctcgggctctcagtagctaaagtggcaggtggtggagagcctgtacggacaaccttaacgggggtgcaagttggggtagacgttacaggatccgagaaggtctggaggacgtttcaagctattggtgacattgccttcgcttacgcttattctaacgtgctcattgagatacaggataccctgaaatcgagccctccagaaaacaaggtcatgaaaagagcaagtttgattggcatcttgactacaaccttgttctatgtgctatgtggctgcctaggttatgcagcatttggaaacgacgcaccaggaaatttcctcacagggttcggtttctacgagcccttttggctaatagactttgctaacatctgcatagccgtacacttggttggagcatatcaggtcttctgtcagcccatatttgggttcgtagagaactggggtaaggaaaggtggcccaatagccattttgtaaatggagaacacgctttgaactttccactatgtggaaccttccctgtgaactttttcagggtggtgtggagaacaacatatgtcatcatcactgctttgatagctatgatgtttccattcttcaatgacttcctaggcctgattggttcactgtccttttggccattaaccgtttacttccccatagaaatgtacattaagcagtcaaagatgcaaaggttttccttcacgtggacatggctcaagatactgagctgggcttgcttgatcgtttctattatctcagctgctggttccatccaaggcctcgctcaagatctcaagaaatatcagcccttcaaagcccagcaataattaaatttgttccaaagtgttctaaattgctttcttccctaagtcactttgttttaataagtttcagcatgttcatggataatgtattgttatcaagtgcttatgaaagaaagaatatagcacacagctgcattgtataaaatgtcaagaacaattctaagatttatgaaagtgtgcactatcattt

SEQ ID NO: 5531 - DNA, 362 bp, Glycine max
aatcttagtccaccaaaatcttataagtagggccaagccaaaccaaccacacctacaacgcacctttctttctcttttccctttttcttaggcacaccacacacccactcaaataatagaaactgagatgaatcctgatcagtttcagaagaacagcatgttcgtagaaacccctgaagatggtggcaaaaacttcgacgatgatggacgagtcaaaagaactggtacatggataactgcgagtgcccatatcataacggcagtgataggttctggagtgttgtcacttgcatgggcaattgcacaaatgggttgggtggcaggccctgcggttctctttgccttctctttcatcacatact

SEQ ID NO: 5532 - DNA, 1193 bp, Glycine max
aattaaccacagtggtcatcagcatgcaatagcatatgttgaaggagacaagtattatggagcaaaagccactataaatgtgtgggaacccaagattcagcagactaatgagttcagcttgtctcagctttggatattaggaggctcatttggtcaagatcttaacagcatcgaagctggctggcaggttagcccggatttatacggtgataacaacacacggctattcacctactggacgagtgatgcatatcaagctactggctgctacaatcttctttgctcgggatttattcaggtcaacagtgaaatagcaatgggtgcaaccatttccccagtttctggataccgaaactctcagttcgatatcagtatccttatctggaaggatccaaaagagggacactggtggatgcaatttgggaatgactatgtattggggtattggccttctttcctgttctcatatttggctgacagtgcttccatgattgagtggggaggtgaagttgtaaattctgagcctgatggtcagcacacatcaactcaaatgggaagtggtcatttccctgaagagggttttggcaaagcaagctacttcagaaacattcaagtggttgatagctccaataatctcaaggctcccaaaggcattggcaccttcactgagcaatcgaactgttatgatgtccaaacaggcagtaatggggattggggccattacttttactatggaggccccggtaaaaatcctaattgtcaatgagtaatgatgagaggaaagtaaaaaagaaaaaagaaaaaaattgcagcctctcttgtatcattgaatgcaagtgttaaagcccttcctttcttctcttccatcttgtatacccttttttctgtagtggaaagttttgactctttttttttttttttttccttctaatattgaaagattctccatgtaagctaggggagaagtgtggccaagtttctcaaaagcctaaagaaacaggcctgcctttataacatcatctttgtattttatttctttgtccactcctcctccctctataggagtgtttgtcaatggcaatggtgcttactcccagaatgagtcgcttaatgtagttccataattttaaatgattatatggtacctatgggccatgctttgaatgaaaaaaaaaaaaaaaaaaaaagggggg

SEQ ID NO: 5533 - DNA, 374 bp, Glycine max
aatcctgtcgcaattaaaagttaaggtgtacgcgcatatatgtatgtgaaattcgttgattctcttctgccttacttacggctgtctgtgctcatttgaggaagcctacgagcgaggttcgataattaatcatgtgtgacactatgtctatgtcgtccgcacctattacagatcatcgacctgttaaaggtcttgagatggaatatgtagacgatgataagataaaaaagcttggctctttaaagaaggtagcaatcagtgcatcttcaaagttcaggcattccttgcaaatgaaggggagaaggcataccatggttgtgtctgttgctattgacgataacgttgatgcccaagagttgcaagtagttgatgct

SEQ ID NO: 5534 - DNA, 513 bp, Glycine max
gtgcctccgtctttttcatccctaaccccactccacacccttcgacgcgattcctattctgatcgttagtggggcaagggctgtgggtgaggatgaatttgcaacaagttggacagcctaaatcatctaatggatatggttgttggaaatctgaaaaagaaggggcaactaagtctgataataagatcccgtctggaaagtcaaatgccagcagcagattagcaagtgtagtgactggcaataaaggtggtagttatgggagtccttcacatgatcgattagtatatttaaaaacatgccttattgggcagcatgtggaagtccaggtgaaaaatggatctatatactctggaatatttcatgcaacaaattctggcaaagattttggaatcattttgaaaatggctcacttaacaaaggatgctgctttgcaaggaaaagaatctggtgtagaatttgtcagtaaagctccttttaagactttaattatacctgccaacgaccttgtacaag

SEQ ID NO: 5535 - DNA, 368 bp, Glycine max
ctcgagccgaatcggctcgagcgaagaagaagaagcactgtgattctgattctctctccgtcgttgcaactggtgcctccgtcgttttcatccctaaccccacaccttcgacgccctattatgatatgatcgcagattagtgggcaagggctgtgggtgaggatgaatttgcaacaaattgggcagcctaaatcatctaatggatatggtcatcagaaatctgaaaaagaaggggcaactaagtctgataataagctcccatctgtaaagtcaaattctagcagcagattagcaggagtagtgactggcaataaaggtggtggttatagggagtccttcacatgatcgattagtatatttaacaacat

SEQ ID NO: 5536 - DNA, 510 bp, Glycine max
tctatcttggagtgtgaaagtaacgcaactaacaccacacctatatattaatttaccgtgaactcgtttgaaagatttaacccaaagtgggtgcgtgcgaagttgcgttaatgctactactctccttcagcttcttaatcactctcacccaaccctttcttcttcttcttcttcccagagtcaacaatgtcagatcccaaccagatttcgttcgctcaagccttcttttgcagcgctttcgccgcctgtttcgccgagttttgtaccattcctctggacaccgctaaggtcaggcttcaactccaaaagaaggtaggggttgatgagggagtgggtttacctaaatacaagggcttgctgggcacagttaagaccattgctagagaagagggtatatcagccctgtggaaaggcattgttcctggtttacaccgccaatgtttatatgggggcttaagaattgggttacatgatcctgtgagtataaatatctgactttcattgaataag

SEQ ID NO: 5537 - DNA, 880 bp, Glycine max
  unsure (1)..(880): unsure at all n locations
aaaaccctctctcatttccaatcccctaaaccctaacctctcctcaatgggtagaaacgaagccgccatttccttcctcaccaacgtcgcccgcactgccttcggcctgggcgcggcggccaccgccgtctcctcttccctctacaccgtcgacggcggccagcgcgccgtcctcttcgaccgcttccgcggcatcctggactccaccgtcggcgaagggacccacttcctcatcccctgggtccagaaaccctacatcttcgacatccgcactcgtccccacaccttctcctccgtctccggtaccaaggacctccagatggttaacctaaccctccgcgtcctctcccgccccgacaccgagaagctccccaccatcgtccagaacctcggcctcgaatacgatgaaaaggtcctcccttccatcggcaacgaggtcctcaaggccgtcgtcgcgcagttcaacgccgatcagctgctcacggagcggtcacaggtctccgccctcgtccgtgacagcctcattcgtcgcgccagagacttcaacatcgttctcgatgacgtcgcgatcactcacctctcctacggcggggaattctcccgcgccgtggagcagaagcaggtggcgcagcaggaggccgagaggtccaagtttgttgtgatgaaggccgagcaggagcggagggccgccattattagggccgagggtgagagtgatgcggccaagctgatctcggacgccacggcctccgccgggatggggctcatcgagctccggaggatcgaggcgtncagggagggtgcggctacgctcgccaagtcgcctaatgtttcgtactcgcccggtggacagaacttgctcatggctctcggtccttcc

SEQ ID NO: 5538 - DNA, 443 bp, Glycine max
  unsure (1)..(443): unsure at all n locations
ccggggcggccgacgcgtccggtttttaattaataatgtaaaagaaaagccatagtctccctctcttaagcccggaacgctcatctccaatctgcaaatccaactaacatgggaagccagcaagccgccgtgtcgttcctgacgaacctggcccgcgccgctttcgggctgggcgcctccgcgaccctattgagctcctccctctacaccgtcgatggcgggcagcgcgccgtcctcttcgaccgtttccggggcatcctcgacgagaccgtcggcgaggggacccacttcctcatcccgtgggtccagaaaccctacatcttcgacatccgcacccgcccccacaccttctcctccgtctccggaacaaaagacctccagatggttaacctaaccctncgcgtcctctcccgccccgacaccgacaagctctccctcatcgt

SEQ ID NO: 5539 - DNA, 851 bp, Glycine max
aaaaagcgcgtaaaagtaaaagagggaaagcaagaggtgcgggaagaagggagaaaggaaaggaaaggaaaagaagaaaacaagaagggtttggtagtttgtttgattatctacgggttgttatcatttccatccatttaattccccacaaccacgctcacctaagtttcaatttcaatcccttttctttttccgttacaaaataattcaaaattccctccctcatttacccttgtttgtgtaaagtagtagcagagtgagactaggtatcatcgatggcagggtacaagggcgatgacgaatacgattacctcttcaagctggttctcatcggcgattccggtgtcggcaagtccaacctgctttcgcgcttcacgaggaacgagttcaatttggagtccaagtccaccataggggttgagttcgccaccaagagcttggacatcgatgctaaggtcatcaaggctcagatttgggacaccgctggccaggaaaggtaccgtgccattactagtgcttactaccgaggagctgttggtgccttacttgtctatgatgtcacacgccgtgctacatttgagaatgctgcaagatggttgaaagagttgagagatcacacagaccccaacattgtggtcatgcttattggagataagtcgagatcttcgacaccttgtctgctgtccacaacagaagatggaaaatcttctgccgagaaggaatctctctacttcatggaaacttctgcattagacgcatccaatgttgaaaatgcatttacagaggtgctctctcagatataccgaatagtgagcatgagaactgttcaagacctcaagaatgccaaactt

SEQ ID NO: 5540 - DNA, 618 bp, Glycine max
ctcgagccgaatcggctcgagcgaaggaaagagcgcttaaaagtaaaacagagggaagcaactggtgcaggaacagaaggagaaaggaaaggaagagaagagaagagaaggagaaggagaagggtttggtagttggttacttagtttgtttgattaacgacggcgcactacacgatccccacaatccagaggcttgttattatctccatccatttaatttaattcccacaaccacgctcacctaagtttcaatttcaatcccttttctttttcttttttatttaaaattccaatttcgcgaaccccaaattccctccctccttttccctttctctctgttctgtaacgtagcatttacagcgatcagtttatagtgagtcacttagaggagttttaggtatcatcgatcatctatggcagggtacaagggcgatgacgagtacgattacctcttcaagctggttctgatcggcgattctggtgtggggaagtccaacctgctttcgcgcttcaccaggaacgagttcaatttggagtccaagtccaccataggggttgagttcgccaccaagagcttgaacatcgatgctaaggtcatcaaggctcagatttgggaca

SEQ ID NO: 5541 - DNA, 885 bp, Glycine max
  unsure (1)..(885): unsure at all n locations
aagaccggggctatcaaccactcagccatctctccaaaagctaatttacattttatctttattccactgaatagaacatgagcatataaatggataccctttatattatctatctttatattatctataaagggtaaagatatccgatgtgaatctatttgtttagttttctatcggtatgtatataggtgaataatccaacatgcctttttgtgaagtaaaaaaactaccctcgatccatgcctcaaaagggttgataataagtaaaaaaaatcaatgaattcatgataaaacccttctgcgtttttttattataaatttttttgtcaataaagggatcaaggggttgggggatcaaatggtaaagttcttttgttggtaaattggaggattagaaacatgactattgctttccaattagctgtttttgcattaattgctatttcatttattttattgattagtgtacctgttgtatttgcttctcctgaaggttggtcgaataacaaaaatgttgtattttccggtacatcattatggattggattagtgtttctcgtgggtattcttaattctctcatttcttgaagctctatttattctagatcaaaaacgaaatgacccctcccccagaattctttcggattgtcgggcacattaaaaaaggaatggataagttcctaaaaataaagaaaactataacacattataaggaggggtcaaatattaattaagataaaagatatagaatatctatctgtatatatatatatatagatataatttattaataattagaactttcttttttcttaaaaaaaaaaaaagtaaataaaaagatttgatagaatcgtaatttcaattcgattatatagatacatagna

SEQ ID NO: 5542 - DNA, 891 bp, Glycine max
ccctgcaggtggaatctcaatggccacgcttagcttcggcatcgccacgacatgtctgagtgctgccgctgattatcgtagaagaagcaactggaaatggagcagacccagaattgtgtgtgttggatgggacccggaaggcgtgcttggtccaccccaaactgggcacctcgccaggttcgagtttaagaggcgcctcgagagagacgcagatgcccgcgaagccttccaacgtcaagtccgtgaagagaaagaacgccgtcaatcccttcgacaatctcgtcctcttcccgatactccgcaagacctcattgaatacttccttgacactgaagctcaggagattgagtttgagattgcaagaatgagaccaagattgaatgaggaattctttgcgcaactcaaattcgagttaggacagcttcgattcgctgttaacaaaacacagctcatggaggacagacagattgagctggaggctctagagaaagccatactagaaggattagaagcctatgataagatgcaaggtgaactcgtaaaagccagggcaagcctaaccaaaatcttgacatcaaaggatgccaaagcaactttgctggagatggttgaaaagaatgaaattaatagatctttattggcacttctagatgaaaacatagcaagtgcacaaaagggcaaccagaaacaggctgcagaatatatggagaagctccgcggggctgttcttcggtacattacagtttagtgcatatagtacgtttcttcccactttactattaagttttgtgaaaattgtgctgttgatcagaaagacaatactaaagaactgggatgttgtggtagcagatttctccactgtaatatcagaagtatcaaattgtacatttt

SEQ ID NO: 5543 - DNA, 1254 bp, Glycine max
ggaatgatttttaaaactttgatctgtaccaaaatccctatactaataaagcaaaaggcaggttcatacatgtatttgttagtttgttgacttctttcaacctaacccatcgttcgcacggagccgtggtggttctggctctgtccttttttcctttctctcgttaccagaaccagaagaaccatttgtggccaacatggatttggaccagtggatctccaaggtcaaagatggccagcatcttcttgaagacgagcttcaacttctctgcgaatatgtaaaagagatccttattgaggagtccaatgtgcagcctgtcaatagtccagtgactgtttgtggtgatattcatggtcaattccatgatctaatgaaacttttccagactgggggtcatgtgcctgagacaaattatatttttatgggagactttgttgatcgaggttacaatagtcttgaagttttcaccatccttttacttctaaaagctagatacccagctaatattactcttttacgtggaaatcatgaaagtagacaattaacccaggtctatggattttatgatgaatgccagaggaagtatgggaatgctaatgcttggcgatattgtacagatgtttttgactatcttactctttctgcaattatagatggaactgtgctttgtgttcatggtggcctttctccagacattcgatcaatagatcagataagggtcattgagaggaactgtgaaattcctcatgagggaccattttgtgatctgatgtggagtgatcctgaagatatcgaaacatgggcagtcagtcctcgtggagctggttggctttttggatcccgggtcacttctgagttcaataacataaacaatcttgatctggtttgtcgggcacaccaactcgttcaagaaggtcttaagtatatgttccaggataaaggccttgtaactgtatggtccgcacctaattactgttaccgttgtggaaatgtagcttctattcttagtttcaatgaaaatatggaaagagaagttaaatttttcactgaaacagaggagaacaaccagatgagaggccccaggacaggcgtcccatatttcttataaattgatgtttttcttgaatttattgtaaaattatatagtaaatggcttactattatgattggacgttgatagtcttgtatcgtggagattcaaatgcatagcttttctataaaaaaaaaaaaaaaatgttagtatgcctttaaata

SEQ ID NO: 5544 - DNA, 436 bp, Glycine max
gtcgtcccacgcgtccgcggacgcgtgggaagggagagcagtgtttaagttgtgtttggcagcgccgaggggcaagctagggagtaagagatggatttggaccaatggatctccaaggtgaaggatggccaccaccttctcgaagaggagcttcaacttctttgcgaatatgttaaagagatccttattgaggagtcaaatgtgcagcctgtcaacagtccagtgacggtttgtggtgatattcatggccagtttcatgatctaatgaaacttttccagactgggggtcatgtgccggagacaaattacatttttatgggagactttgttgatcggggttacaatagtcttgaagtattcaccatccttttacttctaaaagctagatacccagctaatattacccttctacgtggaaaccatgaaagcagacaac

SEQ ID NO: 5545 - DNA, 414 bp, Glycine max
gcgcccacgcgtccgcccacgcgtccgagaaaataataagatcctaaaaatttgtttattggtgggagcagtgtttaagttgtgtttggcagcgcggaggggcaagctagggagtaagagatggatttggaccagtggatctccaaggtgaaggatggccagcaccttctcgaagaggagcttcaacttctttgcgaatatgttaaagagatccttattgaggagtcaaatgtgcagcctgtcaacagtccagtgacggtttgtggtgatattcatggtcagtttcatgatctaatgaaacttttccagactgggggtcatgtgccggagacaaattacatttttatgggagactttgttgatcggggttacaatagtcttgaagtattcaccatccttttacttctaaaagct

SEQ ID NO: 5546 - DNA, 248 bp, Glycine max
gtttgttgactcctttgaacctaacgtaacctgatccgtggctctggttctggctctggctctgccctttttggttttctctcgttaccgaaaccagaagaaccatttgtggtggacatggatctggaccagtggatctccaaggtcaaagatggccagcatcttcttgaagacgagcttcaacttctctgcgaatttgtaaaagagatccttattgaggagtccaatgtgcagcctgtcaatagtcc

SEQ ID NO: 5547 - DNA, 1026 bp, Glycine max
tcgtccacgcgtccgacagcacaacttgtttatcggaacgttgctataaacgttgttgttttcagataaacacgtgactcactatctatctatcaatcgatatctccgagttcagccgaaccaaactccgaagctatggcagagctccaaaccaaggttgaacctgttacggtcccggctccggtggatcccgagccaccgctagctgaggctccgccgctcgagaagaaagcggtggcggtgccaccacctgttccggctgcggcagaggaaaccaaagctcttgttattgtggagaaggagaaggagaatgagaagataccagaacctgtaaaaaagaacgcctcaggtggatcccttgatagagacattgctcttgcagaaatagagaaagagaaacgattgtctaatgtgaaggcttgggaagaaagtgaaaaatccaaagcagagaataaagcccaaaagcagctctctgctgttgctgcttgggaaaacagcaagaaagcagctcttgaagctcagctgagaaaaattgaggaacaactagagaaaaagaaagcagaatatggtgaaaaaatgaaaaacaaaatagccttagttcacaagcaagcagaggagaagagagcaatggttgaagccaagcgtggtgaagaaattctcaaggcagaggaaatagctgcaaaacaccgtgcaactggaacctctccaaagaaggcctttggatgcttttaaatttttattcctttttttgttgttgtgcttttgtgcctgatgtcatagcaataatgaaatttttgtctataatattgtcatgtgtgttttttaaatgttgtttatgtgtgtacgaaatggaaagggggacacggtgaagtttgtgacatacagaacagcctctagatctttttgttaagatgaagtgttctatgctgcctattcatttgtttttgccataacagaatcattctattcaccaagcaatagattttctctctcttcataaaaaaaaaataaaaaaaactcgactgg

SEQ ID NO: 5548 - DNA, 1666 bp, Glycine max
ccactggctagattcacttgtgtttatttttttcttcctttttctctttttataatatcagcccccaaactcccttgtgtacagtgatcgatctcaagaagaaagactcaaaaaatggaggggaatctagagaagaagttgctgagcaaagaggaagtgtcagaagaagataatttatcattggtgaagagggtgtgggaagagagcaaagagatgtggatagtggcagcaccagccatattcacaaggtttacgacctttggcatcaatgttataagccaagcttttattggtcatattggttcaagagaactcgctgcctatgctcttgtgttcactgtcatcatacgcttcgccaatggtattctgttaggaatggcaagtgcgttgtcaacactttgtggacaagcatacggtgcaaaagaatatgacatgatgggagtgtatcttcaaagatcatggatagttttgttcttaactgcactctgtcttcttccggtgttcatcttcacgagcccgattttgatgctcttaggccaagatgagaatatagcagaagtggcaggaaatatttctctttggtcaattcctatgatatttgcttttattgcctctttcacttgccagaatttcctgcaatctcaaagcaaaaataccatcatttctttcttggcagcattctcaatagttattcatttgttcctctcttggctattgacaattcaattcaagctcgagattcctggtgcaatgacttcaacaaatttggcattttggattcctaatattggtcaactaatatttataacatgtggttggtgctccgatacatggaaaggtttctcatttttggcattcaaagatctttggcctgttgtcaagctgtccctttcatctggtgccatgttatgtcttgagctctggtacaacacaatattggttcttttgacgggtaacatgaaaaacgcggaggttgaaattgatgctctatccatatgtctcaacatcaatggatgggaaatgatgatatcccttggtttcatggctgcagcaagtgttcgagtagcaaatgaacttggaagaggaagtgccaaagctgcaaagttctctattattgtgtcagtgctcacatcattggccatcggattccttctgtttatattcttcttattttttagagaaagacttgcatatatatttacctcaaataaagaggtggcctttgctgttggggatttgtcacctttgttgtcggtctctatattactgaacagtgttcaacctgtactctcaggagtggctataggagcagggtggcaaagcattgtagcatatgtgaatatggggtgttattatgccataggtattcctgtaggtattgtacttggtaacgttctggatttgcaagtcaagggaatctggattggaatgttgtttggaacgttgattcaaactatagtgctaattgtaatcacctacaaaactaattgggacgagcaggttaccattgctcagaatcgtattaacaggtggtcgaaagtggacagtcctgatcatgaaaatgaagtagaaagaataaacgttagctaattagtttcagtgtcatcatctatgtactgtgttgtgatacagcaaaaaagtagatagcaattgtacgtcatttttt

SEQ ID NO: 5549 - DNA, 585 bp, Glycine max
  unsure (1)..(585): unsure at all n locations
cccaattgtttatgcatgataaagccanaattaatttgtcaattggggagtctgagagtcatgaaattgtatgatttcaacaggggtggctgttggagcagggtggcagagcactgtagcgtatgtgaacatagggtgttattacctcataggtattccagttggaatagtacttggtaacattattcacttggaagtcaagggtatttggattggaatgttgtttgggacactagttccaactatagtcctagctataatcacctacaaaactaattgggatgagcaggtaactatagcccgtaatcgtattagtaagtggtataaggtgcaacttgttcctgaaacaagtacatcagataattagtttcagactcctatttatcaatatcatcattgtttgtttgattggctattgtacgttatacattcaggggattgcttgatagttattatactatagtaccatcctatcagtatattctctctcaaatatttcttaaattaataaaattatataagtagttgctaaagtattaaatgttcctgtatttaccccttgaatttatatattttaatagcaat

SEQ ID NO: 5550 - DNA, 783 bp, Glycine max
gcctgtataacactagcaacagaaaatatattgccataaataaatccgtggctagattcattaattttgaatttaaaaaactaaatcaaagaaggaacatgaaactaatcatctgatgtaattgtttcatgatcagattccaccttggaccacttattaatacgattacgagctttagttacctgttcgtcccaatcagttttgtaagtgattacagtcagcactacggtttgaataaatgttccaaacaacattccaatccaaatacccttgacttgcaaattcaaaacgttaccaagcacaactcctacaggaatacctatgatgtaataacaccctatgttcacatatgctacaatactttgccaccctgctccaatagcaacccctgagagtacaggttgaacactgtttagtagaatagagattgccaacaaaggtgacaagtccccaacggcatcggccacgtctttatttgaggtaaatatgtaagcaagttttccccttaaaaataagaaaaataagaagagaacaaatccaatggccaaggatgtaagcactgtcacaactatagagaactttgcagctttggagcttccttttccaagctcgtttgccactcgaacacttgcagcagccatgaaaccaagtgatatcatcatttcccatccattgatgttgaggcatatagatagagcatcaatttggacctcagcattttccatgttgcccattcaaagatctttggcctgttgtcaagctttccctttcatctggtatcat

SEQ ID NO: 5551 - DNA, 506 bp, Glycine max
cagaacaacaacttgaacttgaatatatataatggttcaactctttgtttattttaaacaaacgccattctctctttctctctttgaccaatcccaaacccaaaacaaaaaataaaaatggagggggatctgaagcagaagctgttgagaagaagaaaggaagaggaagaagaagaagaagaagagttatcattggccaagagggtgtggaatgagagcaaggttatgtggatagtggcggcaccagccatattcacaaggttttccacctttggaatcagtgttataagccaagcttttgttggccatattggttctaaggaattggccgcttatgctctcgttttcaccgttctcattaggttcgccaatggtgttctgttaggaatggcgagtgcgttgtcaacactttgtggacaagcatatggggcaaaagaatatggcatgatgggagtgtatcttcaaagatcatggatagttttgttcttaactgcaagctggcttct

SEQ ID NO: 5552 - DNA, 804 bp, Glycine max
ctctcatgcaagagcaacgataagatatatactcattcttttttttattttctgttttaatatcagccccaaactcccttgtgaactgttaagtctctgatcgatcttaagagtccccaacaacgacataagacacaaaaaatggaggggaatctagagaagaagctgttgagcagagaaaaaaaatcagaagaagaagaagaagaagagaaattatcattggtgaagagggtgtgggaagagagcaaggtgatgtggatagtggcagcaccagccatattcacaaggttcaccacctttggcatcagtgttataagccaagcatttattggtcatattggttcaagggaactcgctgcttatgctcttgtgttcactgtcatcatacgctttgccaatggtattctgtattaacatcaatggatgggaaatgatgatagcatttggtttcatggctgcagcaagtgttagagtggcaaatgaacttggaagacgaagctcacaagctgcaaagttttctatagttgtatcagtgcttacatcatttgtaattgcgtgccgcttatttgttcttttcttatttttaagagaaaaaaccgcttatccttttacttccaacgccgatgtggttactgctgtgggggatttgtcacctttgttagcgctttctttgttactaaatagtattcaacctgtactctcaggggtggctgttggagcagggtggcagagcactgtagcgtatgtgaacatagggtgttattacctcataggtattccagttggaatagtacttggtaacat

SEQ ID NO: 5553 - DNA, 302 bp, Glycine max
gatcacttgcttagtttgttcttccttctactagcaaagcaaaaaaaaataaaaaaaatagagaaatgcaggggggtgtgaaggagaagttgttgatcaaagagaaaaaaacatcagaacaagaagaagaggaattatcattggtgaagagggtgtggaatgagagcaaggtgatgtgggtagtggcagcaccaggcatttttacaaggttctccacctttggtatcaatgttataagccaagcatttattggtcatattggttcaagggaacttgctgcttatgctctagagttcactgtt

SEQ ID NO: 5554 - DNA, 919 bp, Glycine max
ccaaaaacgactcgtcgtacaatccatctcccagcagcatctgggagaaagaaagaaagaaagaaagaaagaaagcactctttctcgctcgcggcgagtgtgaacaccaaacggcggcgttcgcagcaaacagagtctcgaaaccctagttccctattcctcccatgtcctccgaagacatcactctcgtacccgaccagaggatcgagaacggtctcaattcccctctcgtcttccaagacgaccctctccgcttcaattgccccaccccgcaccagcgtcgggtcggggacccgcctccgaagacccgcgaacttggcgccttcatcgacgacaacaagatgttcatcgaccgcgaccgcttcttcgccgccgcccagaaccccgaattccgccgctacgccgactgctccgcccgccgcgacccgccccacgcccgcaattggagcgccacagacgatgacgaagagtctgacgacgacgacgaagatgacgacgacgatgaagcggatgacaccgaagtaggaggactcgttggtgatggaaccaaaagcgaacttaacaacaacaacaacaacaacggtggcgctaatttacctgctgttgcaaacgggaaagcccactcttacgtttctggaagagagctattggtgaaggatggtggtgatattgggcaattggtgcatagcaatgtgagtggtggtgatgaagatcatcggcaagaggggttaggtaagtctcagaattcatttaccgttgctgaaactgactgtgaggagtactattcgcactatcttcacggcggcgaaggggcttctgggcagaaagcgatggcggatgatagtggttgtgggtttagtgggaggaaagatgctatgtattcgagcgagtcaggggaagtactcatggcaattctttc

SEQ ID NO: 5555 - DNA, 611 bp, Glycine max
cggttcgagcttgggtaatctgatcgtgctgcatacatcacacaaggaaaggggatcattacttttcaacatttacaaacagataacaaagctacgatgattccacattcctgattccactcacaattcacagttcatagttcatagtccatattcatacaccgtttctttgttctcgctgcctagcatggcatcaacttctctcttcaacttcagactccctctgttcaacttcaacccactgcaccatcgacggataaagaggccaaaatctctgctctcctctcctcgcaacagtccacgcctcgtttcttccattaacgaccatttggcgctcacacgtgtcacatatccgcttctccaatctcactctgctccgaagcgcagattccacgttggtgtacagaaagagtattctgatggggaaagctctgagtcgattgtttctgacgctacataccaagaggaattttcctggtcttctgtagttcttccgtttctattccccgcattgggtggctcgttatttggctatgatattggtgccacctctggcgctacaatctcactgcagtcacctgagcttagcggtatatcatggttcaatcttt

SEQ ID NO: 5556 - DNA, 520 bp, Glycine max
gtcagttattcattctcagagtcacacacacgcacatatattttcttcatcttcgtacaccactgtctcatcatctccttttccttgttctggtggcgctcttgattttcagatgacaacagcaattgggtgaaacgtgaacgccaccaccgatcggggtttgccaaaaccttacaatggaggtcgaaaggatgagacagttgatgctgatgtggtgtagaatacgaagcaaccgtgtcgctcttgtgggtggaaaccataccgctgccaggttttgcagtcgctgaaattctctccttcctatatcgctggctttgtttgttttttctcttccaactttactcaataggatctcatctcgctcggttaatttaatcatcgatggggagcacgatgaagaataagcatttgcacgatggaagaacaattgctgctctcaaccccgaaagtttcctcgttatcaggattcccgatgcgcttgttttgcgcattctgtctcgctcatttgttcgtggccatg

SEQ ID NO: 5557 - DNA, 967 bp, Glycine max
cggttcggaataccttccggagccacgcgtcctacgagggtagggctcagctcagccatattctatctccacgccgctaactctctctcacactcagtctctgtgtctctctctctttcacaaccttcactttactctctctctctgacagctaaaatgcaaggaggatttcaatcatttttgtcacatgggaatgtcattagaaatgctgttctacaacgggtgcgcatggtgaaccccctgttacagccaattgcctcttcgcggtttgaatctgttacacctgctcgcattgaggagcatggttttgagagcaccacaatttcagacatcttgaatgataaaggcaagggtgctgatggctcctggctttggtgcaccacagatgatactgtttacgatgctgttaaatcaatgacccaaaacaatgttggagctttggttgttgtgaaatctgacgcgaataaggcaattgcaggaattattactgaaagagattacttaagaaagatcatcgtgcagggaagatcatccaagtctactaaggttggagatattatgactgaagagaacaaacttatcacagtcacccctgataccaaagttctgcaggctatgcaactgatgactgacaatagaatcagacacatccctgtgattgatgaaaaggggatggttggcatggtgtccattggagatgtggttcgtgctgtggtgcgtgagcaccgacaagaggtcgagcgcttgaatgctttcatacaaggtggttattagataatgatgatgaaaaattctcaagggcactcaagctaatttgaattatgtaataagcttgagtgcttgtaaatatgttatggccacagagccttcttgtttgctttcctgtaatttcagttttatgggcattaacccggtggagtagcagcatgttaataataacaactggatgcagtttgaatttgttttg

SEQ ID NO: 5558 - DNA, 516 bp, Glycine max
gtgcagggaagatcatccaagtctaccaaggttggagatattatgactgaagagaacaaacttatcacagtcacccctgataccaaagttctacaggctatgcaactgatgactggtatgtgagcttttacactattaacaataaaaaatcattcttggtatgacttctgagatagttactatcataaaaattaacaaacttatcatacgccacggtttgtaattggatggcagtataaaaaaacattacattgtcagtgcatgtatcattcattttaaaagatatcatataacttgacaatgatcattattatgatatgaaacagagaggttacatacgcgcgtgactcaatatttcttctcttattctgatttttttttacagataaaagaatcagacacatccctgtcatagatgaaaagggaatggttggcatggcgtccattggagatgtggttcgtgctgtggtgcgcgagcaccgacaagaggtggagcgcttgaatgctgtcatacaa

SEQ ID NO: 5559 - DNA, 377 bp, Glycine max
ctctctctgggtcgtgttgtggttaactgtgttgattgatttggtttctgggggaccagtttggtttttggttttggtaagcttttatatatatatatacatccaatccatgatggcccgggggtgatctaaagaagcaaatctgaatagagaggagagagcagagacagctaaaatgcaaggaggaatgagatcatttttgtcacatgggaatgtcatcagaaatgctgttctacaacgcgtgcgcatggtgaaccccctgctacagacaattgcctcttcgcggtttgaatctgttacgcctgctcgcattgaggagcatggttttgagagcaccacaatttcagacatcttgaatgataaaggcaagggtgctg

SEQ ID NO: 5560 - DNA, 1039 bp, Glycine max
  unsure (1)..(1039): unsure at all n locations
nccacgcgttcgaccacgcgtccggcgccataagtaagagcaagtcgaaaagttcatctctccctctctctcacacatcccagccatgagcctcttcggtataggcagaaaccagagaacattccgcccgaaaaaaagtactccttctggaagtaagggagctcaacttcgaaaacatattgatgccacgttaggtagtggaaatctgagggaagcagtaaagctacctcctggggaggatttaaatgagtggctagctgtcaacactgttgatttcttcaatcaggtgaatctgctttatggtacccttacagagttctgtactcctgagaattgtcggacgatgtctgcaggacccaagtatgaatatagatgggcagatggtgtacaaattaagaaacctattgaggtttctgctccaaaatatgtagaatatctaatggactggattgaagcacagcttgatgatgaatccatattcccacagaagcttggttcaccatttcctcccaactttaaggaagttgtgaagacaatattcaagcggttgttccgtgtatatgctcacatataccattctcactttcagaaaattgtgagcctcaaagaagaggcccacttaaacacttgcttcaagcattttatactcttcacctgtgagttcgggctgattgacaaaaaggagctggcaccccttcaagagcttatagaaaccattatcccatattaaatgaattgggacctaccctctgaaaaatcttgtcctaggaagcacaactaatgtattactctaaatagaaactgctttttagtattttacttcagaaagccgcgttgtatttattgtgttggatgtgcttgggaacaggatctaagttatccttctaaataacttacacaaagcatcatatatatgcaatggggcatcatgggttaaaaaaaagttaattgtaatggttcatatatgccaaatgaagactgtacgctggaaggttgttgctggaacaatgttcaatgttaataacatgtgtactatgca

SEQ ID NO: 5561 - DNA, 372 bp, Glycine max
cacacatcccagccatgagcctcttcggtataggcagatactgctgtgatcaatactcatatttggcctgcacatttttatttaaacatttgctgattattgggcaactagttcaagctgatgtttgtataatctggacattcaagtttattagactccctcctcttgctaaatagtcacaaatgtgtcgaaaatctctaattacgcttccaaagataaatgcttgttctgaagaagttacttatcagcaggaataaaattattattatgaaaccagagaacattccgcccgaaaaaaagtactccttctggaagtaagggagctcaacttagaaaacatattgatgccacgttgggtagtggaaatctgag

SEQ ID NO: 5562 - DNA, 1833 bp, Glycine max
ccctctcttctccaaagagaaagaacagcaagcaatcgttacccattacctatttcactttccacaccactctcatcctatatctctttcttccttattcctctgtcaagccactcgataatatgcagagtctttcaccacctacttccaacgcgctcaatttgaagcatgtttttcgcccgcgacttggcgcgtcaagccgaatctctgtcaaatgcgcttttgggtttgagccggtgagctacggagtcggctccagccgagccgattggcagagctcctgcgccatcttagccagcaaggtcgtttctcaggaacaaccctccgctgaccagaacagcggcaccaccgaccacatcgccgccgtcaacggtcacaaagccgccgtcagcgacttccaactcgttccaattggaaacctagcagaggccaacaacaagccgctcccgccgaagccgctcacgatctccgacctctcgccggccccgatgcacggctccaagctccgcgtcgcgtaccaaggcgttcccggcgcgtactctgaagccgctgccggcaaggcctatccgaactgcgaggccattccgtgcgaccagttcgaggtggcgttccaggcggtggagctctggatcgccgatcgggcggttttaccggttgaaaactcactcggcggttcgatccaccggaactacgatctcctcctccgccaccgccttcacatagttggcgaggtccagctcccggtccatcactgcctcctcgctctccccggcgtccgaaaggagttcctcacgcgagtgatttcgcatccgcaggcactcgcgcagtgcgagcacactctcaccaaactcggcctgaacgtggcgcgcgaggccgtggacgacaccgccggcgctgccgagttcgtcgccagcaacaatctccgcgacaccgccgccatcgcgagcgcacgcgcggcggagctctacggcctgaacgtgatggcggacggaatccaagacgatccgagcaacgtcacgcggttcgtgatgctggcgagagagcctatcattccgcgcacggaccgtcctttcaagacgagcattgttttcgcacacgacaagggaacttcggtgcttttcaaagtgctttccgcgttcgcgttccgtaacatcagtctaacgaagatcgagtcacggccgcatcggaaccgtccgattaggctggtggatgacgcgaacgtgggaacagcgaagcacttcgagtacttgttctacgttgattttgaggcctccatggctgaggttagggcacagaacgcgttggcggaggtgcaggaattcacgtctttcttgcgagtgttggggagttaccctatggacatgacaccctggacaccttcctcccggggagattagcatccccttattttgtctttttcatctctccctcccaaaagagaggaaaacaaaaacatatattaaatgtctcatatggattctgaattttgtgaataaaagaaaacataaactcattattttaattatcttaatcttaccccatgtattttcattggtgttcttgtattatctctttctcgtttgtcatattttggggctttagggttatgcaatgaattagaattaagagacgaagagaatacgtacgttgatttttgtacgtagagggatggagaataattagatacgtggtagtgtgataagctagaaagggtagttggtttaatttaaatgcctttgtaataattgtgtgtacactgaattggccactttggttggtgaatacttgttgtgtttctgttaggaaaaaagtatacatgggagagattcatcc

SEQ ID NO: 5563 - DNA, 451 bp, Glycine max
cggtttcgtgggcggacgcgtgggcttctccaaagagaaagaacaccaagcaaagcatagtaacctaattcactttacacctaccaccctccttctaactcaattccatttttcttccttattcctctctcaaaccataatatgcagactctttcgccgcctacttccaacgctctcaatttgaagcacgttcttcgcccgcgtcgagtcgcgcctagccgaatctttgtcaaatgcgccttcgcgtctgagcccgccagctacggggtcggctcgagccgagccgattggcagagctcctgcgccatcttagccagcaagggtcgtttctcaagaacaaacctcctccgctgaccagaacggcggcaccgccgaccatatcgccgccgtcaacggccacaaagccgccgtcagcgacctccaactcgttccaataggaaacctagcagag

SEQ ID NO: 5564 - DNA, 1023 bp, Glycine max
cggctcgagcggctcgagtataccttccttgctatgacatactccgcaattggttggaggaattcacagctaaaaaggcaccaaccacaactacttatgtacctctagtagctggttcattggcacgctctctagcttgcactacttgctaccctattgaacttgctaaaactcgtatgcaggcatttaaagagactcaaattggtaaaaagcctcctggagtgatccagactctgctaggtgttgtttcaaatgtcaagagcacaaacactccacagaacagcttgcaaggttatcgtgttttgtggactggcatgggagctcaacttgcccgtgatgtacccttctctgctatttgttggtcgacacttgaaccgactagaagaaaacttcttggtttgattggaggtgatgatgccaatgcattgagtgttcttggggcaaattttggagctgggtttgttgcaggaactttagcagctggagccacatgtccactagatgttgcaaaaactcgaaggcagatagagagggatcctgttagggcattgaaaatgactacaagacagacactgatggaggtgtggagagatggaggtttgaaaggattgtttacgggtgttggtccacgagttggtcgagcaggcccctccgttggaattgtgatttcattttatgaagttgtaaagtttgttctacatcattagtacacagcatcatcatgattttctgcacactttttttgctgacaaagcagtttttattcagaacctctggagattgcgagcaattttttttggaatgggaatcattccaatccatcctggccataaactaacataattgaataggaaaatgaccggcataggacacacttaggttttatgagctgtttgttattattaatgttttttctttttgctgcttttgacaagcagaaattttgttacacttgggatgctcccctgaactataactgaataaataaaaatatgaataaattgagttctttacctcccaaaa

SEQ ID NO: 5565 - DNA, 621 bp, Glycine max
gcacgcgtccgtaagctcggatttcggctcgaggaaaaatccactttggttgttgggaatttcagttataagactctcaggtggtggtgcatcgctgagttgtgtgagagtgagaaagagagagtgtgtgtgtgtgcagaagatgtggccattcagcagaaaaggggcttctggtttttcatcatcatccacggcagagcaagtcactgaaggaattgatggaactggtctcactgccattgtcacaggagcatccagtggtattggcactgagactacacgtgtcctttcattgcgtggtgtccatgtgattatgggtgtgagaaatatgcttgctgctaaagatgtcaaagaaacaatacttaaggagattccctccgctaaagttgatgccatggagttagatctcagttcattggagtctgtcaagaaatttgcatcagagtttaagtcctctggtcttccattgaacatcttaataaacaatgcaggaattatggcttgccctttcaggctctctaaagacaaaattgaactacagtttgccacaaatcacttaggtcattttctcttgaccaatcttttgttggacactattaaaaaaacttcacgtgaatcaaa

SEQ ID NO: 5566 - DNA, 429 bp, Glycine max
acgcgtacgtaagaccggaaattcgctcgagatttcaggagctcgttggtgcaacgctgaatgcttttttttctttttgtgtgatagattttgcaagttgcgtgtgtgtgagagtgagtgagtgcagaagatgtggccattcagcagaaaagggtcttctgggttttcatcatcatccactgcagagcaagtcactgaaggaattgatggaactggtctcactgccattgtcacaggggcatccagtggtattggaactgagacttcacgtgttcttgctttgcgcggtgtccatgtgattatgggtgtgagaaatatgcttgctgctaaagatgtcaaagaaaaaatacttaaggagatttcctccgctaaagttgatgccatggagttagatctcggttcgatggagtctgtcaagaaatttgcatc

SEQ ID NO: 5567 - DNA, 459 bp, Glycine max
cttttcttctatttttttattcctttttggtgaaatataagttttcctctttagttgttgacttcttgtttatttttctgattaatgagaaaaatccactttggttgttcactcgtatatgtatctcagtctcaggtggtggtgcatcgctgagttgtgtgagagtgagaaagagagagtgtgtgtgtgtgcagaagatgtggccattcagcagaaaaggggcttctggtttttcatcatcatccacggcagagcaagtcactgaaggaattgatggaactggtctcactgccattgtcacaggagcatccagtggtattggcactgagactacacgttgtccttccattgcgtggtgtccatgtgattatcggtgtgagaaatatgcttgctgctaaagatgtcaaagagacattacttaaggagattccctccgctaaagtgatgccatggagttag

SEQ ID NO: 5568 - DNA, 542 bp, Glycine max
aatactctcaattagaaaacatccttgatataatagtataattattaaaaaaggtaacaatctttctcctgtttgtgattggataagcaatatatggaatacatgcaagtactattatttatatccacgttggtcggtaacttgtttttcaatttcaggtggtcgtgtggtgcaacgcagtcctttttctatttgtatgtttgtatgagactgagaaagatagagagatagtgtgtgcagaagatgtggctattcggcagaaaaggggcttctgggttttcatcatcatccactgcagagcaagtcactgaaggaattgatggaactggtttcactgccattgtcacaggggcatccagtggtattggcactgagactacgcgtgttcttgctttgcgtggtgtccatgtgattatgggtgtgagaaatatgcttgctgctaaagatgtcaaagaaacaatactcaaggagattccctccgctaaagttgatgccatggagttagatctcagttcgatgaagtctgtcaagaaatttgcatc

SEQ ID NO: 5569 - DNA, 304 bp, Glycine max
taggggggacatcatatgtgatttgtcccatgttctcaagagcatgctattagctaatgttttgggaatttcagttataagactctcaggtggtggtgcatcgctgagttgtgtgagagtgagaaagagagagtgtgtgtgtgtgcagaagatgtggccattcagcagaaaaggggcttctggtttttcatcatcatccacggcagagcaagtcactgagactacacgtgtcctttcattgcgtggtgtccatgtgattatgggtgtgagaaatatacttgctgctaaagatgtcaaagaaaca

SEQ ID NO: 5570 - DNA, 837 bp, Glycine max
gccacgcgttcgttcaatatctacagtgcagtttttgggaccgaaatttggccaggtgctgaatatggaaggacaatgtacacaattcgccaaagaattggcccgttactcatgaaaatgcagaagagatatggaaaaaacattgggtctggtggcgagttaactgaaaaggaaattatcagagctgagaggaactctgggtttatcagtaacagagtgagagaaattcaaatgctaaatgctttgaggaagagggaacaaaaagagcgcagggaaaaggatttgagggaaggattacaactatataagaatggcaaatatgatgaagcactagagaaatttgagtctattttaggatcaaagccagaacctgaggaagcagcagttgcaagttacaatgttgcttgttgttactctaagctaaaccagattcaagctgcactttcttcactagaagaagctctgaatactggttttgaagacttcaagagaataagaactgatcctgacctggctaacgcaagggcatcagaggaatttgatcctttattgaaaagatttgatgaatctttcatcaatgagaatgccatcaatgccatcaaatctctttttggatttggtaagaaataacccattgtgtggacaaaagcatacagtttggccgactaaggagttggttgagcaatatggtaattatttcccatgtataactttatagtttaactacataggtccctcattttttgtcccttcagcgggatcttgttttatgtactagtataatcaagcaaaattataagaaacttatttatgataataaaattgtgcatttccatc

SEQ ID NO: 5571 - DNA, 1601 bp, Glycine max
cccacgcgtccgcccacgcgtccgctgaaaatgacattgtagctgctgctgtgttgtctgggaaccgtaattttgagggccgtgtgcatcccttgacaagagctaactaccttgcctcaccacctctagtcgttgcttatgctcttgctggcacagttgacattgactttcaaaaggagccaataggaacagggaaggatggaaagaatgtttacttaagggatatctggccatccactcaagaaattgcagaggctgtccaatccagtgtgttgcctgacatgttccgaagtacatatgaagctattaccaaaggtaacactatgtggaaccaactacaagttcctgctgagaccctgtactcatgggaccccaagtcaacatatattcatgaacctccatacttcaagggcatgaccatggatcctcctggagctcatggtgtgaaagatgcctattgtctgctgaattttggtgacagtataacgaccgatcacatttctcctgctggaagcattaacaaggatagtcctgctgcaaaataccttctggagcgaggtgtggaacaaaaggacttcaattcttatggaagtcgtcgtggcaatgatgaggtgatggcaaggggaacttttgccaacattcgccttgttaacaagctcttgaaaggggaagttggtccaaagacagttcacattccaacaggggagaagctttacgtgtttgatgcagcaacgagatacatggcttctgggcaagacaccattgtgctggctggagctgaatatggcagtggaagctctagagattgggctgccaagggtccaatgctactgggagtcaaagctgtgatagccaagagtttcgagagaattcatcgtagtaacttggtaggaatgggtatcattcctctttgcttcaaacccggtgaggatgcggacacattgggattaactggtcatgaacgttattcaattgacctaccaagtaaaatcagtgagattaggcctggccaagatgtgacagtcacaaccgataatggaaaatctttcacctgcacagtacgctttgacactgaggtcgaacttgattacttcaaccatggaggcatacttccatatgtcataaggaacctcattaagcagtgaaggccattgtcgatggaaaattccaaggtcattgtcccagtatgcttttaaagttgtaaaatgtgagaataattttcccagagataggaaaagatccccttttctagagggagattttgacaccagaccagtaaacagtgattcatttgattgtgctataacacagccccttgaaaatggggacaattgtgtaaagccgacttgaagtgtgaaccctgccaattgcgcgcggcacttggtctgctaagttgctaagtatagtgtttaaggtagtaaaaatttctttcttttcaaggcttccgcttggatattcaatgaaaagctgagtatagtagaacaatacgtagagaatagaataagattgagtttgaatgaaaggttaggttagaaatttaagtttgaataatttcattctgtgagcgtttgtaaaagcaactctcattttttctatcaaag

SEQ ID NO: 5572 - DNA, 696 bp, Glycine max
ctcgagccgattcggctcgagtgctattgggtgtcaaagctgtgatagctaaaagttttgagagaattcatcgtagcaatttggtaggaatgggtattgttcctctttgctttaaatctggtgaggatgctgacacattgggattgactggtcacgaacgttatactattgacctcccaagtaacatcagcgagataaggcctggccaagatgtcaccgtaacaaccactaccggaaaatctttcacctgcacagttcgcttcgacactgaggtggaacttgcttactttaaccatgggggcattcttccatatgtcatcaggaacctcattaagcagtgaagtcatggctgatgggaaatgttaaactatgttgccactgcgtgtacacgttttgagtggtggtaataaaatgtgagagaaatgagaataaattcaataaataggaaagatcccttcttaagaaggcaattttttgacatttccaggtgtttatattaggcctgtaaacatggagtgcattgattctagatttctcatgtctgcgttgtgtacccattgaacaatggggacaattgtatttttccatgccgatggcagtgaatattcttttcatttaaatactccccttaattttcttactacggcctatagagttgaacatgaatcaaggcgaatagtagtgaatgttcttttc

SEQ ID NO: 5573 - DNA, 917 bp, Glycine max
agggcgaatagctccacgcttctcgttccttaaattcctcttcccaagctctctctctctctctctctgcgggttttcccttcttgtccattcatatatatcacaatttcaactgcaaattttgaacaacaactcaattaagaaatccttctccggagccatggcagatctcaagtccacattcttgaacgtctattctgttctcaaatctgaactcctccacgaccctgcttttgagttctccgatgatgctcgtaattgggtcgaccggatgctggactacaatgtgccgggaggaaagttgaaccggggactgtcagtaattgatagctacagattgttaaaagaaggacaggcattaaatgatgacgaaatttttcatgccagtgctcttggttggtgtattgaatggcttcaggcatattttcttgttcttgatgacattatggataactctcacacacgccgtggtcagccatgctggtttagagtgcccaaggttggaatgattgcagccaatgatggagttctactaagaaaccatattccacgtatccttaaaaagcacttcaggggaaagccatattacgttgatcttcttgatttgtttaatgaggttgagttccagactgcttcaggacagatgatagatctgatcaccacactggaaggagaaaaagacctgtctaaatacacattaacactgcatcgacgtattgttcagtacaagactgcatattattccttttaccttccggttgcatgtgcattgctcatggcgggtgaggatcttgacaaccatgttgatgtaaagaacattcttgttgagatgggaacatactttcaagtacaggatgattatttggattgttttggtgattctcaaacaattggaaagataggtacagatattgaag

SEQ ID NO: 5574 - DNA, 795 bp, Glycine max
tagacacacagcttaacgcttctcgttgcttaaattcctcttcccagcgctcattctctctctctctctatctccgtgtgtcattccgactgcaaataccacaactcattcaagagattcttctccggagccatggcagatctcaagtctacattcttgaacgtctattccgctctcaaatctgaactcctccacgaccccgccttcgagttctccgatgatgctcgccattgggtcgaccggatgctagactacaatgtgcctggaggaaagttgaaccggggactgtcagtcattgacagctacagattgttgaaagaaggacaggcattaaatgatgacgaaattttccttgccagtgctcttggttggtgtattgaatggcttcaggcatattttcttgttcttgatgacattatggataactctcacacacgccgcggccagccatgctggtttagagtgcccaaggtcggaatgattgcagccaatgatggagttctactaagaaaccatattccacgtatccttaaaaagcacttcaggggaaagccatattacgttgatcttcttgatttgtttaatgaggttgagttccagactgcttcaggacagatgatagatctgatcaccacactggaaggagaaaaagacctgtctaaatacacattaacactgtgagtactgaaaaaaaaaaaaaagagaacaatcaggtagaaatgattactgatgggccgcttttttgataaacatgaaatgccggctcatatgtgagtgtgactatagtaactatgc

SEQ ID NO: 5575 - DNA, 502 bp, Glycine max
ggcatgcactccacccttacgtaagctcggaattcgggtcgagctagtaatttgagttatcggatgctggactacaatgtgccgggaggaaagttgaaccggggactgtcagtaattgatagctacagattgttaaaagaaggacaggcattaaatgatgacgaaatttttcatgccagtgctcttggttggtgtattgaatggcttcaggcatattttcttgttcttgatgacattatggataactctcacacacgccgtggtcagccatgctggtttagagtgcccaaggttggaatgattgcagccaatgatggagttctactaagaaaccatattccacgtatccttaaaaagcacttcaggggaaagccatattacgttgatcttcttgatttgtttaatgaggttgtacttgtacaaatgttgaagtttaatttatgtggatttcatcttgttaaaatgcttaaagttgactatcatgcttttcttttaggttgag

SEQ ID NO: 5576 - DNA, 399 bp, Glycine max
cttttaagaacctagactagactagactacatcatcacctaatacccagaccatctcgccgcacacagcgcactgcagcgttgtgtcttcgcacgccgccgtcgacgtcgtccgccatcgtcacatctcgccggagcgtcgcgtcgctggctaagtgccaagtgctgctgctgattttgtggcttgttgataaaaatgagacttataacacataacatgctgtcatcgaacataaagggtgttgtaaatggatttcctttgcggattgaagcagagaaagttgtagaaaagactgtggaaatgaacggtgagtttctgaaaaagatgtttgagaagattgattggaaggcttttgttgatgcatcgcgggcaatgggatatactgaactacctgaggag

SEQ ID NO: 5577 - DNA, 973 bp, Glycine max
gggaacctacacctttggaaactcacacaccaccaccaccgttttcatcaatttcttatcttttctcattcccttctcttcttcctcaacacacacaaaatatctcttccaatttcaatttctcgtcgtccctcatcatggctcgtctcgcgatcgctgtcgccgccgtgctcctcgtggccctctccgcctccaccgcgacggcgcgtccctgcaggaccttcataatctcctcctactcgttccgcaaccctaactccaacaccttcgccaccatcaccgagatccgatccttcacccctctctacatcaccgacaaacccaccggcaaaccctcctcctcctacgacctcttcttcccccacgcgactcacctccctgagcccgagcgcgtgaacccacgcgctcccctagggttcgcctccgcgtacgatttctcctccctccgcgaccgcaccaaggacatcctcagcgtcgccctcgccctcctcttcggtgtcggctgcggcgccctcaccgccgccaccatgtacctcgtctggtccgtcttctccacgcgccaccgcaccgcctccttcgacgacttctcctccgacgacgaagacgagatcgagagccccaagaagcttggctacgtcaagattccggccattgagaccactaccgccgtcgcccccgcagctccggctccagccaagggttcggtatgagaatgtctccgactccgtaacggtgtggcttatgtggattgttaataattattattataggtgaaattgaatagtgaaaatgtcaaatggtgcaaacttttgccctgtatttgtgtttatgtttactttcttaatttgatgtatttgcgtttatcttaattctaattgccaaaccctggcgcttattattattgtgttgacaaaaaaaaaaaaaaaaaaaaaaaaaacaaaccgctccgctgtatacgcgagctagcgtacgg

SEQ ID NO: 5578 - DNA, 994 bp, Glycine max
gaactcagcttcggctacgtctccgacgacaccccaaacccaccttgttcccttaacgccacactcaataaccctctgatctttaccctttcccttccccttcttcaacacacacataatatctcttccaattttctcctccaatttcaatttctcgtcgtccctcattatggctcgtctctcgatcgtcgccatcgtcgccgccgtgctcctcctggccctctccgccacccccgcgacggcgcgtccctgcaggagcttcataatctcctcctactccttccgcaaccctaactccaacacgttcgccaccatcaccgagatccgatccttcacccctctctacatcaccgacaaacccccctcctatgcccttttcttcccccacgcgactcagctccctcagcatgagagcgtgcgcccacgcgcccctctagggttcgcctccgcctacgatttctcttccctccgcgaccgcaccaaggacatcctcagcgtcgccctagccctcctcttcggcgtcggctgcggcgccctcaccgccgccaccatgtacctcgtctggtccgtcttctccacgcgccaccccaccgccgctttcgacgacttctcctccgacgaagacgagatcgagagccccaagaagctaggctacgtcaagattcctgccaccgagaccaccgctgctgtctccaccgctccggcgccggccaagggctcggtatgagaatgtgtcctccgtaaccgtatggttttctatgttgattgttaataattattataggtgaattgaatagtgaaagtgtcaaatggtgcaaactttggccctgtatctgcgtttatgtttactttttaatttgatgtatttgcgttttttagttctaattggcaactcttggtgtttattatggtgttggtttcctgtgttgattgtttgcaatgctgaaaccttggatatggaattgatcgtgatatatatagtatcatttatttt

SEQ ID NO: 5579 - DNA, 1292 bp, Glycine max
gacgtaggacgcacgcgtccgtaaactcggaaagaggagaaagcaatgggcattgatagtgaatacgtgatatctcacaaggcctatgcgagggtgggattgcttgggaacccgagcgatgtctactacggcaaaacgatagcgttaagcgtcgccaacttcttcgccaccgtcacgctgcgtccctccgaccagttaatcctccaaccccaccccctccacgatctccttcatttctcatcgctccctcaattggtcaacaggttgagctcccaaggttactatggaggcgtgcgattgcttatggctatttgcaatgtcttctacgcgtattgcagagagaacgccatcgatcttggcgacgacaatttcactctctcctacgacaccaatatccctcgccaggctggtctttcgggttctagcgggatcgtgtgtgctgcgttgaactgtttgttggatttctacaacgtcaggcatctggtcaagggggaggtcaggcctaacctcatcctcgctgccgagaaagaactcgggattgtggccggtcttcacgatcgggtcgcacaagtttacggtggccttgtttacatggactttagcaaggaaaacatgaatgagctgggccatggagtttatgtaccagtggatttgagtctcctccctcctctgtatctcatctatgcggaaaatcctagtgattctggcaaggttcatagtaaagtacggcagaggtggcttgatggtgatgagttcattgtgtcttccatgcttgaaattgctaatatcgcccaagaaggaaagactgcattagaagaaaaggactactccaaatttgcagctctcatgaatcgaaattttgacctgcgaaggttaatgtttggagatgatgccctcggtgatttgaacctaaaaatggtagaggttgccagaaaggttggagctgcgtcaaaatttaccggtagcggaggagctgttgttgcattttgtcctgaggggacttctcaagtgaagcttctcgaggacgaatgtcaaaaagaaggatttgtgatactacctattgaacctcttccttctcgtctaaatgaaattgacttgaaaaccttgcaaataaagtaatctatattgagggtttgaaaaatagttctcaacaaaataaaaatttccatttactcaagaacgcgggtttaaagctggtgggagttggcatactcaaagcgcaatgtaagtttgttccgtttcgttgagagaggatcaaactttgaagttgcttttgatgagggtggatctga

SEQ ID NO: 5580 - DNA, 690 bp, Glycine max
cccacgcgtccgtaagacgacagaaaggggggcagttcaaagcgaagaaagattcgaaacgaagaaagaaagcgttgtgaagaatggcggaagagggacaagtgatcggtgtccacagcgtagaggagtggaaggaacatctcaagaagggagaagagtccaagaaattgattgtggtggattttactgcttcttggtgcggtccatgccgtttcattgccccaattcttgcagagtttgctaaaaagttgccgaatgtcaccttcctcaaggtggatgtggatgaattggagactgtttccaaggagtggggaattgaggctatgccaaccttcctgttcttgaaagaaggcaagctggtggacaaggttgtgggtgccaagaaagaggagctgcaattgacaatagccaaacatgccgcaattgctgctgcttgaagtgccatatgaatatgttaagaataatagactattgtcttcgagtcagtttgcttttattactattaatctgttattgggtctgtttgcatgatttcagaacggatttagagttagtaaaacatggatgggttatgtgtaaatgacattgttgcactatcgtgattgaaacatttctgctgatgaaactagccaaaagattagccggtacgttatgtttatcattgctgtgacaatggatgtgtttcatcat

SEQ ID NO: 5581 - DNA, 539 bp, Glycine max
ggcgtcaatgtggacacgtgaggcgcattttagtaacagtccacaagaccacgtactatatatatacgcgcatgggggcattctctttggcgtgcagttcaaagcgaaaagagattcgaatccaaggaagggaaaggaaagtaagagaagagaagaatggccgaagagggacaagtgattggtgtccacagcgtggaggagtgggaggaacatctcaagaagggacaagagtccaagaaattgattgtggtggattttactgcttcttggtgcggcccatgccgtttcattgccccaattcttgcggatatggctaaaaagttgccgaatgtcaccttcctcaaggtggatgtggatgaattggcgactgtttccaaggagtgggaagttgaggctatgccaaccttcctattcttgaaagaaagcaagctggtgaagaagcttgtgggtgccaagaaagaggagctgcaagacataatagtcaaacttgctgcaattgatgctgcctgaagtgccatatgaatatgttgagaataatt

SEQ ID NO: 5582 - DNA, 687 bp, Glycine max
catctgagccgagttccaatttgcgtgagaacgaaaaaagaaaaaaaaaaccctaacgcactcgagaccctgagatttttcatcttcgtttctcattctctttttgatcatggacgtcgaggtgcggcagatcttcaacaagttcgacaagaacggcgacggaaaaatctcggtaacggagctgaaggacatgctcgcggccctcggatccaaaacgacggacgaggagttgaaacgcatgatggaggagctcgaccagaacggcgacggtttcatcgacctcaaggagttcgcggattttcactgcaatggcggtgccggaaaggacgactcgaaggagctccgcgacgcgttcgatctctacgacgtcgacaagaacggcctcatctccgcgaaggagttgcacgacgtgctccggaatctaggcgagaagtgctccctcagtgactgccggagaatgatcagcaacgtcgacggcgacggcgacggcaacgtcaacttcgaggaattcaaaaagatgatgactcgctcttaattaggtttaaatcaatagtccaataataagttcattgttcaaaggtacgttcgtacgtctacgcatcttcatgttttgttagaaagagctaagaactgcacataaagtagttattaacatgttctctgtacattctctaccgtgacatgtgg

SEQ ID NO: 5583 - DNA, 644 bp, Glycine max
ggggcttaacaaaaacccaaaaaaacatgcatttgttcctgaatttcttgacgaatcctaattcctaactaattctactcaacagtacattcaatccaccgctttgttcaactcaaatcctcaatcgctcgcgatttcttcttctggaattctcaaggatctcgataaatggcaaccactgcctgtttcatcattgttagcagaaatgacattcctatatatgaagctgaagttggagtagctgctaaaagggaggattctgctcagctgcatcaatttatccttcatgctgctctcgatattgttcaggaccttgcatggactactagcgctatgtacttgaaatcagtagacaggtttaatgaacttgtggtgtcagtgtatgttacagctggtcatatcctttatacttgggattcttttatagtttagataaaaagaattgcattactcttgtttgttcacttttttttaatctttttttttccaaataaatgaagtactgagtacccaactttgaggaccaatcaatttagttagcttctttaattgtataattatgccattgtcactggcaggggagcaaaatataagtgcctagagtggagaagtcttaaactaaaagcttacagcaagcacatatc

SEQ ID NO: 5584 - DNA, 913 bp, Glycine max
gttttagcccagcccactcaataaggggcttaacaatcatgcattcgttgcttcgttcgtgaattaggcacaatttcctgactcatttgttgaccaattctaattcctaactaatcgatttctctgcttctactcagtagttcgttcaattcaccggtttgttcaactcaaatcgtgcaatccttctttcaagctcgcgatttcctcttctggaattctcaagatcttgataatggcaaccactgcctgtttcatcattgttagcagaaatgacattcctacacatgaagctgaagttggagtagctgctaaaagggaagatgctgctcaactgcatcaatttatccttcatgctgctctcgatattgttcaggaccttgcatggactactagcgctatgtacttgaaatcagtagacaggtttaatgaacttgtggtgtcagtgtatgttacagctggtcatacccgatttatgttgctacatgactcccgtaatgatgatggtatcaagagcttcttccaagaggtgcatgagctttacataaagactctccttaatcccctgtacttacctggctcccggatcacgtcatcacattttgatactaaagtccgagcccttgcacgaaagtatctgtagtatgtagaaaccactaatttgtctgtggttgctagttcatatagctctgtggcccgactcttaaccttgttcgttcttgattacagttgaaaagctggctttctttttctttttctccttcatgatttggcggcatggttaggtttgctgttgtctatattgtacctcagtcattagcaggtggtgggtgcttacgctaatgaaggcgattgttgacaagcttcatctgccatacatcctaatcttgtactcaatgctcaactatttgatttt

SEQ ID NO: 5585 - DNA, 747 bp, Glycine max
gacagatctgagcactttgctatcgtgtattaattttccttgggggcagtccatggaatatgaaatttacaaggcaactaacactatcaaggcttataatcagataggttttctaaagctcgagaagtcaattccagatgccattctaagacaagcaaaaggccttgcaattatcactgtggtcaaagtacgagtgggggttacttacaatattggaacaggacttgtggttgcccgtacggaagacggttcatggtctcctccatctgctgtttccacctttggtgtacggtggggggctcaggctggaggcgagttgacagacttcatcattgttttgagaacaaatgatgctgtcaagacatttggtggcaatatgcatctttcacttggagcaggtttgagtgctgcagtaggctttgttggtaggtcagttaaagctgatgttcgagctggtgatggtggctatgctgcttgttatacctacaactgcagtaaaggtatttgtgatcacatggtggttaaaattgacttaaatatggaacccatggaaggctggttgaggggacttgattgtttctcacttaacaagacacactgaaacttgtattttagcaatgaacaagcatgctgcaattgaatctccaatatccagattcgctcataaacttctcagattgatgttatgaagtgcatttgttggatgttcacttgaaggaagtatggtgactactcgcacgcaagaaa

SEQ ID NO: 5586 - DNA, 663 bp, Glycine max
agctcggaattcggctctagattcctcgttcgtcgtttctctgagccagaacttgtggaggaggaacctcacctgtggggaaattcacgctcattctccttcttcttctttcggatctcgttctctttctcttccttccttctccttctctctgagaacaacaccccacactcctctctctctctccgcttccttctcttctcacacctccatggcccacacttcccttccctccgccgatgccggcatggacgctgtccagcgccgtctcatgttcgaagacgaatgcattttggtggatgagaatgaccgtgtggttggtcatgattcaaaatacaattgtcacttgatggaaaagattgaagctgagaatttgctgcatagagctttcagtgtattcctgttcaactcaaagtatgagttgcttcttcagcaacgatctgcaacaaaggtaactttccctcttgtgtggacaaacacctgttgtagccatcctctgtaccgtgaatctgagcttattgatgagaatgcccttggagtaagaaacgcagctcagaggaagcttttggatgagcttggtattgtcgccgaagatctaccagttgataagttcacccccttgggtcgcattctttacaaggcaccttctgatggcaaatgggg

SEQ ID NO: 5587 - DNA, 496 bp, Glycine max
  unsure (1)..(496): unsure at all n locations
gcaattaataaagttagggggggtgcggttcaggaaggagcgaaagggaaatcagaaaatggcacagtcctcctcgatcgtcgttactctgaggcagcacttgtttaaaaggaacctcacctctctcactctgcctcactctccttctcttccttccttctccttctctctgagaacaacaccccacactcctctctctctctccgcttccttctcttctcacacctccatggcccacacttcccttccctccgccgatgccggcatggacgctgtccagcgccgtctcatgttcgaagacgaatgcattttggtggatgagaatgaccgtgtggttggtcatgattcaaaatacaattgtcacttgatggaaaagattgaagctgagaatttgctgcatagagccttcagtgtattcctgttcaactcaaagtatgagttgcttcttcagcaacgatctgcaaccaaggtaactttnccctctgtgtggacaaac

SEQ ID NO: 5588 - DNA, 432 bp, Glycine max
gttgaaacatgatcagctcaagatggagctcacagagggacatgtattccaaggttggcatgaaggagctatagagtttccacctacatacaaataccgtctgacttctgtagactacctaggctgtgatcagcagcatgtgagcagaaagcggcgctccccagcatggtgcgatagaataatatggtttgggaagggaatgaagcaaatccaatacaacaggagcgagtcaaaactttctgatcataggcctgtacgagcaatgttcacagctgatatcagggttgcagggacttgtaaatgattaaaaaagttacaaaggcaatttgtccaagaaattttggttttaatggactaaatttagtcatggaccaaaaccagacacagacaccggacacctaaccaaacttagtcctgggctaaaacaagcat

SEQ ID NO: 5589 - DNA, 433 bp, Glycine max
ctggttaagtcctcaccctcccctccattcccctcacatcccaaaaaccacacacaacacaccacaaccttcttcttcttcttcttcaacttctggttcaaaacctcaacagtttgttgaattgcgcgttgaaatacgactcaatattctttcgcgagctctgttctcacttcaaaggttaggttcttcgacagtttctttgtttccactccgtcgcttgctgagaaggcgtgagcgagagttgtagaattacgcaacgagtgtcgcggatgagagatctgtggtgaggtctctggaaatgacatcattggaggtgacgatgaagggaaattgcttgaaccacaacgacggcggagccacggagcctcattccccgtccacggccaaagacgcagaagctgcacttttcagggagctatggcatgcttgtgca

SEQ ID NO: 5590 - DNA, 485 bp, Glycine max
gaaaaacagcattaacacaaataaactagaaaacatttttttttctcgttattctccggttcctcgcaggtaccaccaattccacatatctgcgtgtaaatactccaacttgtcccaattcacacctttgcctcgcgattctccgatgcgttacacctttgtccaccgattcctctttaattttcttccctttttcccccaattcaactaaattttctgctatctatattcccaggtaagtaaagtcagatttttcttggtggacggacatgcagaagaaggctgcactcaacttccaagctttcctctagaacaaaagcaaagattatactgtcataaaaaggttttgtacttattttaatgggtgctcctaagcagaaatggaccgcagaggaagaagcagcattgaaagctggagtagtcaaacacggggctggaaaatggcgcaccatacttacagacccagagttcagttccattttgcg

SEQ ID NO: 5591 - DNA, 886 bp, Glycine max
gagcttaatttgtgtcacaactcagaaaggaaagctttgaggtttcttccgcattttagagtggtgagaggatggtgggtgttatttcgttggtaacagggatggctggtcctagtgggtttggatcagcttccactgcagaacaggttactgatggaattgatgccagcaacctcactgcaattatcacaggaggagcaagtggtataggcttggagacagcaagagtgttggctcttcgaaaggtccatgtgatcattgcagttcggaacatggtgtctgcaaaggaggctaaacaacaaatactagaggagaatgagtctgcacgagtggacgtaatgaagctcgacctttgctcagtgaattctattacatcatttgtggacaacttcatagctcttgatcttcctctcaacattttaataaacaatgctggagtaatgttctgcccattcaagctctcagaggatggcattgagatgcaatttgcaacaaaccatcttggtcatttccacttgacaaacctgcttcttgacaaaatgcaacaaactgcaaaagccactggaatagagggcaggatcataaatctgtcatcaattgcccataactacacttatagaaaggggattagatttaataagatcaatgaacgaaaaggttatggtaacaagaaggcgtatgggcagtccaagttagcaaacatattacatacaaatgagctttctcgtcccctgcaggaagagggtgtgaacattacagcaaactcagtccatccaggagtcataattactcctcttatgagacactcttctttccatatgcacttcctcaacgtctttaccttttacatatgcaagaacgtcacccagggagcatccaggacatg

SEQ ID NO: 5592 - DNA, 827 bp, Glycine max
cccacgcgtccgtaccaatatgaacagaatctcctctcgacacctttgctttgctgcagctcgcaactgcaacttcccacaaatataaatatatattacttcatggtcacacatagttaattttattaattactactaggtagctggtttttaataggtagtaggtaggtgtaatcgttgtcttcctgcagatatggaagaagcgggtttaggagattgttgttcctctaatacgactattacgaggaaaagcgagaagcgaaagcagcagcaccaacaacaagagaagccatacagaggaataaggatgaggaagtggggcaagtgggtggcggagattagagaacccaacaagaggtcgaggatctggttgggttcttacgccacccccgtcgccgccgcacgcgcctacgacaccgccgtcttccacctccgaggcccttccgctcgccttaacttccccgaattgctgtcccaggacgacgacgtttcgacccaacaacagggcaagatgtccgccgattcaattcgcaaaaaagccacccaagtcggcgccagagtcgacgcgctccaaaccgcgcttcagcaatcctcgtcgacacactccattagttccagccacgtcagctatgagaaaccagacttgaacgagtatcccaaacctgaagattagtaatttccttcaaccttcaagattaatattgatccaccaatcatgggttctgatgtgacttatatatagggcttcaacttgccctcttcacctatgttaatttgaaaagaaaaaacttttatatttgtcaaaaaaaaaaaaaaaaaaacataaa

SEQ ID NO: 5593 - DNA, 599 bp, Glycine max
  unsure (1)..(599): unsure at all n locations
aatacaacagcaacatgatggtttcagtttcttgagggtactaatatgaacagaatctcctctcaacacctttgccttgctgcagttcgcaactgcaactgcactcaaatataaatatatatacatatatatatatatatatatatatgtattacttcatggtcacacatagttaagtttattaattactaggtagctggttttgaatagggtagttggtagttatagttgttgtcccagatatggaagaagcaggtttaggagattgttgttcctcgaattcgacgattacgaggaagagcgataagcgaaagcagcaacaccaacaacaagagaagccatacagaggaataaggatgaggaagtggggcaagtgggtggcggagattagagaacccaataagcgttcgaggatctggctgggttcttacgccacccccggcgccgccgcacgcgcctatgacaccgccgtctttcacctccgaggcccttacgctcgccttattccaattgtgcanacacactttgaccacacagcacattcgcgttcatcgaaaagcaccagtcggccgatcaccctcaacgccttacatctgtct

SEQ ID NO: 5594 - DNA, 560 bp, Glycine max
ggtagcatttcatttcgttccttaaatattcttcacttacgtccctcaaagtaaagaacagaagagaagaaaacgccctacctaaaaccctaatctctcaaaaccctacatatggcgtcgtcgtcgttaattcgcctccgccgcaccatcagaacactctcgggcatctcccactccttgtccgcgactcatgcggcgtcgttttcctcccccatcgggtgcggcgtttcatggagtttgcagtcaccgaagaagggtgtggttcagtcccgttcattcaggtcaagctcaatttcacttctatcttttcgatcctcgcagcggcagaacaacatccccgatgagattggtcccgataccattctcttcgagggctgcgattacaaccattggctcatcgtcatggaattcaaagacaacaacaaaccctctcccgaagacatggttcgcgtttacgaagagacttgtgccaagggtcttaacatcagtttggaagaggccaagaagaaaatgtatgcgtgcagcacaacaacttacataggccttcaggcagtcatgac

SEQ ID NO: 5595 - DNA, 442 bp, Glycine max
ggtttcaatttattcatttccttcctaaaaatggttcgatacttctctcgaagaacagagcaggcgaaaaggccctaaaaccctaatctcccaaaaccctacgcatggcgtcgtcgttaattcacctccgccgcaccgtcagagcactctccggcgtcgcccagtctttctctgtgcatgcggcatcgtattccggccccattcggtgcggtgtttcatggagtttgcagtcaccgaagggtgtggttcagccccgttcattcaggtcaagctcaatttcacttctctcttttcgatcctcgcagcggcagagcaacatccccgatgagattggtcccgataccattctctttgagggctgcgactacaaccactggctcatcgtgatggaattcaaagacaaggacaacaaacccttttccgaagacatggttcgcgttta

SEQ ID NO: 5596 - DNA, 245 bp, Glycine max
tctcgagccgaatcggctcgagacatattcttcatatacttctctacgaagaacagaacagaccaaaaggccctaaaaccctaatctcccaaaaccctacgcatcgcgtcgtcgttaattcacctccgccgcaccgtcagagcactctccggcgtcgcccagtctttctctgtgcatgcggcatcgtattccgtccccattcggtgcggtgtttcatggagtttgcagtcaccgaagggtgtggt

SEQ ID NO: 5597 - DNA, 1000 bp, Glycine max
  unsure (1)..(1000): unsure at all n locations
ggagccacacaaaaaccaatccacaccctataaaaaaacactctttgtgtgtctgcattttgattgataccctcattcttcatccatagacatggccaccgtcacttctgcagccgttgctattccctcattcactggcctcaaggcaagcgcaggcaaagtgagtgccgcagttaaagtctcagctccccaagccacaaggttgggcatcaaggcttcgctgaaagacgttggagtcgctgttgtggccactgccgcgagtgcagtgctggctagcaacgccatggccattgaagtgttgctgggtggtgatgacgggtctctggctttcgttcccaacaatttctccgtggcctctggggagaagatcgtgttcaagaacaacgcaggtttcccccacaacgttgtgttcgacgaggacgagattcctagcggcgtggatgcagggaaaatctccatgagcgatgaagaccttctcaatgcgcctggtgagacttacagcgttactttggatgctaagggaacctacagtttcttctgttcgcctcaccaaggagctggtatggtgggaaaagtcactgttaattaattattgtctcaagggctcgtctcctacgtctaagttctcatatggttccttcttctaatatttttgttttttctagaagagcttggttgatctttcttgttatggcctatgggatgaatgaacgatataatgcgtttctgtaattcacagacattgttcgagttatgtgcantgctgtaaagaaatcaatgaatgaaaagaaaatgcacagtagatccatagctgaggaggggcccgtccccatgttccgcttatgatgttatcattactccgctctcatgccggcttgttaccacgtcggaatggaaaacgctgcggtacccactttatctcatagtgcactacctctttcccaggtggcgtatctcgaaaaggcagaacagacgccttcccacagttgggcgcctgaaa

SEQ ID NO: 5598 - DNA, 541 bp, Glycine max
tactatagggaatttggccctcgaggccaagaattcaagcccattgaagtgttgctgggtggtgatgacgggtctctggctttcgttcccaacaatttctccgtggcctctggggagaagatcgtgttcaagaacaacgcaggtttcccccacaacgttgtgttcgacgaggacgagattcctagcggcgtggatgcagggaaaatctccatgagcgatgaagaccttctcaatgcgcctggtgagacttacagcgttactttggatgctaagggaacctacagtttcttctgttcgcctcaccaaggagctggtatggtgggaaaagtcactgttaattaattattgtctcaagggctcgtctcctacgtctaagttctcatatggttccttcttctaatatttttgttttttctagaagagcttggttgatctttcttgttatggcctatgggatgaatgaacgatataatgcgtttctgtaattcatttacttctttcagatccttgatgaagtcttatatcgattaacaaaaaaaaa

SEQ ID NO: 5599 - DNA, 767 bp, Glycine max
acgcgaccgacagctgctagagactacagaaagggattccacacacaagaagactcctcaatcatccatagacatggccaccgtcacttctgcagcagtttctattccctcattcactggcctcaaggcaagcgcaggcaaagtgagtgccgccgcagttaaagtctcagctccccaagccacaaggttctgcggcatcaaggcttccctcaaagacgttggagtcgctgttgtggccactgctgcgagcgcagttctagctagcaacgccatggccattgaagtgttactgggcactgatgacgggtctctggttttctctcccaactctttctccgtggcccctggggaaaagatcgtgttcaagaacaacgcaggtttcccccacaacgttgtgttcgacgaggacgagattcctagcggcgtggatgcagggaaaatctccatgagcgaagaagaccttctcaatgcggctggtgagacttacagcgttactttggatgccaagggaacctacagtttctactgttcgcctcaccaaggagctggtatggtgggaaaagtcaccgttaattaattatatattgtctcctacgtctaagttctcatatgcttgttttcctagaagagcctaattcatctttcttgttagggcctatgggatgaatcaacaatatcatgcctttgtgtaaaaaagaaccaggatcacttgctccaactggattgtatctcggtggcaccaaatatatgttcatccagggtgaacc

SEQ ID NO: 5600 - DNA, 336 bp, Glycine max
gagccacagaaaggccaatccattcacccaccctataaaaaacactctgcaattttgattgattcccctattccacacacaagaagactcctcaatcatccatagacatggccaccgtcacttctgcagcagtttctattccctcattcactggcctcaaggcaagcgcaggcaaagtgagtgccgccgcagttaaagtctcagctccccaagccacaaggttctgcggcatcaaggcttccctcaaagacgttggagtcgctgttgtggccactgctgcgagcgcagttctagctagcaacgccatggccattggagtgttactggggggggggg

SEQ ID NO: 5601 - DNA, 494 bp, Glycine max
ggggaattaatcaggtttacatacttggaggagatggaactcagcgaggggcttctgtgatttttgaggaaattagaaaacgtggcttgaaagtttcagtggttggaattccagaatcagttgataatgacatcccggttatcgataagtcattcggttttgacactgctgttgaagaggcacaacgagccataaatgctgctcatgtggaagcagaaagcactgagaatggtatcggtgttgtcaagttaatgggtcgtcacagtgggtttatatctatgtatgcaactctcgccagccgagatgtggattgttgcttaattccagagtcacctttttacctcgagggtccaggtggactctttgagttcattaggaaaagactcgcataaaacgggcacatggttatagtaatttctgaaggtgcaggtcatgagcttatttcagaaagcctatctgctacaaataagcaggaagcttctggcaacaagtta

SEQ ID NO: 5602 - DNA, 685 bp, Glycine max
aaaaactaatggcaggaagtgcacgagtggggcggattgtgatgtcttctgctgtgaagcatctaactcctgtgactttggagttgggtggaaaatgccctgcagttgttgattccctttcatcttcttgggacaaagaggtcactgtgaagagaataattgtggggaaatatgggacttgtgctggtcaagcatgcataacaattgattatgtccttgtggaaaagggttactgttttaaactggtggaattgatgaaggtctggatcaagaaaatgtttggacagaaccctcgacaatccaaaactattgccaagatagttaataaacaccacttctctagattgaagaatcttcttgctgataaaaaggtcaaagaatctgtgatttatggtggttcaatggacgaacaaaacttatttattgagccaacgatcttggtggatcccccactggaagcagcacttatgtcggaagagatttttggcccattacttccaattattaccgtggataagattgaggacagtattaagttcataaattctagacctaaacctcttgccctttatgttttcaccaagaaccaaacactgcagagaagaatgatatctgaaacatcatctggcagtgtgactatcaacgacgcaattctacaatatgcagtctatactgttccatttgg

SEQ ID NO: 5603 - DNA, 439 bp, Glycine max
ctcgagccgctcaatgtttggcttgtgcctttgtgtgctcatttttcactaaacaccaacccaaacctcatacacaaacattcttaattttgatatttttgttattattttcttggtttttgttaattacttatattaagcatcatgggaaccccacaatccaataacttgccaccagggtttaggttccaccctacagatgatgcgctcattcttcactacctaaggaagaaggttgcctctattcctttgccagtttccatcatagctgaggttgatatctacaagtttgatccatgggagctaccaggtttgtctacgtttaaataagatctatattcttttttatattttaaaacttataaagataagaattgctttaatatctagaaaaaaattatggattttgatataattaattttagaaagattggacact

SEQ ID NO: 5604 - DNA, 602 bp, Glycine max
cctcaaggtttggcttgtgcctttgtgtgctcatttttcactaaacaccaacccaaaccttatacacaaacattcttaattttgatatttttgtttatatattctaggtttttgttaattaattatattaagcatcatgggaaccccacaatccaataacttgccaccagggtttaggttccaccctacagatgaagagctcattcttcactacctaaggaagaaggttgcctccattcctttgccagttgccatcattgctgaggttgatatctacaagtttgatccatgggagctaccagctaaggccgcgtttggggagaaagagtggtacttcttcagtcctagagaccggaagtacccaaatggagcgaggccaaacagggcagcagcttcagggtattggaaggccacaggcactgataagaacatattggcatcactggcaagaggaggggttagagagcactttggtgtgaaaaaggctttggggttcaacaaaggaagacccccaaagggtgtcaagaccaattgaataatgcatgaatatcgctttgttgacaccaatagacccattaggatcaaagacacctccatgaggt

SEQ ID NO: 5605 - DNA, 940 bp, Glycine max
aaggtttaaaaggaaaaagttggattcagccaattccagctccaatttgtaactcactgcttcaggcatttctggcacaattttttccacctttatttcaactttaagactccacagaaagaagcatattcctgagtcaaatagttctgtccatatagaatttgtgaagtgagagtccaacctttcattttcaattttcaaagatgcctcgtggaacacttgaagttgttctgatcagcgccaaaggaatcgatgacaatgattttctctccagcatagatccttatgtgattctcacatacagggcacaggagaaaaagagcactgtgcaagaagatgctggatccaagccacaatggaatgagagctttcttttcactgtctctgacagtgcatctgaacttaatctaaagataatggataaagacaactttagtcaagatgattgtcttggcgtggcaaccattcatctggatccagtgtttgaagcgggtagcattccagaaactgcttacaaggttgtgaaggacgaagaatattgtggagagattaaggtggctctcacttttactgctgagagaaatgaggagcagggttatgatgcacctgaagagagctatggtggatggaaagaatccagtggggaatattaaagtgaaagaagaatttacatacttcaatggccagacttacctttataatgaaaaataagcagttttggtgtcacttttaggcaatttccattattgtgttttctggtgtgaagatccaatagtgttgtgcttttaggttgcattcctccctttggatattaaagtacattatgcttgatatattatcttttatgcgtcagttaaacattagaagagcagtgctattttattttgttcgccgttattattattggattcactaattagttatggaaaatgttattctg

SEQ ID NO: 5606 - DNA, 469 bp, Glycine max
aaggaaaaagttggatccagccaaaatccagctccaattggtaactcattgcttgaggcatttctggcacagttttttccacttttattttaactttaagactgcacagagagaagcatataattcctgagtcaatatagaatttgtgaagtcagtccaaacttcagtttcaaagatgcctcgtggaacgcttgaagttgttctgatcagcgccaaaggaatcgatgacaatgattttctctccagcattgatccttatgtgattctcacatacagggcacaggagaaaaagagcactgtgcaagaagatgctggatccaagccacaatggaatgagagctttcttttcactgtctctgacagtgcatctgaacttaatctaaagataatggataaagacaactttagtcaagatgattgtcttggcgtggcaaccattcatctggatcccagtgttgaaagcggtagc

SEQ ID NO: 5607 - DNA, 366 bp, Glycine max
ataaaacctaaacaataattaatagtagttgatcggctttaaatgctgtattttcttctttcctctttccctgtctccattgtctgggtctgttttagctttgcagaggttggccttggcaggcacacgcacatcccacattacatcaaacacatttcatttttttttttctttctcctttgtcatcctcaaaatccccgaccttaattgctccgaccccaacaaaaaacaaaacaagcaagccatggattcctcccagatccatggcttgtcctcgtaaattcaacacctttacaagtcaaacttaaaccaccattaactgaaaaaaccgcaggaagaagaagaggatcaaatctcagaagggtt

SEQ ID NO: 5608 - DNA, 1352 bp, Glycine max
aagtaagtaaaacctcacaatcacaaacacactcttttttgttctttgctcacttcccttgttcgtttcactctcacaatggactccctctctctcttctgcaccggagcccttctcgccggcggcctctactggttcgtctgtgttctgggccccgccgagcagaagggcaaacgcgccaccgatctatccggcggctccatctccgccgagaaagtccaagacaactacaagcagtactggtccttcttccgccgccccaaggagatcgagaccgccgacaaagttcccgacttcgtcgacaccttctacaatctagtcacagacatctacgagtgggggtggggccagtccttccacttctccccctccatccccggcaagtcccaccgcgacgccacgcgcctccacgaggagatggccgtcgatctcatcgaggccaagcccggcaacaaaatcctggacgtgggctgcggcgtgggcgggcccatgcgggccatcgcggcccactcccgcgcgaacgtggtgggcatcaccatcaacgagtaccaggtcaatcgagcaaggatgcacaacaagaaggctgggttggactctctctgcgaggtcgtgtgtgggaatttccttaagatgccgtttgtcgacaacagcttcgacggagcgtactccatcgaggccacgtgtcacgctcccaagctggaagaagtgtacgccgaaatcttccgagttctgaaaccgggggcgctctacgtttcctacgagtgggtgacgacggataagtacagcggcgatgaccctgaacacgtggaggtcattcaggggattgagaggggtgacgcgttgcctggcctcagaagctacgccgacatagccgagacggcgcgtaaggtagggtttgctgttgtgaaggagcgggatctggccaagccgccggctctgccctggtggagccgattgaagatgggtaggatcgcctactggcggaaccatattgtggtcactgttctcgccgctttgggaatcgcgcccaaggggaccgtcgatgttcatgagatgctcttcaagaccgctgactatttgaccagagggggtgactctggcattttctcgccgatgcacatgatcctctgcagaaagccccatgacaaggacgaccataactgagcgtttcattgggaaattccaaaactataacaaccaccaccttgtttctttccggtactctcttttttttttttcataattattattatcttgggtttaacttattgttattagttattattattactatgaacttggtgtaatttggattttgatcttttcaattatatttttaattttgctatgtt

SEQ ID NO: 5609 - DNA, 579 bp, Glycine max
agcggcgatgaccctgaacacgtggaggtcattcaggggattgagaggggtgacgcgttgcctggccttagaagctacgccgacatagccgaaacggcgcgtaaggtagggtttgctgttgtgaaggagcgggatctggctaagccgccggctcttccctggtggagccgattgaagatgggtaggatcgcgtactggcggaaccatattgtggtcactgttctcgccgctttgggaatcgcgcctaaggggaccgtcgatgttcatgagatgctcttcaagaccgctgactatttgaccagagggggtgactctgggattttctctccgatgcacatgatcctctgcagaaagccccatgacaaggacgaacaaaactctggttagggtttcgtttcatttggaaattggaaaacaaaaaccaccaccgccaccttgtttctttccggtactcttttttctcattattatcctgggtttaacttgttgttattagttattattactatgaacttggtgtaatttggattttgatcttttcaattttaattttagtttgcaacaaaaaaaaaaaaaaaa

SEQ ID NO: 5610 - DNA, 466 bp, Glycine max
aaagtccccgacttcgtcgacaccttctacaatctagtcacagacatctaccagtgggggtggggccagtccttccacttcaccccctctctatcttctgcaccggagccctcctcgccggcggcctctactgggtcgtctgcgttctgggccccgcccagcacaagggccaaacgccccaccgatctttccggcggctccatctccgccgagaaagtccaagacaactacaagcagtactggtccttcttccctggtggagccgattgaagatgggtaggatcgcgtactggcggaaccatattgtggtcactgttctcgccgctttgggaatcgcgcctaaggggaccgtcgatgttcatgagatgctcttcaagaccgctgactatttgaccagaaggggtgactctgggattttctctccgatgcacatgatcctctgcagaaagccccatgacaaggacga

SEQ ID NO: 5611 - DNA, 901 bp, Glycine max
acctaagtgagtgcggccgcttctagaaaccagaatgaatcccgcaatgaccaatcacaattctctgtgaactttctagaatctcgttcttcctttgccttctccttcttcttcaaccctttttctttctctttctttcgcactttcattctctaataaaaatctaagtccctttggtcttcatcttctgttctgatccaggtatggcttctaaacgcatcttgaaggagctcaaggatttgcagaaggatcctcctacctcatgcagtgcaggccctgtggctgaggacatgtttcactggcaagccacaatcatgggacctgctgatagcccatatgcaggtggtgttttcctagtttcaattcattttcctcctgactatcccttcaagccaccaaaggttgcttttcggactaaggtgttccacccaaacatcaacagcaatggcagtatatgtcttgacattctcaaggaacaatggagcccagctctaaccatttccaaggtccttttgtcaatttgctcattgttgacggatcccaaccctgatgatccacttgtacctgagattgcacacatgtacaagaccgacagggccaagtatgaggctacagcccgcagctggacccagaagtatgccatgggataatcatgctcctcctttagctgctcactgtagctgcgcaatcatgatttgtgaagaaacaagagatactttgaatgaatgttttgtcttttttttgtcagtggaaatcaaccatggtaagggaattgatgattacttgtaaatattttctttgcaagacatcggtcatggaagaaattgttgtaaaatgtcacaaattttctgcttgttgacttgctattccaaatgatggtaatgaaattatagataggacc

SEQ ID NO: 5612 - DNA, 655 bp, Glycine max
gctaaacggaaccctctagaacccaaagtttttctctttcaattcttcctcagtcaattcaactccctttcaatttcaaccctatctctgctctcttcttcttcttcttcttcattttttgggtctctctgtttacaagcttttcagttatggcatcgaaacgcatcgtcaaggagctcaaggatttgcagaaggaccctcctacttcctgcagcgcaggtcccgtggcggaggacatgtttcactggcaggcaacaatcatgggacctcctgatagcccatataccggtggtgtattcctagtttcaattcattttcctcctgattatccattcaaaccaccaaaggttgcatttaggactaaggtattccacccaaacatcaacagtaatggaagtatatgccttgacattctaaaagaacaatggagcccagcactaaccatttctaaggtccttttgtccatttgctcactgttgacggatcccaaccctgatgacccgcttgtgcctgaaattgcccacatgtacaagactgacagggctaagtatgaagccactgctcgtagctggacacagaagtatgccatgggatgatcatgctcctccttagctgcacaatcatgatttttatgaagaaacaaaattacttttat

SEQ ID NO: 5613 - DNA, 571 bp, Glycine max
atctcgttcttcctttcttctctcagattccccctttgcctccttcttcaaccccttttctttctctctctgtctttcgcactttcattctctcttaaaaatctaaatcccttttggtcttcatctttgcctctgacccaggtatggcttcgaaacgcatcctgaaggagctcaaggatttgcagaaggatcctcctacgtcatgcagcgcaggtcctgtggctgaagacatgtttcactggcaagccacaatcatgggacctgctgatagcccatatgcaggtggtgttttcttagtttcaattcattttcctcctgactatcccttcaagccaccaaaggtactctatcccattcttttactcacattagctgcttgtattattaggtattgatcttctaaacattttcttaaagttgtatcttcagaggtcaaatttttttaagtgctttttgtttcaaagattcacttgtctgtgaacttgatgttcaccatccttccatggtagtggaagtttgattgagctacattcttgacaatctttgcacatacagtctcaactgttaactg

SEQ ID NO: 5614 - DNA, 447 bp, Glycine max
agaaagaagatgatgaagcttttgatgaatcattccgtgaagatcgctccccgaagcttgaggctttgataaccaagattttccctcaacggtactcttttttaaaattacctaatactcgtgcctcaaaggcttcaagagcgagttattggttagcttgtctaatctcacttgttgagcagacacgatatttaaaatttcgaaagtggcctgttgagtggggttggtgccgagaccttcaatcatttatttttgtttttgagagacataacaggatagtgctggagcgccctgaatatggttatgcaacctacttctttgcgctgcttgaagccgctcaaggatttgcagaaggatcctcctacctcatgcagtgcaggccctgtggctgaggacatgtttcactggcaagccacaatcatgggacctgctgatagcccatatgca

SEQ ID NO: 5615 - DNA, 845 bp, Glycine max
  unsure (1)..(845): unsure at all n locations
gggcccacgcgtacgcttttgggctttatctccgcctatgacccacatatggcttcgtgacgcgtgctggaggacctcaaggatttgcagaaggatcctcctacgtcatgcagcgcaggtcctgtggctgaagacatgtttcactggcaagccacaatcatgggacctgctgatagcccatatgcaggtggtgttttcttagtttcaattcattttcctcctgactatcccttcaagccaccaaaggttgctgttcggactaaggtgttccacccaaacatcaacagctatggcagtatatgccttgacattctgaaggaacaatggagcccagctctaaccatttccaaggtccttttgtccatttgctcactgttgacggatcccaaccctgatgacccgcttgtgcctgaaattgcccacatgtacaagactgacagggctaagtatgaagccactgctcgtagctggacacagaagtatgccatgggatgatcatgctcctcctttagctgcacaatcatgatttttatgaagaaacaaaatttacttttaatgaatgttttatctttttttgtcagtgtaaatcaaccatggtaagggaattgattgtcactttgtgaatatttctttgcaagacatcggtcatggtctcatgcaagaaattgtattataatgtcacaatttttctgcttgttgactagctattctaaatgatggtaatcaaattatagttaggaacaggtactatcggcttattgacgtggaatttgatctttttgggcttgggacaaaaaaaaatctcgagtgggattataaaatcatcaaatagactncttatttta

SEQ ID NO: 5616 - DNA, 284 bp, Glycine max
ctgagattgcacacatgtacaagaccgacagggccaagtatgaggctacagcccgcagctggacccagaagtatgccatgggatgaccgtattgagtttttagctgttcaatgaagctgcaaaatcataatttatgtaaaagaacaaaagatcttttgaacggaatttgaatgctttcttttattattagtgaaactccacaatggtaagaagagacccggttgccaatttgtgaatattttctttgctatggaagaatgtaatgttatgcaaacttttctgca

SEQ ID NO: 5617 - DNA, 423 bp, Glycine max
ttcatataatattgcttcttggttcattctagctaattttgatggctcttccaatttgtctcaccgttattgcaattttcaccctttgttgtgtcattaattgtaacaatggcgttgaagcgtttcatgacatatacccggatcttcaatccatttcagcacgttcggtgagcaaacttcagagaactggataccattttcaacctcgtaagaattggatcaatgatccaaatgggcccatgtactacaatggaatctaccatctattttaccaatacaacccaaaaggagcagtttggggcaacatagtgtggggacacgcagtatcaaaggacctcatcaattggaaagaacttgaacctgccctatacccatcaaaaccctttgacaaatactgggtttggtccgggtcagccactgtac

SEQ ID NO: 5618 - DNA, 668 bp, Glycine max
cggtcgacgcctcgactcgagccgcaaatttctcctcctggtactctcgttttcgtttttcggccaagtacttgtactgctaccaccgcactctccacaaaaacgcacccagcaccatcttcaacaaccacggaaccaggaagaacgcatggccaacctctctgcttcctttggcgctcgctgtttccgctggatcactcgctcttcaaccacacttcaatccttccttctgcgacaccgacgacagaggtgtgggtgttgggggcaaaggcagcacgcaatacgttgttaagggatcacagaaagaatttccgcgggagcttcttcaggatttgaaaatcgtctgtcaggataacatatctcttgattatgatgaaagatatatccatggaaaaccacaaaacagctttcacaaggctgtcaatatcccagatgtgattgtttatccaagatccgaagaggaggtctctaagattgtcaaattatgcaacagtcataaggttcctattgtaccatatggtggagctacatcaattgagggtcacaccttatcccctcatggaggagtttgcattgacatgtcattaatgaaaagagtgaaagaattacatgttaatgacatggatgtgttgttgagcctggcattggatggatggagcttaatgagt

SEQ ID NO: 5619 - DNA, 459 bp, Glycine max
cgagcatctttactctctctttcccctaattccgaccatggaagccacggcctccgcaatgagcttcgcccttccctcaacaaaagcccaagcccaagcccaactcctgacccggcccaccaatccattcaccattccctcccgcagcccagcccaccgccccccgccgcgcctccccaccatccgcgccgcaattccccgcacaaagaaagaggcaacggtggagactgtgcgggagcagctcgagaactgttacctcctcgccggcatcaactacaagggcttcacggtgaagcagttccaggagcttcgaaagacgctcccagaaacaacgaaactgatcgtggcgaagaacacgctcgtttacaaggccgtggaaggcacgccctgggagacgctgaagccctgcatgaagggcatgaacgtgtggctcttcgtccacaccgaggagatcccttc

SEQ ID NO: 5620 - DNA, 250 bp, Glycine max
gcccaactcctggcccggcccaccaacccattcaccgtcccctcccgcggcccggcgcgcctccccaccatccgtgccgccattccccgcagcaagacagaggcaacggtggagacagtgcggtagcggctggagaactgctacctcctggccggcatcaactacaagggcttcaccgtgaagcagttccaggagctccggaagacgctcccggaaacaaggaagctgatcgtggcgaagaacacactcg

SEQ ID NO: 5621 - DNA, 674 bp, Glycine max
cgaagcaagacgcacttgatctcttgcaaggacattatatagtttctgttggccgagatacagctgccactgctgagaaaggaggccttgaagctatagcttcatttcctctggctttgggtctgggtttgactggtttcctctgtgcaaccatgtcactgaggcaagttcaatatgatttccggcacatcttcttttcactaatgtgggcgggcattagcatcggcatagcagcatttgtgagggccaatggccgtgttttctgcaacagaccacgcctacacaatccccggtgataacttctattcagacaagtttgagcaattgaaatttttatgtgaagtgttcagcttccgcagcaggagtcactggcagaggtcttagttctacatctagatcactttaacgatcaatatttacatgaggctccttcttgaatcttattatatttattctttcttactaatttgtaatcaatgtagcttccagatatacattcgtaccatagccctatcgaaccccatttgagtgattgctactttaccggtgtttcttacacaccgtatcctccctgtatatctgagtttctatttgtgtcgtctttaaaagattatggaaacatttgaaggttcttaggaaacacattgatttgattatcttctattcttttaagt

SEQ ID NO: 5622 - DNA, 424 bp, Glycine max
ggagaagggggttcaagagtaaagaaagcactcagctatttcatgtgagagtttttctattgctgacatgtcccctctcccccgcagcctccatctcctgaagcttgcatctatagttttgccaaattttatcgcttaagggtttgctgttgagccatttcgtttgtaaaatgaaatataggtttttatttataaagttatttttattacatttgggatgatgggttttgaaaaggagtggagccttccaaaattttggtttgttctgctgcttttgttttgttcctcatccctgaaggacgtcttatttcaagttataaaagttctactagatgaaaagataaagtagtcaggtgatcctgtgatatatttgttctcttatctatcgaaatctgctggaataataagcatttagatcctttct

SEQ ID NO: 5623 - DNA, 460 bp, Glycine max
ggcgtcatttcatttccaccaaacaccaaagaaagaggtgaagtcaaatggtccttagttctgggagtgttgatgcttgagtcttgacggaacgaacggaaaaggggatctcaatggacaacaccaagccccttatcgaactggaactcgacgatgatggcagaatcagaagaaccgggaatgtgtggactgctagcatacacattataacagtggttgtaggggcaggggtgctgtctttggcatgggttatggcacaactaggatggttagctggcatagccagtatcattaccttttcagctgtctccattttcacttacaatcttgtagctgattgttacagatatccagaccctgtcactggcaagagaaattatacttatatgcaagctgtcaaggcttacttaggtggaacaatgcatgttgtttgtggaatggttcaatataccaagctcgc

SEQ ID NO: 5624 - DNA, 992 bp, Glycine max
cggctcgagaatctttcaagttctagcaatcctcatattataaatagagctgattgaatcacaccccatatccaatcgaaaaaaattgataacatcacacagcattagtatgtatcagcaacaagggtcagatccaacaaagcaatcaccggcaaccggttttccggtgagctatagcaattcaacaacgtattcgaccaacgaggcttcctacgctccagtcccacctccccagcccaaacctcttgtcgattggtccaccggcctctgtgactgcttctccgaatgtggaaactgttgcatgacgtgttggtgtccatgtgttacctttggccgagttgcagaaattgttgacaagggatccacatcatgtggtgctagtggggctctgtatacgctgatttgctgtgtcattggctgtggctgcctatactcttgcttctaccgccccaagatgagacgacagtatggtctaaagggaaatggttgttcggattgcttgactcattgcttctgcgagccctgcgccctctgtcaagaatatcgtgagcttcaacaccgtggatttgacatgattattgggtggcatggaaatgtcgagcaacgaagtcggggagtagccatgactgctacaacagctccatcagtcgaaaatggcatgagccgttgaatagtatgcagttctgtaactaagacaatgtgtctacgatgcttgtgttaaacatgaagaataataatgtttgaagaatggttcattcctttttttcgatccccttttcatattaatagttgtcatttaaattaatgttagactacttttataatagatgcggtgttacaacgtatctttttctgtatccaattgtggcaacgaggatacaatataagttcttatgcatttatcttaacttccgccgctaggctgatcgtagtggtttacaatgcatctatttataaaataaaataaaagacaatggatctatttatccttt

SEQ ID NO: 5625 - DNA, 556 bp, Glycine max
aaaatctaaatgcctctttcttatttcccgtaatttgagttcttctctctattcccttcttcaacatttttagcttcttctctttctcaaatccccctatcttcaaaatttcaaggttatcactctaaagacagatttttttcttaaatgactgtggctatggctgtttggagtgctggtcttcacttcagtgctgctacgaagcctcatagtagcttgaggcctttggagaaaatcatttgcactgcccctttcttcaaggcctcatctgggtttgctgctactaagccattctgcatccttaacacaacaagattgtcatattctggaactacaattatccctcgagcagcacctgttactgatgtggaggacgggaatcatggtgagactgataccattccaactcccgtagttataattgaccaagactctgatcctgatgctaccgtggtggagataacttttggtgatcggcttggagcacttcttgacacaatgaatgcataaaaaacttaggtctcaatgttgttaaggcaaatgtctttctggattc

SEQ ID NO: 5626 - DNA, 464 bp, Glycine max
ggatgcctctttcttatttcccgtaatttgtgtccttctctctaatcccccttcaacattttcgcttcttctctttctcaaatccctatcttcaaaatttcaagattatcactttaaagacagattttgttttttttgacaaaaaaaatgactctggctatggctgtttggagtgctggtcttcacttcagtgctgctcgtagtagcttgagacctttggagaaaaccatttgcactgcccctttcttgaaggcgtcatctgggtttgctgctactaagccattctgcatccttaacacaacaagattgtcatattctggaactacaattatccctcgagcagcacctgttactgatgtgaaggatgggaatcaaggtgagactgataccattccaactcccgtagttataattgaccaagactctgatcccgatgctaccgtggtggagataacttttggtga

SEQ ID NO: 5627 - DNA, 550 bp, Glycine max
ggtccaaggccaatcaattgagggtaattcgggggcccaattctcacgggaaaacattaataacactggtggagtatgattgtgttgcgaagtggtctctcacttaggtcattccccgcagtttttaggaagccctcaatacattggatatgttttgtgttacgccaaagtatatcatatcatgcacctgcagtgggcaagcaggaatgccattaccagactatgaccagtaaaatacaggactgcatgggtttctatatcaatgaattttacaattccttgaccttggtaaaccttaattggccaaggagagactccactaaagaggaacaatgtcctgccattttgtatttgacaaaatggcttatttgggattgagttttgaatgctgatctaatgagaagttttcgtagcctcgcagggattgcaagtttaagtagcaataagtattttgtatgtacagtatagcaacagatgtaaacacagaataagcctttaatcagtgagtgacttgaacagcattcataaccccaaagatgccccatgcagt

SEQ ID NO: 5628 - DNA, 733 bp, Glycine max
cggctcgcgctctcaaggccactgattttggtctctctgtcttcattgaacaagggaaggtttaccatgatatggttggcggtgcttactatgttgctcctgaggtattgcgtcgtagttatggaaaggaaatagatatttggagtgcaggcatcatattgtatattcttctgagtggtgtaccacctttttgggctgaaactgaaaagggaatatttaatgccatattggaaggtgaaattgattttgtaagtgaaccatggccatccatatcagacagtgctaaagacctagtcaggaagatgctgacacaggatccaaacaagcggattacttcttctcaagtccttgaacacccatggatgagagaaggtggagatgcatctgataaaccaatcgatagtgcagttctatccagaatgaaacaattcagggcaatgaataagctcaagaagctagcattgaaggttatcgctgaaaatctatcagaagaggagattaaaggtctcaaagcaatgtttgccaacatggacactgacaatagtggcactatcacctatgaagaattaaagactggcttggctcgaatcggatcaagactgtccgaggctgaagtgaagcaactcatggatgcggctgatgttgacggaaatgggtcgattgactatcttgaattcatttcggctacaatgcataggcacagacttgatcgtgatgaacatctttacaaagc

SEQ ID NO: 5629 - DNA, 473 bp, Glycine max
gcgttctcttcttctctctcaaaccagatttcaccctttctcagtttctctctctagaaaaaccaaaacctggctcctttttttagctctttccttatttagccttcacacactccaaactgtgaaatccatttttagcaaagtaaaaaaaagtgagccagtgtgagagagagtggtcatcagtcatcaccgttgattgattaagatgcagcaatcaaacggctctgattcgacgactacgatggagcagagcgcgccgccgcctccgaggcaatcaccggcggtggcgaggccgcagcagtgggtgccgatgcagtaccctgcggcggcggcgatggtaatgccgcaccacatgttgccgcctcagcattatgcgccgccgccgtacgtgccttaccaccaccagtacgcggcgcagccccagcaccagcaccagaacggatccggcggtgagaacaaaaccatctggatcg

SEQ ID NO: 5630 - DNA, 657 bp, Glycine max
cacagattcagcctttctcagtttctctctctagaaaaaccaaacctcgctactctcttctccctttttttttgtagttctttccttatttggccttcacactccgaactgcgaaatccttttttagcaaaaaaaaaaaaaaaaaagagtgagagagcgtgagacagagagagtggtcatcagtcatcaccgttgattgattaagatgcagcaatcaaacggctctgattcgtccacgacggagcagaaagcgccgccgccgaggcaatcaccggcggtggcgaggccgcagcaatggctgccgatgcagtaccctgcggcggcgatggtaatgccgcaccacatgttgccgcctcagcattacgcgccgccgccctacgtgcccttccaccaccaccaccaccatcaccaggacgcggcgccgcacgtgccgaaccaacatcagcagcagcagcagcatcaccaccatcagaacggatccggcggcgagaacaaaaccatctggatcggcgatttgcatcactggatggacgaaaactatctccatcgctgtttcgcttccaccggcgagatttcctccatcaaggttattcgcaataagcaaactggcttatcagagggttatggatttgtggagttctattcacatgctacagc

SEQ ID NO: 5631 - DNA, 905 bp, Glycine max
cctgctacctactgcaccagttcctagctcgcttcttctctgttctctctcatctcatcggatcgatcaagcatcagggagctttgagggttgattctctggtgtagtagcaatcagcacaatagaaaatgttttttgacggatatggatatcatgggacatcatttgagcagatatatcgatgctacccagcttcctttattgaaaagccccaaatcgaaagtggtgacaaaattatcatgcctccatcagcccttgaccgtctagcatctctgcatattgattacccaatgttgtttgaactccgtaatgatgctgccgagcgggtttctcattgtggggttctggagttcattgctgaggaaggcatgatatacatgccatactggatgatggagaacatgcttttacaagagggggacattgtcaaagtgaaaaatgtgacacttccaaaggggacatatgttaagttacagccccacacaaaagactttttggatatttccaatccaaaagctatcttagaaacaacattgaggaatttttcctgcttgactactggagatagcattatggtggcttacaacaacaagaaatattacatagatattatagaaactaagcctgacactgccataagcataattgagactgactgtgaggtggactttgctcctcccttggattacaaggaacctgaaaaacccactgcacccctttctgctgggaaggcagcagtggctgctgaggtgatccctgctgaagatgagcccaagttcaacccattttctggaactgggagacgcttggatggaaaacctttgaattatcagcctcctccagtttcctcttcagggtctaaggaccagaaaccctgatgttgcaattttgagtcttctacagct

SEQ ID NO: 5632 - DNA, 1009 bp, Glycine max
gacgagtaaactgggatatatattttgttcctgcgaacccaaaatcaaaatccctctcctgtgagcatgctgaaaggaacaacaaaaggaggtgaaatgggaggagaaggagggagagaaggggattgggagtgcagcagttgcaacaacaggaactacgccttcagatcattctgcaaccgatgcaagcaaccccgcctcctcgtcgacaccaaaaccccctctgattccaagtggctccctcgtattggcgattggatctgcaccggttgcactaacaacaattatgcatcaagagagaagtgcaagaagtgcggacaaccaaaggaggtagcagccatgccagcaattgcgatgaccggagcatctttccccacttattcacactatttttccagggccccaggagtaccagaacaaaagatgaatattggattgcttggcaatggtgcaccatcacagtcactgcatttaaactccaattggcctgttcctggagcagataagtacggtgtccagccactttccatatggctacctggtggaaattatggcactgtgcatcatcatgaaaattctaccaaccagaacctatctgttccaaagggatggcgcaatggggactggatctgtaactgtggcttccacaattactcatcccgctctcagtgtaaaaagtgcaatgcttttcctcctgcacttgggacaaagcggttagcttcagaagagttggtttatgattgggacaacaagagattgaatataggaactacaaatgatcagcatcaaatatatacaagtttagagcaagtggtagggacaggtgcagatccaaaacctggactcttcccctcttatcccagcatgaactcaactacagctccaagtttgccattggccacatggcttccacctcaagcttctgcacctgccctccttgcaaaaggagcaaggcactggcgaagtggagattggatgtgctcaaattgcaacaatcataattatgctt

SEQ ID NO: 5633 - DNA, 362 bp, Glycine max
  unsure (1)..(362): unsure at all n locations
gacacgagtaaactggcacatatcttcccttttccttccttcctctcccaaaatcaaaacccctctcctgtgttgttgtgagagaaaaacacagagacagagacagagggtagtagttgagttgagcgagtggggggaagtagcgaagaatgagtatgttgaaaggaggtgaaatgggtggagaaggagggagagaaggggattgggagtgcagcagttgcaacaacaggaactacgccttcagatcattctgcaacagatgcaagcaaccccgcctcctcgtcgattccaaaacccccgctgattccaagtggctcncccgtatcggcgattggatcntgcacggttgcactaacaacaat

SEQ ID NO: 5634 - DNA, 591 bp, Glycine max
cctgggttaagaaaactatatgcacccaatggaactttgttgaaagctggggatgtgtgtagaaatgttgaacttggtagcaccttggaggtagtggctgagcaagggccacaagctttctacaatggaaccattggtgaaaatttagtcaaggatgtcagagatgctggtgggattttaacaatggaggatttacacaattacaagttggaagtaacagatgcaacgactgtgaatgtgatgggatacaccatatatggaatgccacctccttcatctggaacacttgctctttctctggttctgaacatcttgggcagttatggaggttctaatgctgcaaggggaaatcttggtctacatcgactaatagaagctctgaaacacatgtgggctgttcgaatgaacttgggtgaccccaactttgtaaacattgatgatactatatccaaaatgctttccccatcttttgcaaaagatattcagcacatgatacttgataacactactttccctccagagtactatatgaacaggtggagtcaacttagcgattcacggacaagccatatgtgcattgtcgatgctgat

SEQ ID NO: 5635 - DNA, 419 bp, Glycine max
caaaggactaacccttccttggatctctttctacctcttttctccgcgactggtttcagtttgaacctaaggcagagaagccagagagtctcctctgccttagagaaactctcacaatggcgtttcaggactttgatctcatctcagagaggagaaggaacgagaagaggcaaaaggcgaggaagaggatcatgattggcgtggtctcttccgttgtcctcgttgccatgataggtgcagtactcttcgttgtggttagaaacgacaacgaagcaggcaacaaaaaaagcaatgaaaacaagtcacatggccattcacaacaatctaccacccccggcaaggatcacgttgtggcgcattccaagatggtgaaattggtgtgcagctccgcggactacaaggaaaaatgtgaagacccc

SEQ ID NO: 5636 - DNA, 558 bp, Glycine max
aaagcaattagtaaatcactaaatccagaaggggaaaaaaagagagaaaagaaatcaggggtaaactttctctctctcccttgcttattcctcccaaaagaaaaagacggtttccgttggaaggaagaaagaaagaaattgagtttgagatctgattgggcggcgacgatggagaacaacgacagtatcatatcgcgggagaagatcgaccaggcggccgtgtggctcggctccgccgtctcttccgctttcttttcctctttggaacgcttttcctgcgtcaacgtcgccacctctgaccccgacaacgacgaagacgacgacgattattactccaccaccaccgccactcccaccgccgcatccaccaccaccactagccctccctccattcagatcgacgggaaaaaaacaaacgacgtctccaacctccccgtttgagacaatataacgacgacgtcgttgctgcgctgtgtatagacctttttccttttccttctttcgagtgtgttatgtaaggaatcccgattttcatttcttcatactttcgacgtcgtg

SEQ ID NO: 5637 - DNA, 780 bp, Glycine max
  unsure (1)..(780): unsure at all n locations
gcagtgggtgtgatctgaaagtgaaggtgaagaaatgcttcttcaaacgaggcaatttggcacagcgtgtccatgggtcagactcacacccgcaagcaaaagaaatagctcagtctcattgagaaggagcaattgtggcccaaaatgttcggtgtcccaattggaattgaagagtgagagtgagagcaaaacgaagccgtatccagcagaggcatcgaggaccataatggagttggctaaggtgggcacgctgtgtacgttgacccaagagggtttgccccttggtactggggttcgattcgcggttgaccctgaacatggcactcccttgttctgcttcaattccactgacaacactaacatcccctcttctcttcatgttcagtttgaacaatttggattgcgcactcctcagtgcactattcaaggaacccttaccaaaccacaggatccaaagcgtcttgtttctgtgtggaggaaaaggtttggagaagaagttgatcgagattttatttacattaattgccgtggatcgggtactccaattggaagacattcaggaggatggcatatgggtcacctcttcagattacaaaaatgctcaacccgatcctcttcgagactctgcacacaacttagtcactgaaatcaacaccaacaatatggaagacattactcgcttttgcaatgtctacgttgatttggatttcctggtctccgaggcaaagatgctatgggttgatcgcttgngctttgacatgcgtttgtcttcccctcaca

SEQ ID NO: 5638 - DNA, 449 bp, Glycine max
aggatctctccaagactctcatgaggacaggatcagctgtttaggtttgtcagctgatggaagtgccttgtgtacaggaagttgggacacaaacttaaagatatgggcgtttggggggcataggaggacaacttaaagccattgaaggcaaggccaaataggggacgaattgcgtacaactcttcattttagccttgcaactattgcatcagtttgtttatgctcatgtccgtttgtccatgtgtgtgatctagtactactttttccattgtactacccacttctctaactataccatttccttataactatgatattatactactttaaaagacctaatgactgattagctatggagctttctgaaagtgtttcctactatataaaattaaaatttcattttcctttttaaaaaaaaaaaaaaaagggctgtctgcgactattgagct

SEQ ID NO: 5639 - DNA, 367 bp, Glycine max
caagactctcatgaggacaggatcagctgcttaggtttgtcagctgatggaagtgccttgtgtacaggaagttgggacacaaacttaaagatatgggcatttggacggcataggaggacaacttaagccattgcgggaaggtcaaattggagacgaattgcgtgctaatttatataacccttcattttagccttgcaactcatgtccgtttgtccatgtgtgtgatctcagtaccttttccattgtacgacccactccgccaactgtaccattcccttataactatgatcattataatacttaaaggtgtgaacagctacagatcttcctgaaagtggccccaactatataaaatgaaaatttgcat

SEQ ID NO: 5640 - DNA, 536 bp, Glycine max
tttccttatcagcagccaccgtcgcatccatccatgaatccgcctcaactacaatcttcacttggtcaccatgttgaggaaccaccttatcctcctcagaattatcctcccaatgtccgccagccaccatctcagtcacccaccggtccttctcctccccaacagttctatgggacaccacctcatgcatatgaaccaccatcaagcagatctggttcaggctattcttctggatatggtacactatctggccctgccgagcaatatcgttatggtggaccacctcagtatgctggcactcctgcactaaaaccacaacaactgccaactgcttcagtggctccgagtggtggtagcggttaccctcagctcccaactgccagggtactcccgcaagcaataccaactgcatctgcattgagtggtggctcaggttctgctggaactggaggcagggtttctgtcaataatttggtcaacaaattttctacaatgggattccctaaagaccatttaagggccacggttcgaaacct

SEQ ID NO: 5641 - DNA, 767 bp, Glycine max
aagtcatttgatgaactctgcaaggtcatcaaggacattctgggagacaaagtggagaaggttgttgtctctgacagaattgttgattccccttgctgcttggtgactggtgaatatggatggagtgcaaacatggagaggatcatgaaggcacaggctctgagagacagcagcatgagtggctacatgtctagcaagaagacgatggagatcaaccctgacaatggtatcatggaggagttgaggaagagggctgaagctgataagaatgacaagtctgttaaggaccttgtgttgcttctctttgagactgcccttttgacttcaggtttcagccttgatgatcccaacacatttgcttcgaggattcacaggatgttgaagctgggtcttagcattgatgaggatgacaatggtggagacgatgttgatatgcccccattggaagaggacggtgctgaggagagcaagatggaggaagtggactaaatgccaaaggtctcgtgttaaatgaattgtggttcgtgtctgttaaatggtggtggatgcagaagtcttttagttttatctttctttttgttttgtttttttgagatatatagggtttttactttttaagtttttgtgatgtgaaaaaaatgtgtctgtcagtctgtgtgttgcatctacctacttttgtcagttattgttccggatataacatcttttgtcagtaattgttctggatataacatcaatgaaggagaacaagtattacttcctcaaaa

SEQ ID NO: 5642 - DNA, 975 bp, Glycine max
gtattgggtcacctccacaaagcttcagagttgtgtttgatactggaagctcgaacctgtgggtcccttctgccaaatgtgtcttgtctattgcttgctatttccattccaagtatagatcgaagctatctaacacctatacgaaaataggaacaccttgcaagatcccttatggccgtgggcacattcctggcttcatcagccaagataatataagagttggggacatcatcatcaaagatcaacaatttgctgagattacaaaggaaggaccgctggcgtttttagcaatgcattttgatgggatacttggacttggattccagaataagtcagtgggacaagtcacaccagtgtggtacaatatgatagaacaagggctcgtgactcaaaagattttctccctttggctaaaccaagaccctgtggcaaagctagggggtgagattgtctttggtgggattgactggaggcactttaagggtgaacacacttatgttccacttactcaaaaggattattggcagattgaggtgggagatattctaattgcaaacaatccaacagggctatgtgagggtggctgtgctgctattattgactcagggacctctttgattgccggtccaacaaaaattgtgactcaaattaaccgtgccattggagcagaaggatatgtgagttatgaatgtaaaaacatcatccataactacggtgattcaatatgggaatatataatttctgggttaaagcctgaaattatttgtgttgacattggactctgctcgcgtaatagaacatttataacaaatgatgttattgaatcagctacacataatgaaagttggggcgagtcacgaacaaaggagagccccttgtgtactttttgtgacatgattgtcttttggatgcaagttcagcttaagcaaaagaatacaaaggaaaaaatattaaaatatgtggatgagctgtgtg

SEQ ID NO: 5643 - DNA, 888 bp, Glycine max
cggattcgtgggcggacgcgtgggcggacgcgtgggttcaagatgaacaatgatggagctcaggtacctccaccctcgcagagggagaagtttaattcagacgagtccattagggttcaggggaagaatggtgttttgaaggtaatggttaataagaagaaggtgggtggtacatcagaacagtattatgatcatcacaaacccttggaaagcaggcaaaggttgaagaccgaagaaactgccaagaggttgaagaccgaagagactgccaagaggtttgaagactcgacggggactgccaagaaggaatatcccaattcttaaaaaaaatgaaaagaaacctgttgataaaccagcattacttaagaggccagagaagaaaaggacagcatcaagaaaatcgttgtcaagcaaaggacagtaagggtgatgagggggattcagataccagtgacacatcattgaatccaagaataagaaatactgaagctcgtaagtctgtgaaaaaaataatctctgaggatgagcagactcctgtgcgccaaaaaaccccaaccacaagaacgaaagaaggaaaactcaagcgtggtagtggtacagaaaaacaaaaactgcgggaacaaataagggagatgctgctgaattcaggttggacgatagactatcgacctcggaggaacagagactacctggatgctgtttacattaatccagctggtacagcctattggtctatcatcaaggcctatgatgctcttcaaaagcaattgaatgatgatgctgatgaggtcaagcccaaaggggatagttcttcttttgctcctattgcagatgaagttctcagtcagctaacaaggaaaactaggaagaaaatggagaaagaattgc

SEQ ID NO: 5644 - DNA, 950 bp, Glycine max
gaccattccaaattaatctgattctctattgtgcgttgccctgcttcagcttcagcttcatagggcttgttggcggtgtcataactcgtaagaacacaaagctcatcgaatcgaagtccttcattttcattctcttccttgtcactgatcgtcatgtacagagttgcagcatcatcattcagaaggcatctcaagggccatggaggtaacttgggatccactaggttttcaacttcagccgcggtagctgcaaggacttcatcaggtggtttgtttagctggcttactggagagcgttctagtgctcttcctcctctggacatgccccttggtggtgttgctctccccgattcacttccagattacgtcgaacaaagcaagaccaagatcacaacactccccaatggactcaaaattgcgtcagagacctctcctaaccctgcagcttcaattgggttatatcttgactgtggttccatctatgagacgccattgtcaagcggggtttcacacttgctagagagaatggctttcaaaagcacaacaaaccgtagtcactttcgtattgtaagggaagtagaagcaattggtggtaatgtaggagcctcagcctctcgggagcaaatgggttatacatttgatgccttaaagacctatgctccacaaatggttgaattactggttgactgtgtaaggcacccagccttcttggattgggaagtcaatgaagagcttcggaaagtaaaagcagagcttggagaactctctaacaatccccagggcttgcttttggaagcaattcactctgctggttattctggtgcattggcttttcctcttttggctcctgaagcagcactgaacagattggacggccccaatttagaggaatttgttgttgagaattacacagcacctagaatggtacttgcagcatctggggttgagca

SEQ ID NO: 5645 - DNA, 586 bp, Glycine max
gtagaattaacaaatcactttgaaggggggaaactgttgttagcacaataacttcaaacaaacgtaatgtaaacaaacgttgtatgtattatacagtttggcctggttgcctgctatatattttgaaaagcttaaaggagataatctaaatcaaaatatcacaaaattcttctaaatcttcacaagtttgacccatcatttgagatactcacgcttgacgcttgtatcttgtatttctgaaattatctatttgaacttgacagaacttcaaacaatccacagcaactcaaccaggaggtcttttgcaccaaatttggagccaatgctacatgaggcattggtaaatttagtgaaaggactagcagacggtgaagttaacattttactatcacattcctttggcttaggctcctccacacttgacattgtaagggaagtagaagcaattggtggaaatataggagcctcagcctctcgggagcaaatgggttatacatttgatgcattaaagacctatgctccacaaatggttgaattactggttgactgtgtaaggaacccagccttcttggattgggaagtcaat

SEQ ID NO: 5646 - DNA, 297 bp, Glycine max
ctcaactcttctactcaaattcaatttctctgagacagtgaaaatatccccgttaagataagatgatgatgaaatcatcatattcttcatacctttctatattattcctatttttccttctccttgtggataaatccctctccaaatccggtgcacgtttttctctaaccagagcagtgttcatgccgcaccacccagtgattggtggttcccaatgggatcaaaccgtggagaccgtggaacagcaagagtctgctccacaaccaacgaagcatatcaaaaggctcttcaaaatca

SEQ ID NO: 5647 - DNA, 485 bp, Glycine max
  unsure (1)..(485): unsure at all n locations
gattgaacctttctcccttcttcccacccagcgcatggtccttcctgaaaattcctcaatttctccgccaatcccaatctggttcctctcgcgctagggttttagtcttagctcactctcatcacaaccctaacaacacaaatttcccactttctagggtttcgtttcatccaccatggccgagtggcagtccctcctccaatcgattttcgtcggcctcattttctcctaccttctcgccaagctcatttccatcgtcgtttccttcaaagacgacaatctcaccgtcacgcgcgccgccgccgccgaaaccaccacaaccacgcgcgacgacgccgtttcctccgatgcgcgccctttcgaggaggagtcgatggtggccgagcacggcagcgtgaggaacgatagtgacggcgactacgacgacgacgactgngaaggcgtggagagcaccgaattggacgaggcgttcagcgccgcgacgg

SEQ ID NO: 5648 - DNA, 426 bp, Glycine max
agcgcatggtcctttctgaaaattcctccgcaatgttcctcaatttctccgccaatactcccaagttggttcctctcgcgctagggttttagtctacagctcattctcacacacaaccctaacaacacaaatttcccactttctagggtttcctttcgtcatccaccatggccgagtggcagtccctcctccaatcgattctcgtcggcctcattttctcttaccttctagccaagctcatctccatcgtcgtttccttcaaagacgacaatctcaccgtcacgcgcgcctccgccgccgaaaccaccgccacgcgcgcggaacaattcgaggatgctctgaagcgcgacgacgccgtttcctccgatgcgcgccccttcgaggaggagtcggtcgtggccgagcacggcagcgtgaggatcgaca

SEQ ID NO: 5649 - DNA, 520 bp, Glycine max
cccactcccacccctcaccctgcaccaatgagcaacctccctacaactcaagggaaagccatccctgatgcctccgactacaagggccgccccgccgagcgctctaaaaccggtggttggaccgcttccgccatgatattaggaggagaagtgatggagaggttgacaacactaggcatcgcggtgaatttggtaacatatttgactgggaccatgcatttgggtaatgctgcctctgccaacgttgtaaccaacttcttgggaacctccttcatgctctgtctgctcggtggcttcctcgccgatactttcctcggaagataccgcaccatcgccatcttcgctgccgttcaagcaactggtgtgacaatcttgacaatatcaaccataattccgagccttcaccctccaaagtgcaacggagacaccgtgccaccttgcgtgagagcaaatgagaaacaattaacggtgctttatttggcgctttatgtaacggcgctcggcaccggacgtttgaaat

SEQ ID NO: 5650 - DNA, 622 bp, Glycine max
caaaaagtcactgcaataaaaaggttgtgggggcaagagtgttctaccatggatatgaagcagcaattggtagaattaatgagcaaaaagagtataagtcaccaagagatcaagatgggcatggcactcacacagcagctacagttggaggctctcctgtgcatggagctaaccttctaggttatgctaatggcacagcccgaggaatggctccaggtgcaaggattgcagcctacaaagtgtgttgggttggtggttgcttcagctcagatattgtgtcagctattgataaagctgtggctgatggagtgaatgttctttccatctctttgggtggtggagtctcctcttattacagagatagtttatcagtggcagcatttggagcaatggagaggggtgtttttgtttcatgttctgctggaaatgcaggacctgaccctgccagcctcaccaatgtgtcaccatggatcaccacagttggagccagcacaatggatagggattttccagcggatgttaggcttgggaatggcaaaaaagtgactggagtttcactctataaagggaaaaatgtgctatcaattgagaaacaataccctttggtgtacatggggagcaa

SEQ ID NO: 5651 - DNA, 953 bp, Glycine max
ctagagccgctcgtcgaccgcaaaagagaaaaaaacaaaaatgctgagaatcgctcgctagcgcgaagacaattgttcgaacggggtcgttggaggcgccaccattggggattagggttctgcctcggctctaccacgagagggtggtggaccactacgataacccccgcaacgttggatccttcgacaagaacgaccccaccgtcggaacgggtcttgtcggagcacccgcgtgtggtgacgtcatgaaactccagattaaggttgatgacaaaacggggaagatcgtcgatgctcgcttcaaaaccttcggttgtggatccgccattgcttcttcctccgtcgctactgaatgggtgaagggaaagcaaatggaggaagttttgaccattaaaaacactgaaattgcaaagcatctttcacttccaccagtcaagcttcactgcagcatgcttgctgaggatgctataaaagcagctgttaaagattatgaagctaagcgtgcctcagcatctgctggtggacaggcaacaactggagagaaagctgtcactgcttgagtacttcatttctagaatgatgatgaaaacaaccaatagtgtggttttctgacaggactcgatggacactgtatgaacatcttgaggtcagacttctcttggttggagctagtcattgtgattggattgtattaatgtgaagtaaatacttgtgtcgctagctgctgtttgttatctgcatggtttatagaagtcaaaccatgtttttattaaaatatgtacacaatagaataaagctatgatatttacatggggaacttggaaccatgtaaatacctttcctaaagcaaatagcgactcatatttaccctattttggtttggaccttatttatctgtcattcaacttaatacgtttctctgacaaaaaaaaaataataaaaaaatacaatag

SEQ ID NO: 5652 - DNA, 740 bp, Glycine max
tccggaatttccgggtcggaccaacccttccttccggttgcagaggcattcgtcactctcgtgtcgggtgaaggcgaaaaccaaatcaagatgctgagagtgggcgcaaagaggcttttgggaacgacgtcgttgggcgttagggttccggcgaggctgtaccacgagagggttgtggatcactacgacaacccccggaacgttggatcgttagacaagaacgacccgagcgtggggacgggtttggtgggggcgccggcgtgcggcgacgtgatgaagctccagattaaggtcgacgacaaaaccggaaaaatcgtcgatgctcgattcaagactttcggttgtggctccgccattgcttcttcctccgtcgctactgagtgggtgaagggaaagcaaatggaggaagttctgactataaaaaatactgaaattgcaaagcatctttcacttccaccagttaagctccactgcagcatgcttgctgaagatgctatcaaagcggccgttaaagactatgaagctaagcgtgctaaggcaactgctagcggagaggcagcaacagaagagaagcctgccactgcatgatttctttcatatatagaaagaatgatgacgaaaacaaccgtgtgtttgtttgtttattcttaatcagattcttatcgaagagcaccttcacttgagactttgggttggacttagctggagagtattcacattctgtgaactaaatatttgaa

SEQ ID NO: 5653 - DNA, 423 bp, Glycine max
tgaattctatcatgtttcctgtcatggataaaataatcaaagctttgtgtgatatggctaaagataatgcacatgttcctatgctttcccgcactcatggacagccagcttcaccaactactttgggaaaggaaatggcgatctttgctgcaagattaagcagagaaaggaaggatctgtctcaggttgagatagtggggaaatttgctggtgcggttggaaattacaatgcacatattgttgcatatcctgatgttaactggcctcacattgcagaacagtttgtacactctcttggattaagttttaatccttatgttgctcagattgaaactcatgactacatggcaaagctttttcatttgctcatccagttcaataatatattaatcgattttgatagagatgtatggggctatatat

SEQ ID NO: 5654 - DNA, 845 bp, Glycine max
aattattttattttattggcgaatgttggtggttggttgggatgggattccaacccataacctatgtgcttccctttttccttcttttctttctttacaatttagaccaaccttgtatctctatcattctgaattattaacgttgtcgtgttttgtgttttgtgttgtgcaggggacaattatctgaagccgtatgtaatttcggaaccggaggtaacggtaactgagcgtagtgaggaggatgagtgtttgatattagggagtgatgggctatgggacacagtgcaaaacgacatcgcatgcaaagtggtgcggatgtgtctgaacgcgcagaagccgccatcgccgccctcgtctccgaggagggagatggcggtggactgctccgacaaggcttgctccaacgcctccattctgctgaccaaattggcgttggttaggcagagttccgacaatgtgagcgtggtggtggttgatttgaggagaacctaaaatgggaactgtgcgtggacacccgatgttgtggaattttgtttttgacaaaagaaaggggaagaaaatgcagggtgttgcgtggtgctttactgatttcttgtgattgtaattaaaatagtacttgtagataggtattttaatcaacgggggtgtgtgaaatttgtaattgtcagaaaaattatcaacaaattatgggaaattttaagagtagtgaaaacaattagtgtgtcaaccaagaggtaaatcagcctcctgaaacaccgttgtttttgttgtaattagatatataattgtaattgaaacccagcttggatctataaacgcgccaattttgttgtttggtttgcatt

SEQ ID NO: 5655 - DNA, 1240 bp, Glycine max
gcgtttcatttcccatataagactcataaccgttcgttcgttcgttcgttccccacttgcttttcattttttttctcccttttcgctaacctcaaagagagttcagtatttatacaaataaaagttttttctttttttatttctggttttcgttttggaatggctgggatttgctgtggagttgttggagaagccgccgagacttcttctcccatcgaacccacctcacgcccttccgcacgccggagtttggaccttttgcccttgaaatacatagctgctgacgtgtcagtcccgccgctggagaacagccggaagcgccagaggctggataggcgcgcttctccggcaagggagtgcgataacgcggttcatagttccaaatcgaaggtagttgaggttgttccgaattattcttcgaagagtccaacgttggactccacaagtccaacagttgtcgaggagtatccgaggtatggggtaacgtccgtttgtggaaggaggagggacatggaagacgccgtttcggtccatccatcgttttgccaggaaaatttatctcaagatgataagaaagagtttcatttcttcgctgtcttcgacggccacggttgctcacatgtggcgactatgtgtaaggagaggttacacgaaatagtgaaggaagagattcacaaagcgaaggagaatttggaatgggaatcaacgatgaagaagtgtttcgcgcgcatggacgaagaggttctcaggtggagccagaacaacgagactccaaattgcaggtgcgagcttcaaaccccgcactgcgacgccgtaggctccaccgctgtcgtcgccgtcgtcacgccagagaaaatcatcgtcgccaactgcggcgattcacgcgccgtgctttgtcgcaacaaggtagccgtcccactctccgacgatcacaagccggaccggcccgacgagttgcttcggatccaagccgcgggagggcgcgtgatatattgggaccggcctagagtgcttggggtgttggctatgtccagagccataggggacaattatctgaagccgtatgtaatttcggaaccggaggtaacggtaactgagcgtagtgaggaggatgagtgtttgatattagggagtgatgggctatgggacacagtgcaaaacgacatcgcatgcaaaagtggtgcgtgatgtgtctgaacgcgcagaagccgtcatcgccgccctcgtctccgaagaggga

SEQ ID NO: 5656 - DNA, 525 bp, Glycine max
gaccgatcctgcgtttcatctcatatactactaacaccctcagaaccgttccccacttgcttttcaattttctttttttgcccttttcgccgccctcaaagagttcaaggatttatacaattaatagttttttaatttggaatggctggaatttgctgtggagttgttggagaatccggagagacttcttcctcttcaatcgaacccacctcgcgcccctccgctcgccggagtttggaccttttgcctttgagatacatagctgctgacgtgtcagtcccggcgccggagaacagccggaagcgccagaagctggatcggtgcgtttcttccgcaagggagtgcgaaaacgcggttcagagttccaaatcgaaggtagctaaggctgttcggaatcgttcttccaagattcttacgttggactcgacaagtccaacagtttacgaggggtgtctgaggtatggggtaacgtccgtttgtggaaggcggagagacatggaagacgccgtttcggtccgtccatcg

SEQ ID NO: 5657 - DNA, 595 bp, Glycine max
tctcacggcaattttataggtcctccaagaaagagagagagagagaggcaaacgaaaccaagggagaaaaacaaccaccgtccaaaccaccaccaacaacgtacgtcttacgttgttacatggccactcgtgttatcccaccaagaatcctaaggaagcttcgctacaacaccgccacaaaacccctcaactcctctcaccctcctctctccccgtctctctctccttctccctgcctcctacctgctccgctgccgtcccccgccgtgctccgtccctccgccgccgcctccgacgacctcagcttccgcgacgtcgaaaagctcttctcctctgtctccaccaccagcctcctccgctcctccgccgtgctgcacgccaccgccgtcgagcccatggttgacttcggcacatggctcttgcgatcaaatctcatgcacgtgcatggcatccgcgacctcatcctcgccaccgtccgcaacaccttcttcgaccacttttgcgccggcgaggacgccatcaccaccgctgccagcatccgccacctaaaccgtgccggcctccgcggcatgctcgtctacggcgtcgaagacgc

SEQ ID NO: 5658 - DNA, 1951 bp, Glycine max
ttctagatcccgagccgccgctcgcatatttacctttccttccttccacttccaattttcaataattcacgactccttccgagatctctctctctcgcccacaatccaaccatggcgaatacggggaatttagacgcggcgatagagcaattgctgaacgtggagaagcagatgaggctcgccggtgacgtggcgggtaccagaaaagcagccaccgatattttgcagctctgcttcgatgcacgagcctggaaaacactcaatgaccagattgtcgttttgtcaaaacgacgtggccagctcaagcaggctgtaacagctatggtgcaacaagctatgcaatatattgacgagacaccagatatcgaaactcgcatagaactcatcaaaacgttgaacagtgtgtctgcagggaagatatacgtggaaattgagagagctagattgatcaagaaacttgcaaagattaaggaagaacaagggcttatagctgaagctgctgatttgatgcaagaaattgcggtggaaacttttggtgccatggccaagactgagaaaattgcattcattctcgaacaagtccgtttgtgtctagatcgccaggattatgttcgtgcacaaatactctcaagaaagattagcccaagagtatttgatgccgatttatctaaggaaaagaaaaagcctaaagaaggtgataatgttgtagaagaggctcccgcagatataccatctttgctggagttgaagcagatatattacgaactaatgattcggtattattcccataacaatgattatcttgaaatttgccgttgctacaaggcaatatatgagattccatctgtcaaagaagaccctgccaagtggattccaatcctaaggaaaatatgttggtacttggttctagcgccctatgatccaatgcagtcaagccttctcaattccaccttggaggataagaatctatctgagattccaaacttcaagttacttttgaaacagctggttaccatggaggttatccaatggaccactctatgggatacatataagagtgattttgagaatgagaaggcctctgggaaatctttgggtgaaaaagcagcagaagatctgaggcaaagaataattgaacataatattcttgttgtatcaaaatactatgcaagaattacattgaagagacttgcagagcttttgtgcctcagtatacaggatgctgagaagcatctctcagatatggttgtgtctaaggcgctggtggcaaagattgataggccaatggggatagtctgtttccaaacagcaaaggatagcaatgacattcttaactcatgggcagcaaacttggagaaattgcttgatcttgtggagaagagttgtcatcaaatacacaaggaaaccatggtccataaagctgctttgaaggtttaagaaggttcacatactgtcacagggcatctcaatattgatgtgattttgtactgaagttgccttttcaggaaaatgttcttttgaactgtcaccgactgagttggtgaggaatttcgctaaacgacgatgctcgctttttctcttttatattctgtcactcatgcgttcagggtagagctggatatatgcatcatagtactgaaagtagcattgttgtatactaccggtacataccttaccactgacttatgacaggatcgtaaaagatcttgattgaagcagtggctggaaattgagtgtttgctcatttatattcttttgcctggttgatttttttcccctcttgtacctcttctttcttctctatattacattttcttgtgaaatttggacgtttcgtgctattttccctgatgacaagcaaaacacctatttatttgagtgcaatgatttggggttcacctgaagtgaacattcgccttatttgagaatttcttaaattatgatattatcc

SEQ ID NO: 5659 - DNA, 2367 bp, Glycine max
tccgcgaggagagagaaagtgcaagaattggaagagagagagagagagaggtttggtttgtgatgtggtagctttgaagatctagttcactgttgctcattttagtgtgtatctaatcgaagacgagggggttccgatgtcttctctcagtagggaattggtgttcctgatcttgcagtttctcgatgaggaaaagttcaaggagactgtgcacaagcttgagcaggagtcagggtttttctttaacatgaaatattttgaggatgaagtgcacaatggcaattgggatgaggtggagaaatacctctctggtttcacaaaggtggatgataataggtattccatgaagatattttttgagataaggaagcagaagtatctggaggctttagataagcatgaccggtccaaggctgtagaaatattagtgaaggatttgaaagtgtttgctacatttaatgaagaattgttcaaggaaatcacacagcttctgacattggaaaattttagggaaaatgaacaattgtcaaagtatggtgatacaaagtctgcacgagcaatcatgttggttgagctcaaaaagctaattgaagcgaatcccttatttcgtgacaaactgcaatttcccaaccttaaaaactcaaggttacggactctcatcaatcaaagcctgaattggcagcatcaactttgcaagaatccacggccaaatcccgacataaaaactctgtttgtggatcactcatgtggacaaccaaatggtgcacgagctccatcacctgctaataacccgctattaggtgccttaccaaaggctggaggatttcctccacttggtgcacatgggccttttcagcctactccagcaccggtgccaacacccctggctggttggatgtcaaatcctaccactgtagcacatgccgcagtttctggaggtggagctataggtcttggtgctccatctatgcctgctgctttgaagcatcctaggacccccccaactaatccttctgttgactatccatctggagactcagatcatgttgctaagagaaacaaggccaatgggaatatcagatgaggtaaatcttcctgtcaatgtgttgtcagctacattcccaggtcatggtcaacatagtcaagcttttaatgcacctgatgacatacctaagactgtcgtgcgaactctgaatcagggttcatctcctatgagcatggactttcatccaatgcaacaatctttgcttcttgttggtacatatgtgggggacattgctttgtgggaggtgggttctagggagcggttggtctcaaggaatttcaaagtttgggatcttagtgcatgttcaatgccctttcaggcggctcttgtcaaagatccgggtgtttctgtcaatcgtgtgatttggagtcctgatggtgctttgtttggagtcgcttactcaaggcacattgttcagatatactcttaccatggtggggatgaaattcgacagcacctggagattgatgctcatgttggtggagtaaatgatctagcgttttctcatccaaataagcaactatgtgtcataacctgtggtgatgataagaccattaaggtttgggatgctgctacgggtgcgaaacagtatactttcgaaggtcatgaggctccagtttattctgtctgcccgcattataaagaaaacattcagttcatcttttcaacagcgttagatgggaaaataaaagcatggttgtatgacaatttgggatctcgtgttgattatgaagctcctggtcgttggtgcacaaccatggcttatagtgctgatggtacaaggctcttttcatgtgggacaagcaaagatggggaatcctccattgttgagtggaatgaaagtgaaggagctgttaaaaggacttatcaaggatttcggaagcgatctttgggtgttgtgcaatttgatactaccaaaaatcgatttttggctgctggtgatgatttctccatcaaattctgggatatggacaatgttcagcttttgacaactgttgatgctgatgggggtctccctgcaagcccacgaattcgcttcaacaaggatggaactcttttagctgtctctgcaaatgagaatggaattaaaattttagccaatggggatggtattcgtttgttgcgcacactagagaattctttatatgatacatcaagaacatctgaagccatgacaaagcctacaataaatccaatttcagcagccgccgctgctgcaactagtgctgcacttgcagagagggcctcatctgtggtagcgattgctggattgaatggagatgcccgaaacttgggtgatgttaaacctagaataagtgaag

SEQ ID NO: 5660 - DNA, 558 bp, Glycine max
cttgaacataaagctgagaagcatctttcagatatggttgtgtctaaggcattggtggcgaagattgatagacccatgggaatagtttgtttccaaagagctaaggatagcaatgacgttcttaactcatgggcagcaaacttggagaggctgcttgatcttgtggagaagagctgccatcaaatacacaaggagaccatggtgcataaagctgccttggaggtttaagaagctccatatcactgttaaaagttacaggtgaaccccaatatagatgtgattttggactgaaggtgccgtaaaaggatgttaatttgaattattgctgattagattggtgaggtattggattaaaagacgatgctttctttttccattttagatactgtcaatgatgcaattagggtagagatggtatatgctttttagcgttgtatactaatggtgaataccttacctgttaccaccgacttatgacaggatcctaaacggtcttgtttgtagctcagtgggaagaaatcgagtgctctgatattctttgtctgattaatttttccg

SEQ ID NO: 5661 - DNA, 887 bp, Glycine max
ggagacaaagaccagacacagagcgagagagaatcgtaacagaaacggtcactggaagttgtctctaccaccctctcagccatggcaacaattccccctagccgatcatcatcacacgcgtttgttgccatggcaaccttcacgactctgttgttgtgcacggcggcggcgaaggagagcgtgtacgagatactccccaagtacgggctcccgagtggtctgttaccggataccgtcaccgactacaaactcgacgaggatggccaattcgtcgtcgttttgccgaagccctgctacatacagttcgattacttggtttactacgagagcaagatctccggcaagctcagctatggctccatcaccaatctcaagggcattcaggtccagcgcctcttcatctggttcaacgtcgacgagatcagggtcgatttgcctccctccaacagcatctacttccaggtcggcatcatcaacaagaaactcgacgttcaccagttcaaaaccgttcgctcctgccgcaaatccctctcttgcccaccttgccttccacgtccaattcagcttcctgctccggtcgatgaaattcccatgcttctcacggagtagatccagtttcatactagctgttgtatggcataatggaatatatgacgttttaacctgtcactgtccctctattgccttagcttatatctgtcaaagtgttaagactcgcaaaacccagtctggttacgttatattatatccacgggagacctttatgaacatgatattatgtacatatttaagttgagacttcaacttcatgtgtgttgctgaactttccagttgctggtaaggtgtaaacgtgctttaataatgaatgccaaattcgggtcttggct

SEQ ID NO: 5662 - DNA, 488 bp, Glycine max
gatagaggttgttggttgttggtgtttaaaattaaaaccgagcctcttccccaaaggagacacagagcgagagagaatcgtaacaaaagcggtaaccggaataagttgtctctacgatttgagccatggcaacaacaacaccctcaaaccgatcatcagaggcgtttgctctcatggcaatcctcagcactctgctttgcacggcggtggcggcgaaggagagcgtgtacgagatactccccaagtacggcctcccgagcggtctgttaccggacaccgtcaccgactacacgctcgacgaggacgggcaattcgtcgtcgttttggcgaagccctgctacatacagttcgattacttagtttactacgagaccaagatctccggcaagctcagctatggctccatcaccaacctcaagggcattcaggtccagcgcctcttcatctggttcaacgtcgatgagatcaaagtcgatttgccttccttc

SEQ ID NO: 5663 - DNA, 415 bp, Glycine max
atgaacacggtgctagatgaggaaagcgcggttggtggcggggacaagaagaaaaagaagatgcaaaagaaagaaaaggaagtcaggactttttactctattccagcagcacccgcgatggaaacgacccaaaggagggttgattttgcaaaagctgggccacccaatgtaatgttaatgcagcagatccctaggcaaaaccctgagtattcgttggtggagactagtccaccactggcggctcgtttgcgctatagaggaggccgaggaggggacaagatatccaccacctacgacttagtggaacagatgaattacttgtacgtcaatgttgtcaaggctagggatctccctgttaaggatatcactggtagccttgacccttatgtggaagtcaagcttggtaactacaagg

SEQ ID NO: 5664 - DNA, 1084 bp, Glycine max
gggcaattttcagggtcggctttcgggacaagggagcagagaagttgcacatataatggacctgttgacctacgcgctggagcaaataaaattgctcttctcagcgtgactgttggattacagaatgttggtcggcattatgaaacatgggaggcagggatcactggtccagttttgctccatggtcttgaccaaggacagaaagatttgacgtggaacaagtggtcatataaggttggcctaagaggagaggctatgaatttggtatctcccaatggagtctcgtctgttgactgggtccaagagtcacaagctactcaaagccggtcacaattaaaatggtacaaggcatattttgatgcacccgggggaaaggaaccactggctttggaccttgaaagcatgggtaagggtcaagtatggataaacgggcagagcatagggagatattggatggcttatgcaaagggtgactgtaattcttgcacttattctgggacctttcggcctgtaaagtgccaacttggctgtggacaacccactcaacgatggtatcacgttccaaggtcctggctgaagccaacaaagaacttgatagtagtgtttgaagaattaggtggaaatccttggaaaatatctttggtaaagagagtggcacatactccggcagttcatgggcagtgacccagttcagagaaccaaagaacctgaataagaatctatgtctactgtgaattttgtggctttcgttggaacgaaggtagcttcgaaacaataaagttatctacttcgcaatatgaagtgtttctgttagttctatggttcctactcctagcacctctttttcttatagaaatggaccaccgtgattggtacaaaagatgtacctagatgattttatattcttttcgacacgtcaaccaatctacttggagagtacttgtgaatgaagtgattgtaaggcccccaattcataggatcatggatccccctccccccttgtgcaatataaaaaaaaaatctttggatgataactgcaccaaatattttcatgtaatatataataatcatcgtactgcactcc

SEQ ID NO: 5665 - DNA, 1873 bp, Glycine max
tatggtagacgttagaagggggatcagaaatcgtacagatacacacttggctgaggaaggtcggaaggaaaaatggagttgttcttctacgcggtgttcggcggtttgggagcggttgttgcagtgacggagctgagcaagagcaacaaggaccgaatcaacacctcttccgcattcaattccttcaagaacaactacctcatcgtctattccctcatgatggctggagattggctacaaggtccatatgtctactacctttacagtacatatggatatgggaagggagacataggacaactcttcattgctggttttgggtcttccatgctctttggaacaattgtcggatctctagctgacaaacaaggccggaagagggcttgtgtgacttactgcataacctacattttgagttgcatcaccaagcattctcctcattacaaagtcctgatgttgggccgtattttgggaggtattgccacttcacttctgttttcagcatttgaatcgtggcttgttgccgagcacttcaagaggggctttgatcaacaatggctatcattaacattctcaaaggctatatttcttggaaatggtcttgttgctattttgtctgggctgtttggaaatgtacttgttgatacattggctcttggacctgtggccccctttgatgctgcttcatgttttcttgctattggtatggccatcatactatcttcatggtcagagaatttcggggatccttcagagaacaaggacttgcttacccaatttaggggtgctgctgtggccattgcttctgatgaaaagatagccttgctgggtgccatacagtctctctttgaaggttcaatgtacacctttgtgtttctatggactcctgcattgagcccaaatgatgaagagattccccatggttttatttttgcaacatttatgttggcttcaatgttgggaagctcgcttgcatcgaggttgatggcccgttcttcactccgagtagagagctatatgcagattgtttttgcagtttcttctgctgctctgatgctccccattttgaccactttcttggtagctccttctggagtgaaaggtggaagcatctcattctctggttgcattcagcttcttggcttctgtgcttttgagagttgtgttggcatattctggccatccattatgaagatgagatctcaatacattcctgaggaggccaggagcaccatcatgaactttttccgcattcctctcaacatttttgtgtgtgttgtgctgtacaatgttgatgcattccctatcactgttatgtttggcatgtgctcaattttccttttggtggcttgtatcttgcaaaggcgactgatggtgatttccgataagccaaaaacagaagattggcaattgaaggatagggacgcagagtcagaaccattgaacctttaactggcttttgcctgagttttgaggaggcaccgaacttagctacttaagtcttactaatgcagtttccgtctacatatgtgcacgatgcgatttgagtgaaggtaaacctgatgctcacaaagagaagggattgaaggaacaagcagaaaggacgagtggaacaatttttttaaagtgtttttggtataaatattgtagtgcattagatttctattgaggagaaatctccgttttggtagtactgatggtattcttttgggggggcagtatctaagtttgtcccgttagggaatagtatatatgccaccataccatgtctttcgttgtcttttaattttgtaatgaaatcgcactccattcaattaatgcatcttttatttttatttaaaagaaaaaaaaatttaaaataaaaatattaaaa

SEQ ID NO: 5666 - DNA, 795 bp, Glycine max
tgagaaagttgcattttggtatttattggattcgttaaatggatattgaatccacagtgtagagctgagacacatttttcagtgtatacttcttgttacaatttttttttggtcttgttttccttcttgttacgttgtgtatttatgattctgaattgcctgtttttttaaacatcgtcagaggggctttgatcaacaatggctatcattaacattctcaaaggctatatttcttggaaatggtcttgttgctattttgtctgggctgtttggaaatgtacttgttgatacattggctcttggacctgtggccccctttgatgctgcttcatgttttcttgctattggtatggccatcatactatcttcatggtcagagaatttcggggatccttcagagaacaaggacttgcttacccaatttaggggtgctgctgtggccattgcttctgatgaaaagatagccttgctgggtgctatacagtctctctttgaaggttcaatgtacacctttgtgtttctgtggactcctgcattgagcccaaatgatgaagagattccccatggttttatttttgcaacattcatgttggcttcaatgttgggaagctcgcttgcatcgaggttgatgtcccgttcttcactccgagtagagagctatatgcagattgttttcgcagtttcttctgctgctctgatgctccccattttgaccacggtatgctatttttccaatgtactcttctctttcctccctagtattctgattaacatttcacaccattttgctgtatc

SEQ ID NO: 5667 - DNA, 1007 bp, Glycine max
acagaagggggcaaaaatccgatcagaaaacagcatcgaacccgtcgtagcagaaaaacttgtcaccatggtttcttccgacaaggatccacgagaggatgtccttcaagcctggtacatggatgatagtgatgaagatcaaagactcccccaccacaaagaacccaaggagtttgtctcgttggaccaacttgctgaacttggagtccttagctggaaactagatgctgataaccatgaaaatgatccagagctgaagaagattcgtgaagagcgtggttacacctacatggatgtttgtgaggtctgcccagaaaagttgccaaattatgaacagaaaatcaaaagcttctttgaagagcatcttcacactgatgaggagatccgcttttgtgctgctggaagtggctattttgatgttagggatcgcaatgaagcttggattcgtgtgtgggtcaagaaaggaggaatgatcatcttacctgccggaatttatcatcgctttacgctagatgagagcaactacattaaggctttgcgtttttttgttggtgagccagtttggactccacacaatcgtccaaatgaccatctccctgcaagacaacaatatgtcaaggattttgtggaaaaggatgttggcaaccatgctgttgatgccgccgcgtaagatctggttccgcctaatcgtagtacgtgggactgagactttgtgttgctaaagtaaggtttgaacaaatgaaaataatggtgcctttaaataaagggtcccagctttttatgttatggtttttgtgtagatgaccctttaagccttttacccacgcctgtgtttctgtgtaggtgaccctttgaaagatagccataatattataactacatattcatctaagttatagtacattttaagctatgtcatatatttagttgatttgtaaaatcatgctatcaagtactatctttattcttatttataagattcaattcactgattcatagacagccag

SEQ ID NO: 5668 - DNA, 565 bp, Glycine max
agggatcgcaatgaagcttggattcgtgtgtggatcaagaaaggaggaatgatcatcttacctgccggaatttatcatcgctgtacgctagatgagagcaactacattaaggctttgcgtttttttgttggtgagccagtttggactccatacaatcgtccaaatgaccatctccctgcaagacaacaatatgtcaaggattttgtggaaaaggatgttagcaaccatgctgttgatgccgccgcgtaagatctggttctgcctaatcatagtaccacatgaaaaggaccaagactttgttgctaaagtaaggtttgaaaaaaagaaaataatggtgtctttaaataaagggtcctggcttgttatgccttgatgtaccctcgccagtgtttttgttgcctgtccctgtataaagattgcattgtattattattagaattgggtacagaataaacataagcatatgttagtatgctgatgtatatttatgtatgcttgggctgtatttaaattttacgagatcaaattgaagcgggagaacctagccttaaaaataggtgacgtc

SEQ ID NO: 5669 - DNA, 387 bp, Glycine max
gacatcggatccacgcgtacgtaaaacccggaatccgggtcgaggaaaggttcaaaccggagcaaaaaaacttgttacgatggtttcttccgacaaggatccacgagaggaagtccttcaagcatggtacatggatgatagtgatgaagatcaaagactcccccaccacaaagaacccaaggagtttgtctcgttggaccaacttgctgaacttggagtccttagctggaaattagatgctgataaccatgaaaatgatccagagctgaaaaagattcgtgaagagcgtggctacacctacatggatgtttgtgaggtcttgccagaaaaagtgccaaattatgagcagaaaatcaaaagcttctttgaagaacatcttcacactga

SEQ ID NO: 5670 - DNA, 406 bp, Glycine max
tccatcgatccgatcttccacctcctccgcgtcctccccttcagcttcctccgcccccctcgcctccgcctcaagcttccctccttcaccctcccctccccgaacgccgtcttcgccctcctcctcctcacctacttcatggtcgtctccggcattgtttacgacatcatcgtcgagccccccggcatcggctccactcaggacccctacaccggcgccgtccgccccgtcgtcttcatgtccggccgcgtcaacggccagtacatcatcgagggcctctcctccggattcatgttcgtcctcggtggcatcggcatcattctcctcgacctcgccctcgatcgcaaccgcgcgaaatccgtcaaggtttcctacgcctccgccggcgtttcctccgtcgtgctag

SEQ ID NO: 5671 - DNA, 1201 bp, Glycine max
attgaccaaagggcaagagacggcgagtttagttttgaaagcgtgcgtgtgcgtgggagggtccgaagaagcacaacgttggagaaagtgattctcgttctgttcttctactcacaagagcaacaacaacaacatcagaatcagaaacagcaatggccaacactaacttggacgatgttccctctctggatctcatgactgagctccttcgtcgcttcaagtgctcttccaaacctgacaagcgtcttattctcattggcccacctggatctgggaaaggcacccagtcaccaatcataaaagatgagtactgcttatgccacttagctactggtgatatgttaagagcagctgtagcagctaagacccctcttggtgtcaaggctaaagaagctatgaataagggagaacttgtttctgatgacttggttgttggcattatagatgaagcaatgaaaaaaccttcatgtcagaaaggtttcattcttgatggttttccaagaactgtggtccaagcacagaagcttgatgagatgctgcaaaaccaaggagttaaagttgataaggtgctcaattttgcaattgatgatgcaatccttgaggagcgaattactggtcgctggatacacccatccagtggcagaacttaccatacaaaattttcccctccaaaggttcttggtgttgatgatgttactggtgaaccacttatccagcgcaaggatgacactgcggctgttcttaagtcaagactggaggcatttcacaagcaaaccgaaccggttattgattactattcaaagaagggccttgttgctaatcttcatgctgagaaaccacccaaagaggtgacagttgaagtggagaaagtgctgtcttaaatggagatcacccttcgatcctggggctcgaaccgcaattgttcttttttcgctacaggaaaacttttcgttgccaatttgtattttaatatactctgaaatccgcttacctttcagctttactgcaaatgccggctgttctcaaacccacattcgaagaccacctttgatgaatcaaaaagtctatttattttgaattttggtctctttcttttttctgcatgaatttccactcgacattcgcaggtgtttacgcacccgtgaaacttttgatttcatgaactagttggcaaaatttgagctacttattgttgggaagc

SEQ ID NO: 5672 - DNA, 426 bp, Glycine max
cagtcacctaacatttgtagctaaacaaagggcaagagacggcgagttgagttttgaaagcgtgtgcgtgggagggtccgaagttggagatagtgattctggttctgttctgttcttctttctactcacaacaacatcagaatcagaaacaacaatggccaacactaacttggaagatgttccctctctggatctcatgactgagctccttcgtcgtctcaagtgctcttccaaacctgacaagcgtcttattctcattggcccacctggatctggaaaaggcacccagtcaccaatcataaaagatgagtactgcttatgccacttagctactggtgatatgttaagagcagctgtagcagctaagacccctcttggtgtcaaggctaaagaagctatggatatgggagaacttggttctgatga

SEQ ID NO: 5673 - DNA, 426 bp, Glycine max
ccaacttgtcgtgtgtctgtgatgactcaatcgatgtcgcacaagcctttggactcgcgccacaccacagactcctgcttgttgcagctccgcacctggaaacccttcaagctccagcaagacgggccccaccccaaaccctactaccacaaacgcccctgcctctccgatcgcacaaccacctcgttttccctcgacatgtccaaactcaccctcgccgacgacgacaatcacaatcccaacaaccgcgccaccaattaccgcctcgtcgctcgcaagaggcgccgccgcggctcgcgatccgtgtccggccgcagcagcgaccggagcgggacgcgccggtgctgctccgtgggggcctccgccgcgtacggcacctgctccgatttcccggtggccatgggcaccgactccagcggggagctc

SEQ ID NO: 5674 - DNA, 822 bp, Glycine max
gtgccgtgcagatattagtggttattgttttttctctttatcttcgtaaaatatctgttctgggacaccgcatatttctaatatatgcagttccttggggtctggcaattacgtgggctgtggctttcttgttgactgaagctggagtctacaactacaaaggatgtgacataaatatacctgcctcgaatatggtttcggagcactgcagaaagcatgtctcaaggatgaagcattgtcgagttgatacttctaatgcattgaaatcatccccgtggtttagatttccttatccattacaatggggtactcctatctttcactggaaaatggctcttgtgatgtgcgtggtttccttgatctcatctgtagattcggttggttcgtatcatgcttcttcattattggtagcatccagacctccaactcctggagttcttagtcgaggaattggtttggaaggtctttctagtgtcttggctggtctctggggaactggaacaggttctactaccttaactgaaaatgttcatacaattgctgtcactaaaatgggaagccgcagagcagttcaattgggtgcatgctttctgattgtgttgtctctcgtgggtaaggttggagggttcattgcttcaattcccgaagtcatggttgctggtctcctatgctttatgtgggctatgcttgcagcattgggcttgtccaatctacgttatagtgaggccggaagctctcgcaacatcatcataattgggttatcattgtttttctctctttccatacctgcctactttcaacaatatggcatctctccaaatt

SEQ ID NO: 5675 - DNA, 1318 bp, Glycine max
atttatccatgccttaaatttttagaactctatctaacataatactagagccagtcttttataatattagagcatctagctcaaatagcatggcttccaatctgattagagtgagcacaagcttggttctagtagttttagtagctctcacagttcaaattttctacatttcacccatagatccagttttgctggatataaaacctgctccttcaaccaaagacaatcaattacagaatatcattaagcttggagaaggacttttgaaggaaccagaagatgttgttgtagataaagaagggactctctatacagctactcgagatggttggattaaaagattgcgcaggaataatggaaaatgggagaattggaagcatatagatagtcatactttgctaggaatcgcaacagcaaaagaaggtggtctcattgtttgtgatacttccaagggtttgctcaaggttacagaagaagatggttttagtgttcttgtttcacacgtaaatggttctcagttaaggtttgcagacgatgtgatagaaggctcaaacgggaatgtatattttagtgttgttagtacaaaatttgatcttcaagattggtatttggatgtgttagaggcaagacctcgtggacaagttctcaagtacaatcccacatcaaatgagactgttattgttcttgataatgttgcatttgccaacggcgttgcactctctaaggacgaagattatcttgtggtttgtgaaacttggaaatacaggtgtttgaggcattggttagaaggagcaaacaaaggcacaacagatattttcattgaaaaccttcctggtgcacctgataatatcaatcttgctcccgatggatccttctggatcgctttgattcagttgacttctgaaggatttgagtttgtccacaactacaagataactaagcacttggttgcatcgtttccaaggctaattaaccttgtcaatggctgcaagaagaaagcaacggtggtgaatgtggcaactaatggcaggataataagaaagcttgatgatagtgatgggaaggtgattaattttgtgacttcagctgtggagtttgaggaccacctttaccttggtagtcttaattccaactttgttggaaaattaccattgtatagtgcatagaatagtcaagtttagccctccttgaataaaggtgtgcctcagcttggatcaagcgaaagaagcatcccatgatggatatgtatgatttagaccaagcacatgtaggagaatattgttccataatgcatattctctgttcattttttgttagt

SEQ ID NO: 5676 - DNA, 524 bp, Glycine max
gggaggcaaaccgcttcattttgaaaattcacaaaccaatagtgaaaagagacagagagggaaaaagaagaagaaaagaaaaagaaaattgcaaaaagcgaaaccgaaaaccaaatccgaagagtgaaggttcgttgaatcccatggcgagagtgaagcacacgccagcttctcgcaaatccgctaaaaagcaagcgccacgcgcatccacttccacgcagccgccaccacaatcccaatcgcctgcaactagagagaggaggagagctcaacaagtggagccgcagcaggagcctgaggctcagggaaggaagaagaggcgcaataggtcgggaactgtggcgcttcgtgagattcggcattttcagaggagttgtgagcttctcatcccggctgctccctttatcagatgtgtcaaacagattacaaatcaattctctacggaggtgtctcgttggacacctgaagctgtggtagcacttcaggaggcagctgaggaatatctggttcacttatttgaagat

SEQ ID NO: 5677 - DNA, 1336 bp, Glycine max
ttcacactcattttcaagaagttcttcagattcagattctgtgcattctgcaggaagcacttcttcagaagagtcacgagcctctcgtgctacagaaaaccatagcatagagattgctatgggttatgctaaatcacttgggagggaaaaatattcagtgatatgtcattattttaagcagttccgtgaacttagaaattggtgttgcctatctgagcttgattttattgcttctttaagccgctgtaggaattgggatgccaaaggtggaaaaagcaagtcctattttgcaaaaacacttgatgacagattcatcataaaagagattaagaagacagaacttgattcatttttggggttttcttctctgtatttcaaacacatgagagaatcatttgagtctggcagccaaacttgtcttgcaaaagtcttggggatatatcaggttactaaaagacacgttaaaagtggaaaagaggttaaatatgaccccctcatggtgatggaaaatcttacctacaatagaaatattactcgccagtatgatcttaaaggtgctctttatgcccggtacaattctgctgccgatggtgctggagatgttcttttggatcagaactttgtgaatgacatgaattcttccccattatatgtcagccataaagcaaaacgtgttcttcaacgtgctgtttggaatgacacatcttttctgaattcaatcaatgtgatggattactccttgcttgttggagtagattctcagaagcgcgagcttgtctgcgggatcattgattatctcaggcagtatacgtgggataaacatcttgagacatggatgaagtcttcacttgttgtgccaaaaaatgtgttgccgactgtaatatctcctaaagaatacaaaaagaggttcagaaagtttatgtctacatattttttgagtgttccagatcactggtgttcccagaaatcctccaatccttgcaaactttgtggctcaggggaagatgacccttcccagcaaaagccctagcacaagattgccaagtggtttctctgtccaaatctttttgattcaatttctcaaaagaaaaaaaaaatacaaattgagaatttatgcaagtagttagcagtactgtatatagacagtcaatattgattataaacctagccccctgctattctgcgatttttagcgaatttctagggatgctgtcatttacaggtccaccctctcccagtatgagatgagtaaatttttgtaggcctaaggtaaatgtaaaggtttatttaatcaatgaaaagtacagttgctagctttcctttgtacccttcccct

SEQ ID NO: 5678 - DNA, 720 bp, Glycine max
cacccaaagagcgatatagagagagagaaaagaaaaaaaaaccacaacttcataaaaaaagacttaatgtgcacgccattgtggtgagatagaaagaaagatgcaaatggaattccaaggctaacaacacaacttcaacaaattagggcttttattattctttgcaatcatatcatatccttcactccttcacttcactctcaaaactcccacagttgaagagacatgttggactatgaatgggggaaccgtccacgataatgctctccggaaacgaagacagctccgccgcgggctccgaccaaacccaccgtcaaatcttcgaccactatgcgtcccacacactcatccccgaccacttcctacacgcgccaacgcactccaccgccaccaccgccgccgcagccaccgtggatttcacccatcaccaccacttcacccctgcaaccccaccaccacaaccaaaaccacatgaaccaccaccaccaccatgccttcttcgacccacgcgcttttcatggcgcgtcgaacaccttcttaccccccaccccattccatgctctcccttgacccgctacctcacgtcaacgcagttgggcctgggcacgggcccggttccgggccaggcggacttctccttgtcccaaagtctgaagacgtcggtcggcccatggactttgtcggctcacgaattggactcaacctcggaggacggactta

SEQ ID NO: 5679 - DNA, 1337 bp, Glycine max
agaagagagaaagtgtctctccagtatccactcttggcgtttacaagaatcgttttatatttgatcatcctctttccctctctctctctctctcaaccccgattccagaatattccgaacgccatgtttcatcgccgtccagatccagagaattgagttgatggggggtaacaattccaaggaggatagcaattggaggcagaattcacctgtgcgttcaagttcctctgcgtcttcttggggttcatatcctgacccccaatcaggttatggtcacgggggttacgcgtatgagccacaacagccttcttatcctacacagcagccgtattatgcccaaccgccgccgccgccgccaaactatggcaatgaacctcagcctcatgctagcggcagagtggccggccacagaaatgagaagcggttagacaggaaatactcgagaatcacagataactacaactccatagatgaggtgactgaggctcttgcacgtgcaggccttgagtcttcaaatcttattcttggtattgatttcactaagagcaatgagtggacaggaaagcattcatttaacagaaaaagtttgcatcacattgggaatggtccaaacccctatgaacaagcaatatcaattattgggaagaccttggctgcatttgatgaggataacttgattccttgttttggatttggggatggtagctttctcaaagttctcaacttatttttttatagaagttttgtttgttttttaaatgtggtaatgggcattactgtgatatcatggcagcatcaacacatgatcaagatgtcttcagtttctatccagatgaacgattttgcaatggatttgaagaagtgttgagtcagtatagggaaattgttcctaatattcgacttgcaggtcctacttcatttgcaccaattgttgaaatggccatgacaatagttgagcagagtggaggccagtaccatgttttggtgatagttgcagacggccaggtaacaagaagcattgacactgagcgtgggaggctaagtccacaggagcagagcactgtggatgccattgttgaggccagtaaatttcctctttcaatcatattggttggtgttggagatggtccttgggacatgatgaaggagtttgatgacaatatcccagcccgggtctttgataattttcagtttgtgaatttcacagaaattatgtcaaagaatattcctccttctcgaaaagaggcagcatttgcgcttgcagcactgatggaaattccggctcagtataaggcaacaatagagcttaagctcttgggtggtcgaaatgcaaaggc

SEQ ID NO: 5680 - DNA, 1281 bp, Glycine max
tcgagcgcgtgtgttgaatgtgtttgaagacacatggcggcggctacagggttacttaataagcccctgttggtggatttttttatgaattggtccatgtctcttgaattgagcatttgctgcgaaattttgaagattcaagtattcaacgttccagaagagttctttgtttacatttatatatagcacctgaaattggctttggagttcttatactggctgtttgattggtatttgaaattctggattttggattgtgttctgctcagtcttgttaaggagaaagtggggtttgagagtctcggcattatttattattagcgcgcttggttccacattccagacgccccagacgtggtttttggcgtctagtaagaagctaatagttataactttcacatctcagacgaggttgttgacgtttaataagaagctaattaattatagctttcacgtcccagtcgtgatttcttgcttctcaacagagaattgagttgatggggggtaacaattccaaggaggatagcaattggaggcagaattcacctgtgcgttcaagttcttctgcgtcttcttggggttcatatcctgaccccaactcgggttatggtcaggggggttacacttatgagcagcaacagccttcttatcctacacagcaacaatattatgcccagccgccacctccactgccacaaaactatggctatgaacctcagcctcatgctagtggcagagtggccagccatagaaatgataagcggttagacaggaagtactcgagaattgcagataactacaattccatagacgaggtgactgatgctcttgctcatgcgcgccttgagtcttcacatcttattcttggtattgatttcactaagagcgatgagtgcacaggaaagcattcctttaacagaaaaagtttgcatcacattgggaatggtccaaacccctatgaacaagcaatatcaattattgggaaaaccttggctgcatttgatgaggataacttgattccttgttttggatttggggatgcatcaacacatgatcaagatgtctttagtttctatccagatgaacgaatttgcaatggatttgaagaagtgttgagtcggtatagggaaattgttcctattattcgacttgcaggtcctacttcatttgcaccaattgttgaaatggccatgacaatagttgagcagagtggaggccagtaccatgttttggtgataggtgcagacggccaggtaacaagaagcattgacactgagcgtg

SEQ ID NO: 5681 - DNA, 535 bp, Glycine max
tttgattttggattgttttctgctcgatttcgtttaaggagataagtggggttgggagtttttgctattatttattgttattttgtttggtgttttagagaattgagttgatggggggtaacaattctaaggaggataataacaattggaggcagaattcatctgtgcgttcaagttcctctgcgtcttcttggggttcatatcctgacccccaatcaggttatggtcacgggggttacgcgtatgagccacaacagccttcttatcctacacagcagccgtattatgcccaaccgccgccgccgccgccaaactatggcaatgaacctcagcctcatgctagcggcagagtggccggccacagaaatgagaagcggttagacaggaaatactcgagaatcacagattactacaactccatagatgaggtgactgaggctcttgcacgtgcaggccttgagtcttcaaatcttattcttggtattgatttcactaagagcaatgagtggacaggaaagcattcatttaacagaaa

SEQ ID NO: 5682 - DNA, 458 bp, Glycine max
cccacgcgtccgtgcgaaattttgaagattcaagtattcaacgttccagaagaggtctgtgttttcatttatatatagcgcctgaaatcggctttggagttcttatactgtttgtttgtttggttttgaaattctggattttggattgtgttctgctcagttttgttaaggagaaagtggggtttgagagttttggcattatttattattagcgtgtttggttccacattccagataccccagacgtggtttttcgcgtcagctaagaagctggtagttgtaactttcacatccctgacgtgatttcttacttctcaacagagaattgagttgatggggggtaacaattctaaggaggataataacaattggaggcagaattcatctgtgcgttcaagttcctctgcgtcttcttggggtgcatatcctgacccccaatcaggttatggtcacggggg

SEQ ID NO: 5683 - DNA, 1431 bp, Glycine max
gatagaccaaaaatgtgctcttcgactctatcgtcctattctttcctcacaatcagctccacatttttcaaatcccaattttgccctcctcccttcccctctcgcgtggtggcgtgtcacgttggatccaattccaatgttcaaaagcacgttgccaccgacctcaagttcgtcctccacgacgccctccatgactctggaatcaacaccactcatgccagagaagctagggagcatttctgctcacaaattaggagattcactgatattgagaagggaaccagtatttgtatcaacaggtgtgttgatttggggagaactgctctctacatagctgcagaggatgattctctagtgtcacattcatcagttccacttcctgtcgatgattttattacgagattagatgatctttcgatggactactgtccgcactacagccccaaatatgattcatcgccggagaagttcttagagagcatagagagatttctatatattcacaagggtttcaggagagccaatgccaatgtattggagccacgagcactttatctccactcggttttgacccatcgttcaggatcagctgcaatgctatcacttatatactcagaagttctgaaaatgcttcggttgtggagccttttgcattttgatgctgaaattttcttccctcgtgatgctcttacccttcccacaggctatcataagcggaaaagcggggagtcagaccaagctcacataatgacttcaggaaacctattagttgagatcttaaatgatctgaagcatgcattctggccttttcaacatgatcacaccaaaactttattcttgagggcggcaactgctgctaactgtgttgacagatctgattttgttggagaaagtggctcacaaattgcattagctaaggctgctcaacataggctagatcgaggtgtttggaccagtgtgcgttttggggacatgaagcgatctttgtcggcatgtgaacgtcttatcctgttgaaaaatgatgcaaatgagttaagagatggcggcattcttctctatcattgtggattatatgaacagtcactggaatacctgacgaagtaccgagatctgaagaactcatctacgcaagaattatcatcatcaaactctcttagcagcctggaggaagatgccgtggataacctgatgatgcgcttgaatcttgtactgatggagcaagggtggagtcggccatcttatgccaagaattttcttggtaataattctgaaccatggtagttcctcttcttccatgtttattgagacaacatcacagaagatttgcatcaagccatattggaaatgaatgctgatggttcacggctgcggcaacttcatgaaaaggaaaaggagaatgagaaaaggagatggaaagatcaacatcataat

SEQ ID NO: 5684 - DNA, 444 bp, Glycine max
acgccacgcgtccgccacgcctcggcccacccttccgcccacccgtccgggagaaagtggctcgcaaattgcattacctaaggctgctcaacataggctagatcgaggtgtttggaccagttgtgcgttttggggacatgaggcgatctttgtcggcatgtgaacgtcttatcctgttgaaaaatgatgcaaatgagttaagagattacagcattcttctctatcattgtggattatatgaacagtcactggaatacctgacgaagtaccgagatctgaagaactcatctacgcaagaattatcatcatcaaactctcttagcagcctggaggaagatgccgtggataacctgatgatgcgcttgaatcttgtactgatggagcaagggtggagttcggccatcttatgccaaagaattttctgggtaataattcttgaccatg

SEQ ID NO: 5685 - DNA, 419 bp, Glycine max
gtgccttggacgaagatcttcaaggatgtgctgctatggtcgctaacattctcagagaaaaagggcagattgttgagttggttttggaaaccaacccccttaaatgggtttttaaacgtgcagcccgattaaatgctgaccggcttgtgttagtggggaattctgaatggcaaaggggtgtggttggtgtcaaaattctctctactgctgaacagtatgaggttaaactggatgatctgaagtaaatcagaatttgaattttttggggttatgtattctgtctttactattggtattaatttccccttgattttttttacatagtcctttgagactcaagtacttgttttgtatgtgtacatactcccctgtgtaggcatatgtgattatccaaaaaccaaaacttccgcttctgtttt

SEQ ID NO: 5686 - DNA, 713 bp, Glycine max
tcttctataggtgaagaagcttttggaacatgactagtagtgttcctgtttccggacttggaatcatcaaagtactgttgatacacatatgatacaatgccccaaatagctaacaccatagagatacccttaatgccatccattttgtcatgaaagaacaccactgccagcattggaacaataggcactcccaaagcgcttatggcattagagaagagggaagaaacctcacgaataagccccaaacaaccaatggtgaagacttgccaaagtatggctgtgaaagtgaggttcagcaaatatgaagccttccccaactcatactccttcatttcattcttcaaaccactccactctccactagcaaaaagtcccactaaggtagcaagggtagccacaagggaagggtataatatcatatccaagaccactttgaatgtttctctttttatgaccttcttgaacacaagctgtgtgagggaaagccatagtccataccctgcagatgcaccaactgtgcatatgaatccaatcacatactttttcttggagatttttgtggaatctgaatcatcgtcatcatctgatgatgactcattttgaaacacaaggagggttgaagaaatggtcacacggactagagagttgattctgtaaggtgtgaacttgagtgagttgagaaagtaggagaagaaagcattgaaagccaattg

SEQ ID NO: 5687 - DNA, 556 bp, Glycine max
tgatgtttcagcatttcttgaaagctataagggaacatcatccagaaaatgtttatgcatccatggaaacaattatgagccttgttcttgaggaaagtgaagatatatccttagacctgctgtctccactcctgggaagcactaagatagacaatgaggtagtttttccaatagccctagaattgggggagagggtccttgaaagctgtgcaaccaagctgaaaccctacttggttcaagcagtgaaatccttgggtatatctgtggatgattatagtgcagtacttgcttcaatatgccaagatgtatctgatgacctggagaaaaatgatacatgtgttactagtgagcatgtggaagataagagtgagtcagcaaaacaatcactagaggagtcaacacattttgatcaggtggttaaaaaggattcaagggaagttacatcctctcagcaagaaaatcctgatgatgtgaataaatctccaaagtcagtcatgagcaatgttgttgcaggtgttgatgttttagctgactccaagtccattaaaaaacaaga

SEQ ID NO: 5688 - DNA, 626 bp, Glycine max
aaattgaggaaatttaaaattatttacatattagttattacgcacatcgattctagttttcgttctctccaatttcccgaaaccctaatttcctcaatcctggttttggaattcgacaatggagcagaagaggagcagcaagatgtacaacctgttcgtgaagcacttggacgggaaaaccctaaccctcctattcccctctccgatcctctacgcgagttccatcaaggatcgcctcttccaactcactggaatccccgcccaccaccagcgcctcgtcaccggctgtcgccacctcaacgatgacaaatccgctatccagtgctccccgggggacggcaacatgtttccctccgtgcgcctcctcctgcgcctcaagggcggcaagggaggctttggctcgcttctccgtggcgccgccaccaaggccggccagaagaagaccaacaatttcgacgcgtgccgcgacatgagtggccggaggctgaggcacgtcaacgccgagaagaggttggaggagtggaaggccggagaacaggagaggaagctcgagaaggtggccgaggagtttctcaagaagcagatgaagaagggcacgggaaagggtaagggtgaacgtgacggtc

SEQ ID NO: 5689 - DNA, 1713 bp, Glycine max
cccacgcgtccgagcgtgtattcgatgtatcaattcaaggttttaaatatctgagagattttaacattgcgaaagaagctgggggagtgggtaagggaatcactagggagtttaatgttaatgttacagaatgcaccttggaaatccacttatcctgggcagggaaaggaactaatgccattcctataagaggtgtatatggacctctcatatctgctatcactgtgaccccaaactttaaagtttatgcacatgggttctctactggaacaattgttggaattgttgctggggcatgtgtgattgtcatattgatgctctttgctctttggaagatgggtttcctttgtcagaaagatcaaacagaccaagaacttctaggtctgaaaacaggttatttcagtttaagacaaattaaagctgctactaataactttgacccagcaaataagataggtgaaggaggctttggaccagtatacaagggtgtactatcagatggtgctgtgattgctgttaagcagctctcctccaaatcaaagcaagggaatcgtgaattcatcaatgaaataggcatgatatctgctttgcagcatccaaatcttgtgaaactttatggctgttgcattgaaggaaaccagttgctgctagtatatgagtacatggagaacaatagtcttgctcgtgcactttttggtaaagaaaatgagaggatgcaattggactggcccagaagaatgaaaatttgtgtggggattgcaaagggattagcttatcttcatgaggagtcaaggttgaaaattgtgcacagggatattaaggcaaccaatgtcttacttgataaacatctgcatgccaagatctctgactttggtttagccaaacttgatgaagaagagaatactcatatcagcacaagaatagctgggacaattggttacatggctcctgagtatgctatgaggggttacttgactgacaaagcagatgtctatagctttggaattgtagctttagagattgttagtggaaagagcaacacaaattataggccaaaggaggagtttgtatatcttttagattgggcctatgttctccaagagcaaggaaaccttctggagctggtggatccaagtcttggttcaaagtactcctcagaagaggccatgagaatgctgctagttagcactcttgtgcaccaacccttctcccactcttagaccatgtatgtcatcagtagtgagcatgcttgagggaaaaactccaattcaagcaccaataattaaacgcggtgacagtgcagaagatgtaagatttaaagcctttgagatgctatcacaagacagtcaaactcatgtctcttctgcattctcagaagaaagtatagagcaaagaagcaaatcaatggggggaccatggcttgactcctccatatcacttccaagtagaattgattaggcttcaaccgatcaacttattagatattccaattatgtgtgatttgcaagtcggggaagttaactcattaaattttaattcatagttgcttgctatatgtatggtggtttaaaggctattaatgggggtttcaatttcctttggaattttattaagtggggatatttttgaattaattttcaaatgtggtaagtcataaattattttactatttttaggtatgaaataataaaaaaattcatgactttgattttt

SEQ ID NO: 5690 - DNA, 403 bp, Glycine max
gtcgacccacgcgtccgcaagatagtatagagcaaggaagcaaatcaatggggggaccatggcttgactcctccatatctcttccaagtagaattgattatgcttcaaacgatcaacttattagaaattcgaataatgtgtgatttacaagtcggggaagttaactcattaaatttaaattctttgtatcaaaggatgtaaacagtaaccagtcagggagatagaatacatacaaaatgtggtgaagtcaaacatcaggttttaaaatgtatagaagatttttcatagttatttgctatatgtatggtggtttaaaggtgtttcaaaaaaaaaaaaaaaaaagaaaaaaaaaaaaaaagggggggcccccaaatattgccctccctaccccgggttttttttc

SEQ ID NO: 5691 - DNA, 1618 bp, Glycine max
gggcgacagacgcgtgctcccaaaccaaaacttttgtgacttacacacaaacacgcactcccttataactatctctgtctccgagccatgtgccagttatcatctccctccactctgtgtgaaagcaatgagggccatccaaacatgcccccaaccaaaattcatgaggagcctgacatgttcgtccttttgatccccaaacccccaacaacaacaacattcttcgaacaaggccaaaataaccaaaagccccataaaacccatttttccctcgccctcgacgaagtcaaatgcgtagccaacatagcattacccatggtgctaaccgggttactactctattctcgctccgtaatctccatgctcttcctcggtcgcgtcggtgagctcgccttagctggtggctctctcgccattggattcgccaacatcacgggctattctattctctcgggcctcgccatgggcatggagcccatttgcggccaggcttttggggccaaaaggttcaaacttttgggtctcgctatgcagaggacaatcgtcttgcttcttctaacttcagttttgatttcattcttgtggctcaacatgaagaaattattgatcctatgtggccaacaagaagacatcgccaccgaagctcaatctttcatactattttctattcccgatcttgtagcacaatcattgctacaccctttgagaatctacttaagaagtcaatctataaccctgcctctcacatacactgcctctctgtctattctccttcacgtccccatcaactacttccttgtctctgtgcttaagcttggaatcaaaggcattgccttaggcgctgtttggacgaatttcaacctcgttgtttcgttgattctctacatatgggtctccggcgtatacaaaaaaacatggccaggtgtttcgttgaagggcatcttgagcggttggaaatcgcttttgaatttggcaattccaagttgcatttccgtatgcctcgagtggtggtggtacgaaatcatgattttactatgcgggttattgattaatccccaagcaacggttgcatcaatgggtgttctgattcaaaccactgctctgatatacattttcccatcttccctaagctttgccgtttccacacgtgtctggaaatgaactgggtgcggagaatcccaaaaaggcaaaacttgcagccctcgtggggttatgttttagttacggtttgggtttctcggctttgcttttcgcagtttccgtgaggcacgtgtgggcttcgatgttcacaagtgacgcggagatcattgctttgacatcgatggtgttgcccatcattggactatgtgaacttggaaattgtccgcaaacaacggtttgcggcgttttgaggggaaccgcaaggcccccgttgggagcgaatataaatttgggttgcttctacctagtgggaatgcccgttgcggtgaggttgagtttctttgccggctttgatttcaaaggcttgtggcttggtttattggcagctcaacctcttgtatgttcaccatgttaattgtgttggctcgaaccaattgggagggtcaagttcaaagagccaaagaactcacatcatcgt

SEQ ID NO: 5692 - DNA, 2150 bp, Glycine max
tattttctgaagctcgcactccaggaatctacaaacctgattacattgatgcattgtacacattttatcatgagaaaaaacctgaaatggtagtttgtcctcctactccggagtggaagagatcttctgaattggggcgcaatggtgaagctggtccagatgatgatgatgatggagtaccaggccctgatttgcacgagaaccatgagacagacacacgaatgacaaatgatgatgttttaggagatgagatacctactgatcagcaggatgcattgcgtcagttctgttatcaaacgcttaaattgggtgttggggccaggggacacacacaatttccaggttcacacccagtttctctcaacagggataatttgcaattgttacgacaacgctattattatgcaacatggaaagcagatggtacaagatatatgatgctaataacaatggatggatgttacttgattgatagaagttttaattttcgaagggtccaaatgaggtttccttgcagaagtacaaatgatggtttgggcgagaagacccaccacttcacattacttgatggtgagatggttattgatacattgccagattcacagaagcaggagagaagataccttatatatgatatgatggcaatcaaccaagtatcaataatagagcgtcccttctatgaacggtggaagatgcttgagaaagaagtgattgaacctaggaatcacgagcgacataatatatatcagagcagaaatccttactatagatatgacctggaaccgttcagggtgaggaggaaagacttttggttgctctctactgtcacaaagcttttaaaggaattcattaaaagactctcacatgaggcagatggtctcatatttcagggttgggatgatccttatatacctcgtactcatgaaggactattgaagtggaaatatgcttatctgaattcagttgattttcttttcgaggttgatggtgatcgtgagctactttttctcaatgaacggggaaagaagaaactcttggaagggaatagggttgaattcacagatggttcagatccctcactttattctggaaagataattgaatgttcttgggattttgacaaactggaatggaagtttatgcgaatcagaacagacaaatcaactccgaatgagtttaatacttacaggaaggtcatgcgaagcataagagacaacatcaccgaggaagatttgttgaatgaaataagtgagataattcgccttcccatgtatgctgacaggatcagaattgatagcaaagcgaatcagcatgctaatgtcgcaaggcgaaggtgatttggtggtggtttagatcagatcagggacttttatgccttcaatctttacattggtggtagtgggtgacatcaagtgaaaacaagatttcgtgtataccccgatacttgtctctgggatttgaatgaaattgtattggttttggctatgtattttggccatcatccaaaagttgcttatattatgtagttagttagtccctgcggtaagtattgctgtgctgctgagctgtatggtgcagttagtacggctcaaattccggcctgaatccgttgtctatggttgtccagatcaagagagttaggtttagaatctcaaatctcaatgtatattatcaattttcttttagtgattctaagttattcaaagggtagccggttcttagagtcaagttccaagtgggtagaatttcccctgtatgtgaatattaatttgagtagtagtaacaagccttccattctctctaatgttctgtggatgtggaagatatcatgcgtttaggctgtcatcagtgcccgaatcagattgttacttagcatgtttgacggtagcccagtcactgctactcattctactagtagctctggaaatctaccatggaaggatgaggaaggtggcaactgtgtgaactgtttggcagtggtgaaaatgtgtaaggttcagataaatggatgtggaaagaaacagtgttaatttgctagcctcattttcatgatgaatgactatattaaaaatatttgcaacacaaaaccccatgtaacagtgaaatttcactttttttccaacgattctttatacacctgaactttgctt

SEQ ID NO: 5693 - DNA, 1020 bp, Glycine max
acgacagaagggcgacgtaagattttagtattgtcaggggtagtgtcggtgatgaagtaactagaataaatatagttacaacatcaacttccatgttcttcatgtttcacttctgctttaagtttgtggctttctactttctctttctagagtaggactaaactcatacactgatcatgggagtggatttaagacaagtggtggcgggtgtcctcaccctcacaatgttcgtcatgcttatacacatgatcaaaagagaccattttgatgctgttgatgataaacttcctggaacggaggatgtcagctttgaaagtacaaactttgatactactcatgttagaaagaacatcgggatttggaagggagatggtgatgagttaaaaccatgttggcttaagccatctgaagacaatgcggagactgaggggtttgttaccttttcactaaccaatggcccagagtaccatatatctcagatagcagatgcagtgcttgttgctcgtagtcttggggcgacacttgtcatccctgacattagaggaagccaacctggtgacaagaggaactttgaggacatttatgatgccaatgtgttcatgaaaagcatggaaggagtggtcagagtggtaaaggatcttccttctcatgtaacaacacataaaattgctgcggtcaaggttcccaatcgggttacagaagaatacatagctcaacatgttgaacctatttatagatcaaaggggagtgtaaggcttgctacttattttccttcaataaacatgaaaaaagcaggggaaaaaagtgatgctgattctgttgcatgcttagcaatgtatggaagcttagagttgcagcaagaaacgcacgaccttgttgactcaatggttgaaagacttaagactttaagcccaaagtcagatgggcaatttatagctgtggatttgagggttgagatgttgaataagaagggttgccaaggaagtgatagtgaaaaagagaagagctgctttaatgcac

SEQ ID NO: 5694 - DNA, 323 bp, Glycine max
ttcgcatacctccatgtgctgctcaagcttcttctgtttcacttctacttgaagtttataactgctcctcaattctaatctcgccttccccatttatatatcttctactttctagagtaagagtagctacactcatacacaccacacaacacagatcatgggagtggatttaaggcaagtggtggcgggtgtgctcaccctcacaatgttcgtcatgcttattcacatgatcaaaagggaccattttgatgctgttcatgataaacttcctggaacagaggatgtcggctttgacagtacaaactttgatactactcatgttg

SEQ ID NO: 5695 - DNA, 589 bp, Glycine max
gtggaagcagaaggcattgttatggctataccaatgcctggacatccagtacaaagccaggaacaggacagtgtgctttatgattgtacacgtttgtgtgatttaattgatcgtcatgattccgcttttttattgactgatacaagggaaagtcgatggctcccaacacttctctgtgccaatactaacaagattactgttactgctgcactggggtttgatagtttcttggttatgcgccatggagctggtcctttatctgcggatatgccagtaaataatgcaaatggaaaacatagattgggctgttatttctgcaatgatgtcgtggcaccaaccgattcaacatccaactgcactttggaccagcaatgtactgtgacccgaccagggctagctcctattgcttcagcccttgcagttgaacttttagtagggattttgcatcatcctcaagggatatttgccgaaggtgatattaacaacagtgtcactggagctactgagcaacctcttggtattttgcctcatcagattcgtggttccctttctcaattttctcaaatgaaccttataggttactcctcct

SEQ ID NO: 5696 - DNA, 1218 bp, Glycine max
ggctcgagcggctcgagctcactgccatctgtatctgcatagcataaataccgcacgcacgcgattcctatgatttgttttttcactctttggccatttttcctattcattcttttgagtgccgagcaaaaccctaatcgagttcgattgcaacacacctccgttgctgaattccaccttctccgaccaatggctgccaaacctcttactaccgaggcgattgcgcttacggaaaagaagatggacatgacactagatgacataatcaaaatgtctaaaaacccgaagaataagaagcaaagaagggttccgaacaaaagtcaaaaattttcaaacaattttactcaggataagtctgcaaaggtccagcgttatatggaatcgagatcttctcttagacagggggctcttgcaaaaagaaggtctaatttccagggaaaccaatttcctgctgcagttgaagttgcgcgaaaagctgttactgctcctctgcacaatagagtccctaatcgtaatagggtggctaactggaataaaacaagatttcaagttcctgtaggtcagagaagggctgctaatggaggctttgctgctaagcagcaaccacttccttcccctcagaagcagcaggagaatgtggatatagtgccaaagcaaaagcctcagacgctggattccctgtttgcaaacatgaaggagcaaagaatgagagttttgtcaatgcagaataatgctgtgcaacgcaatggaggtggaaataagaggctcccatggagaagaggccgatttggcaactaagttgttcacacaatggggaatttcatgatatcaccttttgaacctatgtcctggcctgctgcgtcctgactcctcctgggttgatgcaagtgaaaaatttctcgagtgcagaagaaaactctagattccccaccccctagttggatggattatctttccccctttcattcgaatggacttcttcatttgctcgtccgttgtatattagtgtcttccgtggcttaatgtttgttctggtctggtctgtggtccatatgtggacacaattcctagcagttacaatataatgtcatttgaaaggcctttgggcccgtagcaggtttatctgtactggtatgtttttctttttttgatatttagttatgggacagtatttctttgctaatgttcaactacaatgatgggcttttgcgtttcaag

SEQ ID NO: 5697 - DNA, 760 bp, Glycine max
gaaactttaaattcttaagtggtctactttcatacaacagcctccacgattgtaagttttgtacagcaagccaaattgttgggtgctagtacaaacccaccaagatgatgttgcaactagcaggttactgtggaaattttggcagtagttcaccgacactgagattttcttcaactatgtgaccagtgttctctttttgcttaacttattttcttctttctttatagttggatatagatagaatctgacggtcagtggctcaacttttctagtaagagaggttatttagtggtgtctgttctattacaaatagttggtggtactgggcatcttaatgctactgatcttgatggagtattttaatgttgtgtttctacacctggattaccctcttctcttttctgggtgcagatttcgagttcctgtagatcagagaagggctgctaatggaggctttgctgctaagcaaccacttccttcccctcagaagcagcaggagaatgtggatatagtgccaaagcaaaagcctcagacgctggattccctgtttgcaaacatgaaggagcaaagaatgagagttttgtcaatgcagaataatgctgtgcaacgcaatggaggtggaaataagaggctcccatggagaagaggccgatttggcaactaagttgttcacacaatggggaatttcatgatatcaccttttgaacctatgtcctggcctgctgcgtcctgactcctcctgggttgatgcaagtgaaaa

SEQ ID NO: 5698 - DNA, 506 bp, Glycine max
agagaagctatggaggtgctcaaggatatgtttggacccaacatacctgatgccactgatatacttgttcccagatggtggaataacaggttccaacgtggcagctacagcaactatcccgttatctctaatctccaagtagttcgtgatgttaaggctccagtaggtcgcattttctttactggagaacacacgagtgaaagatttagtggctatgtgcatggtgcatacctcgcaggtatcaattctagcaaagaactacttgaagaaatgagaaagggccaccaaagaaaaaaccagagccaaagtcgagtattagagcccttgtcagcattaaccgaatgcaatattcctagacaataaaatctcaggggcaagcttagaatggcactacacaatcatccaacagcaaaccgaaataatccccacatctttgtcctacaactgtattcactattcatcacctctgtttcatcagcaataatagtaaaagaaaaataatcaag

SEQ ID NO: 5699 - DNA, 431 bp, Glycine max
tagcaatgctaattggatagcagttttgatatggagatctttattcgccgtgtcaagggaatggaattattgctggctgcatcttactctttacatgcttctcacgctgtgtattggtactgtattttctggtctggggcattctctgtcttctgttgtgacaagagttgctgcaatttttgtatttgcatcattctcttcccttctaagcattgccagggtgcctgcacttttgaaagacatcaaggttcgtgcctgtgtagaatcaaaccagcactccagcacattagttttcttacttgcacagctcttgtccagcatcccatttctttttctcatctccatttcatcaagtctaatcctccacttcctcctttggttgggaagatcaattcagcctgttaatgtactttgtgctgaattttttcatg

SEQ ID NO: 5700 - DNA, 448 bp, Glycine max
tcgttttgatcagtttgcccaacaactctgaaaaggatatgcaggcaacatggaattccaaggtggccatcccgcaagattaataaagtcaatcgatcattgaagaagatacagactgtgcttgactctgtccagggcatggaaggagggttgaagtttgatccttctatgggggcgtttgtggcaggagggtcaatcatccaggaaattgatgcacctaaaagtactataaaagaccccgtgcctgttactcaagatgcattctcagtaccacccgcaccttgtagtgaaggtgagaatttttcaattaagttggagggaaaattgaagaaaaccaatgtttcttcagttgattacagtgaagattcaaaatctatggcaatcaatgatgggttcgtgccaaaatgcaagccctttgcaccaaggttcaggattgtcctgaacaagc

SEQ ID NO: 5701 - DNA, 847 bp, Glycine max
gatactgggatggacgtagtattttttttgtcccttttgtgttgattctgttctttgtaattctaatcctaggataaaagttcctgaactcttagaagatgaatggttcaaaaaaggatacaaacaagcaacttttataatggaagaggatgtcaatgtagatgatgttgctgctgctttcaatgattctaaggaaaatcttgtgacagagagaaaagagaaaccagtgtcaatgaatgcttttgagctcatatctaggtcacaaagtttcaaccttgaaaatttgtttgagaagcagcaagggtctgttaagagagaaacacattttacctcacagcgccctgcaaatgaaatcatgtcaaaaattgaggaagctgcgaagcctctgggatttaatgttcacaagcgaaattataagatgaagctgcaaggtgataagagcggaaggaagggtcacctttcagttgctacagaggtttttgaagtggctccctccttgcacatggtggaactgcgaaagaccgggggtgacacactagagtttcacaagttctacaaaagcttttcatcatcatcagggttgcaagacatagtgtggcattctgaagcaaaacaatgaagaatcaagatgtgcatgcatggaagatatcatgcacgtatttttgttggaagatatcaggaactttttttgttcatggaagatatcgtgcttagctaaaactggagcatgttgagttgggagagtctgctctaatgtttgatagggtaaaaacaaaacctagatcgtacaaaacttagagtgtatatttccttgaacttttattcataatatttcatgaccttaatt

SEQ ID NO: 5702 - DNA, 859 bp, Glycine max
taagcatcagactcattaaatgttcaatgtactttgcagccagagaatcttcttctggactcaaatgctgttctgaaagttacagattttggattgagtacgtatgcgcaacaggaggatgaacttctccgcactgcttgtggaactccaaattatgttgctcctgaggtgcttaatgatagaggttatgttggttctacatctgatatctggtcctgtggagtcattctctttgtgcttatggctgggtacttgccctttgatgagccaaatcatgcgacactgtaccaaaaaattggcagggcccaattcacatgtccatcatggttttctcccgaggcaaagaaactattgaagcgtattcttgatccaaaccctctaacaaggataaaaattcctgaactcttagaagatgaatggttcaaaaaaggatacaagccaacaacttttgtagaggaagaggatgtcaatgtagatgatgttgctgctgctttcaatgattctaaggaaaatcttgtgacagagagaaaagagaaaccagtgtcaatgaatgcttttgagctcatatctaggtcacaaagtttcaatcttgaaaatttgtttgagacgcagacacagggggttgataggagttatatacttatgctctaacggtatacatgctaatgttctcattccaactcactttgaaacctgccgaacctcttggattctaatcacacaatcgatgttatatgatgaagatcctgagctgaatgaacgggatgactgtaagcaattgactaacacaaatgctattgatagtgatatataattgaacatggaactactgatactgagctctgcattctgactgaac

SEQ ID NO: 5703 - DNA, 451 bp, Glycine max
ttcgctacaaataccgttggtggtggctacattagtggtgaagagattctaagagatatgtggcaagtgaacatgagttactcaaagtggtttgatcttggaatcttgctagggatgattattctgtatcgtgttctctttttgattaacatcaaaactactgagaagctgaagccaatcattgtatcattcatgtcatcatcaaggtcttcacctaagccaacaatacagatcatgcagaatcccaatgcaactcctttacaagaagttcaagtcatataaaattgaagaatctgtaggttcaagtgtggaggagaaaaaccattttcatcttcatatagatttgtgagagatcaagagatattaaaaagtctatcgtactccatcaaacccaaagtagagaacctctagatgtgtatcttcgtttatataaatgaaaagtgttcttaat

SEQ ID NO: 5704 - DNA, 890 bp, Glycine max
gaggaatccgggcgagccgcacgcgtccggaagttgcgagagtgaagaaatggcgcaagacttggcattggatttggaggagcttcgccgcctccacagcatcgccaaaagacctcgaaccctctctcttctctcctccgaaattcgtaacctcgaaaagttatcgtcagaggaagcttctgcgcagattccggcgccgatttcgaccggaactaaagtggcgccttcacctgcgctgaagtatgcggcactcgcgtcgttcagttgggaccaggatagtgacaaagttaagatatatgtgttaatggagggaatcgatgagaataaggttgaatccgagtttaagtcgatgtcattcgatgttaagttccatgatgttcaagggaagaactaccgatgtgcaatatcaaaattgcacaatgagatagtaccagagaaatgcaaggttgtggtcaagcctaaaagggcaatcatcacattggtgaaggcttccaaaggaaactggctagatttgcacttcaaagaagacaagcttaagccaaatctggacaaagagaaagacccaatggcgggaattatggacatgatgaagaatatgtatgaggatggggacgatgagatgaagaaaaccattgcaaaagcatggactgatgctagaactgggaaaactgctgaccctttaagtagctaccgttgagcgaccaaaagaggttcagatgcttagttcctgtttctagagaatgatttgctctatttaattacattatcttgttttaaaatgaatgtttggcctgtgttcatggtacttgtagaagattagatgtgcagttattgttaccaaagttatactttgatataatgatgcgattttcgtctgtggttgctcgaat

SEQ ID NO: 5705 - DNA, 1139 bp, Glycine max
ctttctgtctctctttagtctttctctttttctctctctccattccgtgttttcagctccggtaacctctccttctccgccgccgttgctatctccgccgtgaccttccatccctcaacgccccacagatcttcaatttgattgcttgggtcaacaatttctgtcattctcaatcatggcaactagacttcagtttgaaaataattgtgaagttggagtcttctctaaactcaccaatgcttactgtttggttgcgattggaggttctgaaagcttctacagtgtatttgaagctgagttagcagatgttatccctgtggtcaagacatccattggtggtactcgtatcattggtcgtctttgtgctggaaacaagaatgggcttctcttgccccataccaccacagaccaagagcttcaacaattgagaaacagtctacctgatcaagttgttgttcagcgaatagatgaaagattatctgctctgggaaattgtatcgcatgtaatgaccatgtggccctcacacacactgatcttgacagggagactgaagagatgattgcagatgttcttggagtagaagttttcaggcagaccattgctggcaatattcttgttggtagttactgtgccttctccaatagaggtggcttggttcaccctcatactttcatagaagacttggatgaactttctacactcctcttcaggtcctcctttgccgtggctgggaccgtgaaccggggtagtgaagtaatagcggctggaatgacagttaatgattggaccgcattttgtggttccgacaccaccgcaacggagctatctgtgattgagagtgttttcaagctgagagaagcacagcctagtgcaattgtggatgagatgaggaaatccctcattgatacctatgtctgaactgtggtagtaatagtgttttgttttgtgcaagatattgcactgctcattgttgagatcttctaatttaagttttggtgatagtttgtcttttgtaatgtgggcatatatattcccatcgtgttgtactcttttttcgttaattgtgatatcatataatatcatgtgctgatttttgttaccaacaaatcaaatgcatgtaagggtgctcttgcgttcc

SEQ ID NO: 5706 - DNA, 561 bp, Glycine max
ggtacagtcaagtacaaaacgcaataccctaatttgtttctctgtctctgtctctgtctctctctccattcgtgctttcagctccggcaacctctcttccggcgccgccgctatctcggccgcgcaccaatcttcaatttgattacttgggtcaacgatttctgtcattctcaatcatggcaactagacttcagtttgaaaataattgtgaagttggagtcttctctaaacttaccaatgcctactgtttggttgccattggtggttctgaaagcttctacagtgtatttgaagccgagttagcaggtgttatccctgtggtcaagacatccattggcggtactcgtattattggtcgtctttgtgctggtaacaagaatgggcttctcttgccccataccaccacagaccaagaacttcaacatttgagaaacagtctacctgatcaagttgttgttcagcgaatagacgaaaggttatctgctctgggaaattgtatagcatgtaatgaccatgtggccctcacacacactgatcttgacagggagactgaagagatga

SEQ ID NO: 5707 - DNA, 331 bp, Glycine max
gatgaaattgacttctttgggttcggcggtaccctacacttagttgttgtgttgctgtgcacccggtgagcggtgacctcttccgctttgatcttcttctgtccagggtaaccaatctggttacttgggtcaaagatttctggcatctctgtcatggcaactagacttcagtttgagaataattgtgaagttggagtcttctcaaaacttaccaatgcctattgtttggttgctattggaggttccgaaaacttctacagtgcatttgaggctgagttagcagatgttatccctgtggtcaagacctccattggtggcactcgtattgttg

SEQ ID NO: 5708 - DNA, 264 bp, Glycine max
tttgtttctctgtctctgtctctgtctctctctccattcgtgctttcagctccggcaacctctcttccggcgccgccgctatctcggccgcgcaccagttattcttctcttcatatcttcaatttgattacttgggtcaacgatttctgtcattctcaatcatggcaactagacttcagtttgaaaataattgtgaagttggagtcttctctaaacttaccaatgcctactgtttggttgccattggtggttctgaaagcttct

SEQ ID NO: 5709 - DNA, 1204 bp, Glycine max
acgtaaagcaacttctcatgctgttctgtccaaggacccaaattcaatggattcggtttcctccgaagcctccgttaatgataagattcctgccagtccacttcgggtgccgcccagtccgtcaagattctcaatgtctccaaaactcactagacttcaatcattgcatctcaatctgaaccaagttacaagagctacccaaaacttctcagaaacattacaaataggagaaggaggttttggaactgtctacaaggccaagttggaagatggcctggttgtggctgtaaaacgtgcaaagaaggaacattttgatagtttgagaacagaattcagcagtgaaattgaacttttggccaaaattgatcatcgaaacctggtgaagctactaggttatattgacaaaggaaatgaacgccttcttattacagagtttgtgccaaatggtacccttagagaacatttggatggtatgcgtggaaaaatcctagacttcaatcaacgcctcgaaattgcaattgatgttgctcatggcttgacctatctgcatctgtatgcagaaaagcaaattatccatcgagatgtgaaatcatccaacattcttctgacagaaagcatgcgagctaaagttgctgattttggatttgcaaggctaggaccagtgaacactgatcagacacacatttcaaccaaagtgaagggaacagttggttatttggaccccgagtatatgaaaacataccaactcactcccaagagtgacgtttattcatttggaattttgcttttagaaattgtgacagcccgccgtcctgttgagttgaagaaaactgttgcagagcgggttacactcagatgggccttcaggaagtataatgaaggaagtgtggtggaacttgtggatcctttaatggaagaagctgtaaacggagatgttctgatgaaaatgcttgatttggcgtttcaatgtgcagcccccattcgaacagatagacctgacatgaaatcagtgggcgagcaattgtgggcaataagggcagattacctcaagagtgcaaggagataataagtggtggtatttggtgatgatattgtgaggtggcaaccaattgaagctgtctcagaatacaagacctgaataaaagtaacaaacttagacaaaaaaaaaaatggtacaccgaggagcttccttatcttgccactg

SEQ ID NO: 5710 - DNA, 1454 bp, Glycine max
cccacgcgtccgtgcactagagaatttggtatacagcttctgaaggcaatctttactagccagagcataatattccagaagcaaattaatttcagggcacatatttacaacttagacacaaacccttccatttccattatcctctccgacgtctccgtcagtcacatacacatactcttcttcttcttctgcttccatggcgctcactgcttcgctcgctaacaacgcatttctgaaaatcccaacactccatcatggcgaatgctcactgtcttcgtcatccttcatcggttctcggctcacactctcgcgctcttctactcttcaagggaaccaattgctttcgagaaagcaattcgtggttttcgcgaggaagatttcggggttggaggaggccatgaatatcagaagagaacgtgaagttcgagttgtgccaaagtttaagaaaaggcctccattaaggcgtgggagagtatcaccacatctccctgttcctgaccacataccaaggcctccttatgtaggttcagatatacttccagaaattgcaagtgagcatcaaattcatgattctgaaggtatagctaaaatgagggctgcaggtgagcttgcagcgcatgtcttaaactttgcaggaactatggttaggccttccataacaactaatgagcttgataaagcagtgcaccagatgataattgatgctggtgcttatccctcaccccttggctatggtggatttccgaaaagcgtgtgcacatcagttaatgagtgcatgtgccatggaatacctgattctcggcagttacagaatggtgatattattaacattgatgtgacagtctacctggatggatatcacggagacacgtcaaagacatttttctgtggggaagtcagtgatgaactgaaaaatcttgtcaaggtaactgaagaatgcctggagaagggaatagctgcgtgcaaggacggtgctctctttaggaaaattggaaagagaatcagtgagcatgctgaaaagtatggctatggtgtagtggagcgttttgttgggcatggtgtgggaacagtgtttcattctgaaccaattattatacacaatcgcaatgagaaggcaggccgcatggttgaaggtcaaacatttacaattgagccgattctttcaatgggaagcattgattccattacatggccagacaactggacaacactaacagctgatggtagtccggctgcacagtttgagcataccattttgataactaagactggagccgaaattttgactaaatgttgacatggtaattctttgtttaatccacattgatgttatgaaatatgaagagtttgtgtctaagttgtaaatctgtgccctgaaattaatttgcttctggaatattatgctctggctagtaaagattgccttcagaagctgtataccaaattctctagtg

SEQ ID NO: 5711 - DNA, 349 bp, Glycine max
  unsure (1)..(349): unsure at all n locations
gaactatatacatggggtgatggtacccataatgctgggcttcttggtcatggcagtgatgtcagtcattggataccaaagagaattgctggtccattagagggacttcaaattgcatttgttgcttgtggtccatggcacacagccttggtaacttcaacagggcagctgtttacatttggtgatggaacattcggtgtcttgggccatggagataggcaaaatgtttcatatcctagagaagtagaatccttattggggttgagaacaatagctgttgcttgtggagtgtggcatactgcagctgttgtanaggttatcgcaacacactccagtacaagcatatcat

SEQ ID NO: 5712 - DNA, 1632 bp, Glycine max
cctggccctgtgttaattgatatacctaaagatattcagcaacagcttgcgattgctaattgggatcaaccaattaggttacctggttacacgtctaggttgcctaagtctcctaatgagaaacatttggagcttattgtgaggttggttatggaatctaagaaaccggttttgtatgttggtggtggttgtttgaattctagtgaggaattgcgagcgttttgtcgagctcaccggtgttcctgttgctagcactttgatgggtcttggtgcttatcccattgctgatgaaaattctcttcagatgcttgggatgcatgggactgtttatgctaactatgctgtggacaaggctgattttttgcttgcgtttggggtgaggtttgatgaccgtgtcacggggaagctcgaggcttttgcgagccgggctaagatagttcacattgatattgattcggcagagattggaaagaacaagcaggcgcatgtttcggtttgcgctgatttgaagctggcgttgaaggggattaatcacatgttggagagcagaggggttggggggaagcttgatcttggaggctggagggaagagattaatgtgcagaaacacaagtttccattgggttacaaaacattccaggacgccatttccccgcagcatgctattgaggttcttgatgagttgacaaatggggatgctattgttagtactggggttgggcagcatcaaatgtgggctgcacagttttacaagtacaagagaccgaggcagtggttgacctcggggggtcttggagccatgggttttggattgcctgcggctattggcgctgctgttgctaaccccggcgctgttgtggttgacattgatggagatggtagtttcatcatgaatgttcaagaattggcaactataagagtggagaatcttcctgttaagatattgttgttgaacaatcagcatttgggcatggtggttcagtgggaggatcggttctacaagtccaatagagctcacacctatcttggagacccgtctagcgagagcgagatattcccaaacatgctcaagtttgctgacgcttgtgggataccggcagcgcgtgtgacgaagaaggaagagcttagagcagcaattcagagaatgttggacacccctggcccctaccttcttgatgtcattgtgccccatcaggagcatgtgttgccgatgattcccagtaatggatccttcaaggatgtgataacggagggagacggtagaacgaggtactgattgcctagatcaaatgttccgtgatgcttggtttgtacaatatatatataagataatgctttcatagttgcaggatttggcctgtggtgagcatcatagtttgcagtagttttggtagcaagactttgtattttccttttatttagcttactatatgcagtagcagctatctctgtaatcttatatccatctcctgttgtttgtattgtgccgttgggttttttgatgtagtgagattgaaaatgatgtgctagtaatattattgctgttagaaatccaagcagagaatctgttgtagaaatcaaaagcaaatgaagcacttttgaaaatgagatgaggatatcatgttttacata

SEQ ID NO: 5713 - DNA, 403 bp, Glycine max
gcgagaacgacccaaagagaaataaaccacttatatatatatatatataaaaataaaaaaattagcatcatacaccatatctagttaccttcaacataaaatggaagaatccaagggttttgttagtggtgagactcaaaaacctcacccaaaaatgccttctagttccttcccaattcctttgccagggaggaatcgccatggccagcagtgtccatcaagatatgccccacaatggaggcaaagggcaatactagggcacaccgtgggaaaccctagcggggcaagtgagaatacaactttgaaggtgtaagtcactcgaggagtaataatacttagtatgaagatcttaaacgtttgaataaccgttgtcgttgttatgttgtcttttctatatcgtata

SEQ ID NO: 5714 - DNA, 1205 bp, Glycine max
gttttcaaccagaccgtccttcgtcagttaactatgggctaatcacaattcaggaagcccaaaactattaaagaaaccgacaacacaaaggatttgcagaaagtgcagctacttagttccattttcatcctctctccattaactttcagtcaaaacaaaacaaaacctctttaggtgtgaaattccacgtgccaaaatcatctccgaggcaccaacatcggcagccacatatttctttatttattggtacaatattgtttttttcttcttcttcttcttcatttttcattaacatatatttctttttcgaagaatcaaaggtagaatctacaatattaaaaaaaaaactgtataagaaattaaaggtagtggtagtggagtgtgtgtgtgtgtgttaattatgtgtatgcatggtggaagctagagtaatagaggcgcaacaagatcactgttgttgtgggggctatagccagctcctcatcataagtggatcaatacataaaaaaggttaattagtaaagtcacacgtgctttctaacggtggcgcaccagaggggtttaggttcaggttcggggaagttcttggcggcggaacaaggcggcgatgaggaaacggaagagagtactgtaggttcggttccgagccatgtggtctctgcagcttcggcccaaaccaataatcagtgggtcccggcaagtggttctccaatgatgtcacgttttatgaatgctccttcctccccaggattgtctctcctctgtttggcgttggccacaagagagcccgtgaagacgacacgggtgcgggtgcaagtgtgggtcttggtgttgttgcagcagcttcttcacaaacacaagggaatgaaagtggcggcggcgacaggaggaggagatacaggggagtgaggcagaggccgtgggggaaatgggccgcggagattcgcgatcctcacaaagcggcgagagtgtggcttgggacattcgacactgccgaggctgcggccagagcctacgatgaagccgcattgaggttcagaggtaacagagcaaaacttaatttccccgaaaacgttgtaccggttcacctcctcctccggttcccgatttaccggcaagtgcggtagccggttccgattccatttccggttccggttcagtggtggcaggtttttcgccgacgctgatgcagggagcgccgtttcagg

SEQ ID NO: 5715 - DNA, 527 bp, Glycine max
cccaaaccaatcagtgggtgccgcggggaagtggttttcccatgatgtcacgttttatgcatgcgccttctcccgttctgtcttcttcgcatcctcatttgggagttggccacaagagagagcgtgaagatgacactggcgctggtgcgagtggaggtgttgctattgcagcagcttcttcacaaacgcaaacacaagagattgaaagtgctggcggcgacaggaggaggagatacaggggagtgaggcagaggccgtgggggaaatgggcggcagagattcgcgatcctcacaaagcggcgagagtgtggcttgggacattcgacactgccgaggctgcggccagagcctacgatgaagccgcattgaggttcagaggtaacagagcaaaacttaatttccccgaaaacgttgtaccggttccacctccttctccggttcccgatttaccggcaagtgcggtagccggttccgattccatttccggttccggttcagtggtggcaggtttttcgccgacgctgatg

SEQ ID NO: 5716 - DNA, 417 bp, Glycine max
gttttcaaccagaccgtccttcgtcagttaactatgggctaatcacaattcaggaagcccaaaactattaaagtatgtatatctgctctctcttttttgtttgactgagcatagtattcaactcaaagatgatcactgtttctttctttctctatatctcaaaaaggaaaccgacaacacaaaggatttgcagaaagtgcagctacttagttccattttcatcctctctccattaactttcagtcaaaacaaaacaaaacctctttaggtgtgaaattccacgtgccaaaatcatctccgaggcaccaacatcggcagccacatatttctttatttattgaaggaatcagtatataaaacacctgctttctaacggtggcgcaccagaggggtttaggttcaggttcggggaagttc

SEQ ID NO: 5717 - DNA, 1303 bp, Glycine max
gtcgtgagagcgcatcaaccagtacagtgtttctccctccaactttgacattaatttttggagctgatgtgactcatccacatcctggagaggattcaagtccatcaattgcagcagttgtggcttcgcaagactatcctgaaattacaaagtatgctggtttagtttgtgcccaagctcataggcaggaactcatccaggatcttttcaaacaatggcaagatccagtcagaggaacagtgactggtggaatgatcaaggaacttcttatatcttttaggagagctacaggacaaaagccacaacgcatcatattttatagggatggtgtgagtgagggacagttttatcaggttctactgtttgagcttgatgctattcgaaaggcatgtgcatccctggaacccaattatcagcctcctgtgacttttgtggtggttcaaaagcgtcaccacacaaggctctttgctagcaaccatcatgataagagttctgttgacaagagtggcaacatattgcctggcactgttgttgactccaaaatctgccatcccaccgaatttgacttttatctctgcagccatgctggaatacagggtacaagccgtcctgctcactaccatgtgttgtgggatgaaaacaattttactgctgatgccttgcaaacactcaccaacaatctttgctacacatatgctcggtgcacccgatctgtttcaattgtgcctcctgcatactatgctcaccttgctgcattccgtgcaaggttttacatggaacccgagacttcggatagtggctctatgacaagtggtgctgttgcaggccgtgggatgggtggcggcggtggtggtggtgtagggcgtagcacccgggcacctggtgctaatgctgctgtgagaccattgcctgcactcaaagagaacgttaagagagttatgttttattgttaagaagatatgatatgcatgccaaagattacttttagcaaccttgttttgtggaggagtgctttttcccttgctgctttcaaactatctccagtggtgtggtctgtgtcattagtattgagttttttgaaactatttaaggtgtgtggtgtgttgaataaggttgtccagtgtggagtggagtgttttatctttgctatgagggtctgatatttgatgcaaactatgtttattgtcgaaagtttcttactttgttgttgccttcgagaagttaaatttgggtgagtcgagtttttgatgagatatataaaatttgctgcttagtggtggtacttaagaaggtttaagataat

SEQ ID NO: 5718 - DNA, 672 bp, Glycine max
  unsure (1)..(672): unsure at all n locations
acaaggtattgncctgttggaagatcattttattcacctgatttgggtagaagacagcctttaggtgagggattggaaagctggcgtggtttctaccagagtattcggcctacacagatggggctatccctgaacattgatatgtcttccactgcatttattgagccattgccggtaattgatttcgtaactcaactgctgaacagagatgtatccgcccggccactttctgatgctgatcgtgtgaagatcaagaaagctctccggggtatcaaagttgaagtgacacatcgtggaaacatgagaagaaaatatcgtatctctggtctgacttcacaggcaaccagagaattgacattcccggtagatgaaaggggaaccatgaaatctgttgtggagtacttctatgagacatatgggtttgtcattcaacatactcagtggccttgtctgcaagttggcaatgcacagagacctaactatttgccaatggaggtttgcaagatagtggagggtcaaaggtactcaaaaaggcttaatgagaggcaaatcaccgctttgctgagagttacatgccagcgtcctggtgagagggagcgtgatatcatgcagacagtacaccacagtcagaaaaatgctgtcgggccattttttttatggatttatttaata

SEQ ID NO: 5719 - DNA, 1208 bp, Glycine max
ggcaaccagagaattgacattcccagtagatgaaaggggaaccatgaaatctgttgtggagtgcttctatgagacatatgggtttgtcattcaacatactcagtggccttgtctgcaagttggcaatgcacagagacctaactatttgccaatggaggtttgcaagatagtggaaggtcaaaggtactcaaaaaggcttaatgagaggcaaatcaccgctttgctgaaagttacatgccagcgtcctgttgagagggagcgtgatatcatgcagacagtacaccacaacgcataccatgaagatccttatgccaaagaatttgggatcaagatcagtgagaagcttgctcaagttgaagctcgcatccttcctgctccatggctcaaatatcacgatacgggcagagaaaaggattgtcttcctcaagttgggcaatggaatatgatgaataagaaaatggttaatggggggacagttaacaactggttctgcataaacttttcaaggaatgttcaagatagtgttgcccgcggtttttgctatgaacttgctcagatgtgttatatatctggaatggcatttacacctgagccagtagttcccccagtcagtgctcgccctgatcaagtggaaaaggttcttaaaactcggtatcacgatgccaagaataaactgcaaggaaaagagcttgatttactcattgttatcttgccggataataatggatcactatatggtgacctcaaacgtatttgtgagacagatctaggacttgtttcacaatgttgcttaactaagcatgtcttcaaaatgagcaagcagtaccttgcaaatgttgctttgaaaattaatgtcaaagttggagggagaaacactgtactggttgatgcgctctcacgacgcattcccttggtcagtgacagacctacaattatttttggagctgatgtgactcatccacatcctggagaggattcaagcccatcaattgcagcagttgtggcttcgcaagactatcctgaaattacaaagtatgctggtttagtttgtgcccaagttcataggcaggaactcattcaggatcttttcaaacaatggcaagatccagtcagaggaacagtgactggtggaatgatcaagtactctacttccctttttctcatatggaacttcttatatctgttaggagagctacaggacaaaagcc

SEQ ID NO: 5720 - DNA, 439 bp, Glycine max
cgctcggtgcaccggtctgtttcaatcgtgcctcctgcatactatgctcaccttgctgcattccgcgcaaggttttacatggaaccagagacgtcggatagtggctctatgacaagtggtgctgttgcaggccgtgggatgggcggtgtagggcgtacacgcgtgtacctggtgccaatgctgctgtgagaccattgcctgcactcaaggagaacgtcaagagagttatgttttattgttaagacatgaatgccaaagaagattactgttaaacctggtttagtggagtgcttttttgctttcaaagtttctccagctctccagcagtggtcattaggtattgagtcttttgaaactatttcaggagtgtggtgtgttgaataaggtgtgttgttttgaaagtatctcctgtgaggagtgctttttatctttgctgctg

SEQ ID NO: 5721 - DNA, 631 bp, Glycine max
aatcaaaactcaaaacttctcttttctttcattctctctcttttattcttatcatcacaatgccttcaattcccgaagagcccctcctggctccgaacccggatcgcttctgcatgttcccaatccaatacccgcaaatctgggaaatgtacaagaaagccgaagcctcgttctggacggcggaggaggtggacctctcccaggacctccgccactgggactccctcaccgacggcgagcgccacttcgtcacccacgtcctcgccttcttcgccgcctccgacggcatcgtcctcgagaacctcgccgggcgcttcaccaaggaaatccaactccccgaggcccgcgccttctacggcttccagatcgccatcgagaacatccactccgagatgtacagcctcctcctcgaaacctacatcaaggactccgcccagaagagcccacctcttccgcgccatcgacaccatcccctgcgtcgccaagaaagcccagtgggcccttcgctggatcgattcctccgactccttcgccgagcgtctcgttgccttcgcatgtgttgaaggtattttcttctctggaagcttctgcgctatcttctggctcaaaaaacgaggactcatgccggggc

SEQ ID NO: 5722 - DNA, 648 bp, Glycine max
ccaaacaaaaccggaatcatatcccaaactccttcctccctctgggtcttgaggtacacaaccctaatcaccgcttcgagctctgtcattgtctcaagttccaggtttcagcgatttcgatctcgcatagcattctacaatggccactattccagttaaccccaagcctttcttgaacaatttgactgggaagcccgtaattgtgaaactgcaagtggggaatggagtacaagggctatctcgtttccgttgattcctacatgaacttgcagctggccaacactgaagagtacattgagggacagtttactggaaatttgggagagattttaatcagatgtaacaatgttctctaccttcgaggagtaccggaggatgaggaaatcgaagatgttgcagaagactagatagtgataaaagctgctaatggctatgacataaaatgaactcgaattttctactgtttttgtatcttaacttaaatgtaggtttttttgtagttgtgtagagatttgaaatgatgcactcgcttgtgtatagggtgcctatgttcaagttgtctgttattttattttcatgcttctgaacaggttatttctctgtttatgcaatcaccagtaatcaatatcatttcaacagaaaaaaaaa

SEQ ID NO: 5723 - DNA, 1164 bp, Glycine max
  unsure (1)..(1164): unsure at all n locations
gagtaaaccactctctcctactatcttttaaatccttttgtaccctcaactccctaagccactagtacctcacaatgcccattgtagcaacctctcttctcttctttcttcttaatttatgcctcagaggcacttatgctgactatggaggtggttggcaaggtggtcatgccacattttatggtggaggtgatgcatctggcacaatgggaggggcttgtggatatggaaatttgtacagccaagggtatggcactaacactgcagcactcagcactgctctattcaacaatggcatgagctgcgggtcttgctatgagatgaaatgtgacactgaccccaaatggtgcctccccggtagcataatcgttactgccacaaacttctgcccccctaactttgcattggctaacaacaatggtggctggtgcaaccctcctttgcaacactttgatcttgctgagcctgctttcttgcaaattgctcaatacaaagctggaattgttccagtttccttcagaagagtctcctgtgtgaagaaaggagggatcaggttcaccatcaatggtcactcttacttcaacttggttctcatcacaaatgttggtggagctggagatgttcattctgtgtccatcaaagggtctagaactgggtggcaaaccatgtctagaaactgggggcagaattggcaaagcaactcctacctgaatggccaaagcctctcttttcaggtcactacaagtgatggcaggactctcactagcaacaacattgtgcctgctaactggcaatttggacaaacatttgaaggggcacagttctaggaaccataataatttttaagttcacattttgtgtgtaatatatgatggcattgttcacttgtttttgttatagttggaaagggtggggaaagagaagaaaagaatgtagattaggaggagtttctggccaacatggcccctaatgctgtggtggctatatggcacccgctaggactaatataatataacgtctttaattttatatctgtcacattgatcgatgccttttgatgaactaaaaggtgttgatgatctcaattgccttgtatttntatcccccaaatggtacaaaaaccaatttggggggccattgatatcaacttgaatatgctttctg

SEQ ID NO: 5724 - DNA, 605 bp, Glycine max
cgacaccgctcaatgtttcctttgtctccttcttacatttacttgattacatcccctccgttcatggaccaatatgctcaagcttcttcttccatcctcatcctctaaactcatctccagacacattttctcacaactatcacgccccaccaccaccatgtccataaatctacgcacccacgccttcgcgggtaacccgctccgatcccccaaccgggtcgacccgttttcgcccgcctccgcgctcgagaccctcacgacccgaatcctcgacgccgcgcacgtgtcctcaccgtccgtggattttaaggtcttgccttttagaaatgggagggtgctggcttcttcggagagtggtgacacgtggcgcctcgggtggatcgcgctggaggaagtgaagggtctattgggtgcggatttgagcgcggactcgttcgtttatttggggtcagactcggactcagactcggtggtgtactgggcgatcgacgtgtcgagggagagtgggttggtgacggaattcagtggcgtgaggttgtgcttcgtggagctcaggacgctcatggtcgctaccgattgggtggatttgaagaccatggggaacc

SEQ ID NO: 5725 - DNA, 411 bp, Glycine max
caagctgtcgcctttgaacttgaggctacaaaacttgtaaatgatgcagagattgccctacagcgagcagataagtctaattctaattcaaatgctgataccatagaatctacacaagcacaagatgttgttgtggctgttcctgaagaggagaaagtggttcaaggtgtttctggtgatgttgatagagacagagatttggcaattgacgacgaatctgtgcttgccaatttatcacctgaaacactatctgataaaaccagccaagttttggaagacaaaacacagtctgattatgtaagtgataatgagaatgctgtgcaaacaagaaagcagggtatacagatagatttgaccagagatagttcactagctcccaaggcattattgaaaaagtcttctcgattcttt

SEQ ID NO: 5726 - DNA, 678 bp, Glycine max
  unsure (1)..(678): unsure at all n locations
tattaagacacgagacaagatggaaactccgagaagagacgaaaacccacgtgacatttttgcccctcacactttcccctgtttactccacgcccctcacttccttgttccttcataaaaacaacacttcctcctcttgcattcggcaaccaaaccatgcagcgcacggcgttggcgacagatgaaccacggcggcgctccggcgacgcgtcgcggagggggagaaggtgttcaaggggagcgaggtgttcggtgacacgtcaccaaattacttgaagaccattttggccctggcgttgtggctcggaaccattcatttcaacgtcgcgttggtgctcttcgcaatcttcttcctctctctccacaaagcattctcttctttcggtttgcttttcgtgctcatggtaattcctgttgatgaaaagagcaaattcggtcgaaaattatccaggtacatatgcaagcacgtttgcgcttactttcccatcacgcttcatgtggaggacatgaaggcctttcatcccagtcgtgcttatgtttttggttatgaaccacattcagttttgccaattggagttgttgcattagctgacaacacatgttttatgcctcttcctaaaatanaagttcttgctagcagtgcgatattttacacaccatttttgagacacatatgga

SEQ ID NO: 5727 - DNA, 1620 bp, Glycine max
tcgcttaaactttcatagtcatagctcacaatctgcttcggctttggcttcagagtttgtgtaaccaacttcacctttccttccttccttccttcttccgatttcgaagatggctgaagcagaggatgccgtacgacgccgtaatgcggtcgccgagtatcgaaagaaacttctccagcacaaggaattggaatccagagtccgatccgtcagggagaatttgcgagcttcaaagaaagagttcaataaaacagaagatgatttgaagtctcttcaaagtgttgggcagatcattggcgaagttctcaggcctcttgacaacgaacgccttattgttaaagcaagcagcggtcccaggtatgtggttggttgccgcagtaaagtggataaggaaaaattgacttccgggacaagggtggttctcgatatgacaacactcaccataatgcgagctcttcctcgagaagttgatccagtggtttacaatatgttgcatgaagatcctggtaatatcagctattcagctgttggtggcttatctgatcagatcagggaattgagggagtcaattgaactacctctgatgaatcctgagctctttcttcgagttggaattaaacctccaaagggtgttctcctttacgggcctcctggtactggtaaaacattgttagccagggctattgccagtaatatagatgctaacttcctaaaggttgtttccagtgccataattgacaagtacattggagaaagtgccaggttaatcagagagatgtttggttatgcacgtgatcaccagccgtgcatcatttttatggatgagatcgatgccattggaggtcgccgtttcagtgagggaacaagtgcagatcgtgagattcagagaacgctaatggagctgcttaatcaacttgatggatttgatcaacttggaaaggttaaaatgataatggcaacaaaccgacctgatgtacttgaccctgctctcctgcgtcctgggagattggatagaaaaatagaaatccctctgcctaatgaacaatcaaggatggaaattcttaagattcatgctgctggtatcgctaagcatggtgaaatagactatgaagctgttgtgaagcttgcagagggatttaatggggctgatcttcgaaatgtctgcacagaagctggaatggcagcaattcgtgcagagcgtgattatgtgatccatgaagattttatgaaggctgttaggaaactgaacgaggcaaagaaacttgaatccagtgcacactacagtgctgattttggtaaagactagaatctattgcaaaattcttgcagagccatggatatctaggcagtgcatcttgagttggaaatacctcaggcaagttactcaattcgtagggctaagcgtgatgttccctttgggttgttctggcttgtgttttccgaattctaaatttggaagaagggtatctttatcaagcggatcaaatcgatgttcaaatgcattgtattatcattgcccccaccccaaccaacccaaacccctttttttttctggattgtagaagtgcgactcattttatactggatctcggcatgtgcacaatttgctttatatttttt

SEQ ID NO: 5728 - DNA, 438 bp, Glycine max
gcgttctgcttcggttcacaaggcaccagctgctccgttctgcttcggcttcagagtttgtgtaacattctccttccttcttccgatttcgaagatggctgaagcagaggatgccgtaagacgccgtaatgcggtcgccgagtatcggaagaaacttctccagcacaaggaattggaatccagagtccgatccgtcagggagaatttgcgagcttcaaagaaagagttcaataaaacagaagatgatttgaaatctcttcaaagtgttgggcagattattggcgaagttctcaggcctcttgacaatgaacgcctgattgttaaagcaagcagtggtcccaggtatgtggttggttgccgcagtaaagtggataaggaaaaattgacttcagggacaaggggggttcttgatatgacaacactcaccataatgcgagc

SEQ ID NO: 5729 - DNA, 720 bp, Glycine max
  unsure (1)..(720): unsure at all n locations
ctttgagcctttttgcttgaatatcccacttgctcaagttgaagatgaatcctctcaaagagtcaacccatcaataaggcctgtgagtttcatataaaaagtgagattgaaatagctccaaatgtagaacaccagttcataccaagctatgcgggcaagtctccagcacgtcaaagctacctgaaagaagacatggagctgaaaagtttagctgaacttaggaatggccctgatgaagataattttgtttcgttgcatttaggagagccggaaatgaagagaagaaagctttcaaattcctctttttgcatcaaagaataaaactagtaggtttaaatatgaagcatatatactcaatgaagcgactgtctcatttgcatggctgttctctatgctatagaaacgcaaggcctttagcatgtggtgcctcgtatgggaggagcttcaaaagcaaagcacaaacaaggttcacttctggatgatattcttattctttacttttcttttttcaatcttgtttcggcaaagtgatgatattagtcacttgtgggttatataatattttatagaggacatttagcttgcactgtgttgaatgggttataccacttttggagacatttgtattataaccactccctgaaggaggagcacctattgtaagttatcagaatgtggaatataacgatgtagagccnnnnnnnnnnnnnnnnnnnnnnn

SEQ ID NO: 5730 - DNA, 406 bp, Glycine max
gggtttttattctgttgcagagacagtggttgagaatcactgctcaaaagaataataataccaaattccaaccagataaggagtgtggaatttggaagcttcacttctttcttgtattacttgatgcccttttcccttctctccctccctcttctcttattctcattgtttagttacctaccgtggatcaaagtcaattccctatctcgcttctttttgtagttgatttcttttgggtttcgcagtctccccaaaagggttgtttttattttgttctaaaattttgtaatttttgcttggacttgtgataaaaaaaatttgattttttagatcgattcgttgatgggtcatgccggggttgttgttaattgttgtattggctaattgaagttcggttggtgatttg

SEQ ID NO: 5731 - DNA, 455 bp, Glycine max
  unsure (1)..(455): unsure at all n locations
atgttgtttacaattcatgagattattcatgatgctctgtatgatagagatgagattccggatactatatcagtttctggtcaaataaattgtcgagctgacttggaagggttgccagatgtgtcatttcacttggctggattgaacacagcaaaccttgaagttttatcgtatcatccttgtgctcaagtttcagatcaaggtttggataagcaaggagtgatgttttctccgccattaggtaattttgtgttgatgcgttatcaggcagcttatgcccttggaccccccataaagggattctatcagttgtcaatggtttctgaggataaaggtgcatttctattcaagttgcatttaatggaaggatataaggctcctttgacaatggaattctgtactgtgactatgccctttcctaagangangattgtatctttggatgggactccttc

SEQ ID NO: 5732 - DNA, 704 bp, Glycine max
gggcggctgcagcaagggctcaacgcacgcaggaggaggagattgatcgagagaagagaagatgactacacgcttcaagaagaacaggaagaagagaggccacgtgagtgccggccatggccgcatcgggaagcaccggaagcaccctggaggacgcggtaatgccggaggcatgcaccaccaccggatcctctttgacaagtaccaccctgggttcttcggcaaggtcggaatgcgctattttcacaagctccgcaacaaattctactctccgatcctcaacatcgacaagctctggtccctggttccgcaagaagtgaaggacaaggcctccaaggagaacaaggcgccgctgatcgacgtcacgcagttcgggtactttaaggttctcggaaagggtgttttgccgcagaaccagcccgttgttgtcaaagctaagcttatttccaagatcgctgagaagaagatcaaggaggctggcggtgctgttgttctcaccgcctgattttattgacggtatcgctttttcaacgatttagggttttttttttgttttgttctgatacgtttcgttttggatgacgttgttgtttagtctatgctacatttcaggatttaatttaaggttttatttttttaatttgcgcgttttagacttcggcttacctctcaattgaatattatcgcgtttaacggtgtttcgg

SEQ ID NO: 5733 - DNA, 733 bp, Glycine max
gagagctgcaagggatcaactgaggagagtgagagaaaagagaagagaagatgacaacacgctccaagagcaacaggaagaagaggggccacgtcagcgctggccacggtcgaatcggaaagcacaggaagcaccctggaggacgcggtaacgccggaggcatgcaccaccacaggatcctcttcgacaaataccaccctgggttcttcggcaaggtaggaatgcgctattttcacaagcttcgcaacaaattctactctccgatcctcaacatcgacaagctgtggtccctggtcccgcaagaagtgaaggacaaggcctccaaggagaacaaggcgccgctcatcgacgtcacgcagttcgggtactttaaggttctcggaaagggcgttttgccgcagaaccagcccgttgtggtcaaggccaagcttatttccaagatcgctgagaagaagatcaaagaggctggcggcgccgttgttctcaccgcttgaatttgacggtatcacttttttgaacgatttaggttttgttctgatacgttttgttttggattatgttgttgtttagtctctgctatatttcaggattaaattgaaggttttattattttaatttgcgcgattaactatgccagcctgatgacattagaatctatcgaaattgttaaaattgaggaaatgttagctttcgtattaccggacctatgacatatgaaattagaatttttgat

SEQ ID NO: 5734 - DNA, 830 bp, Glycine max
gaattatccaaagaatctttataaataggggactatattttttgtttaaagtaaattcatcgatctttcacttccactttcgtttttctccctctcaggacatcctgtattaacagtgaaaagtgcatctgaagagacagaatgcaaggacccgggggtggcagggatcgtttctttgattttggcgatccttttggtggttttggaggctttggttcctttggacctcccaggagtttaatctcaagcttttttgggggtagggacccatttaatgatcctttcttcgcccgaccttttggagggatgtttgagtctagtccctttggtggtcctactggatttcctttcccccctggtatgaatccatctgggttccttgagcatccagccccgggtttggatccatctggcttccttgtgcgtcaagctccagagcctagtagacaaaggaggggaccaatcattcaggaattgaactctgatgaagaaaatgaggaagcaacggaggagaggaaaggcaatccgagaaagcatggtaggtcagacggtgaaccctctgttgaacatccagatgatgaaattgaagggaagaagatcagacaggctggaaatgagagcagaatcaatataattgggcctcagcctcaatctcacagtttctgcttccagagctcaaccgtcagctatggtggcccaaatggattgtattatacttcctcaaggacaaggaggagtggaagtgacggagtgacatttgaagagaggaaggaggctgatagttccacaatgcaagcttctcacctaatttctagaggcattcatgggaa

SEQ ID NO: 5735 - DNA, 618 bp, Glycine max
ttccagacgtgttaattatccaaagaatctttataaatagggaactattcttttgattccaagtaatgcatcggtctttcacgtcaactttcgtttttctccctctcagtgaaaattgcatctaaagagacagaatgcaaggacctgggggtggcagggatcctttcttcgattttggtggttttggaggctttggttcctttgggcctcccaggagtttaatctcaagcttttttgggggtagggacccatttagtgaccctttcttcgcccaaccttttggagggatgtttgagtctagtccctttggtggtcctactggatttcctttccccactggtatgaatccatctgggttccttgagcatccagccccgggtttggatccatctgggttccttgagcatccgggtatgcatccatctgggttccttgcacggcaaaatcctgagcctagtagacaaaggaggggaccaatcattcaggaattggactctgatgaagaaaatgatgacaccgcggagaagaaagaaaatccgagaaagcatggtaggtcagatggtgaaccctctgttgaacatccagatgatgaaattgaagggaagaagatcagacagg

SEQ ID NO: 5736 - DNA, 979 bp, Glycine max
  unsure (1)..(979): unsure at all n locations
cacattttgcatctttcaatagaagtaaatggaggcagcagcagaagcacttccgtgccgagcttaccctttctgaatccccttttaacagttttttattattcacacggaaaaaaagtaagaaaagaagcttttttcccccttgatcatcactatcagatacagaccctctagagaaaaaggaaaaaaaagccttcatgtgaatgtgacaatggaagctaagcctcttcgaactgttccctcttcacacaacacttctggggtcgcaggtggaccccagaagaagattgacatgggacacaagatggtaggtgatgctgggctgctgctgttgatgaaagaaaagggttgctngtggtcaaggaagagaaagagaacacttcttcctacagtgttgaacttcatctcggggttgatgcttctcattcggctccacaagaaataaaccatgtgatcactgaagctcagaggcgtgagcttcaccatcaagttttcatcttcaaccatttggcttataatcttcctcctccttatcaccttgtgcaattccctagcaacatgtcagaatacagtttcctgggttttgatcatgggattatggtggatccagaacctcataggtgtagaagaactgatggaaagaaatggaggtgtggtaagaatgtggtgcctaaccagaagtactgtgaaaggcacatgcacagaggtcgaaatcgttcaagaaagcctgtggaaacatctcaagttaactctcctttggcaacaaagccttgtagcaagtcacacaccataccatcctcaaagacacaatttgaaatttcaagtccaaaccttatcgccattccacatattgacacatcaagtaccccatcaaggagcctcagtgtcaccaattgctcttctgctaataataggtccaaaaatacggcacgttatgctgactacctcatgtcgttttcttccgcgtccacagtgtccc

SEQ ID NO: 5737 - DNA, 732 bp, Glycine max
accgcggcggcggtcgctctagaacgattggtatcccccgggctgcaggaattcgggaccagggaagactccttcctattactcttggacaggtttttcaacgaattgacatcttgagcaaagattttgataacatagtggagcttcaactaggtgctccgtggcccctaccaccccttgaagcgactgccacattagctcacaaatttgaactcataggatcttcaaagataaagatagtatttgagaaaaccactgtgaagacagctgggaatttgtcacagttgccaccattggaggtgcctcggattcccgatgcattgaggcctccatctaatacgggaagcggtgaatttgaagttacatatcttgactcggatactcgcatcacaagaggagacagaggcgagctaagggtctttgtgattgcttgagttcctggtgaatgcaactatgcactatgcattttctctgttggacttaaaaaaaaaaggtttcaacaccttgtgccatcattttgtttagttttttcctcctgatggtatttgttctaagttcttcaatattgtaaacatgatggaattaaactctactatatagttccaaggaagcagggtactttttgtttaagtgtaacatatttcttttttaaggaataattgcttacagatcattagatatgaatacttgaatactctgttgagagaattccccttcaaaaaaaaagaaaaa

SEQ ID NO: 5738 - DNA, 754 bp, Glycine max
gttaaatctcagtcacaaaaactcaacttcctcctttctccaaaaaatctcttccaaattccacacttttccatttcccaaacccaccctccaatccatggcttccctgaacctccttccccaccctccacttttctcttctttccttcacagaccacactgcaacacccatcttcttctcacaccaaaaccttctcaacgaaggccttctcttgtggtcaaatctactgtgggtgtggctgacccttctccatcttcttcttcctacgctggggatacctctgattccatctcttctttgaagctcaatctgctgagtgctgtttctgggctaaatagaggccttgctgcaagcgaagacgatcttcgaaaggcagatgatgctgctaaggaacttgaagctgctggaggacttgtggatctctcgcttggtcttgacaatttgcaaggaagatggaaactcatttatagcagcgcattttcgtctcgaacccttggtggaagccgtcctggtcctcccataggaagactccttcctattactcttggacaggtttttcaacgaattgacatcttgagcaaagattttgataacatagtggagcttcaactaggtgctccatggcccctaccaccccttgaagcgactgccacattagctcacaaatttgaactcataggatcttcaaagataaagatagtatttgagaaaaccactgtgaagacagctgggaatttgtcacagttgccacca

SEQ ID NO: 5739 - DNA, 269 bp, Glycine max
ctccactgtgggtgtggctgactcttctccatcttcttctggctacgcaggatacacctctgattccatctcctctttgaagctcaatctcctgagtgctgtttctgggctaaacagaggaacttgaagctggtggaggatctggtgaatctctcgcttggtcttgagaatttgcaaggaagatggaaactcatttatagcagcgcattctcgtctcgaactctcggtggaagccgtcccggtcctcccataggaagactccttcctat

SEQ ID NO: 5740 - DNA, 526 bp, Glycine max
cttttaaactttgtaatctatttgtacacgatattttcagcacccttttccttcccctgcaatccaccatgtcctccttcaaactccacgtcatcatcatctttctataaatatccacaacaaactaccataacaagttaacattaatcattatttgcccttgtaacccacattatgagcacgaacgagaagaagaagaagaaaaagtcgtctctattgagccgcctcagggtggccgtgcagaaggtgaagttgctactaaacgccaccgtactcagccacgcgtggcatgctgcaaccattcgccgcggcgtttctctgagcaaacgccagatcagtttcaacgaccgaccagggttgatgatgtgcactgcttccgatgaaactgattcagaggatttggtttctcgagcgcataaccttcataggatcataagttgtccctccgatgatgatatcgattagagagcagagatgtctataaataatttcagacgccagcttaagatggagaggcaaatctcgc

SEQ ID NO: 5741 - DNA, 634 bp, Glycine max
gtcgagccgaatcggctcgaggttttttttgccccttcttagttcgcgctccctctgccaaattttccacctaagagcgagaaggcaaaaatctgtgatgaaagacgaagcaagagagaatttcaataacttgcaacttgcctacaccatatttttttttgttcacaatttaatatatggtatctagcctgtggtgtggccataacaagaagggagagaaaacaaaataatttaaggttgagatgaggaagtgtgagctctgtaacagtcccgcgaagttgttctgcgaatcagatcaagccagcctctgttggaaatgcgatgctaaggttcacagtgcaaacttcctcgtcaccaaacatcccaggattcttctctgccatgtttgtcaatcactaacagcgtggcacggcacaggacccaagtttgtacccaccatgtcagtttgcaacacttgtgtcaacaacaatagtactgagacctgcagccaacagaatcatgaagacgatgatgatgatggtacgggagaggatcatgcagaaaacgacgatggtggtgtggctgaagatgatgatgatgatgatgatgaagaaaatcaagtggttccatggacatctacaccaccacccccagc

SEQ ID NO: 5742 - DNA, 489 bp, Glycine max
gttccacggtggcgggtgggtgagcgggagcaacgattcggttgcgaacgacgtgttctgccggcgggtcgcgaggctctgcgaggcggtggtggtggcggtggggtaccggctcggcgccggagaatcggtacccggccgcgttcgaggacgggctgaaggtgctgaattggctggcgaagcaggcgaatttggcggagtgcactaagtcgatgggggggaggaggaggttggagggccagcacaagcatattgtgggttcctttggggcatcaatggttgagccttggttggctgctcatggaaatccttcaaggtgtgttcttcttggcgtgagttgcggtgcaaatattgcagaccatgtggctcgaaaagctgtagaagcaggcaaacttctggaccctgttaaggtggtggcacaggtcctgatgtatccattttttattggaagtgtgcccactcgttctgaaataaagttggcaaattctt

SEQ ID NO: 5743 - DNA, 675 bp, Glycine max
cttttcttctcttctcccattccttctcaaatattccattctttagaatccaaagccacagtcaccagatcaaaatccccaaaacacatcatcgactgaatcgaacaaatgagagagaaagagaaccatccttcgacaaactccgaggacgaccaccgatcctccttactggatctggcgcgtgccgaaatcacggaatcctctaactccaagacccgaacctgcggttcgggtcttggttcgggttccggcacctctgagcctcaggctcccttcccggaccaggtcctcgagaacgtgctcgagaacgttctccacttcctctcgtcgcggcgcgaccgcaacgccgcctcattggtgtgccgctcctggtaccgcgccgaggccctcacccgatccgagctcttcatcggcaactgctacgcgctctcccccactcgcgccaccgcccgcttcacgcgcgccaggtccgtcaccgtcaagggcaagccccgcttcgccgacttcgatcttatgcccgccgactggggggcccacttctccccctgggcctccgccctctcccaggcctacccctggctcgagaagctccacctcaagcgcatgctgctcaccgacgccgacctcgccctaatcgccgactccttcgccgccttccgcgaactcgtcctcgtc

SEQ ID NO: 5744 - DNA, 460 bp, Glycine max
cggctcgagggagacacagactctatagctaatccttcccgactctctaagacaccaaaaagatgaagcaaatcgacgacggcgatgacgagcagcgatccctctcccctctgccggaacaggtcctggagaacgtcctggacagcgtgctccacttcctcaccgcccgtcgcgaccgcaacgccgcctcactggtctgcacgtcctggtaccgcgccgaggccctcacccgccccgacctcttcatcggcaactgctacgccgtttccccccggcgcgccaccgcccgcttcccccgcgtccggtccctgaccatcaagggcaagccccgcttcgccgacttcgacctcatgcccctgaactggggggcccacttcaccccctgggccaccgcactctcccaatcttacccttccttcctcaacaaactccaccttaaacgcatgtccctcaccgacca

SEQ ID NO: 5745 - DNA, 266 bp, Glycine max
gagacagcaaagcagaggcgactcttgctcctccttcctcagtctctcattttctctatctctgaagccaaagatgaaccaaatcgacgacggtcgaaccctctcccctctgccggaccaggtcctggagaacgtcctggaaagcgtgctccacttcctcacctcccggcgcgaccgcaacgccgcctcactggtctgcaagtcctggtaccgcgccgaggccctcacccgcaccgagctcttcatcggaaactgctacgccgtgt

SEQ ID NO: 5746 - DNA, 524 bp, Glycine max
aaaaaaccttgtaatttctcgctcttcctttcaactccaaattccaacggatatccacttcctcttcttctcttcccatttcccttccaatctcctaatttctcttcagcttctgggttctccattttccttcgtcttctgcatctgcattccgtagattcagttctcgtcggaaaatggacgttcgccgaagacccattcctccctccggcgatcgccgacaaacccagaagctgaagaacaccgccaccaccgattcgcagactcttctgcctctctacctcaccaacgccctcttcttcgcggtgttcttctccgtggcctacttcctcctccaccgctggcgcgagaagatccgcaccgccactcccctccacgccgtcacccccgccgagaccgccgccatcgtctccctcgtcgcctccgccgtctatctcctcggcttcttcggcgtcgcctcccgcgcctccctcgacgagctctccgacgacgagatcatcctcaaggaagactcccgcgccccg

SEQ ID NO: 5747 - DNA, 459 bp, Glycine max
acggatctcaactcccatttctagctccctccctccctctgcttttcttctcttctcattttccttcgaacctcctaatctctccctccagcttctgggttctccattttccctcgttttctgcatctgcatttcgtagattcagttctcatcggaaaatggacgttcaccgaagacccattccttcttccggcgaacaccgacaaacccagaagctgaagaccaccaccaccaccaccaccgattcgaaatcgcaatcgcaggcgcttctgcctctctacctcaccaacgccctcttcttcggggtgttcttctccgtcgcgtacttcctcctccaccgctggcgcgagaagatccgcaccgccactcccctccacgccgtcagccccgccgagaccgccgccatagtgtccctcgtcgcctccggcgtctaactcctcggcttcttcggcgttgcgt

SEQ ID NO: 5748 - DNA, 475 bp, Glycine max
ccatcatatagaaaccctaatttgttacacctacaccttcttccttcattttctcatcatcaccaatcaacaacaacatggctaatttgcaaggagggcctgactttgacaaaatcttccacttcctctccatttgcatccttgctttcatcaatgaaggctcttcctccctctcaagtgcattcatgaacgagccatggtcatggggcataagcattcccattagtttgtacgtgaaatttgcacttgagatccacactcaccttggaatctgtgttggggttggagtaccctctttggtctattggggtgccacacgtggtgccattgattggtactgggaagcagcattgaagttcaaccatgagatcttcaaaacatgccttttcaatgttgttattgggttgctacacttgttggtgtcaaagcttgctcattacatcattgagtgggtgaaggatcacaagccgatgaa

SEQ ID NO: 5749 - DNA, 733 bp, Glycine max
ccctgttggatagaatggaggttgttgctattgccgggtatattactgatgagaagatgcatattgccagagattatctggagaagaccaactcgtgaagcttgtggaataaagcctaaacaagtggaagtgactgatgctgctattcttgccctaatagaaaactactgccgagaagcaggggtcaggaatcttcaaaagcacatagaaaaaatttaccgaaagatagcgctacaactcgtgaggcaaggggaaatgattgatgcaaccgtggaaccaataaaagaatatatagactctgatgaatttggtcaaaatacagttcaaaataagaactccgagttggtggagggtagtgatcctgaaaaagagggtgaaacctctgataaagttgacaaggtgcaaacagatctatcatctgatgaatctcaatgcctcgaggttgcaaaagaaagcgaggaagataaggaaattaaaacaaagactatagaaaaagtattggttgatgagtctaatttaactgactttgttggcaagcctgtcttccatgctgagcgcatctatgatcagacacccgatggtgttgttatgggtcttgcttggactgcaatgggtggttccacactgtatatagagaccacacttgctgaagaaggggagggaaaaggaacactgcaccccactggtcaattaggagatgtgatgaaagaaagtgctcagatagctcacactg

SEQ ID NO: 5750 - DNA, 1269 bp, Glycine max
cccacgcgtccggaaaaacaaaacgataagtgtgttaaaattgttccatgagtcgttttgaggttctgtgtccatcaagcgacacgtcgttttgaagcaggaaccgaaccgtgcacccctttgtagtttgaagcgatcaacacgcgcaaccacggcgatgatgatgcaaatcaacatcacctccaccacctcaatcgtcacggcgttctcttcggatcattccccgaatgttctaccttgagccatgtccaacctcgttcagattcgcgtcgccgccgacgctagcgatggcttcgactctccggcgaagcagaaagcagccaaccgcagctcctacagcaatcgcccctttctctccctccgccgcgccaaacagttcctcggcgccgccaagttcaagctcttcttagttctttttgctctctccatcgtcgtttttgtctcctccagactcagttcgtggatgggatggaaccctcaccactcctcttcggtttcctccacttcaaggggtggctatactgtgcttataaacacttggaggcataaatctcttctgaaacaaactgttgctcattatgcatcctgtcgaagtgctgaagcaatacatgtggtgtggagtgaaagtgaacaaccatccgagaggcttaaaacatatctgaataagattgtggttttgaagtctcagaaagctcacaagccaaactttagatttgacatcaatgcagatggtgagccaaacagcaggtttaagccaataaaggacctcaagacagacgcaattttctcagttgatgatgatgtggttgttccatgttctactctagattttgctttctctgtctggcaaagtgcaccatttacgatggttggatttgttcctcgaatgcactggctggataaggagcaaaataatgctgcatattacaggtatggaggatggtggtctgtttggtggatgggcacttatagcatggttctctcaaaggctgcattctttcacaggaaatacttggatttatatactcatgagatgtctccatcaattcaggactatgtttccagggagagaacttgtgaagacattgcaatgtccctttatgttgctaatgctacaagtggtcctccaatatgggtgaaaggcaaaatctatgagattggtgcatcgggtattagcagtctgagagggcatagcaacaggagaaacaaatgtctcaatgacttgatatcactatacggaactcttccacttgtgtcaactaatgtgaa

SEQ ID NO: 5751 - DNA, 1466 bp, Glycine max
ggcgggaaaagcgtgctgctgagttggtaaaaaaggataatgaagtaattgtaaaactcgaaaatacagctattgaacgctcaaaatctgttgagtcagccattctaggtaaatacaacatttggaggaaagaaattgagaatgaaaatgtcgattctactgttcggttgatgcgggaccagatcattatggcaagggtatatttaaagcattgcaaagatgaagaacaaggtcgaactgtacgaagaactaatttaccggctcaaagagagtcaacatgctttaggtgatgcagtttctgatgcggatctacatcgcagtacacatgggaaaataaaggctatgggtcaagttctatcaaaagcaagagagcaattgtatgactgcaaattggtcactggaaaactaagagcaatgctacagacagctgatgatcaagttaggagtttgaagaaacagagcacattcctcagtcagttggctgccaagaccataccaaatggaattcattgtttatctatgcgccttaccatagattactatctccttcctcctgaaaagagaaagttccctgggagtgagaatttggagaatcccagtctttatcactacgcactgttctcagataatgtcttggctgcatctgttgttgtcaactcaactattatgaatgctaaggatccatcgaagaatgtttttcaccttgttactgataaactaaattttggagccatgagcatgtggtttcttttaaaccctcctggaaaagctacaatccatgttgaaaacgttgatgattataagtggttgaactcatcctactgccctgtcttgcggcagcttgaatctgctacattgaaagagttttatttcaaggcaggccatccaaactcactttcttccggggcttccaatctcaagtacagaaatccgaaatatctctcaatgctcaaccacctgagattctatcttccacaagtttatccaaagttggataagattctttttcttgatgatgacattgttgtccagaaggatttgactggattatgggctgtgaatcttaatggaaaagtaaatggtgctgtttaaacttgtggtcaaagctttcaccgatttgacaagtaccttaacttttcaaatcctcacatcgcaagaaattttgatccaaatgcttgtggttgggcatacgggatgaacatgtttgatctgaaggtgtggaaaaagaaggatatcaccggcatatatcacaagtggcagaatatgaatgaagacagggtgctgtggaagctggggacgttacctccggggctaataacgttctatgggttgacacatccactagataaatcatggcatgtacttggtttgggttataatccaagtttggatcgatcagagattgagaatgcagcagttgtacactacaatggtaatatgaagccatggttagaaattgccatgac

SEQ ID NO: 5752 - DNA, 525 bp, Glycine max
gggatatagaagttagaactagtgggccggcgcgtaattcaaggcgaagctccactcacatgtcgaaatcagggcattagggttttccttctcccctgcaactgcaattcccccttttggaagatggttccacagtcagtgataacgcaagtctccgattcaagtggcgtgaatgcgatatcaaacgtttcttctggccacggattctacgattggttgttcgaatgtcacgggttctggcacaatgccactctcaacatcccctcgttcctcttcgtcttctacttggcacttcaagccaggcacagcttactcaaactctcccttgcgcgctcctatataatcatttcatataacctttgcctctggctcattactctgctcaatctcgcttggtgctttctccaggcatgggagtgcacgtctgggagaaagttgacatggaacctgttatccttgttcactacttccggaatgctgtttttggaagtgagcttgctggcttttttatttcaaggaaataat

SEQ ID NO: 5753 - DNA, 548 bp, Glycine max
agcatctttacctcttccattttatacaccagtatcgctctgtatttgtctcatcctcctaactgaaccctaatttcttctgggaaactctattttctctaatatggagcaatactggtctgggagtgccatcaatgaaaacaaaggaatggtagataatttgcatcgttatggagtaatcacatctagaaaggtagctgaagtaatggaaaccattgatagagctttgtttgtacccagcggcggcggactccaaccttatgtggacagtcctatgccgattggctacaatgccaccatctctgcgccgcatatgcatgccacctgccttcagttgcttgagaagaatttgcaacctggaatgcgtgttcttgacgttggctccggaacgggatacctgacagcatgctttgccttgatggttggtaccccacggccgtgctattggtgtggaacatattcctgagttggtttctttttcaatcgagaatattcaaaaaagtgctgcagctcaaccattgaaagatggttccctttctgtgcatgct

SEQ ID NO: 5754 - DNA, 980 bp, Glycine max
agaagacgacagaagggggcgcaggtagagagagcgagagaacaagaacataagggaaccacagcggcggtaacagaagaacaagcagagaatgggtcgagtgagaacgaagacggtgaagaaatcctctcggcaggtgatagagcgtcactactcgcgcatgaccctggacttccacacgaacaagaagcttctggaggaagtggcgataatcccgtcgaagaggctaaggaacaagatcgcggggttctcgacgcacctgatgaagcgcatccagaagggccctgtgcgcggcatctccctcaagctccaggaggaggagcgcgagcgccgcatggacttcgtccccgacgtctccgccatcaacaccgaccacatcgaggtcgacaaggaaaccctcgacatgctccactccctcggtatcaacgacatccccggcatcacccaggttgatcctgtccctgttcagcagaacttccccttcaccaggaggtactgatgatgatggaggctcttctgctttgagaaataagactttgttttatgcttctcgtttcgtgttttcgtggtttttattttattttattttatttctcaagccttttaatttttgttgttgttgctactgctgctgctttagattagaccgagtggaattattattagggtttttggattataagaaatgatataccgttggagtctttgttatattaaaaacatactcatactacttaaactaaatttctcacttaaattctaactacaccttctaaacttccttctatcttctcctcctacacattataaacaaattcaatactttgtgggggggccccaccccacaattcttttttattgaggtcttttcatcccccctatttgctttttttaaaatcgttctctggtacaacctggcgtttcccactttccgccgtggtgacatcccctttccatagtgcctatctttaaattttttt

SEQ ID NO: 5755 - DNA, 786 bp, Glycine max
ggtgcttcgtctcagatcattctgcgcaggtaagacagagagaaagaactgacctcagcggcggcggcggcggcaacagaagaacaaccaccaccacacacaatgggtcgcgtgagaacaaaaacggtgaagaaatcctcccgccaggtgattgagcgttactactcgcgcatgaccctcgacttccacacaaacaaaaagcttctcgaagaagtggccatcatcccttccaagaggctgcggaacaagatcgcgggtttctccacgcatctcatgaagcgcatccagaagggtcccgttcgcggcatctccctcaagctccaggaggaggagcgcgagcgccgcatggacttcgtccccgacgtctccgccatcaacaccgaccacatcgaagtcgacaaagaaacccttgacatgcttcattccctcggaatcaacgacatccccggcatcacacaggttgaccctgttcctgttcaacaggccttccccttcaccaggaggtactgatgttgatgttgttcatggagactcttttggcttcagatgtaagactttgttttattctcttctcgtttcgtgttttggtgctttttatttatttcgtaagcctttaatttttgctgctgctgctactgctgctttaaattagactgagtatgtttttcaagtaaaattagggtttttggattatatgaaatgatatactgtccgagtctttgatataaaaaaaaaaaaaaaaaaaactaaaaaaaagcggccgctctagaggatcctagcttacgt

SEQ ID NO: 5756 - DNA, 659 bp, Glycine max
gacccttaacctctctgctgcgtttgcttctcctccacccatccacaaacgaacacacactttgattgagaatggggcgtgttcgcacaaagacagtgaagaagtcctcgcggcaagtgatcgagaggtactactctcgcatgacgctggacttccacacgaacaagaaggttctggaagaggtggccatcattccctccaagaggctccgcaacaagatcgcgggattctccacccacctcatgaagcggatccagaagggtcccgtacgtggaatctccctcaagctgcaggaggaggagcgcgagcgccgcatggacttcgtccccgatgtctccgccatcagaaccgaccagatcgaggtcgacaaggagacgctcgacatgctcgccgccctcggaatgtccgaggttcctggcatcgttcaggtggatcctgttgccgtccaggcgcccctcggcttcggccgtggcggccctggaaggaggtactaactgtccgcctccttcgagcttccagtttttgtcgtgttgtcaactagagcactaatttgtcatgcgttgagttttggttttacattattttaaaatttctgtagctgagtttcggattgtttggacttgttaaagctgttaatggaattcattttgtctttgctt

SEQ ID NO: 5757 - DNA, 450 bp, Glycine max
gacccttaacctctctgttctcttctgtcattgcttctcctccacacacgcacagagacacacacttttgcagtcacattgagaatggggcgtgttcgcacgaagacggtgaagaaatcctcgcggcaagtgatagagaggtactactcccgcatgacgctggacttccacacgaacaagaaggttctggaagaggtggccatcattccctccaagaggctccgcaacaagatcgcggggttctccacccatctcatgaagcggatccagaagggtcccgtgcgtggaatctccctgaagctgcaggaggaggaacgcgagcgtcgcatggacttcgtccccgatgtctccgccatcaggaccgaccagatcgaggtcgacaaggagacgctcgacatgctcgccgccctcgggatgtccgaggttcctggcatcgttcaggtggatcct

SEQ ID NO: 5758 - DNA, 1738 bp, Glycine max
  unsure (1)..(1738): unsure at all n locations
gagagatggaaatgataatggagaaacaaaagagtgctgtgaaacacacaaggcgtttgtggctgagaagcacctcactttgttgatgagatttggttcaaaataatgctcacctccaaaagctcatccacttcaaaaaaaaggccaattctcctttcctttcatttgcacgtatacacattacaacaagtttttttttttttgaggcccatctaactttgtctctattccaccacgtatttatcagcccttgctatttttcacttcacttccgttctgtttctattcctcactaggagctcctctccactggttcttcatctgcatgcacacacttgcatagttttggaaaccaagaatttttgaaggggtagcatcaacaagaagttctgaaaatggagatcaccaatgtcagcgagtatgaagctattgcaaagcagaagttgccaaagatggtgtttgactactacgcatctggtgcagaggaccagtggactctgcaagagaacagaaatgccttttccagaattttgtttcggccacgtattcttattgatgtgagcaagatagacatcacaactactgtcctgggcttcaaaatatccatgccaatcatgcttgccccaacagccatgcagaaaatggctcatcctgagggagaatatgcaacagcaagagctgcatctgctgctggaacaatcatgactttgtcttcatgggctacttcaagtgttgaagaggtagcttcaacaggacctggcattcgctttttccagctatatgtgtacaaggacaggaatgtggttgctcagcttgtgagaagagctgaaagggctggattcaaagccattgcccttactgttgataccccaatactaggacgcagagaagctgatatcaagaacagattcacattgccgccatttttgacattgaagaactttgaaggattggaccttggaaagatggacaaagctgatgactctggacttgcttcatatgtttctggtcaaattgatcgtactttaagctggaaggatgtgaagtggcttcaaacaatcaccaaactgccaattctggtgaagggtgtgctgactgctgaggacacaaggatagctatacaaagtggtgcagctggaattatagtgtccaatcacggagctagacaacttgactatgttccagccactatatcagccttagaagaggttgtcaaagctgctgaaggtcgtgttcctgtatttttggatggtggtgttcgccgcggaactgatgtcttcaaggcattggcactaggtgcctctggcatatttattggacgcccagtggtgttctccttggctgctgaaggagaggctggtgtaagaaatgtgctgcggatgctacgtgaggagtttgagctaaccatggctttgagtggttgcacctcactcaaggatatcactcgtgatcacattgtcactgattgggaccaaccacgcactatcccccgcgccttgccaagattatgaaaaactttttccaatgggggaaacacttctatatatgtttcatgaacctgttcttctcatcctttcttttcctttttggacaactcatttaaacttgtatttggataactctatgcttaatttctaagcattaatatgatgatacttctgtggctactctgctgctgcattcactcattgtatattattaattttgagtcctttatcaaaaannnnnnnnnnnnnnn

SEQ ID NO: 5759 - DNA, 686 bp, Glycine max
acgcgtccgcttatacacactcattttaaggctgttatatatatttctgttattgaaacttaggttgtcagagctgctgaaggtcgccttcctgtatttttggatggtggtgttcgccgtggaactgatgtcttcaaggcattagcactaggtgcctctggcatatttattggacgccctgtggtgttctccttggctgctgaaggacaggctggtgtaagaaacgtgctgcggatgctacgtgaggagtttgagctaaccatggccttgagtggttgcacctcactcaaggatatcactcgtgatcacattgtcactgattgggaccaacctcgcattcttccccgcgcattgccaagattatgaaaaatttgctcctcatttgagccaagtttgtataatgtggtgcagaacaatggaggaaacagttctatatgtgtttcatgaacctcctttcttttcctttttggagaactcatttaaggttgtatttggaaaactctatgcttaatttcttttaagcattatatgatgatacttgtgtgactactgctgctgctgcattaattcactcattgtatattcttaattttgagaaatttattaactttctctatgttgtttttttagttaccatgacattgatatgaaatattccctctaaaaaaacatggctgattaccttt

SEQ ID NO: 5760 - DNA, 878 bp, Glycine max
ctcaatcagatttgcacatgatcgagcctcacaatttggctttaaattggtccacacccccattgtccttccccattgtgattcattagcacatttgcaaagtgttatttttctttttttctcatttgcactgcaaattgcaatggcttccaacaaggttattgccaccatcatggtgctttctctccttgcctactcaacatcattcaccaatgcatgtggcacatgccacccaaaacctaccccttctcctcctcctccatcaggaaagtgccctaaggacacattgaagctaggggtgtgtgcagatattctaggtcttgttactgttgttgttggctcccctgtctccagcaagtgttgtgcattgcttgaaggtttggctgatttggaggctgcactttgcctttgcactgctattaaggccaatgttcttggaatcaacttgaatgtgcctatcacactcagtgtgctactcagtgcttgccaaaaaactgttccttctggcttccaatgtgcataggcctccatcatgttaggttcattccatcacttgtgtcctcaaattattttgttttagttcttctttgttctatgtgtgacatgtttcattttaataataagctaggtaaacatatgtttgccttagttagtagtaacattttctcttttctagtaaatttggggaactttgattattattattgtgatttttacttttggggtatattggaggtggaaggagttgagtagagaaagagacggaagctccttaagggatgagtaaacctctgatcttacagatgaaccaaaccttatacaccaatgataggcgttaaaattgtctgcctaatttaacgtactttacactcctgttt

SEQ ID NO: 5761 - DNA, 419 bp, Glycine max
tgattgtgattcatttgcacatttggaaagtgttgtttttctttttttcatttgcattgcaaagcaaaaaccttgcaaattgcaatggcttccaacaaggttattgccaccatcttggttctttctctccttgcctactcaacatcattcaccaatgcatgtggcacatgccacccaaaacctactccttctccccctcctccatcagggaagtgccccaaggacacattgaagctaggggtgtgtgctgatgttctaggacttgttaatgttgttgttggttcccctgtctctagcaagtgttgtgcattgcttgaaggtttggctgattcggaggctgcactttgcctttgcactgctattaaggccaatgttcttggaatcaacttgaatgtgcctatcacactcagtgtgctact

SEQ ID NO: 5762 - DNA, 501 bp, Glycine max
gtttctgaatcagttggtgagacttttgagcctgatactgtgaaagatgctcaagttgagaatacaatggaatcagatactatagagttggaactgaagaaagagaaagggaaaggttttctatctgatctagctgtggataatcatgaggtgaaggaaacagattttcccttttcagagaacaataatgagcttttttcagtttcaggaaatgagggactaagagaaactgaagtggttgtggttgaaacattttttaagtccatgatgtttggtggagaggagaaggatgttttgtcttcagttgtgacagataagttacttagagagagtgaggaaccaaatgaagtctatggtgattcatctttgcctctaactgatgtggcttcagaggaaacaagtgttccaaaatcagatgacagtgaccaggttgctccaaccataattgagaaatcattggatttggagccaactttggacgagacagttgaggaaccatca

SEQ ID NO: 5763 - DNA, 749 bp, Glycine max
  unsure (1)..(749): unsure at all n locations
gcgtaggccagcgacagctcttggctttagcaaattccaattcccaattcccaattcgaaacccttattcctttcaaagaaccaaattgagtgatcgtgatggcaccaaaggcagagaagaagccagcggagaagaagcccgcggaggagaagaagtcgacggtgggagacaaggctccggcggagaagaagccaaaggccggaaagaagcttccgaaggagggaggcgccggcggagaagggaagaagaagaagagaaacaagaagagcgtggagacatacaagatctacatcttcaaggttctgaagcaggtccaccctgacattggtatctcaagcaaggccatgggaatcatgaacagcttcatcaacgacatcttcgagaagcttgcccaggaatcttctagacttgcccgttacaacaagaagcccaccatcacttcaagggaaattcagaccgcggtcaggcttgtgctgcccggtgaattggccaagcacgccgtctctgagggtaccaaggctgtcaccaagttcactagctcttgaactgactattatgccccttcgcttcgatctaggtgtctctgttaggaatatgttttatgttgaagtgttggtttattttttctttttggtgaaagcaatttgtaagtgaagaatatgggatttgttgatccttctttgtatggaattagttgctaatacagagacgtatattattcctatcatatgttgcttgagccccnaaa

SEQ ID NO: 5764 - DNA, 625 bp, Glycine max
aggggaagacatctttcactcgttctctgaaattttaattgacttttctcccctcataaaaaaaacctaccaatggctcccgcaaaggcagagaagaagcccgcggagaagaagccggcagagaaggccccagcggagaagaagccgaaggcggagaagaagatatcgaaggaaggaggaagcgagaagaagaagaagagaacaaagaagagcgttgagacctacaagatctacatcttcaaggtgttgaagcaagtgcaccccgacatcgggatctccagcaaggctatggggatcatgaacagtttcataaacgacatcttcgagaagctcgcccaggagtcatcgcgtctcgctaggtacaacaagaagcccaccattacttccagggagatccaaacggcggtgcgtttggtcctccctggggagttggccaagcatgccgtttctgaaggcaccaaggccgtcaccaaattcaccagctcttgattggtttcgtgtgtttatgtcagggttttctgttagcccgatttaattagggtttcttttcctttttatttctttgagtatgtagatgtaaaattaaagccttttatttttaaataatataattgccgttttgtgc

SEQ ID NO: 5765 - DNA, 589 bp, Glycine max
gaaccatcttcgtttttcagcatttctactctccaaacactcgaattcgcattctcttcactctttccccaatccatggccaagggagagaagaaaccggcggagaagaagcccgcggcggagaaggctccggcggagaaaacaaaagccgagaagaagatcccaaaggaacccgcctcgggcgagaagaagaagaagaagagaaacaagaagagcgtggagacgtacaagatctacatattcaaggtgctgaagcaagtgcaccctgacatcgggatctccagcaaagccatggggatcatgaacagcttcatcaacgacatcttcgagaagctcgctcaggaatcttccaggctcgcgcgctacaacaagaagcctaccatcacctctcgcgagatccagaccgccgttcgtcttgttctccccggcgagctcgccaagcacgctgtctccgaaggcaccaaggctgtcacaaagttcactagctcatgagtgggtttctgagaattttagggtttacgagatgtatattttcggtcttcgcggattttatatttatcctcttttataaaaaaaacatccttccctg

SEQ ID NO: 5766 - DNA, 854 bp, Glycine max
  unsure (1)..(854): unsure at all n locations
gattcacaacttcaatccctcttttgctttaccaaattccattttccaattcaaaaccctaactccgttcgaagcaccaaatcgtgatggcaccaaaggcagagaagaagccagcagagaagaagcctgtggaggagaagaaatcgacggtgggagacaaggctccggcggagaagaagccaaaggccggaaagaagcttccgaaggagggaggcgccggcggagaaggtaagaagaagaagagaaacaagaagagcgtggagacatacaagatctacatcttcaaggttctgaagcaggttcaccctgacattggtatctcaagcaaggccatgggaatcatgaacagcttcatcaacgacatcttcgagaagcttgcccaggaatcttctagacttgcccgctacaacaagaagcccaccatcacttcaagggagatccagaccgcggtcaggcttgtgctgcccggtgaactggccaagcacgccgtttctgagggtaccaaggccgtcaccaagttcaccagctcttgaacaaaatatcttaactttgtttacctcgctcttgttttgcttcatgtgtatctgttagatctagcgacctatgcttagatttgaacaagnntttaaaacctttttnttttttttttttaaaattttttttaaaaattttttttatttgtaattgaagtattgggattaggttcatcctctgtgtatggaaatggtagaatcgatcgtataggggtaatttgatacatagaatggctgttttgactattttatgtactcgtgattgtctctctaacttcgttcgaggtcgatattcctttttaaaaatgtttatttgtatgc

SEQ ID NO: 5767 - DNA, 819 bp, Glycine max
tcgtcccactgcgtctcgtcttcaattctatcacattctcatatcactcacattcatgaaactccttctgtccctgtggaacaacattgagacgatctgtgatgtgcaccataagggcggagatagaagccccgcagtaggagaagacagtccatcggtgggagacaaggtctccgtgcggagaagaagccaaagggccggaaagaagcttccgaaggagggaggcgccggcggagaagggaagaagaagaagaggaacaagaagagcgtggagacatacaagatctacatcttcaaggttctgaagcaggttcaccctgacattggtatctcaagcaaggccatgggaatcatgaacagcttcatcaacgacatcttcgagaagcttgcccaggaatcttctagacttgcccgctacaacaagaagcccaccatcacttcaagggaaattcagaccgcggtcaggcttgtgctgcccggtgaattggccaagcacgccgtttctgagggtaccaaggccgtcaccaagttcactagctcttgaacaaaatatctttgcctggctcttgtttttcttcatgtgtttctgttagatctagcgacctatgcttagatttgaacttaacttttttattattatttgtaattgaagtattgggattaggttcatcctctgtgtatggaaatggtagaatcgatcgtataggggtaatttgatacatagaatggctgttttgactattttatgtactcgtgattgtctctctaacttcgttcgaggtcgatattcctttttaaaaatgtttatttgtatgcccc

SEQ ID NO: 5768 - DNA, 717 bp, Glycine max
  unsure (1)..(717): unsure at all n locations
tagcaaattccaattcccaatccaaaaccctaatttcgttcaaagaaccaattgtgatggcaccaaaggcagagaagaagccagcggagaagaagcccgcggaggagaagaagtcgacggtgggagacaaggctccggcggagaagaagccgaaggccggaaagaagcttccgaaggagggaggcgccggcggagaaggggggaagaagaagaagaggaacaagaagagcgtggagacatacaagatctacatcttcaaggtgctgaagcaggtccaccctgacattggtatctcaagcaaggccatgggaatcatgaacagcttcatcaacgacatcttcgagaagcttgcccaggaatcttccagacttgcccgctacaacaagaagcccaccatcacttcaagggaaatccagaccgcggtcaggcttgtgctgcccggtgaattggccaagcacgccgtttctgagggtaccaaggctgtcaccaagttcactagctcttgaattagctatcttatcgcttttctaagactcttttctgtcccaatttgagattttaatcagtagtagacttttttttgtttgataggatttgtaattggaagaatggtcttgggttgatccttttgtgtattgaagtggcaagatgtattgattatataggaacgcagtattgtttagtatcccgntnaaaataatggatatagaaaaatta

SEQ ID NO: 5769 - DNA, 731 bp, Glycine max
agacgacataaagggtcactcgttctatctaattcagtttttttctcccatcataaaaaaccgaccctctcctttccctcttcaccaaccaatggctcccccaaaggccgagaagaagcccgcggagaaaaagcccgcagagaaggctccggcggagaagaagcccaaggccgagaagaagatatcgaaggaaggaggaagcgagaagaagaagaagagaacaaagaagagcgtggagacctacaagatttacatcttcaaggtgctgaagcaggttcaccccgacatcggaatctcaagcaaggccatggggatcatgaacagtttcataaacgacatcttcgagaagctcgcccaggagtcgtcgcgattggctaggtataacaagaagcctaccattacttccagggagatccagacggcggtgcgtttggtcctccctggggagttggccaagcacgccgtttctgaaggtaccaaggccgtcaccaagttcaccagctcttgaaccgactatttcttggcgtttgtctctggctcttgtttctgtatctatggctgttaggcctatgcttagatttgaatcagtaggttttttggggggtttgggggttagcatttgtaattgaaggaatgttagtggttgagttgtttatggaagtggtaggattcattgatgatataggaatgcagtaattttagtatggtttgtgtgttatactttcaacaat

SEQ ID NO: 5770 - DNA, 602 bp, Glycine max
  unsure (1)..(602): unsure at all n locations
caaaaagggaatcaaaactttaaccaatcctcaatccaacaattccaattcccaatccaaaacctaatactttaaagaactaatattgatcaattttggaacaagaagaaaagcacgaaaaaaccgttgagaaaaatcacgtggaaaaagtccngcgaaaaagccaggccggaaaaaagcttccaangaggaagacccgccggaaaaagggggaagaggaaaagaggaacaagaagagcgtggagacatacaagatatacatattcaaagttctgaagcaagtcaaccctgacattggtatctcaagcaaaggcatgggaatcatgaacagcttcatcaacgacatcttcgagaagcttgcccaggaatcttctagacttgcccgctacaacaagaaacccaccatcacttcgagggaaattcagaccgcggtcaggcttgtgctgcccggtgaattggctaagcacgccgtctctgagggtaccaaggccgtcaccaagtttactagctcttaaactgttgtttatgggcttgttgcacgcccaagtctgttctatgtatctggacacctatgttcagattttaatcaattgtaggggtgg

SEQ ID NO: 5771 - DNA, 401 bp, Glycine max
gaattaaccagcgcttcaaacatttctcattcacaactttacccactcttcattctagcaattcgaattcccaatccaaaaccctaataccttcaaagaacctagtagtgaatcagtgatggcacctaaggcagagaagaagccagcggagaagaagccggtggaggagaagaagtcgacggtgggagacaaggctccggcggagaagaagccgaaggccggaaagaagcttccgaaggagggaggagccggcggagaaggggggaagaagaaaaagaggaacaagaagagcgtggagacatacaagatatacatattcaaggttctgaagcaggtccaccctgacattggtatctcaagcaaggccatgggaatcatgaacagcttcatcaacgacatct

SEQ ID NO: 5772 - DNA, 383 bp, Glycine max
cccacgcgtcaacacaagtattcaaaatatctctatatattccctccatttctgagaatggcgaaggctgcggagaagaagccagcggctgagaagtctccggcggagaagaagcctaaggcagagaaaaagattccgaaggaaggcggtggcgagaagaagaagaagaggtcgaagaagagcgtggagacctacaagatctatatcttcaaggtgctgaagcaggtacaccctgacatcggtatttctagcaaggccatggggatcatgaacagcttcatcaacgacatcttcgagaagctcgcgcaggaagcggcgcgtctcgccaggtacaacaagaagcctactattacctccagggagattcagaccgcggtcaggtt

SEQ ID NO: 5773 - DNA, 384 bp, Glycine max
  unsure (1)..(384): unsure at all n locations
gacaacgcaactattgacaatctctctttattctattcactccctccatttcttcaaactaaatttcctgagaatggcgaaggctgcggagaaaaagcctgcggccgagaaggctccggcggagaaaaagccaaaggcggagaagaaggttccaaaggaaggcagcggcggagagaagaagaagaagaggtcgaagaagagcgtggaaacgtacaagatctacatattcaaggtgctgaagcaggtacatcctgacatcggcatttcgagcaaggccatggggatcatgaacagcttcatcaacgatatattcgagaagcttgcgcangaagcagcgcgtctcgcgaggtataacangaagccgaccattacatncagggagat

SEQ ID NO: 5774 - DNA, 455 bp, Glycine max
  unsure (1)..(455): unsure at all n locations
acaaaatccgagtggttttgaacaaggcagaccaagttgatacccaacaattgatgagggtttatggagccttaatgtggtcacttgggaaggtgctgaagacacctgaagtaatgcgagtgtatattggctccttcaatgacaagcctgtaaatgatgctgccactggtccacttgggaaggaactctttgaaaaggaacaggatgatctactctcggatctgaaagatgtaccaaaagcagcttgtgatcgaagaatcaatgagtttgtaaaacgggcccgagcagccaagatacatgcttacattatcagccatcttaaaaaggagatgcctgctatgataggcaaagctaaagctcaacaaaagctcatcgataatttggcagctgaatttggaaaggtacaaagggagttccatttacctcctgncgattttccaaatgtagagtttttc

SEQ ID NO: 5775 - DNA, 1556 bp, Glycine max
gtcaagtacaatagacacgtaatcaaaaccatgcagatacgaacctgccactccatcaccacccaaacccttccacaacttccgtgttcttctagaaaagcccaccaccgccaccttcttccgccgttaaacgctgcggtttccgcggcgccgttcaaagcccggaaggcccactcaatgcctccagaaaagaaagaaattttcaagtccttggagggatgggcctcggagtgggtcctaccgctgctgaagcccgtggagcaatgctggcagccacaaaacttcctccctgacccctcccttccgcatgaagagttcagccatcaggtgaaggagcttcgcgaacgcactaaagagttacctgatgagtactttgtggtgctggtgggtgatatggtcaccgaggacgcgcttcccacttaccagaccatgatcaacaaccttgatggagtgaaagatgacagcggcacgagcccgagcccgtgggccgtgtggacccgggcctggaccgccgaggaaaacagacacggggatctgctcagaacttatttgtatctctctgggagggttgacatggctaaggtcgaaaagaccgtacattacctcatttcagctggcatggaccctgggacagacgacaacccatatttggggtttgtgtacacgtcattccaagagcgggcaacatttgtggcgcacgggaacacggctcggctcgcgaaggagggcggggatccagtgctggcgcgcctatgcgggaccatcgcagcggacgagaagcggcacgagaacgcgtactcaagaatcgtggagaagcttctggaagtggaccccaccggggcaatggtggccatagggaacatgatggagaagaagatcacgatgccggcgcaccttatgtacgatggggatgaccccaggctattcgagcactactccgctgtggcgcagcgcataggcgtgtacaccgccaacgactacgcagacatcttggagtttctcgttgaacggtggagattggagaagcttgaaggattgatggctgaggggaagcgggcgcaggatttcgtgtgtgggttggcgccgaggattaggaggttgcaagagcgcgctgatgagcgagcgcgtaagatgaagaagcatcatggcgttaagttcagttggattttcaataaagaattgcttttgtgaaatttcagttaagacttaagagataagagatagaggtcaacgtgagtcaacaggtttttggctttgtgactattttgagtttttgtttgtaggtggcattttgagtacgaataatgaacaatttaacatggattgcgtgtaatggacattgttggatccatggttgttgttctggtggatacaaaaccagtaggacttttttgttgtaacgtttggcttgcatattagcttagcttgttagtgtttctctttatttaaaatatcatattttgtaataaaatctctgtattaggtaatgatatgatatactaatagcatgttttggtttgtgatcaaaaaaaaaaaaataaagggcggcccgccga

SEQ ID NO: 5776 - DNA, 926 bp, Glycine max
gtgagtttgtgtaagttgcgttgtgtgcgagaatgcctgcgacggactaccaaggttcgtcttctccttcatcgttaacccattttggccgttcaattctgagtcttcgtcaagaacaggttcactccatttccatggaagggtcaagcttggaggctgagttggaatcctttcagcaacacgtcactgaccggttccttgaactcacttcggttgttcatgatgatttgctttcgctctcgtgggttgggaagctccttcattgcttcctgtgttgccaagaggaattcaaggccattctccacagccacagggctcaggtgttgagacccccattggatcgcatggtgtctgaatactttgagcgcagtgtgaaggctttagatgtttgcaatgccattcgtgacggtattgagcagattcgccaatggcagaagctgttggagattgtgctctatgcattggggcatcagaggagcattggtgagggccaatttcgtagagccaagaaggccctcattgatttgcacatcgggatgcttgatgatcaggaccccaacgcctcgattgcacatcgaaaccggtcctttggccgcagcactggtagcagggaccgtcatagtcatggccacagccatggccacaataatagcagtaataatacctatcaccatcggtctttggggcattttcgatcgctttcgtggagtgtttctcggacttggtctgctgctaggcagctccaagcaattgggaacaacatttagccacctaaggcaaatgagcttatggcttctggtgtgccttggcaatgcactgtgttcatcatgaattctgctcctgtctcgtgtgtgatgttggcacttgtggctacaattccgtgccacgaccgtggattacatgtccattttaccattcccaggatt

SEQ ID NO: 5777 - DNA, 439 bp, Glycine max
atttcgtggagccaagaaggccctcattgatttgcacatcgggatgcttgatgatcaggaggccaacgcatcaattgcacatcgaaaccggtcctttggccgcagcactggtagcagagacagtcatagtcatggtaacaatcatagcaataataatacctatcaccatcggtcattggggcattttcgatcactttcgtggagtgtttctcggacttggtctgctgctaggcagctccaagcaattgggaacaacatttatccacctaaggcaaatgagcttatggcttctggtggccttgcaatgcctgtgttcatcatgaattcgatcctgttgattgtgatgctggcacttgtggctgcaattacgtgccaggaccgtggattacatgttcattctaccattcccaggaattactcctgggctgctgcaatcctc

SEQ ID NO: 5778 - DNA, 774 bp, Glycine max
caatagtgcattgggatcaatcctttattcattcattcattgtgccgcttgctgggtttgccgtgttcgcgttcgttgttcgatcggagaagacccttttccctctcgtgggtcacttgagatggcatcaagacaccgtgttcacagagaacccttgaatgctcgaagggggtacccgccagaagggccatatgctcgcgtgcctcccatgcctcgcccgccacctcctattcctcctcatccggctgtgttggaagaggaacttgaatttcagcatgccgagatgcggagactcgtggcagacaacaggaggttgattgatgaccgaatggcgttgcagcgagaccttggggccgctaaggaagagctacatcgtatgaatcttgccattggtgacattcgcgcccagcatgaggcgcattcgagggagcttgctgagaaaggcatgaagatggaggctgaccttagggcaaatgagcctttgaagaatgaggtcatgcaactgcgatctgaagttaagaaacttaacaatctcaaacaagaactgacagggaaggttcagacactcactcaagatgttgcaaggttacaagcagacaatcaacaaattcctatgatgagggctaagattgatggcctgcaccaagagctaatgcatgccagaaccatggtggattacgaaaagaaggcaaacatggagttcatggaacagaggcagtcaatggagaaaaatttggtttccatggcccgggaagttgagaaattacgtgctga

SEQ ID NO: 5779 - DNA, 425 bp, Glycine max
cttgctgggtttgctgggtttgccgtgtttgcgttctttgttccatcggagaagacccttttcccttttagcttcactcttttctctctctttatctgtcaacgatccaagtctacttctgaagcatctttttactgtcacttgacatggcatcaagacaccgtgttcacagagaacccttgaatgctcgaaggggttacccaccggaagggccatatgctcgggtggctcccatgcctcgaccactgcctcctattcctcctcatccgtctgtgttggaagaggaacttgaatttcagcatgccgagatgcgaaggctcgtggcagacaacaggacggtgattgatgaccgaatggcgttgcagcgagaccttggggccgctaaggacgagcttcatcgcatgaatcttgccattggtgacatt

SEQ ID NO: 5780 - DNA, 448 bp, Glycine max
cccacgcgtccggaaaagggaagtaacttatgtgaataatatgaagggcggtcaagaaatctcaaaaacaccgtcctcttctaagagaacactaagtcagggttcagttgatatatatgctgctcagtgcaaaaattgcttgaaatggagagagattgatacacaggaagagtttgaagagattagaagtaaagttgctgaggaaccttttctttgcagcagaaaggctaatagttcctgtgatgaacctggtgatattaaatatgattcctctcggacatgggtgattgacaagcctaacctcccaaagactccacaaggttttaagaggagcttggtgcttagaaaagattactccaaattggacgcttactacatcacacctgcaggcaaaaaactgagaacccgcaatgagattgctgcgtttctaaaagataatccagaattc

SEQ ID NO: 5781 - DNA, 1158 bp, Glycine max
gaccatatttgaagctctttctttcagtaatagagagataatctagagagagagagagagggtttttattttattttaataagattgtgttgtgtttggttctttatttgttgtttactttgaagtggggtgtgtggggagagaaagttgggtttctctcgcttgtatctggaaaaagtctcgattttttaagtggggtttgagggatttagggtttgggttgttgggtcgtgagtggaatcagcaactatgaatatgatgcggaggttgaagagcattgcttctgggaggacttccatttcttcagatcctggaggggattctaactcaaaaagggccaagtttgaaccagaaactgaagggaaggccgatgagaaaacaaataccattgaaacaatctgcacagatcaggaacaacctatagacacatcaaaagaaacttccaatgtaggcacatccgatgtatctacagtagctagaactgagaagtcaggtttcgatgagcttcctaaagaattaaatgaaatgaaaattagagatgagaaaagcaaaaacaacaatgaaaaggatatagaagctactgtagtgagtggtaatggaacagaaacaggacaaataattacaactgccattggtggtcgagatggacaaccaaagcagacaatctcttacatggctgaacgtgtggttgggactggttcttttggtgttgtttttcaggctaagtgccttgaaactggtgaatctgttgccataaagaaggtgttgcaagacaggagatataagaatagggaactccaggttatgcgcacagttgaccatcctaatgttgtcaaactaaagcactacttcttttcaactaccgataaagatgaattgtaccttaacctggttttggagtatgtacctgaaactgtctacaaagtttcaaaacactatgttaggatgcaccaacacatgcctatcatttatgtgcaactttatacctaccagatatgtcgtgcgttaaattatttacatcaagtgattggtgtttgtcatcgtgacatcaaaccccagaacctattggtaaatccgcagacacatcagttaaagatatgtgattttgggagcgcaaaggtgttggttcctggtgaacccaacatatcgtacatttgc

SEQ ID NO: 5782 - DNA, 1844 bp, Glycine max
ggagaagaaaaaggaagaaaggtaatagagagagagagaaagggaagaggagagagaaacgaagaagaagagtgtttctcacatcacatggcctccttgcccttggggcaccaccaccaccaccacaaaccggcggcggcggctatacatccgtcgcaaccgccgcagtctcagccgcaacccgaagttcctcgccggagctccgatatggagaccgataaggatatgtcagctactgtcattgaggggaatgatgctgtcactggccacataatctccaccacaattggaggcaaaaatggggaacctaaacagaccatcagttacatggcagaacgtgttgttggcactggatcatttggagttgttttccaggcaaagtgcttggagactggagaggcagtggctattaaaaaggtcttgcaagacaggcggtacaaaaatcgtgaattgcagttaatgcgcttaatggatcacccaaatgtaatttccctgaagcactgtttcttttccacaacaagcaaagatgaactttttctaaacttggtaatggaatatgtccctgagtcaatgtaccgagttataaagcattacactactatgaaccagagaatgcctctcatctacgtgaaactgtatacatatcaaatcttcaggggattagcatatatccataccgccctgcgagtttgccatagggatgtgaagcctcaaaatcttttggttcatcctcttactcaccaagttaagctatgtgattttgggagtgccaaagttctggtcaagggtgaatcaaacatttcatacatatgttcacgttactatcgggctccagaactaatatttggtgcaactgaatacacaccttctattgatatctggtcagctggttgtgttcttgctgaacttcttctaggacagccattgtttcctggagaaaatcaagtggaccaacttgtggaaattattaaggttcttggtactccgactcgagaggaaatccgttgcatgaacccaaattatacagattttagattccctcagattaaagctcatccttggcacaaggttttccacaagcgaatgcctcctgaagcaattgaccttgcatcaaggcttctccaatattcacctagtctacgctgcactgcgctggaagcatgtgcacatcctttctttgatgagcttcgcgagccaaatgcccgtcttcctaatggccatccactgcccccacttttcaacttcaaacaggagttagctggagcatcacctgaactgatcaataggctcatcccagagcatattaggcggcagatgggtctcagcttcccgcattctgccggttcatagatgcaaagggataatgaaacgatgagtcaaccgatatagtgatcaatgtgaatcaacagacaggctgtttgtggcctatatataactttttcgtcccccttgtgaagatgtatacatgtgcttgctgctcggctaagcatggaagtttgtgattctgtctagtatttcattctagttaaagcatacttatccctgcatctgtatattgttttggtcagatttcagaaagctaggagtacaaaatgatagcaatcatgtcttcataggtagaggggcccacctgaattgaggggcccctgtagtagtttggcttgctttttatgagattaaattcaggatgtcctttatattatgtttatgacaatctcttgattcaaaacaaaaaagttcctcattgtttaatattgtagtaagtagtaaccctcttccttgcccagatcctgtttgtcacatgtggacaacaagaaaggatccaatccaaaagttatttacgg

SEQ ID NO: 5783 - DNA, 767 bp, Glycine max
acgcattaacactcatcttaggcacaatgttgatcacatgcaaattcctgctaaagcagcaaaggttgcataatagcttctgcaatcttcacctactctactcttcactgctctggacgcatgttcacatcctttctataatgaactttacaagccaaatgcccgaatctctaatggccatccactgcccccactattcaacttcatactggaattagctggagcatcacctgaactgatcaatatgctcatcccaaaacatattaagcggcagatgggtctcagctttccgcattctgccggttcataaattcaaagggataatgaaacgatgagtcaacctacatagtgatcgatgtgaatcaacagaagggctgtttgatgcctatgtataactgggagtcccaacataatatgcagtttttcctcccccttgtgaagatgtatacatgtgttggttgctcggtaaagcttgaaagttggtgattctgtgtagtatttcattcaagttaaagcatacttatccctgcatctgtatattgttttggtcagatttcagaaagctaggagtataaaatgatagcaatcatgtcttcataggtagaggggcccagctgaattgaggggcccctatagtagtttggcttgctttttatgagattaaattcaggatgtcgtttatattatgtttataacaatctcttgattcaaaacaagaaattttctcgttgtttaatactctagtacccccgttccttctacccaag

SEQ ID NO: 5784 - DNA, 549 bp, Glycine max
gaggcactacaattccctcagaggagagagaaagtgttggtgtgttttttagagagagagagaaagaaaagactgtgtgagtgtagtgtgtgtcgttctcccatggcctctatgccgttgcggccgcagcaactgcttcaaccccccccgccgctagtggagaatgacgcgatgaaagtggactctcgcggcggctccgacgccagcgccgaaaaggaaatgtcagctcctgtcgcagatggtaatgatgccctcactggtcacataatctcaaccacaattggaggcaaaaatggtgaacctaaacaaaccatcagttacatggccgaacgtgttgttggcactggatcattcggcattgttttccaggcgaagtgcttggagacggtggaggcagtggctataaaaaaggtcttgcaggacaggcgatacaaaaatcgtgaactgcagttaatgcgcatgattgatcacccatatataattaccctgagtaactatttcttctctaccacaagtagagatgaaccttttctgattttggtgatggaa

SEQ ID NO: 5785 - DNA, 370 bp, Glycine max
cccacgcgtccgcccacgcgttcgcggactctcgaagaccacagaagcggggagtagcttgtatccataccgcactgggagtgtgccatagggatgtgaagcctcaaaatcttttgggtcatcctcttactcaccaagttaagctatgtgattttgggagtgccaaagttctggtcaagggtgaatcaaacatttcatacatatgttcacgttactatcgggctccagaactaatatttggtgcaacagaatacacagcttctattgatatctggtcagctgggtgtgttcttgctgaacttcttctaggacagccattatttcctggagaaaaccaagtggaccaacttgtggaaattatcaaggttct

SEQ ID NO: 5786 - DNA, 370 bp, Glycine max
  unsure (1)..(370): unsure at all n locations
cctcgaaggagagagaaattagagagagaaaggtgtgagtgtttgttttttagagagagaaagagtgtgagtgttgtgttgagtgcagtttctttctcacatggcctctatgccgttggggccgcagcaacagcttccaccgccgccgccgcaacaaccgccgccagcggagaatgacgcgatgaaagtggactctcgcggcggctccgacgccggcaccgaaaaggaaatgtcagctcctgtcgcagatggtaatgatgcactcactggtcacataatctcaaccacaattgcaggcaaaaatggcgaacctatacaaaccatcagttacatggccgaacgtgttgttggcactggatcattnggcatt

SEQ ID NO: 5787 - DNA, 354 bp, Glycine max
gccttattatttacacactttttttaatatgcctggatatatatgaggccatatagcaaaaacgttggtaccaaaaccaacatattagaagagagagcacttcattttagctagctagagaaaaaaaacaaagtgatagtgagaagatgttagctatggagggtaataagaagactaagcaatatggtcttgactctgccacttcttggtttggaagttgcatttcttcatgttcatcatcagaaaaagtgtcaactcacagaaagcttcctagaactgcttccgaatcatcagttaccaaccccatgaagaagcgtggaggatggaaagccataatctttattttaaggaatg

SEQ ID NO: 5788 - DNA, 1273 bp, Glycine max
gtggttgtgatggtggtgtataacactcgatccagcacataacaatggaaacgcagctttacgtgttttctctctagattctgctcttaaacgccgtcgttttcaaactctttttttccccttcgcttctctgtctttgtaaccgaaaggggggaaaatataattaacaccgatttcgcgaccaattcttcttctgcgttgaattgggacaacgagaaattggatctcagtttttggcaggaaataaaaattgcatttgagtgtaaaataacagagtatagtgtagggccttgttcttgatactgtgctaaatttgttggatggcggagaaatcatgcatcaagcgccttcagaaggaatatagagccctttgtaaagagccagtttctcatgttgtggctcgtccttctccaagtgatattcttgagtggcattatgtgttggagggaagtgaaggaacaccttttgcaggtggatattactatggaaaaatcaagtttcctcctgaatatccatataaacctcctggaatcagcatgactacacctaatggacggttcatgacacagaaaaagatctgtttgtctatgagtgactttcatccagaaagttggaatcccatgtggtctgtatcaagcatattaacagggcttctttcattcatgatggacaacagtccaaccactggcagtgtaaacaccaccactgctgagaagcagcgtctagcaaaatcttccctttctttcaactgtaagaatgctacattcaggaagatgttccctgagtatgttgagaagtacaaccagcaacagctttctgagcaggctgctccagagagggtctcatcggatacgtctcccgacaagagttcaaggccagttttggaaaagaaattagaatccaatggagaagacatgagaagagtagatgggttgaaggaagtgaggaaaaacagaaaaccatttccaacgtggatgatgctattactcttctccatctttggggttgtaatggcattaccactgcttcagctgtgatgataggcaaagaaatcttcataggagggtataaggggtccagaaagtgttctcctggaactggtactatatgttctgctaaggttgtcatgtctaacagaatttgtatagggaaatgaaatgatgaacatggaggctgcgttttactatgggctgaatttactcctttgtgtctatgttgccagcttcttggtggtgaatgttaagaagttacatgcttgatacttttgactttc

SEQ ID NO: 5789 - DNA, 402 bp, Glycine max
tccactccgaaaattattttgaacacccttcatcgatctaaatgggtttggcaggatttctcagaaaactccaagatatctattctaaacataagctcatatccactgttttcttctgtctcttggtctcacctccgtccttcttctataccttctatgccacaagtcatttatccagtgtttttctcaccagtgaaggtgccgacaactctgtaggcgcaacctttcactatatcatagttattgcacaagttgaatgttttgccgttcttggcatatccatgttttccttgctaaagccactgctccatatcttagcctcagagcagaagatagacccagaagcggagttgagcatcaaaaacctcattttatcattgaccaaacccgcgagaagcttac

SEQ ID NO: 5790 - DNA, 1082 bp, Glycine max
cgacccagtcccagcctacacctttgggtgcattcaaaaggccacagggagctcactgccaccacaagggctattgggcctgggccgaggcccattatcactcttggcccaaacccaaaacctctaccaatctaccttctcttattgcatgcccagctttaaaacactcaactttagtgggtcactgagacttgggcctgtggcccagcccaagaggatcaagtttacccctcttctcaaaaatcctagaagatcatcactgtattatgtgaacttggtggctattagagttggccggagaattgtggatatcccaccggaggctctagcgttcaatgctaacaccggcgccggcaccgtttttgattcgggtacggtattcacccgactggttgaaccggcctacaacgccgtccgaaatgagttccggcgacgaattgccgttcacaagaaactcactgtgacaagcctaggagggtttgacacatgctacacagccccaatagttgcaccaacaataacattcatgttctccggcatgaatgtgacactcccaccggacaacatcctcatacatagcaccgccggcagcgtcacgtgcttggccatggcaccggcaccggacaatgtgaactcggtgctgaacgtgatcgccaacttgcaacagcaaaaccaccgtgtgctcttcgacgtgcccaactcaaggcttggtgttgctcgtgagctttgcacctaatacataataataagtggttcttaggttaagaattttcatgacttgtgggtacaataataaaaatcgtgtcgaattggcattgcaaagttactcctatttgggaattggtatttgatatgggttgggttttggcattgctaagagtttattgctaactatttagtagaagatagtgagctaaatgtttaaggcattgcatgtaagtctccaagtttcaagttatatatgtagtagtatgaaaagaagttatatttgtagctttgtaatggtatgtgtcacgggttcatatatatgtagcaatcccttgtgttgtttattgaagttgattgaattgataatgacttcc

SEQ ID NO: 5791 - DNA, 634 bp, Glycine max
gatagcgcgaatttacaaaactagccaggaacaggccctgtctttccgatattcaccatctctttctctctaatccaaaaaaaaatctgttgtgaacaaacacacattattgtttgttttcatcccacggaaaaatcgatcaggcaaaacaaacaaaggtgaaactgaataggtgcgtgtttgtgttgatgggctaagaggacagagaaaaagaaagaaagagtataaaatcaaatctggcaaatctcgtggggttgagggctcggtcttcgtcgaagcaagcttcccctgatttgcaggacgacgaggaggagtgcaggccttggcgtcgaaggttaataatgtctttctcctggtcctccacccttaggatcaccatcctcctcctcctcctcgccgcggtcatcgtcgcgtgcttcactctccccatcgaaaagatgatgaaggacttcttattatgggtcgatcacgatcttggcccctggggcccacttgttctggctgttgcttacattcctttgactgtcttggctgttccagcttcagtgcttactcttggtggaggttatctttttgggcttccagtgggatttgttgctgactctattggtgcaactgttggtgccggagctgc

SEQ ID NO: 5792 - DNA, 525 bp, Glycine max
caaaagtggctgtccttccgatatccattcataattctccggaacaacacacttgtgtttcctttccattttacggaaaaaagagaaagataagcgaaacaaacaatctctgaatcgatgggctaaaagggaataaaaaagaaagagcttcaaatctggcaaatctcgtgggattgagggctcggtctgcgtcgaagcaagcttctccccatttgcacgacgacgaggaggagtgtaggccttggcgtcgaaggttaaccatgtctttgtcttgggcctccgccctcaggatcaccattctccttctcctcctcgccgcggtcatcgtcgcatgcttcactctcccaatcgaaaagatgatgaaggacttcttattatgggtcgatcacgatcttggtccctggggcccacttgttctggctgctgcttacattcctttgactgtcttggctgttccagcttcagtgcttactcttggtggaggttatctttttgggcttccagtgggatttgttgctgactcta

SEQ ID NO: 5793 - DNA, 555 bp, Glycine max
ttaaaatccctaaaagccatccgaatttcccaattgtggcataggaatgccctcttgttctctatttcaccacacaaattcccaattctaacttggtttttttttgtctctcacacactcctttcaatctccaattaattacttttcttcaatttgaagcgtgtctgaagttggttgaagcattgtgttattgttctggttttggtctccgaggtttgtgtcggattccgatgtattatgtaaaagaagctgcgcatgtcgaccccatgttcgtagctgataacaccaaccccaaggattattacaaagtgctggaggttgaatatgatgcaaccgatgaaaatatcaaattaaattaccgaagactcgcgctgaaatggcatcctgacaagcacggaggagatagtgctgttactgcaaaatttcaagagataaatgaagcttacaatgtattaagtgatcctgccaagcgtttggactatgatttaactgggatatgtgagattgaaaaatatagcttgcaggaatatcttgccagatttaaaagcatgattc

SEQ ID NO: 5794 - DNA, 416 bp, Glycine max
atctggtgcttcatggttaccctgatttgttgtttgagcagaaatcttggattgcggtgaatactgggagttttctgtttaggaactgtcagtggtctttggatttgcttgatgcttgggctcccatgggccccaaggggccggttcgcgaggaggccgggaagatcttgacggccaatctcaaggggaggccggcgtttgaggccgacgatcagtccgccttgatatacttgctgctgtccaagaaggagaagtggatggacaggacgtttcttgagaattcgttctacttgcacggttattgggccgggttggttgatcggtatgaggagatgattgagaagtatcacccagggttgggggatgagaggtggccgtttgtgacacattttgtccggtgttaaacgttttggaat

SEQ ID NO: 5795 - DNA, 462 bp, Glycine max
gcaaaatttcccaatttcgcgaaaccctaactagccctatggaactctctcgtctcttcgtttccgacacgtgcttcttctcccctccgattcgctgctccccttcgccggcgctgtccacgtttttcgccgtcaagaaccgccggagcaggaggaggagcagcttctgttccgcctccaatcccgacaccttggtcgccggcggtgccgccgtcgtcgctggggccggcgagaagcacgaggaggacttgaagtcttggatgcacaaacacggcctccctccctgcaaggttgtgctgaaggataaaccttgccccaatgattctcataagcctatacattacgtcgcagcaagtcaagatcttcaggttggtgatgttgcattctccgttcctaattccttggtggttacgctggagaaggtcttgggaaacgagactgttgctgaattattgactacta

SEQ ID NO: 5796 - DNA, 586 bp, Glycine max
gataaagacactgatatttcacacgggtaaatcgcatcgtggagaaagaactgattgggctatgcatgagcataggcttgaagataaggacctcgctgacaaagggattgctcaggattcctatgtagtctgcaaggtattccaaaggcaaggtctggtccaggaaggggacacggcgagaccatttaatgaggaagagtgggacgatgaggaaattggaataccttgtgctgctttgactgcaccagttcccatcttgcctatgacatctgatggttctgttccaaatgacaatctccctgctagtggatgtactgtgtcagcatccatatcatgtctatcaggatcactgccttctcctggaggtctataatcctggtcaggaaaacattgttgaaggtgcatcaccttcagatgatttttttgagggcttggaagactacttggctggtttctcctctggccagaatactgaattcaacacaaacggaatgcggctactacaggtgatgttggtaactctgatgaattttttgactgcttgaaagactactgggctgctctggctggtttctccgctggccag

SEQ ID NO: 5797 - DNA, 333 bp, Glycine max
gttctgttgcaaatgacaatcatctccctgctagtggatgtattgggtcagcatccacatcatgtctatcaggatcagtgccttctctgggcacagtaaatcctactggtccaaatgatcaagctgttaatgatgatattttaccaatgcttcatatttttaatgatgacaaatggtttgaggagatttataatcctggtcaggaaaatattgttgaaggtgcaccaccttcagatgatttttttgcgggcttggaagactactttgctggtttctcctctggccagaatacaggtgatgttgggaactctgatgacttggacttcttagagt

SEQ ID NO: 5798 - DNA, 1300 bp, Glycine max
cccacgcgtccgcccacgcgtccgcccacgcgtccgcccacgcgtccgcccacgcgtcgggtttcctctgtcacgaggaacagcgcagaacctaaccctcacgaaaacccttttcgattccgataactctcgttgtgccgaaaccctaaccttaaccgggttttctcgttggttgggattgaattggcatcggagggaggcgatcgattggaaaattggtagtagtagtttagcgttgaagaacgatgtctgctgctgtgtgcggaagcaagagatctttcttcgaagagcttcctccttctccgccactctccaagaggctccgttgttcctcttcgccgattcgattccctcctccctctcccgtcgaccaacttcgccctctctttccccacatggacgacttggttcttgagagagctctccaagaatgtggcaatgatatagatgctgccatcaagaggttgaatgagctttgcttgggaactgccgatggaaatggaattgctgaagaattggaggttgtcattaatctggatgcaggtaatttggaaggtgatggaaatgcttctgtttctgaggagcagcctgctttgaacaaccaccttccggcagatggagcagaatggattgatttttttgtcacggaaatgatggttgctactagtgttgaagatgctagagcacgtgctgccagaatgctggaggttctagagaaatcaatcagtgaaagagcaaaggctgaggcaactgatgtgcttcagaaggaaaatttgatgctgaaagagcaaattgaagcgttgattaaggagaaaaattctttcaaaaatgcttttagaatccagcatgaacgatctgctgattatgaggttaagaaccaagagttgcagcatttgaagcaattggtgtctcaataccaggagcagattaaaactcttgaggtgaataactatgctttggcaatgcatttgaagcaggctcaacagagcaacccctttcctgggcgcttcccacctgatgtcttctaatggggtgaatgtgtagaatgtaataataaaggcagcaaacagctggattaattatgtcgtgttgtttttctttcttacaaaggtcaagcgttgttgtagtttgcttttatagcttctgttggtcagagcatggtttctgcttttatagttcaggacttcaggttatatattctatcctatcaacacagtatagtatccgacagtatcagaatatatcgtcactcaattcaattacccgtttggaattttatgatttcgagttatagtccccc

SEQ ID NO: 5799 - DNA, 455 bp, Glycine max
gaggttaagaaccaagagttacagcatttgaagcaattggtgtctcaataccaggagcagattagaaccctcgaggtgaataactatgctttggcaatgcatttgaagcaggctcaacagagcaacccctttcctgggcgcttcccacctgatgtcttctaatggggtgaatgtttagaatgtaataataaaggcagcaaatagctgcatcaggttgattaattatgtcgtgttatttttctctctttcttacaaaggtcaagcgttgttgtagttcaggacttcaggttattctatcctacagtatccgaatatactgtcactcagttcaattaccccgtttgggattttatgatttcgagttgtagtctagcgagattgcgacgatgttcaaggttagcctttatccgtcgcaattgatattttagatgaagtttgataatctctttttggct

SEQ ID NO: 5800 - DNA, 368 bp, Glycine max
tttagggagagaatttcctgcagaagaagaatcgttggtaaccaacgcgctggggaagcacgtggaatacagtttcggttcgtcacctctgtggcacagcactataaataatcctcaagtttctacactttacctctcccaggaggaacagcgcagaacctaaccctcacgaaagcccttttcgattccgataactctcgttgttccgaaaccctaaccctaaccgggttttttcgtttgtttggattgaattggcatcggagggaggcgatcgattggaaattggtagtagtagtttagcgttgaagaacgatgtctgctgctgtgtgccgaagcaagagatctttcttccaagagcttcctccctt

SEQ ID NO: 5801 - DNA, 280 bp, Glycine max
tgtgtgaatggggcctgagtcacgtgcgagggggaggtggggtcaatggtacctcaaccacgtgcgaggaaggatttataaatattatattgagcctgaaggcccaacgcccactgactatttgaggtcttggggcatctcaactgttagtgtgatagggttcttgagagagctctccaagaatgtggcaatgatatagatgctgccatcaagaggttgaatgagctttgcttgggaactgccgatggaaatggtattgcctgagaatcggaggttgtca

SEQ ID NO: 5802 - DNA, 575 bp, Glycine max
ggacttagagaagatgttaacaaatacttttttttaattatcgctgtatgtgtcacagcttgacatatgcatatgttgaaactgaagtgtctatctgtccaacataactaaaagcctaaaaccgcacaaaaagatcttagattgcttgtagaacgttgctgatctggctgcaagctcagcttcaccttgctacgtaatcttgcaggttcgaatttgattgattggttataggaatcaatgcatgccacgtgttttgctgaaggtggaggaagaaaccatgttttgtgaatgcggggatttcggctttcatataccagagtcaatgagtgtgcgctgtgggaaattttgagaacataaacgagccaacaaatgcaactgactactcaaaggagacaccatgcttccttatgtttgtagatgaagaaacagaattagaccataaaaattaactttacattgtttttttgggagctcatacacaaagcaggggcaatgcacttcacaattattaaatgttctattgctgtgaagaaagagaacttgtacattgttttttacagagctcatacacaaag

SEQ ID NO: 5803 - DNA, 669 bp, Glycine max
ttgggaacatgtgggaattatgagaagggagtttgtcattctcccacttcctatgccaccctagagaagaaatgtttaggaaagccaagatgcccggttactgtatcaaacagtaactttgggcaagacccttgtcctaatgtgttgaagcggttatcagttgaagctgtttgctctccaaccaatcggaggggctgaatgattaaggaaggaagccacccttttacgtgtagtatgaagtgacttaacaagaaaaacgaaaggaccataatagtataggtaaagttaagtgtcatggttgtttttagggagaaagtaataatgtttatgatatgttggtgccgaaggcacgaggtttttagtttcatttagtgatgttgtgttgacgggaatgtataaaaattagtgattgtcggataggtgaatcttaatcagggagtccaaaattgggatccttggtggagtagttcccggccttttacgttttaactataggcacggggaagagagggaatttggtttgtgtgatgttttttcgttttactttgtggggttaaattaaactccaaatcaggttcaagttgggagcggatcctactgtaaccactctacgtttatttaaagcccattgttcaattatgaaaaaaaaaaaaaaagggcggccgccga

SEQ ID NO: 5804 - DNA, 716 bp, Glycine max
cttcaagttcaagttcaattcccacaccaaggaaactctctcatctctcaaacccaacaaaaaaaaaaccattactttacttcactttacatgtcgaactccgacgccaccactaacggcgtcagtaacggcgccatcattgatgcgcagagacagcaggccttagccgttaagaagccgccgtctaaggaccgtcacagcaaggtggacggccgagggcgccgcataaggatgccaatcatatgcgccgcacgtgtgttccagctcacgcgcgagcttggccacaagtccgacggtcaaaccatcgagtggctcctccgccaggccgagccctccatcatcgccgccaccggctccggaaccacccccgccagcttctcctccactttcacgctccttgatggtgttttattcgttttcagaggtgactggtgtgtgaaagatgaaaaaaaaaaagaagaaagctctggttgtactctgtatgacttctgctttgagatttttatcttcaattcttagccatttcttagattgatcagcgtgagaataatgttttcttgtatgtaagtggattgtttcgggtgccagaataaaaacccgtctgtttctttctttacctcttttcttcacttgtcactttctttgtttctatgtacaccccaccttgttttgttccttcccccccattcaattatttcagtgtgctttctgtaatt

SEQ ID NO: 5805 - DNA, 505 bp, Glycine max
cttttattctccgtctctctactctcttattctcaacgtcaaacccaaaaccccttcttcttcttcttcttctcgcgccgcaataataatactaaaacatgtccaactctgatggagccactaacgccgtccctcccaacgacgccaacaacaacacaatcgttgagtaccagcagcgaaccaccaccaccaccaccgccgccgccgccgccctcgccgtcaagaaaccgccttccaaggaccgccacagcaaggtcgacggccgcgggcgccgcattcgcatgccgatcatctgcgccgcccgcgtcttccagctcacgcgcgagctcggccacaagtccgacggccagaccatcgagtggctcctccgccaggcggaaccctccatcatcgccgctaccggctccggcaccactccggcgagcttctccactgtctccgaccacaagcccctcctcccttcccctacccccttcatcctggcaaacgcattcgccctgacgac

SEQ ID NO: 5806 - DNA, 673 bp, Glycine max
acgagcttctaagttgaagagcatggattggattgcattgttgcttctgtttcactttcatagtgggttattttgggctttgacttactgggtctacaagtatggtgtggttgaagtggttgcagttgaggtaattagtgcttgcaagcttgtttctgaagccagtgaattgtgtttccaaagttcaattgtcagtcccagaatgttggagtaccctacctttccaacatgggttgagaattcatgtctcttggatgttgttggggcatgttttgagggattgaggttcatgtaaggtggttatgttgtgaatttggtgcagctctctgactctctcctccactttcacgctccttgatggtgttttattcgttttcagaggtgactggtgtgtgaaagatgaaaaaaaaaaagaagaaagctctggttgtactctgtatgacttctgctttgagatttttatcttcaattcttagccatttcttagattgatcagcgtgagaataatgttttcttgtatgtaagtggattgtttcgggtgccagaataaaaacccgtctgtttctttctttacctcttttcttcacttgtcactttctttgtttctatgtacacgggaacttgttttgctgcttgatgacgattcaattatttcagtgtgctttctgttctt

SEQ ID NO: 5807 - DNA, 718 bp, Glycine max
cttcaagttcaagttcaattcccacaccaaggaaactctctcatctctcaaacccaacaaaaaaaaaaccattactttacttcactttacatgtcgaactccgacgccaccactaacggcgtcagtaacggcgccatcattgatgcgcagagacagcaggccttagccgttaagaagccgccgtctaaggaccgtcacagcaaggtggacggccgagggcgccgcataaggatgccaatcatatgcgccgcacgtgtgttccagctcacgcgcgacttggccacaagtccgacggtcaaaccatcgagtggctcctccgccaggccgagccctccatcatcgccgccaccggctccggaaccccccccgccagcttctcctccgtctccctctccgtccgcgccgccgccaactccctctcctccccttcctccacctccgaccacaagccccagttactctctcccactcccttcatcctcggcaagcgcatacgcaccgacgaagactcttccaaagacgaagctgtctccgtggggccctctcttgtgggcccttctactcctcccggactgtgggccctcccggcccggcccgatttcggacaaatttggagcttcgccgccgccgctgctcccgaaatggtgtcggtgtcgcagcagcagcaggcttcattgttcgctcatcaccaccgtcagcagcagcagcaagccatcgg

SEQ ID NO: 5808 - DNA, 522 bp, Glycine max
gaatgtagtaacttcttttgtttggagaaaccctaaagtgaagaaaggaggaggaaaaaggtaaagttgtggagaaatggaaggtgtgaaggaaggcgcgtgagacagggacgtagtggggtccagcacccacgtgccctcctcctgtctccaccagctacttccttccttccttcaactctcaatttctctcaattccatcacatgtcgaactccgacggcaccactaacggcgcaatcactgaggcgcagagacagcagcaacagcaaggggggaaggcgttagccgttaagaagccgccgtcaaaggaccgtcacagcaaggtggacggtcgcgggcgccgcataaggatgccaatcatatgcgccgcacgtgtgttccagctcacgcgcgagcttggccacaagtccgacggtcaaaccatcgagtggctcctccgtcaggccgagccctccgtcatcgccgccaccggcaccggcaccatccccgccagcttctcctccgtctccctctcctcccct

SEQ ID NO: 5809 - DNA, 682 bp, Glycine max
atccgctccaaggttaaaacttaatgttaaaattaacctttaaaattcaaaacacaacacataatagttggtggctaaagaataattgcggcaaacccactaatacccaaactcaaagccatagccatggccaccctaatttcagtttaggaacgtttcatatccaactttcactttcactttcactttcacttccacatctaattcctgttcaattttctatccctactcgtttattctattggcaacgggaagaagatggggttgtgatttgtaattggagaactgtgtgaagtggaggagggaggacactttccacgaccacaatgcggtggtttccgttgagtactacctcaaactcggagagagaacggaatagagagaacactactcgtgcttcggtgtatctcaatgtatatgatcttactcccataaacaattacctttacatgcttggccttggaatttttcattcgggtatacaagtgcatgatattgaatatggctttggggcacatgaatatccaagtagtggtgtgtttgaggtggaacctagaagctgccctggcttcatctttagacgatcagtgttgttgggcagcactgatatgtctaactcagaatttcgatatttcatagagcgcctgtctgcaaaatatcatggagacacttatcatcttat

SEQ ID NO: 5810 - DNA, 419 bp, Glycine max
cactgccttttcacgccacttgtgactcttccattcccaccagaatcaccttccctatcttttagccactgctaaaacttgtccttttcctttccccccgcaaaaaataaaataaaataaaatccaacacatttaacagatttcacgccaccaacggtgtcttcgtaacggatatagcataaccttttgatcattcggtatgaaaatccaatctccaacctcggatccatcttttacattcttcagatcataggatctaatattgtatgcagttttgaaagaagaaaaaaaaaggagaaaattttgatctttgtgtgattgtgctattagattagattttagtagattcattgtgtcgactagaaccctaatgaattagaatgcaatccaagagtttgagcctggctccagctctcaca

SEQ ID NO: 5811 - DNA, 409 bp, Glycine max
gatttacacgttccctaaaatctgttatcataatatgtcactgctttttcacgtcacttgtgtgactcttcaattcccacaagaatcaccttccctgtcttttagccactgctaaaactggtacttttccctttcgccccctcagaaaacaacacatttaacagatttcacgccaccaaccgtgtctttgtacagcataccttttgatcattcggtatgcaattccaatctccaaactcggatccatcttttacattcttcagatcatagaatctaatatcgtatgcagttttgaaacagaaacaaaaaggagataaatttgatctttgtgtgattgtgttagattagattttattagattcattgtgtagcctagaaccctcatgaattagaatgcaatccaagaatt

SEQ ID NO: 5812 - DNA, 1478 bp, Glycine max
tatgcaagagtaatgacatcggacgcacgcgtacgtaaactcggaagtcctctgattcgttcgttcactttcactttaccaactcctaacaatttctctctctgtttccttcttcaccgcatcaatggagttggacggcgttctcctcggcatgtgcaaccctctcctcgacatctctgccgtcgtcgacgacgctttcttgcaaaaatacggtatcaagttgaacgatgcgattctcgctgaggataagcacaaacctatgtatgaagaattggctaacaatcctaatgtggagtacattgctggaggtgctactcagaattcaatcagggttgctcagtggatgcttcaagcaccaggtgccacaagttacataggttgcataggaaaggacaaatttggagaggagatgaagaagaaatgtacacttgatggtgtaaaggttaactattatgaaatcgacaatacacctactggaacttgtgctgtttgtgtggttggcggtgaaaggtcccttgttgccaacttatcagctgcaaattgctataagtctgagcatttgacgagaccggaaaattgggcattagttgaaaaggccaagtatttctacatttctggctttttcctcactgtatctcctgattccatacaattagttgctgaacatgcagctgcaaataacaagttcttcatgatgaacctttctgccccatttatctgtgagttcttcaaggatgcactgaataaagttctgccatatatggactacgtttttggtaatgagactgaagcaagaacattttctaaagctcaaggctgggagactgataatgttgaggaaatagctttgaagatttctcagttgccaaaggcatcggaaacacataaaaggattacggttatcacccaaggtgcagatcctgtttgcgttgccgaggatggaaaagtgaaaatttaccccgtgataccgttacctaaagagaaattagttgacacaaatggagcaggagatgcttttgttggaggatttctttcacaattggttaagcataagcccattgaagaatgcattagagctgggtgttatgcagccaatgttatcatccaaaggcctggctgcacatacccaccgacgcctgattttcattgagtgattcctctttttctgttactgctatgaatttttttctttttatcattgagaaggattttaatagccacactctaactggtgtggggttttttaaccccccggctagggaaaacagcgtgaaaaagttgcagcaagagataaaacttgaataagttcatatatttgaagtccgatcaagcatcaattctcatattgctgtttgtgatcttttttcattttcattttttccaccttttcttctttttattacagtttatgctgtatttgtacccctatcaaggcacatgtatcttaattatgctgtttgttatcccttctttttcct

SEQ ID NO: 5813 - DNA, 1750 bp, Glycine max
aaatgttctcactactgcaatcctatctgaatcattcatcatcttcttaaaagttaaaaaggccaaggtcctgaatctcacagagacagagagaatgagtacggtgggagaagggaaggtgagtagtaatggtcatggatgttgcaaatcagggccaggctatgcttccccactggaagccatttctggtcccagagagtctctcatttatgtaacctctgtctacacagggaccggaatagagaagccagactatttggcgacagtggatgtggatccaaactctccaacttattccaaagtcatccataggcttcctgttccttatttaggtgacgaattgcatcacacaggctggaattcatgcagctcttgccatggagacccctcagcagaccgacgatttctcatcgtacctgcactcgtatcaggtcgagtatatgtggttgatgtgaaaacaaatccaagggctccatctttgcacaaagttgtcgagcctgccgatatcatacagaagactggattagcttatccacacacatctcactgccttgcttctggtgatataatgatctcgtgtcttggagataaagatggaaatgctgcaggaaatggatttcttcttcttgattctgagtttaatgtgaagggaaggtgggagaaaccgggtcacagcccactatttgggtatgacttttggtaccaaccacgtcacaataccatgattagcacatcatggggtgctcctagtgcttttacaaaaggttttaacttacagcatctctctgatggattatacgggaggcatctccatgtatatagctggcctgggggcgaactgagacaaacaatggaccttggtgattcagggcttatacccttagagataaggtttttgcatgatcctgctaaagatacaggttttgtcggcagtgcattgacaagtaacatgatacgattttttaagacccaagatgaatcatggagccatgaggttgccatatcagtgaaaccattgaaagtgcaaaactggattcttcctgaaatgcctgggcttataactgattttctgatttctcttgatgatcggtttctgtattttgtaaactggcttcatggggatataaggcagtataacatcgaggacgttaaaaatcctaaactgactggacaagtatgggttggtggacttatccagaaaggaagccctgtagtagctataactgatgatggtgaaacatggcaagctgaagttccagagattcagggaaacaagttgagagggggccctcagatgattcaattgagtttagatgggaagcggctctatgctaccaactcactatttagtacttgggacaaacaattttatccagagcttgtccagaaaggctcccacataatacagattgatgttgatactgagaaaggtggactgaaaatcaaccccaacttctttgtggactttggaactgagcctgatggtccttctcttgcccatgagatgagatatcctggtggtgactgtacttcagatatatggatttaaacatacgtgtcattatttccctttaataaacggatctgtcatatggttgtaatgagctactatgctataaataatgctcttgtgaatcttcaactttttgaagacagtttgcaattgcataaatatattaagctcatcttagaaaaaaaaaaaaaaaaaaaaaaagaaaaaaagcggcgctctagaggatcaagctacgac

SEQ ID NO: 5814 - DNA, 540 bp, Glycine max
gtttcagtcgcactctgcaatcctatcttgtttgcatgtcaaaatctcattcatcatcatcttcttcttaaaagttaaaaggttaagagagagagagaaagatgagtagcgtgttggagcatggtgttgtgggatgttgcaaatcagggccaggctatgctaccccactggaagccatgtctggtccaagagagtctcttatttatgtaactgctgtctacacagggacaggaatagagaagccggactatttggccacagtggacatagatccaaactctccaacttattccaaagtcatccataggcttcgtgttccttatttaggtgacgaattgcatcacactggttggaattcatgcagctcttgccatggagacccctcggcagaccgacgatttctcatcgcacctgcactcgtttcaggtcgcatatatgtggttgatgtgaaaacaaatccaagggctccatctttgcacaaagttgttgagcctgccgatatcatacagaagactggattagcttatccacacacatctc

SEQ ID NO: 5815 - DNA, 498 bp, Glycine max
ggagatacagtgaggaaaaagccagaaatgtagtaatacttggttgctgaacatgcagctgcaaataacaagatcttcatgatgaacctttctgctccctttatatgtgagttctttaagggtgctctggacaaagttctgccatatatggattatgtttttggaaatgaaactgaagcaagaacattttctaaagctcaaggctgggagactgataatgttgaagaaatagctttaaagatttctcaattgccaaaagcatcagaaaaacataaaaggattactgttatcacccaaggtgcagatcctgtttgtgtcgctgaggatggaaaagtaaaatagtatcacaggatacaatttttttttgatttgtggaattactcttgttcctacctggttcagcacagcctgctcaatctcctcctcttgttttttctctttttgtttttttataataaaaagattcagtttttttgtgttgtcgctgatacctatttg

SEQ ID NO: 5816 - DNA, 945 bp, Glycine max
ctctcccatcacttctgtgtttctctcttcaccttcgtctttctttcatttcaattctttgtggttcagaaactctgtacagttaatcaagcccaacctcacctcacctcacctcacaggttttagttgttaattaaatatatagatagaaatccaaggaagaagatgaagcagtttgccgtccaaaacgtcgtcgctccatcccacgatgagattagcgtggtttgccccaagccccgccgcctcggcctcttcaacttccccgtgaacgatccccctgttagacccttccgctggcatctcaggtatataattaattcgttcttcttcttctaattcaaaaattgttattattgttaagctttgcatactttgtttctttgtagttaccatgttgagccatgtgattcaaactcgtctggttcaaatcctttggacaacttacttaccaaggatggtgattttgatgtagagcaatcatggccagtggtaacctcgtcgcccccatttttctgcgggtcgccgccgagcagagcagctaaccctttgattcaggatgctcgatttggggatgagaatttttccccgctctccccaccgtcgtgggtggtggttccggctgctgcgtcgggtctgccaccgtctccctcttcctctgcaaggaagggagggtgtgtccgagccaattttggtaacaatcctgctgtgagaattgaggggttcgattgccttgacagggacaggcgaaattgcagcatcccggctctggcttagaacaccctcctcacacgccacacgtctctttgatattaggattcagttcaacatataaacataaccacagaagatgagccttcatacaatataataccctacggagaagagtaattttggatgcttgagagttgaatctagaggaagagataaaatttatcttgtgtctgt

SEQ ID NO: 5817 - DNA, 444 bp, Glycine max
ctctcccatcacttctgtgtttctctcttcacctacactttcctctttcaattcaattcaattcttctttttggttcagaaactctgtacagttaatcaagccctacctcacctcacctcacctcacaggttttagctgttaatttaatatatagatagaaatccaaggaagaagatgaagcagtttgccgtccaaaacgtcgtcgttccatcccacgatgagattagcgttgtttgccccaagccccgccgcctcggcctcttcaacttccccgtcaacgatcccactgttagacccttccgctggcatctcagttaccatgttgagccatgtgattcaaactcatctggttcaaatcctctggacaacttactcaccaaggatggtgattttgatgtagagcaatcatggccagtggtaacctcgtcgcccccattttctgc

SEQ ID NO: 5818 - DNA, 408 bp, Glycine max
caactttgtgtttctctcttcaccttcgtctttctttcatttcaattctttgtggttcagaaactctgtacagttaatcaagcccaacctcacctcacctcacctcacatatagatagaaatccaaggaagaagatgaagcagtttgccgtccaaaacgtcgtcgctccatcccacgatgagattagcgtggtttgccccaagccccgccgcctcggcctcttcaacttccccgtgaacgatccccctgttagacccttctactggcatctcaggtataattaatttgttcttcttggtctaattctaatattgttcttgttattattattattattattcagctttgcgtactcttttttctttgcagttgccaggctgagccatgtgattcaaactcgtctggttc

SEQ ID NO: 5819 - DNA, 745 bp, Glycine max
ggagttagggttatacgaaaaattatcaatgaagaggtattctagatatctttcttccatgaggtcaaggtcgtctcctggtggtgatgatgatcttgacaagttattaaacggtgtcataaagaaaaaattgaagatcatccctgagaatgtcacatggggcgggcagtcaagtgatgttttcaactatcttgcaggtgattttatgagaccaagaattaatgaggttgatgaactgctgacaaaaggggtcaatgttactgtgtacaatggacaagtcgatctgatttgttcaaccaaggggactgaagcttgggttcataaactaaagtgggaagggcttaaaattttcttggcgaaagatagaacacctctctactgcggaagtgacaaatctacaaccaaaggctttgttaagtcatataaaaacctatacttctattggatcctcaaagctggccattttgtacccactgatcagccatgcgtggcactagacatggtgggtgcaattacacagtcaccagctacttgacatttgcatagaaaaggaaataatgttactactactctttggaaggtgaagcagcgtacaagaaaagagtcaacaaacaaaatagaacatgatcgtcaagcagtgaaaagcaataaaaagactcgttacagtgatcctactgattgtttgctttaccatctcattcttttccgaatgtcataattaattatatactttttttatccttgg

SEQ ID NO: 5820 - DNA, 418 bp, Glycine max
gacacattgttctactcatacctcaaaaaaggcaaagcttattcccccaagacttagctagcactagcaaacacctctatatctaaaatggtttcaatttctgatcatgaactggttttgatctttggtctcctaggtaacattgtgtcattcatggtgttcttagcacccttgccaaccttctatacaatttacaagaagaaatcatcagaaggatttcaatcaattccatatgcggttgcacttcttagcgcactgttgcttctatattatggcttcataaagaccaatgctactttgattatcaccatcaactgtattggatgtgttatagaagtttcatacctaacaatgtacattatatatgctcccaggaaacagaagatatccactttggtaatgatactcattgccgaca

SEQ ID NO: 5821 - DNA, 1149 bp, Glycine max
ggaaacaatattgatggcccgaaatggaaggagcccaggtaatcaacaaattagatcacgcaatttcttcaacgaaatgcttacgtgtcgcacattgattggttgagatgacgaaagaaaagcgagactttctcatatatataaggacaatccccaacatcgtttattgtgtctcactcacatcacacacactctcatagctgtagcggcgacactaagatcggagaaagaatggcgaaaacgacgtcgttgctgctctttacactgctcctcttcggaaccctagctctcatccaggcgaagaaatcgaaggaggatttgaaggaggtgacccacaaggtttactttgatgttgagattaatggaaaagaagcaggtcgtattgtaatgggtctttatgggaaggctgttccaaaaactgcagaaaacttccgagcactttgcacaggggaaaagggaactggtaaaagtggaaagcctctccattacaaaggtagctcattccatagaattattcctagctttatgcttcaaggaggtgattttacacaaggaaatggaatgggtggagaatcaatttacggagagaagtttgctgatgagaacttcaagttaaagcatactggaccaggacttctatcaatggcaaatgctggtcctaataccaatggttcacaatttttcattacaactgtgacaactagctggttggacggaaggcatgttgtttttggtaaagttctttctggaatggatgttgtttacaagattgaagctgaaggaacacaaagtggcactcccaagagcaaggttgtgattgttgacagtggtgaactccctctataattgtacttcttgattctcaatcaggacttgttgaaggtgttcccagttttcatttcaattccatctacgagactacttatcttttataagcatgttctaatagatcaatgactagttgtatgtttgtgatacttattagataaagtttttccccctaatgataatatggaaaatggcatttgtgaacatgaacattgtagagggaaatctaagtgaacatggctgttgaatattagcagctgcccttaatgtggagtatcttgagctaggaaaaaaaattggcacaaaatcaatttatgttct

SEQ ID NO: 5822 - DNA, 1271 bp, Glycine max
agttcttattatttttttaaaacaagaagcggcattaatgctttaagatttaaaacttaacttgtccttacctgcctcaacgggcagcccgaaacgcagcatttcccgtgttgtgacgctgcccgaactgcccgattcttggctgagaaattacgagcattcggtctgcagtacctgtgtgttctctttctctttctcactctcctctgatatttctatattttggtgctctgtgtctctacgatctggatccaacggtccaaaatgttcggggcttgtgctgcttgttttcccaggttttagagctccaaaccttcagatccacctcattcgtctccagatcttccttccttgataacgttttcgggttcgagaaggcacttgtttgtttgtcgtacgaaatggagactaaaccgagttcggtgatggttacgctcagttacggcgcgttgacgtgcgccgcggaatttctcgcgactttgctagcttctgctgtcgtcaaagcctcgcttttggccccggatctctaccggctgctattgatcaacacgcctactgccaaaggagagagcaaaattcagagtgaagacaagcaacgtgatgcagagggagaagacggtaacgatgatgaaggggacgatgatgacgatggagatggtggatttggggagggtgaagaggagttgtcatctgaagatggaggtggatatggcaacaattccaacaacaagagcaactcaaagaaggcacccgaaggtggcgcaggaggggcagaagagaatggggaagaggatgaagatgaagatggtgatgatcaagatgacgacgatgaggatgacgatgatgatgacgaagaggacgaggcaggtgaagaagaggatgaagatggtgctgaggatgaggagaatgaagaggacgaggaagatgaggaagcattgcagcccccaaagaaaagaaagaagtgaatttagtttagtaaagcctcctctttgtattgttgtgtacgaatttggcttctaacttccatgtttttacttttttgggtactaaacttccatgttcttatttagtttataaggaggcttatgtaggacatgttttaattgatatctatgtttaccattgcgtaattagaatgctacattattgagcaggcaatgctagatttaagagaggaaaaactatgatcttagttttgacttaagcctactccctctcccttgattgactctcttgatagtatgtctagaatgcaagcatcctttatctct

SEQ ID NO: 5823 - DNA, 2689 bp, Glycine max
gaaagagaataagagaaaaaaacgtaattaggtctagaggttgtgagaggtgtatgactatgggaacgtttccaccgcgaaaaccttggtcggcgcatactccttattcttctcctgcttctgcacctcactgctataccccctttcaagcaggagaaaatctctcactcctttctctttctctccacgccgccatcaccacacaaccatgccttcgctctctctctctgaccctgacacccccaaacctattgccaagaagaaaaccaaaacccagtccctcaccgatcccgacctcgatggggtttcggggaagaagacgaagaagcgcaaggcttcagatttagaacaagaggccatgccccccgccgcttacaacaacgatggggacgacgagaccagctccgacctcgtccaacccgaacctgcttccagagaagacgacaacaagaataagaagaaaaagaagaaaaaggttgttaagtccgaagaaaaggaacagcctttggtcacggaggctaatggagaaaagaaggaggatcccaacgcgctttccaacttcaggatttcggaaccattgagggagaaattgaaggagaagggtatcgaatcgctgtttcccattcaggccatgaccttcgacaccgttctcgatggttctgatttggttggccgtgctcgcactggtcagggtaaaactctggcatttgtgttgcccatattagagtctttaataaatggtccagcaaaatctgcgagaaagactggctacgggaggactccgagtgttctcgtgcttctacctactagggaattggcttgccaggtgcatgctgattttgaagtgtatggtggggcgatgggattgagttcatgttgtttatacggtggagctccatatcaaggtcaagaacttaagctgaggagaggtgttgatattgtcattggcacaccaggccgtgtgaaggatcatattgagaagggaaatattgacctgagccaactaaagtttcgtgtccttgatgaagccgatgaaatgctgaggatgggttttgttgaagatgttgaaatgattctaggcaaggtagaaaatgttaataaagttcagacacttcttttcagtgctactttgccagactgggttaagcaaattgctttaaaatttttgaagccagataagaaaactgctgaccttgttggaaatacaaaaatgaaggccagcaccaatgttaggcatattgttcttccttgtactagttctgccagggcccaacttatcccagatattattcgctgttatagcagtggaggccggacaattgtatttaccgagacaaaagaatgtgcttctcagcttgcagggatcttgaatggagcaaaagctctccatggtgacatacagcaatcaacacgtgaggttactctgtctggctttaggtctgggaaattcatgacattagttgccacaaatgtggcagctcgaggtcttgatattaatgatgttcagttaattatccagtgtgaacccccacgggatgtagaagcctatatccatcgttctggacgcacaggaagagcaggtaatactggggttgctgttatgctttatgacccaaaaagatcgaacatatctagaatagaaagagagtccggtgtaaaatttgaacacgtatccgcccctcagcccgatgatattgccaaagctgttagtggggaagctgctgaaatgattatccaagtgtctgatagtgtggttcctgcattcaagtctgctgctgaagagcttttgaacagttctggtttaccagtcattgaattactggcaaaggctcttgccaaggctgttggttataccgatgtaaagcaaagatcacttctcacttccatggagaactatgttacattacttcttgagactggcaaaccaatctatacccaatcttttgcctatggagtcttgaggagatttttgcctgaagagaaggttgaggccgtgaaaggtctttcactcactgctgatggaaatggcgttgtttttgatgtaccagctaaagatttagacatatatcttaatggtcaggaaaatgcctcgaatgtatgtttagaggtagtgaaaacactgccacagttgcaacagaaagagccacaatcaagaggtggcagatttggtgataatggtggtcgtggtgggaactacaggtttggtggaagaggtggaggaggcaggaatggtaggttctccaatggtggcgggcgtggacgtggcggcaactggggtggaaagagatggtgaagctgagaagggactttgggagttgagtgttttcactctgctcggtgtgggatcataactgcgtgacgaccacgtggggatgaatacttcagtcgtgaatgaagaaacagttgatgttggttaaggcccacggaggattcgagttcaagatggattcaatgtgtcccctaacaacatattctatgtttcatttttgttttgttattttttattcttttgcggggaagcgtaagtttagatttttatattctgtctttcacaggagaaattttgatgtagtagtatatacttttacgatatcaagcgtggcaaattccatttagccagcgaacataatatttctagcatctgcaggtaatgcaatgagtaaaaacccagtgtttaatattttggaag

SEQ ID NO: 5824 - DNA, 433 bp, Glycine max
tgcttctgcaccacattgccataccccctttcaagcaggagaaaatctctcgctccctttctctttcttctcttcacgccgccatcaccatgccttcactctctctctctgaaactgacaccaccacccctaaacctatttccaacaaaaagaaaccaaagacccaatccctcactgatcccgacctcgatggggtttcggggaagaagacgaagaagcgcaaggcttcagatttattagaaccagaggccatgcccgccgcttacagctacaacaatggggacgacgagaccagctccgacctcgtcgaacccgaacctgcttccagagaagacgacagtcagaataaaaagaaaaagaagaaaaaggttgtcaagtccgaagaaaaagaacagcctttgttggtaacggagcctaaagaagaaaagaagga

SEQ ID NO: 5825 - DNA, 1326 bp, Glycine max
gacagcatatagtcacataggctattaagggtgagatatatagaaaaacaaaggagaaaagatagaaatggagaagtttccagttgttgacatggggaaccttaataatgaagagagatcagcaaccatggagataatcaaagatgcctgtgagaactggggtttctttgagttggtgaaccatgggatatccatagagttgatggacaccgtggagaggatgacaaaagagcactacaaaaagtgtatggagcaaaggttcaaagaaatggtagcaagcaaaggtttggagtctgctcaatctgaaatcaatgatttggactgggaaagcactttctttttgcgccatcttcctgtctctaacatctcagagatccctgatcttgatgaagattacaggaaggtaatgaaggattttgctgtggaactggagaaactggcagagctagttcttgacttgctgtgtgagaatcttgggctagagaaagggtatctgaagaaggtgttctatggatcaaagggcccaaattttgggacaaaagtgagcaactaccctccttgtccgaagccagagctgatcaaggggctaagagctcacactgatgctggtggcataattctactcttccaagatgacaaggtgagtggattgcagctcctcaaggatgaccagtggatcgatgtcccaccaatgcgtcactccattgtaatcaaccttggtgaccaacttgaggtcataaccaatggcaagtacaagagtgtgatgcaccgagtgattgctcaaaccgatggtaccagaatgtccatagcttctttctacaaccctggtgatgatgctgtcatttctcctgcaccagccttggtgaaggaattagatgagacaagccaagtgtacccaaaatttgtgtttgatgattacatgaagctctatgctggtctcaagtttcaggctaaagagccaaggtttgaagctatgaaggccaatgcaagcgtagttgatgtgggggccatagccacagtttgagtctcagggctctcagcatgtggaagcaacatgggaacggttatgtgtgttttctgttaataataaacaaaggctactcagaacatattagtgtttggtgtccttggataattggcatggaagcttgtgcttgtgcagtatattaaaaccttaaagtttaaaataaaagtattaattaggttgatcttaatttgtgcgtatgatccgtgatatatatgatatgttgtcgcctgtgatatgatgattaagttagtgtgatatgtagtgatacactgtttaagaaagtaacttgtccattttac

SEQ ID NO: 5826 - DNA, 496 bp, Glycine max
  unsure (1)..(496): unsure at all n locations
gaagacgacagaaggggacctcctggcagcatatacttcataaatcacatagctagttgtttaaagtgagagagaaagaaagaagacaaatggcaaactttccagttgttgacatggggaagcttaacaccgaagagagacctgcagccatggagattataaaagatgcctgtgagaactggggtttctttgagttggtgaaccatgggatatccattgagctgatggacactgtggagaggctcacaaaagagcactacaagaagactatggagcaaaggttcaaagaaatggtgaccagcaaaggtcttgagtcagttcagtcagaaatcaatgacttggactgggaaagcacctttttcctgcgccatcttccactcntcaacgtttcagacacgcagatcttgatcaagattacaggaagacaatgaagaaatttgctctggaactggagaaacttgcagagcagcttctagacttgctatgcgagaatctg

SEQ ID NO: 5827 - DNA, 517 bp, Glycine max
cagctacctatccaacttttggaccggttcgagcaatatatttgttattaattacacataaagaaaagactatcttaacttcgttcgtttggaccaagagtttgtagagaatctcttctctcgatgatggcaaacagttgtgtttcaatggacaataataatatcctgggtcttctcaagcttcgaattaaaagaggcgttaatcttgcaattcgcgatgctcgtaccagcgatccgtatgtcgtcgtcaacatgggtgatcagaagctgaagactcgtgtcgtaaaaaacaactgcaaccctgactggaatgaagaattgaccctttctgtaaaggacgttaaaaccccaatacatctgacggtttatgacaaagacactttctctgttgatgacaaaatgggtgaggcagagatagacttaaaaccatatgttcagtgtaagcagatgggattgggcaagctcccaaatggttgttcactcaagagaattcaaccagatagaactaattaccttg

SEQ ID NO: 5828 - DNA, 861 bp, Glycine max
ctctctctctctctctctcgcatttccgtttgggttgcatgcaactctttgctctctttctctctctctccattcgctctcatttttcatttttctttttctattctttgcttcagtggccttaccagtgtgttgctcactgagaaaccaccaattttcagcatgacaaagataagtcctgaagttgaaatcaggatgccaatggaggcatttccaccagtttcagctgatgtgagctttatttctaatagttttccgaaatacaaactggatgttgataatcaagttctggaagagccagttgaggataacctgggtccttctttgaaggatgttattgaacaagaagctttcaatttgtcagaccaacacaagcgtatctcagttcgtgaccttgccagtaaatttgacaagaacttggctgcagctgctaagttgtctaatgaggcaaagctgagagaggtggcatctttggagggacatgttcttttgaaaaagctaagagatgcattagaatctttaagaggacgttttgcaggaataaacaaagaggatgtggcgatagcttcctctctggtggaagctttagcagttaagttaacccaaaacgaaggtgaattgattcaagagaagtttgaagtgaagaagcttgtaaactttctcaaacaggcttctgaagatgctaaaaagttggttaatcaagagaagtcttttgcttgtgccgaaattgaaagtgctagagctgtggtgctgagaattggggaggcgcttgaagaacaagaaaaagctttccaagcttctaaaccacaggatgtggatggactaattggagaagttcaagaagctagaagaatcaaattg

SEQ ID NO: 5829 - DNA, 434 bp, Glycine max
tccacgcgtccgggccactctttagattcttcttctccttattcctcttctccttcttcttcttcctctccttcttcttcttcttcttcttcttcttcttcttcttcttgctgtaattcttcaacttcaatcctgtcttgtctctttctctctcgctcttttttttttttttgcttacctgcaaccggcttaagctgtggtaactccttcctttaattaatcactcttttgtttcggctattactcttattcttaatggccttaccagtgtgttgctcactgagaaaccaccaattttcagcatgacaaacataagtcctgaagctgaaatcaggatgccaatggaggcatttccaccactttcagctgatgtgagctctatttactaatagttttccgaaatacaaactggatgttgataatcaagttctgga

SEQ ID NO: 5830 - DNA, 1040 bp, Glycine max
gcgttaaaaattaaaaaagtcatgataacaaaaaaattggaagagagagattaagcaggtggcgcccaaagagttaggtgtaccaacctcatagcactaataacacatatttgaagacgaatagaagaaagaaagctaattggaaaattcgtttaggaacacaaaaaatggcagatattcctcgggtgaagcttggaagccaaggcctggaggtttccaagttaggatttggttgtatgggcctaagtggagtgtacaacgatcctgttcccgaagaggttggcatctctttgatcaaacacgcattcaccaaaggggtcactttctttgattctgcagatttttatggagcacgtgccaatgaagttttggtcggaaaggctctcagggactttcctcgagatcaatttcagattgccacaaagtttgggattgtcaaaatggaaaatggtaatgtgatagtgaacggttcccctgaatatgttcggtcctgttgcgagggtagcctccaacgccttggtgtcagctacattgatctctattatcagcaccgtgttgacacaactgtacccattgaagacaccatgggagagcttaaaaggctggtccaagagggaaaaataaggtacataggattgtcggaagctagccctgacacaattaggagggcacatgctgttcatcccattactgctgtgcaactggagtggtccctttggactcgtgaaattgagcaagatattgttccactttgcagggaacttggaattggaatagtaccatacagcccccttggccgtggattttttggtggcaaggctgtcgtagaaagtatacctgcaaacagttttctggcatttcaaccaaggttacgaggggagaactttgacaagaacaaaatcttatattctaggatagaaaaattggcagagaagtatggatgtacatcttcgcaacttgctcttgcatggattcttcatcaaggagacgatgtggtacccatccctggaacaactaagataaaaaatcttgatagtaat

SEQ ID NO: 5831 - DNA, 1208 bp, Glycine max
gcgtacgtatactctcagagtagaaccttcactctgctctcacccttattcctctctttcctttctttcttctgcaacaaaaatcatgtctgggtccttgggattcttctttgtgggtcttacgttgttgttgttggtcggggtggctaatgctgtggccaacacttccaacaaatttgatcaactcttccaaccaagctgggcttttgaccacttcattcatgaaggggatctcctcaaactcaaactagacaatttttccggcgctggttttacttccaagagcaagtatatgtttgggaaagtcaccatccagcttaagcttgtggaaggtgactctgctggaacagtcactgctttctatatgtcatcggacggtccaaaccacaacgagtttgattttgagtttctaggcaacaccacgggggaaccatactctgtccaaaccaatgtgtatgtaaacggagtgggcaacagggagcaaaggctcaacctttggttcgaccccaccaaggattttcactcatactctatcttctggaatcaacgtcaagttgtatttttggtggatgaaacgccaataagggtgcacacgaacatggagcacaagggaattccatttcctaaggaccaacccatgggtgtgtacagttcattatggaatgctgatgattgggccacgcagggtggtcgtgtgaaaacagattggagccacgcacccttcattgccacatacaagaacttcgagataaatgcgtgtgagtgtcccgtgtcagtggctgcaatggataatgctaagaagtgcaccagcagtgaggggaataagtattggtgggatgagcctaatttggctgaactcaacttgcaccagagccaccagcttatgtgggttagggcaaggcacattttctatgactattgcactgacactgctaggttcccagtcacgcctgctgagtgtgtccatcaccgtcacacctgagcagacttagtgattagtctaaactttattttgttataacttatgggaagttatgaaaataggattggggcataagaaaaaaatggtgggtggtgaacaaagttgtggaacatgtccttcatgtttctgattgtaatatatattgccacaacattaatgtgaattgttggtttttcttcttgtacattcaaattatcttattttaagttatgaaaaaaaggggcgc

SEQ ID NO: 5832 - DNA, 487 bp, Glycine max
aaaacagattggagccacgcaccattcattgccacatcaaagaactttgagatcaaggcttgtgagtgtcccgtgtcagtggctgcaatggataatgctaagaagtgccctagcagtgagggcaagaagtattggtgggatgagcctaatttggctgaactcaacctgcaccagagccaccagcttatgtgggttagggcaagacacattttctatgactattgcactgacactgctaggttcccggtctcgcctgctgagtgtgtccatccccgtcacaactgagcaaaaaataacttattaaaattagtcttccatattttgttctaattttaagggaagttatgaagataggattggggaataagaaaagaaaatggtgggtggagaacaaagttgtggaacatgtcctccatgtttctgcttgtaatacctcgccccagtataactaatgtgaattattggtttttcttcttgtaaaaaaaaa

SEQ ID NO: 5833 - DNA, 630 bp, Glycine max
agcatttttcagagtagaaccttcactctgctatcccccatattcctgtgtttcctttgaaaaaaaaagaagaagaaaaaacatgtctaggttttttggattcttctttgtgggtcttacgttgatgttggtcggtgtggcaaatgctatggctaactcttccaacaaatttgatcaactcttccaaccaagttgggcttttgaccactttattcatgaaagggatcttctcaaactcaaacttgacaaattttccggggctggttttacttccaagagcaagtatatgtttgggaaagttaccatccagcttaagctcgtggaaggtgactctgctggaacagtcactgctttctatatgtcatcggacggtccaagccacaacgagtttgattttgagtttctaggcaacatcacaggggaaccttactcggtccaaaccaacgtgtatgtgaacggtgtgggcaacagggagcaaaggctcaacctttggttcgaccccaccaaggcttttcactcatactctatccaccaaaaatacaacttgacgttgattccagaagatagagtatgagtgaaaatccttggtgggtgagacaccaataagggtgcacacaaacatggagcaca

SEQ ID NO: 5834 - DNA, 680 bp, Glycine max
  unsure (1)..(680): unsure at all n locations
gacgtatcgtccacgcgtacgtaagatcggaaatcggctcgagctggaaatgccatttatgatcncataggttctattgtagttggcaacttacttggaatggtagccatatttcttatccagagaaaccggcatgctttgattggtagagccatggatgaccatgatatggagaaagtacttcagtttttgaaaaaagacccggttgtagattccctctatgattgcaaaagtgaagttattgggcctggattcttcagatttaaggcagaaatagattttaatggagaaatggtggtgcaaaattatcttaaaaggactggtcgtgaagagtgggcaagacagtttcgtggagctgctaagcagaaggatgatactgccatgatgaagattatgtcaaattacggtgaggaagtagttacagctttaggaagtgaagtagataggttagagaaggagatccagaatcttgtgcctggtattcggcatgttgatattgaggcccacaatccttcaacagaaacaaccttgtcaagtgaaagttttcaataaaatcgacactctcttcacattcatttatattatcaaagcatttatgaaaaattgatttgggtttatccagtatcacgagttctgaagaaatccggagttgagttacatgcctcgggttgagtcgacac

SEQ ID NO: 5835 - DNA, 622 bp, Glycine max
  unsure (1)..(622): unsure at all n locations
gcaaaatgttcatttgcttgtcgatcacttggctgattggttagaaggggaaagtgataagaatcttgtctttcatactttcagcaacactggatggttaacatatggtgttattcttgaacattttcaaaaccaggatccaactatcacggaaaggattaagggatgcattgtagactctgcacctgttgcgtaccctgacccacaggtctgggcctcaggtttctctgctgcatttctcaagaagaatagtgtggctacaaaaggacgtgttttttccgatcaatctggcattaaagtatcaattggcagtgaagatgatttagggctcaaacctgctctaacagaagcagctttactactaattctaaagaaattttttgagatcattctggatcttccttcagtgaacaggaggctctctgatgttatgagcatgttatcatcaaaacaacccagctgtccacagttatacatgtatagctctgctgacagggttattcctgctgattcagtggaatcatttgtagaggctcagcgcanggctggacatgatgtgagggcatgcaaatttgtctcctcaccccatgttgaccactttaggaatgacccaagattgtat

SEQ ID NO: 5836 - DNA, 668 bp, Glycine max
gacgtagcatccacgcgtacgtaaactcggaaatcggctcgagtgatgagtcaaatgttcatcgtgagtatttcaagggcaacccgggttacgaatgccctgcttatagcactaaaaatgggatctacacagaagggtgtggattagacaacatagtgatgtcatggggacatgatgattacatgtatatggttgccaaggcaaatggcaccactttgccatctgcaggattgttcattatcagatatcattctttctatccattacacaaggaaggtgcatatactcacttcatgaatgaagaagacgttgagaatttgaagtggctcaaaatttttaacaaatatgatctctacagcaagagcaaagttctagttgatgtggagaaagttaagccatactatgtgtcactcattgagaagtatttccctgccaaggttagatggtgacaccatttgaattcaagccaaggttttgaggagattgatagataattattctggcgagcgagcaatgtatcaaataattttagttcttcttttcttttatacaaggattcagactgcacctcattatattgaatattcacctgcaaaattgcaatcttcaaatagtaaatttcatatccagtcaagaaataaataaatgatttcatgttacgatgcccg

SEQ ID NO: 5837 - DNA, 332 bp, Glycine max
ggacgaacctcaaattcaacatttgttacagtctgctgagaccatcagaaaagactaccctaatgaagattggctgcatttgaccgcactcatccatgatcttggaaagattcttgcgcttcctagctttggtgagcttcctcagtgggctgttgttggagatacatttcctctgggctgtgcctttgatgagtcaaatgttcatcataagtatttcaaggacaacccggattacaaatgccctgcttatagcactaaaaatgggatctacacagaagggtgtggattagacaacatagtgatgtcatggggacatgatgattacatgtata

SEQ ID NO: 5838 - DNA, 817 bp, Glycine max
gacgtagcatgcacgcgtccgtaagatcggaaatcggctcgaggcaaccggaatttcatgcaaggatggaccacttttcgaactgccacacttgctgtatccggaaagggtttcattgcaaaggacatgtcattccggaacacggcagggccagtgaaccatcaagccgtggcactgcgtgtggattcagaccaatcagccttctacaggtgcagtgtggaagggcaccaagacaccctctacgcccactccctgcgacagttctaccgagaatgcgaaatctacggcaccatagacttcatctttggcaacggtgccgcagtgttgcaaaattgcaaaatatacaccagggtcccacttcccttacagaaggttaccatcacggcccagggaagaaaaagcccacaccagagcactggctttaccatccaagatagctatattctggccacccagcccacgtatttgggccggccctggaagcaatactctagaactgtttacatcaacacttacatgagtgggctagtccagcccagagggtggcttgagtggtttggaaacttcgccttgaacactttgtggtacggtgagtacagaaattatgggcctggtgcagcactggctgctagggtcaggtggcccggttatcatgtaattaaggatgcttccaccgctagttacttcacagttcagcgcttcattaatggggagcacgtggttgccaagtaccaggtagtcaagtttacagcagagcttgaccaattaattcactttatttcttacctctcttattagtcttttctgtatccaaaca

SEQ ID NO: 5839 - DNA, 433 bp, Glycine max
gggtcaaaagcaaagaattgcaatagcaagagccatattgaagaatccagaagtgttgttgttggatgaagccacaagtgccctagatagccaatcagaaaaattggtgcaagatgctctagaaagggtgatggtggggagaactagtgtggtggtggctcacaggttaagcccaatccaaaattgtgacctaattgctgtgttagataagggaaaagtggtggagaaagggaccccctcatctttgttggctcatggcccaggtggagcttattactctttgataagttctcaaagaagaccagcaaattaaacatgaatgttagttttacgcatgaaatctcagctagctaatcaaaacaaacaaaatgtcacatttattggtgattagtattaaacctcttttgtggtaacttgtgaaagtaaattaaaa

SEQ ID NO: 5840 - DNA, 863 bp, Glycine max
gacgtttgatgcacgcgtacgtaaactcggaaatcggctcgagcctggaaagcaaaagtgaggggtagtggtagaaggataaggtgaggtgacgataaaccgtggaaacggtggtgtagtctgtgagtgtcattgtgaagttggagacaatgttagcttcttctctctccttcctccattcttgtacatccccctcttcctcttccttattgtcaatttcacctcctaaccccaaaccctctcactccctacctttcgtgctcgaagccaaagacaggacccgcagggaagacaggaccgctcgccacactcgcatcagaaagaaggtcgaagggacgcccgagaggccgaggctgtccgtgttccggtcgaacaagcatctctctgtgcaggtgattgatgacaccgcaatgcacacgcttgcttcggtgtcgacaatgcagaagacggttgctgatgagttcaactactccgctggccctacacttgaagtagcaaagaggatgggtgagatcattgcaaagtcctgtttggagaaggggatcacaaaggttgcctttgatggaggtggatgcccataccatggcggtgttcaagaacttgctgaagcagacggtgaacatggcctagatttttaaactaagtagtctctttcctttttattccaggtttaaatttgtaatgagaggcttcaacaattttttataatggcatttccttatttccagtggctgttatgatccaatggctcctattcatctatcaatttgtttttagcaaaagactgttttcgtccagtcatcctaaaaatgtaagctgtgattacactgcgttcgactcttacaatcaattaagtgttagat

SEQ ID NO: 5841 - DNA, 1898 bp, Glycine max
  unsure (1)..(1898): unsure at all n locations
agaaagtgaaaaacttatcctatccgttatttgaagttctgttggtgagtgtgagtgagtgtatcaatcggccacacagaaatgggcagtgcttctctgattccagtttcctggttgccttggcggccactttctcctttcaagggaacggtgaaaaccttggtcgcaaaaccatggctgaagaagattcagcaagcaagacccctcatttccgtggttaacaaggctgcctctctatcttcccccgtgacagcacccagcgtcggcgttcggtttcggctggacaatttggggccgcaaccgggttcgaggaagagggctaagagaaagggtagaggaatatccgcagggcaaggggcaagttgtggttttgggatgagaggtcagaaatctcgatctggacctggcgttaggaagggtttcgaaggtggccagatgccgctttatcgccgaatccccaaactcagaggaattgcaggaggtatgcatgcgggattgcccaaatatgtccatgtaaatctgagagacatagaagatgctaaatttaaggaaggggaagaagtgtctctagagtcactgaaggcgaaaggtgtgattaatccatcaggaagagaaaggagacttcctttgaagatcttgggtgaaggagaactgagcaagaagttgacattaaaagcccgcgccttttccacatcagcaaaggagaaacttgagaatgctggttgttccctcaccgtgcttcctggccgcaagaaatgggttaagccatcagttgctaaaaaccttgcccgcgctgatgaatactttgccaagaagcgcgccatggctgcttccgagccagcctcagcttgaacttgagccagcctcagcacgcactagattttttttgacaaagttgcttacgtcaacaagatgattctgtaattctaagctatgggtattgtttgtaatgcttccccatttgtgttgattttgaatctattcctcttaaaagccactgccaaaagcaaaggcaaacaaatggtggttgtgtgaacaccaactttattttgggaccaatgcgtgccaatcctttcaaaccaaaaaaaaaaaaaaaaaaaaactcgagactagttctcctcgtgccgaattcggcacgagcacagtttgcaccttacaatgctgcccctactgctcagcagtatggttgcaatcaaccatacccgccaccaccagtggtgtacaatcatcctcgtcagcaatcaaattcttacgaaagaaatgactatcagcacgccagatcaaatcattatgaaagaaatcaccatcaaggtagtgggggtagttcaaggcatggatatcaatcatcaggaaataatcacaatgccaggtttaataattcacatggttcatatggtagtcaccatcatgaagttagtcaccacgaccgaaacttccaaccttctagagctcatcagaattggactccaccaaacaacccgagtgggcacagggattatggtcatcattcatccaatcaatattctttattagatagaagaggaaacaggaatccaatgcccccacctggttacagtcgcaaataaattcatttcgttcagggaatattcttccctacgaattaaaaattgttgtaccatatctttttctctctcaattagttgaggtttgagagttgtacttgtatttcacctattaagtctagttgagacaatacttgaccaattttccattgaatagatcagtgtcaaattataaccccccttagaactcaggtttgataacatttttatacttgataggctattcaattgattgtgtattttgtcccgaggctggattgtaattcacaaaaacttatactttnnnnnnnnnnnnnnnnnnnnnnnnnnnnnnnn

SEQ ID NO: 5842 - DNA, 673 bp, Glycine max
acgtaacgtccacgcgtccgtaagatcggaaatcggctcgaagtcatcatccacaaacaatggcctcacatggttatgaatcatgcccgggatacgttgcaatgccgccacctatttcagctccctcactccaaggcagaccacagtttgcaccttacaatgctgtccctactgctccgcagtatggttataatcaaccataccctgcgccaccggtggggtacaatcatcctcgccagcaatcaaatcctgtcgaaagaaatgactatcaacaccctagatcacataattatgaaagaaatcaccatcaaggtagtgggggtagttcaaggcatggatatcaatcatcaggaaataatcacaatgctaggtttaataattcacatggtagtcaccacagccaaagcttccaacctagagctcatcagaattggactccacgaaacaacccgagtgggcacagggatcatggtcagtattcgtccaatcaatattctttgttagatagaagaggaaacaggaatcaaatgccaccacctggttacagtcgcaaataaatgcacttcgttcagggaatattcttccctacgaaataaaaattgttgtaccatatctttttcttgcatttctcctattaagtctagtcgagacaatacttaaccaattttccatt

SEQ ID NO: 5843 - DNA, 252 bp, Glycine max
ctcgagccgtgcttgtgcatttatctcacttggaactatttttttatccccccctcccccgtctttcttttcctttgccctttaataaggtatgcatgcgggattgcccaaatatgtccatgtaaatctgagagacatagaagatgctaaatttaaggaaggggaagaagtgtctctagagtcactgaaggcgaaaggtgtgattaatccatcaggaagagaaaggagacttcctttgaagatcttgggtga

SEQ ID NO: 5844 - DNA, 499 bp, Glycine max
tccagaaacaatcagcgcagatggatatgactactgaaatgatgtcagatgccatagatgatgccttggataatgatgaagctgaagaggagactgaagagctgacaaaccaggtgctcgatgaaattggtgtagatgttgcctcacagttatcagcagctcccaaagggagagtcgcaacaaagaatgctgaaaatgatagcagctcgggcattgaagaacttgagaagcgtttggcggctcttagaaacccgtaaattttgcttgggattatgtgattctggaactcaatgttttaaactaaaattctttcctgagctatgttttcttgggatttcacaagtttagtgtgtatatacttccttgaaattattatgtatgaataatgatatatccaaaatttctgagatggctatttacttgtaaaacaagaaaggcgtgactgggactggagggcctcgtggaaaaaaaaacggcggcccccgactattgagctcgt

SEQ ID NO: 5845 - DNA, 398 bp, Glycine max
aacacaaaacggcaagcaaggagatggatgctgccgcgcgtgctgctgctaatgaggctgctgcaaggaatgcaaggctagctgcatccaagaaaaaagagaaggcacactacaatcaacagccagtgcggtaaacggggtgtcaaagtgactgtatcttctctttggtgtttaattttccttttgtcctttttcatttgctatctttctatgtcatatatatgagcatatgctctttgttcatttgcaaatgcaaaataaacactggagcggctttaggtaatttgactttgagtaagttttgtctaattttatacttggtggggaatagaagtatttattggtgtatgttgttcatctttctccagtattgcctctatcttattgctggatcagcc

SEQ ID NO: 5846 - DNA, 1491 bp, Glycine max
ggaatgaccaagaacaacatgaattttctaaccttcgttactgttctactcttcatactaccagcaacctcatcttcccagtatttggggaacaaccttctcactcatcgcaagatattcctaaaaaaagacaacattattacctcgtacgctgtcatctttgacggtggtagcacaggaacccgtgtgcatgtcttccattttgaccagaatttggatctccttcccattggtgatagtcttgagcttaataaaaagatcacacccggtttaagtgcttacgaggatgatcccgagcaagctgcagaatctctgattccacttttggaggaagcagaaagtgtagttcctgaggacttgcgtcccaacacacccgttaggctaggggcaactgcaggcttaaggcttttgaaagggaatgcttctgaacaaatattgcaagcggttagggatatgctgagtaacagaagtaccctgaacctacaatctgatgcagtaactattcttgatggaaaccaagaagctgcttatatgtgggtggcattgaactatctattgggcaatttgggaaaagtgatttcaaagacggtgggagtagctgatcttggaggtggatcagttcaaatggcatatgcagtctcaaagaatacagctaaaaatgcaccacaaccaccagaaggagaagaatcatacataaagactcttgtacttaatggaaaaacttatgacctctatgttcacagttacttgcactttggtaaagaagcatctcgtgcggagatgttgaaggtcactggtgattcagctaacccttgcattttagccggttataatgggacctacacatattcgggagttaaatataaggccttggcctccacttctgggtccaatttcgataaatgtcgagaggtagctcttaaagctctgaaagtgaatgaaccatgccctcatcagaattgcacttttggcgggatatggaacggtggaggggggagtggacaaaaagtcctttatgttactacatctttctattatctggttatacaggctggtatagccgatgcaagtaaaaccagttccaaagtttatcctgcggaattcaaggccgcagctaagcgagcgtgtcaagtcaaatttgaggatgctcaatccacttatccacttatgatggaggatgcacttccatacatttgcatggatattacgtatcagtatacgttgctcgtcgatggatttggcctggatccttggaaagagattatagtagcaaatgaaattgaataccaaggtgctcttgtggaaggagcatggcctctaggcagtgccatagaagccatatcttcattgcccaaatttaataaattgatgtattttatataacacttaaagagaagtgggcttcctttaattactaaataaaatgaagctcgatgtatatcaactctttctatccttattccattgtgtgtatgtggtcaccatttccgt

SEQ ID NO: 5847 - DNA, 422 bp, Glycine max
gaacctcactgggatctggaatttcaccaaccctggagtcgtaagtcacaacgagattttacagatgtacaaggaatacgtggatccgaactttacatggaagaacttcactctggaggagcaggctaaggtgattgttgcccctagaagcaacaacgagcttgacgcctctaagttgaagaatgagtttcctcaacttttgtccatcaaagactccctcgttaagtatgtattccagccaaatcagaaaaaggcataacataacttggacatgttatgttagtttaccgttttaatttacatcttcttctgctgaccatttcagattttccttcgtgtgttttgttgcatttaattttaatgttatatttgtattttttattatgatatgaataaactagttgttacctacttaattttaa

SEQ ID NO: 5848 - DNA, 869 bp, Glycine max
aggcctacttaagatcggaattcggctcaagttttttttttctcttccccaaacaccattttttcttccttccttttttgtttcctattccttcttcaattctctctcttcatttagtagtaaacatttttttggcctcgttgaagcaatggtggggggtggcaattccaaatccgatatctcctttgctggcacttacgctagcagtgctttcgctgcatgtttcgccgaggtgtgcactcttcctttggacactgctaaagttaggcttcagcttcaaaaacaggctgtacttggtgatgcagtgaccttacctaaatataggggtttgctgggaacgattggaaccattgccagggaagaaggtctttcagcactctggaagggcattgtgccagggttacatcgtcaatgtttgtatggaggcttaagaattgggttatatgaccctgttaagactttctatgtggggaaagaccatgttggagatgttccattgtcaaagaaaattcttgctgcatttacaactggtgcttttgcaattgcagtggcaaatccaactgatcttgtgagaagttggacttcaagctgaaggaaaattgcctcctggcgtgcccaggcgctactctggatctttaaatgcttattcaacaattgtgagacaggaaggagttggggctctttggactgggctcggccccaacatcgcaagggatggcatcatcaatgctgccgaactagccagctatgatcaagtggaacagactcattttgaaaattcctggattcaccgacaatgtctgttactcaccttcttgctggtccaggagcaagattttttgcagtctgtgttggctcccctgttgatg

SEQ ID NO: 5849 - DNA, 584 bp, Glycine max
ggtgcaacatgcattgcattctagcaaagcaagtggaccttgccagctcaaggaaattttaccagacaataaatgagtgagtattcagaaaccaaaaaccaatagcaatacatttccgatttccagacagaggaactactcagcttagcttgagtattttcaagaggggatcaaagggaagaagaagggaaggactcaaacttgcacacgcaacctttggttcctttcccaacactcaccatggtggcagattctaagtccaattccgacctctccttcggaaaaatctttgccagcagtgctttctctgcatgtttcgctgaggtgtgtactattcctttggatactgccaaagtgaggcttcagcttcaaaagcaagctgtagctggtgatgttgtctccttacctaaatataagggtatgctgggaacagttggaaccattgccagggaagaaggtctttcagcactctggaagggcattgtgccagggttacatcgtcaatgtttgtatggaggcttaagaattgggttatatgaacctgttaagactttctatgtggggaaagaccatgttggagatgt

SEQ ID NO: 5850 - DNA, 636 bp, Glycine max
gcgtacgtaagatcggaattcggctccgagcaatcttctcttctcacacaatctctgttcaacaacgctagagaataatatctcaagtatcatgtgatgagatgaaccaagcacaacaacttcaagaagcttgaagtttgaactgtctcaaacatgttctcaaagcttcagccacaacaccagcaacagcatcaaccttttcaattctctcgtgaatgtcaaacgtccgaggacgatgacagccgaagcagcggtggccctaacaccgccgtcgctcaaaaatcagttttaggcggcggaggatgcagcgatggggccacaattgaagtggtgcggcggcccaagggccgcccgcccgggtccaagaacaggcccaagccgcctctcataataacgcgcgagcccgagcccgccatgagcccgttcattctagaaatcccgggcggaagcgacgtcgtcgaagccctagcccggttcagccgcagaaaaaacactggcctgtgcgtgttaaccggttcgggaaccgtcgccaacgtcactctccgtcaaccttctttctctcccgccggcgccaccgtcgccaccgtcactttccacggccgcttcgatatcctctccatgtccgccaccttcctc

SEQ ID NO: 5851 - DNA, 439 bp, Glycine max
acgaatccaaatccttctcccacaatctttctttcttactctctacacttcaacaaagaatatctcgagatgcatgtgatgtgatcaaacaagaataacaacttctttaactgttttctcaaaaatgttctcaaagctacactcacaacactcacaacagcctcaaccttttcaattctctcgggaatgtcaatcctctaaagaggatgatatcccaagcacttgtgatcaaaataatgagaccacaagtgaaataatgcggcgccctagaggacgcccatccggttccaaaaacaggcccaagccgcctctcataataacgtgcgagcccgagcccgtcatgagcccgttcattctagaaatcccgggcggaagcggcgtcgttgaggccctagcccgcttcagccgcagaaagaacaccggcctttgcgttttaacc

SEQ ID NO: 5852 - DNA, 418 bp, Glycine max
agaagttgtaaatcacgtgcacgaagaaagagcgtgaattgtcagtctctttggatattgtgtgtgaagcctgggtgtggcttaccctgtgtacccttttgagttcagattctgagcatttgaatttgatagactctgtatcatatggacaataaaaggttcagaattagatagttatcctacgctttttattggggatgtagcaaattgtatacttaatttaggccagacttttttaagttatttcatttcactagattctaggatttctgtttatgtgacttcttgagttccacacttgtgattgtaacctatcgtgttttttttagtacaggcttaagttaaaaaacagaaaatacaacaaaaattgaaagagaaacaaaatactggaaagggtcaaaaaaaatattgcatatgt

SEQ ID NO: 5853 - DNA, 288 bp, Glycine max
ggaatacattgataaagttgttcttgttttttcttcagcttgcaataaggctaagcttcttaaagtgaaagtgttaattgctgataaagagtatgagagtgctattgctgagtctggttttcttcttaaggaagatgaaaataatttagaggcattgttgttacgtggtcgtgcatatgactatttagctgatcaggatgttgccacgaggcattgtcagataggtctccgcctagatccagagcatagtgaactgaaaaaggcatattttggattgaaaaatctact

SEQ ID NO: 5854 - DNA, 1276 bp, Glycine max
acgagcacaaccttgtggaatgggctagaccacatctgggagagagaagaaggttctacagattgatagacccccgcttggaaggccacttttccataaaaggggctcagaaagccgcgcatctggctgctcactgccttagcagagatccaaaagcacgaccctggatgaaaattgcactaggagctgctaagggtcttgcttttcttcatgaagaagctgaacgaccagtaatatatagggatttcaaaacttccaatatactattggatgcagaatacaatgctaagctctcagactttggacttgcaaaagatggtccagagggtgataaaactcatgtgtctactcgagtgatgggaacctatggttatgcagcaccagaatatgtcatgacgggacatcttacatcaagaagtgatgtgtatagtttcggagtggtactacttgagatgttgactggcagaagatctatggacaaaaaccgacccaacggtgaacacaaccttgtggaatgggctagaccacatctgggagagagaagaaggttctacagattgatagacccccgcttggaaggccacttttccataaaaggggctcagaaagccgcgcatctggctgctcactgccttagcagagatccaaaagcacgacccttgatgagcgaggtcgtggaagctttaaagcctctgccaaacctcaaggacatggctagttcatcgtattattttcagacaatgcaagccgaccggtttagcgcaagtccaaataccagaaacgggagaacacaaggagcattgctcaccagaaatgggcaacagcaaaggagcctatcaattccacatggcacgcatgcatctccatatcaccatcagtttccacaaccatcaccaaaacccaatggcaaggcatagagttgacgatgatgatgagttttcattttctttgtcaccctttcttttttgtcatttctcattccccaagtatagatgtcacttgtgtctagccattttgttcatggacaactggagaccaaaagaagcatgcatgcatgtatgcatgcctctttatggtgtatgctgagtgttgaccttagggcaggtgaaagcttatcagctactactatctctagtgtcaaattgtcaaccaatatgtttcttcaggttgtttcgaaatattcaagattattaactcctcaattttattttattttttttccatttgcccccggaaatgttatctcctgatttatttaggcttttcttgtgatatc

SEQ ID NO: 5855 - DNA, 1016 bp, Glycine max
gttggttttgatgatttgtgcttttgattctttagggcttgctgctatagatggggttgggtggtgctgagaatggaaaggtggtggtggagtctttggatgtgtgtaaatcaaaggggaggaagaagaagaagaaagaggatggggaagttgaagaggaagaagagactgggtgttggttcaggctgaggttcattgggagctgcatttcttcaagatccaaggttgatagctcagttagtggcaccagcactaattatgctgaaagtaaatcaactattgatacaagtagagatcaaccaacagtcccagtagtctcttcaacaaccactagtaatgctgaaagcaattcatccacttccaaacttgaagaggagtttaaagtttcttccaggctgcgaaaattcacgttcaatgatcttaaattagcaacgagaaattttcggcctgaaagtcttcttggtgaaggtggctttggttgtgtgttcaagggatggattgaagaaaatggaactgctccagtgaaacctggcacggggcttactgttgctgtaaaaaccctcaaccatgatgggctccagggtcataaagaatggctggctgaagtgaattttcttggtgatctagttcatccaaaccttgttaaacttgtaggttactgcattgaagatgatcaaaggttgctagtgtatgaattcatgcctcggggtagcctggaaaaccacttatttaggagatccatgcctcttccatggtccattagaatgaaaattgcactaggagctgctaagggtcttgcttttcttcatgaagaagctgaacgaccagtaatatatagggattttaaaacttcaaacatattactggatgcagactacaatgccaagctctcagactttggtcttgccaaagatggtccagaaggtgataaaacccatgtgtctactcgggtgatgggaacctatggttacgcagcaccagaatatgtcatgacaggtcatcttacatcaaaaagt

SEQ ID NO: 5856 - DNA, 708 bp, Glycine max
catttttcggtaaaaggagctcagacagctgcccagctggctgctcactgccttagtagagatccagaatccagacccctaatgagtgaagttgtagacgctttaaagcctttgccaagtctcaacgacatggcaactcttcatattacttccaggcactgcaagctgaccgcgttggcagcgagcccgaccccaagaaacgggcgaatgctaggtgcgttcctcacccgcaatggacagcagcaaaggagcctttcaataccaaatggtacttatgcatctccatatcaccatcagtttccccaaccatcaccaaaacccaatggcaaagcatagagctgatgaaaattttctttttctttttctctttcaccctttacaccatttcttagtttcttcttatagatgtaccttctcttaaagcatagcatatgctgctttatgatgttatgttaacttatgggtgttgaccccctttatcttgaaagaatgtgagggtgagagcaagtgaagcttattgagctactatgtcttatctcaaattgtcattcaatattttcttcaggttgcttggaaatattgaacaccatcaaatcctcatccttattttattttgtttttcacattagtccccggaaatgttatctcctgatttatttaggcttttcttgtgatatcgaaaaaaaaaaaaaaaagggcggccgccga

SEQ ID NO: 5857 - DNA, 652 bp, Glycine max
tgaatgttttgttttagtgtatttgacactgcagtttttggacctgtaaatatgtattgtgtgtgaaattgtaggcttggaatcatagatactccaacacttctgcagaagataacctctctagctttcagcttttcctttgtggattggcagcgggaacatgtgccaagcttgtctgtcatccactagatgttgtcaaaaaaagatttcagattgaagggcttcaaaggcatccaagatatggagctcgagttgagcatcgtgcatacaggaatatgcctgatgccatgcaacggatatttcgattagagggttgggctggtctgtacaaggggataattccgtccactgtcaaagctgcacctgctggtgctgtgacatttgttgcttatgaattgacatcagattggttagagtccactttcaattgattttttcccattttttcttcatgattagtgatcatattcttttttgaaatacaagttgattccctcgtagtataggaagaaagtgtgagggatatgctaattttttgtaatgatagtggtagttgataagattgaacttcctttaagatggaagatttgtccttgatgcttgcgtctgatttggaattcaaaatgtaaatttcaaaaatggtgcaaaagcc

SEQ ID NO: 5858 - DNA, 441 bp, Glycine max
  unsure (1)..(441): unsure at all n locations
cctacgtaagatcngaaattcgctccgagtcatactatgctgtttattaaatctctcttccccctcctgatcttagatctcgtcgtctgacactactcttaagatcttctgccataaacctccaaacccttctcttatccattgctctctttggccactgagatcatagacacaactctgccatattcaatcttttatgtgcttttacagctatatctgtttctgaatcatgccacacttttcaagtccaaacgcattcaactaggattttcaaggtacaaagtacctacacgcctccatattttttgtacttgcatgaaaaactatttgttttcaccttccaaggctgtatatacataaattcagcaactgttgtcctgtgctagaagcaaagtcaagaacaacttgatctttgttcaactggtggatcatttgggctgt

SEQ ID NO: 5859 - DNA, 600 bp, Glycine max
  unsure (1)..(600): unsure at all n locations
cccacgcgtccgaatgaaaattggaagagggtgatgaggatttatttgacatggtgggttttgtggcgattagccggtccgtgagtgagttggttgaatggcgagtagccggagaagaacgtttggcaacatgaggtcattcgtaagcaattcgatgggaggtctcaggggcggaagcaaccttgcttcttgggtcgtcgccggaaccctagcctacttcctctggatcaaaccctcccaagacttcaagcgtcaacaacaggagaaggccactcttgccgccgctgagtctgattcttatcgtaaacccattcccgaccctcaggttacgggtttgatatatggaaacaagaacacggacaaagcaaccagtccagaggattgattgattagcattcatgtgagtgtgttgccttacttctactcagtcctacacaaatacaccatcccaagagttaatgaagatagatagatcatagatgtgagtgntgttatgatgttcttggcacttggcaggattcaaatggatgtaattaacaatacggcatatctcgtgttttcatgcgcgctcagtttcatctntactaaatattactactg

SEQ ID NO: 5860 - DNA, 586 bp, Glycine max
actcgagccgattcggctcgagatagattagaccataaatttgtgtcgagcggactcacctagttgtggggagaacattaggcagtccaaggtgtcactcggagaaatctgtaatctgagagtgacttggttggggttataaaatagaatggcgagtagctggagaagaacgtttggcaacatgaggtccttcgtaagcaattcgatgggtggtctcaggggcggaagcaaccttgcttcttgggtcgtcgccggaaccctagcttacttcctctggatcaaaccctcccaagacctcaagcgtgaacagcaggagaaggccgctcttgccgccgccgagtctgatccttatcgttacgttgagactcgtaaacccattcccgatcctcaggttacgggtttgatatatggaaacaagaacaaggacaaaccaaccaaaccagaggattgattcattcattagcattcatggttcaaaatggagataattaataataaggcatatctcgtgttttcatgcacgctcttattcatctttgctaatatattactactgggttatggattcacgtttatgtgtttatac

SEQ ID NO: 5861 - DNA, 1366 bp, Glycine max
ttcaagggtccatcgacccgtccgaaggctgaaagaacacgacagaaaggggaagagtcagattcgcacgcattgcttcgcctcacaacagcagctgcagcagcaatggctcccaaacgaggtggaaaggctccggctcttgccgctaagaagaagcctgagaaggtcacgaatccgttgttcgagaagcgtccgaagcagttcggaatcggaggggcgttgcctccgaagagagacttgactaggttcgtgaagtggccaaagaatgttcaaattcagaggaagaagaggattctgaagcagaggttgaaggttcccccagctttgaaccagtttaccaaaactcttgacaaaaacctagcaacaagtctgttcaagttgcttctgaagtacaggcccgaggacaaagctgaaaagaaggagaggctcttgaaaagggctcaggcagaggctgaaggcaaaactgttgaagctaagaagcctattgttgtgaagtatggtctcaaccatgttacctacctcatcgagcagaacaaagcacagctcgttgtgattgctcacgatgtggacccaattgaattggttgtctggcttcctgctttgtgcaggaagatggaaattccgtactgtattgtgaagggaaaggcccgcttgggaacggttgtccacaagaaaactgcatccgttttgtgtttgaccactgttaagaatgaagataaattggagttcagcagagttttggaggctatcaaggctaacttcaacgacaaatatgacgagtacagaaagaagtggggtggtgggatcatgggatccaaatcccaagcgaaaaccagagcaaaggagaagcttcttgccaaggaagctgctcagaggatgaattaggaggagtttcttatattttgttgctttgcgaatgctatttagtctgtgttttttaatgttactctcttttaattattgtcttcataaaaacatttgttattcacatgagctagagtatttcgctaaaatctcctgccgtctgtcccaattcctgaacccttggatttctttctttttggttgcagacttttttcggatactttatgaaggaactgcatgcggatgcagttgcatccaatttttgatatttgatatttttgtatttgattctctatgattatagtataaaatagtttgtgatcctctctaaacaaaataactgcaaaggatcattctgctgcaggtgatcattttagctagtcaaattgaagtgttcaagtgaaccgagaattgtatattttcgtgctaaacttgtcgattatactcacaagtctctgtttgtctgcataatatattgaagcgtaataaattgattaatctt

SEQ ID NO: 5862 - DNA, 1122 bp, Glycine max
  unsure (1)..(1122): unsure at all n locations
cctcgagccgattcggtcgagtggaagttctttggtaatttaaacgatgctggattatgttcagtctgtggtgaagaaagttttgggactggttctgaccatattcgtgagaaagatggaatctgggcagttttggcctggctatctatacttgcatataaaaataaagataaacttgaagacaagcttgtcactgttgaagacatagttcgccagcattgggctacttatgggcgccattattatactcgatatgactatgaaaacgtggatgcaggtgcagcaaaggaactgatggcatatttggtcaagctgcagtcctcactttcagaagtcaatcagattgttaaggggataaggtcagatgtttcgaatgttgtccacggtgatgaatttgagtacaatgatcctgtggatggttccatctcatcacatcagggaatccgatatttgtttgaggatggatcacgattgattttccgcctatctggaactggatcagaaggtgcaacaattcgattatacattgagcaatatgagaaggatccatcaaagattgggagactttcaaatcgaagcccttgctcctcttgtggaagttgcattgaaactttcgaagatggaagaattcactggtcgatccgctccaacagtcattacatgaacacattcaggtggaaggtggttagatcctgaagtttctcccagtcatttcttctttgtccagtttcttacggatggccgaacactagtgttggttgtttgcagcctttgctatgggcacttgagtggaatttgatcagttactttatcaaaattttgatgtgctgaataagttgcaactgccgagtgctaattctattatatagtcttaatatgatggctcctcttgtattggcgttttattaggagcattctttccttccttttttttttggtccctgcggtgagatttgacttctctcctaaactaactttggaagaagatagatggccccccccagctgaacaaaggctagccgtttcgttgcaaaaatatttttatttttaggtttnnnnnnnnnnnnnnnnnnnnnnnnnnnnnnnnnnnnnnnnnnnnnnnnnnnnnnnnnnnnnnnnnnn

SEQ ID NO: 5863 - DNA, 606 bp, Glycine max
caatcatgtgtgaaattatgaaacatcatccatcatgtccatggtgataaattggtgatagcagcttttccaaagggtttctacaaacccaacatgacaggctgttgcttccctgtgaccttccatcggtccggtagtcgcagggtcagcttcaggcttgttagaagttcctcttccggttcatctaaacatcggggaagagagagtcataaagggcctccggctcttggctttggggagatgatgatcaatttggtccctacagtagcaagagtgtcccttgcagatgcaactgcctataagaaattcccttctggagccactgccaatgttgctgttggaatttgtagactaggaggctcagcagctctcattggcaaggtgggaaatgatgaatttggacatctgttatctgatattctgaaacaaaatggtgttgacaattctggcctgctctttgatgatcatgccaggacagcgttgggaatttatgctcttaagagtaatggagaacctgaattcatgttttaccgaaatccaagttctgatgtgctccttcgtcctgatgaaattgatatggacctcataaagaaagcacaatatttc

SEQ ID NO: 5864 - DNA, 1043 bp, Glycine max
caacttttgaaggacatgttcagtgttaatggtaacaaggagctttgcaaaagcatcaaccctgatgaggccgtggcgtatggtgcggcggttcaggccgccattttgagtggcgaaggagacaagaaggtggaggagttgttgctgctggatgtgatgccgcttagtcttgggattgagactgatgctggtgaaatgtcagtgttgattcccaagaacaccatgatccccaccaagagggagagcgtcttctccactttttctgataatcaaacaagtgttttgatcaaagtgttcgagggggagcatgcgaagacagaggataacttccttcttgggaagtttgagctttctggtttcactccatcgccaaggggagttccacagatcaatgttgggtttgatgttgatgttgatggcattgtggaagtcactgctagagataggagcacggggctgaagaagaagatcacgatcagcaacaagcatgggaggttgagtcctgaagagatgaggagaatggtgagagatgcagtgaggtataaggcagaggatgaggaggtgaggaacaaggtgaggataaaaaacttgcttgagaattatgcttttgaaatgagggacagagtgaagaaccttgagaaggttgtggaggagaccatagaatggcttgacagaaaccaattggctgaaactgatgagtttgagtacaagaggcaggagttggaagaaaaggttttgaagtttatgtaatggtaattcttggtagaacaagtttaatgttgagttgagtccgaagcaatgtaaaatagttccagcttcgttactcaatctagcagtctgagtgttatgactggtttatgcttatgcctaaaatcagtaaaatgtgaaagtgcctagtatggatgcaaggaatgttgtgtttattaattattacagtacctttgtgatatgatggtgcttatggaatggactactcatatttcataaatcataatccattactgattagttttcaaaaaaaaaaaaaaaaaaagggcggccgc

SEQ ID NO: 5865 - DNA, 567 bp, Glycine max
acgtcgcttgcccgcgtgcctaagctaggaattcagctcgaggtggagaaaagcagtcacctcccgccacgaaaatttctttggctctgtgctttgagtccgagtctctcccacagcgacaccatccatcttctttcacattttccactacgttagggttcgtcttcatttcgaattgaaggattcaacaacttagcaaaccacgccatggcaactctgcaatctctgccaccttctttccgtccatcaatcccacccccaaattcccactctttcccagccactccctttaactattcccccaaattgattgcctcaaagggtgtcagcgttaccctcaggaactctatcacttctcccagggtttcggtttccaattcggagtatagtccccaaattgcggaaaatctcggtgacgttactattttcactgccactggcgagccagtaaggttcagtgatctctgggatcagagccagggtatagctgtggtggcactgttgaggcactttggatgcccatgctgcttggaattgggttcagcctttaagaaatcaaagcaaggt

SEQ ID NO: 5866 - DNA, 614 bp, Glycine max
cggtcgcgtgttcggacgcgtgggttcgaagatactcaaaacaaagtctgaactctttctctctctcagtctcaactctgaaattctgaactaggatttggatgcttccattccctctctctctttctgttcccaaaattctcattccacattccaaattcgcccttcatggggaaaggagccggctgccttcatagcaagaagaagcccccgccggtcgccgacgatgctcccgctcccaccgttgccgccgcagcccccaccccgccgccgatctcgcctccagacaacgcccacgcgcgcgaacccgacgcgccagcgcgtgaagcagcgtcgtcgtcgtcgtctctcccgggcggcgcgaaattgaaggtcttcatcgtgttctattcgatgtacggacacgtggaggggctggcgaagaggttgaagaaaggcgtggacggtgtggagggtgtggaaggggttctgtatagggttccggagacattgccgattgaggtgctgaatcagatgagggcgccgcccaaggacgacgccataccagagattacggcggcggagttgacggccgccgatggggtactgtttgggtttccgacgaggtacgggtc

SEQ ID NO: 5867 - DNA, 388 bp, Glycine max
cgtaggtaagctaggaattcgactcgagctgaactctttctctctctctcagtctcaccactgaaattctgaacttggatgcttccattccctctctctttccgttcccaaaattattattccatattcccgatttgcccctgatggggcaaggaggcggctgcgttcccagcaagaagaagcccccgccggtcgccgacgatgctcccgctcccacgccgccgccgatctcgcctccggataacgcccacgcccgcaaacccgacgctccagcgcaagtagcgcgtgaagcagcgtcgtcgtcgtcgtcgcttccgggcggtgcgagattgaaggtcttcgtcgtgttctattcgatgtacggacacgtggaggggctggcaaaaag

SEQ ID NO: 5868 - DNA, 864 bp, Glycine max
agaaaaagaaaattaatgaagtgaaaactacgagagtgtgaaaagggagggagagagaagagaagaatctaaaaaggaagcaacatttctatttcctcttcttcatcacttgaatccaccaagtccttctcctcacacacataaaaacaaatatcctccacttcttctacccccagcagtagaacaagaggtgccggagcaagtttcgtcacgccggaacgatgaccggcggcggatccacggggaggttgccgacgtggaaggagagagagaacaacaagaggagagagagaagacgaagagcgattgcagctaagatctacactggccttcgagcccaggggaactacaagcttccaaagcactgcgacaacaacgaggtcctgaaagctctctgcgccgaagctggctggatcgtggaagaagatggcacaacttatcgaaagggatgtaagagacccacgagtgagattggaggaacaccactgaacttaagcgcgtgttcttccattcaggcaagtccacaatcctcgtcatacccgagtcctgtaccatcctaccatgctagcccaacctcttcctcgttcccaagccccacgcgcattgacggaaaccacccttcttcctttctcatcccattcatccgcaacataacttccatccccgccaacctccctcctctcaggatatccaacagcgcccccgtcaccccacctctttcttcttcccgaagctcaaagcgcaaggcggatttcgactccctccgccaccctctttttgcctaccttcgcccgtccaggcccacgcgccggcaccacgttggcaccttcaccattccggagtgcgacgagttcgacgccttca

SEQ ID NO: 5869 - DNA, 690 bp, Glycine max
ggacggcagtgtgaaaagggagggagagagaagagaagaatctaaaaaggaagcaacatttctgtttccgcttcttcatctcatctcagcacaagaaagaaagaaagaaacttcaatcctcacacaaacgaaaacaaatatctttcacttcttctgcatccgacgctagaagaggtgtcggaacaaacaagcttcgtttcgccggaacgatgaccggcggcggatcgacggggaggttgccaacatggaaggagagagaaaacaacaagaggagagagaggagacgaagagcgatcgccgctaagatctacaccggtcttcgagctcaggggaactacaagcttccgaagcactgtgacaacaacgaggtcctgaaagctctatgcgccgaagctggttggatcgtggaagaggatggcaccacttatcgaaagggatgcaagagacccagcgcgagtgagattggaggaacagtggcaaacataagcgcgtgttcttcgattcagccaagtccacaatcctcgtcattcccaagccccacgcgcattgacggaaaccacccttcttcctttctcatcccattcatccgcaacataacttccatccccgacaacctccctcctctcaggatatccaacagcgcccccgtcaccccagctctctcatctcctcgtagctctaagcgcaagg

SEQ ID NO: 5870 - DNA, 534 bp, Glycine max
agcgcgatggaaaaggtagctttgtaaggcttgaagttgtcacagcttcactgggcttcctaactaattttgaggatgtgtataaattgtgggcttttgtggccaagtttctcaacccgacatttatcagagaagggggtcttcctactgttcaagaaggctccgagacatgagatggcagagttgcccgtgactttattcaattttggaaactgaacatgaaatgaaagattatgtgacaggttgccaaaaggggccgcagccgaagctgcaggaagaatggattggttcatgatgatctgtaagacccctagatagacacaaacttattttctgcatcaaaggaagaataaggcaagccgggtggatttgttaattcatgtttcctgttgcctacatttttattatttttccccttttgttttttgagctgcttgtagagttggctttagaaagatttgttacatattgggaagtcatggtgtaatttgaagcaaatattgtatgggtagaacttctactgatatatatact

SEQ ID NO: 5871 - DNA, 419 bp, Glycine max
gcttcctactgttcaagaaggctccgaggcatgagatggcaaattcgcccgtgactttatgtaatgttggaaaccgaacatgaaagattgtttgtgacaagttgcctacaaaagaggctgcagcaacagccatagtagcttcatgaagaatgcattgattggtgatgatttgtaagctccaatatagatgcaaacttagacaagtggggtggatttgttaattcatgtttcttgttgcttacatttttaattttcctcttttgttttttgagctgcttgtagagttggctttagagatttgttacatatcgggaagccatggtgtactttgaagcaagattgtatgtatgggtagagaacctctactgatatatataaatcgcttcttttgcatacagaaaggatttccaacttgtgta

SEQ ID NO: 5872 - DNA, 1229 bp, Glycine max
tagaagaccttgacgtcgaatgcccgcgtacgtaagctaggaattcagctcgagcgcctcccgatttccctcatggagtttcaaaaacctctatggctattcttgcttctcctcactctcctctcaagctcccaagccaacaaattcaacgttggtggaagcaaagggtgggttccaaacccttccgagagttacaacaattgggctggaagaaaccgattccaaatcaatgacacaatagttttcaagtacaataagggttcggattcggtgttggaagtgaagaaggaagattacgacaagtgcaacaagaccaacccaatcaaaaagtttgaaaacggtgacactgaattcaagtttgatcgatcaggaccattctacttcattagtggaaaagatgggaactgtgaaaagggtcaaaaattaatcgttgttgttttgaccccaagaacaccaccaacaccaaaaacaccaccgtttccaaaaacttcaccttcaccttcaccttcacaatctccaaaggcaaacccaccaaccgtatcgccgccgttaccgtcaccgtcaccatcggttcattcaaaatccctatctccggcgagttctcctgtgccggccgtcggtactccggcaatatctccggcgatttctattccgacactggcaccggagacggggactccaccgccgtctcttgggccttcatcatcttcaccaccgtctccgggtccttcatcttcttcaccgccgtctccgggtccttcatcatcttcaccgccgccggcggggccaacttcaccgccgtcgttagcaccgtcgtctaattcaactgcgccgtcaccgaagaacagtggattttctgtggctccttcaagcgttttgatgtattgtgttacaattgttgctggtgctgcgttgttgcgttattgaacaaacattttgggttgaaattgagacatactttagtgacatgcttcgtgctagaacgttcttgttgggacacatgtggtgatcatttaggatttgatcgttgttgtttttaatttttacttcgatttgcatatgaattatttgttaatagcatgattttgtaatcgtgaggatttcgttggaattttactctcagatgcgattttaatgtggctcgattatgtgaattaagtttttggtatcatttttgttctacgtgtttgtgcaagttcttagttgtcatctcagaattttaaatattg

SEQ ID NO: 5873 - DNA, 400 bp, Glycine max
tacctctccggtctccaacccctaatttcctcccagacttcgtgtctcacaccatcacacgctttccctctctcttctactctatatacacacactcacacaccactcttccacatctcactttccattttccctcatggagtttcaaaaacctctatggctattcttgcttctcctcactctcctctcaagctcccaagccaacaaattcaacgttggtggaagcaaagggtgggttccaaacccttccgagagttacaacaattgggctggaagaaaccgattccaaatcaatgacacaataggtaacttataattattattattattagaactaccacaccactagtattcacatacccacaaaggactttagagtttccttaatacaaaaaaagaa

SEQ ID NO: 5874 - DNA, 683 bp, Glycine max
attggggtcccaaaccaaagggcactgcctcttctatccagaattctattgatgtaaccagtcaatctatggcaggcaaccctgtgggtcaagtaacatctttacaaaagcatttgtccttagcggctttatctgctaagcaaacaaccaagccatgtccctcagtggatgtagaatggccacctcgtgcatcttctggtgttaccctacaatttggtgatactgaaacgcagacaatagcagcaggaacttcatccccatctaatcttgaatctgatgatccttttgctgattggcctccacgtcctaatggctcagtatcaggtggatctggaatatccaacaatggtactttaggaatgccactgaacaaagttgggtttaattcaatgagaagcacttcaagcaatatgggtccccaaactagcaacagttggcctgttaattcccaaagttctgcagagtccattagtttgaactcaaggaatcctatttcaacaatgggtagcctgaatagtggtggccttggacaacagaaatctcttgggtttgtaaaacaaggccaagctttcccagcatcaattgtttcatataataatgttcagtcaacagcaacagatcttggatcaatattttcttccaacaggaatgaacaaattgcacctaaacttgcaccaccccct

SEQ ID NO: 5875 - DNA, 2066 bp, Glycine max
cagaaaaattaaaccaaccatactacaccagacactcctcctaaccttcaataattctcttctcacccttataaaaagaaactcattttaactcagactttgcatttcaccttatctatccatctatcttttctaacatggctgctgggactggactctttgcagagattttggatggagatgtgtacaagtactatgctgatggagaatggaagaaatctgcttctgggaaaagtgttgccatcatcaaccccactaccagaaagactcaatacaaagttcaagcttgttcacaagaggaggttaacaaggtcatggacttggcaaaatctgcccaaaagttatgggcaaagaccccactatggaaacgtgctgaacttcttcacaaggcagctgctatccttaaagagcacaaagcaccaattgcagagtgcctggtgaaagaaatagcaaagccagccaaagatgctgttacagaggttgtaagatctggggatctggtttcttatactgctgaagaaggtgtaaggattctgggagagggaaagttcttggtgtcggatagctttcctggaaatgaaaggacgaaatattgcctcacatccaagattccacttggagtgattttagccattccaccttttaactatcccgtcaatcttgctgtttccaaaattgctcctgccctgattgctggaaactccattgtgctcaagcctccaactcagggagctgtttctgctcttcatatggttcactgctttcacttggctggttttcccaaaggcctaatcaactgtgtcactggaaaaggctcagaaattggtgatttccttacaatgcatccaggagtgaactgtataagctttactggtggtgatactggcattgcaatttcaaagaaggcaggcatgattcctctgcaaatggagttaggaggaaaagatgcctgcattgtacttgaggatgctgacctggatttggttgctgcaaacattataaagggaggtttttcatacagtggtcagaggtgcactgctgttaaggttgtcctggtaatggagtccgctgccgatgctttggttgagaaagtgaaggctaaggtggcaaaactaactgttggaccaccagaggatgactgtgatatcaccccggttgtgtcagaatcatccgccaatttcattgaaggcctggtcttggatgctaaggagaaaggagcaacattctgtcaggagtacaaaagagaaggcaatctcatttggcctttgctactggacaatgttaggccagacatgagaatcgcatgggaagagccatttggaccggttttaccagtaattaggatcaattcagttgaagaaggaatccatcattgtaatgctagcaactttggacttcagggatgtgtcttcacaaaggatgtcaacaaagcaataatgatcagtgatgcaatggaaacgggaacagttcagataaattctgccccagctcgtgggccagatcattttccctttcagggtataaaggacagtggcattggatctcaagggattaccaacagcataaacatgatgaccaaggtcaaaacgactgtgatcaacttacccagcccttcctatactatgggctagtagtgtaatacacacatgcatgggggaacatcattatatagcatgttccataaatcatagtgaacgtacaaccgtgtgagttcagcattgcattgtcttttgcagctgggaatcacagagatgaataacgagtttgattgatatgtcgcatagctacttcatatgtgactacttgttgtactcgtatttaggatgatatgaaactgaattttatcttgtgccttatcattaaggaatatcattgtgttccaattaaattgaatgtcaaatcaatgaaatgagggggaaaacattgtcttctgtttccattgtgtccaaaaaaaaaaggaaaaatagaaaagaaaaaaaagaaaaaacaaacaacaaaacactggatcgcaagaatccgttgaagtgctatggggctgtcagaattagcagagattgccaggaggt

SEQ ID NO: 5876 - DNA, 268 bp, Glycine max
atctctgaccactgtatgaaaaacctccctttataatgtttgcagcaaccaaatccaggtcagagatgcactgctgttaaggttgtcctggtaatggagtccgctgctgatgctttggttgagaaagtgaaggctaaggtggcaaaactaactgttggaccaccagaggatgactgtgatatcaccccggttgtgtcagaatcatccgccaatttcattgaaggcctggtcttggatgctaaggagaatgttgctcctttctccttag

SEQ ID NO: 5877 - DNA, 775 bp, Glycine max
gacctctcttattgttgttcgcttcttcttttcttgtttccttttccattcttctttttctctctgtactcaaactcacttccccacttatttatacaatgtcggcttacaaagaccaggatacccgtcttcatggcatcaaaactaagattcgtgtcgtccccaatttccccaaatccggtattatgttccaagacattactactctattgcttgatcccaaagcatttaaggacacaatagatttgttcgttgagcggtacaagggcaaaaacatttctgttgttgcaggaattgaagctcgaggttttatttttggtcctcccattgcgctggctataggagcaaagtttgtaccattgaggaaaccaaagaagttgcctggaaaagttatttctcaagaatatattctggaatatggaagggactgtcttgagatgcatgttggagctgttgaacctggtgagcgtgctttagttgttgatgatttgattgcaactggaggaacactctgtgcagctatggacttactagagcgagtgggagcagaggtagtggagtgcggatgtgtaattgaattgccagatttaagggcccgcgaacggctggacgggaagcccttgcatgtgttagtggaatgttttgagtgctgtgaatagatgaagatgtagatgggggaatgcgtaaccaccaagtgggtactttcctatatggaaatcctctgcttcctcctttttaacgattaatgaaaatgaacgacttttcctattgagac

SEQ ID NO: 5878 - DNA, 429 bp, Glycine max
ccctcgcgtccgctcttacacacactctataaatacccctgtggataaacttcccttgttcttatttgttactactaccgctttgccttcatacttaactcaattctagttttgtagagagaagaaaaaaaccaaccactctttttctttcatttgcaatttctgtgtcaccaatcatacacacaatgtcggcttacagagacgaggatccccgtcttcatggcatcaaaactaagattcgtgttgtccctaatttccccaaacctggtattatgttccaagacattactactctgttgcttgatcccagggtctttaacgacacgatagatttgttcgttgagcgatacaaaggcaaaaacatttctgttgttgcaggaattgaagctcggggtttcatttttggttctcccattgcactggcaatag

SEQ ID NO: 5879 - DNA, 406 bp, Glycine max
tcgtaggccagctaggaattcgactcgagaaaggaaccaaccactctctcccttccccgctcattcatacaatgtcggcttacagagaccaggatccccgtcttcatggcatcaaaactaaggttcgtgtcgtccccaatttccccagacccggaattgaagctcggggtttcatttttggtcctcccattgcgctggctataggagcaaagtttgtaccattgaggaaaccaaagaagattgcctggcaaagttatttctcaagagtatattctggaatatggaagagactgtcttgagatgcatgttggggccgttgaacctggtgagcgtgctttagtggttgatgatttgattgccactggtggaactctcggtgcagccatggacttactaaagcaattgg

SEQ ID NO: 5880 - DNA, 751 bp, Glycine max
tcggctcgagagagaatcagaatcacttgtcctcctcttccactataaatacgctcacaagtcacaattctccctcatctcacaatggtttcccattactatcttgcctctcttcttctgctactgctgctcaacccacacaccaccctgggagcgcagaacctcatgctaccctaccataacggcgccctcctcaaaggaaccattaccgttaacctcttatggtacggcagcttcaccccaatccaacgctccataatcctcgacttcattaactcgttaagttccaccgcgggggccccacttccctccgtagcatcgtggtggaagaccacggacaagtacagggggggatccactacaatcgtcctagggaaacaaatcctagaacaaacttattccctcggaaactacctcaacggaacacaactagtctctctctcctcacgcttcgaccacctcaacgccatcaacgtcgttctcacatctagcgacgtaggggttgacggcttctgcaggagccgatgtgggacccacgggtccattactaacgggcagaaggcccgtataccgtatgtttgggttgggaactccgaggcccagtgcccggggcaatgcgcgtggcccttccaccagcccgcttacggcccacaggcaccgccgttaattgcgcctaacggcgacgtcgggcttgacgggatggttataaacgtagccacgcttttggcgggaaccgtgacgaacccgttca

SEQ ID NO: 5881 - DNA, 314 bp, Glycine max
gcgtacctaagctaggaattcagctcgagcttttggcatccaaatagttgattaatttcagcgacttgtcttaggattttggacccctttttcgcttgtaactaggttgctctcatctcatggctttgtatcaaactatcctagttgtaacaaggatttggttttaatcttgaagggctgaatgtatttaattattactattatatttgcttactttgcaacttctgtttttgctttgaagattctcattttgtaatgttggaattagtattgatagatttataaattcggagaaatgtcttgcattagtggta

SEQ ID NO: 5882 - DNA, 546 bp, Glycine max
aattcagctcggacaatgcaatgctcgtgtcgttttggtgtcactgagtcagtctgagtaggaagaggaagccatgggcaacacatcctccatgctcacccaatacgacatcgaagaggttcagcaacattgcaaaaacgcttttacgcaacaggagatagtttctctgtaccaacgcttctgtcagctggatcgcaacaactgcggtttcatcccttccgatgaattcctctccattcccgaattcgccgtcaatcctctctctcagagtttgttgaggatgctggatgggttgaacttcaaggaatttgtggccttcttgtccgccttcagtccccgtgccactctccaccacaaaattgaattcattttcaaggtctatgacaccgattgcaatggaaaagttaccttccatgacatgttgagggctttaagggatttgagtggacccttcatgtctgagcaacagagagaggacgttctgacacaggttcttgaagaagctggctatgcaaaggattcttcattagtcttgtctgactttca

SEQ ID NO: 5883 - DNA, 842 bp, Glycine max
  unsure (1)..(842): unsure at all n locations
cggaattttgtattattagagatagatgagcgcgacaaaatgaattattggagagagatagaaagaggctcaagagggagcttccaggaaggatacacagcgaatgactggcattcaagttagcttagctatgatgaatgaagaggagtatagatggtcaacgtttttggtaagcaagcaagaatcacaaattggaaccatgtttctcaaatgttttggcttcggcgctcggggacagtatccaacggtgatagaagacggcgctcggagacagtatccaacggtgatagaagagttgtgccatcgattttctctcgcagatctaaggaaatcaaccaacaatttcgatcaaaacacagcaattgatcgtggtagagtatatagagtatataaaggttgtctccaacacaatgaagatgcttctgagtatacagtcgctgtaaagcgatataaagcggaaatggaagcagaagggtttttcaggaatgaaatagagttactctgtcagcttcgtcaccctaatttgctctctcttataggattctgcaacgaccaaaatgagaagattattgtgtacgagtacatgtccaatggatctcttcatcaacttctacaaagtggggtactgtcatggaagaaaagactggagatatgcataggagcagcgcgcggactacactaccttcacgctggagccaaacgcaccatcattcaccgtggcatcaaccctaaacacattgttttggatgacaacatggagccaaaactcacaggttttcgcattagcttactgngaccgcgttctatgtcaaagccaaaaccaattaaagtagattatattg

SEQ ID NO: 5884 - DNA, 407 bp, Glycine max
gggagcttccaggaaggatacacagcaaatgactggcattcaagttagcttagctatgatgaatgaagaggagtatacatggtcaacgtttttggtaagcaactagtaatgaatcacaaattggaaccatgtttctcaaatgttttggcttcggcgctcagagacagtatccaacggtgatagaagagttgtgccatcgattttctctcgcagatctaaggaaatcaaccaacaatttcgatcaaaacacagtaattgatcgtggaggatgtggtagagtatataaaggttgtctccagcacaatgaacatgcttctgagtatacagtcgctgtaaagcgatttgttagagtgggagtggtagaaaaatggttcaggaatgaaatagagttactctgtcagcttcgt

SEQ ID NO: 5885 - DNA, 481 bp, Glycine max
tcagaaacaactcctctctactcaaacccttcttcctcataacaacaaaaacagaaacccctttcccccaaaccctagaatcgccccacacagatcctcatcgctcccaatccaattcccaaccatttcttttctatcccaaacaccgttgaccacacacacccgaggttttatccattaaagttccgtcttttgattcctgggtccccttttttttctccttctcttttattgggcataggaatgttgggtactgggttgaacttcgggcgcgctcgcggcgaggatcggttctattctccggcgaaggctcgccggtcgcttctcaccatggagaatgacaagctgcgtagggcccacagcgacgtcgccgcgtctcgctccgtcagagacaaatcggtcggctcgggtaaccggataccggagaaccgggtcgggtcggacgaggcaaagaagagtggcgcggttccttcgtgtgaac

SEQ ID NO: 5886 - DNA, 415 bp, Glycine max
ttcctttcacaagtcataaaactcccttcacttgctctgaaattttcatgtatcacgctcccgcccctgccgctattatcgttcttcttcttcactaagaatccaaaaaaaaatgaacgatcttatgacgaaatccttcaccagctacgtggagctgaagaaggtcgcaatgaaagaagacgttgatttggaagccggtggtcctggtgatcgcaaggtggaactgagctcttccacgacccacttggacacagacatgggcctcttcctagaagagggcgagaaagtgaaaggcgacatggggtccctccgagacatcctgggccggctccaacaaggcaacgaagagagcaagtccctccacaagcctgaaacccacaaaggcctcacaagcccgatcaaagctgaaatccct

SEQ ID NO: 5887 - DNA, 485 bp, Glycine max
cgtcgaatgcccgcgtacctaagctaggaattcagctcgaggaatatctctccgcaatggaaactgtgtgtgaaaggattggtgtaacagaaaactgtacacaagagggattccaaaaccaagtgctgagaaaagggtgtcaaaatcttggcctcaaagttgactatgtgccaagaaactcctcagggaatcactactgtggctcatgtggttatggctgtccgaaaggagagaaacaagggactcaagctacatggcttgtagatgcagttgaaagagatgcagtaataataacaggatgcaaagctgagaggttcttgttggaaagcaacaggagtggaaatggcagaaagaagaaatgtttgggagtgatggcaaaagcattaaacagcagagtcacaatgaagttacaaattgacggccaaggtgacaatttctgcaggtggggcacttttgacaccccctttgttaatctctagtggact

SEQ ID NO: 5888 - DNA, 445 bp, Glycine max
gagctatgacgtcgcttgcacgcgtccgtaagctcggatttcggctcgagcatgattcaactttttgaaactggagggatccttgcttctgtggactcaagagtgctagttttggcaggatcaacagtgggtggtggctctgctgttaattggtcagcctgcattaaaaccccacacaaggtgttaaaagagtggtctgagagccacaagcttcccttcttttcaagccaagaatatctctctgcaatggaaaatgtgtgtgaaaggattggtgtcacagaaaactgttcacaagagggattccaaaaccaagtgctgagaaaagggtgtcaaaatcttggcctcaaagttgactatgtgccaagaaactcttcagggaatcactactgctcatgtggttatggctgtcctaaaggagagaaacaagggactccaagatacgtgg

SEQ ID NO: 5889 - DNA, 438 bp, Glycine max
attcagctctatgtaagttaactagctgctgttctttcaagtgctggctacaaggtggttgttcttgagaaaggaaactatttttctactcaggattattcatctctagaaggtccttccatgaatcaactatatgaaactggagggatccttgcttctgtggactcaagagtgctagttttggcaggatcaacagtgggtggtggctctgctgttaattggtcagcctgcattaagaccccacacaaggtgctaaatgagtggtctgagaatcacaagcttcccttcttttcaagccaagaatatctctccgcaatggaaactgtgtgtgaaaggattggtgtaacagaaaactgtacacaagagggattccaaaaccaagtgctgagaaaagggtgtcaaaatcttggcctcaaagttgactatgtgccaagaaac

SEQ ID NO: 5890 - DNA, 473 bp, Glycine max
aagcccaccattttccatttccatgtatctgtgtactttctattcttatcataagataactaactcactttgtgtgatagagttctcattctcatggctattaccggcgatattttccggcagagcataacggaaatgcttgcggagtccccttccggtgcgccagaacttcacgttctcgccgtcgatgacagcctcgttgatcgcaaggtgatcgaacggttgctgaagatttcttcctgcaaagtgacggttgtggagagtggaacgcgcgctcttcagtatcttgggttggagggagagaacggttctcttgggtttgatagtgttaaggttaatctcataatgacggattattccatgccggggatgacaggatatgaattactcaagaaaatcaagcaggagtcttctgtgtttagagagattccggtggtgatcatgtcatcggagaatgttttgacccgaattga

SEQ ID NO: 5891 - DNA, 515 bp, Glycine max
acgtcgcatgcccgcgtacgtaagcacggaattcggctggagtggaggtggcataatcgcttgtcatggatttgcaaagatctctcagatttggatcctccgaatctatcgcctttattattttctttaaccctttacttttcatctcaccatttattatttattacgcgtccttccttctctctccctttcccatctaaataaaacccaccattttccacttccatctacttgtgttctgttgtgtactttctattctcataagataactaactcactttgtgtgatagagttctcattctcatggctattaccggcgatattttccggcagagcataacggaaatgcttgcggagtccccttccggtgcgccagaacttcacgttctcgccgtcgatgacagcctcgttgatcgcaaggtgatcgaacggttgctgaagatttcttcctgcaaaggtaacccggtgttgcgattcacctgtctgtgaatttgtttgggaaaattgagattggt

SEQ ID NO: 5892 - DNA, 665 bp, Glycine max
aagctaggaattcagctcgagaaataaacaaagaaagagagaaagaaactcaacctcgttcgtttcgttcctccatgaaataatggcttccgtttctactttctgtttcgttctcttcttcttcttcctcctcacacaatgctggttcttaacttcagcaaagaaaacctacatagttcacatgaaacaccacgaaaagccttcggtttaccccacacacactgactggtacagcgccagtcttcaacaatctctcactctcaccactgccgattcagattccgattccaatccgttactctattcctacaccaccgcctacaacggtttcgccgcgtccctcaccgacgaacaggcggaacagcttctcagatccgaggatgttctcggagtgtacgaggacacggtgtaccagttgcacaccacccgcactcctgagtttctagggttggaaaaggaaacagggctttgggagggtcacaccgcacaggatctcaaccaggcttccaatgacgtcatcattggggtcctcgacaccggagtgtggccggagtcgccgagcttcgacgacgcaggaatgccggagattccggcccggtggcgcggcgagtgcgagacgggtccagatttctcccccaaatgtgtaacaggaaactcatcggcgc

SEQ ID NO: 5893 - DNA, 798 bp, Glycine max
cgtacctaagctaggaattcagctcgagccgcctcagagggctcttctcgttctcttttacattccaaagccaacaaaacaaaaaactcactaaccctaaccctacccccacccttttgaaatgaacttcaaaccctggctctctttcctcctcttggccctggccctggccatggtggctgaggcttctagtgttcatcatgaatatggcttccatgttaatgctgtggtccatgatctcattggagatgacaatgagatgttgctagattccgaatccaatcgccgaaccctcaccgggcgacaacggtacattagctatggtgccctaaatgccaacaatgtgccatgtggtaaccgtggaagatcctactacaattgccagcagaggggtcgtgccaacccttacaatcgtggttgcaccaaaatcacacattgtgctagagacaccagctagatgaacaagtcatgaagctggagagggaaatatatatgatatataattatatgttatataataaagtattaattgtggttctagaataacttacgtgagttcttgccacacttttctacataagccccccattcaccagattctattttaatttgttgggggaggttatttaattaattttttattcaattttcgagtgtttgtgatgctaatgttatatggggactaattaattggtctctctctctatatatatttttggtatgtgatccgtgtacaattcttttcctcttgttttcaaatatatatggagcctatagaaaaatatctaataaattaaa

SEQ ID NO: 5894 - DNA, 936 bp, Glycine max
cgtcaaagcccgcgtacctaagctaggaattcagctcgaggaagaaagaatacgcgcagagtggactttgacctcagcgccgtttgggtccgaaccaagacgcacacaggacggtgcgttcaccaaacctaccttggtgggccccacttttcccccgaaccgtagcttcagagtgatccctttcgcaccctctatataatagcgccctcgccactcgcctcgacgcgtgagactctcgcgggtggataacgaaatttcttagacaaaaaacaaggatcagaaccgttgaatcaagttgaggaagatggcactagtctctggaggaagatcaacactgaaccctaacgcccctctttacattcctgccgcgtttcgccaagtggaggatttctctccggaatggtggcagctggtgacgacgctgacatggtaccatgactactggctaagccagcagcacgatgagggagccttctacggcgaggacgacgggtttgatggcaatgatgtcgttgatttgcttcctgattcgtttgatcttgatgctggcgaggatctttttgaagagtttataagatcttctgaatcccaagaagaaactggacccaaagtaactgcatgaggcttagagatgaacccatttaaagaatctacctaccaacctaagagactggacccaaggccttagctttaggtcagttagatgatatgtttgcatcatgttatccgtagcttcaactttctgtaacttcttgtataggcaaaggtttcaaaccttcaatctatccttctcttgcttttgccaaaatgttatggtgaatagggaaggaaaaagatggaaaaaaatgtgactgtttcatgtactgatgttgtaaaagctgctacaacctacaaaattacaaaatgtaaaaaaaatgtaaaatgacttctctgttg

SEQ ID NO: 5895 - DNA, 705 bp, Glycine max
cggacttgaaggcccgggccgaccgacgcgtccgcgtcccacgcgtccgtcaagcattgcatccctcttgatttgtagtttgttttgtgctttagataaaagttctgccaaatcaagaggggttttaagatcatagtgtgtgttttgcaacaatggctaagttctttgctgctatgatcttggcactctttgccatttccatacttcaaacagtggtaatggctgctaatgaacaaggaggccacttgtatgacaacaagagcaaatatggaagtggaagtgtcaagagttaccaatgcccatcacaatgctcgaggagatgtagccagacccaataccacaagccctgcatgtttttctgtcagaagtgctgcaggacatgcctgtgtgtgcccccggggtattatggtaataaagctgtgtgcccttgctacaacaactggaagaccaaggaaggaggacccaagtgcccttgagcttcaacttgttcaacttcaattgtcgctttcctacatttttattgcttccttccttgtgccaatttaatgcactagctaccaaatgctactagtcccttttggtggcattctatgatattatgtttttatgtattttggtgtatcactccttgggccttgtttgcctttaatgagagtggcttattaatatcaatatatcacctaccaaacttattgctagcaaaaa

SEQ ID NO: 5896 - DNA, 492 bp, Glycine max
atttgaaggttgttttgtgcttatagataaaagttctgccaaatcaagaggggttttcagatcgtagtgtgtgtgtgtgtgttaaacaatggctaagttctttgctgctatgatcttggcactcattgccatttccatgcttcaaacagtggttatggctgctaatgagcaaggaggccacttgtatgacaacaagagcaaatatggaagtgggagtgtcaagagataccaatgcccatcacaatgctcgaggagatgtagccagacccaataccacaagccctgcatgtttttctgtcagaagtgctgcaggaaatgcctgtgtgtgcccccggggtattatggtaataaagctgtgtgcccttgctacaacaactggaagaccaaggaaggaggacccaagtgccctttgaacttcaacttcatcaaattgttgcttttcactatatttttatcatctcccttgggccaatttaatgcactagcttactt

SEQ ID NO: 5897 - DNA, 891 bp, Glycine max
catgcacgcgctaggaattcagctcgagctctttttctctctctacactcaccaatggacgactctcacaacaggaagcgacttcgccaccactccccaaagcacccccgactttgttctaactcctccgacactcacccacttgactcgccccagtttcaactctcccgcgtcgacccggaccttctcaacatgctcaatgatgccgagaacgtcacggagcgtgaccctaccatgcagggtcttgactctgttattaagagtttcgaggaagaaatactttctccgcttccgaacccgaatctagcgtccgaagcagaggtgtttaatccgaacctagggtacttgttggaagcatccgacgacgagctagggttgccgccggcggtagcgcccggcgaggatgcgacaaatccccaaacacttgattcgggccgggttggatctgacggagtggatctgactgggttcctagggcttgaagatgatatcgtgaactgcggagggtttgggttaactggttacgatgatgtggaaggtgacggtggtggttatgtgacgattgatggattgtttgactatgcggaacccggtgccgatattctgtggcgatcggagtcgttgcaggcgatgtagttggttggaaagattaattaattaattaattaattaacatttggctaatgaaggtgtacaaagagatatctaggaattacgtcccacagataacataagtgggttaagattacatgtgaatttattttagttcgtggctaaagacttgttctttaatcctctcttagcaaaaatgttgtttaaatgggaatctagaaatggttaaaattaacatccctgctgtcctttgaaaatctggttctatatatagatcat

SEQ ID NO: 5898 - DNA, 760 bp, Glycine max
cacgcgtacgtaaggccagaaatccgctccaaaaaatgggagacagaaacaagtcaagtttttggtaaaggcaaggcctacacctaacatttcaaaaaaatgagggattaaaaggagacaattttgtagggattaaaagtgaacatttccctatttataagaactaaaaacatatgtaactcaactttttatcaaaatgagaggggatgttatttctatggcaaaagtttatttttatataaatttttaccattttaattgaattaatgtagaaaagtttgttgcatgcaaaaatatcatggggaaagaaacattcttttccactatgtttttttccttcccttccttctcattcgtataaaacttattcagaacaaagccttattaagtgagacttcatgaaatactaatagtctaaatcttacatcaaattttgatgcaggttcaacataggtacaagaaagctactggttatttgcccttcatttttgaaggttcatcacccggtgctggaaaatttgggtacctaaaaatacgtcgtcgagctaccccaaaaaaggctaacgccatcaaggatgatggtgcactcacctcagaaaaggctaacgctagcaaggatgatggtgcagtcacgatgaagaataatagttaatcatggcttatatttaaccactttaagagttctacctttgttgtctttccccagaacatgtatagtatggttaaattttgaaccatttcaacaattattaacattttt

SEQ ID NO: 5899 - DNA, 643 bp, Glycine max
gtacggtcaggaattacggctcgaccacgcgtcagcccacaccttcgcccaagccttcgttacggtgccaaaaaaacaaaaaaagggcgaaccaatttggttcttccctccccctatcgtcttcttcctctgttccattagggtttccttttctccctcggagcttccaattgaaatccaattcctcaatacctccacactttctcgttcggaaagctcgcgaattcgaaagacatcgacggctccacgtgatacgttttcttcctctctggttatcaatgttggctactagtgcagttgcatctttgcccgtattaccaccagtgagaagaggtggccaccacattgaacagaatgttgtttccacattgagctttccaagacgattactgacaactaataattcaatacctctgagtggtacacagtttccatttggcagaagagctcattctactcagccagcaactataatatgtgctgcagctttgaatgcaagatgtggtgcagagcaaacccaaactggtactcgccaggctcctacaattactcatgttcctggcaaggagaagtcaccacaactcgacgatggtggaactggatttccgcctcgtgatgatgatgatggtggtggtggaggagg

SEQ ID NO: 5900 - DNA, 420 bp, Glycine max
cactaccaccaccacgccctctgcataaattctctttattccttcgttgctgccgccgccgccactagctaggtttcccctctcacctttctcagcttctcctcaccaccccaacatagtttcttatttttaagtgaaaaaaaccatcatcacgtcacccttggtaagacctatatatccttcactattcttccgacaaatgtttcagtgattcacactaatccacccctgcaactaaacaaaaaacatcctaaatatctgtcttattgttctttatatttttagtaaagaaaaaaaaagaagagaaaaccctattcactctgaaagtggcgaagatgagtttgggaaccgcggaggaggaatcgggttccgaaatcaacatcccggcggaaatccactggcacatgctggacaagtcaa

SEQ ID NO: 5901 - DNA, 811 bp, Glycine max
gaccttgactccgctcagccaacggctgagaaaaatagcctcgtccttcacgattccagcgatttccgctctccaacgggactgcgcagggtgaagaatcgagaggccagccgccggtgaagaatcgcgcgattcgcctggaaatcgcgattcacagcacgattcatccccgatacagagattcaaccacgattcaggaacgaaaaacgagacaacctccgtttcgtatcggtagcagctggaatcgtatcgaatcgcgagatacgcatcctgaatcattgttggaagtctctgggtgatggctggttcagaacctgtaagggcagagggagagactatggctgtggatgctgccccaaggaagccccggattctacttgctgctagtgggagtgttgctgctgtcaaatttgcaaatctttgtcactgtttctctgaatgggcagatgtaagagcagtttccacaagtgcatctttgcatttcattgatagagcatcaatgcccaaggatgtaattctatacacggatgacgatgaatggtctagttggaagaaattaggtgatagcgtgcttcacattgagcttcgcaaatgggctgatatcatggtcatcgctccattatcagcaaacacccttggcaagattgctggagggttgtgtgacaatctactgacatgcatcgttcgagcctgggactacagcaagccattctttgttgcaccagccatgaacacttttatgtggaacaatcctttcacagagcggcatctcatctccattgatgagcttggcatttctctcatcccggct

SEQ ID NO: 5902 - DNA, 1095 bp, Glycine max
tcgcccacgcgtccgcccacgcgtccgcccacgcgtccgaatttgtccaagtcccgcaagcccaaatatcagttatctcctccacagtaaccctagatctgaaacttaccttgactccgctctgccacggctgagaaaatagcgacgcggaaacacgctcgtcttcacgatcctgcgatccagcgcggcgtgtccagcgattccgctctccgacgagtctgcgcaggctcaagaatcgcgaggccagccgccggtgaagaatcgcgcgattcgtctggaaatcgcgattcaagcacgattcatccccgatacagagattcaaccacgattcaggaacaaaaacgagacaacctccgattcgtatcggtagcagctggaatcgtatcgaatcgtgcgatacgtatcggtagaagctggtatcgtatcgaatcgtgcgatacgtatcgtgaatcgtacgatactaactaccgtggtctgaaccattttaatttgtggatcaaataacaaggctcctcggttagaattcctgatcggtcatggctgattttcagacctctacccacagagccaagtggattttctctcctcaacagctggttgagaaatatagagctgccaatcagagagccaaacaaattctagagaagtgtgagcaacactaatggaagtagatgttgatggatcgttgtcatatcctgaaccccaaatgactgcaaaggatagtgctgaaaagcattctcgaacaaaacctcttactattgaagaagaacaatgtataaaggtattttatgaaaacaagctacaagaagtatgtaacaatttccgcttccctcataagatccaggcaacagcccttatctattttaaaagattctatctgcaatggtcagtgatggaacatcaaccaaaacacattatgttgacctgcgtatatgctgcttgtaaaatagaagaaaatcatgtgtcagcggaggagcttggtaaggggatatcgcaggatcatcaaatgattctcaataatgagatgatagtttatcagagtttggactttgatcttattgtgtatgcaccatatcgctcagttgaaggttttat

SEQ ID NO: 5903 - DNA, 548 bp, Glycine max
cccacgcgtccgcccacgcgtccgcaaaacatcagtcatctccttcacaggaaccctaaatctgaaactaccttgactccgctcagccacggctgagaaaatagctcgtcttcacgatccagcgattccgctctccaacgggactgcgcagggtgaagaatcgagaggccagccgccggtgaagaatcgcgcgattcgtctggaaatcgcgattccagcacgattcatgcccgatacagagatttaaccacgattcaggaacaaaaacgagacaacctccgattcgtattggtagcatctggaatcgtatcgaatcgtgcgatacgtatcctgaatcgtacgatactaactaccatgctagagagccttattgcataacgaagtttgtttccttaaaggaatcctttttttcctcctactttgagttgcaattgcattttatgggttttggtttttctgtgagtatccctgttgatcaagaatgcaattctttggggtgtctgagattagtccttcacctcctgctccgacagcatcaggaaacaatg

SEQ ID NO: 5904 - DNA, 557 bp, Glycine max
  unsure (1)..(557): unsure at all n locations
gacggctgagaaaatagcgacgcggatacacactcgtcttcacgatccagcgattctactctccgatgagtctttgcagggtgaagaatcgcgagtccagccgccggtgaagaatcacgcgattcgtctggaaatcgcgattcatccctgatacagagattcaagcacgattcaggaacaaaaacgagacaacctccgattcgtatcggtagcagctggaatcgtatcgaatcctgtgatacgtatcgtgaattgtacaatactaactatcatgatttaggctagtgctggagcttatttgactaggttatataatgttgttaaatagctgccaagtgctactgcattgccgaatttcttgaattcgcaatcaccacttcgtcaactattgcggtcgctatgggtgtcgtgggtacagaaagcgtcctgcatcctcttttcatctttggcgagtctccagccaattgaacttttgagctaatatctcaatatttacctattntattttcatttgcatacaacttaattcgttgtacatatataattgatatatatca

SEQ ID NO: 5905 - DNA, 472 bp, Glycine max
  unsure (1)..(472): unsure at all n locations
aaactaccttcactccgctctgccacggctgagaaaatagcgacgcggaagcacgctcgtcttcacgatccggcgcggcgtgtcctgcgattccgctctccgacgagtcggcgcagggtaaagaatcgcgcgattcgtctggaaatcgagattctagcacgattcatcccagatatagagattcaaccacgattctggaacaaaaacgaaacaacctccgattcgtatcggtagcagctggaatcgtatcgaatcgtgcgatacgtatcgtgaatcgtacgatactaactaccgtgctaccgggtgctttgctcttcaattctgcagaaattcagattggtcaattaaattaagggctaatgggtttgttggaacataggcttggcttgagttagatttttgtcacaacttgaacgataagttcttgttgattntcattctttactttcttcattnttttcatccttacctt

SEQ ID NO: 5906 - DNA, 758 bp, Glycine max
gggctgagaaaatagcgactcagaaacacgctcgtcttcacgatcctgcgattccgctctccaacgagtctgcgcaggatgaaaaatcgggaggctagccgtcggtgaagaatcgcgcgattcgccaggaaatcgcgattcaagcacgattcatccccgatacagagattcaaccacaattcaggaaaacaaaaaacgagacaaactccgtttcgtataccaatttgaagctggttacatgagtgcagtggaaacttctgcttgaatcatggaaatttaagagcactgtggaagtctctaggcgatggccggttcagaacctgttagggcagagggagagactatggctgtggatgctgccccaaggaagccccggattctacttgctgcgagtgggagtgttgctgctgtcaaatttgcaaatctttgtcactgtttctcttacatctagtctgataatcggtggcatgttttatttaggacaagatttacatgcagttgcttaggtgcttttggtgctgtgctctaattagtaatgaagtttctcctttgtaatttgcaaaataatggtttgtattaatacttatctcagcatagtctaaaactccaagtataattggtgaacaccaccaaaaacacctgaaatactgcatctagatttttttcctgatatttattgtagggaatgtgctgcagactcctttatgcctcgtagagtgatgcttgtatactttcattagtcaccggactagttggtg

SEQ ID NO: 5907 - DNA, 792 bp, Glycine max
  unsure (1)..(792): unsure at all n locations
cccacgcgtncgccggctgagaaaatagcgactcagaaacacgctcgtcttcacgatcctgcgattccgctctccaacgagtctgcgcaggatgaaaaatcgggaggctagccgtcggtgaagaatcgcgcgattcgccaggaaatcgcgattcaagcacgattcatccccgatacagagattcaaccacaattcaggaaaagagatgaacgagacaaactccgtttcgtatcaatagaagctggaatcgtatcgaatcgcgagatacggatcgtgaatcaagtctctgggtgatggctggttcagaacctgtaagtgcagaggccagagctgcagtctggctcgccgaagctctcaaagaatcagaatcaaaacttcaagtgagaatcatagacgaagcttgttttcatcttaatcgtaaccaaagcttcgcgaatatgccttcggagaagaatttaagaggggtgcttaggtcagaagtagataggtccctgtctaaagatagcatcatcatagtagattctttgaataacatcaagggttaccgatacgagctatggtgcttggctcgagcagcagggatcagatattgtgtggttttctgtgatgttgaagaaaccatttgcaggaaatggaatgaagaacgcagggagaaaggagaagccaattatgatgattcgatatttgaagatttggcaagaaggtttgagaaaccagatagaagaaaccggtgggattctccattgtttgaattatggccacacagagaagcaacagagaaatcttcccctg

SEQ ID NO: 5908 - DNA, 506 bp, Glycine max
ctgcgatccagcgcggtgtggtcagtgagtccgctctacgacaagtctagccacgccggtgaagaatcgtgcgattcgtctggaaatcgcgattcaagcacgattcaggaacaaaaacgagacaacctcggattcgtatcgaatcgtgcgatacgtatcgtgaatcgaagcaaatgaagattgtttcagttgcagttaggtcaatcagtgctaatttgccaaaccagtttcatcagagccacttgctcagaagtctttccacttggaaatttacagataatgcaactggtaatcggcagtttagcaattcagaatctcctgaggagtctgagcagtttggtggaaatcgtgggaaatatgcccaacttgattccatatttgaaaagtttaatcaacagggaatggcaagacaaagacctggttcagtaaatggtgctagttctgagaggatgcacgatctagaagaaacttatgacacattaactgatggaatggatggaaaactg

SEQ ID NO: 5909 - DNA, 829 bp, Glycine max
caggaatcctcaatctgaaactagcttgacgccgctctgccacggctgagaaaatagcgacgcggaaacacgctcgtcttcacgatccagcgattccgctctccgacgagtctgcgtaaggtgaagaatcacgaggccagccgccggtgaagaatcgcgcgattcgtctggaaatcgcgattcaagctcgattcatctccgttatagagattcaaccacgattcaggaacaaaaacaagacaacttccgattcgtttcagtagcagctagaatcgtatcgaatcgtgcgacacgtatcgtgaaccattgaagatgataattcggcccgaccgcggaattcattggttgaagttacccagtcgggtcttcttatggaaactataatcgacattactcctcgtgatcctattccaacaccttccgctggacctcttgaccaagaatgttctaaagaagcactcattgcgtgtgatagagaaaagattaagggtatagaaggagtgagtctggataaattggttgcgacattcacccgtcttgggcaagatgtacagacacttggcattgttaatagctattcgttggctgaacgagttgcttcaattctcaaagaagcgaaaccactgtgctatacagatgaaagccatggctgaagatgttcaacctttgttcactgaagtccgtgatagtggcctgatgaaggaagttgagaatttaacccgaagccttacacaagcaactgaggatttgagaaggggacactcatccataatgacccatgtgtacactgtactgctccaaaagtccatatatactctcatttttaccc

SEQ ID NO: 5910 - DNA, 378 bp, Glycine max
gtacggttgagaaaatagcgacgcagaaacacgctcggctacacgatcctgcgatccaacgcggtgtgtccagtgattccgctctccgtcgagtctgctcatggtgaagaatcacgaggccatccgccggtgaagaatcacgaggccatccgccggtgaagaatcgcgcgattcgtctggaaatcgcgattcaaacacgattcatccccgatgcagagattcaaccacgattcaggaacaaaaaccagacaagctccgattcatattggtagctgctggaatcgtatacaatcgctgcgatgcgtatggtgaatcgtacgatactaactaccatggaaggggctactctacataatcatgcagattcttaatttgcat

SEQ ID NO: 5911 - DNA, 349 bp, Glycine max
cggacgcgtgggtggagtccgttctgccacggctgagaaaatagcgacgcggaaacacgctcgtcttcacgatcctgcgatccagcgcgacgtgtccagcgattcctctctctaacgagtctacggagggcgaagaatcgcgaggctagccgccggtgaagagtcgcccgattcaagcccgattcatccccgatgcagagattcaaccacgattcaggaacaaaaacgagacaacctccgattcgtatcggtagcagctgggatcttatcgaatcgtgagataagtatggtgaatcggacgatactaactaccatgcttgtaactattggtaccatggtgtcaacctaa

SEQ ID NO: 5912 - DNA, 344 bp, Glycine max
  unsure (1)..(344): unsure at all n locations
ctgcgatccagcgcggcgtgtccagtgattccgctctacgacaagtctgcgcagggtgaagaatcgcgcgattcgtctgaaaatcgcgattcatgcacgattcatccccgatacagagattcaaccacggtccaggaacaaaagcgagacaacctccgattggtatcggtagcagctggaatcgtatccaatcgtgcgatacgtatcgctgactcttattattggttggcaatgcaagatccaaggaagaagaaaaacttaacccanaaggcatctttatttcagttgcaagcgaatggtgtcaaggcagatggacagacatctctgtctttaacatcagacag

SEQ ID NO: 5913 - DNA, 477 bp, Glycine max
gaacagaagagatttaggcagcccgaaccgacgatgttgtttttaactgacagcagcagtaagcgaacactaacactaacgtgaaacgcgttgcgttgtcggaaaatcaccctcacctgatcactgtggaagtctctagtcatccctgttgatcaagaatgcaattctttggggggtctgagattagtccttcacctcctgctccgacagcttcaggacacaatggccctatgatgtatgtgttcaatcggaatggtgtgtgcctgctctatagggagtggaatcgtcccttgcggacattggatgcccagcaagaccaaaagttaatgtttggtctacttttctctctgaagtcattaactgccaagatggaccccactagtgctgttgagaaaggaaaccttggtatgccacagttacctggccaaggttgttcatttcacagtttccgcactaatacgtacaaacttagtttca

SEQ ID NO: 5914 - DNA, 303 bp, Glycine max
cttactcttgtactgtcttagatctcgtttctctcttcgactcgtccacactttgtcgtcgttcccaatcgcaggccatatcgccgggggcattcccgccgtctcatccttgcctcttaccgaacactgaaacggggaattactcaggagagcttcgcaatcccactaacagctgctacccgcggttttggttttttcgctagtatcaatctattcttcatccctgttgatcaagaatgcaattctttggggggtctgagattagtccttcacctcctgctccgacagcttcaggaaacaatg

SEQ ID NO: 5915 - DNA, 428 bp, Glycine max
tggcaagcagaaaggataatgaatgaaaaagtagacaagttagtcaagttctcatgccttgaagccgctgaaatttttcattgtgcatctgctgctactctggaggtgtaagtcattctgttctaatcccaaaataaaagtcacttctgctatctcttcctgaccaagaatttggtccaagtaggtttaaatcttacataatttaagcataaacttccccttttgggggaaaaacttgaaatttcagctggaaaatcaccaaattgaccagtgtggctatcgtgtaggtttgtaaactctttcatagttgttagaatgcatgattcgatacaattcagcaagctaacaatttgtatcatgcaatgaattgtcgatgactttgatctgtacaatacttgcattaattgatgatatcaatgcaatttcat

SEQ ID NO: 5916 - DNA, 333 bp, Glycine max
cttctttctttgtgccattgatgtacccccaggtgcaggtgcaggagcaacaggttttctctcctccgcatcaatcgaaacgccctctctttgacacgattggtcacaattttcaggctccaaggttgccccttttggattcagggcaagaggtgtttggtaggaggcagcaaacacagctgccattgtttcctcaccatatgcaacaacaacaacaacaacaacaatcaatgggtttgccatctgctaaacagcagaaggtgagttccaccggagacgatgcaagccaccagtttcaacaggctatatttgatcagttgtacaaaactgctg

SEQ ID NO: 5917 - DNA, 568 bp, Glycine max
gaataattgtccaggtgtaaggcggaaccttgtacacggcaaggaccccatctccgagtccagtgttaaactcaacttgaaccctcgttgtcgttgtagagagcaaaacactgcaaaccccttcggcgttttgtccttacgttgttattaagaagcgtaacgcattcaccacgatggtgaccaaagcgatggaggtggtgaaggatctggacgtgaagcggtacatgggtcggtggtacgagattgcgtgcttcccgtcgaggtttcaacccagtgacggcaccaacaccagagccacctacactctccgagatgacggcaccatcaacgttcttaacgagacttggagtggcggcaaaagaaggtttcattgagggcactgcttataaggctgatcccaacagcgacgaggccaagttgaaggtcaagttctgggtgcctccctttttacccatcattcccgttactggggattactggcttttgtacattgaccaggattatcactatgctgtcattggccaacctttcaggaattatctttggatattgtccaggaagaaccata

SEQ ID NO: 5918 - DNA, 1722 bp, Glycine max
ctcaacgacttcaagaatctcctcgtctcagagctcgaacaaattcggaagctaaggaatcaaatcgagtccagcgagtttcaacccgggcagagcctcaacggccatccgaagaagccgtcgagcaagaaagtttctggcaacaagcggccctggccgtcaaatgccgcgaaggatttgagaccgtcccattccgaggctgggaacttgatgaagtgttgctcccaggttttgcagaagctgatgaaacacaaacatgggtgggtcttcaacgcccccgtccatatagtcggattgaaactccacgactactgctatataatcaagcagcccatggatctgggtactgtgaagtcgaatctctctaagaacgtgtacgccacgcctgcggattttgcctctgatgtgagattaactttcaacaatgcactggcttataaccctaagggtcacgatgtgtacaccatggcggagcagcttctggcgaggtttgaggaactatatcggccggtgcatgagaaattcgaaggtagcataggtcatgatcgcgaatctgaggaggaattgcaagccagttcgtggagccaagttgagccagagagggtgaagaaaaaggagaatccgatccctcctgcaaaattgcataaagaacctcccccgcagcaccctgcaagttcttcaaatcctccattggtgcagtctccggtgcgcacaccatccccaatgcgagcccctcctgtgaagcctttgaagcaaccaaagccgaaggctaaggaccccaacaagagggatatgagtcttgaggagaaacacaagttggggttagggttgcagagtttgccgccagaaaaaatggaacaggtggtgcagatcataaggaggaggaatggacatttgaagcaggatggggatgagatcgagctagacattgaggctgttgacacagagacactttgggaacttgatcgattggtgactaattacaagaagatggttagcaagattaagaggcaggcattgatgggcaacattgacaacaacaacaacgatgtgcagtctaacaaaggcaacggggaattgccttctagcgagaaggttgatggggggccagttgaagtgaagaagccaaagaaagtagaagcaggggacgaggatattgacattggggatgagatgccaacgagtatgttcccccctgtggagattgagaaagataaagatgttgttggaggccatgcaagtagtagttctagtagctctggcagttcaagcagtgattcgtcttcgtcaagcgattcggattcggggagttcctcagggagtgattctgaagcagacaacgggcactcgtagtagtcagtgggtttttggaactaatggtcatgtagatgaagaaaatgcttttgcttcattggcttcctttgagggcgtggctcgaatacatggacgagggattgtgaccgttgtttgctggttcgttttgggagtagcggtttgcattgtggcgctgtccactccaggatttgtggtgtgacatatttgtacaaacgatttcgggaaccgaagtaatcatcaaaacaatttgtaggccagaaagtagtagacttaaatgtggtgaaaattctaggatagaatcgttaaaaattaggaatagaactgagagttagtgtttttgagtttaccttgtacccattacaacagtaaatagatggaagatccttt

SEQ ID NO: 5919 - DNA, 493 bp, Glycine max
cgtcaagcggtatttacctgcccctaacagtctttggtttgtagttgaagctatttttctatctagaaataacctaagtttgatcgctgttgcagattcggattcggggagttcctcagggagtgattctgaagcagacaacgggcactcgtagtagtcagtgggtttttggaactaatggtcatgtagatgaagaaaatgcttttgcttcattggcttcctttgagggcgtggctcgaatacatggacgaggtatgctcatttcatttgatgtattatttttttacgctgtgaatattgtcgcagatggatatgataggctaaatttgtgattacttttcatttcggggattgtgaccgttgtttgttggttcgttttgggagtagcggtttgcattgtggcgctgtccactccaggatttgtgtgtgacatatttgtacaaacaatttcgggaaccgaagtaatcatcaaaacaatttgtaggccagaaag

SEQ ID NO: 5920 - DNA, 517 bp, Glycine max
cccacgcgtccgcggacgcgtgggtgcagttcaagtagtgattcctcatcgtcaagtgattgggattcggggagttcctcaaggagtgattctgaagcagacaacgggctttcgtagtagccagtgagtttttggaactaatggtatcatgtgggtggggtaggcgcggatgaagaaaatgtttgctttcattggattccttagagggcgttggtcgaatacatggagaagagagattgtgaccgttgtttgttggttcgttttgggagtagaggcggaccacctgctccaggatttgtggtgtgacatagatatagttgtacaaattatttcgggaaccgaagaaaacaatttgtaggccagaaagtagtggacttaaatgttgtgaaaattctaagatagaatcgctaaagattaggaatagaaccgggagaattagtgttttttgagtttaccttgtacacattactacagtaaatagatggaacggcctccttcgaaaaaaaaaaataaagac

SEQ ID NO: 5921 - DNA, 504 bp, Glycine max
aggatacctaggtctcctcgtcgatgggtaacattgcccccattcctgtagaagccaaagcaactgatgaagtcaccactctgctcacaggattctgagatttaaattgtagcataatggaattttcgtgatctctttttatttgatatggatttgtcttgcaatgcttttgactatgaagttgattgctaaatcattgaatcagtgttttgcagaatatctgtaatcatttcaagattgtagttctaaggattcttgtttcttcaaaatctttaatgttgctgtttaatttttgttggctacttcctttactgtctccaatgtctcattaatcattttagaaaattaaagttcaattttgtagctcatacactatgcaatgatgaggcttcaagagtcaaaatcactgatcttcctccacatttaggaacaaattttcgatgctcatgtagtacatacctctttggtagtttttatccttatttagtagttttctcatttccc

SEQ ID NO: 5922 - DNA, 933 bp, Glycine max
acgcgtaagtaagctcggaattcggctcgggtctcaacagggggacactagatcttactcgcaatgggtggggtcatcgggttggtctgaaaggtgagggcaagaaagttttcagcgaggaaggatcaacaagtgtaaagtggaaaccacttggtgcagttccgagggctctgagctggtacaggacaagatttggcaccccagagggaacaggccctgttgccataaggatgagtggtatggcgaagggaatggtgtgggtcaacggtaacaacattggtcgctactggatgagttacctctctccacttggaaagcctactcaatcagagtaccacatcccaagatccttcctgaacccacaagacaatttgcttgtgatttttgaagaggaggccagagttccagcacaggttgagatcctaaatgtgaacagagacacaatctgcagcgtagttggagagagggaccctgcgaacgtgaattcatgggtgtctaggaggggcaatttccatcctgtagtgaaatcagttggagcagcagcttcgatggcgtgtgcaactgggaaaaggatagtggcagtggagttcgcaagctttggaaaccccagtggttattgcggagactttgcaatgggaagctgcaatgctgctgccagcaagcaaatcgtggagcgagaatgcttagggcaagaagcttgcacgcttgcattggaccgtgcggtgttcaacaacaatggcgtggatgcttgcccagatttggtgaagcaacttgcagtccaagtgaggtgtgcttaggtcttgtttcgtggtttaacttggccaagtagaagagtccaggagctcaacatgtcattggatttttgtaccatcatacttcaattcaatgcctacatccttttaaatcaatatatcaaaattacagcgtttattt

SEQ ID NO: 5923 - DNA, 1259 bp, Glycine max
ctccctcgccgatttccataatagcagagaaccttcagaaaccctaatttctcaaaatcttcagaggacacacagcacaaccaacacctccacagcctctcctacctcccggagccatggccgccgccgactcctccgccgctccatcgcaccagttgtcgcagagggagacggacatccagatgatgctcgccgccgacgttcacctcggcaccaaaaactgcgactttcagatggaacgctacgtcttcaagcgcagaaccgatggtatttacataattaaccttggcaagacatgggagaagctccagctcgctgctaggattattgttgccattgagaacccacaggatatcattgttcagtctgccaggccttatggccagagggcagttcttaagtttgctcaatacactggtgctcatgcaattgccggaaggcacactcccggaacattcactaatcagatgcagcaatcctacaatgagcctcgtcttctgattctaactgatccaagaacagatcatcagcctatcaaggagggtgctcttggaaatattccaactattgctttttgcgacactgattctccaatgcggtatgttgatgttgggattcctgccaataataaggggaagcatagcattggttgtctcttctggctattagctaggatggtactgcagatgcggggtactattcgtccaggtcacaagtgggatgtaatggtggacttattcttctatagagaacctgaagaggccaagcaacaagaggaagatgaagcaccacctgcccaagattatgccatttcagacttcaatgctgctggcattggcagcttccctgctactgatggccaatggcctgctgcagtcgaacaaccctggactgaagaagctccacaaccaatctcagcagctcctactaactggacaccagaagcagctgctgcaggagattggggtgaggctgttccagctcctgctccagctccagttccacaagctggtgcgcctccagctcaagcttttcctcctgctactggctgggactagcttttgacaagagattttattccatggtgtcaaaaccatagtttttcttcccctcggctcagaaacttcccttccaagattttatttgttagaaaagaaacatcatttacttgatattgaatctcagtaaaattttgtttgttgacatattgaaggaaacttcatcgtttaaaatttaaatgtagtaatttaattgtttca

SEQ ID NO: 5924 - DNA, 708 bp, Glycine max
accaataaagatgtcgtgctaaagcacagtgagattcagggagaacactgactgtatttatatattaaacaatggaagcgccatcactccgcgcgatcagagaaagtgaaagtgtctgagagtgtgtgtgtgacttatggagtccaattcagagttcgacgtgattatcatcggagctggcgtcatgggcagctccaccgcctaccacgccaccaaacgcggccttaaaacccttctcctggaacagttcgacttcctccaccactgtggctcctcccacggcgaatcccgcaccatccgcctcacctatccccaccactactactaccctttagtcatggactcttaccgcctctggcaagaggcgcaggcccaagtcggctaccagatctacttcaaggcccatcacatggacatggcccatcacaacgagcccgccatgcgcgccctcatcgactactgccgcaacctccaaatccccttcaaactcctcggccgccaagagctcgccgacaaattctccggccgcatcgacatcccggagggttgggtgggcctctccaacgagcacggaggcgtcatcaagcccacaaaagcagtggccatgttccaaaccctagcctacaaaaacggcgccgtcttgaaggacaacaccaaggtcatcgacatcaagaaagagggcggcacaggtggggtcgaggttttcac

SEQ ID NO: 5925 - DNA, 553 bp, Glycine max
catctcaccactctcagcccccaaacttcgtgcttttctctttttcccatcgatctcgtttctcccaaattcgagtcttccttcgtttccaagtcagcgttaagggtttagtttggcgcgtgcgatgaagatcgaggaattggacgatggagagtgtagtagggaccatgaagagaagtttgagaggcagattgtgagcgttgatgccaagagagcgttggttggagcaggtgctcggatcctgttctatcccacactcttgtataatgtgcttcgtaacaagattgaagctgagttcaggtggtgggatcaaattgacgagtttttgttactgggcgctgttccgttccccaaagacgttcctcacttgaagaagcttggtgtgggtggtgtgattactctcaatgagccctacgaaaccttggtgccatcgtcgttgtatcatgctcacgggattgatcatttggtgattcccaccagggattatctctttgccccctcattcgtggatattaaccgggctgtgcagttcattcatcagaatgcaacttgc

SEQ ID NO: 5926 - DNA, 1820 bp, Glycine max
atggaaactcttatccagagacaaagactatttctatttccactcaacatgggactccagttggaacacaggataaagatactgttgtggaaggctttggtttagttgaagtatatgatcaatggattgcacctccagtatctggaggaagtccaaaagcccgatatgagcatggagctgcagtcgtgcaagataaactgtacatatatggtggaaatcacaatggtcgataccttaatgatcttcatgttttggatttgagaagttggacttggtcaaagattgaagctaagactggagttgagtccccaacaacttcaatcccttgtgctggccattcattgattccatggggaaataaacttttgtcaattgcagggcatacaaaagatccttctgaaagtatccaagtgaaagtgtttgatcttcaaatggctacatggtcaactccaaagatttttgggaaagctccggtatcacgtggaggccaatcagtgaaccttgttgggaaaaccttagtaatttttggtgggcaagatgcaaaaaggactctcttgaatgatcttcatattcttgacttggaaaccatgacatgggacgaaattgatgctgttggggtgccgccttctccaaggtccgatcatactgctgctgtacatgtggaccgatacttacttatctttggtgggggttcgcatgcaacatgctacaatgatttacatgttcttgatttgcaaactatggaatggtctcgccccacgcagctaggagaaataccatcaccacgtgctggacatgctggtgtgacagtaggggagaactggttcattgttggtggtggtgacaataagagtggggtctctgagacggttgtactgaatatgtctacactggcttggtcagtggtaacttctgttcaaggacgagttcctgttgccagtgagggattgagtttggttgtaagctcctatgatggtgaagatgtacttgtatcttttggagggtacaatggacgttacaacaatgaggtctatgttcttaaaccaagccacaaatcaaccttgcaatccaaaataattgaaaattccataccagacagtgtttcagctatcccaaatgtcacaaatgtggagtctgaatttgaagcaggccatgattctaatccaccaaaatccataggtgatattgtatcagtcttgaaggctgagaaagaagagttggagtcatcactgagcaaggagaaacagcatgctcttcaactaaagcaagatctggtggaagctgagtctcgtaactctgacctttacaaggagctccaatcagttcgtggtcagcttgcatctgagcaatcgaggtgtttcaaactcgaggtggaggttgctgaattaggtcagaagctccaaacgattgggacattacagaaggagctggagcttctccagcggcagaaggctgcatcagagcaagctgccttaaacgcaaaacagaggcagagttctggtggcgtgtggggttggcttgccggtactcctccccctagccggaatgcagatgatgcgtgaacctcttaactgaataccagtgctacattacttttggtttcattcagccaattttatttccaatatttactgtgtattaattcagttcttttttattgatgtaaataagatttagcttctatttggccaaaggattttccacaccggagaatgaggatcatggtatggtatagtgcgtgttactccatttttgctgatgattaaagtgagatacattattgaataaattattgtttttttttttaaaagaaagaatgc

SEQ ID NO: 5927 - DNA, 734 bp, Glycine max
agcaaaggctcctactagtactactacagtacacatataataataaataagccttcgattttcgatttgggggagagaacctaagagatataaataagccataataaggattcgattcggaaaagaagaaaagacattcaacaaacaacgcaatgggtattccgtcggaactgagggacatgttgttgcccaacaaaaagggcgtcctcgttgcctctcccgcagaggacaggaagactttgaggtccaagcaatgcactagggaaggtgtgcgagctggattcaaggctgcttccattgctggtgttgccagtgctgtgcctacattggctgcagttcgtatgattccatgggcaaaggcaaacctcaattatactgctcaggcacttatcatatctgctgcatccatcgcctcatacttcatcactgctgataaaactatcttggagtgtgcaaggaaaaatgccaagcttgaagatgctttgagacacaatcaacaatagttgtcttagaaactgaaagaagtacccatcattgttcttggtgcatgatggtgctactcgttgtaatacaatcaataagcctattgcaaagtgttaatttcttggtctgtatttcaaggtgcatattcttaaacaatatgtttgttttgtatgagtctgacagagtcgtttggaattgccactccctatggcttcagaagttgaaaatttaagggcccgtttggagtggtt

SEQ ID NO: 5928 - DNA, 600 bp, Glycine max
cgcgtacgtaaactaggaattcgggtcaaggatcgatcatggcttatatatcctgtctatcctctttctccctctccaatttctctgcacctcttcccatttccatttgttcttcatcttccaccttcctaacttcccaaataccatgcaaacccaccaaacgtagcaaaccaaaacgccaccacgtttcgaaagtgacatgcaacagtaaccaaaacaccccaacaccaaacccagaagaagaaagaccatcatacaacattctaggaaaatatagaagggatgttctccttggcattgggggcctttacggtgcatctgctcttagcaacaccaaccctttagccatggctgcagctcctattcttgagcctgacctagaacattgttgtataactgatgatgtaccacctaaaggggtcatcgaggcacaagtctattgttgcccaccaaaatcttcttcccctcctatagatttcaagttgcctaaaggaacaccccttagggttagaccacctgctcaattcgtcaccgatgagtacctagaaaagtataagttagcccttaagcgcatgagagagcttcctctgatgatcctcg

SEQ ID NO: 5929 - DNA, 343 bp, Glycine max
acataaaagtttcttatggcatagaaaacatgtagtcctcctattcgtacacagtcaagtttaactcaacaaacaaagaaactcaaagatgagagtataggaaatacaaatacaatactagagtcattctgtacaaaggtttgggttcatcatgtaataagacaatacacatcaaaacacttcctcgcccgtctgagtattactttccaagttaataaaactattttgtataggtttccacattgggatatatacagcaaaataattgtataaatattatgtatcccatcttgtatattacgtatttacgctagcaatgtcattgaatgaatgttccgaagac

SEQ ID NO: 5930 - DNA, 321 bp, Glycine max
cgcagagagtattgtgaacactacaattagcagtgatcattcgcatcatgccgtacttctcctgttcaactttggaacccatttagcattgatgtacacacttcgccagactgaaattgatcatttaagagcagtacacatcaaaacacttcctcgcccgtctgagtattactttccaagttaataaaactattttgtataggtttccacattgggatatatacagcaaaataattgtataaatattatgtatcccatcttgtatattacgtatttacgctagcaatgtcattgaatgaatgttccgaagacaattgcttt

SEQ ID NO: 5931 - DNA, 836 bp, Glycine max
gtacgtaaactcagaattcgcccaaattcttgtaggaggcgtgaaggtgacggaagagtttgttggggttgaacacctgaacacaactttaaccctgcttgtcgaatctgtgcattgcttgaacgattgaaccctaatggctgctctcttgaggaggtttgcgagcgccactccgatcccatccaattcctctcacaccaatctccgccttcccttcaccgccatcgccgccatttccggcggagtctccttccttttctaccattcctctcccaacttcgctcattcacaagaagcagaacaagtggaaagtaaaaacatcgcactcgttccggataaatgggtcgagtttaagttgcaggatactgctagggttagtcacaatacccagctattcaggttttcatttgatcccactcagaaattgggtctggatattgcttcttgcatccttacaagggctccattgggacaagatgctgaaggaaaaccaaaatttgtcatacgcccgtacactcctatttcagatccacaatcaaagggctattttgatttgcttatcaaggtatatcctgaagggaaaatgagccagcattttgcaagcttaaaaccgggtgatgttgttgaagtgaaaggccccattgaaaagctcagatatactcctaatatgaagaagcatattggcatgattgctggaggcacaggaattactcctatgcttcaggtaattgaaactatattgaagaatcctgatgacaaaactcagatatctttactttatgctaatgtctccccggatgacatactgcttaaacaaaagcttgacattctagcaa

SEQ ID NO: 5932 - DNA, 388 bp, Glycine max
gatgtcttggacaaagcatcttgtgaatgtgacagagtgttggggttgaacacctgaacagaacttgaaccctgcctctgcgctcttgtggaatctgtgcagtgcttgaaccctaataatggctgctttcttgagaaggtttgcgagggccactccgatcctattcgctgcccaatccaattcctctcacaccaatctccgccttcccttcactgccatcgccgccatttccggcggagtctccttcctttactaccattcctctcccaacttcgctcattcacaagaagcagaacaagtggaaagtaaaaacatcgcactcgttccggataaatgggtcgagtttaagttgcaggacactgccagggttagtcacaatacccagcta

SEQ ID NO: 5933 - DNA, 603 bp, Glycine max
aacttattttcactttctttccttacccacctacgtttccttcagatccaaccaattccatcgtcaccaggaacacaccccttttgcctattcagctttacctctcactcttcaactgtgtctctgataaggttcaaccctttttttgctctctatgccattccaacagattttgatgattctgcatgctctatgtagcttactctgcagttgggaagggcataccagaacaagagtgtaattgcagtgcacggatttattaatagtcttgtagatctgttggctttttcaggatgggcaagtgcaagggttgtggaaagttaggaagaatgaggccaagtcatatgagtgcttatgaattttctctgatgctggctcctgttgtttctgtttgggattgcatagttcgcaaaatgaggtactcctacagacctgagtgggtgtagtggttcggaacatagtagtattagtcttgatacttcaacaaataatatatttagcattattacaattagggaaagagtggaaaagaattacagaaaagaaaaatgtatacagctctaaagaaattcacttgaaggaagtctcaaagacgtcacttta

SEQ ID NO: 5934 - DNA, 315 bp, Glycine max
ctttctttccttacccacctacgtttccttcagatgcgaccaattccatcgtcaccaggaacaccccttttgcctattcagctttatctcactcttcaactgtgtctctgataaggttcagcccttcctttgctctctatgccattcccgcaggatgggcaagtgcaagggttgtggaaagttaggaagaatgaggccaagtcatatgagcgcgtatgaattttctctgatgctggctcctgttgtttctgtttgggattgcatagttcgcaaaatgaggtactcctacagacactgagtgggcgtagtggttca

SEQ ID NO: 5935 - DNA, 358 bp, Glycine max
cacaaaacttcttttcactttctttccttaccctacgtttccttcagatccaaccaattccatcgtcaccaggaacacaccccttttgcctattcagctttacctctcactcttcaactgtgtctctgataaggttcaaccctttttttgctctctatgccattccaacagcttactctgcagttgggaagggcataccagaacaagagtgtaattgcagtgcacggatttattaatagtcttgtagatctgttggctttttcaggatgggcaagtgcaagggttgtggaaagttaggaacaatgaggccatgtcatatgagtgcttatgaaatttctctgatgctggctcctgttgt

SEQ ID NO: 5936 - DNA, 299 bp, Glycine max
ctttccttacccacctacgtttccttcagatccaaccaatcccctcggcaccaggaacacaccccttgtgcctattcccctttacctctcactcttcaactgtgtctctgataacgttcaacccttgtgccagctctctatgccattcctgcagatctgctggcttggtcaggttgggctagtgcaaggggtgtggaaagttaggaagaatgaggccaagtcatatgagtgcttatgaattttctctgatgctggctcctgttgtttctgtttgggattgcatagttcgcaaaatgagg

SEQ ID NO: 5937 - DNA, 1109 bp, Glycine max
gttaaaaatgagttgccaagtactttcaaggcctaccgctaccaacagcaccgttggtcttgtggtccagccaatctttttaggaaaatggtcatggagatcataattaacaagaaagtgtcattgtggaagaagatacatgtgatttacagcttcttctttgttcggaaggtcgtagcacacataaacacgtttgtgttttattgcattgtattacctgcaacagttttggtgcctgaggttgtggtcccaaagtggggagctgtctatatcccttccatcatcactattctaaatgcagttggaactccaaggtcactccatttgatggtcttctggattctctttgagaatgtcatgtctctgcatcgaacaaaggcaacaattattggtctacttgaggccagtcgagtgaacgaatgggttgtcactgaaaaacttggtgatgctctcaaggctaaagcaggaggtaaagcacctaaaaagcctcgattcaggattggagacaggattcacttgttggaacttggtgtcgcattctacctcttcttttgtggctgctatgatgttatgttcgggaaaaaccatttcttcatcttcctctttatccaatcttttgccttcctcatcatggcatttggatatgttggcaccattgttcccaactcctaagaagggttcggcacttcattcggctatttcagcttctgtgccttcatatcaacgtgtattatagtgttttcaacatagttctggctaatcacagcttgttagtataaaaaagaaagggtggtcattctttaaggtgttgcataatcagagtcagtgactctaaagagttacttttcttgtgaatatactgcaaagatatataagaaatttactgaaattcttctcatgaaagggaagtacacagaacaagaacgcagcgatcatgtggcatcgatcctactacggggagcaaacattagatggattgtttatatgatattgtagggttttttttgttttaacttttgcttctctttacattgtatttgtttgaagaaaaaaataagcagcttcaagaaatgggataagatacacaaaagaacgaagggcggccaccg

SEQ ID NO: 5938 - DNA, 414 bp, Glycine max
cccaagtggggtgctgtgtacatcccttccatcatcacactcctaaatgctgttggaactccaaggtcactccacttgctggtcttctggattctctttgagaataccatgtctctgcatcgaacaaaggcaacgattattggtctactagagggtagtcgagcgaatgaatggattgtcactcaaaagggtaaaccacccaagagtcggtttaggataaggattcatcacatgttggaacttcttgttggattctacctcttcttctgtggctgctatgatattatgttcgggaaaaaccgcttctacatattcctatacatccaatcaattgctttcttcatcatggcctttggatatgttggtattttcgatcccaacacctagaggacttgacaacacttcattcagata

SEQ ID NO: 5939 - DNA, 906 bp, Glycine max
cgttcaccacttcagccacactcaacaacaccgcgtttggctcacacactaacacaactgttctgtacctttcttcctctcctcaacttgtttcctacttaacgcgtttccgtgaaccaatcgccgatctcgcgctttatctataaagcgcgagatacctcaccgcaaccagtggaactcaccgaattgaactcaagttttttctattcttctctcggcgtcgccatggacgaagaagaggtgcgcaagatcttcagcaagttcgacaagaacggcgacggcaagatctcgtgcgcggagctgaaggagatgatggcggcgctgggatccaaaacgacgtcggacgaggtgaagcgcatgatggcggagctggaccggaacggcgacggctacattgacttgaaggagttcggcgagttccactgcggcggcggtggcgacgggagggagctccgggaggcgttcgagctgtacgatctggacaagaacgggctgatctcggcgaaggagctgcactccgtgatgcggaggttgggggagaagtgctccctcagcgactgccggaggatgatcggaaacgtggatgccgacggtgacggcaacgtcaattttgaagagtttaagaagatgatgactcgctcgtaggtggtggtggtagtagcactctctttcagtaatgttgcggtttcttcgtcacccttggtgatttcttccttcttcatattgagaggcagtggcaatgttttcttcaccagctctactatttcagttacaccttcatctccaaaacgctcatcagattcctctaagatctgtgtaatgaaagtgaacaaactgattacagtttcgtaagggtagtagctattgaaatagacaaaatatttaaaagcatattagtagtctcct

SEQ ID NO: 5940 - DNA, 558 bp, Glycine max
gacatcgcatccacgcgtacgtaaaacacttgattagctgaggaggaagagagaaaaaccatggcaataacactcaacaatggcttcaagatgcctatcattggattgggcgtgtggcgcatggaaggaaacgaaatcagggacctaattctcaattccatcaaaattggttatcgccattttgattgtgctgctgactacaaaaacgaagcagaagttggagatgcgcttaaggaggcttttgatagtggccttgtgaagagagaggatctcttcattaccaccaagctttggaattctgatcaaggccacgttcttgaggcgtgtaaagacagtctcaagaagcttcagttaacgtatctagatttatatcttgttcactttcctgttgccgtaaggcatactggggttggtaatacttctagtcctttgggtgatgatggggtcctggacatagataccaccatatccctggaaacgacctggcatgcaatggaagatcttgtttcatcgggcttggttcgcagcatagggatcagcaactatgatatctttctg

SEQ ID NO: 5941 - DNA, 537 bp, Glycine max
gagaaaaaccatggcaataacactcaacaatggcttcaagatgcctatcattggattgggcgtgtggcgcatggaaggaaacgaaatcagggacctaattctcaattccatcaaaattggttatccccatggtggttgtgctgatttggatgcgttgttggcttgttgcagctgactacaaaaacgaagcagaagttggagatgcgcttaaggaggcttttgatagtggccttgtgaagagagaggatctcttcattaccaccaagctttggaattctgatcaaggccacgttcttgaggcgtgtaaagacagtctcaagaagcttcagttaacgtatctagatttatatcttgttcactttcctgttgccgtaaggcatactggggttggtaatacttctagtcctttgggtgatgatggggtcactggacatagataccaccatatccctggaaacgacctggcatgcaatggaagatcttgtttaatcgggcttggttcgcagcatagggatcagcaactatgatatctttctg

SEQ ID NO: 5942 - DNA, 839 bp, Glycine max
ctcataaattgcaggtgcagcagcagagagtgcggtaggctcatccgagaccggaagcagcaatggggatcgatctcaaggccggaggtaaaagcaaaaagaccaaaagaacagcacccaagtccaatgatatctatcttaagctcttggtcaagctttatcgcttccttgttcggagaactggcagcaaattcaatgccgttatactcaagagattgttcatgagcaaggttaacaagcccccattgtctttgtcaaggttgattaagtatacgaaggggaaggaagataagattgctgtggtggtgggcaatataaccgatgatattcgtgtttatgaagttccacccttaaaggtacagcactcaggtttacagagactgctcgggcaagaattgagaaggcaggtggtgaatgcttgacgtttgatcagttggctctcagggctcctctgggacagaacacggtccttcttagaggcccaaagaatgctcgtgaagctgtgaagcactttggtcctgctcctggtgtgcctcacagccacaccaagccttatgttcgagcaaagggaaggaagtttgagagggctagaggaaggaggaacagcagaggatttagggtttgatgtgataaatagtgttctattctctgaaattcaaaatttccttatatcttagacggttgaagcagttttcttgttatttgtgttctgataatatgattttcagtttgaagttgtcattcttggctcctttattctcccagtgaagtaagtgtctgtttgtgctttaactcagttttgatgctagagaattgataatcgttaattacgtgaaaaa

SEQ ID NO: 5943 - DNA, 1030 bp, Glycine max
acaacctcctaataacccattaaaccccccctctcatacactctctaatccaaagagaacaccaccctttttcctcattctcttcctcactaaaacatcacactttttttcatttcaccaaacaaaacagtaacaccacacagccatgacagacagggtgtacccatcggccaagcccgccgcggttaacggcgccgccgccaacccatctttcccggcgactaaggctcaactttacggcgccacacgccccacctaccgccctcagccccaccaccggcgccggagcaagcgccggtgctgctgcaccttcttcttctggctgatcctcaccgttctgatcctcctcctcctgatcggcgtcggcggcacggtgttctacctcctctaccgcccccaccaccccaccttcaccgtgacgtcgctgaaactctcttacctgaacctcacctcctcctccaacacccttaactcccgctttgacatcaccgtctccgccacgaaccccaacaagaaagaatcctctttcgcctacgaccccacctccatcaccatcctctccggcgacatcgacctcggcgacggcaccgtccccggcttccagcacccgaagaagaacaccacgctgatcaaggcttccatcctcagctccggccaggcgctccaaagcgacgaagcctcacgcttgaagtccagcatgaagagcaagaacgggttgccactcaaagtgaatttggaaaccaaagtgaaggccaagatgggaaatttgaaaaccccaaaagtgggaatcagagtctcctgcgacggaatcagagtcactcttccctccggcaagaaaccggcaacggcgtccacttccaacgctaagtgcgacgtcgatgttcggtccaagatctggaagtggaccatttgatccacgtaataatgtacaccatacaacacagaggtgtgtaatgtgttaattgcttgtttgttttcgttttcctgcctttcctttcagcttcttttactttggtataattttcgagaa

SEQ ID NO: 5944 - DNA, 504 bp, Glycine max
ccttaatttctctctcacacacactttcccacatctctcatacacttcctgcttctctctctctctctcgtcctttttcctcattctcttcttcacaaaacatcactcttttttcatttcaccgacaacacaacaacgtgagttaaacaaaaaacagtaactccacgcagccatgacagacagggtgtacccatccgccaagcccgccgtggttaacggcggcgccgccaacccatctttcccggcgacgaaggctcaactttacggcgccacccgccccacctaccgccctcaaccccaccaccggcgccggagccggcgacggtgctgctgcaccttcttcttctggctgatcctcaccgtgctgatcctcctcctcctgatcggcgtcgccggcacggtgttctacctcctctaccgcccgcaccaccccaccttcaccgtcacgtcgctgaaactctcctacctgaacctcacctcctcctccaacaccctgaactcccg

SEQ ID NO: 5945 - DNA, 421 bp, Glycine max
tcagacccacccgtacgtaaactccagaattcggtccaaaatttccggccaacaaaaacaagcaacccaaaacgctctatcatcgtagaaagtgattttcatagtcatagatcattttctgcacatttctgcaggatgaagttgatcctgcaagcttattagacatacctaggctttgctaagttaatgctgttatggcttttgaaaatggttccaaaaaggagcttcagaaagttggtctaaaaatctccaagagctttcctcttactaggactactctggcatctatggagtctttgtccctgccagtggttcaggaaattgttctttctgctgatatgcaatgtgagaagtgccagaagagggttgctgatattattactaaaatgaatgcagagaccgagtcagtggtggtgaatgt

SEQ ID NO: 5946 - DNA, 435 bp, Glycine max
atccctttggagatgcaggatttggagcatttcctgcctccaatcctgctcctcacccacagaacaacaatccatttggaagcacaggcttgttataaagaacaaattcctttttgaagatacgaggatgtatttaatcgatcaagttggttggttggttttgagcaaattgtaacatgagtttctcatttgttgcttgatatatagatgttttctggaatgggaggtgctgtgccttgtaaaatccagacaacgcacgcggtgtattgatcattttatgatatacataatggtgggatagctttctttgaacatttcccaactcttttaagtaattggaacacttttacacatgttcatatatatcatgtattcagtattcattgtatggttctacactttgtatactagtatgtaagattagatatttgatct

SEQ ID NO: 5947 - DNA, 693 bp, Glycine max
gactaaacaaataaatgtaacggcggccacggggaggcttgaacttagaacctttgctgaccctcgtggagtgatccggtggacgcaataactgcaggcagctctgacttcagtgcaagcaagcatcaaaacattgctttaaaagcatcaattcagcgtttctgcaagttccaattttccaactatccacagaaacggtcgtttgaaaaaaagctgttaattcgggagcgatatggaggtcgaactcaaagagctgcacgccgatcttcaatctctgagccaatcgcttcccgatccatctcaccatgatttgctccgcaagattcaattgcgtgttgaggaccttgcgaagcttgcagaggctgcacctgttcgtcgctctaaagttgaggatatgagtgctgaggttgtagatagcaatccttatagtcggcttatggcacttcagagaatgggtattgtggacaactatgaaagaatacgcgatttctccgttgccatagttggagtaggtggtgtacgaagtgtttcggctgagatgctaactagatgtggcataggtacactcttgctgtatgattatgacatagtggagctagcaaacatgaataggttgttctttcgtccagatcaggttggcatgacaaagactgatgcagctgtacagactctgtcagacataaaccctgatgt

SEQ ID NO: 5948 - DNA, 820 bp, Glycine max
actcgagccgaatcggctcgagctctgaccgggaaaagaaaaaccagctttcttcaagcacctagatttcctctctctctaaatggcgttctcttcttttctcggcagagtcctcttcgcctccgttttcatcctctccgcttaccaagaatttaattcttatggagttgatgggggacccgcagcaaaagcactcagaccgaagtttgatgcctttgcacatcaagtacattctaaagttggctttcaacttccagatattgatatgaaatttttagtggctggggctattgctctcaagggccttggagggattcttttcatactcagcagctcttttggagctttccttttgcttttgcatcaagtgatcactactccaatactgtatgatttctacaattatcacagtgaggacaaagaatttatccaacttttcatcaaatttactcagaatatggctctcttcggggcattgttgtttttcattgggatgaaaaactctattcctagaaggcaacccaagaagaaggctgccaaaacaaaaacatattagttgaaaggacttctcggattgttcctggttgctcattatacccattttccatttctccaggatttggctttggtctctgtctggttcagaacgaatgtaccttctgtccgatggattatgtataatttataattattaatatatgtatgctaaatttccgtttgcttgacattagaaactgtctttcgattactaaacttgtatacgaagagggggaaaaatgatcatagcctgttcattcagaactgggtgtcaatttcggtc

SEQ ID NO: 5949 - DNA, 498 bp, Glycine max
tctcggcagagtcctcttcgcctccgttttcatcctctccgcttaccaagaatttaattcttatggagttgatgggggacccgcagcaaaagcactcagaccgaagtttgatgcctttgcacatcaagtacattctaaagttggctttcaacttccagatattgatatgaaatttttagtggctggggctattgctctcaagggccttggagggattcttttcatactctccaatactgtatgatttctacaattatcacagcgaggacaaagaatttatccaacttttcatcaaatttactcagaatatggctctcttcggggcattgttgtttttcattgggatgaaaaactctattcctagaaggcaacccaagaagaaggctgccaaaacaaaaacatattagttgaaaggacttctcggattgttcctggagaaatggaaaatgggtataatgagcaaccaggattttggctttggtctctgtctggttcaga

SEQ ID NO: 5950 - DNA, 778 bp, Glycine max
cccacgcgtccgcccacgcgtccgcccacgcgtccggagtgcttgtgacgctcttgtccttttgccacgcttaagatcacccaagagagaacctaagacacacaacacaacacaaacacacagagttagaggagaaatcatcatggcatcagcagcatctgggtttgtgttgtcacttaatgttgcagctgccaccacaaactcaagggtggtcatgttcaacacaaagaacaacgcttctaggcttgttgtaagggcttcagatgagcctgcagcggcggcacccgccaccgccacacccccagctgaagctgaagctaaaccaaagccaccacctattggccccaagagaggtgctaaggtgaagattcttaggaaggaatcttactggtacaaaggcactggttcagtggttgctgttgatcaggaccccaacactcgctaccctgttgtggttcgattcaacaaagtcaactatgccaatgtatcaacaaacaactatgctttggatgagattgtggaagtggaatgagtctaatttatttgtaattttgattctggtcatgctatcgcagttactagcctaaggtttttttatgtcaaaaacaaaaaagaatttgtatcatattctctctgttatctacccccttgatttctattctctatgaactatatcctgtgtgcagttgctcataatcttattcttcgactaaagacatcttattttattcaaaaaaaaaaaaaaaaaaactaaaacacataaaataaaacacatgat

SEQ ID NO: 5951 - DNA, 600 bp, Glycine max
  unsure (1)..(600): unsure at all n locations
gcaagagagtgacatcgcgaccacgcgtacgtaaactcggaatccggtccaagctttttcctcgcttaagatcaccaatgagagaacctaggacacacagcacagcactcacacagagagtttcacgaagagatcatcatggcttcagcagcatctgggtttgtgctgtctcttaatgttgcagctgccaccacaaactcaacggtggtcttgttcaacaccaagaaccacgcttctacgcttcttgtgagggcctcagacgagcctgcagccgcggcacccgccaccgccacccccccagctgaagctgaagcaaagccaaaaccaccacctattggccccaagagaggtgctaaggtgagttacttcaaaactcaactttttagaagtggttgttgctcatgttgtgcagaataattcacttttatcccatgaacatgatccttaatagttgttgcttgtctgtgaatatactaggctagctccctattagaattggtatgagaaaatgtctagttataaacatgtcctcttattttcctattcttttgngtcatcaaagatttatatagtaaatagtgaaattggattttctcaaac

SEQ ID NO: 5952 - DNA, 1153 bp, Glycine max
  unsure (1)..(1153): unsure at all n locations
ctttcctctccttttccttccaaaccctaatttttgctactgcttatttttattcatcgcggaggcgtgggtttacgggcagaaacatttggtatcccaatccctgactggggtaagaaccctaggaagatggctgaagctgttgatagggtgatagtacctgactttcagcctaagaaagatgtgaaaatagtgacagatgagaaggccaccagtctctctacagcttctatagatgatgcagcggttattaatgatctagtaatcaagttagagaggtgccgggcaaatcttccaccagtgttcaggatgaaaccaattcaatttgagaaggatgatgacacaaactaccatatggatgtgattgctgggcttgccaacatgagggcacgcaattacagcattcctgaggttgacaagcttaaagccaagtttattgctggacggatcattcctgcaattgcaacctcgactgccatggcgactggtcttgtctgcctggagctgtacaaagttttggatggagggcacaaagttgaagactacagaaacacatttgctaacttggcactgcctctcttttcaatggctgaaccagttccaccgaaaattatcaagcatcaagatatgagttggacggtttgggatagatggattctcggagacaatcctaccctcagggaacttctagagtggctgaaggcaaagggcttgaatgcttacagtatttcttgtgggagttgcctgctctataatagcatgttccctcggcataaagatcgaatggacaaaaaggttgcagatctggcaagggaagtagccaagtttgaaattcttgcgtaccgtcgccatttggacgttgttgtggcatgcgaggatgatgaggataatgacatcgacatccctcagatatccatttatttccgttagtaggttgctttcatcttgatagaggtgtgtttgagacttaggtgaaaaacgacagcatgtttgactctcatgcttcatattcataattgatacacaaaggcaacattatgtcaaatttcatatatgaattgaaaaagcaactttggttcctcgtgttattattttgcccttgggtctttatcctaaccttacctatttattgggaaaaaaaannnnnnnnnnn

SEQ ID NO: 5953 - DNA, 744 bp, Glycine max
ctgagaaacaggcaccaatgtgtactgggcattcatttccacataacattgaccacggcttgacatgggctcggtcagagtttgagggtttgcttgagaaaactccagctgaagtaaatgcatatttatctaatccaaatgaatatactaatgcaatgaggaatgctggtgatgctcaagcgagggataacttagagcgtgttcttgagtgcctagaccaggagaagtgtgagacttttgaagattgtattacatgggctaggctaaagtttgaagattattttgctaaccgagtaaagcaattaatttatacttttcccgaagatgctgcaactagtactggagctcctttctggtctgcaccaaaaagattccctcgtccactacaattctcagcctctgatttgggtcatctaaattttttgatggcagcttctatatttacgggcagaaacatttggtatccctatccctgactgggggaagcaccctaggaagttggctgaagctgttgatagggtgatagtacctgactttcagcctaagaaagatgtgaaaatagtgacagatgagaaggccaccagtctctcttctgcgtctatagatgatgcagcggtgattaatgatctagtcgtcaagttagaggggtgccggacaaagctgcaaccagagttcaggatgaaaccagttcagtttgagaaggatgatgatacaaactaccatatggacctgatagctgggctt

SEQ ID NO: 5954 - DNA, 646 bp, Glycine max
acgtaagctcggaattcggctcgagatcgacttcatcttcggcgacgcctccgcggtgttccagaactgcaccatggtggtaagaaagccactggagaaccagcagaacatcgtgacagcacaagggaggctcgacaagcaggagaacaccggcttcgtcctccagaaatgcgtgatcaaggccgacaccgacttggtacccctcaaagacacaatcaagaactacctcggaaggccgtggaaggagtattcaagaaccatcatcatggagactcagattgatgacctaattcaccctgatgggtttcttccttgggaagggaactttgccctaagcacactttactatggtgagtacaacaacaatggggctggttctagcaccactgctagggttaattggcctggccgcaaagtcatcaatagggatgaggctaccaggtacacggttgaggctttcttgcaagggacatggatcaatggcacaggtgtaccagctcaactaggcctgtacagttaaaaggctctaattaacatcatcatgtttaataaatatgtataccagttgagttgaatgctccagctaatttaatgtattctaatgttttttatttgaaagggattaataatactattatttatgatt

SEQ ID NO: 5955 - DNA, 1662 bp, Glycine max
ctcgagccgctcgagccgggaagaactaacaagaggcgtaagcgtaaacttgtccgaagaataacaccgggaaagaaagagagtgaagaagggtataagcgtccttgtgaaggcactagggtgttctgaactgatcctctccctgggtctggcactgtaaaattcaacgtcaaccccataatatacttgaagaaacgcttccatcttctctctatttgtttcaacttcagttatgcgtttctctctatagccagctatcatcaattcatcatgtcatcgccaaactccgcccgtcagccccacgcgccgctccttctcccgcgccccgatgccgccgcccgcctccccgtcctggcgctcctcctcggccgccgcggccactccgtcatggtccgggagacggcggcgcgtgagctggaggagcggcgcgccgactggacctactcgaagccggtggtggcgctggacatgacgtggaacatggccttcgtcgtggtctcggcggtcatgctcgcctgcaccgtcaaggagaaccccaacacgccgatccgctggtggatctgcggctacgcgctgcagtgcctcctccacgtggccctcgtgtggctcgagtaccgcaggaggaacgacgctcccagggacgaggaatctgctgccagcctccaatacgacgacgtcaacgatagcgacgaggacgatgttggaacctccgggagttcctcttcctccggattcacaaaacgatgtgcgtcattgaataccatgatttcattactttggtggatggtgggcttttattgggttgtctctggtggtgatattctgctgcaagatgctccacgtttatactggttgtctgttgtctttctggcatttgatgtcttctttgctatcttttgtgttgttttggcatgcttgattggaattgccctctgttgttgtttgccctgtattattgctattctctatgctgttgcaggacaggagggtgcatcagaatcagatctcagtatacttccaaaatacagatttcaaatgttaagcaatgaggaaacacctggtgagggagggggaggatcaatgattcctatggagaccagcaatggttactcggtgaatgaacgaacactttcacctgaggatgcagaatgctgtatatgcatctcttcctatgaggatggagctgaacttcacgttctcccttgtaaccatcatttccactctacgtgcatagtgaaatggttaaagatgaatgcaacttgtcctctttgcaagtataatattctcaagggaaatgaacaggtgtgacaatactaaaggcgatcaaagatatattatatcaagctgagttttattatataacagctcagggttttcaaccgctgatgcgtatatgtagataatatcaagacatgaaaaaatagaacgtctcccaatttgctcggtttagctgtcattgttttgttgcttaattgcttcagtagagaaaaaggtagaggtaagaaggaaaggtgccgtatagagatcttttaaataagttaacgatttcatttgacccttatttctcctttatttgtcttttgtttttcggcatatttcttgtatcaaatttgtttatatgggagaaaacaatggaaagtgtggcagtctaactttcagctt

SEQ ID NO: 5956 - DNA, 868 bp, Glycine max
  unsure (1)..(868): unsure at all n locations
aattccctggagtgtgtggtgtggtgttgctgttgcaaattgcaacactcagtcagcactgcaccactgcatttcatttcccagcttagctacaactacaagcccacgtcgctttcataaaaccacacccacctgccaccatcactttccccaaaacgcaacatcatcaaaacttaaactcagagaatcagagagagagagagagagaaatgagtgaagaagccaaaaagaacttcgccggagctctaacggcgaggcccaactccgatgagccgaaaccggcaccggtgccagctgttcccccgaagaaggtcatcatcaagagcgctgatatgatccccgacatgcagaaggaggccgttgatatcgccgtcgccgcgtttgagaagtacaatgtggagaaagacgttgcggagcagataaagaaggagttcgataagaggcatggccccacgtggcattgtatcgttggacgtaattttggctcatatgtgactcatgaaacaaaccactttgtttatttctacttggatcagaaagcggttttactctttaaatctggctagccttattgtggtagcaaagaagttgagagcaatgggcattgtcttgtgattatgcagtcctccatgtattgattccactgacactcaaaatctttgcaagacattcttgtcctcgtgtccttgtatatttgatgtcatgtaatcgagttatcggtttggatatgaatctaaggattaccttagaagagttttctaaaaaggaaatattatatcttttaaaaaaattcctttctgaacccaaaaaaaaaaaaaaaaaaaaaaaancgaccggccgctctaaagcatgcaagcgtacgtgcgcg

SEQ ID NO: 5957 - DNA, 338 bp, Glycine max
caaagctcattccgagagacagagttaaagatgagtgaagacgcgaaaaagaacattgccggagctctaacggcgaggcccaactccgatgaccagaaaccatcgccgttaccgtcaccggcgccggccgtcccgccgaagaaggtcatcatcaagagcgccgacatgatccccgacatgcagaaggaggccgtcgatatcgccgtcgccgcgtttgagaagtacaatgtggagaaagacgttgcggagcagataaagaaggagttcgataagaggcatggacccacttggcattgcatcgttggtcgtaattctggctcatatgtgactcatgaaac

SEQ ID NO: 5958 - DNA, 747 bp, Glycine max
gtttatggcacaagaaagaaattataaaacaataggtatctgggtgtactgaaaattgatactttggtctttgtgattactgattagtacttgttgactagtgatctgacatttgtggtaagttgtatgtttattgaggaattagtgacagtaacttctgaacctttagggatgcacttgaaaactgttgttaattagcttagcagtaccagtgtttcacactgtatgtctgtcttgcagaagactgaggatgattcacctgcaaatcgatcatcggtgtccgaatttggggatgacaattttgctgtcgggagttgggagcagaaagaagtaatgagccgtgatggtcacatgaaacttcagacacaggtcttctttgcctcaattgatcagcgcagtgaacgtgcagcgggtgagagtgcgtgtaccgctcttgttgcggtaatggctgattggttccaaaacaatcgtgatctcatgccaataaagtcccagtttgatagtcttattcgggaaggctcgttagaatggaggaacttgtgtgaaaatcagacctatagggagcgattccctgacaaacattttgatcttgaaacagtcatccaagccaaaatacgccccctttctgtggttcctggcaagtccttcattggatttttccacccagaaggaatggatgaacggagattcgattttctgcatggggccatgtctttcgataacatctgggatgagattagtcatgct

SEQ ID NO: 5959 - DNA, 595 bp, Glycine max
ggaaagcatggaaagcctgccatgaggaggaggggagtgagggaaatttctctgccaggagtgaggatggtgaatacaattatccctttgactcggattcgctcgacgaattcgaggagggtgatcagatgagatgaaggaggattccagtgtgaggaagtcgtttagttatgggaaactggcatatgccaatgctggaggggcgtcttactctagcgtgacggtgaatgatgagggtgaggactgggtttactacagcaatcacagatcagatgttggggtttcgcataaagaggattctttgaccgtgtcagtgactgagccttatgtgttgcaaagctcaaggcgtagtatactgccttggaggaagaggaagttgagtttcagatctcctaaatctaagggggagccattgttgaagaaggcttatggcgaagaaggcggtgatgacattgattatgatcgcagacagcttagctctgatgaatccctttcactcgggaagactgaggatgattcaggtgcaaatcgatcatcagtgtctgaatttggggatgacaattttgctgttgggagttgggagcagaaagaagta

SEQ ID NO: 5960 - DNA, 399 bp, Glycine max
ccttttgttcttgatgggaggggtgctttgggcacttgtgattttgcctaagaagaatatgaggcttgataaatccttgggggcaggcctattgagtgtgtacctctgctttttggtcataaggatagccatggctgttggaattgtgaaattttagctagagaagcaagtctctaaaggggtccattgtggtcctcatggaacaggcttatgttaaatcatacatttcacgatcagcatgtctactttgtacattttgcgtgtagtttttcttttcttcttcttagaatagtagtagctagtcttcgcatttataaattctcgttgaaaaatgaaaaatagagtttatttatcccaaataatatatacaaatgtacatttaagaaagataaagaaagt

SEQ ID NO: 5961 - DNA, 1707 bp, Glycine max
cccacgcgtccgcaaccacacaagcaaagtgtcttctctttctcttcctttgctttgcatccatcgttaataggattgcattgcattgaattaaaaaatgcagagcagaggatcgagtcacagagtctccagtatgggcaataatcgatcccgcattcccgcgctcctcatctccatgttcgctgctttcgcttctatctacgttgctggaaggctgtggctggacgcagagaatcgcgtttatctcatcaaagagcttgataggatcaccggccagggacaatctgctatatctgtggatgatacattgaagatcatagcctgcagggaacaacataagaagcttgatgcccttgagacggaacttgctggagctaggcaagagggctttgtttcaaatcccttgatagagactaatggaacttactcgacgagaaggccgttggtcgtgataggtatactgacaaagtttggccgccagaagaatagagatgcaatccgcaaggcatggatggggagtggtgcatctttgaagaaaattgaagaaggaaagggcatcattgtgcgatttgttattggtagaagtgaaaatcgtggagacagtcaagataaagacattgatcatgagaataggctgactaatgacttcttaattctcgataatcatgtggaaacaaatgatgcattcccaaagaaggtcaaattgttctttgctcatgctgcagacaaatgggatgctgagttttatgcaaaagtcaatgatgatgtctatgtaaatattgatgccttgggagctacacttgctactcatttggacaaacctcgtgtttacatgggatgcatgaaatcaggcgaagttttctctgagctgaaccataaatggtatgaaccagagtggtggaaatttggtgacaaaaaatcatactttcgtcatgcatcgggagaaatgtatgttatatcacgagctttggctaaatttatatcaataaacagatctattcttcgtacctatgcccacgatgatgtgagtgctggatcctggtttattgggcttgatgtgaagcatgttgatgaggccaagttttgttgctcatcttggtcgacaggagcaatctgtgccggtgtttgagttgattccagtgcattcttgtgagcagacgacaaacgtaattcttaggagtcatcaattgttagaaggtttgcatcctaagattttttaatatctactggaagcgaagtgattcatagagatgtctgttgaaaagttgcttctgattatagacttgatgtccatcgaacaatatagtttcattagcttatgagcacgggtggcaaggtgtgcggttgaaggtttactagcagctattactataggcatgcaacgtcgtacagcaaataaaaaaattcagcttgtcacctataaggatttttattttttttactagagctggccacctataagttggtttctatcatactctgtttctttccttcatttcatgagcgtaggggaagatgactcctgagtagaagaacttccaaaaatgtactagtgatatttataggaacgacaatctctcttgcagtaaagggaacttttgtttttgtatatgaaataggcagggaaatttgagtcgtaattatgttttattcatacaattcgcaatttgaatcatataattcatcatttgaaaaaaaaaaataaaa

SEQ ID NO: 5962 - DNA, 382 bp, Glycine max
gggggggaaagagagtggattcttggtgactttcttgaccagaaaagtagcaaccgcagcaccaaagactttgctttgcatctatcgaattctaatccaattctctctgcatctacatatacaatatcataatcgttcataagattgcatttgcattgatttcaaaaatgcagatcaggggatcgagtcacagactctccagtatgggcaataatcgatcccgcattcccgcgctcctcatctccatgttcgccactttcgcttctatctacgtcgctggaaggctgtggcaggacgcagagaatcgcgtttatctcatcaaagagctcgataggatcactggccagggacaatctgctatatctgtggatgatacattgaa

SEQ ID NO: 5963 - DNA, 551 bp, Glycine max
atgcataataattgcatataaaaactaaacagtattgttggtgtgacgtgacagaacagcagaagggaagaagatggacttactggagttatgggcaattttcggccccggcgtcgccggcgctgtcttcggcgccggatggtggatctggcttgacgcggtcgtctgcagcttggtcaccgttcccttccttcactaccttcccggaattttcgcatcttttgcggctttgatgttcaattgcgttagaaaagaagacatcgattattctccatatgacgaaggcgagtggagactgaagctgtggctcttcattgcatatgttgtatcctttgtttctttagctggatcagctggcctactgatccaagattcacttgataaatctgccccttcagtttggactggagttgcaggtgttttgcagtgtgtttttgtcttgatcagtggactggtatattggacttctcatcctgaataagttgcaccaagatatgactcggagcttcaaactataccaggttatgcccacccatgtattgtcttgtttg

SEQ ID NO: 5964 - DNA, 1471 bp, Glycine max
  unsure (1)..(1471): unsure at all n locations
atgactcaaccctttggaacattttaggccgacaattggagaaaaattattctggacaagcatgaggatacaatgagcaagatgggagcaattttggcatcaggaatccttgatgctggtggcagaaatgtgaccataaggttactttctaagacaaaacatgataaaattactgcagtggttggtcttgcagttttcagccagttttggtattggtaccctcttatctattttataagcctgtccttttcgcctacggcttttattgggttgaactatgatctgaaatctccaaagtttgagttcttgtcacatgcaaagccttcactttttgaataccccaagcctactactgttcccaccactacttcaaccgtgaaacttcccactgctgttctgtcaacctcagctaaggctaaagctagggctaagaaagctgaagaacagaaggctaatgctgaaatttcatctgctcccgactctgcatcagctgtcccaagtggtggaaaaggaaagtcgtctggtgagaaggatggagactcaatgcaggttgatagcccaacaacggagaagaaatcagagcctgagccatcgtttgagattctgactaatcctgcaagggtggttcctgcacaggagaagtttattaaatttttgcaggacagcagatatgttccggttaagttggcaccatcaggatttgtgcttctcagagacttgcatcctactgagccagaagtgcttgctctaactgacacgccctcatctaccagttctgctgctggtgggtcagcaacaggattgcagagttcttcatcagccatggctgtggatgaggaacctcaacctcctcaaccatttgaatacacctcatgagtttggacctgattccactaagttcaaatattcgatattcgtcatggtgcttatgaaaattggttcttctgaggagagtagctacctacgtgtgaatggatcaactctactgctctgttacccacttgaaatcgagttctggggcttggtttttcatttttcctgaacgcactgtactgtggtatttgctccaatatgtagttaatatgtgtactggttcatactatatattttcaaagtggggtgccgaagcagcgtgcggccaatctgctgtgtcaatgtgtttttcttttttatcgtttccaatttgtttttgaagtacttctccaatttctggtcaccaaatggggggccaaggattcttctatttgtagggtagtggcactttcaaagaaggccaaggattctatttgtagggtagtggcactttcaaagagtttctttctcttttaaaaactcgttaatcttttatgtttactgttaacagctcgagattacgaatttctgatttctgnnnnnnnnnnnnnnnnnnnnnnnnnnnnnnnnnnnnnnnnnnnnnnnnnnnnnnnnnnnnnnnnnnnnnnnnnnnnnnnnn

SEQ ID NO: 5965 - DNA, 419 bp, Glycine max
ccctaagtatacatatatcataaaattgccatccaaaagctcaataatactgaataattataattataatatgtatcatacaagcgaaatagatgacatgctccctacagtagaagcctcaatatctccacaaatgatcgtgttcaaggtttaaatagttttaaaataaccattaaaagtcaaacaaatggggaaggatgtacagtaaccacaagttatatgctgcaccaagaataagtgagaaatctggatgcaagtggattctcatgaaaatgccacatatatatcacttatatgttttcattcttttttgggcttgatcagagtcttctccactgcctgcatctctaaaatgtgcaattgtttgattgtttgaagaagggttgtcatgatgcttgaaagaagaagtcccacaattc

SEQ ID NO: 5966 - DNA, 1258 bp, Glycine max
tgagaaatcattccatttccggcttatatatatacacataaatgcagcttcttttatttttaatattagacatcactaccaaagatctttctttcagcttcttgttctacaatgaaaagcctctgccttgggccgtttcttgctgctagtgccccagttggtagaagagcctatggaggccacttaagcagaaagtgctttcaaaagcaacttcacttccactcacgttgtgttgctttctcttcattcatatgttctgcaactatatcagtgatgccagaattagaagagaagcaagtgtttgatggagagaaggctaatttgctagttaaagatctcagaaagagctttgattcaggcatgactaagagctatggatggagggtttcccagttggaagccatagctaagatgttagaagagaaagagaaggaaattactgaagctctatataaggaccttggaaaacctcgacttgaagcatttataaccgagatttcccaggctaaatcctcatgtagtgaagcacttaaagagctgaaagaatggatgaagcctgagaaggtgaatacttcaatcacaacatatccatcatcagcagagattgtgccagaaccactgggggttgtgttggtcatctcaacatggaactttcctttcttgttatcaatggatccagtcattggagccatttccgcaggcaatgctgtggtcctgaaaccatcagaaatttctccagcaacatcatcactgcttgcaaatttgatcgaacaatatctagacaactctaccataagagttgttgaaggggctattcccgaaacatctgcactcctggatcagaagtgggataagatactttatacaggtagtgctagagtaggtcgcattgtcatggctgctgctgcaaagcatcttactccagtgattctggaacttggaggaaagtgcccagctgttgttgaatcagatgtcaacttacaagttactgcaaggaggataatagctggcaagtgggcatgcaatagtggacaagcatgcatttctgttgattatatcatcacaagaaaagagtttgccccaaagctggtagatgccttaaaagaagaattggaacaattttttggtaaagatcctatggagtcaaaagacatgtcaagaattgtgtctccataccagtttgcgcggcttgagaatctcttggatgaggataaggtatctgacaaaattgtcttgggaggtcagagggatcagaaga

SEQ ID NO: 5967 - DNA, 415 bp, Glycine max
cgtcacacgcacgcgtacgtcaactcgcggccctggtagaaacccaaattgcccttgatcattcaggttaatcaaacaaagctagaaaaaaaaaccaccacaaaaaactaggtgttattttcatctactgtagttattttagtaactttgtggtaccccttagctttgtggtgtataatgaagctcctagtctctttgaagtctccaaaaaattgttggagaaaaggggtggtgggtttctttcttagagttacaagaaacaagtttcttcattggttttccctgtttatattatatattatatatatttgttgtttttgtttgctcctctctctggagctgtgaaggttgaggtgtgactgtgaacagaatattctattatgggacaaggagactgtattttttatattttgct

SEQ ID NO: 5968 - DNA, 1531 bp, Glycine max
tctcgagccgaatcggctcgagtgaagacgacagaagggggatacataggaagctggaacatagtacaaactcacctccaagtccatgctttttgttcttgcaagagtaacagagaggaggtggacaaacaaagctataatttttagaggggttaccaccctcaccttctgccaaaccaaacccacccttttctctctttaagctactattgtgctgagagctgaagaggagatggggggtggaaatcaagaggcagtgaagcagctgcagaccctgatggaaaatgtggatgatgagcagctgaagaacacattccagattatgcaccagggttatcaaactgaaacgttaatacggtttctcaaagctagggactggaatattgccaaagcccataaaatgttaattgattgtttgaactggagggtggaaaatgagattgacaatgttttaaggaagcctatccccatggatttgtacagagccatacgggattctcaactcataggaatgtctggttactcaaaggagggtctacctgtcattgctgttggtgttggtctcagtacatatgataaagcatctgacaaatactatatacaatcacacatccaactaaatgaatatagggatcaagtgatcttgccaacagctacaaggaaacatggacgatacattggcacctgtgtgaaagtcttggatatgactggtttaaaattttcagcattgaatcaactgaggttgttgactgctatatctacaatagatgacttgaactatccggaaaagacagacacatactatattgttaatgtgccatatgtattctcagcgtgctggaaggttgtgaagcctcttttgcaagaaagaacaaggagaaaaatccaggtgctgcaaggttgtgggaaggaggaattactgaaggtaatggactatgcatccctcccacacttctgcagaaaagaagattccaagtcttccaaacatcatgcattaggaaacattggaaattgtttctccttcaatcacgccttccatcaacaactctacaatcacatcaagcaacaatccatcattgtggagtcaatttcaccaatcagacaagggtccttctatgtagacataccagagccagaccctgatgatgccaaaatagccaagaccatagaaaatgagttccacaaattggagaatcagaagaatggttttaccaactcactaactggtcttacagttaatggccattgaaagctatgctactaaagctagtaactgtttttggcctctcctgagccacttttatttgttgattactttatggtcccttttggaaaaggagggttatacttgtaggtcatacttatacccggttattagatttaatattgtaatgtttgcatcaactagatgcaaaattcttcaggcagaccttaatcgaatttctacaaccaccttgagatgataagcatatgatatatgttcaatgtagaaaagatggcgccatgctacaattcatatggctgtctaggt

SEQ ID NO: 5969 - DNA, 631 bp, Glycine max
acaaactcacctccaagtccatgctttttgttcttgcagagtaagagagaggaggtggacaaataaagctataatttttagaggggttaccaccctcaccttctgccaaaccaaacccacccttttctgtcttcaagctactatcgataaatcagtttaaatttttgtggggtagtaataattgtaccatattgaggtaccttaaaaaggatctggggtttgcatattttccttgcaaatctctcagctactttggcttggctttctgaattttggtttttcagtgctgagagctgaacaagaagatggggggtggaaatcaagaggcagtcaagcagctgcagaccctgatggaaaatgtggatgatgagcagctgaagaatacattccagattatgcaccagggttatcaaacggaaacgttaatacggtttctcaaagctagggactggagtgttgccaaagcccataaaatgttaattgattgtttgaactggagggtggaaaatgagattgacaatgttttaaggaagcctatccctactgatttgtacaaagccatactggattctgaacttataggaatgtctgggtactcaaaggaggatctacctgtcattgtctgtggtgt

SEQ ID NO: 5970 - DNA, 145 bp, Glycine max
cttcactctcggaagtcttttagacttattgctgaagatgattcctcattagccaaagtaaaatggtattctggtagtaaaccagtaaaaaaaatttcaaacaaaatagtgtaattttactttataacagaggaaagtctcactt

SEQ ID NO: 5971 - DNA, 1185 bp, Glycine max
ggaacgacgaagaccaagacgaagaagaagaaacaagagcagcgagaaactgagtgaggaaaggatgaagaaagcagagtgagtcccgttccattccgtatcgttcatcacattatattgattcctctccaaaaaaccctctcaattgcacgttcctcaatctcacttatgggcgaacagacgctaggtcaagcacaatccctaatcgaacctcaacctctccccgccccctcctcaactgccgtccccgacggtgccacggtggactccgaactaaacaatgtccctcggccgacaacatccccagccacgaaaatccccctccgtccccgcaagatccggaaggtctctccggacccctccacctccgaatcccaaaccgaaacccccaaacccgccaaaaccgggggccgcaacaccaccaaggctgctccgccgcgagcccttacggtggtccctcgtatagtggcgcgctcactctcctgcgacggtgaactcgagatcgcgctccggtacctccgcaacgcgacccagtcctctcccctctcatcgacattcaccaacccccaaccttcgacaatttccacactcccttcctcgccctaacccgccgcatcttgtaccagcaactcgcgtacaaagccggcacctccatctacacgcgcttcatcgggctctgcggggcgcgaaaacggcgtcgttcccgaaacagttctcgcccttactccccaacagcttcggcagattggggtttcggggcggaaggccagttaccttcacgatttggccaggaagtaccagaacgggatactctccgattccgccattgtgaacatggatgacaagtcgctcttcaccatgcttaccatggtcaatggcattggctcttggtctgttcacatgttcatgattttctcactccacagacccgatgttctccccatcaatgaccttggcgtcaggaaaggggttcagcttctctacaacctcgaggacttaccccggccctcgcagatggaccagttgtgtgacaagtggaggccttaccggtccgttgcttcgtggtacatgtggagatttgttgaagccaagggaactccttcgagtgcggtggcggtagcgactggtgccggcttgcagcagcagcgccatcaccagcatcaacaacaggagcaacagcagcag

SEQ ID NO: 5972 - DNA, 461 bp, Glycine max
tgaagagtgaagagcagcgaggaggatgaaagaaaggcgttagagcagagtgaggcatcatcagaatctgaatctcacatgggcgaacagacgctaggtcaagcacaacccctccccgcccccgatgctgccacggcccactccgaactaaacaatgtccctcagccgacaacctccccagctacgaaaatccccctccgtccccgcaagatccggaaggtctctccggacccctccacctccgaagcccccatcaaacccgccaaacctgttggccgcaacaccacctccaaggctgctccgcctcgagccctgactgtggtccctcgcatagtggctcgctcactctcctgcgacggcgaggtcgagatctcgctccgctacctccgcaacgcggaccccctcctctcccctctgatcgacattcaccaacccccaaccttcgacaatttccacactcc

SEQ ID NO: 5973 - DNA, 688 bp, Glycine max
gacgtcggacgcacgcgtacgtaaactcggctttttatattctgttttattgggattctcactttgaaaagtggcaatcccaatcgattccatattctagaaatcaaactgaatcagagcttagcgtggtgaactcagtgagtgagtgagagatggcggagagtgaagtggaggtgattcattcttggtctgctccaagatccctcagtactagtctcatgtattctttttctcagagggatgacatagaagtgcctgatgagcccctctatcgcaaatttccttagagtaactggtcttgatagaccctacagggaggagctactctccaaaatggaagctgatggagataaggtcactaatgacataatttttgctccaggaaagaagaaatatagattctgtaagcatatatcaaagcaacggttacaaggtttgacagatgatctgatgaagaaaggaaagcacttcattctgataagaaatcctcttgatatattgcctgtccctccatctttctatgagttgggtttggcagagctggtttgtatatacaacgagcttcgtgaaattggaaaggcaccacctgttattgatgccgcagaacttcaacaagatcctgaggctactctacgcagtctctgtaatgatttggagattccttttcaatctgcaatgctcaagtggg

SEQ ID NO: 5974 - DNA, 908 bp, Glycine max
  unsure (1)..(908): unsure at all n locations
catcatccctcttgcatagcattgcactgtttcccttttctcttctcacatcgtcattcacacaccctcttctcttggatctcatcgccctcacaaacccttatatttacaccggcccactttcctatttgcaccatttcgttcagatcatagcgccgttcgagatcagaaaccggaaaaaataggtttttgattcgtggggttggttccaaatggcgtcattcacgatcccttgccccaagtgcgttgttgttccttttgctcatttgggactgaactctcagacccagcaacggaacgcgctggggttgaagaaatcgctctcatttggatctttgagtagtgattcggcgccaaatgggattcagtgccttaacaagaagcaatcttctgtctggaagcttcaagcacaaccaaaagaggctgttactgttgaaaattctgcacctgtacaggtcaatggtcctaaaattgctccaccagaagagaaggatgaccataatggaaaaccctctggtcctagcacttctgctgatgcatcttcaatttctgcatttatgaaccaagtttcagatcttgttaaacttgtggactctaaagatattatggagctgcaactcaagcaagcaaactgtgaactcgtgataagaaagaaggaagctttgctgcctccaccagctacatttgtagctccagtgtcacaaccatttccatatcccacaaattctcttccagcagcaccaccttcagttgctacttccactcctgcaagttctccatcttcaaaagcagctcctgccttacctcctgcaaaagcaagcanatcatctcattccgcactgaaatgtncaatggcaggaacccttttatgaagtccagcaccttgcgaacctccatttgtcaaggtg

SEQ ID NO: 5975 - DNA, 384 bp, Glycine max
aaaatggtatagtggtgtggaccctagtggcatcttggaccagtcatgtagcagttctcaatggctagatttctggacttgaaaaaaacaagcgagccacactttgtgctgcatctgcatgtgtgatgttttgtttcctccgagagaaggaacaaaagattggttgattggttggctcttgtgctgccagcaggtccaaaacattccagcctagccaagaaactcgaaggaagttttgtaggcttgatttgataggcgagagaattaagatagcctcactcaattcaattgtgtagagatttggcaaaaaacaaataatgtgcaatgtctctgtctgttcatgcttgcatgcctttccaacccgtctttgcgtgtgttctttct

SEQ ID NO: 5976 - DNA, 475 bp, Glycine max
  unsure (1)..(475): unsure at all n locations
gctttgctcttcaaaagctcacccaaagtttattatgtattccagcccttcagctgggaatcattggagtatgggtcaatctaatgttgtatatcaggtattctttgcagtaggcctgcacttttgttttttgggtttgaaagtctttagttctaagtatatacatctgtgatagtagctgtcatcaaaatatgtagggaaggtttaccttcacttcagatgttcggcacaaaatgctcactgttctatctagcaaatattaggtagatggtgttattagttcatgtatatgcaaagataatagggtaagcttgccggcatttaggagggtactttgtatcaatcaatgattatataacatttactacaggtgactatactttgaacttatcttaatttattgatgttattatgaaaattatataagcaactagatgtagttgactagtnnnnnnnnnnnnnnnnnnnnnnnnnn

SEQ ID NO: 5977 - DNA, 588 bp, Glycine max
  unsure (1)..(588): unsure at all n locations
gattgtttggtttggaagattagaaaattccctgggcagaccgagtcaaccttaagtgcagaagttgaacttatttccacaacaacagaatagaaatcttggactagaccaccaattcagatggagtttcaggttcccatgttcacagcatctggtttacgtgtccgtttcctcaaggtgtgggagaagagtgggtacaataccgttgagtgggttcgttacattacaaaagcaggatcctacgagattaggtgctagacacaattggtattttgctgggtggagattgaagcaaaaatcccaaataaggcgcagtgcaggctagttatccaagtttcgtattgtattaaacatgtaatgaaagaaggttcaggagttactcaatgtgctgtcagtatgattctgtatgaaaatcagttttaatatttttgttccaaaaggccagcctgttattggatcctgaaattgagtgttctcttgtacactttgtattttgttcttatatctctttttatataaaatcgatttattgtaatgataatatttattgagtgatgattcattgannnnnnnnnnnnnnnnnnnnnn

SEQ ID NO: 5978 - DNA, 371 bp, Glycine max
cgtacgtaagctcggaattcggctcgagctccatggaggctgttgcaaaacttcatgaggtgttttatgtcgtacacagttgggatttgccatcaggccggttccgatagcttgctcacttcctgtacattcaggaaattgaaggacaatttctttagtggctccttggagaagtatgcaggtgtcttgtatgggttaggtgttgagaatggacagggttctcattgagaaggaaaaaaaaaacaaataaaaaatgaaattagaaaaaaaaaaaaaaaaacttggtagatctctctttgtttgagctgctgtatatctggcgtaataccaatttctattaatttaaacctttggcattaagtgtctttact

SEQ ID NO: 5979 - DNA, 467 bp, Glycine max
ctttccacagtggttacgatttcgggtacttgttgaagcttttaacgtgtcaggatttgcccgatacgcaagttgggttctttaatttgataaacatgtatttccccactgtgtatggcataaagcacctcatgaagttctgcaacagcctccatggaggcttgaacaagctcgctgagttgttggaggtcgagagggttgggattagccatcaggccggctccgatagcttgctcacttcctgtacattcaggaaattgaaggataatttctttagtggctccttggagaagtatgcaggtgtcttgtatgggttaggtgttgagaatggacaaggttctcattgaggacaaaagaagatgataaaacttgttagatctctctttgtttgagctgcttctgtatatctgttgaaataccaatttctattaatgtaaacctttggcattaagtgtctttattaaaaa

SEQ ID NO: 5980 - DNA, 512 bp, Glycine max
cgtggccctccggcaatttcccaacaattctgggtcatgaggcaataggggttgtggagagcgtaggagaggatgtaactgaagttgcaaaaggagatatggttgtcccaattttcatagctgaatgtggggagtgtatagattgcaaatcaagcaagagcaacctttgttcaaagtttcctttcaagctgtctccttggatgcctagacatgccacttctagattcgtggatttaaaaggagagatcatacaccacttcttgtctgtttctagttttagcgagtacaccgtggtcgacatcgcccatctaaccaagattgatccggcagttcctcccagcagggcatgcctcctcagttgtggtgtatcaaccggggtaggtgctgcttggagaacagcaggtgtggagccagggtctacagtagccatcttcgggttgggaagtattggattagcagttgccgagggagctagactctgtggagcaactaggattataggtgtggatgtc

SEQ ID NO: 5981 - DNA, 348 bp, Glycine max
ctccaccgggttacgcttatcctttggcgaccaacaacaacaaagacagccggctcgacatcatcatcaacagcatgggtgtcactcctctcctttcgtatctctactatccgaagaaggcttgtcttctcaaatcaaacaacagcgtgacgaaatagaccaattccttcaagcccagggggagcaattgcggcgggcattagcggagaagagacagagacattatcggacgctgctaagggcagcggaggaatcggtgttgcggaggctgagggagaaggaagcggagttggagaaagccacgcgccataacgcggagttggaggcacgcgcgacgcaacttaacgt

SEQ ID NO: 5982 - DNA, 431 bp, Glycine max
gacgcatgtgtcaaatccttcttcattggccacaagtttgagcagctcaagagaaggtagccctgataggacaagcttgccaatgctctctggaatgccttcaactgcatcaaaactattggctactaatccaaataacgtgaattcttgggacccttcaccccatttgaggccagcacttactttgcctcaaatgccagtttttgcagcttggacagatgcatagttcatagctcaatagtccttttaattttttgttctctcaagtgaaatttcaatcctttttattgtctttttttgcatgcatgaacaacacaagaggaaggggttgtagctagtcaaatggagggtctaaatattatatcatcacatcactgtcagcaagtttaatttaaactttcaaatcattacattttagcacacattgctgg

SEQ ID NO: 5983 - DNA, 307 bp, Glycine max
  unsure (1)..(307): unsure at all n locations
ggtttccttttttaattccccttcaataaattgggatttgaaaatgaagaatagaatgttagcttggaagcaagaactatttggtagggaatcaaagaaagattccaccattcaaggatcaagaaactgttaaaacaaaatatccccgtttctatgacaaattagaaacaatttgtgtacaaaaatgttaatttgtacatgttgttggggtttgtttggaggttagttttataatatactttgtagataaggtattgtnnnnnnnnnnnnnnnnnnnnnnnnnnnnnnnnnnnnnnnnnnnnnnnnn

SEQ ID NO: 5984 - DNA, 1750 bp, Glycine max
cccattcttccgccctctttaagataaagcaaaagcaagcagctagctaggggaaatagaaaagcaaaggaagaaaagaaaaacatgaaaggaagaaagaaaagaaaagaaaagcaataaagaaagggaaaaaagaagaagagagaaaacaaagacaaaaggttctcaaaactccatgattattcaaattctctcaaaaacagtaccaagcaatagtcccctacttaatcaacccacaggagtggacctctctcaaagtctctacaagaccctgtttaggcttgggttggaacaacatcaaaaaaagaaaggagagactttcttttctcttttgtagatcgagatcgtagaaattaagaaaggcatgaatagaggtgttttgcaaagctcaccggtgcaacaaatgatggccagaaaccctaacaactggtggaacatcaacaccatgcgccctcctcctccttctcaagcttctgcacctttcttctccactccttccaactttctaactccttataaccccacttctcttcctcttccttcttggcatgacaacaatcaagagctacccgagtcatggagccagctactcatgagtgggatggtgtctgaagaagagaaagggggtatgtgccagattcagtcaaagaagttggagaactgggagcaacaaatgctaagccaggctccaagtgctcctattgttgatgttaagcaagaaagctcggtgaacagctatgtgtatgggcatggaacaaacgaagagtttcaaccagcaaagccaattacatggtctcaaatagtgcctgcttcttcccccaaatcatgtgtaacaagtttcagcagcagcatgttggatttctccaacaataacgccgatgcgaggcctcctccaccagatccatcctcagagtgtaatagcagtactgcaactggtggggcattcaagaaagctagggttcaaccgcccacaactcagtcgaccttcaaggttacgaaggagaaattaggtgacagaattaccgcccttcatcaactcgtttccccattcggaaagactgacacggcttctgtcttattagaagctattgggtatatcagattccttcagagtcaaattgaggcccttagcttaccatacttgggcagtggatcaggaaacatgaggcaccaacattccgttcaaggagagaagacttgtatattccctgaagaccccggtcagttgctgaatgaaaactgtttgaagaggaaagcagctagtgagcaggattctcaagaagaaccaaagaaagacctgaggagtagagggttatgcttggttccagtgtcatgcacgctgcaagttggaagtgacaatggagctgactattgggctcctgcttttggtgggggatttcggtagattgcttaacttactatatattaataggttatcatatgcagcatacagagagagaaaatatattcatggagattgtataacatcattagcagtcaatctgctgcaaaacctaattaaggctgattgctcatgatgctatacgcaattcctgaataaaatgtatgctgccagtcaagtcaagttgtatatatttgcaagcccttgttaagactccttaattcacggaaatcaagctttagttattttcactagcttaattaattaagaggtcgatcgatcgaacaatgctcgattaattaatgtatgtatatatatgcaataattgtatgattattttcaaaaaaa

SEQ ID NO: 5985 - DNA, 379 bp, Glycine max
attccaacctcaattccctacaatcactgatcaatcaagttgttgtaccaccaccaacgacaacaacaactattggagcatcgaggatatctggtcgtctatgcaattactcaatggagattaaacctagctatatgcatgcctatataaatcatatatatgatgatatataaacctaagctcttgtagagtgtgttcaggcttaataacatcattaggtctgtttatatgagtagtctaagtttggtgtttgtaatgcatgatgtgagttaagaattaatttagttatggattgaaatatatagtaacttatatactacatgtgcattctcctattatcgtaaataatatggttgttgtaccataaaaaaaaaaaata

SEQ ID NO: 5986 - DNA, 484 bp, Glycine max
tacgtaaactcggaattcgggtcgggcagcagcgtccaggtgcatccccttcctccgtcaaacccacgcccatttcattcttctcaattcccaattccaaattagggttagggttttcacaatctcaatgaccttctcttcttccttcaccttacaatccctattccactaccgctactactactccctttgtcttcgtcgttgtcgttcgtaaggattaatcaattaacctatcgaatcgtttcagtatcgtcgtcttctgttgccttccatgggcctcgctcagccgcagtcggaggtgtaggtcggagtttcttcctcgcacgcgtgggggggctcatggctccgacgcggcaggtcggcgtagggctgcatgagaggggaggacggagaatggcaacttagatgttgaatcggacgacgatgaagacaaagaagtcaaggagtttcgcattcaaggccactcaatgtgcctcaagaggcg

SEQ ID NO: 5987 - DNA, 599 bp, Glycine max
cggacgcgtgggctgggaaaaaacgaaagaaggggggtatgaatgggatttccaaaggattaaaaataaaaaaatgaattaaaagacacaacacagaatcggaagaaagacttcttctttcacattcacaattcacaagcaaagcaaagcaggcagcagcagcgtccagtatcttcttcttctgctgcttcctccatggacctctctcaccctcaatccaacctgtccctcggattctcttcctcccacgcctctccgcctcgccgctccgacccgccggtgccgctgcagctcatggaaccgcagacggagaacggcaacaacctagatgtcgaatcggacgacgacgacgacgacaaagaagtcgaggagtttcgcattctaggccactcaatgtgcctcaagaggcgaagagattgcgactccttcttcttctccgacgccgccgccaagagggtttccgtcgaacccgatctcgacgcgcgtaaagccgccgtgcgcgcgtggagctgccaacccctctccatcgctgatcccgacatccacgagataatggaaaaagagaagaagcgtcaattttgcggggatcgaactcatag

SEQ ID NO: 5988 - DNA, 398 bp, Glycine max
cattcccttcctccgtcaaacccacgcccatttcattcttctcaattcccaattccaaattaggggtagggttttcacaatctcaatgaccttctcttcttccttcaccttacaatccctattccactaccgctactactactccctttgtcttcgtcgttgtcgttcgtaaggattaatcaattaacctatcgaatcgtttcagtatcttcttcttctttttcttccatggacctctctcaccctcagtctaacttgtccctcggattttcttcctcccacgcttcgccgcctcctcgctccgacccgccggtgccgctgcagctcatggaaccgcagacggagaatggcaacttagatgttgaatcggacgacgatgaggacaaagaagtcgagga

SEQ ID NO: 5989 - DNA, 689 bp, Glycine max
atgcacgcgtacgtaaactcgggaaagtccaattgtaatttgcaacaagggcatctaaacccagaacccaatcatcttttattgcaaacttttgtgcattggaatttggaggccataaaaaagatgcgatgctacacgcaaacaagtagtacaagtccaataagaaaagcaagatagaaagattggctagttcacacacctcaattaatacaacaacaccctgttgctgatagttattatagagagagttcgatcaattcaagcttgcaagcttaaccatggaacggtatgagataattaaagatattgggtcaggaaactttggtgtggcaaagctggtcaaggaaaaatggagtggtgaattatatgctatcaagttcattgagagaggcttcaagattgatgaacacgtgcaaagagagattataaatcataggtccttgaagcatcccaatatcattagatttaaagagttgttgcttactccaactcatcttgcaatagtcatggaatatgcttccgggggagaactgtttgaaagaatatgcagtgctgggagattcaatgtgtacaaggcgagatatttctttcaacaacatatttgtggagtcagctattgccattcactggaaatttgccacagagatcttaagctggaaaacacacttctagatggaagctgagcacca

SEQ ID NO: 5990 - DNA, 856 bp, Glycine max
tttcctttgacacattcattgatcctctttccaacacaacctcctcgttgctcatcttcaccgaaccaaccacctcaacaattttccaaaccaaaacctcaatagagagaaacaaatttttcagaggccatcatggacagagaacaagaagagatgcaatttcttgggttctttgacatatacaaagaagcctctaagatcatactttcatggaggaaaatcttcacccaaatcacctcaacactaatcctgcctctctccttcatcttcctaatccacatggaaatctccaacctccttttcaggaagatcctcatcaacgaaatagtcatggacgaaacaaggcgtaacacaccccaatacaacaagcttgaccgcatgatctcttctgaattgatcactcttgtgctcttcaaaatcgcatacttcactcttcttctcatattctccctcctctccacctcggcagtggtctacaccatcgcctccatctacaccgcaaaagaagtgacattcaagagggtcatgagtgttgtccctaaggtgtggaaaaggttaatgttgacctttctatgtgcctttgctgcttttttcatttacaatatcgtgaccatgttggttatgttcttgtcaatagtcacaatagggataagtagtggtggggttgtggttttggttttgataacggttttgtacttcattgggtttgtgtacctcaccgtggtgtggcagctagcaagtgttgtgaccgtgttggaggactcgtgggggattcgagccatggccaagagcaaggagttgataaaggggaagatggttttatccatattcgtctttttcacccttgtggcttctt

SEQ ID NO: 5991 - DNA, 542 bp, Glycine max
tcgcatgccacccgtacgtaaactcggaattcggtccaagaatgacaacggtagctgcttctcttgatgccaaagaggtgtctacctccaaaactgaccaaaaccaagtgtgtgactgtgatccccaaactagccatgtcttcaaatcaaaattaccagatatcccaatctccaaccacctccctctccacgcttactgctttcagaaactatcccaattctccgaccgcccatgcctcatcgtcggacccgccgccaaaacctacacctactccgagacacacctcatttcacgcaagattgccgccggattgtccaacctcggaatccgcaagggcgacgtggtcatgatccttctccagaactccgccgagttcgtcttctccttcctcgctgcctccatgatcggcgccgtcgccaccacagccaatccgttctacaccgccgcggagatcttcaagcagtttaccgtctccaagacgaagctgatcataacgcaggcaatgtacgtggacaagcttcgcaaccacgacgacggcgcg

SEQ ID NO: 5992 - DNA, 701 bp, Glycine max
aaggatttgaatgacacgaaactgcgaaatgccctaattcaagaagctggcattcggattttgtgattgggagagaaaccgacccagttgtgctactgcgaatgccgctgtcccgtgcaattcgaagggaatgaagaacaagggtttagaattagggtcttaaaccaactcaaccaactttgtgggtaaaattagggattcaggtgtaaagtgaaaaactagggttttggtaaatctccaaaatgtcgacgggcaaacccagaggcggtgattttcagatggtcccggcgccgggaacgtcaaagcctccccttccgccggcagcagcatcgaatgcgatagtggaatatactccggtctctctcaaagaggaagaggaggatctggaagtcaagctccgacggattatcgacaatgttcctgtccgtgttagcaatacttccggtagttccgccggttcaggctccggcgactttcaccagtatcggcaaatgagacgcaaggaacaagatcgtcttgccaggatggaagtcgactaccagaaaaggaaagagctggcagaatttaatttgagaagagaggaaagactaaaagcggctgaggaacggacggcaaagaagcgagcaaaacgtcaaaagaagaagcaaaggaaaaaggagaaaaagaccaaattaaatgctggagaacagctgcaagagaaa

SEQ ID NO: 5993 - DNA, 1361 bp, Glycine max
gaaaaacaagagaacactggattagatggctctaaagattctgatgcaaaatctaccagtcaatctatgcaaatgtcttcaggccctaatggttccactgctaatgcttctcgtgaactatcatccgcagagcggcagaacttgttggacaagaaaacaaagcttttgtccatgttggatgaggtagataaaagatacagacagtactgccatcagatgcagattgtggtgtcatcttttgacatggttgctggctgtggagcagcagaaccatataccacacttgccttaagaacaatttctcgccactttcggtgtttgcgtgatgccatcagtggccaaattcaggtgacccaaagaagccttggggagcaagagggaataccccgtctccgctatgtggatcagcaacttagacaacaaaaggcccttcagcaacttggtgtaatgcgacaagcttggaggcctcagagggggctttctgaaagctctgtttcaatactccgtgcttggctctttgaacattttcttcatccttaccccaaggattctgagaaaattatgctggctaggcaaacaggcttgaccagaaaccaggtggcaaattggttcatcaatgcaagggtgcgtctctggaagccaatggttgaggaaatgtacaaagaggagtttggagattccgagatgaactgcaacctttcatctgagaacaacacggtcaaaggtaaaagagatgatgttcaagagtctgataacattaacaataataataataaatgggaagagtcacaggacaatttagtaactgttgacagtgtgcaagtccaacctcaagcagaaatggatagagtggtcaatgtagaaaatgtggtgatggattctggaactgggaaattgcagggtgaccaaaaccaacaaaggcttggcttgaacaacaacaacaacagcagcagcaacttttattctatctcaaccaacgagaatggtggggatggaggcctaatgggttcttctactcatgccacatatgatttatcagagttgggtaactttactgtgggtagccacgtttcccttgcattggagttgaggaactgtgaaaatgatgggtttgccatgtctgatgatgccatacagaaacgacgtaagcaaacattgtcctcttccccggagactgatttgctagattatcatttcacggattcaggaaagcaacagcacaggtttggcaatccccatttgctgcatgagtttgtcgtatgaaatctggcaaaaaaatatttgatgattttaatggatctctggagaggtgtacctcaacaaagctgaaagagaaaaaagcctatgctgtgctgctgctg

SEQ ID NO: 5994 - DNA, 1550 bp, Glycine max
atcgcgtcggcagtccacaaacttgggactcttaacagcgtgacgcgttggcctgttgggcgcagtcattatctctctcaatttttttcttaaagtgagtgattgggtggtgctgagtcaggaaagtggctgagattgggttttggttttggtgtgattccaacaaatccacgtttgagccacacacactttgtctttctggctttgttttctttgtcccattcctatcccaaactttcttgtggctctgagattcaattccccgttttgttttttactctttagactctccgccacctgaacattacccatccatctcatagcactcaccccagaaaagcaccgtcacttgttcgtttcaacgttcttctattgatacgttaatgctttttgattcctttcagatttttctaactaactaactatctgtgaatcaaagaaatttcagtgtacgtttcgtctgattctttgggatactgcttgagctcgatgggagatgtggctaaggaccttgcagctgggactgttggaggggcagcacagttgatatgtggacacccctttgacaccatcaaggtcaagctccaaagccagcctgcaccactccctggtcagcttcccaagtactcaggtgcatttgatgctgttaagcagacaatagcagctgaaggagcaaggggtttatacaaaggtatgggtgctccgcttgctacggtagcagccttcaatgctgtcctgtttacagtgaggggacaaatggaaacattagtgaggtccaatcctggttcccccctcacagtggatcagcagtttgtttgtggagctggagccggagttgctgtttccattcttgcctgcccaactgaattgatcaaatgcaggttacaagcacaaagtgcgcttgccggctccgaaacagctaccgtggctgttaagtatggaggacctatggatgtggccaggcatgttcttaggtcagaagggggcgtgagaggtcttttcaagggcttggttcccactatggggcgtgagatacctggaaatgctatcatgtttggtgtatacgaagcattaaagcaaaagtttgcaggaggtactgatacttctggcctaagtagaggttctctgattgttgctggaggcttggctggagcttccttctggttcttagtttacccaactgatgttattaagagtgtgattcaagtagatgatcacagaaacccaaaattttctggttcatttgatgcattcagaaagattcgagctacagaagggttcaaaggcttgtataagggttttggtcctgcaatggctcgaagtgttcctgcaaatgcagcatgtttcttggcatatgagatgacaagatcagctctgggatgattaattcttgtaacaggcttaatatcaaattctcatgttttctttttctttttgttcactaaacattttattccatccatttacatatacccacacaaacgcgtcttccgttattgcttcaatcaacgactcattctttcattagtaatacaaacatccttattttc

SEQ ID NO: 5995 - DNA, 541 bp, Glycine max
gacagacagacagacagacagagtgagtttgtgacgaatcctctgtcgtcatctcaacctctctgcatttgtgcgttgcattgcacatatctctcaaaactttgttctggttctgtgactcttactattttcgtgtgtcttgcatttggatcattatctgtcacctgagaaacccacctcagagattcacctaacaccccttcttttgattttgaaccccttccatttcaatcaaaacctctctcatcgtcttctattctacatacaattctacccttttcttcactctgcttttctgacaaaagtgttggttgaacttgattctttcttcatccatttaattgggaaccagcgaaagcacgatgggagatgtggcaaaggacctaacagctgggactgttggaggggcagcacaactgatagttggacacccatttgacaccatcaaggtcaagctccagagccagccaacaccactccccggccagcttcccaagtattctggtgcaattgatgctgtcaagcagacggtggcagctga

SEQ ID NO: 5996 - DNA, 379 bp, Glycine max
tttgttttttacttcttatattctccgccacctgaacattacccatccatctcataacacacaccccagaaaagcagcctcacttgttcgtttcaacgttctttctattgatacgttaacacttttgattcctttcacattcttataactgactaactaacgatctgtgaatcaaagaaaaaggttgttgttgggttctgttcccttttcactgtgagtttcatctgattctttgggagactgctagagcacgatgggagatgtggcgaaggaccttgcagctgggactgttggaggggcagcacagttgatatgtggacacccatttgacaccatcaaggtcaagctccaaagccagcctgcaccactccctggtcag

SEQ ID NO: 5997 - DNA, 363 bp, Glycine max
gtttgtgacaaatcctctgtcgttatctcaacctctctcaaaactttggtctggttctgtaactcattccatttttgtgtgttttgcatttggattattatctgtcaccttcacagattcacctaacaacacctcttcttttgattttgatccgctttattctgcatacaattctgctcttttgttcactctgttcttctgactgaagtgttggttgaacttgattctttcttcatccatttatttgggaaccagcgaaaacacgatgggagatgtggcaaagcgacctaacagctgggactgttggaggggcagcacaattgatagttggacacccatttgacaccatcaaggtcaagctcc

SEQ ID NO: 5998 - DNA, 415 bp, Glycine max
tgcacgcctacgtaaacatgaacttcggattcggctcgagctcgagccgaatcggctcgagaagtaagcttgctcatgagaacagcagcattaaaactcgtgtcaggaatgaaggcgggattccaccgcttgttcatttgcgtgaatttgcggatacaaaggtgcaaagagcagctgctggtgcattgcgaacccttgcttttaaaaatgatgaaaataaaaatcagattgttgaatgcaatgcccttccaactcttattctaatgcttcgctcagaagatgctgctattcattatgaagcggttggtgtcattggaaatctggtccactcttcccctgatataaagaaagaagttcatcttgctggagccttgcaacctgttattggactacttagctcctgttgctctgaaag

SEQ ID NO: 5999 - DNA, 1058 bp, Glycine max
cgagaaagcaaaaagcccaagcagtcgtcttggtgctgccgattggtcaaaatatataaatccatttgttgaaatttgttactgtattgcattgcgtttgctgcacccatcaatggcaggcgtttctctcaagtgcggtgactgcggtgctctgctgagaaccgtagaagaagcgcaagagcacgctgaactcacctcccactccaacttctccgaatccaccgaaccggttctcaacctcatctgcaccgcttgctccaaaccctgccgatccaaaaccgagagtgatttgcacacgaaaagaaccggccataccgagttcgttgacaagacttccgaggccgttaaaccgattagtttggaggctccgaaggtggatgcaactgcttcatcggaaaacccttccgctgctgcatccactgaccaaaatgaagaaatggttgttcctgaagtggacaaaaagctgcttgaggaacttgaatccatggggttttcaacggcacgggcaacgcgggcgcttcattactctggtaatgctggccttgagtctgccgtaaattggatagtagagcatgagaatgatcctgacatagatcagatgcccttggtacctaccaacaccaaaattgaggctcctaaaccttcgcttaccccagaagaattgaaggccaaacagcaggaactaagggagagagctcgtaagaagaaagaagaggaagagaagagaatggagagggaaagagaaaaggagagaattcgcattggcaaggagttgctggaagcaaagaggattgaagctgacaatgagaggaaacggttgttggccttgagaaaagcagagaaagaggaagagaaaagtgctagggagaaaatcaagcaaaagttggaagaagacaaggcggaaagaaggcggagacttggattgcctccagaggaaccctcagcagccaaaccttcacctgcacctgttgtggaggagaaaaagagttttgtgcctgttaggcctgccacaaagccgagcaaatgagagagtgcctccgttctctcaagcagaacca

SEQ ID NO: 6000 - DNA, 2079 bp, Glycine max
  unsure (1)..(2079): unsure at all n locations
cgctattagcactcctactcaaaatacaacatantcaccgaaaaaacttaaaactgcctcagaagacaattctgcaagcaataaatctagtggttctgtggcttcctcaaagacaaacaacgaatgcagcgagagattaagtgaggctcaaagcacttgtacatcaccaattttcgaagctgagagtacatacgtggagaatatgcaggatgtgccccagtatgtacattgccaagttatgcaaactcttgtgcagagcacttgtacatcccctatttttgaagccaagagtacatatgtggaaaatatgcaggatgtgcccccgctgaaaagttctaaactgaacaaaattgatatggtgaagcatgaaaagtttgcccaatttgaaagggaatcagctgagcataatgatgaaacagaagataaatcagttacaattgtatcagatgctgcaaggtgcgacaaaacttctgaattaacagagttaaggccagaacaagactgtggtgttgctgaacctgaaactgaaaacgaggatgaaatcttaaaatctgagttagacggagacaattctcatgttagtatgatgcaaggatgcagtgctgagcgggtgaaaccttctaaaggagctattgacttgattgccacagttggaaatcttccaaagcaccttgatgaaaactgtagtctcaatggtggtaatacaaccaagtttgattgtgaaacgcaattggaactttccttaagaagtgattttcctggcagctcaggtaatcaagcaagtgaagcaactgaggaatctcaaagattgaaccattcaaatacttctgccttttcttggtatagtaatagtaaattgttgcagcctcatttttcaacaccatcgattacatttcctgaagtaaacaacctcagttgggattctcatgaatcccataaattatctggaattacttctggaaattgtcagtatggtggctcaaatcagaacctggagaatatgatcggtacagtcatttgtcagtatggacaagttacaccaaaattatcaaacagtcaatgtggactcttacctgtttctggggttatctccaaccttaagtctgagggacatggtaatgttttcacttctttgttctatgcacaatctggtattcaccctatgtcgagtccaaaacctgtctgccagaatgagagttctccctttcccacaagtacctccacccagtcctatcctgaaagccacaactcagatcaactacatgactgctccaatgatgctacttgtcttaatcaaaatgtaaaggataatactgattcagatcacgcaaggcatgattctcctgttgctgatcagagtgctggtaatagtttatgccatgatgctgcaaatcatgtcaatagtagtgcatatggaagcatggacagtggaaatgatggacatgctacttcagctatagtatccaagaacacctcagatggtttcagtgatagtggttgtcataattatgatggatttagagtgacagatcctcatcgctccagtcaaagagaagcagcgctagtgaagtttcgactgaagcggaaagagagatgcttcgagaaaaaggttcgatatcaaagccggaaaagactggcagagcagcggcctcgggtgaaggggcagtttgtacgacaacataatcatccattcgctgaggctggtggtgattcatgaacattgttctctttaggtttcctgtagtattaaattacagctgactgtaacaccgattgtgtcaacaaggattagctgtagggtggtgtctgtgtatgtgttgttggaatctgtttatccattaggcaaaagaagagtaggccagtagggagatttatatttggactgccacttacaaatttaggattgcaattatttagtgggtttggtttggattttacctgtgtatatgttttcttggttgaatactaatatgggtctgtaaaaaatcccctctagaacctctggttttgcaattgagtgatctttctttgcaaaagaaaccaatgtagaatctaaaaaatgtatgcaagagtgagggt

SEQ ID NO: 6001 - DNA, 470 bp, Glycine max
gtttgtacgacaacataatcatccattcgctgaggctggtggtgattcatgaacattgttctctttaggtttcctgtagtattaaattacagttgactgtaacaccgattgtgtcaacaaggattagctgtagggtggtatctgtgtgttgttggaatctgtttatccattaggcaaaagaagagtaggccagtagggagatagctaaagggtagtgctaaacattcttaggtgttttcttctgggtttacatttggactgccacttacaactttagaattgtaattatttagtgggattggtttgggttttgcctgtgtatatgttttcttggttgaatactaatatgggtctgtaattacataggttttaggtttcagtctgtaatatgggtctgtaattacatgggttttgcaactgattgatctttctttgcattcggcatttaagcattgttttaaactcacacc

SEQ ID NO: 6002 - DNA, 802 bp, Glycine max
  unsure (1)..(802): unsure at all n locations
tgtgtcactttctactgatgatcctctccaaanttacttaacaaaggaaccattggttgaagaatatagcatagctgcttctgtgtggaagttgagtctcatgtgatttatgtgagattgcccgaattcagtttatcaatcaggtttctcacatgctttaaagcacattggattgtaaggagtactacaagagtggccacgcggaaatgacattcagagaacaaacgttttcacatccggnggaattccgtgatacgatttggagagaggagatgcaacaggtttatttgggcaaagccatcattcctgaagtagtagacatataagatgccagtggcattcgtttcatccacaatgaggtagaaagtatatttcctcaaacccatgcagcatcagagatgtactaaggctgaagacattacaacactggtctgatgatatgaaccagatacatactatagagaatcagcaagatcgctgagcttgagtatcgaacaacgtttacagctacaaatcgacgtaccgtgggaatttttttccttgtactattttgtgttattttaaaattattacgaataagttcatgcttaaagcaaaatgatgcctgttggtgttagaaatgtaagttatgatcctttgaagggagagatgttcatctcccaaaattttgattcccattgtttatcgataatattatatatagtgaacaacagttgagacttgcaaaacggtggctctgttagttttaccataacgaggctacgtaacaagagcaaaagtggctgttaagttagttttaaaa

SEQ ID NO: 6003 - DNA, 742 bp, Glycine max
tatgggggtcaccaacacaaacaatagtgcatagcgtttttcattgtgcattattcaatggccaccacagcagctctatccggaaccatggtgagcacctccttcatgaggaagcaacctatgacgaccaagagcctaaagacattccccaacgctctttttggtctgaaaggtggacgaggtggtcgtgtaacttgcatggcctcgtacaaggtgaagctcataaccccagaaggagaagtggagtttgaatgcccagatgatgttttcattgttgacaaggctgaggaagaaggcattgaacttccctactcgtgcagggctggttcttgcgtttcatgtgttgggaaaattgtgaaaggtgacgtggaccagtcagatggtagcttccttgatgatgaacaaatagaaagtggatgggttctcacctgtgttgctctacctaggtcagacgttgtcattgagacacacaaggatggagagatcgaatgatcgatatatatcataatgtaatcttgtccattgctcttctaatgccatctatctatgtcgtgttttgattttgttagagtgatttggcattggctagttagctagctgaaatcatcgcgagtttattaattacttttgtcatgtttgtggaaacaagtgaaattgttgcactttaattaattagtttggtaatgcttactgtttatgcacatgttgtctaagacaataatagttattctttatctttttc

SEQ ID NO: 6004 - DNA, 586 bp, Glycine max
tcgcccacgcgtccgctcacgcgtccgcccactcgtccggcacctccttcatgaggaagcagcgtatgacgaccaagagcctaaagacattccccaacgctctttttggtctgaaaggtggacgaggtggtcgtgtaacttgcatggcctcgtacaaggtgaagctcataaccccagaaggagaagtggagtttgaatgcccagatgatgttttcattgttgacaaggctgaggacgaaggcattgaacttccctactcgtgcagggccggttcttgcgtttcctgtgttggcaaaattgtggaaggtaacgtggaccagtcagatggtagcttccttgatgatgagcaaatagatagtggctgggttctcacctgtgttgctcaacctaggtcagacgttgtcattgagacacacaaggagggagagatcgaatgatcaatatatatatatatgatgtaatcttatccattgctgttctaattctatctatatcttggattttttattttgttatagtgatttggcatatttgtgacaaatagtgagtttattacttttgtcatatttgtgaaaacaagtgaaat

SEQ ID NO: 6005 - DNA, 435 bp, Glycine max
  unsure (1)..(435): unsure at all n locations
cccacgcgtccgcccacgcgtccgcccttgaatcctagtgcgtagcatattccagtgtttttcatttcatcgtgcattcaatggccaccacagcagctctatccggaaccatggtgagcacctccttcatgaggaggcaacctatgaccaccacaagcctaaagacattccccaacgttggtgaagctctttttggtctgaaaagtggacgaggtggtcgtgtcacttgcatggcctcgtacaaggtgaagctcataaccccagaaggagaagtggagtttgaatgcccagatgatgttttcattgttgacaaggcagaggacgaaggcattgaacttccctactcgtgcagggccggttcttgcgtttccctgtgtggcaaaattgtggaaggtaacgtggaccantcagatggtagctttcttgatgatgagc

SEQ ID NO: 6006 - DNA, 689 bp, Glycine max
atgcattcttctcttccacctctgcagcagctggaacaggatcctccaaattctaattagtatagccagcagaagagaaatttgttagtgcagctaaagcagcattgttatatataaatcattactagtagaactagtcaacaatctgaattataccaaaaatagggctagagcaaacacaaaagaaaaagagtaattaccaacagatcaggaggtggttgtactggtggtgcttccactttcacaggttcagaaggtggaggtggagggggtgagggtgagggtgagggtggacattcctcttccacttctgttgtctttttgtattcaatagccaaaacttctttgttctcaatagcctgatcctttcgaactattggtccctggggagcatctttgacatactcttccatggcttgcagaaatgacgaagggggctgctcaactttaataaacttctctccccgtccaatgtcaagattacggcatatttcatagaactctgacagtctctcagcctggtgcccaaccctcctgtatatatcaagagctttcagagcatcatggcgttgcatctcaaaaaacccggaaccatggtgagcacctccttcatgaggaggcaacctatgaccaccacaagcctaaagacattccccaacgttggtgaagctctttttggtctgactcgt

SEQ ID NO: 6007 - DNA, 796 bp, Glycine max
agccagtttgctagctgttgtggcactctcatttgaactgggagcagtaacatgggccaattcccatcctgtagttccatttgcttgatttgaagcagcagaaggttgttgctcaacagcaacgggaacaatggctaaagccaatgcattcttctcttccaactctgcagcagctggaacaggatcctccaaattcaacagatcaggaggtggttgtactggtggtgcttccactttcacaggttcagaaggtggaggtggagggggtgagggtgagggtgagggacattcctcttccacttctgttgtctttttgtattcaatagccaaaacttctttgttctcaatagcctgatcctttcgaactattggtccctggggagcatccttgacatactcttccatggcttgcaaaaatgacgaagggggcttcatatcatcaactaataaacttagtatatgtttcccaaaagaactattgaaaaatcaagctaaatgtctttgacataaacaagcatgatataagatccaaccaacctgctcaactttaataaacttctctccccgtccaatgtcaagattacggcatatttcataaaactctgacagtctctcagcctggtgcccaaccctcctgtatatatcaagagctttcagagcatcatggcgttgcatctcaaaaaactgtcacaatagtctcataaatacatagaaagttgaacatcaagcctcaaatccatgaagataaccatatataccttatcaaccatattgactgttccatcactaatagctt

SEQ ID NO: 6008 - DNA, 504 bp, Glycine max
ctcgagccgaaaaaatctcaacaaaatttgagcatgccacatatggagcttaggtctacctgcaccacctgcttctttctcttgattctcatcctggctctccctcgtttctcaagaggggaatctgaagcattgcatacagagatatatgagattgattatagaggtccagagacacactcttcaggtgttcctcctcctcatcacttccatattggtaagcagcattcaacttctcatcctcaaaaaggctcagtcagaggaaccaaagctttgggcttaagggatagcacttacgatgaaaataaggtcaagaaagtacatgaatgatcatcaggaagctttacaaattaaatggagtatgactttgattagtgctctcatacataaatatttttgttagagagcgtaatgatagtaaagttgagacttgagatattgtcccattatggtttgctcatgtgtataattgataatagacaaaaatcaacatttgaatatcta

SEQ ID NO: 6009 - DNA, 807 bp, Glycine max
  unsure (1)..(807): unsure at all n locations
cggacgcgtgggcggacgcgtgggcggactctgaggctcccctcacctctctctccgaaatccccaaattgcctgtgaatgctagaaaccctaggcacgttcgatttgatgctctcccatttgcaatcaagggcgagcgcattcggttcttgcacgcaaggctggtactaccgctgcatcggcctcgatccctgaattcatcattctttctcgcaccatctttttctattccgattcgatttgttgttgttgttgttgttgttgtgtttttgtttccttccttgacgaatcatcacgatgttgatgagcaagcagaagaagagccagatccagaacgcgaagaggttgttgataagcatcaatgtgctggggagcgcggggcccattagatttgtggtaaacgaaggaggagcttgtggcggcggtgatagacaccgccctcaagtcctacgcgcgtgagggcaggcttcccgtcctgggaaacaacaccaccggtttcgtgctttattgcccccatcttggatctgatggtaccttttttcaactttgagtccttgggagagaattggatcacatggngtgaggaatttcgtgctgtttaagaagccagagggtgtggcggatgtagatggaagtacagcactttctcgcagcagcagggggagtgggagctggaaggcttggttcaacaagtccctcaacctcaagatttctacccactaatgaataaatctctcggggaattgaacatgatgccttttgtggtgaatgccactaataatatccataatacgtagtatttctttt

SEQ ID NO: 6010 - DNA, 470 bp, Glycine max
atggtgttgcagctctaagtccttgggatagaattggatcgcatggggtacgaaatttcatgctgtgcaagaagccagagggtgtggcggatgtagatggagatgcaagtgggatttcgcgcagcagcagggggattgggagctggaaggcttggttcaacaaatccctcaacctcaagatttctacccactgattcgattaatcgaataaaaaaactcttggggaattgaacatgatgccttttgtggtgaatgaatgccactattatcagtaatatgtatttctttgcttgtttctcttctcgctagcccgagaaccctctttaggaatttgttcaactttgagttttaggttttgatttttatggaataataaaattctagttttgattcctcatttccttccttgccttctctattcaattaaacttgaagagaagagaatatacttgcaatattagctcacattc

SEQ ID NO: 6011 - DNA, 648 bp, Glycine max
ttggggaaagaaaccaaagtctatttttttttgtttctgagcctcccctcccctctctctaagatccccaaattgcttgtgaatgctagaaaccctagacagattcgattggatgcgctcccatttcacatcaagggcgagcgcattcggttcttgcaagcaagcctggtactaccgctgcctcggcctcgacccctgaatttgaaccattcatcaccacctttcttcattcattcacggttttccttttcgactcgatttgttgttttttttgttttgtttccttgacgatgttgacgatgagcaagcagaagaagaaccagaacgcgaagaggctgttgataagcatcaatgtgctggggagcgcggggcccattaggttcgtggtgaacgaggaggagcttgtggcggcggtcatcgacaccgcacttaagtcctacgcgcgtgagggcaggctttccgtcctgggaaacaacaccaccggtttcgtgctttattgcccccatcttggatctgatgctttgagtccttgggagagaattggatcacatggggtgaggaatttcgtgctgtttaagaagccagagggtgtggcggatgtagatggaagtacagcactttctcgcagcagcagggggagtgggagct

SEQ ID NO: 6012 - DNA, 1483 bp, Glycine max
gtgtagcacaccatgtgtcatttatgctaccctatggtttgtttgatattggtgctgggtcactggctaattcattgactctcttcccatacattgatgaaatatctgagaagctggactatataggcataaactactatgggcaggaagtggtttcaggtgcaggcctgaagctggtggaaaatgatgagtacagtgaatctggtcgtggggtataccctgatggcttataccgcatgctgcttcaataccatgaaagatacaaacatctaaatattcccttcatcattactgaaaatggggtttcagatgagacagatttgattcgccggccatatctcttggagcatttgcttgctatttatgctgccatgatcatgggtgtgcgtgtacttggttacctgttctggactatttctgataactgggagtgggctgatggatatggtcccaagtttggacttgttgcggttgaccgggcaaataatcttgcacggacccctcgcccctcttaccatctattttctaagattgtgaatacaggcaaagttacacatgaagatcgtgaaagagcatgggatgaacttcaaagagttgcaaaagagaagaaaacaagaccattttatcgggctgtggataaacaccgtttaatgtatgcaggtggacttgacaaacctgaacagcgaccttatatagaacgagattggcggtttggtcattatcagatggatggactccaggatcccttgagccgcttctcaagatccatttttcgaccattctccctcttctcccttaaaaggaaaccaaaatctcaaaagaagaatgccaaattgattctccagcctcttgaaacttagcaattgatttgtcttgtcccagattctatatttttgagtgatgagcactttccatttcaatattcaaccccagacacatctgtctaactttcattatatgtgtaatattgtactgggtgtattatggtgcattcttgttgtaaagcttatttgtctcatttttaccaagaagtcaacgtattaatataatcactggacggtaatatgtgatgcctgtccctgttagcggaatgtcatgtattgtataccctggacatacacaaagaatgcaaatcgctgatcaccactttatgtaagcaagagccttcccttttttctttctttctttctccctaaggaaccttgatctcctcttttctatggagtgagatattttgcatctaagttttcccaattcatactggtcatggcatatcagtatcagtatattatacaaatctcgtctccttattgaagagaaagatcaagatcagggaatttcccgcttcttggaaatggacgagaattgcattgtctcacagtcggagccgcattagttatcacctttgtataacatgtattccagttttgctgcattattcagataatatataatacataaatatatgaaagattttccaaaa

SEQ ID NO: 6013 - DNA, 590 bp, Glycine max
tcgacgacttcttggtgtccgaacaaaagggtctgagagacaggggaaggtatccaagctggccaaaggagagatgctaatgttgaacattggatcaatgtcgacgggggctagagtagttgctgtgaagaatgacttggcgaagttgcaacttacttcccctgtgtgcactagcaagggtgagaagattgcacttagtcgacgtgttgagaagcattggcgtcttatcgggtggggacaaatccaagctggaatcactcttgatgtccctcccgccccccatctgagttgaacactgatcacaagaaacaccagcagctataaaaacctgagacgaatttagatatgtgggaagggagacaagtgttgggaaccatttttgtgaggtggagaagaaaacgttttttgattgttgtcttctattttgttttcacatcgttattggtttattttccccactgtacctattattgaagctgtatcctatactctgattgagttcaggctgggagcgagaatttcagccagtacttgtttcattccatggcatctttaccgatattcaaaaattggttcgccacttaaaagag

SEQ ID NO: 6014 - DNA, 830 bp, Glycine max
tgggtgactgttgtgcgtgaaaaccaggttttgaaggtggatatggataggatgagttctagagttggagaacttgaagaagagttcagtaaaataaagcaagaaatgaaaagtgtgacaaaatctcacagttcacgaagctcgcctcggttggttgccaggaaaatcgggtgtaagcttgttccacgaccatcagatgctcaaccagaatccctcaaccgcaccggatccacaccaagagcatccattgaatgggcacggcgttcccataagtccaaacactcagaaagttttacttgagtatcaagaaaccagagctcccctttcttttattcatgtatacatatagcagtgttgtgtggttttaaattttttgtacgagggaaagggaaggaaaatgtttcttaatccattatgcctttttatttcaccagtttgcatatctgaacattttccatttctttccctcgtgtaaagtttgttgtacacttatgtaggcaatttcacatattgtcctgtttgtttggggaatagctcctgtatttatcatccgtatagctttattcttaatttggagatattgacagtgaaagatgttgttttagacccctttgtgaagaacattattgccatcgaagaaagaatcatccaagttccacctagtgcagatgcaaagctgatgcacaaaggttggagagctcacaaccgaatgtaactgacaatattgtgcttctagcatagcttatttcatagatgacaaaatattgtatagttgtgacacgagtgtaatttctttataaatgacaaaatattttatggtctttgtcatt

SEQ ID NO: 6015 - DNA, 246 bp, Glycine max
cagaaacaaaaaccgttattccccagtcaaaatggtatgatttttgtcgtgtctttttcgtgttgtgtccttggtttctatcctattttctgttatagtgagttcttagctagctgttttgggatcgtagacgctgaaacttaaaaatgcttgattttggtacacattatcttttatgactatagcaagaccagtgtacaaatacatttctccgtggatgtgtatgaatttcaatatgctcacgat

SEQ ID NO: 6016 - DNA, 508 bp, Glycine max
atacaagagactgacgtcggacgcacgcgtacgtaaactccgaattccggtccagataacacaatcaatcggtaaccttccagaactcaaaaccccctttcaaatttcatcatgtccggctatcccaaccagcctcccagctacagctacggcgcgccgccgccgccccaaccctacggtgcccatccgccatcgcaatcatacggggctcctccgccatcgcaatcatacggggctcctccgccaccgcaaccctacggcgcgccgccgcccgctcagccctactccgcctccccctacgcccaaccgtccgccccctacgccgccccctacaacaaacccccgaagaacgagtcccactcccacggcggcggaagcagcggcggctacccggctccggcgtacgcgagcccgttcgcgtcgctggtgccatcggcgttccctccagggacagaccctaacgtggtggcgtgcttccagatggcggaccaggacggaagcggattta

SEQ ID NO: 6017 - DNA, 949 bp, Glycine max
cactttgataaatgtgtatcgagcatctaatgatttcttggagaagagatcaatggaaatgaatacggcaaagactgaaaaggtttatagaaaatggtgcaaagaaaattttattaatagccggtctcttagacatgctcgtgacattcacaggcagattcagggacatgttgaacaaatgggtctgaatctttcttcttgtggagatgatatgcttcaattccggagatgccttgcagcttctttcttcctcaatgcagctgtaaagcagccagatgggacatacaggactttggcaagcggtcaggtggtgcagatccacccttcttctgtattattccggcaaaaaccagagtgtgtgatatttaacgaattggtccaaactaataacaagtatgtccggaatttaaccagagttgattacctatggttaaccgagctggctcctcaatattatgctatgcacaattaaattcttgatgttgccactaaacaggttactagattatttatctgttgaaacatatcagtgcaagcctcagactatgccccgccactggtttatggatcttttcataatgactgttttttatttaaggggcttatctttggcattcggtaacttttggatgcctggtatgtggagatgccactgaatcatataatgacaagtacttctttctgggttgttatcacgttattttctcttgggcagctatggccactaagactgagggaaaagtatgtggtggtagggtgcaccttaaagttgtgacctcattgatgtggtgaattgaacaacggaattgagtacagactatcatgttgtttataaaagttcaattctatttctatcccattttaaaatgcacaattccttagtagtgctaatatgtagatgatcatggcttaaacttttagaatatgaattgtatgtatgattagtctg

SEQ ID NO: 6018 - DNA, 276 bp, Glycine max
ggcccgcgcgtccgctcacgcgtccgcccactcttccgttcataatgaaaggttttgggttagggggcttgcctttggcatttggtaactattggatgcctggtatgtggagatgccactgaatcctctaatgacaagcacttcatgctgagttgtggtcacgttattttctcttgggcatctatggccactaagattgaggaaaaaagtatgtggtagtagggtgcaccttacagttgtgacctcattggtggggggacttgaacaacggaattg

SEQ ID NO: 6019 - DNA, 701 bp, Glycine max
accagccaagacctgcagccagggctgaaaatgttcctgctcccaggccggagggtgacaatgctgctccagcagagggtcaacctgaagccgagaatgggaaccagcccgctaatgatgcagaccaggcagtcgagaatgaaaatgttgcagaacatggcaatgtcaatggtggtaatcagtggtggggcattgtgaaggagatccagatgattgtctttggatttatcacttcccttctccccgggttccacaaccatatggattgaactatattttgtagcttacaaggtttgtggatctgacatatggtctatgtgggaccatgcctgagacatgggacaagggggtgttctgaaataaaatgtatagcatcagaagttccaagcgtcataactaatacatacatagttaggtgcacctatataatccagcggaagatatggtgcaactacagggtgccgtttttgtatcattatttggattgttgataaaacactttttttttggattccagagcccaggtttctacttagccaggggctttagatttttttattttttccccagtactgtttttttttgctagttcctgatgacttgtttcttttcatagtttgtacgatctttcaaagcgcctaatgctttttccaatctcagttagtcgatggttcaacgttatggagagcaattgccaagag

SEQ ID NO: 6020 - DNA, 608 bp, Glycine max
ctcgagccgctcgggccttttcggcgcacagcagaactctgcttcttcggattccgatcgcacgccccctcaccatggtgaacgttccgaaaacaaagaagacatactgcaagagtaaggagtgcaggaagcacaccctgcacaaggttacccaatacaagaagggtaaagatagcattgctgcccaaggaaaacgccgttacgatcgcaaacaatctggttatggcggacaaactaagcccgtcttccacaagaaggctaagaccaccaagaagattgttctgaggttgcaatgccagggttgcaagcatgtctcccaacacgctattaagaggtgcaagcactttgagattggtggtgacaagaagggcaagggaacatcactcttctagtttgagaattaggatttagagctttatgtttcagcaatgttggaatgttttgtttctctctggatttttctgctagttatattttattattttgcaacaccctcgtgattgagaaattaaaactatttttgctaatttcaacgattgcaatctttatctatttttaatcctttagatactaaaaaaaaaaaaaaaaaaagagaaatcaataaataa

SEQ ID NO: 6021 - DNA, 1288 bp, Glycine max
ctcgagccgcgagggtgtacgagacgcatatcgggtcggatcacacttttcaattcgggtcactaatcgaacgggcgaaatgcatcgatgataatcacccacgctatttagagaaggaaaatgagagtgagggtttgttgttacttttgctttaacacattacactcacactctttgtgaaaaaggggagtttcttattctttctagacgcttccattgatcggcgatttcttagacatggcggagcatcacgaacacgaggaagtgaagggtgagtccttgttggagaagatttctgggaagatccacgaccacgattcgtcatcttcgtcggattccgacaacgagaaaaccagcgcttctgactccttgaagtcaaaggttttcaggcttttcggcagagaaaagcccattcatcatgttcttggcggtggaaaaccggctgatgtttttctctggagaaacaagaagatatccgcatcgacactcggagttgcgaccgctatatgggttctgtttgaattgcttgagtaccacctcctgactttggtttgccacttcctgatccttggtcttgcggtgttgttcttgtggtccaatgcatccactttcatcaacaagagtccaccaaagatcccacaagtgcacattccagagaaacctgttttagaatttgcctctgctcttagagttgagatcaaccgggcttttgcgttgttaagggatattgcatctggaagggatctcaagaagttcttatcagtgattgctggattatgggttttctctattttgggtagctgggccaacttcttgaccctgttctacatagcttttgttttgctgcacactgtgcctgtgctttatgagaaatatgaagatcatgtagactcttttggtgggaaggcaattgccgagattaagaagcaatatgcagtgtttgatgcgaaggtgttgagcaagatacccagaggacctttgaaagataaaaagaaagattgaagtggcactagattctgacaaatatgttttagtggggtttcatgaatgtcctgttaaatttagattcatcatcagttaaaaccctatcatgtcatattttatttttttagggtccttttactagacattgtggatgaagagtatcttgtatatttttcttctggctttacatgtacctctcagaaatcctatatgcttatggatgacttgttattgtgttgtatttacatcatgaatacatactctgcatttgaatgctatcgtagaaaaaacttgcaataattgc

SEQ ID NO: 6022 - DNA, 490 bp, Glycine max
attatgggttttctctattctgggttgttgggccaacttcttgaccttgttctacatagcttttgttttgcttcacactgtgcctgtgctttatgagaaatatgaagatcatgtcgactcttttggtgagaaagcaattgccgagattaagaagcaatatgcagtgtttgatgcgaaggtattgagcaagatacccagaggacctctgaaagataaaaagaaagattgaagtgggcactagattctgacaaatatgttgtagtggggtttcaggaaccctatgatgtcatattttatttttttagggtccttttactagagacactgtggaagaaaagtatcttatatatttttcttctggctttatatgtacctctcaagaaatcctatatgctgcttatggatgacttgttattgtgttgtatttacatgatgaatacatactctgcatttgaatgctttcgtagatgtcgtggtaattatgtttccc

SEQ ID NO: 6023 - DNA, 439 bp, Glycine max
ggttttctctattttgggtagctgggccaacttcttgaccctgttctacataggtaatgaagtggttctttatcatttgacatttactgccatggaggttctaatattaacttgaattttatatactgcgatgtaatgtatttctatgttttcgtgaaacagcttttgttttgctgcacactgtgcctgtgctttatgagaaatatgaagatcatgtagactcttttggtgggaaggcaattgccgagattaagaagcaatatgcagtgtttgatgcgaaggtgttgagcaagatacccagaggacctttgaaagataaaaagaaagattgaagtggcactagtttctgacaaatatgttttagtggggtttcatgaatgtcctggtaatttagaatcatcatcaagtaaaaaccctatcatgtcatattttatttttt

SEQ ID NO: 6024 - DNA, 324 bp, Glycine max
gatacagcacatgatgagactaggataaataaggtggagcctgaccctgagcaagatggaagcattgatcttggggtaaacacgccactgttggggtcgacttcaaggacataagttgaagatgatattcaagttagccaagaaaaagctcctgacaattgatttctgatgagtttctggcaatgttttttcaaccatcagttgccaactttacagcttttagttgctgtttctgattactgttgcaatttttatctttttcagcccaaatcttgattacaaatatttatggagtattaaataataaacaagtttagtgacaaa

SEQ ID NO: 6025 - DNA, 357 bp, Glycine max
atcgaaaggttgttttcaagtcaactcaatggcacttccctcaggtttagtttccatgttgatagtactttttggtatggttttggtagttggggttgaggcaaaggcaagggctttctttgtatttggagactcactggttgacagtggtaacaacaattacttagcgaccactgcacgggctgattcccctccttatggcattgactatccaactcgtagaccaaccggtcgtttctccaatggcctcaacattcccgatcttatcagtgaacgaataggtggcgagtccgtgttgccttatttgagtccacaactaaaaggtgaaaatcttctgaatggagccaattttgcttc

SEQ ID NO: 6026 - DNA, 251 bp, Glycine max
agggatccacataaacatcaacatcgaaaggttgttaattttcaactcaatggttcttccctcaggttttgtttccatgttgatactttttggcatggttttggtagttggggtgaatattgtcccaggggttgaggcaaaggcaagggctttctttgtatttggagactcactggttgacagtggtaacaacaattacttagcgaccactgcacgggctgattcccctccttatggcattgactatccaa

SEQ ID NO: 6027 - DNA, 1451 bp, Glycine max
ggcacgttgacatcggactcatccaacggtgcaagattcttcctgcccagagacgaaaccataatccgtagagcattaataaacatttcccatttgtttggttgctccgaaaacagaggaccaaacaagcccttatcacaactctatctaacaaattacataggacaggcccaaaaccaaaaaaagcttctttgtctctcgtgccgattctccaccactattcccttcaccccaatcacactttccggtagttgttgctattagtgtagaagatgagtacgctggatgcaacaagggctgaacttggtcttcttgttttatatttgggcaaggctgaagcaagggacaaaatatgcagggcaatacaatatggttccaaatttttgagtaatggggaacctggtactgctcagaatgtagacaaaacaaccagcttggcacgaaaagtcttccgtctctttaagtttgtcaatgacctacatgctttgataagtccaacaccacaggggacacccctccccctagctctgttgggaaagtccaagaatgctctactctccactttcttgtttcttgatcaatttgtgtggcttggcagaacaggcatctaccagaataaagagcgcaccgaactaattggccggatatctctttactgttggttgggatcctcggtgtgtgccaccttggttgagcttggggagcttggaagactctctgcatcaatgaagaagttagagaaagatctcaagaacaagaataaatacgatgatgagcaataccgtgccaaactaaacaagtcaaatgagaggactctatcacttatcaaagcaggaattgatactgtggtagcagtaggactgcttcaattggcacccaagacagttactcctcgcgtaactggggcttttggatttgtttcgtctctaatatcttgctatcagttgcttcctgccccggtcaagtccaaaactgtgtgaagtgtggaagaatagaaaggttctcatgacgtgtctgtcgtcaaataattatatgaattggtcaggaaatgtcggttggtgtgagcattgaccaattttcatcatagttacaattgttctctaaaactgctgtgtagggcatctttctattttggtctttcaaaatatatgcaactataatatgttgctccataatttacaaatacatgaatttgtaccctaaaagacatgcaatatcaaatcggttcccccacttcccctcaatgttcgtttcagaatcccacaccaaaaaataagataacaatctaagacgaatgcaaggccacatgagtgacgtttttgtattaagcagataccaagtaaaaaaagggcggcctccaacaaattagctcgtgtacccggaaattacttccggacgggcactggaagggttgctacctttccctaaactaattcgtacaagagcttgga

SEQ ID NO: 6028 - DNA, 613 bp, Glycine max
  unsure (1)..(613): unsure at all n locations
cgtttctctctttctttttttggttcctgttttttctttttgaattaagagttgagaattcacgtgccccagttggttgatctaccttgcagcttgagatagtaaagttgcaaactttgaagcaattagtgtagaagatgagtacgttggatgcaacaagggctgaacttggtcttcttgttttatatttgggcaaggctgaagcaagggacaaaatatgcagggcaatacaatatggttccaaatttttgagtaacggggaacctggtactgctcagaatgtcgacaaaacaaccagcttggcacgaaaagtcttccgtctttttaagtttgtcaatgacctacatgctttgataagtccaacaccacagggcactcccctccccctaattctgttgggaaagtccaagaatgcactactctccactttcttgtttcttgatcaatttgtgtggcttggcagaacaggcatctaccagaataaagagcgcactgaactaattggccggatatctctttactgttggctgggttcctcagtgtgtaccaccttagttgagcttggggagctnggaaggctttcttcatcaatgaagaagttagagaaagatct

SEQ ID NO: 6029 - DNA, 494 bp, Glycine max
cccacgcgtgtgcattgggcaggcgcatcgccaaaaaaaagcctcgtctctcgtgccgattctccaggacaattcccttcacccaacctaattgcaattagtgtagaagatgagtacgttggatgcaacaagggctgaacttggtcttcttgttttatatttgggcaaggctgaagcaagggacaaaatatgcagggcaatacaatatggttccaaatttttgagtaacggggaacctggtactgctcagaatgtcgacaaaacaaccagcttggcacgaaaagtcttccgtctttttaagtttgtcaatgacctacatgctttgataagtccaacaccacagggcactcccctccccctaattctgttgggaaagtccaagaatgcactactctccactttcttgtttcttgatcaatttgtgtggcttggcagaacaggcatctaccagtataaagagcgcactgaactaattggccggatatctctttact

SEQ ID NO: 6030 - DNA, 629 bp, Glycine max
ccgattctccaccactattcccttcaccccaatcacactttccggtagttgttgcttgagattgtaaagttgcaaactttgaaggtggggattgcgagttttgattctgggtcaacttaaaagagctattagtgtagaagatgagtacgctggatgcaacaagggctgaacttggtcttcttgttttatatttgggcaaggctgaagcaagggacaaaatatgcagggcaatacaatatggttccaaatttttgagtaatggggaacctggtactgctcagaatgtagacaaaacaaccagcttggcacgaaaagtcttccgtctctttaagtttgtcaatgacctacatgctttgataagtccaacaccacaggggacacccctccccctaattctgttgggaaagtccaagaatgcactactctccactttcttgtttcttgatcaatttgtgtggcttggcagaacaggcatctaccaggttggaaataataatttttttctttagcatcatgtttgtttctgtattattatattgaaataccatatagtggtacaagagttttgtgtttaattacagaataaagagcgcactgaactaattggccggatatctctttactgttgg

SEQ ID NO: 6031 - DNA, 494 bp, Glycine max
ctcgagccgattcggctcgagcacaattattccacaaaatttccctcaattatttctcaccatcatcaccccctttccttctctcaagaaaaaaaaaagttaatttcttgaacccaatggcttcagagacagaggtgccggatattatttcctctgttttcgaaaggtttcaacaaaacagagacatgtctctgtttctgcccttcctcttcggcttctctgacgccaccccaggacgaaatagcgacgacccagatcacgaaactgctcccacagaagccccacaacgtcaaagaataatcttggtgaaccccttgactcagggcatggtggtgatcgacggtggttcgagcctcgaggctctgtttcgcgaattcaccaacggaaaaggtggtcgaccaccggcttctaaggagtccattgaggccttgccgagtgtggaaattggagaaggtaacgaagattcggagtgtgtggtttgtttggaggagttt

SEQ ID NO: 6032 - DNA, 344 bp, Glycine max
caattattcctcaattatttcccacttttcttctctctcaagcaaaagttttcttctctcattctcagcgttctgaatcgaaactaatggcttcagagacagaggtgttaaatattatttcctctgttttcgaacgcttcgagagaaacatgtctctgtttctgcccttcatcttcggcttctctgacgccacctcaggacgagatagcgacgacccagatcacgaaactgctcacacagaaggttcactgcgtcaaagaataatcttggtgaaccccttgactcagggcatggtggtgatcgacggcggtttgagcctcgaagctctgtttcgcgaactcgcc

SEQ ID NO: 6033 - DNA, 552 bp, Glycine max
cgccgagcagaaagcaaggatgggcgcagcggctagggaggcagctatggtggtggttatggaggggggctgtcaagctatggaggtggccgtgctagcttaacgctacctgaccaaaaaacactaaccggccgaactgcactttcacttttgctttgagatggcaaagtcgaagaatcacacagcacacaatcagtcctacaaggcccacaaaaacggcatcaagaaacccaagaggcatcgccacacttccaccaaagggatggatcccaagtttctgaggaatcagaggtacgcgaggaagcacaacaagaagagtggtgaaacagccaccgaggaagagtgaaatggcactttctaacggaaccattagggtttttttatgctcatttttttggttaaactttgtttgaaatcaacgttcagcagtataattaatttgtttacagagaatgcagtacttttatcgcaattttcctggtttctactgaaaacccttcaattacttattatcatcaatggaatgctaatgtgttttgtgttttttcgtcc

SEQ ID NO: 6034 - DNA, 428 bp, Glycine max
accaggcaccttcaccttcccttcgagatggcaaagtctaagaatcacacagcgcacaatcagtcctacaaggcccacaaaaacggcatcaagaaacccaagaggcatcgccacacttccaccaaagggatggatcccaagtttctgaggaatcagaggtacgcgaggaagcacaacaagaagagcggcgaaattgccactgaggaagagtgaagtggcactttctaacggaaccattagggtttttttttaagctcggtttttttttgttttattttgtttttaatggttgactttgtttgaaatcaacgttcagtagtataattaaatttgttttcagagaatgcagtgctcttatagcaattattttcctggtttctgctgaagacccttgaattatttatttatcagtgaaatgaatgttaagg

SEQ ID NO: 6035 - DNA, 466 bp, Glycine max
gtaaacatagcataattgaagcctaactctttagtcttgaagagagagagaggcaaggaacgaacgacgtattctctctcctccactcacctcaaatccaaatccaaatcccaattctccagtctttgctatggcatcaatttcgtccttatctctcacttctgtttccctccccaaatctcaatctctggaccccaagaaaatctctgattcttcttcctcctctggcagcaggagtcaaagttgttgttgcgcgccatcgttccaacgaagaaagatgcttctatcttccgccgccatcgttgccggaaccttgtgcagcaattcagtcagcggagtcagtttggcagctgaattcgccgatatgccagcgcttagagggaaggattatggcaagacaaaaatgcgatacccagactacactgaaactgaatcaggactccaatataaggacttgcgacctggg

SEQ ID NO: 6036 - DNA, 544 bp, Glycine max
cggacgcgtgggtcctaaaacaaatcgtgtaaaggcaaagtacagacaaagttagttagaaattgaaagggaaagggaaacgaaaatgagtagtagggtttggtgtgtggtgatggtatcagcgttggcgttgatgttacaatggcacgaagcattcagctcctacgctggctccgcaagtgcgatcatcgacccttccaaggtcaaacaagtttcgtggaaaccgagagctttcgtttacgagggttttctgacggaattggaatgcgatcacttgatttccatcgccaaatcggagctcaagagatccgcggtggccgataatttgtccggcgagagcaagttgagcgaagtcagaacgagctccggcatgttcattcccaagaacaaggatctgattgttgctggtattgaagacaagatttcatcatggacctttcttccaaaagaaaatggagaaggcatacaagtattaagatatgagcacgggcagaaatatgatcctcattatgattactttgctgataaagttaatatagctcgg

SEQ ID NO: 6037 - DNA, 1645 bp, Glycine max
aaaagacccggtagattttgtacttcgtttttctttgatgaaaaaaaaataaattcgtaaacgtagaaaaaaattcatcaaagaaaatactctatccatagtagaggaaaaaaatgaattgcagggatggaaaagccgtatgcatcaatacgcagaaaatgcttgtacggttatttaatattattttttttgcccatttttttattttcttatttgtatttatcccttttacctttatttgggaataaggataatctttaccaatataggagaaatcattatcaaaatctttatcaagataagggaaatacttattaagttataaaatcagggtaatgatccaccaacccgctagttctttttatgaggcacaaacgggagaatttatcctggaagcggaagagctactgaaaatgcgtgaaactatcacaagggtttatgtacaaagaacgggcaaacctttatgggttatatccgaagacatggaaagggatgtttttatgtcagcagcagaagcccaagcttacggaattgtagatcttgtagccgttgaataaaaaataagtggcaaggattattctaaaaaaatacaggatttgaaatttcatttttgaatcttcttactttcattttaatataatatctctattagttaatctattaatatctattagttaatctattaatagaatataagtaatatagaatctaagtaattcacggttaggatagatctaaaccagctcattatatatatattacaacttactatgccaactatgaaacaacttattagaaacacaagacagccaatccgaaacgtcacaaaatccccagctcttcggggatgccctcagcgccgaggaacgtgtaccagggtgtatgtgcgactcgttcagatcatatactaagaagaaaaaaccaatttcattttttcagtattgttgatcggttaagatagtgtgaatgtagttttcccattcagactatcttaacttatatatatacattctttacattcttctatcttgtatcaaatttatggtttcgattggtgcaaacccaatagtcttaatttacaatttaagatgagaaggactttcccatcggtaacaaaacaaatataaagttacccgttaagcggagaaaatactatttcaattaaagataaagtatgtccttaatgaatgaattttgatggattttggacgaacggaataagaaggtcagctacccagcaaattttcataattaaataccgttactgtataactagatttcattgtgaaaaaatctacttactaaactaaatattggatgggtagagccaaagagtgtgaactgtacaagttaacaataacattaattaaattaataaaaatgaaaagaaagaaaggctccggtgtatagaaaggacctgcccgtttctaaaaaaaatcatagaaacgatggaacccacccattttttatatatgtcctaatttatttactattacttactatgttttttgatatctagtatcaatacaatttattattttgaggttgaatatttagaaaaaaaaatatatatatacaatcgtggttggggaggttatagtagcaagagccattggaatttttttttttatacattggaagaatc

SEQ ID NO: 6038 - DNA, 818 bp, Glycine max
gtccattatgaaaagagaaagaggtttaaaattgacacattgattccttttttgcttatatgatttttggtgaactgtatgcatcaaaaggtgcatgtacggctcttaaggaaaaagatggaatcctaatcaatcgactttatcgagaaagattactttttttaggtcaagaggttgatagtgaaatatcgaatcaactaattagtcttatggtatatcttagtatagaagaagagaataaagatttgtatctgtttataaattctccgggggggtgggtaatacccggaatagctatttatgatactatgcaatttgtacaaccagatgtacagacagtatgtatgggattagccgcttcaatgggatcctttcttttggcaggaggagaaattaccaaacgtttagcattccctcacgcttggcgccaatgatgtcttttatttgagaatatatataaagactataccttcgccataaaaacagttaagaaaaacattgtataagtagtaatagcatggtattgtgaattccatatgcaaatttttgttttttaaatcattcgattatatatagaaagagtagtatgaaaaagagggtatttacaattttatctgatctatcaggaacctagtttaattttagtgtcacagactttttgttttttttttcataccagaaaacttttaacaatttttattttaattagaagaaaacataacatatgaaaaaaaaagaaactttcggattgttgaataacaaaatgatataaaaaacaacggaaccaccgtgctatttttatttaaagcgattcaaaa

SEQ ID NO: 6039 - DNA, 737 bp, Glycine max
cggcactcggctcgaggaaacagatttattctatacccgataagtcacaatacgcaatggtggggagacgagaggggtttacaattttctctatgaatatttaaataggtaaatgcagacatactcacttatcaccccaatgacccattcgtaacaactttactttatttagtattcctttttttatatttagtattcctaaaaaaaaaatgcaatataataaaaataaatcatttttaacacgataagctaattcttacgtttccacactaaagttagatatatgattttattatttctccattttatgcccattggtgttccaagagtaccctttcgaagccctggggaagaagatgcatcttgggttgatatatacaatcgactttatcgagaaagattactttttttaggtcaagaggttgatagtgaaatatcgaatcaactaattagtcttatggtatatcttagtatagaagaagagaataaagatttgtatctgtttataaattctccgggggggtgggtaatacccggaatagctatttatgatactatgcaatttgtacaaccagatgtacagacagtatgtatgggattagccgcttcaatgggatcctttcttttggcaggaggagaaattaccaaacgtttagcattccctcacgctagggtaatgatccaccaacccgctagttctttttatgaggcacaaacgggagaatttatcctggaag

SEQ ID NO: 6040 - DNA, 398 bp, Glycine max
ataccagatggcggaagtggacgagtttgaggacaagcagaaggagttggaagggatctgcaaccccatcattgctaagatgtaccagggtgctgctggacctggtgcgagatgttcctatgggtgctgacatgcctgctgctggtgctggacctaaaattgaagaagttgactaagcttgtggaatatcactaacttcaactttgggttgcttctttcttattaggtgctctgccagagatgtaagctttaataatgtaagttttagtgatgtaaggtttcatgaatcgtgaataaggtctttttagtttcatgtgaatttcagagatgatggagcttgagattaatgtaatttttatactgtttggctttttaaaaaagacaccggcacatcctct

SEQ ID NO: 6041 - DNA, 404 bp, Glycine max
gggtcaggagggttaaatcttgatggaatagaaccagaatacaagctggtcctacgcaaagtgctaaagtttcataagcatccagttactgcacttcacctcacgaccgacctgaaacagttattgagtggggattcaggcgggcatttgctttcctggacactgcctgaagagagtctgcgaggttcattaaatcaggggtgagattggtaaatgatggttcgttatgctgacttaagcatttggccagcctttaattgttgaatcctaacattggcttgagtggatctcaattgttgaaagatggattcatgttcataattcgagagaattgccaaagaatgctggccacattgaaacagagcaagcaagattgtaaaagacaagatgatataacggcgttt

SEQ ID NO: 6042 - DNA, 457 bp, Glycine max
gtggctttggtgtttgaggtgcttgagattgtgcctcatgaacttctttttgtggcggttaaggtggtggagggtgcgttggagtttgaggaacatcattggggggattggaaagatgcgttgcaagatctcgtgctctcttggcacaaccaagaatcgtgatcatcagttaatgataggtatagttagttcttctcaagtgaaggatctacatgaggtttgatgttgaaggactaattgcagaacatgacatgcacactcacatcgtgctcgtcctgatgagaagaaacaaacaaggttgatgatgcttgttttgtgatttgattttgattttgtgttgaagcttagttataggtgtattaatttatatatgatggtttgaaaaataaaagttgttgttatgtacacatcagaatggtggctaaatgtattcaatactccaattttgagttcatag

SEQ ID NO: 6043 - DNA, 654 bp, Glycine max
caggaatatggggtgtcagtggaaaacatttttgcggttcaaacaggtggttgcccttcctatgaagacattataaaactaccaaataaggttcttctatggtgtggatcacgaagctcaaacctcttgaggcacttgcaaaagggattcttgccagcaatatgctcattacctattccgggttatatgtttggcaaagctattgtctgttctgatgctgcagcagaggctgcaagatatggttttactgctgtggacaggccagaaggattcttggttttggccattgcttctctaggaaatgagattaccgagttgaaaaccccacctgaggatgcatcatctttggaggaaaagaaggttggagtgaagggaccggggaagaagaaaacagatgaatcggagcattttgtttggaaagatgatataaaagttccttgcggtaaactagttgcctcagaccatcaagatagccccctggaatacaacgagtatgctgtctacgataaaaagcgggcacgcataagctattggtgggagtgaagtatgaagagaaggaagagaagggtgcggtgattgacacagctgaatgatgggaccaaaaaggatgtaagggaagcttttcttttttgtgatgcgggaattgaaagctat

SEQ ID NO: 6044 - DNA, 488 bp, Glycine max
tcgttcacgcgtacgatcattctaaagctagtaagtagtaagtagtaagccactatcgtttctctctaacagcaaaaaagttctaacctcaccaaacccacactaccatgggtaatgagaatcgcgagcttcacgtattattcttccccttcccagctaatgggcacataataccaagcattgacttagccagagtctttgcttcaagaggaatcaaaaccaccgtagtcaccactcccctcaacgttccactcatttcaagaaccataggaaaagccaacatcaaaatcaaaacaatcaagtttccttctcatgaggaaactgggttgcccgaaggttgtgaaaattccgattctgccctctcctctgacttgatcatgacgttcctgaaggccaccgtgctcctgcgggacccactggagaatctgatgcaacaagaacatcctgactgtgtaattgccgacatgttctacccctgggcgacagac

SEQ ID NO: 6045 - DNA, 1476 bp, Glycine max
aaatcatcctgaactccagaatatacccatctattatgcttctccacttgcaaaaaaatgtttgactgtgtatgaaacatacaccctttccatgaatgacaggatccagaatgcaaagtcaaatccgttttcctttaagcacgtatcggctttaagtagcattgaagttttcaaagatgtaggaccatctgtggtgatggcaagccctggtggacttcagagtggcttgtcacgacaattatttgatatgtggtgctctgataagaaaaattcttgtgttttaccagggtatgtagttgaagggacattggcaaaaaccatcatcaatgagcccaaggaagttactctcatgaatggactcactgcacctcttaacatgcaggtgcactacatttccttttctgctcatgctgactctgctcaaacaagtgcgttcttagaagagctcaatcctcctaacataattcttgttcatggagaagctaatgagatgggcaggctcaagcagaagctcataagtcaatttgctgatcgcaacactaaaattcttactccaaaaaactgtcaatctgttgaaatgtatttcaattcgcagaaaatggcaaaaaccatagggaagctggctgaaaaaacaccagaagttggtgaaactgtcagtggtttgcttgtaaaaaaaggcttcacatatcagattatggcagctgatgatctccatgtcttttcacaactatcaacagcaaacattactcagaggattaccatcccttattcaggtgcctttaatgtcatacagcatagactcaaacagatatatgaaagtgtagctcagtcagtggatgaagaatctggagttcccacattgcaagtccatgagtgtgttactgtgaaacatgaatctgaaaagcatgtctccttgcattgggcctctgatcccatgagtgacatggtatctgattcaattgttgctctggttttaaatatcaaccgcgatgtcccaaaaatagtgaatgaatctgatgccattaagattgaggaagagaatgagaaaaaggcagagaaggttatgcaagccctcctcgtttcactctttggagatgtgaaggtaggtgaaaacggaaaattgataattaacattgatgggaatgtagcagagctaaacaaagaaagtggggaagttgagagtgaaaatgaaggtctcaaggaaagagtaagaacagcattccggcgcattcaaagttctgtgaagccaattcctgtttctgcgccatagtttttcatttccttacattttctttggaaaaggtgaaatgccaccgataaggaacaccagctcacatgtccccgctaacatgagacaattatcacaacatgttaccttcccttccctttaacatgatgagctttgtcacagcattctctgtttccttttgtttattcttcaaatatttggtcatttaatctaaacttattttcttc

SEQ ID NO: 6046 - DNA, 626 bp, Glycine max
gaaatatttcttgaaggaggaaatgagttcacagccattgtccttgatgtaggatctgatttagatagttttcctgttgtactacttccaactgaggtggagcttcaattccgtggtgcaaatgatgtgaaagagaatgatgcaatatttaattaccgtaggaagtaccttccaacccaacaggttgcttatcacactccaccacggtttcctttggatgtaattgaaaatattcgcaaaggagcatctctgttatttcaacggctttgcctgcaagattttgcacgaattgatggatggtttttgccaaattcaagttccaaattatcaccattttcccaaagtgagtttggaagaacagaatctggtgccataatattcactgacattaacatgataagtggtatggaacagaccagttttctatttcagcaagcttctaaggttggtttttctcatacaaacatccttagaagcattattcaccatgcttgcttgcgatttccaaatcttgcatcagttagtggtatatcaggtcagcttccaagcaggtcaaaatccttacaacgtaacacatcagaacggcaagtatctcttatgagtggtacgaatgtctggctcaattt

SEQ ID NO: 6047 - DNA, 452 bp, Glycine max
ggagcatctctgttatttcaacggctttgcctgcaagattttgcacgaattgatggatggtttttgccaaattcaagttccaaattatcaccattttcccaaagtgagtttggaagaacagaatctggtgccataatattcactgacattaacatgataagtggtatggaacagaccagttttctatttcagcaagcttctaaggttggtttttctcatacaaacatccttagaagcattattcaccatgcttgcttgcgatttccaaatcttgcatcagttagtggtatatcaggtcagcttccaagcaggtcaaaatccttacaacgtaacaagtctttttctcgccgtgaacgaacctcgaaagtgtttgtcatttttggaggtaacacatcagaacggcaagtatctctttatgagtggtacgaatgtctggctcaatttgctagcct

SEQ ID NO: 6048 - DNA, 396 bp, Glycine max
gtgttcaagctcgaaaaatcgtagaagactacaccaaggtgagtgacgaaaactgatggctgccactgaggaaaaaattctctctaggattgaccgtttggataatgtgttgcggcatttggaggaaattagagggtgcaatccatctccgaagagctcgtgtgcatctactccaacaagtggaagtgacggacacgtgtcgtccactgatttctccccaaagagtttagagaagcactgccgtccgattgaaaacattatgatggagaccgaagccaaaggaacgatgatagagaggctcaatcaggtggaggatcgaatgctaaaggtatctccacgtggaaatctattgaccgtttgatcttggcttgtatggatgtggtgataatatgactt

SEQ ID NO: 6049 - DNA, 517 bp, Glycine max
ctgaagcaaagcaatggctacttcacagttgaaaacccagaatgtggttgtatctctcaccctagccttaacctcggtactggtgctactgtggataatgtgttgcggcatttggacgaaatcagcaggtgcaatccatctccgcccgaatcacgtgcatctactccaacaagtggaagtgacggacacgtgtcgtccactgttttctccccaaagagtttagagaagcactgccgtccgattgaaaacattatgatggagaccgaagccaaaggaacatgatagagaggctcaatcaggtggaggatcgaatgctaaagctggaagaagagttggtagcaaagaagaaagaggaaggtgagaaaatgaatagcccaaagaaaggttttaaacagcttgtgaagcaaagtatgaaacctaggggaaaacatagtaataaagaagcatgaatgaattatgaccattgtagctgctcccatcccaactgtgccaacgttttaattttaatgtacattta

SEQ ID NO: 6050 - DNA, 1019 bp, Glycine max
tcatgaatctcaacttcaattgtataacctccattattgatgagaaagatgatggtcttttgtccacagcgaatcattgttgaaatatcctgtgctgttacctgaaaactgccatcaccaatgcaagcaattacacgcttgtctgttgcagcctgtgcatatccaagagtagcacctactgaccaaccaatggatccatactgcatctggaattcatatccgcaattctcaggcagatggagcttctgacagttgaaccatgagtctccagtttcagctattacagcagtatctccgcttagcagttcttgaatgtgcttgaatagaacattaactctaagtggttcatcctgctctcgcctcagaggaatgcctggtgggacatagatacgccggtaattctccacagctgcggtgttggtcttcacttttttagccaatgcagttaagaaatcagccatgaaaacccagcccaaggaaggaccattgccaatggttacccgattaggctgcactattatggctttctccttctttatcaacaacgagtatccaacggagctatagtcattgaagatggggccaacaaaaacatatgcatcagcagacgccacaatttccccacaaaagctagagctgacagcaccccagtatgtcccaatgaaatgtggatgatgctctggtactagtcccttcccggacggcataactgctattggatatccacttgcttctgcaaactccagaaaggcctttgctgcctttgctacccttagttttggcccacccacaatcactggcttcacagcgttgttcagtaaagcagccgttgcttccactgctgcttctaatccttcttgattgcttaccttaggtgcaagaaagaatggcacggggtctctagcaaaagttggatgaggaattccaggaaggttacaacttatgctgatataaacaggcttgctttccttcaaagcagtagaaattgcagtgtcaataagttcatgcgcatcgtccaa

SEQ ID NO: 6051 - DNA, 807 bp, Glycine max
tcccacgcgtccgctccagtttcagctattacagcagtatctccgcttagcagttcttgaatgtgcttgaatagaacattaactctaagtggttcatccttctctcgcctcagaggaatgcctggtgggacatagatacgccggtaattctccacagctggagactcatggttcaactgtcagaagctccatctgcctgagaattgcgggtatgaattccagatgcagtatggatccattggttggtcagtaggtgctactcttggatatgcacaggctgcaacagacaagcgtgtaattgcttgcattggtgatggcagttttcaggtaacagcacaggatatttcaacaatgattcgctgtggacaaaagaccatcatctttctcatcaataatggaggttatacaattgaagttgagattcatgatggtccatacaatgtgataaagaattgggactacactcgctttgtggacgctatccataatgggcaaggcaaatgctggactgccaaggtacgtacagaggatgatctgactgaagcaattgcaaaagctactggaccacagtaagattcactatgttttatagaagtttttgtacacaaggatgacaccagcaaagaattgctggaatggggatctcgtgttgctgctgctaacagtcgtcctcctaatcctcaatagaaaatcatttcctaattattggcctgttttgtgtattttgttgaatagagttccactactggatatttacaagagaaaaacgacaaaaatgaaaaataagttgaaataaatgtttgcttt

SEQ ID NO: 6052 - DNA, 632 bp, Glycine max
gatagtaagagtaccttccatttccatgtgacaggggacaattggttgtagtgagtgtgggaggagagtcacaactaccagtccttgctttgcatcgtgtgagtttgggagaggaaggaagctactcggaaagttattccttcctcagcaaaaaaaaaaccattcctttataaccataaagcgccttctttaattttcttcaccaccactccattactctctccacgcaccccctactcacctctaccttgtttttgagtttgaggaatataagaaaaatgaaaatgggtaaaggaattgtttttattgttgctctggtggccatttgccttggtgggaaatgggtggaagcgcaggtgcatcatgttgtcggagcagaccgtggttgggatcaaacctccgacctcgtttcttggtctgcaagcagagtcttcagggttggagaccaaatttggctcacttactctgtggctcagggattagtcgctgagctgaaaagcagagaggaatatgaggcatgtaatgtgagcaaccccatcaacgtgtacacagagggtttgcatactatccctcttgagagtgaaggaatgaggtattttgtgagcagcgagccagagaattgcaaaaatggt

SEQ ID NO: 6053 - DNA, 402 bp, Glycine max
gacagtgagtgtgggaggagagtcacaactcacaactaccagtccttgctttgcatcgtgtgagtttgggagaggaaggaagctactcggaaagtgattccttcctcggcgaaaaaaaaccaaaccattcctttataaccataaagtgccttcttttttcttcaccaccactccattactctcttcacactccacacacacacacatacacacctctaccttgtgtttgagattgaggaatatcagaaaatgaaaatgggtaaagggatgatttttattgctgctctggtggtcatttgcctcggtgggaaatgggtggaagcgcaggtgcaccatgtggtcggagcagaccgtggttgggatcaaacctcagacctcgattcctgggctgcaggcacggtc

SEQ ID NO: 6054 - DNA, 873 bp, Glycine max
ccaagccttcgatcaggcggcaaaagacgaacacatgggaactggaaggtgtgaccccaagagcccgcatggcaacgccgtcggttcaacggccgtcgtcgccgtcgtcacgccggacaaaatcgtcgtctcaaactgcggcgactcccgcgccgtcctctgccgcaacggcgtcgccatccctctctcctccgatcacaagccggatcgacccgacgaattactccgagtccaatccaagggagggcgcgtgatttactgggacggtccgagagtgcttggtgtgttagcaatgtctcgagccataggtgacaattatctgaagccgtacgtgatttcagaaccggaggtgatggtgacggagcggacggaggaggacgagtgtttgatactggcgagtgatgggttgtgggatgtggtatcgaatgagaccgcatgtggggtggtgaggatgtgcctcaaggcgcagaagccgccggggtctccggggagtgacgtggcggctgacggttccgaccgtgcttgctccgatgcgtcgattctgttgaccaagttggcgctggcaaggcatagttcggataatgtgagcgtggtggtggttgatttgaggagggatcaacgacaatcatcaaactacaacgacgttaattaattgattgattaacggagacgagaaaccaaaccaaactaaggaatcacaaatgaatgagatcgcccttttaaccataatgggcacaccctttgttttcaggacttcgttaaggacgggaagaccaaatcagagggaggaggggcgtgtggcttttgcttaatcaaatgttgattgtaatgtaatgggattttaggtttaaaaaaaaaaaaaaaaaaggacgg

SEQ ID NO: 6055 - DNA, 416 bp, Glycine max
  unsure (1)..(416): unsure at all n locations
tggtgtcgaatgaaaccgcatgtggtgtggtgaggatgtgcctcnaggcgcagaagccgccgtcgccgcggggatctccggggagtgacgtggcggcggacggttccgaccgggcttgctccgatgcgtcgattttgtttaccaagttagcgttggcgaggcatagttcggataatgtgagcgtggtggtggttgatttgaggagagatcatcggccatcatcaaacgccaattaattaacgttggcgagaaacataaccaaaaccctttgttttcaggacttcgttaagaacgggaagaccaaatcagagggaggaggggcttgtggcttttgctttatcaaatgttgattgtaatgtaatgggattttaggttaaaaaaacaaaggagcaaggaaattgtaactttggaaaatg

SEQ ID NO: 6056 - DNA, 917 bp, Glycine max
gctcctttccctctctaataagggttcctctttccttctctagcacaatttacaatctcaatggctggaatttgctgtggtgttgttggagaaggtgacactccggctccactcgagcccactcctcgcccctccaggcgccggagtttggacatcttacctttaaaatatatcgccgacatgcccatgccgccgccggagggtttacggaagcgtcccaagctcaacctcagggactgcgataacgcaattgaaaattgcgacgaatccactggacacaaggtgacgaagaaggaatccaaagtagactacgacgacgacgtcgtttcggaaactaagaacgtaactgtttcggaagttgaagaagaatctcccaagttcggcgtgacgtccgtttgcggcaggagaagagacatggaagattccgtctcggtgcggccttgcttcacccaaggcttccactacttcggcgtcttcgacggtcacggttgctctcatgttgcgactatgtgtaaggagcggctacacgagatcgtgaatgaagaaattgacagcgcgcgcgagaatttggagtggaaactgacgatggagaacggattcgctcgcatggacgacgaggttaatcgcaggagccagagcaaccagaccttcacctgcaggtgcgagctccagactccccactgcgacgccgtcggatccaccgccgtcgtcgccatcgtcacgccggacaaactcgtcgtttccaactgcggcgactcccgcgccgtcctctgccggaaaggcgtagccatccctctctcctccgatcacaagccggatcgacccgacgaactgctccgagtccaatccaagggagggcgcgtgatttactgggacggtcccagagtgcttggtgtgttagccatgtctcgagccat

SEQ ID NO: 6057 - DNA, 652 bp, Glycine max
ctccctctcccactttctattaacacccctctttccttctctacctctatttaactaattctacaatctgttattacttttgcttgcatctctctgtgttcaatcttcaaagacttgaattcttcttacttaggttctgaatggctggaatttgctgtggtgttgtcggagaaggtgacactccggctccactcgagccaactactcgcccctccaggcgccggagtttggacatcttacccttaaaatacatcgctgacatggcggtgccgccgtcggatggttcacggaaacgtcccaagctggatctcagggaccgcgataacgtagttcaaaattgcgacgaatccactggacacaaggtggtgaaaaaagaagccaaagtggaaatccacgacaatatttccgaaacgaaaaacgtaactgttgcggatgcttcggaagttgaagattctcctaagttcggcgtgacgtcagtttgcggcaggagaagagacatggaagattccgtttcggtgcggccttccttcacccaaggcttccactactttggcgttttcgacggtcacggttgctctcatgtcgcgactatgtgcaaggagcggttacacgagatcgcgaatgaagagattgacagcgcgcgcgagaattt

SEQ ID NO: 6058 - DNA, 646 bp, Glycine max
gaattattattattgctttgcaaaacactaaccaaccaaaacaaagggaaaaaaaaagtatccactttcccttcttcttcttcttcttcaatttgggttttctcaaaagtgaaaagcgaagtccgtcactgccacaatcaccacttagatcagtgatgcacaccagtctcagaaaacccacaagaacaaaaatcagatttttccaaaactcttgagtgatagactttgaatgaaatcttgtttttcattaacgagattcaattgaagtgaagtgattattcactggaaaacttatttttcatagtattggaggtacaactgaagctgttagatttgttttaactacacgagttcgttggatatttgagcatggctgggaatcaagatcagttcgagatcaagtttcggttgactgatggttctgatattggccccaaaagttttcctgcagctactagtattgcaacattaaaagagagtgttctcgctcagtggccaaaagacaaggagaatggcccaaagaccataaaagatgtgaagttaattaacgcaggaaaaattttggagaacaacagaacagttggggaatgccagagtccgttatgtgatacccctgatactgttacaacaatgcatgtggttgtgc

SEQ ID NO: 6059 - DNA, 600 bp, Glycine max
  unsure (1)..(600): unsure at all n locations
ctttttcttccatttgggttttctcaaaagtgaaaagcaaattccgtgacttccacaatcaccactcggatcagtatgcacaccagtctcagaaaacccacaagaacaaaaatcagatttttccaagnctgggattttttttttttttttttttaatccaatcctttcttgccttttaggcgacccagttgaaaattttgagatttttttattgtttgatgtgtaccgattttaagattggatctcttttgattgagctgtttgagatttctttcttctttctctctctctctctctcttttggctggcgactgtgttgaattatcttatgatgtttccaatccttgtttgttttgtaggtgacccagtttaaaatttgagatttttttcttgtttgatttgtacccatttgaagattggatctcttttgatttggctgtttgagatttctttcttcttctttttttctttggtggctggtgacagtgtgttgaattatcttatgatgtttccttttaagcacttgttgctggatttcaatcatttcactccatttattgatatatttgttttttatttttgcatatttttttgaatatg

SEQ ID NO: 6060 - DNA, 260 bp, Glycine max
acaaccacaacaaagggaccaaaaaagtatccactttcccttcttcttcttccatttgggttttctcaaaagtgaaaagcaaattccgtgacttccacaatcaccactcggatcaaactcttgagtgatagactttgaatgaaatcttgtttttcattaacgagattcaattgaagtgaagtgattattcactggaaaacttatttttcatagtattggaggtacaactgaagctgttagatttgttttaactacacgag

SEQ ID NO: 6061 - DNA, 845 bp, Glycine max
ggatgggatatttcttgttgtttgagaatatgttaaattcggtgctctatgctcgtgacaaatggcttgtggatggcggagttgtgctaccagacaaagcatccctccatctcactgctattgaagatgctgactataaagaagacaaaattgagttttggaacaatgtatatggatttgacatgagctgcatcaagaagcaagccataatggagcctcttgttgacacagtcgaccagaatcagattgctacaaactgccagctactcaagacaatggatatctcaaagatggctcctggagatgcttcattcgcagcaccttttaagcttgtagctgaacgcgacgactatattcgcgctcttgttgcatattttgatgtatcatttacaaagtgtcataaattgatgggattctctacagggccaagatcacgagctacacattggaaacaaacagtcctatacctagaagatgtcttgaccgtttgtgagggggaggcaattgtggggagcatgactgttgctccaaataaaaaaaatcctcgggatgttgatataatgctcaagtattcattgaatggaaggcgatgcaatgtttcaagggttcagtactacaagatgcgttgaacctggtttttattggctcttgttttcctattgtttctccaatttgtaagattgacatttgctgcttctattttaagatagaggttgccttttgatggatgtaacttgtttgctattttatttgaattctttctcatcattgctcaattatgttatcgatgtaatgataaaatttgaaatctatttattgtttacaattttttttgtttccctctt

SEQ ID NO: 6062 - DNA, 522 bp, Glycine max
  unsure (1)..(522): unsure at all n locations
cccttttgtccgcccacgcgtccggttaaacgggggggcgttccgtccctcctctccctctccccctttctctctggttaacacttaacagaaagaacaacactgagatccaatcacaatcattcatttcattcataccgttcgcaacacgatcactattctgcgacgatggtggcacattcgagttcttggggaagggcactcgtcgcgatctcgccctacaccttctccgccatcggcatcgccgtcgctatcggcgtctccgtcctcggcgccgcctgggggatctacatcaccggaagcagcttgatcggcgctgcaatcagggctcctcgaatcacttccaaaaatctcattagtgtaatcttctgtgaagctgttgctatatatggtgttattgtggctattattcttcaaaccaaattagaaagtgttccagcatcaaatatttatgcaccagagtctcttanggctggatatgcaatctttgcatcgggattaattgtgggcttcgcaaatctt

SEQ ID NO: 6063 - DNA, 712 bp, Glycine max
cttctttttttttttcctgattcattaatttgatagcagttaaacggcaccgcgttccgtccctcctctctctctgtgtggttaacagaaagaacaacgctgagatccaatcacaatcattcattttcattcataccgttcgcaacacgatcactatttctgcgacgatggtggcacattcgagttcttggggcagggcactcgtggccatctcgccctataccttctctgccatcggcatcgccgtcgctatcggcgtctccgttctcggcgccgcctgggggatctacatcaccggtagtagcttgatcggcgctgcaatcagggctcctcgaatcacttccaaaaatctcattaggttgtgtgtaggaataattggaagcagctgtgcattgtctgatgcccagaactcctctctctttgtgaaaattcttgtgattgagatctttggtagtgcgctggggctattcggagttattgtcggaattattatgtcagctcaagcaacatggccgacaaaagtttagtttcccttgtatcagaatgtggtgtgggaatgctattatggtagagtgcaatatatctctgcactgcccgggattaaaagttttctctgtttcctgttggtagaaatgtacaatccagcgtaatagtctgcctccatcacaacattaggctgtattatttaccaatgagttgttaggtcttgtgt

SEQ ID NO: 6064 - DNA, 963 bp, Glycine max
ctgggaagtcgttcgtggaatgcgcaccttccctaacacccccattacaaatctctgtatttcagggttgaaaattcacacgttgaattgaaatttggaaatcgtgacaccaaccctacaccaccatggcctccgtagacaaattttgggcttttgccctcgctcttctcctccttgcctcccctctcctccaagttgctaggtgtcagtcagactccgaagatgtagtggaggctgctgaagaatcaagtgatatcggcattgttggtgatgatgtccaagactttggtgatgggaccttcccttctgctccaggaattgaaacaataagtgtttttccaaaaaatagtgcgagattgataacagctggagaagagacagagctgcttgttggtgttaaaaatgatggggattcaagcttgaatgttattgcgatcaaggctagtgttcaccttccttttgatcaccgtatgctggttcaaaatcttactgcacagggttttaacaatggttctgtaccagcctcagcacaagctactttcccatatttatttgcagtcagtaagttcttgcaggcaggaacttttgaccttgtgggcactattatatacgagatagatgaacatccatatcaaagcaccttttttaatggcactgttgaggttgttgaatctggtgcttttcttagcatggaatccgtttttcttgttactcttggggttgcactccttgtcctcctggggctatggattcatggtcaaatacaacacctatctaagaaaacaaagagggcgccaaaagttgaagttgggactaggactactgatgcttcaacagatgaatggctacagggaactgcttatactcagtctctgtcaagcaagtcaaagaagaagaagtagataagcaatttctcacgttcagccacacacaagactctatcatggatatggaatacagaat

SEQ ID NO: 6065 - DNA, 962 bp, Glycine max
gaaacaaaaacaaaagaaaagaaaactggttcttcttttcgcgttgcgttttcttggtgtctctgtcgattcttcttctgaattttaatacttaggaagtttagttttctctcttggcttctccggttggagtttccggcgaccttgtcggagattttgttgtttatttttcacaccacttgtgaaacttctcaagaaaaagaaaaaggatgtttcttgttgattggttctatggaattttggcgacccttggcctgtggcaaaaggaggcgaagattttgttcctagggttagataattctgggaagaccactttgcttcacatgctcaaagacgagagacttgttcagcatcaacctactcaatatcccacttcggaggagttgagtattgggaagataaagtttaaggctttcgacttgggtggtcaccagattgctcgtagggtctggaaggactattacgctcaggtggatgctgtagtgtacctggttgatgcatttgacaaggaaaggttttcagaatcaaagaaggagttggatgctcttctctctgacgagtcactagcaaatgtgcctttcctcatcttgggaaacaagattgatataccttatgctgcttcagaggatgaactacgttatcatatgggcctcactaacttcaccacaggcaaaggcaaggttaatttggttgactccaatgttcgtcctttggaggttttcatgtgcagtattgtccgcaagatggggtatggtgaaggctttcagtggctctctcagtacattaaatagagaacaagtgtttgctctttattatcctcatgctaatgtagtctccacattagcgtatctctgctcatgtaaattggatatactttaatggtggttttactttttctttgttatgaatgagacatactagtttctataaacacacaaaatacgaacctttaaaaccattcc

SEQ ID NO: 6066 - DNA, 587 bp, Glycine max
cacgaacgcacagatggcgatgaggtgtaaggatgatagcttgacatgtgaaactcagagatcaaaatcacagcgttagcaacccaacgacaaccgaaacagcgtcgctttgaaataaaccaaacctcgccacatttcttctcttcattcttcttctaagctttctagaatcttcacttcagaaccgaagccatggcggatcggttcttccccaacccgatgcccgagttcgtacccgaaacgacgccgtccactcctcaggaagaagaagaagccctcacagtgggcgactcgctcccgaagctcctcgccatgccccacgcgccactcttggagcgtctcaaacgcgccgctctcgacctcaaagaaaccatagtgatagaaacgtgggggctgtccgggcagcaggtgcgcgacttcactctctattgcggcgttctgggcaccgcgtttctgcccttcaagtcttaccgagtgaccggcaacgggaacgacctgtctctctgctccgagattgtaaaggcttgcgatgccgcttcggctcgttccagggacgtcacgttcatttgtgggcgtgctggtgtgtg

SEQ ID NO: 6067 - DNA, 428 bp, Glycine max
ctttgggaagagaagaaggaaagtctagtttttttggttcgtggggttggttttgcaaatggcctccttctcggtcccatgccccaagtgtcctacaacttcttcttcgtcttctctccctttggggttgaattctcaaaaggtctcatttcaaagtgggttgatcttgaagccttctctttcattcggatctttgtctgctgaatctgctgcatcaaggattcagtgccttaacaggaagcaattttctgttctgaaggctactaaagttgaaaattccaactctgcccctgtaacggtcaatggacctactgttgcttcatcaaaagaaaaccaagtgcataatggaaaactctctgatactactatcccagatgaagcttcaattattgcattcatgtctcaagtttcagaccttgtaaaacttg

SEQ ID NO: 6068 - DNA, 1782 bp, Glycine max
atttaccatgtatccttggggatgcattgcatgaaatgtatgatggatgacatgtaaaatgggcagttgtggaaattaacgaaattttgggtccattttttttatatattatttcttttataggttcatcatcatcatcaaattgggacgttgttctcaggaaggtccaaaaagtcagtgcagcgaaaacggacgagccgaagaatacccccttttcatctctctctacaataatcatcctcttcctcttcagtaaattaacagaactcggattcacagggaaatctaattgcataggaacagtaaagacaacacctttttatctctacacaagtgattatggcggttgctgagaatgttggggccaaaatcggttcttccagtcaaaatttagaaaacagtgtagtatcatcggactcgggcgaggttgagaaatcaaaacccagaagtgggtccatcaacgacgatcagaagctgaacaacggtgtcttcaaccaccaagatagagttcctggcactatgccagtgcccaatagcaattataactacaatgcccaaatgggtcagatgcacgcaaatggggtgaacaatgatgggtatggaatgaatggggtcatttgtggggagaatgggggtgagagtttcaagcgtgatatgagggatttggaagagcttttgtcaaagttgaatcccatggctgaggaatttgtgcccccatcactaaccaatactcatggctacctacctggacctggtgccggtgctggtgccgggtttggttaccctaataattttatactgctcaataactttggtgatgctaacggtcaaactaacagaaggaggaagaatggctataatcatgggaagcgaagagtgaatcataaaatggatatggagaagagagaagagatgattaggaggactgtttatgtgtctgacattgatcaactggttactgaagagcagttggcggcactctttcttaactgtggccaggttgttgattgccgtgtttgtggggatcctaattctattctccggtttgccttcattgagtttacagacgaagaaggtgcaagggctgctttgaacctgtctggaaccatgcttggatattacccgttgagagtgctaccttcaaaaactgctattgcccctgttaatccaacatttttgcccaggtctgaagatgaaagggagatgtgttcaagaacaatttattgcacaaatattgacaagaagcttactcaagccgatgtcaaacacttctttgaatctatttgtggagaggttcaacggttgaggcttcttggagattaccatcattcaactcgaattgcttttgttgagttcacagtggctgagagtgcaattgcagctctaagctgtagtggggtgattctgggttcactgcccataagggtaagtccatcgaagacaccagttcgatcacgtgctcctcgccctactatgcactgaatcaactttccatgtttctggggttgattgctgctgagatatatttacatatatatatatacatagaaacagctgtgttctaaggaacatgtggcatttagttggtacttttgtcctcatgtcttacagtatggttactttgcttccccttgggggattatggttctctgttttagcttgtagtcggatcgaactttgaggatcttgatggcttaatttatgatgcacaatgtgttgtgttgatcatgcaaggagagaagtttatggttggatgtttctaacatctggaattttatttta

SEQ ID NO: 6069 - DNA, 635 bp, Glycine max
gccaacatttttgcccaggtctgaagatgaaagggagatgtgctcaagaacaatctattgcacaaatatcgacaagaagcttactcaagcagatgtcaaacacttcttcgaatctatttgcggagaggttcatcgcttgaggcttcttggggattaccatcattcaactcgaattgcatttgttgagttcgcactggcggagagtgcaattgcagctctgagctgtagcggtgtgatcttgggttcactgcctataagggttagtccatcaaagacaccagtgcgccctcgtgctcctcgtccccccatgcactgaatcatcctttctcgtgtttctgctgctgctgcaactcggagatatatttacatatatacatacatagaaacagatatattctaagggtacctatggcgttttgttgatacttttgtcctcgaggcttgcagtatggtatctttgtttcctgttggggtcatgagttgtgtttagctcgtagagttggatggcgttttgaggatctccaaggcttaattaatttatgatgggttgatcttgcaggagaaaattttataactggatttttctaacatctgggaatttatttaaaaggaacatgctacaaagtctttgtttt

SEQ ID NO: 6070 - DNA, 899 bp, Glycine max
catcatcgccatcaagacaacaacatcttcaatttgggacgttcttcttcttctcagctgcaaggtccaaaaagtcagtgtagtgaaaacagacgatccgaagaatattaccctctttcatctctctctataacattattcataagttcagtttgatcttatgtcaatgaaggatttttagacaaaacccagattcacaggaaaaacccttaaagcggagaataaaaggcaacgacttttcatctctacgcaagtgattatggcggttgttgagaatgttggggccaaaatcggttcttcgagccagagtttggagaacggtgtagtgtcagcggattcgggtgaggttgagaaatcgaaaaccagaggcgatcaggatctgaacaacggcgttttcaaccatcaagagagagttcccggtaccatgccagttcctaaccggcaatttcagctacaaggctcagatgcacgcaaatggggtgaacaatgatgggtatgggatgaatggggtgacgagtggggagaatgggggtgagagtttcaagcgtgatatgagggatttggaagagcttttgtcaaaattgaatcccatggctgaggaatttgtgcctccatcactagccaatacgcatggccttttagctggacctaatgctgggtttggttacactaacaattttatactgcctaataactatggaaatactaatggccaaactaacaacagaaggaggaagaatggctataatcccgggaagcgaagaatgaatcataaaatggatatggagaaaagggaggagatgattcggaggaccgtttatgtgtctgacattgatcaactggttactgaagagcagctgggcagttttctttttaaactgcggccacggtgttgattg

SEQ ID NO: 6071 - DNA, 416 bp, Glycine max
cagatgaaggtccaaaaagtcagtgcagcgaaaacggacgatccgaagaatacccttttcatctctctctacaataatcatcatcttcctcttcttcttcagtaaattattgtacctgacgatcttctcggtttgatcttatatcaatggaatttttttagacagaactcggattcacagggaaatctgattgcataggaacaaaaaagacaacacctttttatctctacacaagtgattatggcggttgctgagaatgttggggccaaaatcggttcttccagtcaaaatttagaaaacagtgtagtatcatcggactcgggcgaggttgagaaatcaaaacccagaagtgggtccatcaacgacgatcagaagctgaacaacggtgtcttcaaccaccaaaatagagttcctgg

SEQ ID NO: 6072 - DNA, 536 bp, Glycine max
atcttcttcttctcagctgcaaggtccaaaaagtcagtgtagtgaaaacagacgatccgaagaatattaccctctttcatctctctctataacattattcataagtaagataaaaacctttctctctgtcaaacacaccaatttctctctctctctctctctctttttcctttctggggttttaaggttgtttgcttttgtatctcaatctccaggttcagtttgatcttatgtcaatgaaggatttttagacaaaacccagattcacaggaaaaacccttaaagcggagaataaaaggcaacgacttttcatctctacgcaagtgattatggcggttgttgagaatgttggggccaaaatcggttcttcgagccagagtttggagaacggtgtagtgtcagcggattcgggtgaggttgagaaatcgaaaaccagaggcgatcaggatatgaacaacggcgttttcaaccatcaacagcaccaagagacagtttccggtaccatgccagttcctaacggcaattttagctacaag

SEQ ID NO: 6073 - DNA, 766 bp, Glycine max
cactttggaaaaaagaacctaaaacaaaacatggcacctcaaatttctagaggcagagtccctattgttgttttgctagcctctctagtcctccccctcctttttcaagaatattcttcttcttctgtgttcattgcaagtgcatcagcttcagaatcagatgttgatctgttagaatttcccttaaatttagaatacttggaggctgagtttttcttatttggttccttgggtcatggattggatgtggttgctccaaatttaactgagggaggaccccctcccattggtgccagattggccagacttgacagccttgtcagggatatcatcttgcagtttggtttcagggaagttggacacttgagggccataaagagcacagtgagagggttccctaggccgttgctggatctaagcacagcatcttttgccaaagtaatgaatagtgcatttgggcgacctctggttcctccctttgacccctatgctaattcgatcaactatctgttagcatcttatgtgattccctatgttggtctcactggttatgttggtgccaatccactgctgcaaaatgctacttccaagaggcttgttgcaggacttctaggagtagagtccgggcaagatgcggttattcgaacattgttgtatgaacgccaagcatcattggtgcaaccatacaaagtgactgtggcagagtttacagatcgcatttcaatgcttaggaacaagctaggaaatgcaggtgtgaaagacgagg

SEQ ID NO: 6074 - DNA, 1259 bp, Glycine max
gttggatatgtagcagaactgcttcaccttcttctcttctctccgcctccaccaccactccctcactctccactccctcaattcacaatcctcacgttgcctcgttcacatgaaactcctctcgccctccgtgttctcgctctctctctgaatcactcatccttataataaataaataatttctcgaagaaggagaaagaggttttcattgttgtggttgttgtagaagaagaagaagctgaagaagaatggagtccacagaatcttcatacgtgtcttctcccgagggaccgaggaagcacgctgcatcgcctcctccgaaatcgccttcgctagattctgaggagaagccaacatacattaggtttctagtatcaaactctgcggctggttcagttattggaaagggcggttcaactatcactgattttcagtcacaatctggagcacgaatccagttgtcacgtaatcatgaattctttcctggaactactgataggattatcatggtatctggcgcaataaatgaaatacagagggctgtagaacttatcctttctaagttgctcagtgagcttcatagtgaggatgacaatgatgctgagccaaagacaaaagtgagactcgttgttcctaatggttcatgtggtggaataattggcaagggaggtgctaccattaggtcattcattgaagactctcaggctggcatacagatatctcctcaagataataattactatggacagaatgataggctagtgacgctgacaggatcttttgatgaacagatgcgtgcaattgaattaattgtttcatagctatctgaagatcctcattatgcacagtccatgaattctccattttcatattctggttatcaaggtgtttcatacacatatgtgcttacgtctgttgcaccaccggcatacaatgcagtgaattacagaccaaatggtgctgctggaggaaagctccagaacagcaaggaggagcggagtaactcattgaccatgggtgttgcagatgagcatataggattggttgttggtcgtggtggaaggaatattatggaaattggtcaggctagtggggcaaggataaagatatcagatagaggtgattacgtatctggaacaaccgataggaaagttaccataacaggatcccagagagcaatacgtacagctgaatctatgatattgcagaaggttgcttatgctaccgagaggggggtgatggagtagtttgctactgca

SEQ ID NO: 6075 - DNA, 423 bp, Glycine max
tgaagatcctcattatgcacagtccatgaattctccattttcatatcctggtgtttacttctcaggttatcagggggtcccatactcttttgtgctcccgtctgttgcaccaccggcttacaatgcagtgaagtacagaccaaatggtgctgctggaggaaagctccagaacagcaaggaggagcggagtaactcattgaccatgggtgttgcagatgagcatataggattggttgttggtcgtggtggaaggaatattatggaaattagtcaggctagtggggcaaggataaagatatcagaaagaggtgattacgtatctggaacaaccgataggaaaggtaccattacaagatcccagagagcaattcttacagctgaatttatgtattgcaaaaggtgctaatgcacccagaggggggt

SEQ ID NO: 6076 - DNA, 460 bp, Glycine max
gctacattgaaggaagtgtggacttcatctttggcaacagcactgctcttttggagcactgtgatatccactgcaagtctgcaggcttcataaccgcacagagcagaaaatcatcacaggaaacaactggttatgtattcttaagatgcgttatcacgggtaatggaggaaattcatatgcatatcttggacgaccgtggggcccttttggaagggtggtctttgcatacacttacatggatcaatgtataaggcatgttggctgggataactgggggaaaatggagaatgaaagaagtgtttgcttttatgaatacaggtgttttggacctggttgctgtccatcaaaaagagtaacctggtgtagagaattgttggatgaagaaactgagcagttcctcacgcatcctttcattgatccagaaacagagaaaccttgggttgctcaaaggatggccct

SEQ ID NO: 6077 - DNA, 1186 bp, Glycine max
cccacgcgtccgcccacgcgtccgcccacgcgagttggaaaacaaagtatagagtgaaagaatgggtgagaaaagcaagattttgatcataggaggcaccggctacatcggcaaacatatagtggaagcaagcgcaaaggctggaaatcccacttttgctttggtgagggaatccacactctctgacccctccaaggcacaactcatccacaattttgaggctttgggcgttaatttggtccgcggggatctgtacgatcatgagaagttggtgaaagctatcaagcaagtagatgtcgtcatatccacgctgggtcacctgcagcttgccgatcagctcaagatcatcgctgccattaaggaagccggtaatgttaagaggtttttcccttcggaattcggtaacgacgtggatcgtgtccatgccgtggaaccagcaaaatctgcattagctatcaaagcccaaattcgacgcagcattgaagccgaaggcatcccctatacgtacgtttccagcaactacttcgctggctattttcttcccacattagcacaaccaggtgcttttgctccacctccacccaaagacaaagtcattatcttgggcgatggaaatcctaaagcaattttcaacaaggaagaggacattggaacctacaccatcagggctgtggatgaccctaggacattgaacaagattctctacctcaggccccctaagaacatttactcgttcaacgagcttgtggccttgtgggagaacaagattggcaagaccctcgaaaaaatttatgtaccagaggagaaggttctcaaggacatcgaagaggcacctcttccaatcaatgtggtattagcaatcaaccactcagtgttcgtgaagggtgaccacaccaactttgagattgagccatctttcggggttgaggcttctgagttgtacccggatgtcaactacaccaccgtggaagaataccttggtcagttcgcttgagaatttaaaaggagaaagatgctcttgtgatcggatatttaaataatctgagttgttgatttggagagtggaagattgtgttttatgtcaaaagatcgctatgtgatgtaatcttgcctttcatgtgtagaatgttcctacttgaatggttgaaaaataataaatgacttacgagttgagataaaaaaaaaa

SEQ ID NO: 6078 - DNA, 380 bp, Glycine max
aaaaaaaagactcattattttcaatttgacccacactaacaagagggactacaaaacaaccttaaaaacctagagactaaaaaaataaatttaaatttgaaagacaaaaaaaatgacctaaatttgagaaattaaaaacatgtttaagcttacaaaacactttatttctatctatttatttttaattcctcaatggaaagtttaataataacatgaaaagtttacctaatgtgaaacacatgaccattattaattcatcacaacttttcgaggtctcacattgcaagtcaagtcgagtgaatgtcactattctaattcattttttattcatattatatttgattgtactctcagagagtccgtttatattaaaaaataat

SEQ ID NO: 6079 - DNA, 1112 bp, Glycine max
gcgatctgtacaatttactaactttttagtcacgcagttaaactcttgagcaagcaaagatcccctttatattcttcattcctctggggtgctgcacaacgaaactcacagaagaaagaagaaaaagaagcgaaactaaagtcagcattcgaaaaagatgagtagcatcggtacaggttacgatctatcggtcaccactttctcccctgatggccgcgttttccagatcgagtatgccgctaaagccgtcgacaacagcgggactgttattgggatcaagtgcaaagatggggttgtgttgggcgttgagaagcttattccgtcgaaaatgatgcttccgggttccaatagaagaatacactccgttcatcgtcactctgggatggctgtagcaggattagcagctgatggcagacaaattgttgccagggctaagtctgaagctactaactatgacagcgtatatggcgaaccaattcctgttaaggaacttgctgaccgtgtggctagttatgtgcacctctgtacgctatattggtggctcagaccttttggatgtggtgtcatactaggaggttatgacagggatggaccacagttgtacatggttgaaccttccggtgtttcctatagatatttcggtgctgcaattgggaagggcaggcaggctgctaaaacagagattgaaaagttaaagcttgctgatatgacatgtcgacaaggggttattgaagtggctaaaattatatatggagttcatgatgaggcaaaggacaaagattttgagctagaaatgagctgggtgtgtgatgagtcaaaccgccaacatgagaaggtcccggatgagcttctagaagaagcaaaggcagctgccaaagcagctcttgaagaaatggatgcagattaatagactagaaatgtttatttcaaagttgcatttcataacttgtaattgagcatttggaacatctataggaaatacaaggcttcgatagtcggattttgtatgcttcttgatgaattaatgcccttgttgatttcctgttactgggagaattgttttgaagttctctagattctgacctttattgatttgtgttgaattctctgtc

SEQ ID NO: 6080 - DNA, 512 bp, Glycine max
ctatctcaaagttgaaagctgagaatccagcgatagttacaccagcatccgaaaaagctgagcagcttccggacaggttacgatctctccgtcaccactttctcccccgatggccgtgttttccagatcgagtatgctgccaaagccgtcgataacagcgggactgttattgggatcaagtgcaaagatggggttgtgttgggcgttgagaagcttattccgtcgaaaatgatgcttccgggttccaatagaagaatacactccgttcatcgtcactctgggatggctgtagcaggattagcagctgatggcagacaaattgttgccagggctaagtctgaagctactaactatgacagcgtatatggcgaaccaattcctgttaaggaacttgctgaccgtgtggctagttatgtgcacctctgtacgctatattggtggctcagatctataatggtgctgcagaccttttggatgtggtgtcatactaggaggttatgacagggatggac

SEQ ID NO: 6081 - DNA, 958 bp, Glycine max
  unsure (1)..(958): unsure at all n locations
tatcgagcgaatcggctcgaggcgagaagacgacagatgagagaagaaggaagcatcataaccggccaaagcttctctctcttccatttatcccccataaataaaactaggtgaaaaaaatatactctgtgcttctcatgatgatagtgtagctgaagctgcttctgctgcagcattggtgatttggacacaaaaaaagtttcaaacttttcagttctctgagcttctggtttatcaattttgaaggagttcaatactttaccctattagttggttccctgaaatttgtattggtattgctgtatcagaaattcttctgaacaatctctttaatcaaccatgtcattattggctaaactacgctgtgtcaccatagatgttactggtaccctaatggcttacaaaggggagctcggtgactattattgcatggcagccaaagctgcaggcaaaccttgcccagactacaaacgtatgcacgagggttttaagcttgcatataagggcatggcaaagaattatccatgttttggacatgcagccacaatgccaaacattgtgtggtggaaaacctgtgtgcgagattcttttgtcagggctggatatgaatacgatgaagagacatttgagaaaatcttcagacgtatatatgcgtcctttggttcatctgctccatatactgtatttccagactcccaaccatttcttagatggcttcgtggagagggtctcaaagttggtattgtgagcaatgccgagtatcgatatcaagatgtgattcttccagctttgggtttaaacgagggatctgagtgggactttggtgtgttttccggccttgaaggcgtcgagaaaccaaacccgaaaagttattagagtgcacattagagggccggaanantgtaccagtaagaagcgatgcacacctgggacagcangtgcaaagactatgatccag

SEQ ID NO: 6082 - DNA, 840 bp, Glycine max
  unsure (1)..(840): unsure at all n locations
cccatgtgtatatatatataataagcctataagttgcatttaatttacagcctcgtacgtgtgaagtgaagaataatcttgtgaatcgcgtaagctctctcaactcaactggatccgggtcacaaccgtcttgaaattaagaccaactgggtcattgatcacaatctcaattggtagcacaacatcaagggaaagtgaaaaagaaaggtatatttgatcagggatatggcaactcgaagatatgagtttggaaggatgaatgaggctagccacccagactccatcagagctgccttggctgaattcctctccacttgcatctttgtctttgctggagaaggctctgcccttgctttgcgacaaatttacaaggaaccagggtcatcagcgggtgagctagtggtaattgcactagctcatgcatttgctctatttgctgctatttctgctagcatgcatgtgtctggtggacacgtcaaccctgccgtcacttttggcgctcttcttggtggaaggatctccgtccttagagcagtttactattgggttgctcaacttctaggttctatagtggctgctctcttgttgaggcttgtcactaacaacatgagaccacaggggttcagtgtgtcaatcgggcttggagcgttccacggtcttgtacttgagattgctctcacatttggtctgatgtacacagtctatgcaactgctattgatcctaagaggggtagcatcggctcaattgcacccttagccattgnattcgttgttggggcaaacatccttgctggtgggccgtttgatggagcatgcatgaaccctgctcgggcttttggc

SEQ ID NO: 6083 - DNA, 604 bp, Glycine max
tcacaaccttgaagattgaaaagaattctgaaaagaaatattaaactaagaggttccctttttgcagttagtggcactgcatgtgataaggaatcactcagtttaactttatatatgcgtatcacccctcggtcatctatcatataccccttctccttccctccttataacatcactgatttctcagcacttgctaaatccctctccatcttttgcatgtcctagaacttttttccaaattcagaataacaatttggcatttcatcagtctccattcataggacaaatgggtgaggaagcaaaacaggaacaagtacaaccggtggctgaagccaagcctgaggagaagaaagaagagatggcagaggaaaagaaggaagaaaagccagaagaagagaagaagaaagagcctaaaccaccttccccatgtgtgctgtttgtggacttgcattgtgtgggatgtgccaagaaaattgagagatacattatgaaaatgagaggagttgaaggagtggtaattgacatggctaagaatgaagtgaccataaagggtatagtggagcctcaagcaatctgcaacgcaatcaccaagaaaactaagaga

SEQ ID NO: 6084 - DNA, 537 bp, Glycine max
tgaagattgaaaagaattctgaaaaaaaaaattaaactaagaggttccctttcgcagttagtggcactgcatgtggtaaggaatcactcagtttaactttatatatgcatatcactcctcagtcacctatcatataccccttctccttccctccttataacatcactgatttctcaacacttgttaaaccctctccatcttttgcatgtctaagaactttttttccaaattcagaataacaatttgacatttcatcagtctcgattcataggacaaatgggtgaggaagcaaaacgggagcaagtacaaccagtggctgaagccaagcctgaggagaactaagaagagaaggcagaggctaagccagcagaggaaaagaaggaagaaaaaccagaagaaaagacagaagaagagaagaaggaagagcctaaaccaccttcaccatgtgtgctgtttgtggacttgcattgtgagggatgtgccaagaaaattgagagatacattatgaaaatgagaggagttgaaggagtggtaatt

SEQ ID NO: 6085 - DNA, 2177 bp, Glycine max
cattcgctaaacccaaaacactattttattatcttcttcgtctgttctttgcattgaagaaaatttctttgaattgaagaaaacttgaaatcgaattgtgaaacagaaaataaaccaaaggaaatttttactgattgaattgcagagattggaaaaatggcgttgagtatgactcaacagatcgggaccctagctggtgcgacggtgccggattcctcggccggagaatcgaccgcggcggtgagtgccgccgcggtgtggaagtcaccgacggcgagtctgaagtgcaaggtaatgaggacggatggctgcgcggaggggctttcgccgccgctgagtccgtgcaggtcgccggtgctgcgggcggatctgtcggcggcgtgtcaggcattcacggcggaggtggcggaggaggagtacgttgccggagggaaggaggagaaggggaaggggaaggagggagtgccggtgtttgtgatgatgcctttggacagcgtgacggcggggaacgcggtgaaccggaaaaaggcgatgaacgcggcgatggctgcgctgaagagcgcgggggtggagggggtgatgatggacgtgtggtggggtttggtggagagagagaagcctggggagtataattggggagggtacgtggaactcatggaaatggcgaagaagcatggcctcaaggtgcaggctgttatgtcatttcaccaatgtggcggtaacgtcggagactcttgcactattcctttgcccaaatgggttgtggaggagattgataatgaccacgatcttgcatatactgatcaatggggaagaagaaactatgaatatatatcacttggatgtgatactttgccggtgctcaagggacgatccccagttcaatgttatgctgatttcatgcgtgctttcagagacactttcaagcacctccttggtgataccattgtggaaatccaagttgggatgggaccagcaggtgagttgcgttacccttcgtacccagagcaaaatgggacatggaaattcccaggaattggtgctttccaatgctatgacaagtatatgttgagtagcttaaaagctgctgctgaagctcacggtaagcctgaatggggaagcacaggccctactgatgctggccactataacaactggccagaagacactcaatttttccgcaaagaaggtggtggatgggatggtccatatggtgagtttttcctcacttggtactctcagatgctgttggaacatggtgacaggattctctcatcagccacgtcgatctttgacaacactggagttaagatctcagtgaaggttgccggcattcactggcactatggtacaaggtctcacgccccagaactcactgcagggtattacaacacccgattccgtgatggctacctccccattgctcaaatgctggcgcgccacggtgccatctttaacttcacctgtatcgagatgcgcgatcacgagcagccacaagaggccctttgtgcacccgagaagctggtgaagcaagtggctctggcaacgcagaaggcacaggttccacttgccggcgaaaacgcgctgccacggtacgacgagtatgcacatgagcagatcataagggcatcacaattggatgttgatggtgagtctggtgatagagagatgtgtgccttcacatacctgaggatgaatccgcatttgtttgaaccaaataactggaggaagtttgtggggtttgtgaagaagatgaaagaagggaagagtgcacacaagtgttgggaagaggtggagagggaagctgagcattttgtgcatgttacacagcctcttgtgcaagaggctgcagtgctgatgcactgagaattgttgaacatccttgtggtaatagggcttaggaataagtcacaaggaggctgtgtgaaagttttagtgaaccaacagcccaggtttgtggctttgaagatgtaaaattttgtattatattgttttgtattgtatgcacctaaaacttctatttgtgacccttttacattgtgtacgtaatcatagactttggggtactgtttccttaaaagttactctactttgtacaagtagttacttaatatggtttaaaaaaaaaaaaaaaaaaagggcgccccccgacaagtgagcatgtcgacccgggaaat

SEQ ID NO: 6086 - DNA, 388 bp, Glycine max
acgaaatccaagttgggatgggaccagcaggtgagttgcgttacccttcgtacccagagcaaaatgggacatggaaattcccaggaattggtgctttccaatgctatgacaaggtatatatatttatgtctttcttttccttctccttgttgtagtcctttatatataattgtcttaggatttgtttggataaataaatttcttcatgaacaaagaggagaaaacaaggtaaaatgtgttctaaacctctacttaattatgctatggtgcagtatatgttgagtagcttaaaagctgctgctgaagctcacggtaagcctgaatggggaagcacaggccctactgatgctggccactataacaactggccagaagacactcatttttt

SEQ ID NO: 6087 - DNA, 600 bp, Glycine max
tctcgagccgaatcggctcgaggttagagtgaaacaataggcgatccgcaacttacgttgttcttgaacggagcacgctccctctctgtcctaactcctaatctctctcgcacacacacagtaactatttatttcctccaaatgcttttcttctttagttttaatcacaccctctttcaggttgtagctgctgactcattggatgaagaattcttgatcaaataacttgtcataattgatttcaaatgaagacaggctccatgaattttttcattattccatgtacctagatgtagaatacaaagcttagctaattgctggggtgaaaccttccacggtttcagtacaacttgtggaaacaattctagcatcaggttgcttggttctagaatttatggtcttcagggaggacagagaaagaaatggacaagacctataactacaaatacagaaggcaaggggagcaccaaatccaaaagtatcaagcatgagattttgagtgaaaccattttagcaaatgctacagcaaatgtaaataaaacacagctagatcaatcccaagaaattcaggattgtgacatacaacacgagattgctgag

SEQ ID NO: 6088 - DNA, 325 bp, Glycine max
  unsure (1)..(325): unsure at all n locations
aaacatttttggagatgggggattatctggtcctaatgcacagtctgtactgaaggagagtaacagcaatactgcctactcaaagattgccacctcctttaatcgatggtccattggtgtcccgaggtccacagctttctgctgcaaattatttggttacatcaaatgcagcatctccattgccgatgcctgcttcagccatggctcgaagtttctctacatcttatcgtggtgctaaagttgcagcaatacatgactcaagaccactagaagacnctaatannatcaacaatttctgaggatattgattctcctcctctgatgc

SEQ ID NO: 6089 - DNA, 601 bp, Glycine max
gggagctgagttttgactatgcacaaaatgaatgcgagcaagatgattctacattagagaactcaatgaaggaaaacttggattggctagctgacctaaccttgaaggagaatgaattcctgcaaggttaggtcagctagccaatctgccccactttttgttgataataagcgtgattctagcgaaaagctgagacagatgcggccaactttatctcggaagttcaattcatatgtgctgcctacaccagttgatgcgaagagttcaatatctatgaggtcaagtaatcaagtacctttgaaaataaagacaaatttaaatgagcctatgaagaatttatggcattcatccccactagaacaaaagaaatatgaaaacatttttggagatgggggattatctggtcctaatgcacagtctgtactgaaggagagtaacagcaatactgcctactcaagattgccacctcctttaatcgatggtaatttatcctctagtcatgattatattaccgcttactctaaaaagatcaaaagacatgccttttctggtccattggtaagtaatgcatggccaaccaagcctgtctcgttagaaagtg

SEQ ID NO: 6090 - DNA, 613 bp, Glycine max
tcactttataatcttcaaagctcagctttttactttcctcacatttcacccgatctagttagggttccttacacgatggagcggttgaagtgggcgcaactgggtgagaggctgaagaccggtggggcccagatggggcgaatggtgagcggaaaagtgaaggagatgcttcaggcgccgacgccggagtccaagatggtggacgaggccacgctggagaccatggaagaacccaattggggcatgaatctcagaatctgtggcatgatcaacagcgaccagttcaacggctctgaggtcgttaaggccatcaagagaaagatcaatcacaagagccccgtcgttcagaccctcagccttgacctcctcgaagcctgcgccatgaattgcgacaaggtcttctccgaaatcgcttccgagaaggttctcgatgagatcattcgcctcatcgataacccgcaggcccatcaccagacccgcagccgggcttttcagttgattcgggcctggggcgagtccgaggatctcgcttatcttcccgtctttcgtcaaacttatatgagtttgaaaggaacggatgaacccgttgacattggcggagggaattcaccac

SEQ ID NO: 6091 - DNA, 1847 bp, Glycine max
gcgcaacgctattcttcactcaaacgaactgaaacgacatatcgcagaatcaagggtttcgtttcttccttcgcacctattcattcttctatctgcttgcaattattagcgccaaaataatcccaatgaatcggtcatcttccgtttcaaatttccgaaacctcacatgcgtagctggcttagcatgatggattcaaacttaccatttctgcctcctagcaattccgatacaaaaaactcatttcgcaagccttctggtgatgcagctaataggaattatcagcatcggtcacctgttgacagatcaccctctcctgatgcttctacgcatggacatagctcaagtccaaatccagtgagagaaaattctgcaagagtctctcaccattcaaggaagtatgatgacagggaacacgaccaacagtatggaagaaatcactatggcagaagcagtgactctcttagacattctgatagacagtcattcaaaagttcctttggtcactctcggtatgacaagtatgcaaatgaagatagatatcgggagaggctgttgtctcgttctggacatgagtcaagggatgatcatgtgagagaagagagtgatagcaggccaaaaaactaccagtgcagtgtggacaagtattcacatgacaaatatgacaggtctgatcatagaagcaaagaaaaacgtagagatacatactcggagcatcagaaatataaagatatggattcttcatatgataaatctgcatctagcaagaggcatgcactgtatgatgacgtggagagggaggggcattcaagggactgggatggtcgaaatgaaagaagagattcccgcagaagttcaggggactacagaagtgaccaggcagtctgttattcagagtcaaggaaccaaagagatgaatcaggtccccaaagagactgtggtaaatctagtttaaaagaaggttataagagtgaacagaaggagtcaaatgatcaaaaccttccatgggaagagaaaagaaaacatgatgatactgagactgggaagggtaaagactggaaaactagacaagcaagcgagcagtgtgctattgaagacaaagaatcttctggaaagaaactaaagttgtttgatcttgacaaggatgacaattatagaaaagatgatgaaagtaagacttcaagttcaaacctttctcacgagagcaaggcagatgtatgggctgccaagaccagtggctttgatggtgacaatgacctagatgctgcgaaaattgcagccatgagagctgctgaattggttaataggaacttagttggggctggttgcttgactactgaccaaaagaagaaactgttgtggggtggcaaaaagagtacacctactgaagagtctggccatcgatgggataccgggatgttttctgatcgtgagaggcaagagaaattcaacaaactcatgggtatgagaggcgaagcaaaggtggagcagaattccaacaaccaaagcagtaacgacagtctccgtgctgagaagcagaaggaacttcagatggatctagagaaacaatacactgcaggccttcgacgaagagatggccgtacagttggcttagggctttaaccattctcactccggaaaagttacatcctttgacatttatgtgtcaattatcaccccatgtttagggaggagcttttcgcttgtttgctgtggacatgcttgggagtttatgaatcttatgttagggacatcaccacttggcatctgtttggagttcctgattttgacagggcgtgttatttctatggaatttcttatcgtgataatatctaaatttttgttcccc

SEQ ID NO: 6092 - DNA, 324 bp, Glycine max
gcttcctgcgcatctattcattctctctgctttcaattacaagcaccaaaattccgacgaatcagtcatcttccgaaacctcgcagtagctgtgaagccgaaaaattgataccctcgatgttcagtaggactagcccccgggtgtagaggcttagcatgatggattcaaactcaccgtttctgcctcattgcaattctgatacaaaaaatgcatttcgcaagccttctggtgatgcagctaataggaattatcggcgtcggtcacctgttgaaggatcaccctcacctgatgctagtcctaggcatggacatagctcaagtcca

SEQ ID NO: 6093 - DNA, 1130 bp, Glycine max
ctttgctctttgcagtgtttactatttttcgctgactccggcgagatccgtgtcacttctccggcatcacttgtctcagttccgtccaccggcgttgcgatggaatcggaatcttcaatctccgattctgaaacgcaccctctctcggaccaaatcgacgacgcgtgccacgacatgagctccctggaagagctcgcgagtcgcggcgcttggcgttccatcatcgacaaggtctcacgcgcccgcgctctctctctcctccacaagccccacgaccacctcacctacctcgctttcaacgccctcgccttcaccaaactgcgtcgtttcaacgaagcctccgcggaactcgattccctcgaagacctccacagctcccactaccgctacgaaacctaccccaaaatctaccccaatcggatcggatccatggtccccttctccctccggtggctccacgccctaatccccatcaaattagggcaacgtcagcaaggcatggaccgattctacattcttctcgatttcgtgcgcgggaagattaaggaaaaggagaaactgagcaacctcggcgtctcccttaatctgtggagaaaaagagaggtttttgtggtgaattgcatcatagggaaccatttaagtcagaaagagtttggggtgtgcttgagcttgatgaaggagcttctctctcgcgattgttctgaccctttgctggtttcccagcttgggtacatgcagttgcagattggggacttggagggtgcgaaagtttcgttcttgaaggtggaggagttggggaagagtaatgggtcgttgagcgaggttgagtttaggaaccttgtgaataggaacaaggcgttggtgtatttggttgggaaggattatgtgtctgcggtgagggagtacgaggagtgcattgagagggacagtgcggatgttgtggcagtgaacaacaaggctctgtgtttgatgtatctgagggacttgtcggattctattaaggtgttggagagtgcgcttgacagagttcccactgtggctctcaatgagacgcttgttgtcaatttgtgtagtatgtatgagttgggtatgttaatcactctgatgttaagagaacgcttagtagctgg

SEQ ID NO: 6094 - DNA, 454 bp, Glycine max
ggctccttcgtctttcactctttgtatttttcgctgactccggcgtcactttccgttgagtctccgtccaccggcgtggcgatggactcggaatcttcaaactccgattctcaaccgcaccctctctcgaacccaatcgacgacgcgtgccacgacatgagctccctggaagagctcgcgaaccgcggcgcgtggcgttccatcattgacaaggtctcacgcgcccgcgccctctctctcctccacaagccccacgaccacctcacctaccttgccttcaacgccctctccttcaccaaactgcgtcgtttcaacgaagcctctgcggaactcgattccctcgaagacctcgacagctcccactaccgctacgaaacctaccccaaaatctaccccaatcggatcggatccatggtccccttctccctccggtggctccacgccctaatcccca

SEQ ID NO: 6095 - DNA, 632 bp, Glycine max
cgcgcctttgccgccgaaccaaccaccgaacctcagaaaccctctccaaagaaaaccgtcgacaccttcggccaacgcacctccatctaccgcggcgtcacccgacatagatggacgggaagatacgaagctcatctatgggacaatagttgtagaagagaaggccaaagcaggaaaggaagacaagtttacctgggtggttatgacaaggaagataaggcagccagggcttacgatctcgcagctctcaagtactggggtccaactaccaccaccaactttcccatttccaactatgagaaggaactggaggagatgaagaacatgaccaggcaagagtttgttgcttctctacgaaggaagagcagtggtttctctaggggggcctctatatacagaggagtgacgagacaccaccagcatggccgatggcaggcgagaataggcagagttgccggaaacaaagacctctaccttggcactttcagcacccaagaagaagctgctgaggcctatgacattgctgctatcaaattcaggggattaaatgcagtaacaaactttgacatgagtcgctacgacgtgaagagcattgcaaatagtactcttcctattggtggtttatctggcaa

SEQ ID NO: 6096 - DNA, 616 bp, Glycine max
cctcgagccgattcggctcgagcacaaaattgaactgtaattgtagtagtagacagtagcaccatgagccaggaacagctcaagaaacctcaaggggagcaggaccccatcaaatacggcgacgttttcaaagtctccgacgaactcgctttcaaacccatcgcgccaagagacgcagctctcatgcaagccacggagaaccaagcattgggccaaactcaaaaaggaggtcccgcctcggtgatgcaatccgccgcaaccgaaaacctccgcgccggcgtcgtgggccgccaagacatctccgacgtggcgaggaacgaaggcgtgagcgtgaccgaaaccaaagtgggctgccaccgcgtcatcacggagttcgtgggaagacacgtggtggggcagttcgtggagcccgacgtccccatgaacaccccaggcaccgcgctggagcgtgacgccataaccatcggcgaggctctcgaggcatcggcgatagccggagcaagcgacaagccggtggatgaaagcgacgccgccgcgatacaagctgcggagatgagagcgacaggaaagaacgagacagagcctggcgggctgggcgccagggcccagtcagcag

SEQ ID NO: 6097 - DNA, 451 bp, Glycine max
gtgattgattatcaatccatgaaatctggcgaagatccaactttgggaattccagtgcatgaagagttgacaaatgctgcagatagtcccacattggttgattttttgcatgcagatgttacaagggaaaaagaagattccaataagagaaaaaaggatggctcaacatcatgttctctaaggaagaacagaagatgtattgctggtgaggaggataaaggtgctaaaacctcaaggcagctgagaaaacaagcagctcgtaaacctgtaaacagttcactcaatgaggatgttgaagataataatgaccttgacccttcttataattctaatggagatgaacttcaagaaaatgatgacgagtatgaagttgattatccatccaggtagagaagagtatcaaatagttcacagaagaaacctgtggctaaaagtggaaaaacatctcaaa

SEQ ID NO: 6098 - DNA, 620 bp, Glycine max
ctcaaattcaatcctcgtggctcttctggactcgcattacacggaactcgcggagctcgttgaaaaagccatgctgttacagaaactagaagacactgtcgccactcacaacataacaatcttcgctccgaccaacgaagccttataccgcaacctcgaccccgatttcaagcgcttcctcctccaacccgccaatcttcactccctccagacgctcctcctctctcacatcacccccgccctaatcggatcccaaaccctaacacgccacgtcaccactctctccgaccacaacctcaaactctccgaaaacctcaccaccgtcgaccaagccagagtcacccacccgaatgttgtgacccgacccgacggcgtcatccacggcatcgaccgcctcctcctcccccgttccgtcgaggacgacttcaaccgccgccgcagcctccgctccatctccgccgtcaaacccgaacctgccccggaggtcgacccgagaacccaccgtctcaaaaaaccccccccaccggcgaaacctggttctcttccagaacttccgatctacgacgcgatggctccgggacccttcctggccccggcgccggcgccggggccaggcggtc

SEQ ID NO: 6099 - DNA, 430 bp, Glycine max
ccgccctttacaatatcttatctgaaacactcttctcatatctctctcactcaaacctactttctcctttctttctcttctggaaacaattactaaaggatgagtaaacaagacttcttgaaagttcagagctgtgttctcaaggttaatatccactgcgatggttgtgagcaaaaagtcaagaaactgctgcagaaaatcgatggcgtttattctgtgagaatagatgcagatgaagggaaagtggtagtggcaggagatgtggatccagcgaaactggtaaaaaagctaaagaggggagggaagcatgctgagatatggcagaaccagaaaggagaaatgatgtacaatcacaagtatcccatcaaccagaacatgatgcaacttgggggaatggacaataattagtctcaaaatcaaaatggtcaga

SEQ ID NO: 6100 - DNA, 555 bp, Glycine max
cggctcgagatcgatggggtttattctgtgagagtagatgcagatgaagggaaagtggtagtggcaggagatgtggatccagcgaaactggtaaaaaagctaaagaggggagggaagcatgctgagatatgccagaaccagaaaggaggaatgatgtgtaatcagattcagaactatcctatcaatccccaattccagaacatgcaacttggtattgggggaaaggacaacaataataatcacaagggtcagaaagagaaaggtactgctgcggctgctggtcaactagcacacttccctattcttaaaggggttcaggatctcaaggtacctgccaaggaacaaaagtctgtcaagttcaacttgccagaggaggatgaatttgatgccagtgatgatggttatgatgaggatggattaggccatggacatccaatgcagaacaagatcatgcccatgatgattaatcacaaccattaagacaattctggtgggagtaggaatattaatggaagtgttaagaaagctgacgtcattgatcaggcaatgctgttc

SEQ ID NO: 6101 - DNA, 872 bp, Glycine max
cttcactaaatggtgtccaagtgaatcaaaatgggttagcaacatctccaaccagttcaactgattcggcacaagttgtatatgttgaaactgaccttgaaaccaaaagtaaaactcttgatgaggaaaataaagattcattttcaacagatgtaagttctgaaaagaagcatgttgtgcaaaatgctaatgaattatctgccagcagtgaaaatccggaagtagaagaaaagcaggaagatctcagccccccatctggttgtagtaaagaggataaagtaaccaacaaggatgcagtagatgagaaaaagccaagcaagtgttggggagattacagtgacagtgaagctgatatgattgaagtcacaagttaaggaatgataaacttttcttagtaaaatgattagtaaaaaaaagaaacatagcgaactggttccttgcaagatgcctgtcgagatacctaaaagtgatgccaaggattgactggactgaggaggtctttgaggcagaactgattacttatgaggatttctgaaaggtttcacacagcttggtacatacttttctatgggggttcaaatttatagcgtgtttcgtgaaggaggctccatggccacagaaggagaaggctttgttgcgtagctaattggcaatgtcttaaattgttttaatgttttcctgctacttttcttttgcttattcaaaatggaattctagctttgaggtcaaaatactcttactcttacggctgataactaggttgcaattgcaggacaataaggcctcatttgtcaggccagtgtttgttttttcaagtttagaagcagcccttacatcttacgaatttattcatatttttattttcatatggt

SEQ ID NO: 6102 - DNA, 712 bp, Glycine max
cccacgcgtccgcccacgcgtccgcccacgcgtccgcccacgcgtccgcccacgcgtccgcgcacgcgtgttgtgtgagtgaagaagcagagggagtagcggcattaaaaatgcagatcttcgtgaaaactctgacagggaagactataaccctcgaggtcgagagcagcgacaccatcgacaatgtcaaggccaagattcaagacaaggaaggcattcctccggatcagcagcgtttgattttcgccggaaagcagcttgaagatggaaggaccctggccgattacaacatccagaaggaatcaacccttcatctcgtcctcaggcttcgtggtggcatcattgagccttccctcatggctttggctcgcaaatacaaccaggacaagatgatttgccgcaagtgctatgcccgtctgcatcctagggctgtgaactgccgtaagaagaagtgcggtcatagtaaccagttgaggcctaagaagaagatcaagtgaattctgggtgatattgttggtctctaccttcgtgttgttggatttggaacagggactggtttgatatttatagttctggttttgattaatgttaattgttttgagacaatagttttgaagtagccaattatattgttatgacgacattttgatctctcgtaagttgtatttcatgtttttgcaatgttctcttatctcaaaaaaaaaaaaaaaaa

SEQ ID NO: 6103 - DNA, 476 bp, Glycine max
ttaagagggaatctctctctttatttctttcactctctcagaaccaaaattttccaaactcctcaactctcatcagatatcaaccatctctctctctccaaactcaaatacctttctgttctgctcttcaatttattcatctctgacaccctcttaattctgcttccagttcctctgagtgatgggtatgatctctcctcactcccacaattcccacattatagtaatcctcatcacctgcttctttcgtcataaattctagatcaaactccactccctgatcctcccttttacttcttatgtagcatgtatgaactcaaatcatcaaatgaatatgaccctttaatctaagaagaagaaaaaaacacacacatacacacaacacactttaaagtccaaagtctaaaccaacccaccaaaagtcttgttcccatggcgagtggcaagctttatgcgggttcaaacatgtcacttct

SEQ ID NO: 6104 - DNA, 631 bp, Glycine max
aacttcaatttattcatctctgacaccctcttaattctgcttccagttcctctgagtgatgggttcaaaacccgtggttgattttgagaatgtaagtgggagcaggatgacggataggcctttctttcaagcgttggagaaggaagagaactgtgatgaggattacgaggggtgtttccaccaaccggggaacctgcaggaggctcacacagcgaacaagttcagttcctctgaaaggaactttgaggtagagaacaagcttgaacccgaaaggaaagtccaacttgcaaaagagcttggcttgcagccaaggcaagttgctatatggttccaaaaccgaagggcaaggttcaagaccaagcagctagaaaaagactatggcgtgttgaaagctagttatgacagactcaaaagtgactatgaaagtcttgttcaagagaatgacaagttaaaagcagaggtgaattctctggagagcaaattgattcttagagataaagagaaggaggagaattcggatgacaagtcatctcctgatgatgctgtcaattcttcttcaccccacaacaccaaggagcctatggattaattaattatttcaaaaaatgcaccaccaccaccaccatctgaa

SEQ ID NO: 6105 - DNA, 929 bp, Glycine max
ctattcttgcactttctctcaaccgacttcctatttgcgggcaagaggagctcgggctgggattggcgagtttgttgagtatgacttagataatgaagatgaggattggctttttgagtttaatgaagagaggaacattttgacacctgaaatgtttgagagtcttcttttcaagttggaggtattggatcataaagctcgtgaaagagctggacttataacacctacacttggttcaccaattcctgtgcaactacggcttgatactgctattgaggccttacaagcacagggcttcaaatattcaattatccagtctgtatatgattattggaaagagaagcgagaacgatggcaaaagccggttttgcgacgtttgcagccgcctccaccggttaacgacaccaacccgtataatgtctttcggccaagggagaaggcccacagacttcacacaagaaggatgcaaaggagagaaaccaacgtgcagtcatttgaaaagctccgccaggtcaggcgcaaccttgaccaagctaaaagcttgttggaagcgttgatcaacagggaagagaaaaaaagagaagtaatggagagtgaagttatgctgcagaggatgcaaatgaagtacaagcatgaaaccgagtttttggaagacaacatagcactctctggatttactcccttcacttccaagtttgtttccagtgaagaggaatatttcgattcagatgatgtcatgataaaccgtcttccccgcacacggtctactgcagtacagtatttgccttctcatgaaaccaacgttcccatggttcctgccgctagtacaaagcaagagttcacgaggagatatgtcccacatgcatggcctcataaactggatccacttgagccagttttattgttcaccaaacctctacttccagata

SEQ ID NO: 6106 - DNA, 259 bp, Glycine max
gaaataattttggaaggttatcttataaattacaattcttgtactgaaaatttttcatttattgcagctcgggctgagattggcgagtttgttgagtatgacttagataatgaagatgaggattggcttttcgggtttaatgaagagaggaagattttgacacctgaaacgtttgagagtcttcttttcaagttggaggtattggatcataaagctcgtgaaagagctggacttataacacctacacttggttcaccaa

SEQ ID NO: 6107 - DNA, 793 bp, Glycine max
gcaccaggtttaattcatcaataggtgttttcatttgggattcaaactcaccatggtggacgccttcaaactttgcatcttccttcttgcgtcgatctgtgctttcctagtcttttctaatccagtgctgtgtagtgataaggaggacagtgtattcaagggaatcaacagctacaggcaaacacggagcctggtacccctgagccaagtttcgaaggcaacatgtttggctgatgaagttgcagaagaaatagagaagatgccctgtgaaaacgtgaaccaatactacccttcatctgttcctggtagtgggaacctcaaaatcccaaacttgcagaagcacataaataaatgtgacattaacttcaacaccaccactgatggggtcattcttcccgtttgtgtctccaaattggaaccaaccattgtgctctccaattacactcattctggtagctacgcacagtttctcaacaattccaagtacacaggggcagggcttggttctgaggatgattggatggttcttgttctgaccaccaacactaccactggaagtttctctgctgctgcaacttctgttcgtgctaatgctgcttctgtggagttcttgctctttgttttgctgcttgtgctcatcaactaccttgattgagtgcttatgtctttcttctaatagcttcattgtgtggagtgcggacactttcgtttcattccttctcttgtataaatgtagtgcgaagtgaacttaattaggagttaatctgtgtgctattaaatttgttatttatcc

SEQ ID NO: 6108 - DNA, 1000 bp, Glycine max
tgggaaattctcaagctctgccctcctgagcagctggtaactcattacaagattggaagtttcaaattaggcgatgttgatgattttctactgaaggtaggtacagttaggggcaagctcaagaagggtggaatagttgacattaatgctgctgcaagaatcgttcttcatgattggaatgaaggtaaaattatatattataccatgcccccaaatagggatcaaggggaaccttcagaggccaatatagtttctgatttttcaaaagagtttaacattgatgaagtctacagcagtgaatcttcatatattgggagccttatatctgttgatgacttcaatgctgttgaagttccttcaagtcgccctctcaatcttgatgagacaatgttagaggacgagacacaaatcaaaccagctgaacaaggtgaaggtcctggaaacctggctgtggtggatgaatcaatggaagaagatgatgctggcaagaacaaggggaacagtgaagctggcaggcaaaatgaaaaattatatgccacagatggtatgcttaatacaaaaatgaggcgcgctgagaagaagaaaaggaaaaaggccaagaaagccggagcctcatcggatcccatggatggtgattatgacttcaaagttgattacttccaaaagggagcgacaatggatgctgaagagagcaagagtgaggatgacgatgaacaagtcagctcccaggtgcctatgaatgagtgatgggggaaatggacttgccatagtttatgggggaaatgaatgctgaacaggccaacacagccattattttaaacatgatgtaagggttttgcctcttaacttcaatttttgtttcggagattctaaatcgctgctgttgatccattatgtatatattattttgggatggcacgaacaaagttttggatacgtcatttgtgtccaattgaggcatatgattatgcaattttatttccaaaaaaaatacactcac

SEQ ID NO: 6109 - DNA, 525 bp, Glycine max
caaccacgggcattatgtcagtcttgtgaaaagccataaccactggttattttttgatgacgaaaatgtagagatgattgacgagtctgctgtgcagacgttctttggatcatcacaggagtattcaagtaatacagaccatgggtacattttgttctatgagagccttggctctggtaacaggagttaggcggaggatttctacaacccccttaaatcatttggacttccttttcacatggtttccatatttattttccctttaccgttttccctttattcaacctgttgaaggagctgttacatactctagaggatacgggttgtgaaaaggtatacttaggtggttggcatgtacagtggatagtgctaggcactgtccttttttctttttcctttctcacaataagaccagtatatatatcaggtgaaaatttcaccaacgatgtgtattcatggttgcaagcgttcaaccaacattagaattacaatgaaatggaaattggtcctaactcatgtcggatt

SEQ ID NO: 6110 - DNA, 650 bp, Glycine max
attcagctaaccgaagaaacaggaaacttcctctttctcaccgccactgaatcctctttatatacaaacccttgcccctgctcttccccgcatcacacacacacaacataaactattcaattcagtctctttcgttatcaaattatttcttcgatcaaggtcgttttcgaaacttcaccaacatgagctactacgatcatcagcaacagcctccaattggtgttcctccccctcaagggtatccaggaaaggacgcttaccctccaccagggtaccctgcacaaggttaccctccaccagggtaccctccccaaagctatgccccacagtatgctcaacaacctcctcccaggcaagaagttggttttcttgaaggatgtttggctgcactctgctgctgttgcatgcttgatgcttgcttttaagttctgaaagagacgtggaaggtggtgactgaatcagaaacattctgtgaagcggcattctcatcaatattgggttctgttaattcaatagtagaactgaatattaacatttgtttaggtttaaattcttgcagtgtctatgagtctatcaattctgtatttaaactggttagttcatgggtctggtttctaactttgaatttaagggactggatttatgctaag

SEQ ID NO: 6111 - DNA, 1157 bp, Glycine max
ctcgagccggtcgatacctaaaattcctaatcagaaaaaaaaaaccctagtaatgccgccgatggggaggaagcgaaaggtagcacccaaatcttctctatccaccgagccacctctcaagcagcaacaaccaaaacccgaaaatccccctcaagaatacgaagaagtcgaagaggaagttgaggaagaagaggtagaggaagaggtcgaagaggaagaagaagaagaagaggaggacgaggaagaagaggaggaggaagaagaagaagaagaagaaaacgacgtcgtcaaacaacagcagcagcaacagcaagacgaagacgacatcccgatatcgaaacttctggaaccgttgggcaaggaccagcttctgaaccttctttgcgacgcggcggcgaagcaccgcgatgtggaggagaggatccgaaaggcggcggatggagatccggtgcaccggaagatatttgtccacggattgggctgggacactaccgccggaaccctaattagcgcgttccggcagtacggagagatcgaggactgcaaggccgtcaccgacaaggtctccggcaagtccaagggctacggcttcatcctcttcaagacgcgccgcggcgcgcacatacgcgctcaaggagccgcagaagaagatcggcaaccgcatgacagcgtgccagctggcatccatcggaccggttagcaacccgccgccgacgccgatggcgccttcagcggctccgtcgtcgtcggtttcggagtacacacagaagaagatctacgtgagcaacgtcggtgcggacctggatccgcagaagcttctcgcgtttttttcacggttcggggagattgaggaagggccgttggggcttgacaaggccaccggaaaacctaaggggttctgtttgtttgtttacaggaatccggagagtgcgaggagagcgttggaagagcctcataaggatttcgaagggcacattttgcattgccagaaggcgattgatgggcccaaggccgggaagttgcagcagcacgggaatgtgaatgcccaggcgcagcgggcccagtttcagaggaattctagtgttggtactaatgctgctgctgggtatggtggtggtgcggcgttgcagcccgggcacttgatggccccggctggg

SEQ ID NO: 6112 - DNA, 671 bp, Glycine max
cccacgcgtccgctaatcagaaaaaaaaaaccctagtaatgccgccgatggggaggaggcgaaaggtagcacccaaatcttctctatccaccgagccacctctcaagcagcaacaaccaaaacccgaaaatccccctcaagaatacgaagaagtcgaagaggaagttgaggaagaagaggtagaggaagaggtcgaagtggtcgttgaaaagtaagaggagagaaagatggagaagcaacaacaacaagcaccatctaaggaaacaaaggcacagagtgatgaatcagttaaagaaagcagcactgaagggcttccaatggaggatagtccctatgtgaaatacaaggatttggaggattataagcgtcagggttatggtacacaaggtcatcaagaaccaaagacaggtcgtggagctggagccactgaagcacccactctctctggtgctgcagtttcatctgatgcacaagtcgctgccactgatgccattaacagtaaaggagtcccttaattattcacacttcctagaatagatcgttcctttgctaataagaaatcgttttcttaatttggggtggcgttttttaaatgtgtgaacatctcagtaatttgtattattattacttacacgtttgaagtttgcatttagcatattgtactactttta

SEQ ID NO: 6113 - DNA, 507 bp, Glycine max
ggtgaacacttgtctttaattgaaaagggttttgagagagagagagagagaaaatggcggaagagaaggggatgagtccgtgggagcagcactcggctgttatcaagctgcctcggtttgattacaacgctccctcttctcttctccgtaactcccattccggttttctcatcacttgtactatcaagcgagagaaaagcgctacaaaagaagcaatctctatccttcacaagttccttgggtcgggtcattatcacactttaaacaaccctaatgaagaagatactacttctaagagaaggaagatatgcacacaagatgctgccgaggaatgtttcgacgagtctcccactgctaactctggagctgatggtaaactttcaagtcctgttaaagcagaggcagagaaagacggaatagctaatctttctttggttaagctcacgaggaatgggttgcttctccttacctttcccattaacacgcaccctgacactgttactattg

SEQ ID NO: 6114 - DNA, 816 bp, Glycine max
ggatgccttctctgctgcagttattgtcaatattgctttctcttttatacctgcctcatttgccgtttcaattgttaaggaacgtgaagtgaaagctaagcagcaacaactaatcagtggggtttctgtcctgtcatattgggcttctacatttatttgggacttcgtgagcttcttgtttccggcctcttttgccatagttctcttttacgtctttggtctggatcagtttgttggaggggtttctttgttaccaacaatcctcatgcttttggaatatggacttgcaatcgcatcatcaacttattgccttacatttttcttttttgaccataccatggcgcagaatgtggttctcttgatccactttttctctggattgatactgatggttatctcattcattatgggactcatgccatcaacaatgagtgccaattcttttcttaagaattttttcagaatatctcctggattttgtttcgctgatggtcttgcttcactagctcttttacggcaaggaatgaaagataaaacaagtgatggggtgtttgattggaatgttactggggcttccatctgttatcttgctgttgagagctttagttactttctgttgacgcttgcacttgaaatgtttccttctctcaatttgacttcattcatgatcaagaagtggtggggaaaaattaatatcttccagcataataatccctatttggaacctctgttagaatcatcttccgaaactgttgctatggacttcgatgaagatgtagatgtgaaaacagagagaaatagagtactttcaggttc

SEQ ID NO: 6115 - DNA, 415 bp, Glycine max
cttacaaggcattttcttctctctctccctctcatcttctggggacctcaaaatatagtaggtaccacaacacaacaccatattatgggttccaaagtcaggaccctggttttgctctctttgttttgcttagctctatttgtgtccttgcaccaagcaagggcagcaaagtcacataataatgataataatcataatgtggctcgcttgaaggggagaaaggagttgaatagatgtaatttgttcattggaagttgggttattgacccttcttcacatcctctctatgactcctcaagctgcccctttatagatgctgagtttgattgccaaaagtatgggacccccgataagcagtatctcaaatactcttggaagcctgattcatgtgccttacccaggttcgatggagtga

SEQ ID NO: 6116 - DNA, 459 bp, Glycine max
ctaagacacacaaacactacacatcacaatctcacattgttctcaagtttcaacactttctagttctaccatggcggtaggactctccgccgccataaccatgaagtccctcctccgtttccaccaacctcacctgaacctccccaaatcaatcccaacaacactccctttctcccccatgagaattttccaccacacagcatcaccaagaacccaaaaagtttcaactttcaccgtttgtgtcctcatgcaggacccaaaacaaggcacccacatggaaattcagccacaagaaccaccaccctctcctcctcagcaagttttgtcacaaaagttggctgagaaattggccagaaaagagtctgagagcttcacttacctcattgctgctgtcatgtctagcttcggcatcacatccatggcagtgttcgctgtttattatagatttgcatggcaaat

SEQ ID NO: 6117 - DNA, 709 bp, Glycine max
ttccggtttctctctcgctctttccgttttgacttaccatggcggaagaattatcaacagcgattccgcaatcgcaagcaagctccacgaagaaacgcgcttcaaagaatgaaaagctgtgcctcgaggactaccttcatctcgttcactctcgccaaacgcttcatctcaccatgaatcaactccatcaggtcatccgcattcacggcttcaagaaaatccaccacgctcctaagaaagtgctggtgcaagcggtggagtcgctggatctggtggatctgccgcagtcaaaggtgagcgagagcgtgtcggcgtttgctgcggtggcgctggaggacgtggttggggatctcggcgagctcagctggcaggagtgctgcgtgacctccgtcgagaagatcagcatctccgacagccagagcgtgttccctgctgcttgctcagatcagagcctctgcgtcgtgaaccactcgctgtcgcaggcccggaaagagaacaggatcgacgaaacccgtaacctaatccctgaagcttttaggaaagacctgaaaccaacgaaaatggtgccgaagcggaagaggagcaacgttcgcgactatgttgcctctactttggattccgcttctctcgcttcgtgctgaatgaatgaacgacttcggttacttctctctctgtatagtttaaagaaatttaaagtttccaatgcatt

SEQ ID NO: 6118 - DNA, 765 bp, Glycine max
attcaatcataagattattgtttgtttgcggttgcagagatgagtggatgaattaattgatgaatgaaattcaaatactaattgttgctatcacaattcacaagagattggattttggaatggaaagggtgttgtcagtagatgagatatcggagcaatactgggtggctgcatcatcttcttcatcatcatcatcatcatcgttcaagtcaaagatgaaccggagcgaatccgaatgggcctttcagcagttcctacagcaggaagctgcttcttcttcatctaattctgatcatgatgatgatcatcatcatgctaaactcaaaaaggaatccaacaccaacatccctgttactctacatgttgattcccaagactaccatgctattcttaagaccaagcttaatctcgcatgcgctgctgttgttatgactcgggtatgttcatttttcggaacaaccccatggtttttttttttttagttagctcttggaattgtttcattttatatttgaaacaatttttatttatttattttttctaaaagaaagcccacaagtctttgagtctcccccatcataaatcacccagatattacccatttatgattttttctccttcccttaaactcagttgcaaaatgaaagtttgttctttcggcccataggtagaagagaagcagaataatgcttccgcgtaaaaggtttacagtggctctcaaggaaaattccacattcactttggatgaagaaaaaaatctttcac

SEQ ID NO: 6119 - DNA, 697 bp, Glycine max
gagatgagtggatgaattaattgatgaatgaaattcaaatactaattgttgctatcacaattcacaagagattggattttggaatggaaagggcgctgtcagctgatgagatatcggagcaatactggggtggctgcatcatcttcttcatcatcatcatcatcatcgctcaagtcaaagatgaaccggagcgaatccgaatgggcctttcagcagttcctacagcaggaagctgcttcttcttcatctaattctgatcatgatgatgatcatcatcatgctaaactcaaaaaggaatccaacaccaacatccctgttactctacatgttgattcccaagactaccatgctattcttaagaccaagcttaatctcgcatgcgctgctgttgctatgactcggggatctttggtcaaatctcaaaaccctgacagtggaccacaggcatctaatttttctgaagttggatcgcatgctaccttaaaaggatctggcccttttggaaatgatgatccctctaaattacaaaataaagatatcaaagcacaaattgggattccttcctcaccttccatgcaaaacaaatccgctgtcgtcgcaatgaggccaacaataagtggatcatcaggagaacaatcagatgatgaggaagcggaaggagagattaatatgactggaaacatgactcctgttgatg

SEQ ID NO: 6120 - DNA, 518 bp, Glycine max
ccgatcgtagcgaatcggagtgggcctttcagcagttcctacaggaagctgctgcttcttcttcctctaattctgatcatcatcatcttaaattcaaaaacgaattcaacatcaacatccctgttactactacttctattcaaaatattaatgttgattcccaagactaccatgctattcttaagaccaagcttaatctcgcatgcgctgctgttgctatgactcggggatctttggtcaaatctcaaaaccctgccactttctctgacagtggaccacaggcatctaattcttctgaagatggattgcaggctaccttaaaaggatctggcccttctggaaatgatccctctaaattacaaaataaagatgtcaaagcacaaattgggattccttcctcatcttccatgcaaaacaaacctgctgtcgcaatgaggccaacgataagtggatcatcaggagaacaatcagatgatgaggaagtggagggagagattaatatgactgaaaacatgact

SEQ ID NO: 6121 - DNA, 1206 bp, Glycine max
atctggtgaaggatctactacttcaactgcaccttcagctaagccaagtgcaactcctacttcaacttctgtgtctactgcacctcaagctcctgcttcaactggagcatcggctacacctgttactgccccaacagctgctcctgcacctgcacctgcaccagctgctccagctccagctcctgctcctatatcttcaggctctgctgtgccagagtctgatatatatgggcaggcagcatccaatctggttgctggaagcaacttggagggaacaattcagcaaattcttgatatgggtggagggagctgggacagggatactgttgtccgtgctcttcgagctgcctacaacaaccctgagagagctgttgaatatttgtatacaggtatccctgagcaagctgaagctccacttgtaacccgggcgcctgtaagtgctcaacctacaaatcctcctgctgatgctccacaaacagcacaacctgcatctgttccttctagtggacctaatgctaatcctttagacctctttccccagggccttcctaatgttgggtctggtgctgctggtgctggttctttagactttcttcgcaacagtcaacagttccaagccttacgcgctatggtacaggctaatccacaaatattgcagcctatgctacaagagcttggcaaacaaaatcctcatcttatgcgattgattcaagagcatcaagttgacttccttcgcctaattaatgaacctgctgaagggggtgaggggaatatactggggcagctggcttctgccatgccgcaagcagtgactgtcacccctgaggagcggcaagcaattgaacgtctcgaagcaatgggatttgatcgtgcaactgtattggaggtgtacttcgcttgtaacaaaaatgaggagctggctgccaactaccttttagatcacatgcacgagtttgatgaataattagatctcctttccaatttgtcaaaatagttgttttatgtttccttttgaacagtctttgttatgtaatgaggtaatatttgataatgacaagtctcgaatggacaagagatattttaatcactgcattattgcacaggtattcatcattttcttctcttagaaattttatcaatattcttatacagggctgtttggctggaatatgtgtttataaggggccatccccttacctggcccgg

SEQ ID NO: 6122 - DNA, 703 bp, Glycine max
cccacgcgtccgcacaaatattgcagcctatgctacaagagcttggcaaacaaaatgcccatcgaatgagattgattcgagaccatcaagctgacttccttcgcctgataaatgaacctgcagaaggtgctgaagggaacatattggggcagatggcttctgcgatgccacaagcagtaaccgtcactcctgaggagcggcaggcaattgaacgtcttgaagcaatgggttttgatcgtgcaatcgtattggaggtgtacttcgcttgtaacaaaaatgaggaattggctgccaactaccttttggatcacatgcatgagttcgaggaacaatagatctcctttcgaatttgccaaattatttcgtgtcatcttttttctcgatgggtctttgttacatactatgtttaatgaggtaatgcttttgataatgtcaaatctcaagtggataagggatgttttattctcctccatattattgcccatgtatttatcatttccagcccgtcgagggtttcttagtatttcatatacatagttgtttgccttgtattactggtattgtgcatccttttaacgtgtgtaattgtgcatgcttgttcattcgcaagtcgatagatgtgtaattcgtttgacacagactgtttctgggttcagttcatgtttttggaaatataatgactttttgctgtcaagttttatat

SEQ ID NO: 6123 - DNA, 481 bp, Glycine max
caaggctccacagacaagtacagttcccgcttcaacccctccagtgtcagtagcgcctcaagctcctgctcctgctgcaactggggcactgcctgcatctgttactgcacctgtatcttcaccttctccagctccagccccagctcctgctcctatatcttcaggaactgctgtggaagggtctgatatctatgggcaggctgcgtccaatctggttgctggaagcaacttggagggaacaattcagcaaattcttgatatgggtggagggagctgggacagggatactgttgtccgtgctcttcgagctgcctacaacatccctgagagagctgttgaatatttgtatacaggtatccccgagcaagctgaagctccacttgtagcccgggcgcctgcaagtgctcaacctacaaatcctcctgctgatgctccacaaacagcacaacctgctccagttacctcagctggacctaatgct

SEQ ID NO: 6124 - DNA, 433 bp, Glycine max
acattttcccctctttggagaaatcaaaagtggggaacccatgattcctcctccatcttccggtctcttccagttcctcctcctctttcctctcatactctcccattccgattccgattccggtcaccccgtgctcccgcgcccgctgatcgtggagtacccggagttcgacgcggtgctgcggtgcggcgcgtggcgcgtggcgggggaggcgaacaacctacgcgcgtgggcgataattcccgaggaatgcgcggagtacgtgaaggactatatgagcgggaaaggctacgcgcttgacctggaaatggtctccaaagaggccgaggagtacgcgaggactgtgccactcggctacgacgggaaggacgcgtgggttttcgacatcgacgagactctcctctccaatctcccctattatgccgcacatgga

SEQ ID NO: 6125 - DNA, 1251 bp, Glycine max
gacccactcgtccgccggcgcaggcgcgcacgcgaccgcccactcgttcgatagggtatgatgaccatagatcgaacctttcgaaggtcggtcccttcccacacatatataacatactgactggatgaggtaagaccagagaagttccgttccgacacgtgacgttcattctgtctgttggaactgttggccttttagggttagggtttcggtttgtggatctattgttgcctctgcgatggatcgcaagaggggaaggcctgaagctgccttcaatttcaatggcggcgccaagaaatcgaggcctgaaacggactcctttccaactggtttaggaagcaaatcgaagccatgcacaaagtttttcagcacctccggctgtccatttggtgaaggatgccacttcctgcattatgttcctggtggctttaaagctgtctctcaactgatcaatgttggtagcaatcctgttactcctcaagttgggagaaaccctgttccaccatccttccccgatggatcttctcctccagttgttaaaacccgattgtgcaacaagtttaatacagctgaaggttgcaaatttggtgacaaatgtcactttgcccatggtgagtgggagcttggcaggcctacagccccatcatatgaagatccccgtgttttgggacagatgccaagcagcagggtaggtgggcgagttgagcccccacatccagctcatggagctgctgccagctttggagcctcggctactgcaaaaatcagtatcaatgcttccttagctggagctgtcattggaaaaaatggtgtcaactcgaagcaaatatgtcgtgtaacaggagctaaactttccataagggatcatgacacggatcctaaccttagaaacatcgagcttgaaggcagttttgatcagatcaaacaagccagtgccatggttcacgaagttattctaaatgttagttctgcctctgggcctccaatgaaaagctttacttcgcagacttctgcccctacaagcaacttcaagactaagctgtgcgaaaactttgccaaaggttcctgcacttttgggggaaagtgtcacttcgcacatggaactgatgaattgcgcaagtctggaatgtgatagcgttataattttgttttagcgaggtttgaattgtgcagaattttctagtttttcaatttttttatcaaacagcttctaatttgctacatgataactaataattaatggcgagtctt

SEQ ID NO: 6126 - DNA, 432 bp, Glycine max
gacacgtgacgttcattctgtctgttggaactgttggccttttagggttagggtttcggtttgtggatctattgttgcctctgcgatggatcgcaagaggggaaggcctgaagctgccttcaatttcaatggcggcgccaagaaatcgaggcctggcacctccggctgtccatttggtgaaggatgccacttcctgcattatgttcctggtggctttaaagctgtctctcagctgatcaatgttggtagcaatcctgttactcctcaagttgggagaaaccctgttccaccatccttccccgatgggtcgtctcctccagttgttaaaacccgattgtgcaacatgtttaacacagccgaagggttcaaatttggtgacaaatgtcactttgcccagtgtgagtgggagcttggcaggcctacagcgccatc

SEQ ID NO: 6127 - DNA, 722 bp, Glycine max
tgagtctgctttgataaatccttcagctttagtgcccgatccatggcaagtatctagtgagacattaaccagcattgaccctgaagcagtggctgttgaacctgcactagttccatgtgttcaggcttatgttgattcagttcttgatctagcttcacactttatcacccggttgcggcgttatgcaagtttctgccgtacagtggcaagtcatgctgtaactgcagggacgggaaataaccgaaatgtggtagctagtcctgcccaatgttctgcaactcctgcaacaagtcagggaggtcaaaatgggacaaccagttctagtggaagcacacagatgcaagcttgggtacaaggggccattgccaagattagtagcactactgacggagtgtccaacccggttcctaacccccccatcagtggtccttcgtcctttatgcccataagcattaatacaggaactttccctggaacacctgcagttcgacttattggggactgtcatttcctccatagattatgccaactgttgctcttctgttttttctttcgacgagcacaacaaccccgctatgcgggaggtgtacagagaactgctgacacaaatctacaaaaacctcaacctaatgcttctgtccctggcaaggtggaggaaattgcaaaaccagtgtcaactgtggttaggccagatgatggtcaggctggtcgagttagtcaac

SEQ ID NO: 6128 - DNA, 517 bp, Glycine max
aatgggaaagtttgtgctaaatggaagaaggaatactcccatataattcttactccgtaagtatgggggaatgtgacaagatttgttcctgtttgacaaaatattaccaggctgtcctccaaatgatgaggctttgctgtaatggactcctccagctgcagaaaaagatcaataggcgcaaagacttcctccattggtggacaaagtgaggtcgattcaatctattttcttggcatcgaagctattttataataagcaactacatggtagtttaccttgctaagaagcacccatgtttgatggagattgtgtccatacaataccttgtcacagtttctgaatgcttttacggggtttcaggcccctttgaggttgaatgtttattatctgtacctgagagtaaacaatttctgaatgactaatgtttggtttgtaagttacggttcttacattggaccaattttagtctcatcccctatttttgaaaaacggcgtttcaatagatatttttgaactg

SEQ ID NO: 6129 - DNA, 511 bp, Glycine max
ttactcttactccgtagttcgggcatgtgacaggattgttcctgttgacatatatgttccaggctgtcctccagctgctgaggctttgctgtatggactcctccagctgcagaaaaagatcaataggcgcaaagacttcctccactggtggacaaagtgaggtcgattcggtttattttcttggcatcgaagctattttataataagcaattacatggtagtttaccttgctaagaagcactcatgttagatggagattgtgtccgtacaatactttgtcacagtttctgaatgttttatgtgctgctgcttttacggggcttcaggcccatttgaagttgaataatggatgtttattgttatctgtcaatgcttaatctgcacctgagagtgtaaacaatttctgaatgactcatgtttggtttgtaagttacggtttttacattggaccaattacagtctcgcatattcctgattaatggcgtttcaataaataataattttgaattga

SEQ ID NO: 6130 - DNA, 877 bp, Glycine max
agatgatgaccctatattagagcaagcaatagggacggagattgagtggcatccaggaaagtgtttgacacataagattcttaagaagaagccaagtaaaggatcaaagaatgctaaacccatcacaaaaacagaaaaatgtgaaagtttcttcaactttttcaatcctccccaggtccctgaggatgatgatgatattgatgacgatgctgttgaagagctcgagaatttgatggaacatgattatgacattgggtaagtcagtagtgaatacttgagcgatatttcttattccttttgatctgagtgatgaagacttttggtctatcaataatacttttcattgatattaaagcttagtgtatttattatctgatggtccctagttggaaaaggctttttttttttaattatttgttctctggttttacatctttatttagttagtttccactgaaaaatatttgttgaacttgaaatgtagtttggcatgttgagtataaagttgtttatagtacacgcccaacattatgaattcatgtccttaaaactgtaattacttttgtgccattcttgtaccagaaaaagatcagaatgaacagatattaacctttggaagaaaatgttgacatttatggatgacaccaaatgactgtttatggtgctgttcactactattttttagatgtattttttattgacgtgcaactgcagttctacaatccgggacaaaattattcctcatgccgtgtcatggttcacggtggaggctgcacagagtgattttgaggatatagatgaagatgattatgaagatgaagaaggtgatgatgatgatgatgaggatgaggatgaggatgaggatgaggaggatgag

SEQ ID NO: 6131 - DNA, 931 bp, Glycine max
atctcattcgatcatcaatcctcactcgtggatttcaatctcgttcagttcctcccattttcatacacaaataattttctttatatttctgcattgctttgagtggattgtgcataatcatattatcaatttttcattcatttaaccaggggtgtaagaagaagttgaggtgatggaaccccaggatgaagaagagatccataactgtttgatcaagctggttgctttattgttccttaccttgggttatctttctagttactgtctttaatgcagcatcaatgctagtgaaggaattgactctattgttgataatgcattacagagaagtaatccggaaaggcgaagggataaggtgtacattggttgtggagctgggtttggtggtgacaagcccttggctgctcttaagttgcttcaaagagttcaagaactaaattatctggttcttgaatgcttggccgagcgaactcttgctgatcgttatcaaatcatgatgtctggtggtgatggttatgattctcagatttctaactggatgcatatgctgctgcctctggctttggaaagaggaacttgcataattaccaatatgggtgcaatggatcctctgggtgctcaacagaaggtcttagaaatagctaacagcctgggtctcaatgtttctgttgctgtggctcacgaagtgtctgtcactaatataataggttcaggattttccccagcaaaatcatatatcatggagggtggtatcagcacctacttgggagctgctcctattgttcattgccttgaaaagtaccaaccaaatgtaataattacatcgagaattgctgatgctgctttattcttagcacctatggtttatgagctaggatggaactgggatgaattagaacatctagctcaaggatctttggctggccatctt

SEQ ID NO: 6132 - DNA, 568 bp, Glycine max
aaaaatgcagcctcagcaaccagggtataacagttcaagggtttacctagagcttatctctgatcttccctggcagaaggccagtgaagaaattgaactggacttgagagctgcacagaaacggctggatagtgatcactatggtttagtgaaggttaagcaacggataattgaatacctggcggttcgcaagcttaaaccagatgcaaggggtcctgtgttgtgctttgttggaccaccaggtgttgggaaaacatcattggcatcttctattgctgctgctttgggaagaaaatttgtacgcatatcccttggtggagtcaaggatgaggctgatattagaggacataggagaacatatgttggaagcatgcctgggaggcttatagatggattaaagagagtagctgtttgcaatcctgtcatgttgcttgatgaagttgacaagacaggttctgatattcgtggagatccagcttcagcattgctagaggttcttgatccagaacaaaataaatcgttcaatgatcactatttgaatgttccgtttgatctatccaaggtagtt

SEQ ID NO: 6133 - DNA, 444 bp, Glycine max
ggatctgcaactgcaacagcaagcacaaacatcaaacagagtcattgttattgtaacgtaaaatcacatggagaaggaagctttgaaggaccaaattgaaactccaaagcactgaacgaactcaattgaaaccctagcacagagtcatacatagatagtagcgtggatagcagtgtgtgatgcggtgatcgcgatcacgatgaaaaatgcaaacggcttgatttcgacgacgtcgtctaatacggcacagtcacaatccactggcctcaagacgtatttcaagactcacgaaggccggtacaagctttattacgataagacttacccttccactcttcttcactacgctcatggcaaaaccgtttctcaggtcgctctgcttggtctttttttcccctctttcttattctgcctttgcaatactcttttgtattgctattatgt

SEQ ID NO: 6134 - DNA, 520 bp, Glycine max
gttgaaagacaagggggaaatctcttttgttctatgtctctgtgaagaagctcaaagcgttaaactgcttcttcttcttcaatggcggcagaatcatctcgcagtagcgctaaacgcccctttatggaagaagacgacgatgaattctccaaaaagccaccagcaaaaagggttaggtttccaaagggaaagaaagtgaagccaggagatgaagtggtggtggacaaagcaaatgttgaggagggtgaagttgacttggtgaatgctaaaactgccaccaatgctgcaaaagagcgggaaaaactcagaaggtttctaaagggaaagaaagtgaagccaggagatgaagtggtggtggacaaagcaaatgttgaggagggtgaagaagttgacttgatgaatcctaaaattgctgctgccaaagaacgggcaaaactcagaaatcaaattacttctgaactccttagtgagggcgctggaggtatcacaaacgatttatcggctgctgaagtgacatatg

SEQ ID NO: 6135 - DNA, 1163 bp, Glycine max
gaaaaatctaagactatttgaagaaagaaacgcttctctctcgagcgtgatcgtgatccgttcccttccaattttaccaaaatattagagaataaacaaaatatactatttcatttccgtcccctttcattctaatacattccaatgtttcccagtgccggcgttcccaagaagcggcaacgcaccaccgccgccaaccgttcctcctccacagttggcaccatctcctccctctccgacgtaaccctaatcgaaatctcccaaaaccctcgaccttcctctcccatgaccgacgaccgcccctctcccgcggcggaagacgctctccattataacgacgcttccaccgccgacgtcgtcctccgcctcttcatcgacgcttcctctccgctctattccgccaccgccgactccgtttccaactccgacctccacgtctacctccattccgacgtcctccgccgctccaaatacttctccgccctcctctccgaccggtggatcggccacgtccaccactcgccggagcactcatcctcctccaaccgcgatctctcttccgcctcaacctcggcgtggctcccgccgccggctcgatccagtcgcatctcaccgtcctggagcttctctacacgaacgacttcgccgcggcggtggactgcgcgtcgacggcgctggatctgttaccggtggcgctggagctccttttcgaagattgcgtgcgctggtgcgtggatttcctcgaggcggtgccgtggacggaggaggaagagaagcgagtggtgagattaatccctttccttagcgaggaagagtcgaaggaactcgtggctagggtttggccttcgggagaggactcatgcgaagcgatgctgcaaggattgatttcctcggcgatgaacagttacggcaacacggcgttcgtgaaggctttcgtagggaagattcttcgggatctgtcgtcgagggagacggcgaagagagtgttagagaaggcgttcgcgatgagcttgaagacggtgaaggagtcgttggaggattactcgagtccggtgttcagaggggatcacaatgagacggaggctattcagaggctgaatctgcataaggcttccaccaatgggaagcatcttctgtggcttgtggagaggatgattgagctt

SEQ ID NO: 6136 - DNA, 551 bp, Glycine max
gatccgttcccttccaattttaccaaaatattaaagaaaaaacaaaatatactatttcatttccgtcccctttcattctaatacattccaatgtttcccagtgccggcgttcccaagaagcggcaacgcaccaccgccgccaaccgttcctcctccacagttggcaccatctcctccctctccgacgtaaccctaatcgaaatctcccaaaaccctcgaccttcctctcccatgaccgacgaccgcccctctcccgcggcggaagacgctctccattataacgacgcttccaccgccgacgtcgtcctccgcctcttcatcgacgctccctctccgctcgattccgtttccaactccgaccaccacgtctacctccactccgacgtcctccgccgctccaaatacttctccgcgctcctctccgaccggtggatcggccgcgtcgcgccggagctctcgtcctcctcctcctgcaaccgcgaccgcgacctcgacctcttccgcctcaacctcggtgtggctcccaccggcggctcgatccaatcgcatct

SEQ ID NO: 6137 - DNA, 459 bp, Glycine max
catccacattagatgcttcaccagtggatgaatacctttggcttgtagagagctctccccatcagccaaaggtattcatccacattagatgcttcaccagtggagccaaagcaacggatagaagaccaatcatgcccagctgtggattttgtggtggtacagaaattgggggtggatttgtttgcggatcactactacaggctcagtcattagctgcttttagcacaccagctatgtgctgcagtttgtttattcttgatgatgaaggccttcctattccacaaaatgttccaggaataggtgagttggctcttggtccgctcatgcttggggcttcaaatacactgcttaacgctgatcaattacgtgtctatttcaaaggaatgcctctcttgaatgggaaggattacggaggcatgggaatgtatttgagcgactgctaaaggatactatcatgcc

SEQ ID NO: 6138 - DNA, 398 bp, Glycine max
aattggttgaagtttttcctgattgtgaaatgattatggggcctggcatgcaccgaataagttctcgccttcaagagattatagtagattgcagtggagaagatggacaagaaaaaactcctgatacagcatttctgaacaagaaaactgcacttctgcagcttgtggaggaaagtcctgtcccaagaactattgtgttctgcaacaaaattgaaacctgcagaaaagttgaaaatttgttaaagcgttttgatagaaaaggaaattgcgtgcaagttctaccattccatgctgccatgacacaagaatcacggcttgctagtatggaagagtttacacgttctccatcaaaaggagtctcccagtttatggtttgcaccgacagagcatcacgggga

SEQ ID NO: 6139 - DNA, 1608 bp, Glycine max
  unsure (1)..(1608): unsure at all n locations
tgaatggaaaaagaagcttcctcgggatgaggataaaggggcttgccggaaaatataaaaaagaaagaaagaggtggtaacacgaaaggcgcgtggcagccgctggtttaaccgaaaagaaagcaactttgtcctacatcagaggcaacggaaaagaggatcctttctgcttcttctcttctcttccacacaaagacatcgtttcattgctctctctcttgtgcggacacaatttttgatggggatatacctcagcactcccaaaacagagaaggcctctgaagatggtgagaacgacaagcttcgcttcggtttgtcttccatgcagggctggcgtgctaccatggaagatgctcatgcagctcatccatgtttggacgagtccacgtcatactttggtgtttatgatggccatggaggcaaagcagtttcaaaattctgtgccaagtatctacacctgcaggtgcttaagagtgaagcttacttagctggagatttaggcacatctttacagaaatcttttctcagaatggatgagatgatgcgtggacaaagagggtggagagaattagcaatcttgggggataaaatagaaaagttgtctggtatgctagagggctttatatggtctcccaggagtagtgaagccaatgaccgtgtcgatgattgggcttttgaggaggggccccattctgatttactggaccaaactctggaagcacagcttgtgtggctgtcatccgaggaaacaaacttgttgttgctaatgctggagattctagatgtgtcttatcaaggaaaggccaggcacacaatttgtccaaggaccacaagcctgaacttgaggctgagaaagacaggattctgaaagctggtggtttcatccacgttcgacgggtcaatggaagttcaaacttggctagagcaattggagatatggaattcaagcagaataagtatttgcctgttgaaaagcagattgtaactgctgatccggacataacttcagttgagctttgtgatgatgacgagtttcttgtaatagcttgtgatggaatatgggattgtatgtctagccaacagcttgtggacttcatacatcaacagttaaagactgagaataaactttctgcggtttgtgagaaagtatttgataggtgcttggcaccagcagctggtggtgagggatgtgataacatgaccatgatcttgattcagttcaaaaaaccttccaacagcccagatgcatcatctgtcacgaaccagcctcaatcgtctgctcaaccatctgaagctgatagaagttcagagacaatagaatcgaagtgagagaatttcggacctgacttgatggtcatcaatttcttactgcatgttgaagcattggtgagctgaggttcttgccttcttgggtactattttatatccagatttcaggatgttaattgtcaataggggattgcaaatttgtgaaaaactaattcatgggactagtattggctttgacacaagtgtgggtgttcagaatatgaaggaacanaaaaaattcagcaagcatacctgatgtacaccgaatgactaanattaccttttggaagcttacctatg

SEQ ID NO: 6140 - DNA, 644 bp, Glycine max
gggatcgacgccacgcgtccgcccacgcgtccgcccacgcgtccggggaattggttgtgaaggacatacaggatacttgcaaactgctggggccaatttacaatgaaacagatggggaagatggacatgtatctcttgcagtttccccaaagctagcaaatgacaccaaggggacaattgaggcagcaaaatggcttcataatatggttggaagtccgtgtgtttacatgaaaattcctgccactgatgaatccatctcttccatgaaggaggtcatttctttggggataagtgtaaatgccactctcatattctgcctccctaaatatgaagcagtgattgatgcttacttggatggccttgagtcttgtggcatgactgatctctctaaggtttcaagtgcagcagcattctacatcagtagagtggatgttacacttgacaagaaacttgagcaaattggtactactgaggctcttgatctcaaaggaaagggtgcggttgctcaagcagtcttagcataccaactttaccagaaaaaattttctggtccaagatgggaacgcttggagaatagaagtgccaagaagcagaggttgatgtgggcttcaacaaatgtgaaaaatccatcttaccctgacaca

SEQ ID NO: 6141 - DNA, 561 bp, Glycine max
gatacacaatacttcctttcacagtgtcttccatcctcttccaactttcacactttcacttgctctctctttgctcttatcccttttcttttttcttcttttcctttgggttttctattctcagtttgcggtgtttgatagaaataatggatcggaacgggccaaagatcaaaagtacaattcttcaccatctctatgagaagcagagacagagcccttactatgacaatctctgtcgccctgtttcagatttgcttccatttattgccaatgggatcagaggtgtcactaccaacccagcgatttttgaaagagctatttcatcctcaaatgcctacgatgatcagttgagggaattggtaggggcagggaaggacatagaaagtgcttattgggaattggttgtgaaggacatacaggatacttgcaaacttctggagccaatttacaatgaaacagatggggaagatggacatgtatctcttgcagtttccccaaagctagcaaatgacaccaaggggacaattgaggcagcaaaatggcttcataatatggttggaa

SEQ ID NO: 6142 - DNA, 395 bp, Glycine max
tacgtaaactcaaatctccgatcgaggtttcttcccaagtccaaatccattccattcattttgctgtctctctgttttcaacaaacgtccacaacaacacatttcgccgtttcaaattactacttgacaccgtctgaagtcctaattcactaggacgttagaccagagatagaagaagggagagtggaaaatttcggaggcaagagggacggcgcggacgctttctagcgatagttttaagtgtcgcttcgcaaatcgccacaaaaaaacacgcgtgacgggagaggtgctcatatttagtgtccatcgtgtcttgaaaaggattgcttccaaaggaagagagtcttgcggtgtatcggcgctattgacttcatagggtgatgtgcaaatggcac

SEQ ID NO: 6143 - DNA, 1627 bp, Glycine max
tgaaaaaaaaaaggtggaattaatttggttcacatgcaaatgcaaatgcaaatgcaatgtatgtgtatttataatttttcccggccctggtccggttcaccttatacggcgtcgttttggggtgtgcgactattgtcccttctcttcgtttcgtcggttactaaaatacactaattgcctctctctttccctttcttcttcttctccgtcttcttcacactgagttgactgagtcttcgtaactcgctctctactgtctcagctactcatcgcattctctgcatttatcctccgatcacattttctctctcttcgttcgggatgtcggagaaagctcttagggatctcaatacaattcttggaactgaaaggaagaatgaggactccagtaaggcatgtttatccaagccttctgttgacaatgctgttgaaaatattgaagaatggcaaaagaaaaagaatagttcctccttggtttctccagctgttaatggaaatcaggctgtgactgctaattccagtgcagaggttgtaaatgcagaagtagaatatattgaatctgagaacttgaatgatgtagacgatgctgatacttgtctcaagactctcttggctggacttgactcaaaggattgggtcctggtttgtgacacactgaataacgtacgtcgattgtctatatttcataaggaagcaatgcttgatgtgctgggggatgtgatcacatctattgcaaagtccctgaaaagtcctagaagtgctgcttgcaaaactgccattatgacatctgcagacattttcagtgcatataatgaccccggactagattcattggaccctctcctagtacaacttcttctcaaggcttcacaagacaaacgctttgtatgtgaggcagctgaaaaagccttgatagcaatgactacttggatttcccctatttctttattgccaaaattgcaaccatgccttaagaataagaatcctcgtatccgtgcaaaggcatcaatgtgcttttctcgaagtgtttcacgactgggggaagaaggcataaagacatatgggattgacaaattgatccaagtagctgcatctcagttgagtgaccagctccctgagtccagggaagcggcccgaactctacttctcgagcttcaaaatgtgtatgagaaatctcatgatctcatcaagccagctactcctactgtcaataatgagcatactgtgaatgaggagaatccagaggtgagttcttgggaaagcttctgtcagtcaaaactttctcctcttagtgctcaagctgtacttcgtgtaaccaccagtatcgctcgggagggtcttgtttcatgacacgcacattaaacctcactttgcggctttcatcatttccttgtttgcttatcattttcttctgtaaatacagtgcgacaattgagatgattgagttgagttgtcgtcgaagcacgtattgagcccaagatttataatgtgtattctattattttccccctagctgttgttacctatattacttttgattaatactactactactactagataatggaccgggaaaaattatgagtataatctttggtcttgtaactgtttttggatgattatggtt

SEQ ID NO: 6144 - DNA, 452 bp, Glycine max
cttgagcttcaaaatgtgtatgagaaatcttctcatgatctcatgccagctactcctgtcaataatgatcataataatgtcaatgagcatcctgtgaatggtgattctgtgaatgaggattcagaggtgagatcttgggaaagcttctgtcagtcaaagctttctccactaagtgctcaagctgtacttcgtgtgaccagtatcgctcgggagggtcttgtttcataacacgcacatttttacttcacttagcggacttcatcgtttcctggtttgcttatcattttcttctgtaaatacagttcgacaattgagcccaagatttataatgtgtattctattattttccccctatttgtggttacctacattacttttgattaatactactactagataaatggcccctgcatcgcactggaaaaattatgagtataatctttggtcttgaa

SEQ ID NO: 6145 - DNA, 467 bp, Glycine max
tcgttttggggtgtgcgactattgtcccttctcttcgtttcgtcggttactaaaatacaccaattgcctctctctttccctttcttcttcttctccgtcttcttcacactgagttgactgagtcttcgtaactcgctctctactctctctgctactcatcgcattctctgcatttctcctccgatcacattttctctctcttcatttgactatagctgacaaggatgtcggagaaagctcttagggatctcaatacaattcttggtactgaaaggaagaatgaggactccagtaaggcatgtttatccaagccttctgttgataatgctgatgaaaatattgaagaatggcaaaagaaaaagaacagttcctccttggtttctccagctgttaatggaaatcaggctgtgactgctaattccagtgcagaggttgtaaatgcagaagtagaatatattgaatctgag

SEQ ID NO: 6146 - DNA, 434 bp, Glycine max
ctggaagggatgcatttattagataaaaggtcatcacaggctctgcctgttgctttgatgattcatgactttcgtttctgatgcaatgaaactgttggctacaagtggagatgggacactgtctgtttgcaatcttcgaagaaataaagtgcaagctcagtctgaattttctgaagatgagctattgtctgtggttttaatgaagaatggtaggaaagttgtatgcggatcacaaactggaatcattctattgtattcatggggatgcttcaaggattgtagcgatcgatttactgatctctcttcgaactctattgatgctatgttgaagcttgatgaagacaggattattaccggatcagagaataggattatcaacctggttgggatattacctaacagagtcatccagccaatagctgaacactcagagt

SEQ ID NO: 6147 - DNA, 467 bp, Glycine max
  unsure (1)..(467): unsure at all n locations
ctcgagccgcaaagattgagccatgcatgtgtaagtatgaactaattcagactgtgaaactccgaatggctccataaatcagttgtagtttgtttgatggtatctagtagtcggataaccgtagtaattctcgagctagtacgtgcaacaaaccccgacttctggaagggatgcatttattagataaaaggtcaacacaggctctgcctgttgctttgatgattcatgataactcgtcggatcgcacggcctttgtgccggcgacgcatcaatcaaatttctgccctaacaactttccatggtaagataatggcctaacaatgtggtgaccggttaccgagaattaaggttccaatccgggaaaggaacctgaaaaaccgctaacaaattcaaaggaaggaacaagcgcccaaaattaccaatcctgacacggggaagtanntgacataaataacaataccgggctc

SEQ ID NO: 6148 - DNA, 524 bp, Glycine max
  unsure (1)..(524): unsure at all n locations
tacggcaagacgacagaaggggaggactgtagaggaaatgaagcatgcggtgccagctaagctggatgtcggttcctcgtcaataatcgtctttccctgcctcatgccatcatccagtggttagggtcggagagcttgccctcacttttctcttccatcttcactctcagtctcactcactcaccattcaccattgccctttgcgtcgctctaagcaacacgtccttttcgatccacatattccagtgtgtatataagtcatcatgctgttgtgacagttaaagatagtgtggtgtggagaaggagccttgtgattagttgtttgagaccaccaaggacgtaaacaagaggatgtcaaacagtaggaacactcattggtgttatagttgcaggaggccagttcggctggggcggcgagatgtggtttgtcctagctgtaatttgggatttgttcatgaacttaatgatattgtccatgttaatccttttgacctctttggaatggacaacantgaagaacgaga

SEQ ID NO: 6149 - DNA, 452 bp, Glycine max
ttctttcttccttcttcactcttagtctcactcactcaccattcaccattgtcctttgcatcgctctaagcaacacgtccttttcttcacatattccagtgtgctgttctgagattcggagagatgggtttggaagtagcttccagaaactgtatataggtcatcgtgctgttgtgacagttaaaggtagcgtggtgtggggaaggagcctagtgattagttgtttgagaccactaaggaagtgaacaagaggatgtcaaacagtacgaacactcattggtgttatagttgcaggaggccagtttggctgcgacggcgagatgcggtttgtcctagctgtaacgagggatttggtcatgaacttaatgatatggtgcatgtgaatccatttgacttatttgacatggacatcagttaagaactagatcaaaggctcgtactcatggaaacat

SEQ ID NO: 6150 - DNA, 778 bp, Glycine max
  unsure (1)..(778): unsure at all n locations
ggaatnncccgggtgcgacgccacgcatgccacaatggttgtccctcttaggcactttcttgttttctctctcaccctcatatccatcatcttccacacccatggagcgttctctgagcaatcaataatcaagttacccacagaccaaccaagggtagagaaactgacccacttgcattttttctaccacgacatcttagagggcaagaacatcacggtggtgaaaatcatcgagccatcagcgagcgaggttcgtgaagcaactgggtttggaaccactttcatgatggacaatgttttgaccgagggtccagagctgagctcgaagcacgttgggagggctcaggggctgtttggcttggcctctttggaggaccgtggaatggtgatgctcattaacttggctttcagtgagggtgagtatgctggcagcactctcagcatgcttgggaggaaccctgttcaggacactgttagggaaatgcccattgttggaggcacgggcgtgttcaggtttgccaagggctatgccattgccaagagtctttgggaaatttctgacaatgagcattttgtggtggagtatcatgtcactgtttctcatccttagatcttatatgtcttttgttaagagtaataaattttaggcttaaatatcttcaagatggtatgataaatgaataaattttattgagttttaagtacatttgttgttgttttgaatgtttgatatattcaaaattttctcgagttcttataattaattaactgttaacaa

SEQ ID NO: 6151 - DNA, 408 bp, Glycine max
  unsure (1)..(408): unsure at all n locations
gttgctatttgctatttgctctgctaatttgtatttctttttggtgaattgctgctaactttcattcttgtgttctttgtggtttttagtttcaggatgctggaagttcatgctcacactgagtcctgcagggctgctcgattcatcaacggtggacgtgcgatcttgacaggttctccggattgcttaatactggctacagatgtggaaactggatctacaattgctcgtcttgatgatgctcatgagtgatcaaatttcctgcaattacacctttgtcatgatttgggttacagtagattcacaagtatcttcattgctttagaatttgtttgtggtttttgttgtgatgcanggctgcgataaatagattgataaacttgactgagtcaactgttgccttcggag

SEQ ID NO: 6152 - DNA, 262 bp, Glycine max
gagataagtttggggaaacttgcatttgacattgattttcatccctcagataatcttgttgccgccggtctaattaccggccaccttcacctataccgttatagccctcatactgtccctgtgaggctgttggaagttcatgctcacactgagtcttgcagggctgctcgattcatcaacggtggacgtgcactcttaacgggttctccggattgctcaatactggctatagatgtggaaactggttctacaattgcccggg

SEQ ID NO: 6153 - DNA, 618 bp, Glycine max
gttcggttcaacgccgtgtattcgtccccgctggatcgggcgcggtccacggcggtgtcggtgtgcaaggaagtcaatttttcagaggaacaaattcaatccacagatgctcttgcgagattagtcaagggaattgggaaggctgccttcgatcagaaatatatactcccgaaattcagggcttaattgacaggttccagccagattttactgcaccttctggtgaatcacttagacaagtagaattccggatgattcacttcttaaatggaactgtccttgcattacatgaaaaactattagatttatcatcacatcaaaatgacaaccaggcatttgcacagaacaactcccatgctcttctcactaactcacctcacgaccaagatggaccttctctccctccaaaccaatgggatttgctcaacaggcaccggcctccattctcaaggaaaaagtctggtaagagcaggctacaatttgtgacaactactggtgatgaaattgaagacgaaatttcttctggcaacgtaaaccaccaaagttctctgcataattctggtttcaacagcttttcaccaactgtgtcttgtataggactatttactcattctgtgc

SEQ ID NO: 6154 - DNA, 413 bp, Glycine max
  unsure (1)..(413): unsure at all n locations
aagctgactagtaaaaaacttgagggtctaatcagtaaatttggtggttttgaccttgtcatttatcagaatccatgctcttactcaagttccaggcttcaagccggtgtaggtctctccgctcttgatttttcagtgttttgtgaatgtgttcgagtcttgcaacgagtaagaggtatgtatcaaaggaagtgagtgaagtgactcgtatcttttgttgtacaaaataatgtcattcgatgcctttatggtgacatttcccgttcttacttgaacatttcgttttcctgctgtatatgtgacttctatatataaatttttctgtgcagggaatttgtatgtaaagttgtcnttctttcttaatcgtcaataagaattgttcatatatgcaagtttatgcattggtagacatt

SEQ ID NO: 6155 - DNA, 356 bp, Glycine max
cgcgtattaccagatggttcgctgatggagattaccaaagtttatccattggatgctgtttttgacaatcccgatgatgtgcctgaagatataaaagcaaacaagcgctatgccggttcatctaaatggacggttcaggaagttgctgaatctgttaaggaagactttggcagcatagatatccttgtgcactcacttgccaatggaccagaggtgaccaaaccattgttggagacatctcggaatgggtatcttgctgcaatatctgcatctagttactcctatgtttctttactcaagcattttcttccaatcttgaacccaggtggatcttcaatctctctgacatacattgc

SEQ ID NO: 6156 - DNA, 483 bp, Glycine max
gccgtcgcctctgagaaatacctctacgaaacgaaaccgactctcagctacgacaccgttacggaaggtaacggctctgtcggctacgtttacgacgagaacacgccggtgaaagcgacggttaacaacgacgacgaagccgttggcgttgtctctccaagcctgcagaggaaagactcctcggacttcgcgttcgcaaatgaaaacttgaaaccgccggtttccgccagattcagccaccggaaatccgttagagccagtcccgaaggagggaaggtggtggcgttgggagtggcgaaggcgaagaagcacgagacgttggagagcacgtggaggacgataacggaggggagagcgatgccgttaacgcggcatctgaagaaggcggagacgtgggagagggagacgccgttacgggacttgaacggagggggcaaattgatgaagaagtcggagacgttcgcggggagggagaagaacgcg

SEQ ID NO: 6157 - DNA, 800 bp, Glycine max
ctgatgcaatactgctttctggggaaactgctcacggaaagttcccgctaaaagccgtgaaaggaatgcataccgtagcattactgacagaagccaccatacccggtggtcacatgccaccaaatattggtcaagtattcaacgagccacatgagtgagatatgtgcttaccatgcaaccatgatgtctaataccctcggaacctcaactgttgtcttcaccagatcacgcttcatggctatccttttgagccactatcgaccttcaggcaccatatttgcttttacagatcaccagaggatacaccagaggttggctttgtatcaaggagtctgtcctatttacatggaattctctgaagatgctgaagagactttcacaagggccttggatttgctgcagaagcaaggaatggtgaaatcaggagaagaagtagcactagtacaaagtggcaggcaacccatatggaggttccaatccactcacaatatccaggtccgaacagtgaaaacaaaataaaaaaaggtgaagatggccatgaaccaagtttcagcctttcaggacaatatatttaattttagaagagcatgttcccttttggtgggttgatgccaatttgctaagtccggcattttagttgtttgtttgttgcctaggtttttcattttttcttcatctattactttcttgttatcattatttttgggtgattgttctatattaatcacggacattagacatatgatagtaggtgccattgaaattttgattagaaattggaatgaaaaatgctttcagcc

SEQ ID NO: 6158 - DNA, 397 bp, Glycine max
ggagggagacggtagcagataagcctaaacacgaaactcgcaaattccctcaacactggagtcgctggaaaattcattctgggactcaggttacgtttctcccttcctcaatattccatttgtctcattctaagaaggcactgcatagtctcagtcattatctcacaatgcgattcggatccttaaatcgttgcttggtttgaaccaaacgataagcagtgatatgattatgatgttgtgtattgttaattatttatttgttatctgtttccgtcatatctttcaactgttaaccgctaatttaaattcccagggctgttcttcttgttctcattgggactgctatatactgtgttggtcaatcagctgaactgaccaagcatgattcaaaaagggt

SEQ ID NO: 6159 - DNA, 481 bp, Glycine max
cacatatgcacagaggagagggagacggtagcagataagcctaaacacgaaactcgcaaattccctcaacactggagtcgctggaaaattcattctgggactcagctgagctgaccaagcatgattcaaaatggttgcattgtatcccaagggtgtgcccctctgaattctaggtcacgcaaccatggcatacctagtacctctgcctttcgttgcgcttctctaatgcctcccaaggttgccgtctctaacatccggagcttttggggacataatctggaatgtaaacccttgttgccaagaggaatgacattgacaaacacgtttgctgtatcaagcctgcgtgtaagggagggtcaaaatcatctctttcgtgctctccctcttttaccccggttgcgcaagtctaatatggcccctcgagcatcaaaggatgtcccaactagctttcgttatcctccaatgaccaagaaaccgcaat

SEQ ID NO: 6160 - DNA, 272 bp, Glycine max
cacgaaactcgcaaattccctcaacactggagtcgcgggaaaattcattctgggactcagctgagctgaccaagcatgattcaaaatggttgcattgtatcccaagggtgtgcccctctgaattctaggtcacgcaaccatggcatacctagtacctctgcctttcgttgcgcttctctaatgcctcccaaggttgccgtctctaacatccggagcttttggggacataatctggaatgtaaacccttgttgccaagaggaatgacattgac

SEQ ID NO: 6161 - DNA, 360 bp, Glycine max
ggaagcttcaaagagggtttatgaagaaaggttgtttcccgaacactagagtctagagaagtttgcagagtgagcaactgagcatatactgcatacgtaatggagttcccttcttcttcttcttcttcatcctccatcttctccccgcgcccatcagacgacaccgttttctacgccatataccctgactcacccaccgcaaccaccaccgtgacgctccactccctccacctcaaaatcctcgaaaccctatctcccttcacccaagactacatatggcagcaccagcccttcgccctctccgtttcaactcctccgaacccttcctgcccctgcccctcctcctccttccaacctcct

SEQ ID NO: 6162 - DNA, 522 bp, Glycine max
ctcaaataccacagccctgaccatctgccggcattaactccctctggtgaaaccaccaagatggcgtaaatgttaacagcaggtgagtacagcaaccacagctggccgctgcagccagaaacaagcctgaccgagctgaacttgcccagagtgctctgcattctctcttccatgttagagaagctggtggctcgcaatgaaaagctcgttgatatcctgagccagcagctagatggactgaactgtggctcagtaagacttgggaacagcttgaatacatttcatggcgtaagagcaccaagcataagcatacctaagtacttggagaggatatacaagtacactaattgtagcccctcgtgttttgtggttggctatgtgtatatagacaggttaacacataggcaccctgattctcttgtcacttccttgaatgtgcacagattgctagttaccagtgtcatggtggcttccaagatgcttgatgatgaacattacaacaacgccgtatatgctcgagta

SEQ ID NO: 6163 - DNA, 1058 bp, Glycine max
cggctgccagacgactgaaggggacttcatcatctcttaataaagattagaaatcgacatatggggggagcaaagagttactcttgttttgcagtaatagctgtggccttggttttgctacttctgaatgtggctgtggtttgcaatggaggcaagacaagcacattcattaggaaggttgagaaaactgaggacatgccccttcatagtgatgtatttgttgccccttctggctataatgctcctcagcaggttcatataacacaaggtgaccaagtgggaagggccatgatcgtgtcatgggtgactgtggacgaaccaggaaagagtctagtgcattactggagtgacgccagccagcacaagagagtggccaagggaaatcatgtcacatatagatacttcaattattcttctggttttatacatcactgcacccttagagatttagagtttaacacaaaatattattatgaagttggaattgggcatactactaggcaattttggtttgtgactcctcctgaagttcaccctgatgcgccttatacatttggtctcattggtgatctgggtcaaacttttgattcaaacaagacccttgttcactatgaatcaaaccctcacaaaggacaagctgtgttgtatgttggagacctctcttatgcagataatcacccaaatcatgataacgttaggtgggatacgtggggaagattcgtagaaagaagtactgcttatcaaccttggatatggactacagggaaccatgaacttgactatgctcctgaaattgatgaaacagaacctttcaagcctttccgccaccgttactatgtgccttacaaagcatccggaagtactgaacccttttggtattctgtcaagatagcttcggcacacatcatagttttggcttcatattcagcttatggcaaatatactccccaatatgaatggcttgaggcagagctaccaaaggttgatagaaccaagaccccttggttgattgttcttgtgcattctccatggtataatagttacaactatcattacat

SEQ ID NO: 6164 - DNA, 2387 bp, Glycine max
cacacctccccttcccctcccaattcccatgacaggtgtctgtttgccttgttcctgatttaagccataatagccacacagagagagagagagagagaaagaaggcatgagaaaatgaatgatctccatcatcattcccttccccatgtgatgtgccacccctctctctagggttttcaattccaatttcaatccaacccaacacaaagctcccacctttcccattcattcgcacaattcccttcgcccttttccttttcggccaaaagggtctccggcgcttcgcctctctttgaccgttccgggctcgcctccccaggcctcttgagagagagagagagagaaaactgcttttctagtgagagaaagtcaccatgggaatgtagagtggagcttcttcccttgttgtttttgttgttggtggtgaccgagcaatgttggaaacggacaaggattttgattccaagctgaagattcaggggaattcctcatcttccaatggtggtgggaatgtacagagatccaaaagctttgcttttagggctccccaggagaattacaccatccaggactttgaattgggcaagatctacggtgttggctcttattctaaggttgggccgccgaagcggaaggacactggaactgtgtatgcattgaaaatcggggacaagggatttattaccaaagagaataaaacagcttatgtgaagttggaacgcattgtgctagatcaattggatcgtccaggcattgtgcggttatatttcacatttcaagactcattttctctatacatggctcttgaatcctgtgaaggtggagaaccttttgatcaaataaccaggaaaggtcgtctatcagaggatgaggcacgattctatgcagctgaagttgttgatgctctcgaatacatacataatttgggagtcatacatcgtgatattaagccagagaacttattacttacagctgaaggacatattaaaatagccgattttgggagtgtgaagcctatgcaggatagccaaataactgtccttccaaatgcagcatcagatgacaaagcctgcacttttgtgggaacagctgcttatgttcctccagaggttcttaattcctctccagcaacttttggaaatgacctttgggcacttggctgcacattataccaaatgctttctggaacttccccttttaaagacgcaagtgaatggcttatttttcaaagaattatagcaagagaacttagatttccagattacttttctgacgaagcaagagaccttattgaccgcctgttggatttggaccccagcaggagaccaggtgctggacctgatggttatgctattttaaaaagtcacccatttttcaagggggttgactgggataacttgagggcacaaattcctccaaaacttgctccagaacctgggactcagtcgcctgcgtctgatgatgttcatgactcatcgtggagtccttctcacattggggatggttctgcagcttcggttagacaacctgacggtgctacatcttctgaggggactggtcacataactaggctagcttcaattgattccttcgattcaaaatggcagcaatttttggaacctggggaatctgttcttatgatctctatggtgaagaaattacaaaaactaacaagcaagaaggtgcaactcatccttaccaacaaaccaaagctgatctatgtagacccatcaaagctaattgtgaagggaaatataatatggtctgataatccaaatgatttaagcatccaagtggctagtccatcaaatttcaagatttgcacacctaaaaaggtaatgtcgtttgaggacgcaaagcaaagagcatggcagtggaaaaaggctattgaaggacttcaaaaccggtgaatttattctggttttgtgaacatattcttttagatatcctctttattgttcagcaagagggataaaacagttgactgcccaacaatcaattattcattaaaagaaaacaaattcgcagattttgctgaagctggttctagctaattcctcaacacagcttaattttgtgatgagttcttccatcctctttcatgcttcgaagggatgataaaatgtggaagttctaattgtagctatgtctgaggatggacccaatactttgtaagaaaaaaaatttggttttttagttatatattaaatattatgagttggaagatgatatcattttggttgtcataatgtatgaatcgttgaattgttcaatttattgtttcttcagcccgtggttaaacagtgaaaccatcttgaaatttcaaatggataatttggcccttggctatctgtaaataacataggtgtaatctggcaattctatgt

SEQ ID NO: 6165 - DNA, 834 bp, Glycine max
ttcttttttaccgaaatcgaaattcattcccacatttcactttgatctgatctcatttccattcattcattcattcgttcttcttctttcaccaacaacaaagaaaacagagagaaactttcatttcatagattttcatcatctcagcaaaggaatcaatcaatcaagccatggcaggcttcagtggcgacgaaaccgctcctttcttcggcttcctcggtgccgctgcggccctcgtcttctcctgtatgggagcggcgtatggaacggcgaagagtggggtgggggtggcgtcgatgggagtgatgaggccggagctggtgatgaagtcgatcgtgccggtggttatggcgggagtgttggggatttacgggttgattattgcggttattatcagcactgggataaacccaaaggctaagtcttactatctctttgatggatatgctcatttgtcctctggccttgcctgtggcctagctggcctctctgctggaatggccattgggattgttggtgatgctggtgtcagggctaatgcccagcagccgaagctgtttgttggtatgattcttatcttgattttcgctgaagctcttgctctgtatggcctcatagtgggtatcatcctctcatctcgggcaggccaatctcgtgatgattaaaaggagtcaacttggtggtacttcgtagttccgtaaattttatatcaggcttgtatttgaaatgggagatacttgtcttttatatattactattatttcatttgttttcgtacacaaaccctgtatccaaactgcatcagttttatgaagcattttcctttggattatt

SEQ ID NO: 6166 - DNA, 416 bp, Glycine max
cttcaccgaggccaccgtcacacggccgtggaaattcaagcaccaacagtggaccaaagccaaccaggagggaaaggagatgaggaaacagttctcctccagtttggtaaagtaggggatgatacttttaccatggattatagacagcccctatctgctttccaggcttttgccatttgcttaactagctttggcactaaacttgcttgtgagtaatataattttggtgtcactgcttatttattccgtggatggatgttttaagtgaatagttgttttcttttttactcggctttaagtctacaatttgattgccggaagcttgttgtaaatgttatatcatcaataggacatgacatcttccataaatcaaatatattgccttattcaaaaaaaaaataaaaataacatatttg

SEQ ID NO: 6167 - DNA, 688 bp, Glycine max
  unsure (1)..(688): unsure at all n locations
ttgggactcaatnaaattgaatttgagaaggaagggacaaaagagaggtggctaccatatttacattttctcttctttacttctttcaccccctacaactccatgttctataagagaactccttgttcttccttgagatattgcatttaatgctcatttatttccttgttactacaaatattcgtgctaccctccctacattttcctcaccccacaacatagtttttgcgcaaaaacatttcagacttcatagcatgtcatcaactgcataccttcttcttttgtatctgggcatttcattgcatgcatgttatgcccggcatcttagccctctgaataagatgctggaagagaaatcctacttctctatcaagagtgatgagaaaaatggacttgattcctctccaaagcagctcaatgaagctggtcacaacaagacggagactcgattgcttggtgattctgtgaagccaagaaaccaaagaagcactagaccatcatagggtagtgcacaaagctactgatgcaaatgcttcaggtggtggtgctctacaaaagtctcttgtttcagtttcatggcgtgtgcctcacaataacaagaaacctcgtcagaaacaccctgggtttgacttggactattcgccaacaaagacacaccctcctcatcacaactaagcaacaacaatga

SEQ ID NO: 6168 - DNA, 626 bp, Glycine max
gatcttcttccttaccatttccttgtggggagttaaggtatcaagtgaagagcaccaccaccatggcaaatctaaagagggaaaggaggagacaggaagaagaagctaaaaaatgggcagaagagaaggctgaaagggagcaagaacaagctacgagagaagcagaagaagcacagagggaacaagaacaagctaaaagagaagcagcacagagggaacaagaacgggcaaaaagagagcaagaaaggaggcggcgagaagaagtagctggaaagggagaagaggaggaagaacacgcaggaagagggcacgaaaggagaaaagaagaagaagaaacagcacggagggaacaagaacaagaacaggctgaaagacagcaacaaaagagagaaaagaggagacaaaaggaggaacaaggagaaggagaagaagaagaagaagaagatgaagaggaaccaacatggtgggagagaagagaaagaagaaaacagaaggggaaaagtccagaagaaggagtagaatgggagcaagaacaagctacgagagaagcagaagaagcacagagggaacaagaacaagctaaaagagaagcagcacagagggaacaagaacggggcaaaagagag

SEQ ID NO: 6169 - DNA, 874 bp, Glycine max
tgtctctctctctcctgtatttgtcttgattccgatgcgaatggtaattgcagaaaccccaaccctcctttcctctccctcctcctagatcgagtcagaatcatggccaaagctgaaggtggcaaggaaccaataaatgaacaagcagtagcaaatatgtatgctgcaatgaggtctgagctcaaccaaatttactccaaaataactgaactggagatggaagttagtgagcacacattggttaccaatgccattcaaccacttgaccaatctagacgatgctatcgtatgattggaggggtgcttgtggagagaaccatcaaagaggtcttgcctgctgtgcagcgaaataaagaaggactcgaagaggttgtggcaaggcttaacgaggcgttggaaaagaagaaaaaggaaatttctgagtttgaggctaattataaaatcaggataaggaaggctgatgctgaggtgaaggatgaatctggtaggaaggaagggtctgctcagggggttcttgtgggtcctgcaggtggaagtgaatcatttgtctatttttattttgtttcctcaaactagtggccagaacttgtcttacaattgggtgcaggcagtttgatgatttgttttatatgtagactaagtgcgtgtctgaattagattcatgttccgtccatatagaagcaagtaaatgtaacttctgcatcattttgacgtggttttgctgcttgaacgtggatccaagacgtgtttccaaccacgctcattagcaagtatacctcgcttgatatgaccttaagtttaattgctttgggctgaaaaaacttatcttcattggtttgtgtttatgtagatttttgtatgcaagaatagagct

SEQ ID NO: 6170 - DNA, 560 bp, Glycine max
gttcaaaataaatagttatcaaagttagttttttttttcttttccctaaagagttaggctctattggaccgtacgattaagatcgttcggtgaaattgatcacgctggtgccgcataccctagcgttcctgttattctattgtggctgaaacaaaacagtgttgaacggcgaggtagaacgacgacccccttctgcgttttgaccttcaatctcaatcatggccaaagctgaaggtggcaaggaaccaataaatgaacaagcagtagcaaatatgtatgctgcaatgaggtctgagctcaaccaaatttactccaaaataactgaactggagatggaagttagtgagcacacattggttaccaatgccattcaaccacttgaccaatctagacgatgctatcgtatgattggaggggtgcttgtggagagaaccatcaaagaggtcttgcctgctgtgcagcgaaataaagaaggactcgaagaggttgtggcaaggcttaacgaggcgttggaaaagaagaaaaaggaaatttctgagtttgaggctaaatataaaatc

SEQ ID NO: 6171 - DNA, 325 bp, Glycine max
cgggatacaagagccatccctttccactgttgatttgctccgtcttcacccagtgttcgaagagaagtctgtgacccagctagcgtcccatttgctctgtcgtacgtgtttggtggccatcgtcatcactgagctctgtcgaaggtgtgtgtcgctatctccattcgtctactcaggccctgttcaaggtgtgtcgcgccgctgtcgtgtcgtacgaactgcttggttgcggcttcagtatcggcttaccaaacccttactcatctgggatttaaagaatcatggccaaagctgaaggtggcaaggaaccagtacatgaacaagc

SEQ ID NO: 6172 - DNA, 357 bp, Glycine max
caagcctacaggcactgagacttgatgggaatcctctcagaagcattcgaagaactgtgttggataaaggaactaaagctgttctgcaatatttgaaggacaaattgccagagcaatagtgtttttagttttttccctcctttgaaagtgttgtgcttgacatgaacagcaatatttaaagtgtccaatttttttttcaggtgtcacattctgtgtttgctctttattttgttcaattattttcccgtggtacctctgcttttgtgtgctatttcatgtaacaattttgacggtttgaatatttaacattaccaactaatttgcatggcttaaaaaaaaaaaaaaaaaggccggccc

SEQ ID NO: 6173 - DNA, 745 bp, Glycine max
gtcaattagtgtgacttgaaaatttggttgagtgtgagcatttcacgttgcaatcagatttctctaaatagaattatctgaataaatttctcattctcccctcccccctctttggatagcttggttatatgcttcaagagaatgagtgctggcaacacactctttaacaaattgtttctaacaaactttccattattgcttaaaacttattgtaaactacaaaatcctgagtgaagtccattaaataaggagtgagacctgcacaattttgtaatttccaacaaatgtcagctaacagtagagtgtgttagacagaatctgttagagagtgtgttgttggcatttctccttctaagaatacaagtggtggttttctacaatatataccttttgtaaatatcgtctgttgttaacttgttaaactgttttgcattttgcacatgacttgtgctggatgtgtgttgtgaatataataaatctaatcacctagccgagaaaattatgggaaaactctttttctgggggaattcattagaaaatcccatatggcattcagtatgcttaaatttttttaatgatctcattgatctatacttctttagtataaaaccaggaatgattttggtgaactgctttcttggtccttatatgccagtgggtctgtaccatgcaacttgacaaggagagttattatagtttatctcaagtctctcttcctagttttagtgataacttatgtctctct

SEQ ID NO: 6174 - DNA, 391 bp, Glycine max
cggggctcctggggagtctccccttttgaatggtactagtactagctgtctgtcttgttcgctgcgcatggaagccatgaaaggagcaagagttggcgtgggcgaggaccacgacatgggtgacggaatgcaatgcagtgaccacccttacagaaacaaccctggcggtatctgcgccttctgccttcaagacaaactcggcaagcttgtttcctcttctttccctctccctctccttcctccttcttccccttcttcctcctccactctcccttccatctcctcccttcctccctcctcagcccccgctccttcctcctccaccgccgtttctcacttcaatcatccatactaccctcgtagaacgcgcctcccttttctcttgcccaag

SEQ ID NO: 6175 - DNA, 608 bp, Glycine max
gtcttctcccatggccgccaccgatgaatccctccgcaaatccctcgccgagaagcacgccgcagtggaagcccaaggcaacgccgtccgcgccctcaaggccgccaaagccgccaaacccgaaatcgacgccgcaatcgaagccctaaacgcgctgaagctcgaaaaaagctccatcgaggatggtggttgaagcacttgaggcaatggctgagaaagaagctttggatatgaaggctgctctggagtcaaaaggggaggtggagtttcaagtgtgtacacttgggaaaaatgtgactattaagaagagtatgctgaccattcaaaaggagataaagaaagagcaccagcgagtttttacaccatctgtgattgaaccatcatttggaattggacgtataatctattgcctctttgagcacacattctacacgaggccaagcaaagctggggatgaacagttaaatgtatttcgtttcccttcacttgtagcccctattaagtgtacagttttcccactggttcagaatcagaagtatgaggaggttgccaaactcatttccaagtcattgactgctgttggaatttcacacaagattgacactcac

SEQ ID NO: 6176 - DNA, 1121 bp, Glycine max
ggaagcatttagtgagagtgagagcgatagcaaaaacagcaatatcttcttccttccctaagcctaaaaataaaatatcttgtcattcaattccactcacattcgccatatcgtcttctcccatggccgccaccgatgaatccctccgcaaatccctcgccgagaagcacgccgcagtggaagcccaaggcaacgccgtccgcgccctcaaggccgccaaagccgccaaacccgaaatcgacgccgcaatcgaagccctaaacgcgctgaagctcgaaaaaagctccatcgagcactccctcctcggcggctccgacagccgcgaggccttccgtcagtccgtggtgaacacccttgaacggcgcctcttctacatcccctccttcaagatctaccgcggcgtcgccggcctcttcgactacggccctcccggctgctccgtcaagtccaacgtgctctcgttctggcgccaacacttcgtcctggaagagaacatgctcgaagtcgattgcccctgcgtcactcccgaaatcgttctcaaggcctctgggcacgtggacaaattcaccgatctcatggtcaaagacgagaagaccggcacgtgctaccgcgccgatcacctgctcaaggacttctgcaacgacaagctccagcgtgaccttgcgttgtcttctgataaggttgcggagcttaagcacgtgcttgccatgctggatgatttctctgctgaagagcttggtgccaagattaaggactatgggattgtttctcctgagactaagaactctctctctgatccctaccctttcaatttgatgtttcagacttccattggtccctccggcttcagccctggctttatgagacccgagactgcccagggcattttcgtcaattttaaggatttgtattattacaatggcaacaagcttcctttcgctgctgcgcagattggccaagcgtttaggaatgaggtgggttcatgattttcgtggcaatttagactttattttttttatactttctaaattagatatagtctttgcatgaattgggttggatgttgtttgtgtgtttagatatctccacgacaggggcttctgagagtgcgggagttcacg

SEQ ID NO: 6177 - DNA, 526 bp, Glycine max
acaaggaccgattgaggtttaggcaacatctcgccaatgagatggcccactatgctgctgactgttgggatgccgagattgagtgctcctatggttggattgagtgtgttggcattgccgatagatctgcatatgatttgcgtgctcactcggataaaagtggtgttccgttagtggctcatgaaaaatttgcagaacctaaggaagtggagaaattggttataactccagtaaagaaagagctgggtctggcattcaaggggaaccagaggatggtggttgaagcacttgaggcaatggctgagaaagaagctttggatatgaaggctgctctggagtcaaaaggggaggtggagtttcaagtgtgtacacttgggaaaaatgtgactattaagaagagtatgctgaccattcaaaaggagataaagaaagagcaccagcgagtttttacaccatctgtgattagaaccatcatttggaattggacgtataatctattgcctcgttgagcacacattctacacga

SEQ ID NO: 6178 - DNA, 308 bp, Glycine max
cgagactgcccagggcattttcgtcaattttaaggatttgtattattacaatggcaacaagcttcctttcgctgctgcgcacattggccaagcgtttaggaatgagatatctccacgacaggggcttctgagagtgcgggagttcacgttggcggagattgagcactttgttgaccctctagataagtctcatcccaagtaccctgaggtagctgacttggagttcttgatgttcccgagggaggagcaaatgtcgggtcagtctgccaagaggattcctcttcgtgatgctgtttccaagggaattg

SEQ ID NO: 6179 - DNA, 1035 bp, Glycine max
gttggctcagaatctccttttgtaaggagtcctaatccgagtagtaggtattatttcttgaagaagcggacaatttcccatgggagttatacagatgatcatactacaaacatcacccaaggcaataaatttggaaggaaagtagtcaaagctgttacatacagggtcaagtccatgccctcaacttcaaagccttgtgcaaatgagacattagaaaatggggataagctgctcagttctcttccagaacctgatccaattgatgctaatccagttaagaagtctattgttagtctcggaaagtctccttcatacaaggaagtggccttagctcctcctgggacaatctccaagtttcaggtctataatcctcaaagtgagatttctgttagcagtgaacatgatagtggaaaacacgaagaggaagttgaagctaatagaaatgttgatgttgatccaaccctgatagaggtaaatgatacagttaaagagaagaataatgattctttatcagattctgtagatgattcactggatgatactggagtggctattgaggggaaagaagaaactgagttgattgttgctgtgcaagataattgtatgagtgctgaggggcaatcgggagatgttaaggctcaaggagcagttgatagcagcatattgattcatgcagtagatgatcatgtggattcttacaagcaagaacttgatacaagtaattcatctggcagtttagaacctagtgccaatacaaatcccatttctcagggtggtgaggatttaagggtcaatgtatcaccatcaagtcagagtcgtaccgggggcatcccatataagaacttgtctgcatctgcagctccattcaacccatcacctgccattgcacgtgctgcaccaattgccatgaagatgactcttccttctggtcctagtgcagttcctgcaattggcccctggccagtaaacatgaatgttcatcctggacctactactgtgctacccacagttgccccaatgtgctccgctccgcac

SEQ ID NO: 6180 - DNA, 1134 bp, Glycine max
  unsure (1)..(1134): unsure at all n locations
gttttngagagttagagagagagagatggtgtcgtgaaaaaaaataaaaagggaggtgagagagtgaattagacaaaccaaaccaaagcggaatgccgcacccttcaataatccattcttcaaacaatggctgaggaacatcctcgccctaggcttcttcttcttcttccttttctcgatcttcttcaataatcttctttgcagcattgtcgtcgttgttgcggttgcgtgcgatgggcgaggtggggaagatactttacatagtggtggtcgatgactccgagaggaaagagtccttccgctactcgcgtcccgttctgcagagcacgctccagctcatgggttgcaaagcgcgtcacgccttcaagatcagccaaagagtgtttgaactcacaaggaaagagaattctactgatgttttgaagccggaagtagaggccctatcaggttttgatgctttcaagaggaattttgtgaagaaagatggtaggagtgtaccatttgagttgtacaaaaggcgcacatctgcatttgttcggagagaaacttttctagatattgcctgtgatgctctggcagagtacaagtatgtgggtcctaaccagagagcagacttggtattagcctgcaggatccgtgaaaggaaagagtcggtgacagtgttactatgtggcactagtggctgcggcaaatctacattgtctgcattgctgggaagtaggttgggaatcacgacagtggtatcgaccgattctattcggcacatgatgagaagttttgctaatgagaaagaaaaccccttgttgtgggcttctacgtaccatgcaggggagtgtttggaccctgttgctgttgcagaagcaaaggctagaaggaaagcaaaaaagctggctggtgtgtcacattcagtttccaaggaagatgtaactgagggtcacaattctagcaaatctgatgttaggacgttggagatgagctctggtcctactgaactgctaagtccaaaacagatggctattgaaggattcaaggcacagagtgagatggtgattgacagtcttgataggttaatcactgcatgggaagaacgaaaagagtctgttgtcgtggagggagttcatttgagcctcaact

SEQ ID NO: 6181 - DNA, 427 bp, Glycine max
cccacgcgtccggtgaattagagaaaccaaacctgaatgccgcaccgttcaataatccattcttgaaacaatggctgaggaacatcttcgccctactacgctacttctttttctcgatcttcttccataatcaatcatctcatcctccgcagcattgtcatcgttgttccgctttcgcgttgttgcggttggttgcgatgggcgaggtggggaagatactgtacatagtggtggtcgaggactccgaaaagaaagagtcctttcgctactcgcgtcccgttctgcagagcacgctccagctcatgggatgcaaagcgcgtcacgccttcaagatcagccaaagagtttttgaacaaacaagggaagagaattctactgatattttgaagctggaagtagaggctttatcaagttttgatgctttcaa

SEQ ID NO: 6182 - DNA, 851 bp, Glycine max
gcatcctccgaaaaccctaacaacacaggcgcagacgcaaacgcaaacgcaaacgcaaacgcaaacgcagagcgtgatccattgacgaagatggtgcagcgtctcacctaccgcaagcggcacagctatgccaccaagtccaaccaacacagggtcgtcaaaacccctggtgggaagctcgtttatcagactaccaagaagagggccagcggacccaagtgccccgtcactggcaagaggattcaggggattccacacttgaggcctgcagagtacaagagatcaaggttacccagaaaccgtaggactgtcaaccgtgcatatggcggagttttgtctggaagtgctgtcagggagaggattatccgagctttcttagttgaagagcaaaagattgtgaagaaggtcttgaagatccagaaggcaaaggaaaagcaagcctcaaaggcttgaatttgaacaacacaatgagacatctttttggaggacttttaggtttgagtggttatagttaatcacaaattttattagagttgtcatgttaattgtcttttattatttggcttgtttgaactctttctagagcaagtgttaaagttgtcgacaatgccattacgatacagttttgtttgtctcattttcttttgatggtttattggtatcatcttgtttctttatattctaatagaactttgtaattccactggaattgggatataactcaattctgactgctttactggtggtattttgcaaaaaaaaaaacaaaaacaaaaaaaaccggccgcccccgccaagtcagccaccagcacgggaattaaatccgggaccgtaccttggaggctaccaag

SEQ ID NO: 6183 - DNA, 715 bp, Glycine max
tcccgggccgacccacgcgtcagaagacgacagaaggggtcttttttctttttgctgtgggaagaggaaccctagctagggtttggaagaagctgatccgagaagatggtgcagcgtctcacctaccgcaaacgccacagctatgctaccaaatccaaccagcacagagtcgtcaagactcccggtggcaagcttgtttatcagaccacgaagaagagggccagcggacccaagtgccctgtcactggaaagaggattcaagggattccacatttaaggccagcagagtataatagatcaaggttacacagaaaccgaaggactgtgaaccgtgcatatggtggtgtgttgtctggcagtgctgttagagaaagaatcattcgagctttcttggttgaagagcaaaagattgtgaaaaaggtcttgaagatccaaaagacaaaggaaaaacaagctttgaagggctgagttttgagaaagagtgataaagatctttttggagggattttaggtttgggtgattaatgattatagtaaagcatgaaatttgttagagctgtttctgtgttaattttgtgcttatttggctttgttaaactcaattctagtgcaactggtaactttgtcgacaactccattacgatacagttttgtatgtcaccattttctcttgctggattattaattttctctctgcatattagtgctttgctcc

SEQ ID NO: 6184 - DNA, 461 bp, Glycine max
  unsure (1)..(461): unsure at all n locations
cgtagtaactcggaatcggtcgattcgagcgatcggctcagggctcgagctgatccgagaagatggtgcagcgtctcacctaccgcaagcgccacagctatgccaccaaatccaaccagcacagggtcgtcaagacccccggtggcaagctcgtttatcagaccaccaagaagagggccagcgggcccaagtgccccgtcactggcaagaggattcaggggattccacacttgaggcctgcagagtacaagagatcaagggtacccagaaaccgtaggactgtcaacgtctatgtggtggggttgctgggcgngctgtagagaagaatattcacttcttggttgagacaaggatgtaaaaggctggaagatcaaagacaagaaacagcttgagcttagttggaaagagaaaagactttgaggttttagtggggggttaagaaagctaaatttcagctttct

SEQ ID NO: 6185 - DNA, 1076 bp, Glycine max
ctccgttgcaaactctccgctcactccaccgccttttccacacttccatcgtccggcacttcatggccgcggcggagcccactataagcccatctaacacgcgcgtgggctggatcggcacgggcgtcatgggccagtccatgtgcgcccacctcatccgtgccggctacaccctcaccgtcttcaaccgcaccccctccaaggcccagcccctcctcgacctcggggcctacttcgccccctccccccacgccgtcgcagcccgctccgacgtcgtcttctccatcgtcggctacccctcggacgtccgctcagtcctcctccacccctcctccggcgccctctccgccctccgccccggcggcgtcctcgtcgacatgaccacctccgaaccctccctcgccgtcgaaatcgcggacgccgctaccgccaaaggctgccactcaatcgacgcccccgtgtccggcggcgaccgcggcgcgaagaacggaaccctagcaatcttcgccggcggggaagaatcgacggtgaagcgtatggaagccttgttctcccatttggggaaagtgaactacatgggagggagtgggaagggacagttcgcgaaactggcgaatcaggtgacgatagcttcgacgatggtggggttggtggaggggatggtgtacgcgcacaaggcggggctggatgtggggttgtacctggacgccatttccaccggcgcggccggttccaagtcgcttgatttgtacggaaagagaatcttgaatagggatttggaaccggggttcttcgtgaaccacttcgttaaggatttggggatttgcttgaaggagtgtcagaatatggggattgctttgcctggcttggctctcgctcaacagctttatgtgtcgcttagggctcacggtgaaggtaatttgggcactcaggctcttattttggtccttgagcgactcaacaatgttactcttcctccctcctccaatacctgaaatttttaaacatgcattgtattgtatctatagtctactttgcagaatgaatgctatcgcataataactatttggctgttt

SEQ ID NO: 6186 - DNA, 585 bp, Glycine max
ggtttacattgacgtgtattacaaaaatcaaatgctagttttttgggcggggctggatgtggggttgtacctggacgccatttccaccggcgcggccggttccaagtcgcttgatttgtccggaaagagaatcttgaatagggatttggatccggggttcttcgtaaaccactttgttaaggatttggggatttgcttgaaggagtgtcagaatatggggattgctttgcctggcttggctctggcgcaacagctttatgtgtcgcttagggctcatggggaaggtaatttgggtactcaggctcttattttggtcctagagcgactcaacaatgttacacttcctccctccaatacctgaagaaaattttaaacatgctttgtattgtatccatcatcgtctactttactttacttccctgccattgctatgcagtctacagaatcgtatcgcataacaaaaactttcaatcccgaagctgattattgcaatgagcagtgtcttttttatattattggggatgtaatctagacccctaatattatgaatggagaacttgttcagtgaacgaacgcccaattttt

SEQ ID NO: 6187 - DNA, 572 bp, Glycine max
tcccacgcgtccgaatttcttcttcctctcctccttctaccattttcctttcactttccatcactttctctcgtttccccttcgcaatttcccctctcgaaagagacacgcatcgaagaaaatcacatcacggcaatggaggaaaagcacgcagcagccatcgaatccgcacacgccgaatctaacggcgtctctcacggcgccgaccacggctggcagaaggtgacctacgctaagaaacagaagaagaagactgttaacgccgctaacggcggccccgattcccgcgccaattccagcaagctcgttccgaacggcacgctgtccggcaacgatggcgtgttccggtcgctcgaactgcaatcggaggaccggcgccgaaaaattgtggaggcgaagaagctggctgatgccgcgtacgacgacgaagacgcgccgctcagatcgaagcagcggcatcgcgacgacgacgacgaatacgactacgatgacgagaatgtggaccgttccgcggagaacgggaaggccgaggaggcgaagaaggtgaagccgaagaaaccgaagaagcctaa

SEQ ID NO: 6188 - DNA, 1470 bp, Glycine max
aagatgcttattgaatagagtgcacatttgtaatgtactactaattagaacatgaaaaagcattgttctaacacgataatcctgtgaaggcgttaactccaaagatccaatttcactatataaattgtgacgaaagcaaaatgaattcacatagctgagagagaaaggaaaggttaactaagaagcaatacttcaatggccacccttgttgttcataaccaaacttcttctgctcaagatgctgaggctctccaacaggctttcaaaggatggggggctgatgacaaggccattatagcaatactgggtcacagaaatgttcatcagaggcaagaaatcagaaaagcttatgaggagatttaccaagaggatctcatcaaacgccttgagtccgagatctctggtgactttgagagagctatgtaccggtggatgttgcagcctgcggatcgtgatgctgttttggtgaatgtggcaatcaagaatggcaccaaagactaccatgtgattgcagagattgcttgtgtcctatcagctgaagagctcttggcagtgaggcgggcctaccaccgccgctacaagtgttccttggaggaagatgtggcagctaacaccaccggcaatcttcgccagcttttggttggattggtgacctcatataggtatgagggtgatgagatcaatgtaaaattttcacaaactgaagctaatgttcttcatgaatctgtcaaggagaagaaaggcaacagtgaagaagtcatcaggatccttactacaagaagcaaaactcaacttgtggcaactttcaaccgctacagagatgaacatggaatttccatcagtaagaaattgttggatcaaacatctgatgacttccacaaggtgttgcacactgctattcgctgcatcaatgaccataagaagtactatgagaaggttttgcgcaatgcagtcaagaagtttggaactgacgaggatggactaagccgtgtgattgttacaagggctgagaaggatctgaaggacatcaaagagctctactacaagagaaacagtgttcaccttgaggatgaagtgtccaaggaaacttctggggactacaagaagttcctcctcactctcttggggaaataagactaagttaagaacttgctctaagggcatcttagtaatgggtttttgttaattatgtcattggtttctggtttgtgcgatttcattatgttagttttccagtaagagtttgttatatctggttaagtttttgagacaacaagaactcgtgtcttgtttgagggcatgcgtgccatttcttagggttgtgttggtacttggcatgctcttattagaggacctctatgctgcgtgtttcctttggattatgctattacctcacctggtttgcttttaatgaaaggttgataacaaatttatatggacttgaattcttcattttaaattctaatcagg

SEQ ID NO: 6189 - DNA, 710 bp, Glycine max
ggtttggccgatgttcctttcttgtgatccgaggagaacgaagagtcgttcctgagaagctcgtcgctatgggttctctccctgtgcccgcatttccatccaaacactgccttgacgagagcagccacattgacgaagccaccctctcggcgctattcaagtcgcagcagagccacctgaacttcttcttcgaccacatcgaccactcccaaaccctagccttcacgcgcgcgctcctcaatgccgccggcaccgtcttcttcaccggcgtcggaaaatccggcttcgtcgcgcacaagatctcgcagacgctcgtctctctgggcgttcgctccgcgttcctctcgccggtggacgctctccacggcgacattggaatcctcaccaatcgcgatgtgctcatcctcctcagcaagtccggcgccaccgaggagctcctccgccttgtgccgtgtgcgagggccaaaggcgcgctcctcatcgcgctcacctccgttgaaggcaacgcgctcgccgcggcgtgcgacatgtccgtgcatttgccgctccagagagagctctgtccgttcaacctcgcgccggtgacatccaccgctattcaaatggtgttcggcgacaccgtcgccatcgcgctcatggaggcgaggaatctcaccaaggaggagtacgccgcgaaccatcccgccggcaagatcgggaagagcctcatc

SEQ ID NO: 6190 - DNA, 836 bp, Glycine max
ggattatttcagtggcgtgaaacttccagaagaactcaaagtcactcctcttctgcttgcgctctttcgcttcctgcgaatctttccgagaatcgagtcacagagtagagctaaatcagcgtagagatacaaaaatgccaaaagtaaagacaaatcgtgttaaatacccagagggctgggaattgattgagcctacactccgtgaacttcaagcaaagatgagggaagctgagaatgatccacatgatggcaaaagaaaatgtgagacattatggcctatatttaagattgcacaccagaagagccgctacatatttgatctctaccatcggaggaaggaaatttctaaagaactgtatgaattctgtttagatcaaggatatgctgaccgcaatctaattgcaaaatggaagaagcctggttatgaacgtctttgctgcctgaggtgcatgcagccacgtgatcacaattttgccaccacttgtgtttgcagagttcccaagcaacttagggaggagaaggtcatagagtgtgttcactgtgggtgcaagggttgtgcaagtggggactgattgaataccgattctagttttagttgccaatggagggtttcttagaattactttctttgtgcttttagctttctgttgtctgaaatcctcaccatgggacaccacttctcctggttgtattactgtctactaaatgagtgctatatatattgggaatattggtttcatattagtcatctgcctagttcaaaatctgactggagctttgtacctttacattcattaccctaatatggtgtacttttgctcgatacttctcagctt

SEQ ID NO: 6191 - DNA, 988 bp, Glycine max
cagcgatgcaaggcaatggcaaagccaagaagatcaaagatgatgtctttgaaactccctttcctgttgaccttgttcctcgcactctcccaagctcaaccgcattccgatgatccaccgccgccaccctcctccaacgtctgcgtcatcggcgctggcatcggtggctcctccgtcgctcacttcctccgcaaatactcgccgtcctccactccctccaccaaaatccgagtgttcgagcgcaacggccgcgtcgggggacgcatcgccaccgtgacggtggcgggcgagaccttcgaggccggagcgtccattctccatccaaagaacctgcacacagtggattacgttaagatcctgaagctgaaggtcaaagagccgaccgcgtcggaggattccctctctctcggcatttgggatgggaacaagttcgttttcaaaacggtgtcgccgcttagttccactgttcccctcatcgataagcttctcaaacttccgtttgttaatactctcgtatcgttcgttaattccgcactcatgttcgttcgctacggcttctcgctctttaagatgcagaacttcgttgagattgctgtggataaattcgtaaagtactatgaagatcctggttcaagacctatttttgagactgtggatgagatgctgcagtgggctggtctgtataatcttactaccaggactttgcgggatgaattggtggatgctgggttgtctacctcgttgatcaatgaacttgttactgtcatcacacgcattaattatggccagagtgtctccatgagtgggttgggtggtgtggtttctctagcaggatcaggtggaggattatggtccatcgaaggaggcaactggcaaatggctgctggactgattaatcagtcagatgtggcattacacctgcatgaagaaataaaatctgttgctgaccttggagattactacgaactcaactcaacaaaaggaaaca

SEQ ID NO: 6192 - DNA, 453 bp, Glycine max
gtttggaaagaaagcgataaacccagttgccatgaatccatgatcccctttccttccttcttcctctaattttcttgtatgctaagacttcctcgtcattgattattattcgcatccaacgccgtcagcataatttgtgtattcccctttgaatgttgaaagaaacaaaaacccacagaacctgcgatttcaacacaattaggttttcccttcaatggccgctaattcccacagagtgggttcttcctacggcggcgctgccccttaccgatcaagagatgggcttagcacccgtcccgttggtgcctcggcggtcatccaattgcgaattgatcccctggacttggacgatgagatcaccggtcttcatcgccaagttagaaggttgaaacatgttgctgaggagataggaacagaagtgaagtatcagaaaacttttcttgaagaactgca

SEQ ID NO: 6193 - DNA, 433 bp, Glycine max
gcgttcgcccatgcgtcttttctatttctctgacttcccatagaccacaatacactcaccccaggcaaagaaatttcgtttcaaaattgtgatatggacggaagagcgagcagcagcgtgggcggagaagcatcgccagctccagcaccggtgccgataacgaatgcgaacgcgccgccgcctttcttgagcaagacatacgagatggtagaggacccttcgacggactcgatagtgtcgtggagtccaacgaacaacagtttcgtggtttggaaccctcccgagttcgccagagatctcttgcccaaacacttcaagcacaacaacttctccagctttcgtcgccaattaaacacctactgatttaggaaggtagatccagatcgctgggaaattgcaaatgagggatttttgaggggtcaaaaacacttgc

SEQ ID NO: 6194 - DNA, 429 bp, Glycine max
ggggatcccaattcacggaacctactctctaccctccagggttccttctttcacctctgcaatttctactccgccacgccctacgacattgttcgtcgtaaccctctcttcgttccacttaggaagagaaaagggtttgtttggatatggaaggtgacgagcacatgaacgaggttccatcagagaacagcaacttgggaagtgattctttggaaaaggagaacattttggaagatgaaaaggaggatttgcaagatgggttgaagttgaaggtggtcactgaggaagtgagtggaggattgctcgctgagaatggttgcatttctcttgaggatgggagtctcaaaagaagccttgagactgttggaacatctgtatcaggtgctaaaagagctcgaattacagttgatgaatatcaaccttcagttc

SEQ ID NO: 6195 - DNA, 1917 bp, Glycine max
ctctgctactctcctatctggcgcattaaatgttccaatgctttttactggccactcacttggccgagacaagttggaacaacttttaaagcaaggtcgactatcaaaggatgaaatcaacacaacttacaagattatgcgcaggattgagctgaggaattggcccttgatggttctgaaatagtcatcacaagcactaaacaggaaatagaagaacaatggcgcttgtatgatggttttgatcctgtattggagcgtaaactacgagcaaggatcaggcgtaatgtgagctgctatgggagattcatgcctcgcatggcgacaattccacctggtatggagttccatcatattgttccacacgatggtgatatagaaggtgaaccagaaggaaatttggatcatcctgccccccaagatccacctatttggtctgagataatgcgcttctttaccaaccctcgcaagcctatgatacttgctctcgctagaccagaccctaaaaagaacatcacaactttggtaaaagcatttggagaatgccgtcctcttcaagagcttgccaaccttacattaattatgggtaaccgagatggaattgatgagatgtcaagcacaaatgcttctgttcttctctcggtacttaagttgattgacaagtatgatctgtatgggcaagtggcatatcctaaacatcacaaacaatatgatgttcctgacatatatcgcctagcagcaaagacaaagggtgttttcattaatccagctttcattgagccatttggtcttaccttaattgaggcagctgctcatggtttgccaattgttgctactaaaaatggaggtcctgttgatattcatagggtacttgacaatggtctgctcgtagatccccatgatcagcagtctattgctgatgctcttttgaagcttgttagcaacaaacaactttgggcaaaatgtagacagaatgggttaaagaatattcatttattttcatggcccgagcactgtaagacttacctttctaaaatagccacttgcaagccaaggcatccacaatggcagcgaagtgaggatggaggtgaaagttcagaatcagattcaccaggtgattccttgagagatttacaggacttgtctctaaatctgaagttttcattagatggagagaagagtgagggtagtggaaatgacaattctttgaattctgatggaaatgctgctgatagaggggcaaaattagagaatgctgttttgtcatggtcaaagggcatctctaaggacacacgcaggggtggggctacagaaaaatccgatcagaatccaaatgctggtaaatttcctccattaaggagaagaaaacatctgtttgtcattgctgtggattgtgataccacttcaagccttcttgaaactattaaagccatctttgagtctgctggaaaggatagggcagagagcattgtaggtttcatattgtcaacatcattaacaatatcagagatacagtcatttctaatctcaggtggcttgagtcccattgattttgatgcttatatttgcaatagtggcagtgatctatactatccatccctcaatcccggagatcgcccatttgtggttgacttgtattaccactcacacattgaataccgttggggtggagaagggttgaggaagactttagtgcgatgggctgattcaaccactgataagaagggtgataatgacgaacaaattgtgagtcctgctgaacagctttctaccgactattgttatgctttcaaagtgcgaaagccaggaatggctccccctgtgaaggagcttcgcaagttattacggatccaagctctgcgttgccatccgatatattgtcaaaatgggacaagactgaatgtcattccagtgctggca

SEQ ID NO: 6196 - DNA, 592 bp, Glycine max
acgagccggccagccgacaattacgggaggttatgtgggtccctccacttttatatacacaacaacaacacacatactagtcatttgttgttgttgtgtttgtgtttgtgttctctcctttcattaacgttgtgttgggtttgctagtgtacttggttttcattatggcgtcttcttcagcctctcgtgagggacactacagaggagttaggaagcgaccatggggacgctacgctgcagaaataagagatccgtggaagaagacacgtgtctggctgggcacattcgatactcccgaggaagccgccctcgcctacgacggcgccgcccgctccctccgcggcgccaaggccaagaccaacttccctccggcgccgcccctctgcctcgacctcaacgtcccttcctccgatcaccgctggccccaccacgtccccccccgcagcctcgtcctcagcgacttcctccacaccgccgttctcagagatatcgacccgccccaacaacctttcccacccgccgccgcagtagctccaccgaaatccccacggcggagctatgcccgttggcggccgggttcaagtgatggaag

SEQ ID NO: 6197 - DNA, 369 bp, Glycine max
ctcgagcggtgccggccagccgacaatcacgggaggttatgtgggtccctccacttttatatacacaacaacaacaacacacatactagtcatttgttgttgtgttctcctttcattaaggttgtgttgtgtttgttgggcttcgttactgtactttggtttcattattatggcgccgtcttcttcagcttctgcttctcgtgagggacactacagaggggttaggaagcgaccatggggacgctacgccgcagaaataagagacccatggaagaagacacgtgtctggctgggcacattcgatactcccgaggaggccgccctcgcctacgatggcgccgcccgctccctccgcggtgccaaggccaa

SEQ ID NO: 6198 - DNA, 1035 bp, Glycine max
cggacgcgtgggttggccattctatgatttttactcatgactcctccaagttgatagtagcaggtcacgataaaaggatatatgttgtgcatgttgggggggcagatgaagttaagtcagaattactgcatacttttacaccccttcgcgaatcacaagatcaagaattacctccaactgagccacccataacaagattgtttactagttctgatgggcagtggttggcagctgtgaactgctttggggatatatatgtatttaacttggagatactaagccagcactggttcatttcaagattggatggcgcctctgttacagctggtggctttcctccccagaacgacaatgtactgatagttacaacttcctcaaatcaagtgtatgcatttgacatagaggccaagcagttgggagaatggtccacaagacacacacatgctcttcctaggagataccttgaatttcctggtgaagttattgggctctcattccctccatcagaaacttcatcttctccatcggcaacttcatcttcggttgttgtttacagctccagggctatgtgcttgattgactttggattgcccgtggagcaagatgaaagtgatatgctaaatactaaagattcaagggcaaggaattcacaccattttaatgttaagaagaggattgaagttatgaaggaacataataggaggaattttgaagttatacctttcgagaatcctgttttatttttaggtcatactgcaaaaaattccatctttatggttgacaaaccgtggttgcaagtggttaagagtttagaaggccgaccagtccacagacatatatatgggacatgaggcattaagcaaacctagagaattgttctcagcttgaggggatacattatggggataaaagtcccttgtttttctttttgtctcttcagggctggggacctagaatcgtgtattgtgttatcataatcaattttgttccattagtaatagcttcacttcacaatttattctattttttatttac

SEQ ID NO: 6199 - DNA, 384 bp, Glycine max
accggattccggtccaaggcccttcatcagagataacttgacaaataaaatcaccatgtctatcatcccaaacttgttcggtggtagacgaagcaacgtcttcgacccattctctctggacgtatgggaccctttcgaggggtttcctttttccacaggtcacgtgccttcctctggtggggaaagcagtgccatagccaacactcgcgtggactggaaggagactccggcggctcacgtgttcaacgttgatcttcccgggttgaagaaggaggaagtgaaggttgaagttgaagatgggagggtgctgcagattagtggtgagaggaccaaagaacaagaacagaaagatgataggtggcaccgcgttgaaagaagcactgg

SEQ ID NO: 6200 - DNA, 1321 bp, Glycine max
gtgatgctaaaaggggtgatttggtgaagtgtgaggcctatgaagcagacagatcagaggttgagggtgcaagcacaccatcagaagctgcaaagaaggtgaaaattgggatatattttgcaacctggtgggctttgaatgtggtgttcaatatttataacaagaaggttttgaatgcttacccttacccttggcttacttcaactctctcacttgcatgtgggtctcttatgatgttgatctcttgggccactgggattgctgaagccccaaagactgatcctgagttttggaagtctttgttccctgttgctgttgcacatacaattggacatgtagcggcaacagttagcatgtcaaaagttgcggtatcattcacacacattatcaagagtggtgaacctgcttttagtgttctggtttcaagatttcttttgggtgagagctttcctgtgccagtctatctgtctttaattccaatcattggtggatgtgcacttgctgctgtgactgagctcaatttcaatatgatcggttttatgggggccatgatatcgaatttggcatttgtattccgtaatatcttttcgaaaaagggcatgaagggaaagtctgttagtggaatgaattactacgcatgtttatctattttatctcttgctattctcacacccttcgcaattgctgtggaaggaccgcaaatgtgggctgctggatggcaaacagccatgtctcaaattggaccccaattcatatggtggctagctgctcaaagtgtattctatcatctatacaatcaagtgtcatacatgtctctggatcagatctctcctttgacgtttagcattggaaacaccatgaaacgtatatctgtcattgtgtcttccattattatcttccacacaccagttcaacccatcaatgctcttggtgccgccattgctatccttggaaccttcttgtattcacaggcgaaactatagagttggggaactaagattcctctagggacttgtttgttacagttcttcatgctcaaccagggacaaggaagttgattttgtaatgtgtcactgctggatttttgtaatactaggatgatctggctatcagtccatctgtagatataataataaaaataatgctgctgaggaaacattatcataatacagatgattaggtaggttttatttatttttttggaatttcagaaatgccaatgatttaaaataaatgcgttttgtttataatttagtctgagaagaatttctcaaaaacattgtttactataaggagcttgcaataatgtgatgctgtgatg

SEQ ID NO: 6201 - DNA, 396 bp, Glycine max
gggtaagggtaagcattcaaaaccttcttgttataaatattgaacaccacattcaaagcccaccaggttgctgtcgccccaaagactgatcctgagttttggaagtctttgttccctgttgctgttgcacatacaattggacatgtagcggcaacagttagcatgtcaaaagttgcggtatcattcacacacattatcaagagtggtgaacctgcttttagtgttctggtttcaagatttcttttgggtgagagcttcactgtgcctgtctatctgtctttaattccaatcattggtggatgtgcacttgctgctgtgactgagctcaatttcaatatgatcggtaataaacttgtcctttgaagatttttttttttaatcttgttaagcacagta

SEQ ID NO: 6202 - DNA, 263 bp, Glycine max
cttcatgctcaaccacggacaaggaagttgattttgtaatgtgtcactgctggaattttgtaatactaggatgatctggctgtcagtccatcagttcatggagactgtctatacttcagtcacgaggttccatgttcatactttagcttccatgcaattggacaaacggtgattgataaacaagtgtatatagaaagtaaaagaaccctttgtcgtaaacggttttgaaggccatagaagccattcgaagaggtacaataaat

SEQ ID NO: 6203 - DNA, 842 bp, Glycine max
  unsure (1)..(842): unsure at all n locations
ccaacccttcgttccggcaccaaaagaacacagaaaggggaacggaacaatttgctataagtcgggttggatttgtaggaggaagtaagaaaacacaaacaacacgaatttcattgcagagtgttattttgagtatcagcatcaatggctccaattgcagtgggaaacgtgattccagacggcattttggcttacttggatgaagaaaacaaaccccaaactgtctccattcactctctcgccaccggcaagaaagtcatcatctttggggttcccggtgccttcactcctacttgcagcttgaagcacgttcctggcttcattgagagagcagaagagctgaaagggaagggtgtggacgaaataatctgtatcagtgtgaatgatccatttgtgatgaactcatgggccaaaacattcccagagaacaagcatgttaagttccttgctgatggtgcagccaaatacaccaatgcccttggtcttgagcttgacctcactgacaagggtctcggcgtccgctcaaagaggtttgctctgctggtggaagacctcaaggtgaaggttgcgaatgttgaaagtggaggagagttcaccatctccagtgctgaagagatcatcaaggccctttaaaacccttgaatcctcttgttggctgtttaactgtctttaatgtgtggtgtgagactcttttgatgcaagaactatactagaaacattttccttttcatagatgtaattgtgttgtgtgctctgggaagggccatgatatggtgcatattatggaaataaataagatttcttgtttcaaatgcaaaaaaaaaaaaaaaagggggggnnnn

SEQ ID NO: 6204 - DNA, 664 bp, Glycine max
ctcgagccggaaacgaaaacctcaacccaaaccctcccgaattgaggtgacttgattttccctcttctctttttctctctcgtgagtctcgtccctgaagcgaaattctagaatggcggaagaagctcctgcatctgaaacctccgtcacaatgcctcaaccggcggaagtcatcaccgtcgacggaaccctaacctcttccgagaatgacaagagcggaatctccgtcgatgccgccgcgcacggcggtgaaaagacggtgtccaacgctgaaccttccggtagcgatcctcagaagtctctggagttggcgaacgagctgatggaaaaaggaaacaaggcaattaaggagaacgattttggagaagcagctgataacttcagccgtgctctcgaaatcagagtggcacattatggtgaacttgctcctgagtgtgtgcacacatattacaaatatgggtgtgcacttttatacaaggctcaggaggaagctgatcctttagctgatgtgcccaagaaggaggatggatctcaacatggctccaacaaagatggttctgtgaagggttctttgaatgctgaatcttccactgcttctttttcaagcaatgccgagctggatgtgacttcaaatgaccagggtggagcagtggatgatgggtcc

SEQ ID NO: 6205 - DNA, 403 bp, Glycine max
gtctccgaactcacaaatctgcaaagtttgggtgaacaactccaacggcatttaattattcattcgcagattttcgtcgttcgaaccctagaatgccgaagcgtgatagaaccaagaaaaccgcgaaagcaaccgaatcagtacccgaacctcaacctcaactgcagccaccacaattcatcgacctcgaaatccaagcgatggagcgacaaattggcgcgatcagggcggttcgcgacgtggagatcgagcacctgctcacggagctgcggttcctgcgctcgcggttcagcagcgaagagctccggaagcccgtgctgcagggtttcgaagaaaccctaccgaatctcgctgtcgtgaacgacgagcgcagcaagaagcttgaagtgaaatggagagagac

SEQ ID NO: 6206 - DNA, 1310 bp, Glycine max
cccaaaaaaaacagagtgggtagggtgacggaagcagaaaccaaacacaactcaatcacgaaaatgtcgaatttgccccaatcgctgtcgatgggcgcggccttcggcggcggtggcgctccaacgccgtcttccagtggcggcgccggagcacagggctccggcgctggcaaggatcggaagatggcgtccgcggagcagctcgtgctcgaactcagcaaccctgaactccgtgaaaacgcgcttctcgaactctccaagaagagggagctatttcaagatcttgctccgttgctatggaattcttttggtactattgctgcacttttgcaggaaatagtttcaatataccctgttctttcaccaccaaatcttactcctgcacaatcgaaccgagtatgcaatgctcttgctcttcttcagtgtgtagcatctcaccctgatacaaggatgctattcctcaatgctcatatacctctatatctgtatcccttccttaatacaacaagcaagtcaagaccatttgagtacttgaggcttaccagccttggtgtcattggtgcattggtgaaggttgatgatacagaagttataagtttccttctttcaacagagataattcctctatgcttgcgaaccatggaaatgggcagtgagctatccaaaacagttgcaacatttattgttcaaaaaattctgttggacgatgtgggcttggactacatttgtactacagcggagcgcttttttgcggtaggtcgagttctggggaacatggtggcagctctagctgagcaaccttcatctcgtctattgaagcatatcattcgatgctatcttcgcctgtcagataatccaagggcttgtgatgcattaagaagctgtctgccagacatgttaagagatgctactttcagcacttgccttcgtgaagaccccacaactaggaggtggctacaacaattgcttcacaatgttggagtgaatcgggttcctgcactacaagctggaggaggtttcgatcacatgattgtgacctgagtatacaccaagatcttgcttcattggtgctatcagcattttagggtccgttatatctatatttcatggaacttggtttttcagaggaaaaggttgtaaattagtggtgcgtggaaaccaagttagaagacattttctttctttatacccctcccctccttgtgcggttaagcttatatcaagacattgaggcagcttttactccttaaatgaactttgagcaggtacattatgatgtcaaattttcaataaagctaaaggtattctta

SEQ ID NO: 6207 - DNA, 367 bp, Glycine max
gtaacttaaccacagttctggaacattcaattattctgatacagcacctccaccgttactaccatgggccgtcactccagtaaccattctccctcctcacgccgccaccgcagtagtatctctccgccgccgcgagacaagcacgagtattccggccgcagtacagccaaaccggttcggcccggttcgccggattctcccccttgttcgcgctctccgtctccgcgaaccaagcggttgaagaaagctcaatccgaacgcgagcgtgagcctcgcgagagcgagaggaaccatggcggtagcagagggagaggttcggagaggggcgccggtgagcggagggagaagaagagaacggagaatgatg

SEQ ID NO: 6208 - DNA, 1174 bp, Glycine max
cacttagatgccaacaacgacagcaagatcttcgccgatgagctcaacagcgcagtccaaacgacgcttggatctgtcgtcttgccggaggagcttcgctgtgtcatggaccacctcgaaatcgaccgcgacggcctcatcaacctcttgccaccgtgagtgtttgtgaagttctagatctcatgggttgcttggcgttgttgtttgggtggaggtgcgcacaacaatgcggtgttctcatccaaggcctttttctgttactggagaagcaacaatgtttgaaagggataacttttaatataccataatgaaataaaattaaaatttaatggccaaaaaatgatattaactaaaagaaagaaagagccataaaatactttgattaaataaaaccgtgaagagctagtattggcttaatagcagtcctcaaacaatcgcttattgctaacgcgacctcttcctgttcccgctgcatcagcctcagagcacccgctagggtttcttctgcacacccaaccaaatggcggatcctgagttggaagcaatcagacagagaaggttgcaggagcttatggctagccatggtggcgtgggaaatcaacagaaccctgaacaggagaaagctcaggatgatgcaaagagggaggctgaggaacggagacagatgatgcttagtcagatattgtctgctgaagcgcgagaaaggcttgctcgaattgctttggtgaaacctgagaaagcaaggggcgttgaagattttatattgagagctgctcagatgggtcagataactgaaaaggtttctgaggaaaggctcatatcactgctggaacagataaacaaccaaacaacaaggcagacaaaagttacaatacagaggcgtcgaagtgttctcgaggatgatgattaactttcactgcctctttaaacggcgtgccttgagtatttgatttcatgctttagtatgtgtattttactgtcaaatcaaagtattgcataagtggattgtgaaatatctgtttcagcttgaaattttggctgtcttgccaggcctcctaatgaattaaactacacaatacttgaaagcttattattttgacacattcatttgtaaaacaatttctagcatgtggatggcatttcaaagaatacatgttgtaatattccactaaaa

SEQ ID NO: 6209 - DNA, 663 bp, Glycine max
ggcgaataaaaatattgtcttggctactgtaaaacatggaggacatctggcattctttgaagggataactgcatctggcctttggtgggtaagagctgttaatgaattccttggtgaattacgtgctagccattttatgcatgtacagaagaagatcactaaaccaaccataccattggactcgtcaattgatcaaggcccttatgttaatgttaaggaagatggaatggtggctgcattgaacaatgagccaaaacactgacaacgtggaagaaatacaggtaatacaggatacagataatgacggtctagagatgattccagaagaaaaagtggttaaacaagatgagcttgagactaatgcaaagattcgaggttctcctggcattgctcaagcttgtgttcatgatgcagcagtgcatgtaataacacctttcaaaatagacctaggccagttatctcgacaaaatcgatggtccatctggttgctagtttatattgctattaccacaagttggcctctggttggttcggctctatatattgtgtttgggaaaaagataagggatatcctaccaaatggattagtcagaaaataatttcttgattgctaataccactgttgtatttgtctgtgtagatgtataagaatatacacacatc

SEQ ID NO: 6210 - DNA, 770 bp, Glycine max
gattccgctcgagctaaattctcaaaggcaccaatttcattgctcagagttcccaaattctccccaagagataaaatgtctctaatcccaaacttcttcggtggccggagaaacaatgtgttcgatcctttctcactggacgtgtgggatcccttcaaggattttcctttcccaaatacgctttcttcagcttccttccctgaattttctcgggaaaattcagcatttgtgagcacccgtgtggactggaaggagaccccagaggcgcacgtgttcaaggcagatattccaggactgaagaaggaggaagtgaaggtgcagattgaagatgataaggttcttcagataagcggagagaggaacgttgagaaggaagataagaacgacacgtggcatcgcgtggagcgtagcagtggcaagttcatgagaaggttcagattgccggagaatgctaaagtggatcaagtgaaggcttctatggaaaatggggttctcactgtcactgttcctaaggaagaggttaagaagcctgatgtcaaggccattgaaatctctggttgatccatgttatggttgaaaatcgtgagcttatcctttgttgttgtaataagtgtcttctgtcttgtgtgcctttgagaaaaatcttccatgcatgcattgtggattgtaattgctccagtgattgataactgtgtggctgtgtaattcatgtgaataaagtcctaccttcagagttcagaatatataatttcggtgtatctagtgtctgg

SEQ ID NO: 6211 - DNA, 664 bp, Glycine max
acgaggcagttaatagcaatttcgataagaaaagttccaaaattcagctaagagaaaatgtctctcattccaaacattttcggtggccgtaggagcaatgtgttcgatcccttcaaggattttcctttcccaaattccgtctctacttccttccctgagttttctcgggaaaattctgcgtttgtgagcactcgtgtggattggaaggagaccccagaggcgcacgtgttcaaggccgatattcccgggctgaagaaggaggaagtgaaggttcagattgaagatgataaggttcttcagataagcggagagaggaacgttgagaaggaagataggaataacacgtggcatcgcgtggagcgtagcagcggcaagttcatgaggaggttcagattgccggagaatgcaaaagtggataaagtgaaggcttctatggaaaatggggttctcactgtcactgttcccaaggaagaggttaagaaggctgatgtgaagaacattcaaatctctggttaagcaaaagcaaattgttgttggtcttttgtgtttatctttgttgtttgagaaattgtgtgattttctatgttctattgtgagtgatatgcttgggagaatgtatcgtacgaggtgtgattgtataaagaaataaaatagttgcagttgg

SEQ ID NO: 6212 - DNA, 921 bp, Glycine max
gcgtacgtaagctcggaattcggctcgaggaaaaaagttacctgtttgcgatctcattacaatctccccagtttctaatctcagctaagaaaaaccaaaagatgtctctgattccaggtttcttcggtggccgaaggagcaacgtcttcgatccattctcactcgacatgtgggatcccttcaaggattttcatgttcccacttcttctgtttctgctgaaaattctgcattcgtgagcactcgtgtggattggaaggagaccccagaggcacacgtgttcaaggctgatattccagggctgaagaaagaggaagtcaaggttcagattgaagatgatagggttcttcagattagcggagagaggaacgttgagaaggaagacaagaacgacacgtggcatcgcgtggagcgtagcagtggtaagttcgtgaggaggtttagattgccggagaatgctaaagtggaccaagtgaaggcttccatggaaaatggggttctcactgtaactgttcctaaggaagagattaagaagcctgatgttaaggccatagacatctctggttaatctatgttgctctgttccttcgttgaaatgtgtttatgttttcttattctgaggatcatttgtgtgagtcgtgtgaaaaatatttcaggttttatgttggctaagaggcctaatgtttgggccctagaaatctctggttaaactgtgtaaagatctgttacttggtttaaagtttgtgtgttttgttcacttccaaggaatttatgtgtgcaagaaagatgtaattgaaaaatttagcaatagactaatggttttatatattctatgttgcaataaatcttaggatatgtatatcactggaacagattcactatgccagtgtgtgagaaagcaatgatagttctaaatacaaccg

SEQ ID NO: 6213 - DNA, 410 bp, Glycine max
tgcgaagtcatagttagaagttttaaacattcaacctcaatttgcagagttctaatattacattgcagagaaaatgtctttgattccaagtttctttggtggcagaaggagcaatgttttggatcctttctccctcgatgtgtgggacccttttaaggattttccttttcccacttctctttctgctgaaaattcagcgtttgtgagcacacgagtggattggaaggagacaccagaagcacacgtgttcaaggctgatattccagggctgaagaaggaggaagtgaagctggagattcaagatgacagaattcttcagataagtggagagaggaacgttgagaaggaagacaagaacgacacgtggcaccgcgtggagcgaagcagtggtaagttcatgaggagtttca

SEQ ID NO: 6214 - DNA, 430 bp, Glycine max
atggggatgatgagcatatagtattcggctcgatgtgaaggcatcgttagcagttttgtagattcaacctcaatttgcagagttacgttctaatatatttacacaagactgataagagaaaatgtctctgattccaagtttcttcggtggccgaaggagcagtgttttcgaccctttctccctcgatgtgtgggaccccttcaaggattttccatttcccagttctctttctgctgaaaattcagcgtttgtgagcacacgagtggattggaaggagacaccagaagcacacgtgttcaaggctgatattccagggctgaagaaggaggaagtgaagctggagattcaagatggcagagttcttcagataagcggagagaggaatgttgaaaaagaagacaagaatgatacgtggcatcgcgtggagcga

SEQ ID NO: 6215 - DNA, 402 bp, Glycine max
ttggggtctgtgttacaacttacggctaaattctcaaagatttaaactttgtctcagagtttccaaattcacccaaccccagagagaaaatgtctctaatcccaaatttcttcggtggcagaaggagcaacgttttcgatcctttttccctcgacgtctgggaccccttcaaggattttcctttcccaaacactctttcttcagcttcctttcctgaattttctcgggaaaattctgcattcgtgagcactcgtgtggattggaaggagaccccagaagcacacgtattcaaggctgatattccagggctgaagaaggaggaagtgaaggttcagattgaagatgataaggttcttcagataagcggagagaggaacgttgagaaggaagataggaataaca

SEQ ID NO: 6216 - DNA, 359 bp, Glycine max
caagagtatcctttcacttcctttaaatacctcgagtgtccccattgacatcatcaaacaagagaagagttacagaatttcctgtttacgatcttattgcaattttgcaactttcaaagcttattagctaaagtaacatcaaaagatgtcattgattccaagtattttcggtggcccaaggagcaacgtgttcgatccattctcactcgatatgtgggatcccttcaaggattttcatgttcccacttcttctgtttctgctgaaaattctgcatttgtgaacacacgtgtggattggaaggagacccaagaggcacacgtgctcaaggctgatattccagggctgaagaaagaggaag

SEQ ID NO: 6217 - DNA, 288 bp, Glycine max
cagcagttaacaaaatttcgataagaaaagttcccaacttcagctaagagaaaatgtctctgattccaaactttttcggtggccgtaggagcaatgtgtttgatcctttctcccttgaagtgtgggatcccttcaaggattttcattttccctcttctgtttctgctgaaaatttagcatttgtaagcactcgtgtggattggaaggagactccagaagcgcacgtgttgaaggcagatattccagggctgaagaaggaggaagtgaaggtgcagattgaagatgata

SEQ ID NO: 6218 - DNA, 341 bp, Glycine max
gaaaagagttatttgtttacgatctcattagtcattacaatctgccaagtctctaatctaagctaacaaatatcaaaaagatgtctctgattccaagtttcttcagtggcccaaggagcaacgtgtttgatcctttctcccttgacgtgtgggatcccttcaaggattttcactttcccacttctcgtttctgctgaaaattctgcatttgtgagcactcgggtggattggaaaggagaccccagaagcaccacgtgctcaaggcagatattccagggctgaagaaagaggaagtgaaggtgcagattgaagatgatagggttcttcagataagcggagag

SEQ ID NO: 6219 - DNA, 270 bp, Glycine max
tttcctttcgtccggttaatagcaattgcgataagaaaagttccaaaattcagctaagactaaatgtctctcattccaaacattttcggtggccgtaggagcaatgtgtgcgatcctttctcacttgacatgtgggatcccttcaaggattttcctttcccaaaattccgcctctactgccttccctgagtcttctcgggaaaattctgcgtttgtgagcactcgggtggattggaaggagaccccagaggcgcacgtgttcaaggccga

SEQ ID NO: 6220 - DNA, 271 bp, Glycine max
cttgagccgtaaattctcaaaggcaccaatttcattgctcagagtcccccaattgctccccctgagataaaatgtctctaatcccaaacttcttcggtggccggagaaacaatgtgttcgatcctttctcactggacgtgtgggatcccttcaaggattttcctttcccaaatacgctttcttcagcttccttccctgaattttctcgggaaaattcggcatttgtgagcacccgtgttggactggacggagaccccagaggcgcacgtgt

SEQ ID NO: 6221 - DNA, 200 bp, Glycine max
tctcgagccgattcggctcgaggatctcattacaatctcccaagtttctaatctcagctaagaacaaccaaagatgatgtctctgattccaggcttcttcggtggccgtaggagcaacgtgttcgatcctttctccctcgacgtcgtgggatcccttcatggatgatcatgttccctgttctgaatctgctgaaaattta

SEQ ID NO: 6222 - DNA, 1455 bp, Glycine max
  unsure (1)..(1455): unsure at all n locations
ataagacgaaggtgctgccaaagccaccacaatcgcatgagcctaagcctgagacataccatagactatatggtgtttctccacaattcccatggagcctaagacacaaccccaagcgaatagtcctccaccaaaaccttgggaacaagcaggttcctcttcgggtccagcgcctttcaaacccccgtcagctggcaacacaagtgatgtagttgaggcttcagggactgcaaaacctggggaaattgtttctagttctgataggagtgcagctgtcaacaggaatactcttgggaggcctgttcccacaaggccatgggagcagaattatggaaacagcacctatggaggatatgggtctacaatgaattataattctgggtatggatctggaatgtatggatcttcttatggtggactaggaggaggaatgtatggatcatcttatggtggggggatgtatggtaacagtatgtacaggggaggatatggtggcatgtatgggtcatccgggatgtacgggggtggaatgtataacagtggcttagggggtccaatgggtggttatggcatgggtggtggtccttatggagaacaagaccccaacaatccgtatggtgcccctccatccccacctggattttggatttctgccctacgtgtgatgcaaggtgtggttaacttttttggtcgaatatcaatactcatagaccagaacacacaggctttccatttgttcatgactgcacttctccagctgtttgaccgctctggaatgttgtatggagagctagctagatttgtgttgcggttgcttgggattagaacgaagtccaagaaggtttacccgccaggtccaaatggacagccgctgcttggacctggaccacacaatccttccggaaatgtaaactacattgaggcaccaaaggctgctccaagtggttcttgggacaacgtttggggaaatgacgcaaatcaatgatacggtatgttattctgctaaaagagttcgtccaaatacattgaaaagaagaaacagctgcattcattatgaagatactgaaactgcagaagtcatgtatatcctgggattaaaattgagtttgctattttctctttgcttgcgttggctcttgattttactagaaaggggatcttaaataggataccatccctgcattataccttgtaagcgttttgtttgaatccttacatgtattatcttatccctagcgtaatattgcatacctgcattaagattttcgggcgacctttaattacgtttcttttcgtgtgctcgtaatgtgaatattcctctagtttgctttacgcatggttctgccaaacatcggtgtgattatatgaagtcggcgttaagttttaggtttaattgcagtttaattccaatattaccgcccatgagtaattttgattctcgaattattaaannaa

SEQ ID NO: 6223 - DNA, 498 bp, Glycine max
ccctttcgtccgtgtaaagccaccacaatcgctacccttggctgcaagcttaagcctaagcctaagcctgagacataccatagagaaagtgattcaattaatatattatatggtgtttctcttcaattcccatggagcctaagacacaacctcaagcgaatagtcctccaccaaaaccttgggaacaagcgggttcctcttctggtccagcacctttcaaacctccgtcagctggcaacacaagtgatgtagttgaggcttcagggactgcaaaacctggggaaattgtttctagttctgataggagtgcagctgtcaacaggaatactcttgggaggcctgttccctccaggccatgggagcagaattatggaaacagcacctatggaggatatggttctacaatgaattataattctgggtatggatctggaatgtatggatcttcttatggtggactaggaggtggaatgtatggatcttcatatggtgggggga

SEQ ID NO: 6224 - DNA, 709 bp, Glycine max
cacatttctgtagctctatggccgaaatgatacagtttgtttccttattctaaaccccaaagtagcaatagttagattagagtacatagtttttgtcacacctcacttctctccgatttgcgcttgttcttcttcttggtcaactcgatcgtaagtcgtagaactagaagggtgagggcaatatggaggtaacaaaagggaaggaaactaaaattgttttgacgaaacccttccaattggaagctgaatcagatttagaaccgtcttatagagccccccatctcctacatcgcttgttaagtttactcaagaacgtgcggccaggatcagatctcacaaacttccaactgccgcctgtgtttaatttcccaaaatctcaacttcaatgctatggtgaatcagtgtactgcacatcttccaacttgctaagccaatgcaacagtgggcagagtccactggacaggttcacatcagtagtagcatggagcatatctaccacacgccccacatcttttggtgttgctccttataatcccactcttggagagacccaccatgtttccaagggcaatctcaacgtcctagttgagcaggtttcactcaatcctccagtatctgccctccatgcaacagatgagaaggaaaacattgagatgatatggtcccagcaacctgttccaaagtttcggggtacatctattgaagctca

SEQ ID NO: 6225 - DNA, 456 bp, Glycine max
cgcaatggcccaaatgacactgttttcttattctcaaccccaaagtagcaataaatagatgtctccaatttttttcttcttgatcaaaagtcgtagaactagaaggttaggttgagggcgatatgaaggtaaccaaagggaaggaaactaaaattgttctgacaaaacccttccaattggaaggtgaatcagatttagaaccgtcttatagagctcccaatctcctacatcgcttgttaagtttactcaagaacgtgcggccaggatcagatctcacacacttccaactgccagctgtgtttaacttcccaaaatctcaacttcaatgctatggtgaatcagtgtactgcacatcttcaaacttgctgagcaaatgcaacaatgggcagagtccactggacaggttcacatcagtagtagcatggagcatatctaccacacgccccacatcttttg

SEQ ID NO: 6226 - DNA, 617 bp, Glycine max
aagcattatacacattgtactttctctctctgacaataagtcattgagttgagtttgaagcctccgtccatgttcttccttccgaaggggcatcaattaacatctctcgtgtcaggtagcacttggaacgtatcatcatgaacacagttggagaaagaatgacaaagagagagacttcggagaatgatgaggaggaaagtttattgaagaatgagaatagcggaacagataatgaatctaagattaactacagagggtggaaggtcatgcccttcattataggaaatgagatttttgagaagctaggagccattggcactttatccaatctcttggtccatctcactacggtattcaacttggaaaacatcacggctacaaatattatcaacatctttaatggcagcaccaactttgctacattgctaggcgcttttctctctgatgcccttttcggtcgctacaagatactggcattctgcacagcggcttcctttgtgggtttgtttgcaatacaactgacagcagcagttgagaagctgcatccacctcactgtgaagagtccaccatatgccaagggccaacagaggggcagatgacatttctaaagacaggg

SEQ ID NO: 6227 - DNA, 723 bp, Glycine max
  unsure (1)..(723): unsure at all n locations
ngacgacaaaaagggaacacattaattactcactcttcactcaaaactcttgtctttcattttgataattcccacactatggctgagcttcactaccaacaacaacaccaataccctcaccgataccctaatgatccatacgaacaacaaactagctactccactcaggtcgtcaaggcggccaccgccgtcaccgcgggcggctccctcttgatcctcgcctcgttgatcctcgccggcaccatcattgccctcaccatcgtcaccccgctgttcgtcattttcagtccggttctcgtccccgcggtgatcaccgtcgcgctgctgagcctggggttccttgcctccggcgggttcggtgtggcggcgatcacggtgctggcgtggatctacaggtacgtcaccgggaagtacccacctggcgcggatcagttggacagcgcgcctcacaagatcatggacaaggcgcgtgagatcaaggactacggacagcaacaaatcagcggggtccaggcttcttaattctgcactcgcacgcacatgatcgtatccatctcgtggaatatttctctctttgtctagttagtttatatttaccatttatgaatgaatgaatgcatgattgagcgttaaagttgaatttgaatctctcttttctttgtattttcgtttattgtgggtgttcgctcatcatcacttgttgtaatgtcttaattttgtgtg

SEQ ID NO: 6228 - DNA, 506 bp, Glycine max
gatcacactaatcactcactcttcactcaaaactcttctctttcgtgttcataattcccacacattatggctgagcttcactaccaaccacaacaccaatacccccttcgctaccccggcgatccacaccaacaaacccgttcctccacccaccgggtcgtcaaggccgccaccgccgtcacagcgggcggctccctcttgatcctcgcctcggcgatcctcgccgccaccgtcattgccctcaccatcggcaccccgctgtccgtcattttcagtcccgttctcggccctggcgtaatcaccgttgcgctcctgagcctggggttcctcgcctcgagtgggttctgtgtggcggctgtcactgtgctggcgtctatctacaggtacgttaccggcggacaaccacctggcgcggatcagttagacagcgcgcgtcacaagatcatggacaatgcgcgtgagatcaacgactacggacagcaacacatcatccgcgtccaggcttc

SEQ ID NO: 6229 - DNA, 2344 bp, Glycine max
taccacttaccactttcccaagccatccattctcacacacaaaactttccaccacatactatataaacatcccattcatttccacactcttctcattcaagtcctaaaataccaaaaacccattcacttttccaacccattcacttttccacaagccttagttcttctcatttattctctttttcaaaatactttcactctctctaaccttccagttctcactaaacctcgtgaagctcgtgatggacaccaagataggttcactagacgcgcccaagcccaacagcaacgacgtcgtatcatgcaacctcaccagcagcgccgccatccagccctgcttgccggcgacggtgatcaacggcgccggctgtagtgactccaccttgggcggccacctggcccgccggctggtggaaatcggcgtcaccgacgtgttctccgttcccggggacttcaacctgacgctgctggaccacctcatcgcggagccggcgctgcacctggtcgggtgctgcaacgagctcaacgccgggtacgccgccgacggctacgcgcgcgccaggggagtcggcgcgtgcgtggtgacgttcaccgtcggcggcctcagcgtgctcaacgccatcgccggagcgtacagcgagaacttgccgctaatttgcatcgtcggtgggcccaactccaacgactacggcaccagtcggatcctccatcacaccatcgggttacccgatttcagccaggagctgaggtgctttcagaccattacttgcttccaggctgtggtgaataacttggaagatgctcatgagttgattgatacagcaatctcaactgcgctgaaagaaagcaaacctgtgtatataagcattagctgtaacttgcctgggattcctcaccccactttcagtcgtgaccctgttcgtttttcattgtctccaagattgagtaataagatggggttggaggccgcagtggaggcagcggcggaattccttaacaaggcagtgaaaccagtgctggtgggtggtcctaaactgagggtggcaacggcatctgatgcctttgttgaactggctgatgcgtgtggttatgcgcttgctgtgatgccatcggctaaagggcaggttccagagcaccatccccatttcatcggaacttattggggtgctgtgagcactgccttctgtgctgagattgtggagtctgcggatgcatacttgtttgctggtcccatttttaatgactacagctctgtggggtattcgctccttctcaagaaggagaaggcgatcattgtgcagcctgatcgggtggtgatcgcaaatggacctgcatttgggtgtgtgctgatgaaggatttccttaaggcacttgcaaagcgcctcaagcacaacaatactgcatatgaaaattaccacaggatatttgtccctgatgggcatcctttgaaggctgcacccagagagcctttgagggttaatgttctgttccaacatatacaaaatatgctgtctggtgaaactgctgtaattgctgagacaggggactcctggtttaattgccaaaagctgaaattgccaaaggcatgtgggtatgagttccaaatgcaatatggttcaattggatggtctgttggtgctactctgggttatgctcaagccgttcctgagaagcgagtgattgcctgcattggtgatggaccacgcgtccggactgcccaagatgtatcgacaatgttacggtgcgggcaaaaaaccatgatctttctgatcaacaatggtggatacaccatcgaggttgaaattcatgatgggccgtacaatgtgattaagaactggaattacactgggttgattgatgcaatccacaatggtgaagggaaatgctggactgccaaggtgttctgtgaagaggagctagttgaagcaattgccacagccacaggacccaagaaagactccttatgcttcattgaggtgattgttcataaggatgacaccagtaaagaattgcttgaatggggctcaagggtttctgctgccaatagccgtcctcccaatcctcagtaatcttcagaatttatcctatgactaaattgctgcagttgccctttagctctatgaaagtgagaatcatttgagatgatgcccttgtagggaatttacctttgttaatggcttgaaacatttatgctaaactgactccccacttgtttgtgtaaattctttcacttttgttcacctttgtttatcacctttgttcatttcgattattcttaagtaaagcatcgttctttttatccttttctgtttgctacattttgttaaacaggaaccgatttcat

SEQ ID NO: 6230 - DNA, 463 bp, Glycine max
cccacaccgcaacattgttgatacatcttgggcagtcacctgaaaacttccatcaccaatgcaggcaatcactcgcttctcaggaacagcctgagcataaccaagagtagcaccaacagaccatccaattgaaccatattgcatttggaactcatacccacatccctttggcaatttcagcttttggcagttaaaccaggaatcccctgtctcagcaattacagcagtttcaccagacagcatcttctgtatatgttggaaaagaacattaaccctcaaaggcgatcattgtgcagcctgatcgggtggtgatcgcaaatggacctgcatttggttgtgtgctgatgaaggatttccttaaggcacttgcaaagcgcctcaagcacaacaatactgcatatgaacattaccacaggatatttgtccctgaaggacatcctttgaaggctacacccagagagcc

SEQ ID NO: 6231 - DNA, 431 bp, Glycine max
caaataccattcaactcttgtcatttttttcactttctctttttcaaaatactcttagtctctctctaaccttcttccagttgtctctaaacctcttgaaatccgtgatggataccaggataggttcactcgacgcggccaagcccgcctgcaacgacgtcgtatcgtgcaaccacaccaccagcgccgccatccagccctgcgtgccggcgacggtgatcaacggcgccggcggagactccactttaggcggccacctggcacgccggctggtcgaaatcggcgtcaccgacgtgttctccgttcccggggacttcaacctgacgctgctggaccacctgatcgcagagccggcgctgaacctggtcgggtgctgcaatgagctcaacgccgggtacgccgccgatggctacgcgcgcgccaggggagtc

SEQ ID NO: 6232 - DNA, 942 bp, Glycine max
cctaaagggaggagaaaagaaaagttttttaagggagaaccatgaaaatcggagacaggaagaagaagaagagcatccccagcgacgaatgaatgggcaattgcggaagcagagaggaatctgccgtagtttccaaggctcaaggtctcagatctagggctctctgtttcataattaattactctcctcactcactcgcattctttcttctttacttgcttcagttgttcagcagcttcaccatgcgacgtcgttgggcgccagtgccaggaccgacaagaagcacgctcacaggcacaatctcagcgagtgcgcttcggatctcagcgagtcctgttccacaccgcgcggtaacaatagcagcaacacgctgctctacacgcacgtcatcgctttcacgctctacgagttggagaccataaccaagagcttccgcgccgactacatcctcggcgagggaggcttcggcaccgtttacaaaggctacattgatgagaacgtcagagtcggactcaaatcgctccctgtcgctgtcaaagtgttaaacaaagagggtttacaaggacatcgagagtggcttacggaggtgaattttctagggcagctgaggcatcctaatctggtgaagttgattgggtactgctgcgaagatgatcacaggctgcttgtgtatgagttcatgtttcgagggagtttggaaaatcacttgttccgaaaggcaactgtccctttatcatgggctacaagactgatgattgctcttggagcagccaaaggacttgcctttctccacaatgctgaaaggcctgtaatctatcgtgacttcaaaacgtctaatatattattggactccgactatacagccaaactttctgattttcggatagctaaagcaggaccacaaggtgatgaaacccatgtatccacccgagtgatgggtac

SEQ ID NO: 6233 - DNA, 553 bp, Glycine max
gtgaacaataggggagaaccaggcgaacatgacaatctgctcctcggagaaaattgctagtagtaccccacaaccaccatcaccaccatcaccaccaccaccaccgccaccgccgccaccgcaacaacaattgctccgacgacgtcgtttcctctctccaccacttgaatgaatgggcaattgcggtaccagagaggaatctgctgtggtttccaacgctcaagttgttcagcagcttcaccatgcgacgtcgttgggcgcgagtgcgaggagccagaatgcaggtagcgagaagaagcacggtcacggtcacggtcacaggcacaatctgagcgagtgcgcttcggatctgagcgagtcctgttccacaccgcacggttacaatagcaacaacacgctgctctacacgcacgtgatcgccttcacgctctacgagttggagaccataacgaagagcttccgcggcgactatattctcggtgagggaggcttcggcaccgtttacaaaggttacattgatgagaacgtcagagtcggactcaaatcgctccct

SEQ ID NO: 6234 - DNA, 413 bp, Glycine max
cggctcgagaaagattgggaagggagaagcatgaaaatcggagacaggaagaagaagaagagcatccccagcgacgaatgaatgggcaattgcggaagcagagaggaatctgccgtagtttccaaggctcaagttgttcagcagcttcaccatgcgacgtcgttgggcgccagtgccaggaccgacaagaagcacgctcacaggcacaatctcagcgagtgcgcttcggatctcagcgagtcctgttccacaccgcgcggtaacaatagcagcaacacgctgctctacacgcacgtcatcgctttcacgctctacgagttggagaccataaccaagagctttcgcgcccaataaattcctcggccagggaggcttcggcaccgtttacaaaggctacattgatgataacgtca

SEQ ID NO: 6235 - DNA, 1264 bp, Glycine max
ctattattaagcgtccaatggatttgggaacagtaaaaagcaagttagctgctggagaatatgctggtccactggaatttgctgatgatgttaagcttacattttcaaatgcaatgaactataatccgtctgggaatgatgtccatctcatggctgataccctcaataaatattttgagttgagatggaaagcaattgagaagaaactgccaaaaagtgatgttctgccaatacctgcaaagccacacaatagtgaaggtgtaaaaactagaagacaagcgcctccttcaaaaaagaggaaaattgcctcattaccccctcaacctaaagttatgccacctacaaagaaggttatgtcggatcaagagaagcatgatctaggtcgagaattggagtctcttctgggagaaatgcctatgcatatcattgatttcttaaaagaacatagttcaaatggtagagaatgtggagatgacgagattgagatcgatattgatgatctcagtgatgataccctgttcacattacgaaagcttttggatgactttttgcaagagaagcaaaagaacaaagcaaaagttgaagcatgtgaagtagaggtgttgaatgattctggaccaagcaattcctcattgcaaccatttaaaggtaatgatccagcggatgacgaggtggacattggtggaaatgagccccctgtgtcaagctattctcatgtggagattgaaaaggatacaacttacagagtgaacaaaagcctaagcccaggcagctcaaatgatacagactctgatagttcttctgatagcgaagccgatgatgttaaagcaagaccagcaaatgcagcaaaggcaccagaaaatctgggttctgaagctcagttggatgaaatgaccatggctgctgctagtcctgaaagaaatcaatccgttagtggcttagatcaacttgatgataactcccagcataagccaagttcctttgattccgattgccaacaagatggggacagtgctgccaccgagagacagttcccccctgataaactttatcgagccgccgtattgaagaaacgatttcttgataccatcttgaaagctcgagaaaagacactgacacagggtgaaaagggggatcctgagaaattgcgccaggaaagggagaaactggagatggagcaaaagaaagcagaaaaggctaggctacaagcagaagcaaaggcagctgaagatgctcgaaagcaggcagaggaagaagctgctgc

SEQ ID NO: 6236 - DNA, 393 bp, Glycine max
  unsure (1)..(393): unsure at all n locations
ctcgagccgttctctccatttgtccttgaatataatactcagcatggctaagcttgttctttccctttgttttctgcttttcagtggctgctgcttcgctttcagtttcagagagcagccacagcaaaacgagtgccagatccaacgcctcaatgccctcaaaccggataaccgtatagagtcagaaggtggcttcattgagacatggaaccctaacaacaagccattccagtgtgccggtgttgccctctctcgctgcaccctcaaccgcaacgcccttcgcagaccttcctacaccaacgctccccaggagatctacatccaacaaggtagtggtatttttggcatgatattcccgggttgtcctancacatttgaagagcctcaacaaaa

SEQ ID NO: 6237 - DNA, 1493 bp, Glycine max
  unsure (1)..(1493): unsure at all n locations
atcacagcctagtcttcccagtctttactttgctctttgcacctcagcacagtttcccatcgaaaactagcccatctttttccctcgtaccttttgcttcagcaacaacaacatcgtcgtcacaaatctagagatagatagatagatagagagaaacggttgaattgaagatgaaaatcactgtcatgactgctgatgaacaaatcatcacgttagatgtggatccccacgaatctgtggaaaacgtcaaagcattgctcgaggttgagacaagtgtgcctcttcaacaacagcagcttctgtttaatgggaaggaagtgaggaattctgagaagttgagtgctcttggtgttaaggatgatgatttgctaatgatggtgtctggtgctggcgctactgcttctagtggatctacgaatgatttgagcttaaatgctgatggatctgctgtcaaccctggttctttccagcagcacattagacatgattctaatttgatgagtcagctctttcagagtgatccagagttggcacaagctattttagggaatgatctgaacaaattgcaggaagttttacgattgcgtcatcaccaaagagatgaattaaagcgtcagaaggaagaagagcttgctcttctttatgctgatccttttgatgttgaagcacaaaagaagattgaagctgccatccgccagaaagggattgatgaaaattgggctgctgcattagaacataatcctgaagcttttgctagagtggtcatgttgtatgttgatatggaggttaatggtgtcccattgaaggcatttgtggatagtggagctcagtctaccattatatcaaaaagctgtgctgagcgtcttggattgttgagacttttagatcagcgttacagaggaattgctcatggagttggccaatcagaaatattgggtcgtatacatgtagctccaatcaagattgggagtatattttacccttgctcattcttggtgctggattctcccaatatggagtttctctttggactggatatgctccgaaagcaccagtgtataattgatttgaaagaaaatgttttgcgagttggtggaggagaagtttctgtgccatttttgcaagagaaagacataccatctcggtttctagacgaggaaaagtatgctaaggaagcttcaggctctggtggtcaaatttcatcaggcagcaataatccatcaacaggaggccactcttctggtggagcttctggtgataaggctaaggattctgagtttgaagccaaagttgcaaagcttgttgaattgggatttgaaagaaatgcagttatacaagctcttcaattattcaatggcaatgaggaacaggcagctgggtttctttttgggggctagaaacaacgtttattttggaaattgattgatttattacttgaaacaatttttacttttagccaattcaattacaaattctaaattatagacccaana

SEQ ID NO: 6238 - DNA, 443 bp, Glycine max
cccacgcgtccgctcggctcagcacagctaccatcgaaaactagccaaggctctgtctttttccctttttccttttgcttcaacaacatcgtcgtcacaaatctagagacagagagagagagagaaaaaaaaaactgttgaattgaagatgaagatcactgtcatgactgctgatgaacaaatcatcacgttggatgtggatccccacgaatctgtggaaaacgtcaaagcattgctcgaggttgagacaagtgtggctcttcaacaacagcagcttctgtttaatgggaaggaagttaggaattctgagaagttgagcgctcttggtgttaaggatgatgatttgctgatgatggtatctggtgctggcgctggtgctgctgcttctagtggatctaccaatgatttgagcttaaatactgatggatctgctgtcacccctg

SEQ ID NO: 6239 - DNA, 617 bp, Glycine max
gtttttctcgtgtatgcccaaaaagttcccaattttccatccaattctgcatgaaccatagattcacgcaagcaaaaaaacacttttcttttttctttgcctccggaattggagcaccgccatatccggtcgcgtgtttcctcgttcggggacattgatgattctgcttgttccgccactggctgctgttgtcgtgttccgcttctgggatcaccgcccagtgcctaaaggaacaatcttttggcgctaaattgtggtggggttcctctatttttttctttttttctccaatatgtatagatctggagcaggcatggcttggaacgtgtttaggttctgcactgccctgagaggattaggctcgatcatgatactaatggttcttggggttgtgggtgttacctattacgctgttgtgttgactaattttggacctgccttgtttcttggaggccttgatactcttatctccttcgtggggttgatcttgtttcattgtttgggggccttgttattgtggtgttactttgctgttgtgtttatggatccggggactgtgcctcctaactggaagcctgctgctgatgaggagagaggagaggttgatccgttgaatg

SEQ ID NO: 6240 - DNA, 1671 bp, Glycine max
ctcttctggatgaattgcttgttgtcatttcttttgatggatcttatgtcaattacagacatttggctattctttgtgataccatgacttatcgagggcatttgatggcaattacacgtcaaggtatcaaacgaaatgatactgggccaatgatgagatgctcatttgaagaaacagttgatattctgcttgatgccgcagtatatgctgagactgattacttgaggggagtcactgaaaacataatgttaggtcaacttgcccccattggcactggcgaatgtgccttgtatcttaatgatgaaatgctgaaaaatgccattgagctccaattgcctagttatatggatggtcttgattttggtatgactcctgcccgctccccaatatctggaactccatatcatgaaggcctgatgtctcccagttatttgttgagccccaatttacggctgtctccaactactgatgcacagttttcaccttatgttggtgggatggcattttctcctacttcatctcctggttacagcccatcatccccaggctatagtccctcatcacccgggtacagccccacttcacccgggtacagccccacttcacccgggtacagccccacctctccgactgagagtcctagctctccgggatatagtcctacaagtccagcttattcgcccaccagtccatcctactctcccacatcaccgagctacagccccacatcaccctgcttcagtcccacatcacccagctacagccctacctctcccagctatagcccaacttcaccagcttacagccccacttcacctgcttacagccctacttcaccagcatatagcccctcatctccttcctatagtccgacttcaccttcttatagtccaacttcaccttcctacagccctacatcaccctcttacagtccgacgtctccatcatatagtcctacatcacctgcttacagccccacatcacctggatacagcccaacctcgcccgcgtatagccctacctcaccatcatatagccctacgtcccctagttacaatccgcagtcagcaaagtatagtccttcgttagcatattctccaagcagtccgagattgtctccatcaagtccatatagtcccacatcaccgaactatagcccgacgtcgccatcatattccccaacatctccatcttattctccatcaagcccaacatacagtcccagcagcccttataattctggtgtgagcccagactatagcccaagttcgccccaatttagtcccagtacgggttactcaccaagtcaacctggttactcaccatcttcaaccagccagtacactccacaaactagtgacaaggatgatggaggcactcgctgaggacaacttgaggctggacagaggacttatgctatgctgggatcagacattgagctgttcgagggctattagtttgcattgtattaatcatctgtatcatttgagtctctgttaccaatgttttcggaccagtttgtccaagtatgaattcaaatttcgctttgaacttgaaccttttttgaggcctgtgttgtgatgggtcatcctcttgaaaacatttattccacatgggcatgtaaagttttgacggatgatattggcccctataaaaagatacatttgcaat

SEQ ID NO: 6241 - DNA, 797 bp, Glycine max
aaaaaaaagaggtttattttattacaaataattgctggagaacagtacagcattgaggactggaaatggaagcagagaaatttatttgagtggttccccggtgagaaaacagggtatccaatgttttcacttttaattttgcctataagcaatgtaattggttaatgcaaacaagggagccgcctttggaggatcgaagccagacaattgttccttggcatcctttaacaattcttgagcaaattcctttgacttatctatccccaatagcttgggataagtaaccttatcagccaccaaatccttccccgccgtcttccccaattcctccgacgacttcgtaacatccagaatgtcgtccacaacctgaaacaacaacccaatgcacctagcgaacttccttaatttctcaacctcctcgtcgctcccacctcccactattgcccccaacacaaccgcagcttccagcaacgccgccgttttgtgcacgtgaatgaattccagcgtctccagccccacattcgccaccccctccgaatctatatccaccacttgtcccgccacaagcccttccgtaccgatcgacttcgctaattccccaatcgctcgaaccacgcgtgacggcgacactccctccgtggacgctgccacgtgctcgaacgcgaaggcgaggagcgcgtcgccggcgaggaccgccacgtcctcgccgtagaccttgtggttggtcggctttccgcggcggaggtcgtcgttgtccatacatggcaggtcgtcgtggatgagcgacatggtgtgga

SEQ ID NO: 6242 - DNA, 1303 bp, Glycine max
gtttaaccgcacattttgcacttcgtctccaagttctataataagcagcatttccacacatttctttctatcaaagttgaacaaaactcattttccaactacatttcttccaccaactcataaaatccttcatatctgttcccaaaagcttgtttgtgagaatggcttcgggtgaacagaaattcccacctcaacaacaacaaacacagcctgggaaggagcatgctatgaatccagtaccccaattcactagccctgactacaagccttcaaataaacttcaagggaagatagcattagtgactgggggtgattctgggattggacgagcggtgtgtaacttgtttgccttagaaggtgctaccgtggccttcacatatgtgaaggggcatgaggacaaggacgcgagggacacgttggaaatgatcaagagggcaaagacttcggatgctaaagatccaatggcggtaccagctgatttgggttacgacgagaattgcaagagagtggttgatgaggtcgtgaatgcttatggttgtattgacattctggtcaacaatgcagctgagcaatacgagtgtggaaccgtggaggacatagacgagcctaggcttgagagggtctttcgtacaaatatcttctcctatttcttcatggcgaggcatgccttgaagcacatgaaggaaggaagcagcattatcaacacgacatcagtgaatgcatacaagggacatgcgaaactattggactacacgtccaccaagggggcaattgtggcctatacaaggggtcttgcccttcagctggtgagtaagggaattcgggttaatggggtggctccagggcccatttggacccctttgataccagcctctttcaaggaggaagaaacggcccaatttggagcgcaggtcccaatgaagagagctggtcaacctattgaggttgctccttcctatgtttttcttgcttccaaccaatgctcctcttacataactggacaagtccttcaccccaatggtggaaccgttgtgaatggttaaaccgttggtgatgatgatattcgggatgaatatatgtggcgagagtagtaggccagtgttacgttttgtgtgaatgttttacgatgtgttttaatgcatggctaactcactcaggtcctctctgcactgttagaggtggggcttggaggattatccacttttgaatgtacgagttattagcctaagaaaatgtgtcttttgtagccaattatatgtaaacaagtaaaagtatataataaagatcggtatgtataaggttt

SEQ ID NO: 6243 - DNA, 397 bp, Glycine max
gaagaaacggctcaatttggtgcccaggtgccaatgaagagagctggccagcctattgaggttgctccgtcttatgtttttcttgcttgcaaccaatgctcctcttacataactggacaagtccttcaccccaatggtggaaccgttgtcaatggttaaaccgttgttgatgatattcgggatgaatatatgggacaagagttgttttgtgacttgtagacaagtgttacgttttgtgtgaatgttttacggtgtgtaactcgctcaggtcctctctgtacttttagagttggggcttggaggattatccacttttgaatgtacaagttattagcctaagaaaacgtgtctattgtagccatagatatgtataagagttaaagtatatactaaagat

SEQ ID NO: 6244 - DNA, 589 bp, Glycine max
ggccgaaaccaaaacccaaacccacagcacaatatgctatgctatgctctctaatccgtatccgccgtcacgctcctttccaccacactctccgctctctcttgccgattaaccgtttctcctcctcctcctcctcctccgcctccgccgccgccgccgccgccatggttgctcacgcgaaggacgaggcgtaccttagcgcggcgattccgaagcgcgtccgtctcttcgagaccatccaggcggagcagcgcacgcagcgcctctcgctttcgccggatcctatcaaggtcactctccccgacggcaacgtcaaggacgcgaagaagtggctctcgacgccgctcgacgtggcgcgcgaaatctcgaagaatttggccaacagcgcgctcatcgcgaaggtcaatggcgtgctctgggacatgactcgccctctcgaggacgattgccagctccagatcttcaagttcgacgacgacgaaggccgcgacaccttctggcactccagcgcccacattctcggtcagacacttgagacggagtatggatgcaagctatgcattgggccttgcactacaagaggagaggg

SEQ ID NO: 6245 - DNA, 395 bp, Glycine max
ccaaaacccacagcacactatgctatgctatgctctctaatccgtttccgccgttccgctccttcctaccacactctccactctctctttccgacgattaaccgtttctcctcctccgcctccgccgccatggttgctcacgcgaaggacgaggcgtacctcagcgcgacgattccgaagcgcatccgtctcttcgagaccatcctggcggagcagcacactcagcgcctctcgctctcgccggatcctatcaaggttactctccccgacggcagcgtcaaggaggcgaagaagtggcatacgacgccgcttgatgttgcgcgtgaaatctcgaagaatttggccaacagcgcgctcatcgcgaaggtcaatggcgtgctctgggacatgactcg

SEQ ID NO: 6246 - DNA, 584 bp, Glycine max
gatgtgtgaacaatcgtgaagttttttctttgagaagtaaaagatcttagtgcaagtaattaacatggaatctcagcaagcaaaccgtgaagaacttgatgagaaggcaaggcaaggtgaaactgttgttcctggaggaactggtgggaagagtcttgaggctcaagaacatcttgctgaaggaaggagccgtggagggcagacgaggaagcagcagctagggtcagaggggtatcatgaaatggggaccaaaggagggcagacaaggaaggaacagatggggagagaagggtaccaagagatgggacgcaaaggaggactcagcaccatggacaagtctggtggagaacgtgctgaagaggaaggcatagaaatagatgagtctaagtttaaaattacctaaaaaactaaaaaattgtgaggaagaagtgttttgttgtagttgttttagtgtgtgtgtgtgtgttttttgatgtagtagtgaatatagctaggaaactagctagttctataaaatatatgttttaaagctttagtgctactgtttgttaggaatggtaggtattttaggttaaggaacctta

SEQ ID NO: 6247 - DNA, 520 bp, Glycine max
aaaacataaacgaagaagttagtaatatgtttccctctgagtcactagagaaagagagagggaaatggctttcacgatatccagatctgaatctgctttgaaagatagagagaagaaggagtgtgtaacaacagagggtatgatatcgagccagctttgtcatcgtcgaaagcatcttctcatcaaagcatggacaaacatgcaatcctccgacgcatcaggcaacgcaggtttaataacagagccaaaaccgctctggaagctctcataggcacctcagaagccaacaacaacaccaccactgggcaagaacacttgtggcttcaactgggtgactctttctcttctccttaactcatgaatcacccctcagctacccatctataaataccatccctagatcactacttatgcagctatgaccttgtgaataccacgttcaattgttatataaaaaatgtgtgtattatattactatgatatcatctaatatggaaagtactaagctttgctttgcaaa

SEQ ID NO: 6248 - DNA, 614 bp, Glycine max
aaaccatttcccagaaataaacacgagaaaaaaaatttcacataaaaaagttagtaatatgtttccctgagtcactatatatgtgaacctcaataatcaagtatccgctcttaaagattcagattctcaatagagagaaagagagagaaatggctttcacgatttccagatctcaatctgctttgacagatagagagaaggagaatcttgacaacttagttgacaaggagtgtgcaaccacagagggtatgatatcgagccagctcaagttgaagtcttctttgtcatccaaagcgtcttctcatcaaagcatggacaaacatgcaatccttcgacgtatcaggcaacgcaggtttaataacaaagccaaaaccgctctggaagctctcataggcacctcagaagccaacaataccggcactgcccaagaacagaagtggcttcaactgggtgactctttctcatctccttaactggaaacacaatctccccccagtttgcaacccatctataaataccctctttagtttccttcacccaacaaagtcatcttttccatacgcttgcatggctaggaaaggaaatccaacccgatctttatcggcatgcttaag

SEQ ID NO: 6249 - DNA, 433 bp, Glycine max
cggctcgagagctattgaacttatctctcttctcacttctgttgttataagtaacttccctcatcattacaaaacaatcctccacaggtttcaaaatgctgaaatcgggcatgggaattgaggagagaaagcaagtgaagaagccagcacaagccagctcgagaaaagggtgtatgagagggaaaggaggtcccgagaatgctagttgcacctacaaaggtgtgaggcagagaacatggggaaaatgggttgctgaaatccgtgaacccaatcgaggtgctaggctctggctcgggacttttgagacctctcatgaagctgctttggcttatgatgctgctgcacgtaagctctatggctctgatgccaaactcaacttaccagagctctctatcaaatcacaatctcagtgtccaccaccagcttcttctgt

SEQ ID NO: 6250 - DNA, 551 bp, Glycine max
ggagaaacagatcggttcaaccatggccacgttacagtgcaactgcaattctcttgcactcaacaaacccgggtattccagaagaagaagaagacaatttcttcaaccccttttctcatccactcgttctgtttcaagcaattcaatctgcacaagttccagtgccacaacttcaaggtggggttgtgctgtttctgctgttgtctcagaagagaacgctgttggttcctctttctctgcagctgatgtcttcaaactcacgtatttagagggaaacagttggatctggaatgtgggtgggataaacatattggttgatcctattttggtgggcaacttggattttggaattccttggctatatgatgctgctaagaaagtgttgcagaagttccagctcagtgatcttccggaaatcaattgcttactcattactcaaagccttgatgatcactgccatttgaagaccttaaagcctttctctcagaaattcccagatattagagttatagcaacccctaatgccaagggcttgttggatcctcttttca

SEQ ID NO: 6251 - DNA, 958 bp, Glycine max
cgcatgcacgccttccttaacctcggaattcggctcggctcgagggagttacaaggatcggaagagaggaaggaagtggtggaggagcgttctggggcatactggacgacgttggcgccaaacgtggaggattacagtgggagtttcgcgagatggattgcagcagggtcggggcaagtggttagggggattctgtgggctggggatgtgactgtggacaggttgaagtgggggaatgatttcttgaagaagaggttggagcctggttcacactcccaggttagtcctcaggcactggagagcatcaaaagggttaagaagttgaccaagatgtctgagaaggttgccactggtgtcctctctggggttgtcaaggtgtctggattcttcacaagttctgtagtcaactccaaagctggaaagaagttctttagccttcttccaggggaaattgtccttgctaccatggatggattcaataaggttttggatgctgcagaagtagctggaaggaatgtcatgtccacttcatcagttgtgaccaccggcctagtttcgcataaatatggagaggaagcagcacatgttacaaatgaaggccttgacgcagcagggcatgcgattgggacagcttgggctgtgttcaaacttgggaaggcactcaaccccaagagcgcaatcaagccaacaacactagctaaagctgctgctgaagcaacttcagctagactgaaggctaagaaataaggcacggcaacaaaagaatcaggatccccccagcactctccatatagaattctagtttgtctgtttattgatataatcaatcttcctagtgattaggatttatagttaatgttgacgtttcttttcatctagagttctgtttttattcaagtcctacgccgaatttgcgatattgaattccatttatttttttccccttttttttcttccg

SEQ ID NO: 6252 - DNA, 818 bp, Glycine max
cgttgcgtttcctgacttcacaattcacaatcaatcacatttcaaaggcatgttttttcaacaaagttcattctacccacgagtcgattcaacaaacccagacgctaattctcccttctctatccccgcaccatcttcttcttcttcttccatttatccctcagtggaaacaacagagaatctcatttgggaagagccaaacacgactacagaagaagccatggaaaacgttctggtcacggtcccgggtgcgattctgcatctgatagaaaaggattccagcgtgcaccttgcttcgggcgacctcaccatatcgaccctcggagaaggcgacaaagtggtggcggttctggcatgcgtcggcgatcaggttcagtggccgttggcgaaagacgtgtcggcggtgaagctggatgagtcgcactacttcttcacggtccaggtcccacaggagcacggggaggagaagggattcgaggtgttgaattacggtttaacggtggcggcgaagggacaagagagggtgctgagggaactggacgaggttctggacaagtacagctttctgtcgaaggagaaactgaagggggttggaggttgggaagttttggatggttcagtttcgacggagacatcgccggaggagttacaaggatcggaagagaggaaggaagtggtggaggagcgttctggggcatactggacgacgttggcgccaaacgtggaggattacagtgggagtttcgcgagatggattgcagcatggtcggcgcaagtggttagggggattctgtgagctgctgatgtgactgtggaca

SEQ ID NO: 6253 - DNA, 820 bp, Glycine max
ttcgacgacgcgtgcgcccacgcgtccccacgcgtccgcccacgcgtccgctcgctttatcttcccttcccttcatctccgcttcaaaataatatcctcctctctatctctgttcgaaacaagtccaacaccagcaacacactgcttcaatctcaatcgggcacattgagaaatggttttgagtaatgggaaaactgaggcaccattgccaagtagtaatgggggaggtgctgagattgataacaatgagaagaagcccttcaagatcttcgtagggtatgaccctcgcgaagatcttgcctatgaggtatgtcgccactccatcttgaaaaggtcttcaatccctgttgagatcataccaattaagcagtcagatctgaggaaaagtggtttgtattggcgtgagaggggccagtttgagagcactgagttctccttttcaagattcttgaccccttgccttgccaattaccaaggttgggcaatgtttgtggattgtgatttcctctacttggctgacatcaaggaattgaaaaacttgattgaggacaagtatgcaatcatgtgtgttcagcatgactatgctccaaaggagaccactaagatggatggggcagtgcaaactgtgtacccaagaaagaattggtcttcaatggttctctataactgtgctcatccaaagaaccgtgttctcactcctgacactgtcaacacacagaatggtgctttcctccacaggtttcaatggcttgaggatgcatctatttggatccacccctttttttgaaactttctggggggcataaccgattgttggtat

SEQ ID NO: 6254 - DNA, 1798 bp, Glycine max
gaaagtgcttgacgcaaaggcgatgaagcaacaaaagcaattgttaaggttgtaacttgtatcatcattcatttcatctgtgttgtgttgtacgcgtccgcccacgcgtcgggtgatttccattgccgccaccgattacccaccaactgatatacataacctcttcacctttccctccttccctaatttatcactaaaaaaacaaacaaataaaaaaaaagtccactaagttggggcacgtcacccatctcgcccttcccctcgctcatctcaaatccatgcttcggaattagggtttccattcggatttcgtaagtctggtgcccaatttcgtgactccgagcgacgtaaaaggggaagggaaagggatgaggatttggggatcggagatcgtgttcgccatattgctctgtgggaccctttcatgcaccgctcaagctcatcacatcactgccagcacctgcccggctcgctccatcctcgatttcgtgttagggttttcagatttcacatgccaacttcccaattctcttggatccattgccgtcaccgagggagatgaggtttctttgcagaaggcgctgaatatggttcacaagaataatcatgagtatgtggctgtgctcttctatgcatcctggtgccctttctcgcgggtgtttagaccggttttctctgttctctctgcgctgcacccttccattcctcattttgccattgaggagtcatccgttaggcccagcatattatccaaatatggtgtccatggtttccctacgctgttcattttgaattctaccatgcgggttcggtatcatgggtcccggacgcttggctcactcattggtttctacaatgatgttactgggattatgattgattcacttgatcaactatcacttgagaaaattggtcgttcatctgctgatgagagtcatggtaacaccgagccagaaagttgtccattttcatgggctagatctccagaaaatttactacgtcaggaaacttatttggctctggccactacatttgtggttttgagattactatacttgtttttacctacgctgcttatatgtattcaatatgcttggagaagggtcatccaaaatattagaatagggagcttgttggaacatcctttgatttatttgaagcggctaacacagtcatttaactgtttgaaagagccatgcaagagacgtaatctgcaggaaggagcaatgaatgctagagcatgggcttccaagtcccttgccaccgtttcaattggagaggaaagcagcagccgtgggatgcatctgtgagttgactgtactgtgcaatttttcttgaaattggagattagaatataacctataaaaggcttggctgcaagttatgccatgtacttttgtttcaggatcatcttcacaccctctggcctcgtgcttagtggggtcaattatgttactgaatgatgtaaacgtcccttatatgttcatatgatcaagaaatacttcattcagcgttctagaagattgagacttcaatgtgtatagtttaaatgtagcaaactcgagctgaaatctgcaatttctttgacttgtacgttttcttgagggtcaaatcttttgttcgtcagttcttgaatttatttttgttgggactgaaatggttgtaaatcccacataaaactgattggatgcattgttgatgtactcggtgcgtggttatttgtggttcaaaaatcattccatggtggtaatctgtttcaaaatctatcgtaatctgttttaaaaaaaaaaaaaaaaga

SEQ ID NO: 6255 - DNA, 854 bp, Glycine max
aaaacaatgggttgtgctagctgatttgtgaatgagattggatatcaatgccagctattccaaatccaatgtactatgcgtgaagaagcatctatccatcggatatcaatgctttgctttggtttaatttggttccaagttctttgcctatatatatataagtccaacactgtcggtgtgcatgtgcgttcaccgctgaatcctagctttatcttcccttcccttcaaaataatatctctgttccaaacaagtccaacaacacactgcttctatctcaaacgcacatcgagaaatgagtttgagtaatgggaaaaccgaggcaccattgccaattagtaatggggatgagaagaagccgttcaagatcttcgtagggtatgaccctcgtgaagatcttgcctacgaggtatgtcggcactccatcttgaaaaggtcttcaatccctgttgagatcataccaattaaacagtcagatctgaggaaaagtggcttgtattggcgtgagaggggccagtttgagagcactgagttctccttttcaagattcttgacaccttgccttgccaattaccaaggttgggcaatgttcgtggattgtgatttcctctacttggctgacatcaaggaattgcaagacttgcatgagggcaaggactgtactgtgcgagttcagttcgagtattgggcgattggaacactcacctatgaaaggcttggctgcaagttatgccatgtacttttgtttcaggatcatcttcacaccctctggcctcgtgcttagtggggtcaattatgttactgaatgatgtaaacgtcccttatatgttcatatgatcaagaaatacttcattca

SEQ ID NO: 6256 - DNA, 693 bp, Glycine max
ccctcgcgtccggggttgtgctagctgatttgcgaatgagattggatatcaatgccagctattccaactccaatgtactacgcgtgaagaagcatctatccatcggatatcaatgctttgctgtggtttaatttggttccaagttctttgcctatatatatataagcccaacactggcggcgtgcatgtgcgctaccgctgaatcctcgctttatcttcccttcccttcatctccgcttcaaaataatatcctcctctctatctctgttcgaaacaagtccaacaccagcaacacactgcttcaatctcaatcgggtacccttctctttttctcttcaccttttaatgttttttgtttcggtctttttagaaaaattaactagattattctttgacattgcattacatcaattgggtgatcttgggtgtggaaaaagattagatttttgcccttgcttttctatggttttgtttagagccaaatgggtatgtgtgtgcttgtgaatttattttcattgtcatatttgtgtttgatttgttgcatgacaggcacattgagaaatggttttgagtaatgggaaaactgaggcaccattgccaagtagtaatgggggaggtgctgagattgataacaatgagaagaagcccttcaagatcttcgtagggtatgaccctcgcgaagatcttgcctat

SEQ ID NO: 6257 - DNA, 577 bp, Glycine max
aaagttttatcatcattctttcatctgtgttgtgttgttttgtgtgtgcaatcctcattaccattgccgccgccaccaccaccgcctatcaccctctcatccaccaactgatacccgtaacttcttcaccttcctctccttccccaatttaaaactaaataaaaaaactgtccactaaggttgaggcacgtcaccatctcgtccttcccctcgctcatctcaaatccatggttcggaattagggtttccatttggatttcgcaattctggtgcccgatttcttgactccgagagagggaaaaggggaaagcgatgaggatgaggatttgggtattggagatcgtgttcgccatatttctctgtgggaccctctcatgcaccgcccaacctcatcataatagggtttctctctcaaccaccacaagtatctgtcccgccggctcccttctcgatttcgtcttagggtttccagattccacttgtccccttctcaattctcttggatccattgccgtcatcgagggagatgaagtttctttgcagaaggctctgaatatggttcacaagaataatcatg

SEQ ID NO: 6258 - DNA, 355 bp, Glycine max
tgtactacgcgtgaagaatcatctatccatcggatatcaatgctttgctttggtttaatttggttccaagttctttgcctatatatatataagtccaacactgtcggtgtgcatgtgcgttaccgctgaatcctcgctttatcttcccttcccttcatctccgcttcaaaataatatcctcctctctatctctgttcgaaacaagtccaacaccagcaacacactgcttcaatctcaatcgggcacattgagaaatggttttgagtaatgggaaaactgaggcaccattgccaagtagtaatgggggaggtgctgagattgataacaatgagaagaagcccttcaagatcttcgt

SEQ ID NO: 6259 - DNA, 404 bp, Glycine max
gttgcgttgtgtgtgccattcccatttccgccatcgctaccgccagcaccaccgatcactctctcacccaccccaactgatacccgtaacctcttcaccttcctctccttccctaacctaatttaaaactaaaaaaaacacaaacaaataaaacaaatgtcccctaaggttggggcacgtcacccatgcttctgaattagggtttccatttggatttcgctgttctggtgcccaattgagcgacgcaaaagggtaagaggaaagggatgaggattatggtttggggatcggagaatcgtgttcgccatattgctctgtgggaccctctcatgcaccgctcaagctcatcataatagggtttctctctcctccaccaccgccatctgtcccgctcgcccccttct

SEQ ID NO: 6260 - DNA, 531 bp, Glycine max
gagcattgcatagggagggattattttattccctccattggccgtagtagcagcgttgtgtggcggtgacaaccatggccgactcatctcaagaccttgaccaacttctcgatagtgctttggatgattttcagtccttcaacctcaatcctccccctccaagtggggaagcaactgcgaatagcaagaaggagagtccttctttgccgtcgggggttcaaggattgggcatgggtttacccgatttgagaacgaagaaaaaggggaaacagaaggcttccaaagacagccacgtgtcggaggcgctcaacaagctcagggagcagaccaaagaggctgtgaaggggctggagtctatatccccacccactgccgatgatttaggtaaggatgccttgatggaagattgggtcaaacaatttgagcagcttgctggctctcaggacatggaatctattgtggagaccatgatgcatcaacttctgtccaaggagattcttcatgaaccaatgaaggaaatagcagaaaagt

SEQ ID NO: 6261 - DNA, 515 bp, Glycine max
tgatttagaagggggttaagaacataacgaagccacgcatgataataacaatacccttcttcgtttcttccctctccactcggcactcacaattctcaacccaaccaccccctattaaccctcaccgcaatctctgattcgatcttcttcaatttcggggtttcccatataccacaaggcataggcctgtgtgaatttgcgatatgctgggtaattgtcgccaagacccaatctcttgggtactcctttaccaacccccaccgccgcattaattgtttttctattggaatcggacaaaggttccactgcgactgaaactttcaaaggccaaaaaatgctcgattcggtccttctggcgcttttcttgccgtgccttggcatgagcggggtttttatcgtctacatgtgccttctttggtacgccaccacccggcaccaccagcaaccccccatcgacgggcaaccggtgaagcccgtcgctgacaagggtctatccgctctggagttggagaagc

SEQ ID NO: 6262 - DNA, 427 bp, Glycine max
gaagtgcgttagaacagaaaagaagtgcaaacaaggcgcacataataatagtacccttcttcttcgtttcttagctctccactcgcctattaaccctcaccggaatctctgattcgatcttggttttcccatatagcacaagacatagagccgtgtgaatttgcgatatgctgggtaattgtcgccaatacccaatctcttgggtactcctttaccaacccccaccgccgcattaattatttttctcttggaatcggacaaaggttccactgagactgaaactttttaaggccaaaaaaatgctcgattcggttcttctggcgcttttcttgccgcgccttggcatgagcggcgtttttatcttctacatgtgccttctatggtacgccactacccgcctaaaccaaccccccattgacggtcaacc

SEQ ID NO: 6263 - DNA, 1005 bp, Glycine max
gtgacctagagaagtggctagtgctgtgtatatgaagtacttgtgtttcgctacctctactttcttctctttttgttcgcttcggctccgttaggttttccttccgcgtgtttgctcggaactactcctccactcatcgtttaaaatgtctgacgtggaagagtttcgttgcttcattggtggccttgcatggtcaacgtctgatagaaagttaaaggatacatttgaaaagtttggcaagcttattgaggcaaaggtggttgttgacaagttctctgggcgttctcgtggttttggatttgtcacatttgatgacaagaaagcaatggacgaggctattgatgctatgaatgggatagatttagacgggcgaactattactgttgatagagctcagcctcaacaaggatcaactagagatgatggtgatcgttaccgggagcgtggtcgtgatcgtgatcgtaaccgagattatggaggtggaggtggtcgaggatctaatggtggtgaatgctttaagtgtggaaaacctggtcattttgctagggaatgccctggtgaagggtccaggggaggaaggtatggtggtagggaaagtagatatggtggaagcagtggtggtggttatggaccggatagaaatgcagatcgttcttcaggggggcgcagcagggatggtggtagtcatggggattctggaagtgatcgatattatcgtgatcgttcaggaccatatgagcgggagcgacggggatcgggaggctttcgttgatataatatagtctttcaatgagatatgaaattgaagaggtcgctgttaatgtttcaactttccttttcatttgcacttgacaatgctctttggacttctgggattgttgtttggatggatcattgataccagtattttgatatgcaatactccccacattatgcaaactctttatgttcctaaatgctgatcttttggtctagtgaaatcttatgcatgcttgacttgcggtc

SEQ ID NO: 6264 - DNA, 286 bp, Glycine max
ctcgagccgaatcggctcgagaaacagagaaaggtaaagaaaaagggtcttctgtgagagcaatggatgagcttgttacaaccattttatcacccaaggttctgtgatttgttgcatttagaatttaggatttgaatgatataataaagttgcttgtgtgagcatacttgtcataaactgctcaccaatctttaacataagactgagtctttgacagtgtctgtatgaagatcatttccagaatttgctctgattatttaaaatctttttctacttgatgttgctc

SEQ ID NO: 6265 - DNA, 725 bp, Glycine max
  unsure (1)..(725): unsure at all n locations
gttcatcaatcatcatcaccaangttgagagatggatgacctcatatatataacaattaaaatttaagaccccatttttgatagtccacagaaacaaaaccagcaggttctgtctgtctgtcccattcacaacataccaacaaaaagtttcaatgagcacacatggttcttacagcatgagatccaaaggctcctttgaaaatgaagccaaggcaacagggaaagaaagtgggggaggaggcggtggtggaggtggcaagagtggaaagacaatgtccaccaacagcaaggagaatctgttcatagtttttctggtgacactttggtactcttcaaacattggtgtgatccttctgaacaagtacctgctctcaaactatggattcaagttcccaatcttcctcacaatgtgccacatgtcagcttgtgctgttctcagctatatctccattgtgttcttcaaggtggtgcctcagcagatgatcaaatcaaggtcccagttcatcaagattgcaactttgagccttgttttctgtgcctctgtggttggtggcaacatttctctcaggtaccttgctgtgtcattcaaccaggctgttggggcaaccacaccctttttcactgctgtttttgcctatttggccaccctcaagagagaggcctgggttacctatggtgccctggttcctgttgttgctggagttgtcattgcaagtgggggcgag

SEQ ID NO: 6266 - DNA, 1040 bp, Glycine max
acagcacatcaatacatcttcaaattcccctcttctctctctcacatctcttcgtcctctctctcacatcacaatttcataaaaaacctctttttaagtttcttgcttctttctctctgaaagaaaattgaagtcctaaccagttggctcttttgttttatcgttctccatggctcagaaaaccgagaaagaagaaaccgacttcaaagttccggaaacgattacgctttgcgtcaacaactgcggcgtcaccggaaaccctgccacgaataacatgtgccagaagtgcttcactgcctctaccgccaccacttccggcgccggaggtgccggaatagcttctccggcgaccagatccggcgtctccgcgcgtcctcagaagagatcttttcctgaagagccctcgccggtggcggatcctccttcttcggaccagacgacgccgtcggaggcgaagcgcgtggtcaaccgctgctccggatgccggaggaaggtcggactcaccggatttcggtgccgatgcggcgagctcttctgcgccgagcaccggtactccgaccgccacgactgcagctacgactacaaagccgccggaagagaagccatcgcgagggagaatccggtgattagagccgcgaagatcgtcaaagtctgaaaaaaaacaaaaaagaaggaaaaaacccgaacggaacggaatctcaaaacgacgtcgttgacggttgacctttcgcgcgatcgggttcaggtcacgggtttcgctttttttcttttcagatttatatatagagagaagaaaaaaaaaggtagcagataacaggtttgagagagagagagagagagtgtgaggttttagattgagagagagagcgagagagagagattgttgctgaaaagaagatgaagaagaatttatctgaatttctcttgtgttcatcgatcaaactctgatcgtttaatttttttttaaattttctcttctaattttatgtttaatttcttcctgatttgatcttgaaatgataaattattgttgtttacca

SEQ ID NO: 6267 - DNA, 686 bp, Glycine max
aacttatccaaacggattttacgtgagatggagcgacccgcttacccatggtacctgtgagacaagaaagggggcagtagaggcaaaactgcaagcaaaacggacccccacttgaacaatttggtaatttccgctgccacaccaccaccaaagaaggaaataaaatttgatacgcgtctctatgaggcccatatttcattcctattaccgaccttacagcacatcaatacatcttcaaatccacctctcatctctctcgccctctctctcacatcatcaccatttcacctatttttctctctctctctctctctctctcgcatcacaatttcatcaaaaccttttaagtcttcatagttttccttctttctttctttgtgaaaaaacaaaaagtccaaaccatggctcagaaaaccgagaaagaagaaaccgacttcaaggttcccgaaacgattacgctttgcgttaacaactgcggcgtcaccggaaaccctgctacgaataacatgtgtcagaagtgcttcaccgccttcaccacctctaccgccaccacgtccggcgccggaggtgccggaatagcttctccggctaccagatccggcatctccgcgcgtccactgaagagatcttttcccgaggagccctcgccgccggcggagcctccgtattaggaccagacgaccccg

SEQ ID NO: 6268 - DNA, 545 bp, Glycine max
aaactgtgaacccgttcaattatatttcaactcctgttgaatcatcagtttaactcgttttgaattatgatccaaacccctgttcagtctctgttcggtttttgaaacattggttttctgtgcattgtgcgaaccacagacctttagtggcttatgataacaatctaagcgaaaaataaggcacaagctagtttgcgattaaagtaataagatagtgggacacttggatggataggaaggatctgtataggtctctgcaagaaaatgttaggagactcgaggcaggtgaatgactatatagtttaggttgtacatagaaatctcttgcaggaaaatgcaatttgcatccaaaggggactacccagttgcagaaagctcctgctgcatggatactattactcttttgaagggaagaatggccaaacgacatatctctgccttacccatctcaatttgtctttgttcatcctctactgtgggaaaatgctttggaaccagttttgatgttgttaaagcttaatgtgggatatcccttttgtattatt

SEQ ID NO: 6269 - DNA, 521 bp, Glycine max
ggaaaattgtaaactaacctttgtcaattgtccattatctgcaaagttttaaaaatcggtgtttaattggacaaactgtgaacctgttcgatcatatttcaactcctgttggatcatcaatttaactagtttcaaactatgatccaaacccctgttcaatctctgcttcagtttttgaaacattggattgttgtgcattgtgataagaaaccaagccaagagtaaggcagaatgtagtttgcggttaaagtaataagatagttggaaacttggatggataggagtgatctatataggtctctgagagataattttaggagacttgatcggttctggttctacgtagaagaagtctcttgcaggaaaatgcaatttgcatcccaaggggaccacccagttgcagaaagctcctgctgcatggatactattactctattgaagggaagaattgccataccagtagatctctgccttatccatctctgactattcttgtacacccattgggaaccaaattacac

SEQ ID NO: 6270 - DNA, 613 bp, Glycine max
gtgaagagttccctccagcacagtgaagatgggacagcttgggctttccgttagggatcttctgatcatattgatccggatagtgttccttctgatgggtctttcggttcaacctcatacaccgtgtcgtaggtaccattccaagcttggtcaggtcccagtggttatactgctagcattagtgtcacaaagcggaagaaacacactgcaggtgatgcactggatttatcaaaaccatataaaggtgccctcaaggataaggttaaaggaaagaaatacgtagcttagatatttagtacattcttgtagagtcaaattaagaaagaacctgtccctgctgcctcatttttggtgctggagtccaactgcttaaaaatatgtcatgctacatgcttgcttcttaagttaactccttatcaaggggtagaaccatttccccccattttaaaaccttcattttttttcatagttttgatctatttattggatttcatttagatagaggtttctctaggggggggcttcctaagtctgttgctattatagagaattactgtgatgtacatcgtgatttttttgttttcatactcgtgtcaatatctgaattcttttt

SEQ ID NO: 6271 - DNA, 545 bp, Glycine max
gcctcattacacatcttccaagcttcagagcgcgcaaacaacacttcctctcagacatggcatctcaaggtttgtgtccttcgataaaaaatattcttcttttggactctgaagggaagcgtgtggcagtcaagtattactcagatgactggccaacaaacaatgcaaagttagcttttgagaagtttgtatttactaagactgttaagacaaatgctcgtacggaagctgaggtaacactacttgagaacaatatcattatttacaaatttgtacaagacctgcatttctttgtcactggtggtgaagatgaaaatgagctcattctagcatcagttcttcaaggtttctttgatgcagtcacccttctgttgaggagtaatgttgacaaaagagaggcacttgagaacttggatctcattctcttgtgtcttgacgagattgttgatggagggatgatacttgaaacaaatggacctcttattgctgaaaaagtgacatttcatagcttgatgctgatcccccttgcagagcagacataactc

SEQ ID NO: 6272 - DNA, 366 bp, Glycine max
acgcgtcagagacgacagaaggggctcattacagatcttccaaacttcagagcgcaggcaaacaacttcttctctcagacatggcatctcaagatggtgtgagaaaatgaagctgtgttgcacacattctgcttgcatttgctttcatggaggagaagcttctgatatttgtgcaagggaagcgtgtggcagtcaagtattactcagatgactggccaacaaacaatgcaaagttagcttttgagaagtttgtatttaccaagactgttaagacaaatgctcgtacagaagctgaggtaacactacttgagaacaatatcattatttacaaatttgtaacagacctgcatttttttgtcactggtg

SEQ ID NO: 6273 - DNA, 625 bp, Glycine max
aaaacctagaagaaggtattatggccgcagcagcagcagcaaccactctctcctcttccctttccaaaccctcctctcttactttccaaacccactctttccccataaccctacccactccccctcgcgccgccgccaaaccccctcttctcgtcttctccaaaaacccaatttccgacatcgtctcctccaccttctcacgcgccgaagaaggcgcgtgggacgacgagaagccgcgcgaggagtgcggcgtggtcggcatatacggcgaccctgaggcctcgcgcctctgctaccttgccctccacgcgctccagcaccgcggccaggaaggcgccggaatcgttacggttcacaacaacgtcctccaatccatcaccggcgttggtctcgtttccgacgtgttcaaccagtcgaagctggaccagctccccggcagcctcgccatcggccccgtccgctactccaccgccggccaatccatgctcaaaaacgtgcaacccttcgttgccggctaccgcttcggctccgtcggcgtggcccacaacggcaacctcgtcaactaccgcaccctccgaaccaacctcgaggacagccggtccatcttcaacactacctccgacac

SEQ ID NO: 6274 - DNA, 417 bp, Glycine max
gttcttttttctctttttggtctaagcaaaccaccccaccatggcagcaagagcaacagcaatctttaacactccctcctcctcctccttcttcacattcacactctttctctctctctctctcctcctccaactttctctctcctccccctctccctccatccacgaccttctccgctccaaaggcttgccccccggcctcctcccagaggaggtgaaatcctacagcttctccgaaaccggccacttggaagtcttccttgacgcgccgtgcctgaccaaatacgagaacagagtcctcttcgagcaagtcgtcaccgccaacctcacctatggaagcctcataggagtggagggtctccagcaagaggagctcttcgtgtggctacccgtcaaggacataatcgcaaatgaccc

SEQ ID NO: 6275 - DNA, 440 bp, Glycine max
gcgtcacaagaaaaaaagaaaactccccttaaacccccccccttcatgttcttttcttttctctttgtgcgctaagcaaaaacgcgaccggctccgcaccacaccaccaccatggcagcaagagcaaaaactccccttaacactctctcctctttcacattcacactctttctctcattctctctcctccaactttctctctcctcccccaccaccatccacgaccttctccgctccaaaggcttaccaccggggctcctcccggaggaggtgaaatcctacaccttctctgaaactgggcacttggaagtgttcctggacgcaccatgcctcacagaatacgagaacagagtcctcttcgaacaagtcgtcactgctaacctcacctacggaagcctcataggagtggagggtctccagcaagaagaactcttcgtgtg

SEQ ID NO: 6276 - DNA, 598 bp, Glycine max
  unsure (1)..(598): unsure at all n locations
ctcattcgtactcaatagcttccttttcagcactttcactatagtatactttctgaacctctgagaatgacttcttcctcttccgcactcgttcttctgctcgcggcgattttcgtcttctccggcgtcgcacaatctccggcgtcgtctcctgagtcccctgctactccaccgaaagccgccactccctcgccttcttcgtccaagtctccacccgctgtttctccgacaccttcaccttccggcgggatctctccgccatctcctccttctttagtaccggcgtcttctccttcatcgatctcttcccctccgtccgatgctcccgcaccgtccgagaatgccgccgtctcgaatggattcgccgccgccggatctgtcgtagtcggtctcgtcgctgccgcctcattgatcatgtgaaccgccgcataggcttatatagaaaatttattatctcctaataaattattctccttatttttgagtttgttatggtttttttttttttcatttagagtttgtataagacgcttagtagtatatcattntagctctatttttattcgcctaataaatttattatttaattcaccttatt

SEQ ID NO: 6277 - DNA, 557 bp, Glycine max
  unsure (1)..(557): unsure at all n locations
ctgtaatttacaatttatattctcaacctctgagaatggcattctcttccactctacttcttctgctcgtggcgatgttcgtcttctctgccgtcgcacaatctccggcgtcgcctcctgagttcgctgctgctccaccgaaaaccgacactccctcgccttcttcgtccatgtctccacccgccgctgctccttcaccttcatcctccgtcgtgagctctccgccgtctcctcctacttcagttccggcgtcttctccgtcgccttccatctctccgtcgtcgatctcttcccctccgtccgatgcccccgcaccgtccgagaatgccgccgtctcgaatggattcgccgctgtcggatctgtcgtagtcggtctcgtcgccgccgcatcgatcatgtgaaccgctacataggcgtatatagaaaatttattatctcctatatattctccttattttttttttacttttttatagttattattttttcatttagagttttatatctggagaatttcgagtttgtatangacaagcgatttaccttggtagtttttc

SEQ ID NO: 6278 - DNA, 532 bp, Glycine max
cacgcttcggtctatcccaatggatggaacttttaatcagctccgaccgttcgttggatagatgaaaaggtttcagtaaggtttattcttttgacttgaagtctgccaccgataggtggcctctcagtctgaagactcaccttattagaactttatttggtaagtctgttggagattgtttagatgcaatcttcagcagatctatgaagtaccctttcttcgctcagttcgaggtgtcgtattctttagagtaggacaacctcttggctttctgtcttcttggcctctcttcactttaacacatcacttagtgatgttttattgtgcagagaaggtgtacccaggacagcgctttactaggtatgccattcttggagacgatgtttgtatcgccgacgagaatgtggcctctctttatcgccagacagtaaatgatctaggtctcgcaataagaaagggggtgagataggcgacaggtagcttgcttccaagccggcccggccgcgaggaagagatctttgccggtgctgac

SEQ ID NO: 6279 - DNA, 1058 bp, Glycine max
cactgactctgtctctctcgaacacaatgtccaactccaccaccggcaccaccgcggccttaccaccgaagcccacctgggtcctcccataccgaaccgagaatctccgcgaggtctacaccctaagccgaaagctcggccagggccaattcggcacaaccttcctctgcacgcacaacgccacgggacgcaccttcgcctgcaagtcaatcccgaagcggaagctgctctgcaaggaggactacgacgacgtatggagggagattcagataatgcaccacctctccgagcaccccaacgtcgtgcgcatccacggcacctacgaggacgccgcctccgtccacctcgtcatggagctctgcgagggaggggagttgttcgacaggattgtgcagaaggggcactacagcgagcgacaggccgccaagctcatcaagaccattgttgaggttgtggaggcctgtcactcgcttggtgtgatgcatagggacctcaagcctgagaactttctgtttgatactgtcgaggaggatgctaagctcaaaaccaccgattttggcctctccgtgttttataagccaggtgaaaccttttgtgacgttgttggaagcccgtactatgttgcaccagaggtcttgcgtaagcattatggtcctgaagcagacgtgtggagtgctggtgttattttgtacatcttattaagtggggtgccaccattttgggctgaaacagagcaggggattttccgacagattttgctaggaagactagatttccagtctgagccatggcctagcatttcagacagtgccaaagatctaattcgaaaaatgcttgatcggaatccaaaaacaagggttacagctcaccaagtactctgtcacccttggattgttgatgacaacattgcaccagataaacctcttgattctgctgttttatcacgcctgaagcagttctctgcaatgaataaacttaaaaagatggctttgcgtgttattgcagagaggctctctgaggaagaaattggtggtctgaaggaattattcaggatgatt

SEQ ID NO: 6280 - DNA, 282 bp, Glycine max
ctgtctctctgtgacaaacacaaacacaatcaatggcgaacgtcacagcggcacccccgcggtcgcaccgaagcccgcgtgggtcctcccgtaccgaaccgagaatctgcgcgaggtctacactctgtcccgaaaactagggcagggtcaattcggaaccacgttcctctgcacgcacaagggcacggggcgcacctacgcctgcaagtcaatcccgaagcggaagctgctctgcaaggaggactacgacgacgtgtggagggagattcagataatgcacca

SEQ ID NO: 6281 - DNA, 865 bp, Glycine max
ggagtaacatgcaatgcatcatcacatctgagggagaggagagcattttcatttttcaacttgagagaagaagagaaggggaaaaggaaaaaaaggcaaaatgggtaaggatctgagcgatgagcaagtgtcttcaatgaaggaagctttctctttattcgacacagacggtgacggtcggatcgcgccgtcggagctggggatcctgatgaggtctctgggagggaacccgactcaggcccaactcaaagccatcgtggccgaagagaacctcacggctcccttcgacttcccccgattcctcgatctaatggccaaacacattaaacccgaacccttcgatcgccaactccgcgacgccttcaaggtcctcgacaaggactccaccggcttcgtcgccgtctccgagctccgccacatcctcaccaacatcggcgagaagctcgagccctccgagttcgacgagtggatccgtgaagtcgacgtcggttccgacggcaagatccgctacgaggatttcatctccagaatggtcgccaagtaacgccgattcgattctctctttccagtgttgcttttctctttctccgctattattgctttctcgtgtttgccttttcagtggaccaaccaatagattggtgtctcgtcctgtctttttattttatggtgtgcggctaaccgagggtggttttaggaaacggtggctagctactcaatttgccctatttgctttgggttttatttgtattattatgagatctgattctgagctagtctatatatgcatgctgtaattcagaccaaaaaaaaaaagaaaggaaagaacgcgacatggggaattaaaaaaaaaaaaaaggggggc

SEQ ID NO: 6282 - DNA, 419 bp, Glycine max
catcagttgagttgagagaaggaaagggaaaatgggtaaggatctgagcgaggaacaagtgtcttccatgaaggaagccttctctctattcgacactcgacgtcggatccgacggcaagatccgctacgaggatttcatcgccagaatggtcgccaagtaacgccgattccattctctctttccagtgttattttctctctttctttcgcttttggttgtttgcttttcagtggaccaattaatagattaatcaattgtcttgtgtttactttttattttatggtgtgtggctaaccgagggtggttttaggaaacggtggctagctactcaatttgccctatttgctttgggttttacttgtattattatgagatctgattctgagctagtctatatatgcatgctgtaattcagacc

SEQ ID NO: 6283 - DNA, 420 bp, Glycine max
ggaagaagagaagattttcatcagttgagttgagagaaggaaagggaaaatgggtaaggatctgagcgaggaacaagtgtcttccatgaaggaagccttctctctattcgacactgacggagacggtcggatcgctccgtcggagctggggatcctgatgaggtctctgggaggtaacccgacgcaggcccaactcaaagccatcgtggctgaagagaacctcacggcccccttcgacttcccccgattcctcgatctaatggccaaacacattaaacccgaacccttcgatcgccaactccgcgacgccttcaaggtcctcgacaaggactccaccggcttcgtcgccgtcttcgagctccgccacatactgaccaacatcggcgagaagatcgagccctccgagttcgaccagtggat

SEQ ID NO: 6284 - DNA, 409 bp, Glycine max
aggcagaggacagcattttcatttttcaacttgtgagaagaagagacggggaaaaggaaaaggaggcaagatccgctacgaggaggtcatctccagaatggtcgccaagtaacgccgattcgattctctctttccagtgttcttttctctttctccgctattattgctttctcgtgtttgccttttcagtggaccaaccaatagattggttaatcgtcctgtgttttaattttatggttcgcggctaaaccgagggagggtttaggaaacggtggctgctcaattgcccctatttgcttttgcgttttatttgcattattatgagatctgattctgagctagtctatatttgcatgctggaattcacaccaagtatttgggtatctaatcctttaattcttggttgatc

SEQ ID NO: 6285 - DNA, 1203 bp, Glycine max
ctcaaaaattctttttttttatcctttctctttctctctctgtctttctatatcctcagcaacacactcggaaaaatgtagaacaactagaatcttttgttccaaacaaaaacgtatgaattggtcggtttttctccggagtcgtcttcacttttctccgagtttttattatcatcatctctctcgtgtccctgtctccatctccatctcttagtttcttcttcaaatggcagaagttgaagacatagacaaccctcatcacgaccaccatcattacctttcttcttctacaacacaacctccaatgatcaatttcccgcgagatctgttaagaaccttcgtgggagtgaacaacaacagcaataaaaacaataacaacagtcagcaccacaatttgcctatgccagtggtgaagttagaggatgagaaagaagagctggaactaagtctcggcctttcgatgaatggtagatttggggtggaccctacagcgaagaagataaagagaacaacctcgataccggagtttgtgcgcgacgaggagatgggatatgctgctgcgatggggtgcacggggtctctggtgaggacgtgttcgcttccgacggagaccgaggaggagtggcggaagaggaaggagttgcagacgctgcggcggatggaggcgcggaggaagcgctccgagaagcagaggaacatgaaagccttgagagaacaacaacacagggttgttggtgttgttgggtcccacgggagcaatccggtggatcaaggtgcaggggagtacggtgaggttgcagttgcaccacccttggcgagaactgtgtcgttgaccacacgtgtttgtggactcggcttgaatggggacagtgaaaaagagaagaagagtggaatagtgttgccacctccctcgccttctcagggttccattggttcttccggaatctctgaagctgagtctcaacagggtcaaggaacaacacctatggatgttagaagccctactagtgctaacttgttgccagacagtgaactgaaatcaccagcaggtgttgctgagaacaacacaggcaagaatgctgctgctgctgtagtgacaatgagaagtcaatctaacaaacattcaccaccacagagcagaaccaaagacattgtgaggaacttgttggaagacatgccctgtgtctccaccaaaggagaggg

SEQ ID NO: 6286 - DNA, 902 bp, Glycine max
  unsure (1)..(902): unsure at all n locations
caaccgtttcgacggtcccattccctccctctccaacctcaccgctctcaagctcctcttcctctcccacaacaaattctccggcaagtttcccgccaccgtcacttccctcccccacctctaccgccttgacctctcctacaacaacctctccggtcagattccggcaactctcaacaacttaaccccacggcgaagaagataaagagaacaacttcgataccggagtttgcaagcgacaaggagatgggatttgctacggtggggtgcacggggtctctggtgaggacgtgttcgcttccgacggagaccgaggacgagtcgccgaagaggaaggagttgcagacgctgcggcggatggaggcgcggaggaagcgctccgagaagcagaggaacatgaaagccttgagagaacaacaacagagggtggtccgaagggagcaatccggtggagcaaggtgcaggggggtacggtgaggttgcaccacccttggcgaggaccgtgtcgttgaccgctcgtgtctgtggactcggcttgaatggggacagtggaatggagaagaacgagaacagaagcggaataacgttgtcacctgcctcgccttcacagggttacattggttcttacggaatttcagaagctgagtctcaacaaggtcaaggaacaacacctatggatgttagaagccctactagtgctaacttgttgccagacagctaactgaaatcaccagcatgtgttgctgagaacaacacatgcaagaatgctgctgctgctgctgcagtaacaatgagaagtcaatctaacaaatattcaccaccacaaagcagaaccaaagacattgtgaggaacttgttggaagacatgccctgtgtctncaccaaaggagatggccctaatg

SEQ ID NO: 6287 - DNA, 763 bp, Glycine max
gtccttctatatcctcagcaacacactcagaaaatgttgaacaaacagctagaatcttttgttccaaacaaaaacgtatgaattggtcggtttttctacggagtcgtcaccatgaatcatcttcagttaccaccaacaagctccacgcttgagtttcacgtttctccgaggttttattatcatccgtgtcgtgtctctgtctccgtctcttagtttcttcttcagatggcagaagttgaagacagagacaacaacactcgtcaccaccatcattacatttcttcaacaacaacaacacaatctccaatgaacaatttcccgcgagatctgttaagaaccttcatgggagtgaacaataataataataataataataataatagtaataataataatcaccacaatttgcctatgccagtggtgaagttagagggggagtttagaactaagtctcgacctttcgatgaatggtcgatttggggtggaccccacggcgaagaagataaagaggacaacttcgataccggagtttgcgcgcgacgaggagatgggatttgctgctgcggtggggtgcacggggtctctggtgaggacgtgttcgcttccgacggagacggaggaggagtggcggaagaggaaggagttgcagacgctgcggcgggtggaggcacggaggaagcgctccgagaagcagaggaacatgaaaccttgagagaacaacaacagagtccgaaggagcatccggtggagcaagtgcaggggg

SEQ ID NO: 6288 - DNA, 534 bp, Glycine max
cccacgcgttcgcccacgcgtccgcccacgcgtccgaaaaacctgagaagttcgtgtcatgttacgcagcacacttaaagcttgattcttactagagttccgaatcctcggcgtaagcgtgaaaaacactacgaattggtgtcttattcatattctagaaaaaccaatttttgaggaatccgatgaatagttcattcgccggccctactcttcacttatcgacgactggcggttgtaggcccggcggtggtggtggcggcggcagcagcaaccgccactgtttccattgacgattttcatctcccgtgtgatcccatctcgtcgcaagagcgtaaagacgaggccatgctagttttaaaatcagatctcatggctgcactcaacaaggaggttaaatcattggttgaagataactggaagtttgaagggccacgttcgcggatccacctcgtatcacatcgaggtggtgggcatctctatcgcccaatgatctctctctttatgatatcttttgagtttcttagaatattttag

SEQ ID NO: 6289 - DNA, 390 bp, Glycine max
gcttggaagaacctcactgaagaattaaggagagaaaaatcaacatcaaagttataacgatgaagcccattgacgataaacaagagacagtgacgatcagagcggtgagccacgacgaggaagggagaaagagggtggaaaaaatagagctcaacactcacaacatccacactataaagtacgtcgagaagaagctcatcaacaagggtgtgcagcgcaaggaccgccacccagccgacggcatcagaatcggccggccaccgccaaagtccggccacggcggcaaattcacgtgggagggcccggctagcgtggaggataacgagctcatgacggagccggcggccatggacgaaggagaccccaactacttggactgggaagagagag

SEQ ID NO: 6290 - DNA, 1170 bp, Glycine max
accagctttctttcatcacaccccattctcccaaactaacaaacaaatcccagggagccaccaaccatggcttccaagctctgcgactcatgcaaatcagccactgctaccttgtactgccgccccgacgcggccttcctctgcggcgcctgtgactctaaggttcatgccgccaacaagctcgcatcgcgccacccgcgcgtcgtgctctgcgaggtgtgcgagcaggcgcccgcgcatgtgacctgtaaagccgacgccgccgcgctctgccttgcctgcgatcgcgatatccactccgccaaccccctcgccagccgccacgagcgcatccccgtcacgccgttcttcgagtccgtacattcagtcaaggcctcctcgccgatcaacttccaccaccgcttcttctccgacgccgacgctgatgctgacgtcagcaccgaggaggccgaggccgcgtcatggctgctacctaatccaaagacagatctaaattcgtctcagtacttgttctccgaaaccgaaccggttccttacatagatctggattacgcggccatggatccgaagacggagcagaaaagttccgccaccgccgacggcgtcgttccggtgcagagcaacttcgagccgttcacctacggttacaagtacaacactactctctcacagtcacagtctcatatgagccagagtgtatcttctccgtcgtcgatggaagttggagttgtgccggacgggaacacgatgtcggagatatcgaactgcagctacagcaaagtggcaccggtgacggtgacggcgcagttctcggcggcggatagggaggctagagtgttgaggtacagggagaagaggaagaaccgaaagttcgagaagaccattcgttacgcatcgagaaaagcgtatgccgaaacgaggccaagaatcaaaggaaggttcgcgaaacgcactgatgcggaccctctggctggatacggcgtcgttccgtcgtgttgatgattatcatatatatcatatatgaatatgaatgcttacttttttgttttcttatgtttgcttttgctgctgtatatatggactaccccttcttttgtttgaattatgcaatgtaaagttgcaaaaaaaaaaatttaatataaaaaaaaaaagcggccgttttaaaggatc

SEQ ID NO: 6291 - DNA, 667 bp, Glycine max
gcggttgttgatcaagtgcttaagatcattgagaaggaagatagaaaactcttgattccttgtgtaaaggctattgggaatctggccaggaccttccgggcgacggagaccaggataatcggtcccttggtccggcttctcgacgaaagagaggcagaagtgtccagggaagcagccatatctctcacgaaattggcctgctcggagaactacctccaccttgatcactccaaggcaatcataagtgccggtggtgccaaacacttggtccagcttgtgtatcttggagaacagacagtgcagatttcagcactagtcctgctctcctacattgcattgcatgtgccagacagtgaggaacttgctagggctaaggtgcttggagtgcttgaatgggcttccaagcaaccaaacgtgacgcaggacgaaaccctcgaggcattgttgcaggaatccaagggtaggctggagctttaccagtctagaggttcaagaggattccaaaaattacatcaataggatgaagggtaagttattcattgttgtggttgtgaggtttgtcaatcattggtattgatccattgttcttgtgagtgtatatacaatcaaatgtcttatccaattgttcaaatttgttttcaactataaagggaattgtttgttgcct

SEQ ID NO: 6292 - DNA, 484 bp, Glycine max
aggctgcgagacgacagaaggggacagatatcttgctagggttttaggaaaagacactgtctcgcgagtgaacacaggttacagcaatggctttctttggtagaattgggaatttattaagacagacagcaagcaggcaggttagttcagaattgcgatcatccccttcgttttttcaggctatacgcagtatgtcatctgctccaagcacaaagctgtttatcggaggtgtttcatattctactgacgagcaaagtttgagggaagctttttcaaaatatggtgaagttgttgatgctaggataattatggatcgtgaaactggtagatccagaggatttggctttattacatacacttcggttgaggaggcatcaagtgccattcaggccttggatggtcaggacctacatggtcgcccgattagggtgaattatgctaatgaaagacctcgtggatatggtggcggtggctttggttcata

SEQ ID NO: 6293 - DNA, 662 bp, Glycine max
gtgacctggattagtactcagagataaatcaaaccagaaaacagagtgataataatataagaaagaaagaaagcactgcctctgtcctgactgagtggggaaacttatagcatacgcaaaacatagtaagagatcgaggaaacaatgaacatagcaacaattggtgagacactactcgctgaagacgagtttgatttagtggcggtagtagtggaagtagtgggtgtggcatcagaggcttttcctgatttgacagtgacgcaagtttcataccgccagaacaatgtccaggaacagaacatatgaagtaatgagtgcctgcacttttaagggcaattgtggtcgcaccactactgtctgtgctaatagaattccctgcggtgcacgacttgtaatcgctctctttaacttcatccactgtgtgcccagctccatagttgaacgcgagactatcacccactgaaaagatcttgtcgccagtccaagtgctataatcagtaccaattgcccaacctgaagtatctcccacggtgtagacggttgcgagggttggcagggccatgttgattgctagcaacgaccacagaatcaaagcactagagaatgccatgattttgtgagagcgagataataataggggaaacaaggaaaacacacaacag

SEQ ID NO: 6294 - DNA, 387 bp, Glycine max
cccttgtttccgttttaggaaaagacactgtctcgcgagtgaacacaggttacagcaatggctttctttggtagaattgggaatttattaagacagacagcaagcaggcaggttagttcagaattgcgatcatccccttcgttttttcaggctatacgcagtgtttcatattctactgacgagcaaagtttgagggaagctttttcaaaatatggtgaagttgttgatgctaggataattatggatcgtgaaactggtagatccagaggatttggctttattacatacacttcggttgaggaggcatcaagtgccattcaggccttggatggtcaggacctacatggtcgcccgattaaggttaattatgctaatgaaagacctcgt

SEQ ID NO: 6295 - DNA, 386 bp, Glycine max
cccacgcgtccgcccacgcgtccgtggtcgcgtgggcgcgagtgaacacaggttggagcaagggctttctgtggtggagttgggaatttattaagacagacagcaagcatgcaggttagttcagaattgcgatcatccccttcgttttttcaggctatactcagtatgtcatctgctccaagcacaaagctgtttatcggaggtgtttcatattctactgacgtgctaagtttgagggaagctttttcaaaatatggtgaagttgttgatgctaggataattatggatcgtgaaactggtagatccagaggatttggctttattacatacacttcggttgatgaagcatcaagtgccattcatgccttggatggtcaagacctaca

SEQ ID NO: 6296 - DNA, 1067 bp, Glycine max
catccttacgtagtgtacactatccagtggagcttgaatttgccaaggcaccgaggcagtggaaggaagacaatggcggtttctctatcggcgctcacaacctccctctcttcactttccttctcttcccacatttcccagagaccaaacactctctccttcgccagaaccgaatccctctccgtctccgtctcgcgcttccccaaaaccccctcctccctcgtcgtttccgccaccgcactcgcggaaccggaaaccgaagacctcaagaactacgtcaagtcgaggctcccaggtggattcgccgcgcaaactatcataggcaccggtcgccgtaagagcgccatcgctcgcgtcgttcttcaggaaggaaccggcaaattcatcatcaattaccgtgacgctaaggaatatcttcaaggaaatccattgtggcttcaatacattaaggtccccttaataactttgggatatgaaagtaattatgatgtttttgtcaaagctgagggtggtggcctgtctggtcaggctcaggcaatctctcttggcattgctcgtgccttgctgaaggtgagcgaagatcatagagtacctttgagacaggaaggacttcttacaagagattccagagtggttgagaggaagaaagttggtctcaagaaagctcgtaaagcccctcaatattccaagcgttgaggttgggatgttacatgtatggtctgtcttttctttcctcctggtgtctctggaaatgggttacatttggaactattgattgttttcatttgtagttgtaggcttccaagttaggaaaagtaaaagagaaattgaaaaatatcccaaggcgtatgtattcagaatcctgctctctgttttcccatctcttgtttccttgatctgtatggaattgggaattgtaggtatgtaatatttgctttgtctctcccttttacccccaaccaaaatcacatgttttactatattgcaggtttcttttcaagacctaaattttgtggtcttttactcttcatttcttgtgcctgtttgtaccttcatttggcatattg

SEQ ID NO: 6297 - DNA, 617 bp, Glycine max
ccgagaggtagctgtcttccatctgcacaagaaatatatctcaatgcattgagaaaaagagggctgttgccagatttgagaaaacagaaacagatacatattcatcatgctgcttcggttgatatgggagatgtcaaggttggtgagagtcagagatcaaatcgtgtttcatctgataagctcgccaaaggaaacctgttaaatctggaacaatctcgcagcaaaaatatttctctcgaaaggcgctggagtcttgaggtatctattgagaaactgattgggcatgattcaagattaggatcaacagattctgtagcagaaaatggagataaagtcccaattttggaacgcgagtatatgcaaggtgtgttaataagtgaattagttttaaataatagtttttcatcaatgtctagaagggcaaaacagctccaaaaaaaacttgccaaagaaattaaaagacctggtgaagcaatcattaaaggtcaccggagctatgatctgatgcttagtttgcagctcggaataaggtatactgtggggaagattaccccaatacagagacgagaagttcgagcatcagattttggtcctagagcaagcttttggatgaattt

SEQ ID NO: 6298 - DNA, 359 bp, Glycine max
aagaggggtcgcgacgcatatattacaatatgaagtcccagcatattgaaaatgatggggtttctggggaagaatctgaagtggcagatgtttcaattgataaggatgttgataagattgggagtgagggtacttctggagctggccaaactccagtggggaatgtactaaagaaattctccaagactcgagcttcaatccctgagtggcagtattccacaagaaaaatagatcatgatgaaaagttccttgttagtttgatgagagaaaaaggggttacatatagctctgcccctcaatctgtactaaggtcaatgaggagtactttgatcactgtgataacactgtggataccttta

SEQ ID NO: 6299 - DNA, 1418 bp, Glycine max
cccacgcgtccctatttccatcttcaacttcaacacttaaactccttttagtttcaataatccacaccccaaaccccaaatctttccctatttattttcatcttagttttccctaggaccatatattataccatatttatatatcttcacatacttaataatatataataatgggtgttgtacggacgtgggagagcaggagggcggagctggaggcctttcgccggagcctggtggcagccgccggcatccagcggcggaaagacgatgagggggggagaacccacaagtttgtttcctcctatgaacatgatgatggaaagggtaccttaatctgtgtcacttgtggagtttcctactttggtcttgccttggtcaaccatctcttgctcttaggttactctcttcgagtcaccgttgacaacccagaggacatagagaagctgagggaaatggagaggcgtggtgaagtgagggctacagaaggaaatttggaagtaataatggcaaagctaactgatgttgatgggttggagaaagcatttcagggctgtcgtggcgtctttcacacttctgcatttacagaccccgctggtttatctggctacacaaaatccatggccgagattgaagtaagggctgctgagaatgtgatggaagcatgtgcaagaacaccttccataacaagatgtgtgttcacatcatcactatcggcttgtgtgtggcaagacaattcacaatcagaatttaccccagttattaatcatgcctcttggagcaccgaatcattctgcacagaaaagaagctttggtatgctttaggcaagatgagagcagagaaggctgcttggagaatatctgatgaaaggggtttgaagctcactactatttgtccagctctaattacaggtcctgaattttgtaacaggaatccaacaccaacaattgcttatctcaaaggtgcccaagaaatgtactctcgtcgtttgctagcaacagttgatgtgaccaaattggctgaagctcatgcaagcgtattcaaggaaatgaacaccaatgcatctggtagatacatttgctttgaccatgtaattgatacacatagtgaggcagagaagctggcaaaggatattgggatgcctgaggaaaagatatgtggagatgcatcaaacaattctattataaatggatttgaactgtctaatgagaagttatgcagactcatgtcaaggcgactcaggtgtcacagtgaatattagatgaaaatcatgttatgcttggcttatttaaagacgtgccttaggcttaggagtctacaagagggaatagacgaggcatgtttaatagtttgtttagtaatctgtaatgcctgcatgttatggttgtgttatagtatataatttattcaattttggtaa

SEQ ID NO: 6300 - DNA, 450 bp, Glycine max
attcaattttggtaccaaaaatgaatacaggcattacaaattactaaacaaactattaatcatgcctcttggagcaccgaatcattctgcatagaaaagaagctttggtatgctttaggaaagatgagagcagagaaggctgcttggagaatatctaatgaaaggggtttgaagctcacaactatttgtccagctctaattacaggtcctgaattttgtcatatgaatccaacagcaacgatggctgctctcgtaggtgcacaagaaatgtactctcaaggttttctagcatcagtggatgtgaccaaattggctgaagctcatgcaagtgtattcaaggcaatgaacaacgaggcttctggtagatacatttgctttgaccatgtaattgatacacatagtgaggccgagaagctggccaaggatattgggatgcctaaggcaaagata

SEQ ID NO: 6301 - DNA, 1146 bp, Glycine max
tttggatagaagtaaatttggaagagggaggttgaagtgttgttttcagttagcaaggggttactttctgcaaagatgagtatgccattgttggtagagcttctcttgagtcagatgtcttcagttttggggtggttcttcttgaacttatcagtggtcgccatcccatccataaatctactggcaaagatgaaagccttgttatatgggctactcctcgcttacaggatagtaggcgagtaataagggagttggttgatccacaattgaaaggaaacttcccagaagaagaggtgcagatgatggcatacttagcgaaggagtgtttgctgctggatcctgacactcgaccaaccatgagcgaggtcgttcagattcttttgagtatttccccgggaaaatctaggaggagaagaaacattccagccagcctctttcaggaaccagaggatgcagaaaagcaaaggcaatctacacccagtaaatttccaacacatagttcattgccaatatataatgatcacaatctttctgttgagaacaaaaacaaagcagaagatgcagtttcagctgagaatatggagagtttgatcctcttgacttcgaaatctgacggttctcgtgcatcagaagaggaaatagtagacctgactgagcctaggtttgaatcattttgcatcacaaatggcaatgccccatgaaaaatatacacccggcacgggcagagagatgcagatggcagaagcctgaggagtttatgttgtgtgaactggtggtacacctctgttgcttgttctaccacccgtcactgtgcatggctctatgagatatcataagagatgctgcaattattctgttttaattatcttggtctacatgtttttttcatgttttgaaaggaaaagctcacaggtgttgtttgatgagcactgaaaagtattcgtttgtttcttgtacagaaaatcataggatgataggaaattctggttcttctttatttggagaggaaccggatgacatacacattaaattaaaggttttggtcacagaaataattgtcttacaattatatttgataccaagtcttcttgaagtagatgaaataaactttcttaataatgcacaatcatatctttttgtgggact

SEQ ID NO: 6302 - DNA, 2228 bp, Glycine max
  unsure (1)..(2228): unsure at all n locations
tcctcgagccgaatcggctcgaggggctcgagactagttctagatcacgatctagaacttagatctagtgatggcaggaagtttgagtaactgcatttaggagactacgaatgggaaacctatggagaggtatttgctccgtgtgtccaatcttgcatctggtcttcttaaattgggccataatggagatagccgtgttgccattttctctgatacccgggctgagtggctcattgcccttcagggctgcttcaggcagaatgtaacagtcgttactatttatgcttctctaggtgaggatgccctgatccactcactaaatgagactgaagtatctactctgatctgtgactccaagcagtcaaagaagttggatgcaataagatcaagactaacatctttacaaaatgttatttactttgaagatgataacgaagaagatgctttctctggaagttcaagcggctggacaattgcatcttttagtgaagttgagaaacttgggaaagaaagtcctgttgagccaagcctgccttccaagaatgctattgcagttatcatgtacacaagtggcagtacaggtctgccaaagggtgtcatgattactcacggcaacattgtagccactacagcagctgttatgacagtgattccaaatctaggtagcaaggatgtgtacctggcatacttgccccttgctcatgtttttgaaatggcagcagaggtgatttcttcttagccttctaattgtcaaaaacagctgatgttgatgatattatctctaaattacggtggttgtccagtctgttatgctggctgcaggttgtgcaattggttacggctctcctctgactttaactgacacgtctaataaagtcaagaaaggaaccaagggagatgctactgtgttaaagcccactcttttgacagcagtaccagctattcttgatcggattcgagatggagttgtaaaaaaggttgagcaaaaagggggccttgtgaagaatcttttccattttgcatacaagccccgactggctgctgtaaaaggaagctggctaggagcttggggattggaaaagttgatgtgggataccattgtctttaaacaaattcgtactgcacttggaggccagctccggtttatgctttgtgggggagctcctttatctggagattcacagcacttcatcaatgtctgcatgggggctcctattgggcaagcatatggcttgactgaaacatttgcaggggctgccttctctgaatggtatgaccgcaaggtggggcgtgttggtccacctcttccttgttgctacattaagcttgtttcttgggaagaaggagggtatctgacatcagataaaccaatgccaaggggagagattgtagttggaggatttagtgtgacagctggttactttaagaatcaagaaaaaactaacgaagtgttcaaggttgatgagaaaggtatgcgctggttttatactggtgatattgggcaattccaccctgatggatgtcttgaaatcatagataggaagaaagatattgtcaaacttcaacatggagaatatatctctctcggaaaggttgaggcagcactatcatcatgtgattatgtggacaatataatggtttatgcagacccctttcacaattactgtgtggctctagttgttgcttcacaacagtccctggagaagtgggcccaacaagctggtatagattaccaagatttttctgatctgtgtaacatacctgatactgtcactgaggttctgcagtctatttccaaggttgcaaaatctgcaaagctggagaaaactcaaattcctgcaaagattaagttgctgccggatccacggactcctgaatctggattggtcactgcagctctcaagataaagagagagcagctgaaagccaaattcaaagacgatcttcagaagttgtatgcatgaaatgtagtatctaacctcttcaatttctggttggtgtatgctcaatgtatgtaatgtgtcacaggtatcttttttattcgataatactattgaacatgtaactaatttgacataataaaatcatactccaaataatacatcaagtgggtctagttcagttggttaaacaggatgtgtgacgtgttataaactccctcacactgtattcaattcttccaaaaaaaaaaaaaaaaananncgnccncgcggccgctctagaggatc

SEQ ID NO: 6303 - DNA, 679 bp, Glycine max
  unsure (1)..(679): unsure at all n locations
cagtcnctggagaagtgggcccaacaagctggtatagattaccaagattttcctgatctgtgtaacaaacctgaaactgtcactgaggttcttcagtctatttccaagaaagggttacttatggaggggcttaccagaaaggctaagtgaagcattgtagagtgtcaactgcggcgatgtcacctatcaggctatcaagggtggtgctatagtanggacttggatatcatcaagtgcttaagtcccacatcgactagtatgtgaaggaggttgcaaaatctgcaaagctggagaaaactgaaatccctgcaaagattaagttgctgccggatccatggactcctgaatctggattggtcactgcagctctcaagataaagagagagcagctgaaagccaaattcaaagatgagcttcagaagttgtatgcatgaaatgaagtttctaccctcttcaatttatggttggtgtatgttcaatgtatgtaatatgtaacaggtctcttttttatacaataatattattgagcatgtaactaatctgacataataaaatcatactccaaataatacttggctgtcaacatgaaattcttgccagtgaagccaaccaagcggctagcaatagatatagttgatttatgagcagtaatttttcttgaaaaaaaatacttatatac

SEQ ID NO: 6304 - DNA, 422 bp, Glycine max
gttcaagcggctggacaattgcatcttttagtgaagttgagaaacttgggaaagaaagtcctgttgagccaagcctgccttcccaggaatgctattgcagttatcatgtacacaagtggcagtacaggtctgccaaagggtgtcatgattactcacggcaacattgtagccactacagcagctgttatgacagtgattccaaatctaggtagcaaggatgtgtacctggcatacttgccccttgctcatgtttttgaaatggcagcagagtctgttatgctggctgcaggttgtgcaatcggttacggctctcctctgactttaactgacacgtctaataaagtcaagaaaggaaccaagggagatgctactgtgttaaagcccactcttttgacagcagtaccagctattcttgatcggat

SEQ ID NO: 6305 - DNA, 948 bp, Glycine max
aattgcagctattcttgttcccgtttccttaatttgtctcttactttacgcaagttgttcacggctcctctttatatgtacatgtactatctctcatgcatttcattcatcacatacaacactctctccaaagttcaaattaagactgaggggtgagaaagagagaattgatatgggtgccggtctagttgcgttcctcttaatggttcttgtgcaattggtctatgcagtgatgaacattacttcaaagcttgcaatagaatctggaatgagccctcttgtccttgttgcttatcgacaactctttgctactgtgtccattgctccctttgcttattggctcgagtggaatacgcttcccaggattacacagcgtcttatgattcagatattattttcgtccctgaccggagttacaggaaatcagatgctttattttgtggggctgaaatattcatccgctacaattgcatgtgcgctgacaaatgtgctcccagctttcactttcatccttgcagttctcttcagacaagagaatttgcgaatcaacaagagggctggtctagcaaacgtattcgggacaatactgcgcgtgagcggagccttgctcttgtcattttaccatgcaaaaaccattggcttaggccaatcaagtattcactggagatatgctgagaaaatggaaggaactagctcttctggcaaaggaaccttgttcctaggccctttggtcgtaattcttagcacccttgtttgggcagcatggttcataattcaaaaagacataagcaagacatttccagctccttacacgagcactggcttaatgtgtttcatggcaagctttcaatgcgtgatcattgccgtgtgtgtcgaccacagggcctcagcttggtcactccacaatgctatgagactttcctctgccctttatgcgggaatttttgc

SEQ ID NO: 6306 - DNA, 441 bp, Glycine max
cccacgcgtccgaagacgacagaagggggctcagtggtcactcactcaccccttcctttctaactcctcaaattgtgtgttctgagaatggaaatgcctccttctccatcggggcattccgcactctccatcccataaaagtcccagatccaagatggcttaccaccatcaaaaatcccttttggacaccctatactgctccgaagagcattggataggggaaggtgaatttgaccaagcagaggaggagtacggtaacagtaatagcaatagtagcagcaccttagtaaacaactcccctgagtcctcccctcatttgttgctcgaaagcgacatgttttgggacgaacaagagttggcatcgctgttggagaaagaacaacacaacccactaagcacttgctgtctccaaagcaaccctgccttggagggtgctcgcat

SEQ ID NO: 6307 - DNA, 356 bp, Glycine max
cggttgcaaaaaaacaacaaaagggggggttaaaaaaatggctccatcgtggcattccacactccaataaagtcccacatccaagatggcttaccaccatcatgaccacaccaaccggaaatcccttttggacaccctatactgctccgaagcagaggaggactacggtcatttcctaaacaactcctcccctgcgtcccctcctttcttgctccaaagcgacatgttttcggacgaacaagagttgacatcgctgctggggaaagaacaccacaaccctctaagcacctgtctccaaaccaaccctgccttggactttgctcgccgggaagccgtggaatggatgctcaaagtca

SEQ ID NO: 6308 - DNA, 1101 bp, Glycine max
atccaactcaaaccaaaaccccacaaacctataccaccacccaagttgaggaaccacactatgaaccatcaaacgagagcagttacacagataaaatctcctccgcaaccacagcaatagctgacaaagccatcactgccaaaaatgttgtagcttcaaagctcggatacggtgatgacaccaccgaaaaaactcaaacaaatcataaagaagagaacacaagcaatgaaaaaccgtcaacaatcacatcagcaacctcagccaaaaacactgtctcttcggatcaccaagagaacacaggcagtgcaaagccatcaacaatctcttcagcaacctctgcaatagctgataaagccatatcagccaaaaacacagtctcttccaagctcggatacgctgacaacaacaccgaaacaactcaagcaagccatcaagagaacacacaaccatcaacaatctctgtagcaacagctgcaatagccgataaagccgtctcagcaaaaaacaccgtagcttccaagctcggatatggcgacaacactgaaacaaaaacaactcaaaccactcaaacaaggaatcaattaaagaacacaggcaatgagaaaccttcaacaatctcatcagcaacctctgcaatagctgataaagctgtctcagccaaaaacaccgtagcttcgaagcttggttttggcgacacagcaacaacaacacaacaagagaagagaactgaccatgctgctgctcctacagaatatggaaaaagtgttgctcagtccctgacagagaaactagctccagtttctggaaaagatgctggtgtaggaagtggtgtgaagtccaaagtttctggaactcaaactagtagtatgggtgtggaacaggacaagggggtttctgtgaaggactatttggtggacaaactgaggcgtggtgatgaagacagggctctctctgaagtgatatcagagactctgcacaagaaggaactgcccccagtggaagttactgaagaaggtgtgagaaaggtggtttctgatgctgtgcataagagataggatgatcctgagagaagaatggaacttcaaagaatactgggaaagg

SEQ ID NO: 6309 - DNA, 1038 bp, Glycine max
cttctacaaaaatccatggccaatacttgcctcaccagtttactgctacaaaaactctatacccttcatctggcagccatgatcagttaaaaccagaattatctttctctactgaacctaaaactccctacccttcttctaccaaaatcaatgatcaccacttgccacaacactccagtgcaagtgcaacaaatgctcaatatccttcagctagaagtcatgatcagtttctacctgaatattcaagtcaaaccaaaaccccaaaaacctatggagacaaccaaaccactcaaacaaggcatcaagaagagaacaaaggcaatgataaaccatcaacaatctctttagcaacagctgcaatagctgataaagccgtgtcagccaaaaacaccgtggcttcttcgcttggatatggatatgacgctgacactgaaacaactcaatcaagggaccacgatgagaacacccacggtgaaaaaccatcagcaatctcttcagcagcctctgcaattgctgataaagccgtctcagccaaaaacatagtcacttccaagctcggatttggcgacaacactgaaacaactcaaacaagccgtcaagagagaacacaaccatcaacaatctcattggcaacagctgcaatagctgataaagccgtctcagcaaaaaacactgtagcttccaagctcggatacggcgacagcactgaaacaactcaaacaagccatcaagaacagaacacaggcaatgaaaaaccatcaacaatctcatcagcaacctctgcaatcactgataaagctgtaactgccaaaaatgttgtagcttcaaagctcggatatggcgacaacactgaaacaactcaaaccactctagcaaggaatcaagaagagaacacaggcaacgagaaaccctcaacaatctcatcagaaacctctgctttagctgataaagatgcctcggcaaaaaacagtgttgcctctaagcttggtttcggtgacacagcaggaacacatgaagagaagagaactaaccatgctg

SEQ ID NO: 6310 - DNA, 426 bp, Glycine max
aaactagtcagacacagactagtcaaacacagactactcagacacagactactcagacacaaactagtcagacacagactggtgagacaagcagctcagacaaggacacagcgacagaaaaatcaaaggaatcgtctacagccagctaaactgtaagcaaccatgatggagtggtgtaatttactaatcaactgagtcttaggttgatgaatgagcctacctaaccgagactagctgcaatgacctctctccagacaaaggaatgaagagccaatattgatgaatttaacatattcagatagctaaatagttgggccatgtgctccgggtttttaaccccttttttgtacctttgcattaggcaacagcctggcgtgtaaatgtataggcggaataatgtatattggaatggaatatgttcctatt

SEQ ID NO: 6311 - DNA, 502 bp, Glycine max
catccatcccctgtgtctctcttttttatttgataaattgaacctccttttgtcagtgtagtgagtgtctctctcattcattctcaggtcccaaccgcattaagcgtctttgatccatcttcttctgtccccgaaaggacgtacccaaaccaaatcgccacatatcaaatgctaagctacgcgcccttttctcagtgaccgattcttcagttaactctctctgatccaattcaattgaatgggcctcaacctcttcgctctccctccatggcaatggcaaactatttctctgctgtgatcctccaccgccatcccatcaccgccctcgatcttctcctcatcttcctccacaccctcttatagctctcacccgacaagcgtaaaaaaacccaaccattttttttctctctctggtttcgaattttttaaggatataaaaactagaacaaaattcgtttttgattgtgattcctgatacccttttggattctgatggcgtcgg

SEQ ID NO: 6312 - DNA, 857 bp, Glycine max
  unsure (1)..(857): unsure at all n locations
gtgcgtcgtagcgtagaggaagtcgacgagggtgtgtgtgtgcgtaagcgtaacaaactaaactagggttacaaacaaccagatcttcacgcaaacttctgatttgagttttactcctttagatctgcaaatcaatttctgattttcatttaaacgcttggccgaattgtggagctgccaaagcaaaacacttattattatgtgagagcaataatgggctctggaaatatactaccttcttctggcagctctgacatgtctatctccgagctccgcgagaagcaccattgggagctagaaaatctgactctgaccacacaacctctcaaaacgttgaaattcttcacattagctgttattcaatacatcaagaaaacagcaatatatctattggcaaaaggtggatgggttatgcttttcagtgttgcagttgggactcttggcatagtgctgatgacccttggttgcctccatgagaagcatcttgaggagcttcttgaatattttcgctttgggctgtggtgggttccccttggggttgcttcttcaattggtcttggatctggtttgcacacatttgtcctatatttgggaccccacatagcactgtttacattaaaagccgtgcaatgtggccgagttgatttgaaaagtgctccatatgatacgacacaattaagtagaagtgcttcttggcttgataaaaactgttctgagtttgggccaccattattccagtcagtatatgattcacaggttccgcttagcagcattttgcctcaagttcagctggaggctattctatggggtattgggacagctatangggagcttcctccttactttatctccagggc

SEQ ID NO: 6313 - DNA, 332 bp, Glycine max
aaacaacccgatcttcacgcaaacctctgatcaatccacgattgattttcattttcaatgttattctcctttgaaacacttgccccgtagctgcaaaagctaaaacacttagtgaatgagagcaataatgggctctggaaatatacgaccttcttcttccggctgctctcacttgtctatctccgagctccgcgagaagcaccattgggagctagaaaatctgacactaacctcacaacctttcaaaacattgaaattcttcacattatgctgttattcaatacatcaagaaaacatcattatatctattggcaaaaggtggatgggttatg

SEQ ID NO: 6314 - DNA, 573 bp, Glycine max
cattttctattttctctacattctccaacctctacgttattctcctccatcccgatctctttattgtcttctttctctcttcctggttttcgttggagaatcctgaaaaccgcttgattttaatcaaagggtcatcaggattcgggcacccatatctcgtatcactccttctctcctctgttgtcttagaaagaagaccaagaaaagcatcaatttttgcaagcaatcttcttcttttgccctttctcttgtcttaaacacacacacacaacaacccagctgctgaagctgaagcatcacaactcacacatgattcgagtggccacaaattaagcgtgttggtgttatgagtgagagaatggaatcgagtagcattgagagcagcactgtatcatcgatgactatgatggaagaggatgagcatccccatcagttttcttcaatctcgaagcttcatagcaatggccccaccactaccagtgtccatgaccttcttgaatgccccgtttgcaccaactctatgtaccctcccatccatcagtgccacaacgggcacacactttgttcaacttg

SEQ ID NO: 6315 - DNA, 404 bp, Glycine max
atacactctgcttcttctgatgccatccctctccccgcttcgcctaccaccgcgctggtccacgcaaaaacatctactttgacccttccattgttcgcgttgccattgtcacctgcgggggtctctgtcccggccttaacaccgtcatccgagagcttgtcgtgggcctgtggcaactctatggcgtccgtcatattttcggcatcaccgccggctacagggggttttactcctctgtcccactccccctcaatcccaaactcgttcatcattggcacaacgtcggtggcaccctccttcagacatccaagggcggtttcgaccttcataaaatcgtcgatgccatccaaactcacgccttcaatcacgtgtacattatacgtggagatgggactatgcgagga

SEQ ID NO: 6316 - DNA, 1030 bp, Glycine max
ctctcatactcctctcactatacgttatccgagcgagatagagaacagatagagataacactaggcagcacaagagaatggcgctgctgtgtggttcaacttccgtgactccattcctttctcacaagaacgttggtttcacaacctcagcaaaatcttcctttgttggctttcaattgccgcttccaaagctcacattatcttcttccgttcgaacccttctgccggcaacatcccgtgtccgttgccagcaagagtctactactgttacccctgtcgcagaagaagacccgcgcttcgcgtgcgtcgaacccgaaccccgattcaaaggcccggacatttggaacaagagctggtatccaaaagctgcagatcatgtgaatacagaaaaaacatggtatgttgttgatgctacagacaaagttcttggaagactagcatcgacgattgctattcacatccgagggaaaaacttggcaacctacacacccagtgtggacatgggtgcgtttgtaattgtggtaaatgcagaaaaggttgctgtatctgggaaaaagaggacccaaaagctttacaggaggcactctggacgacctggtggtatgaccgtggagacatttgcccagctgcaaaacagaattcctgaaagaattattgaacacgctgttcgtggcatgcttccaaaaggaaggcttgggaggagactattcacccaccttaaggtttataaaggcccagatcatccacatgcggcgcagaagcccgttgagttgccaataagggataagagaatacatttgcagaaataggtcataggtgtagcagagaacatggaatgaaatatgaaaattttatgtctatctatttcacagaacttcgagtttcctgctttggttgctaccttgctgatgtttccattaaatgtttatattgtctgtagaggtaactgattattgtgttacttgtttttgtcaaggtcctttgtggaatcttcataatatttttgttgtagatttgaaccttgcctcgt

SEQ ID NO: 6317 - DNA, 692 bp, Glycine max
tgttcgccttgatcatcaatcatttctttctggaatagctgatgttcgtgatcggcacagggatatgcgacttgatgttgataacatgtcttatgaggagttgttggctctggaagagcgcattggaaatgtgagtactggattgagtgaggaaactgtattgaaacacttgaaacagagaaagcactcggctgaaaaagggcctcagattgatgcagaaccctgttgtgtttgtcaggacgattatggtgatgaggactgatattggaacgcttgattgtggccatgatttccatagcagctgtatcaaacagtggctaatgcaaaagaatctgtgtcccatttgtaagacaacgggcttggcaacatgatgtatgtgactctctgtcctcaggcaaataccatgaccatgaaggaaaaaaaaaattggcacaatttacccaggaaattctggtgcttggtgccttgtcttctgtttccagcctagtaaattgtcgaacctgactgacagaggtttcccctaccctgcctccctcccccgaatttgtttattcattatctaaatccaaaggtctcccggtttaggtgatgaaggagcgcttcttaactcaagttgacaaggcttggtttacatttatgaaattttttaatattgttcggattggagttatgctcaacggaaacctaggcac

SEQ ID NO: 6318 - DNA, 422 bp, Glycine max
aatatggttggctgcttactatttggcttaatggatatttatagcaagcttgtaaatgccggtgtaagaaccgtgttttcattttgtgacaggatgttgtgatccttgagcatcaatcatttctttctggaatagctgatgttcatgatcgacacggggatatgcgacttgatgttgataacatgtcttatgaggtaaaatctcatttctgcatctggatgcaaatattaatatatctatacaaccataatgtcagtttatcccttgcttgtctttcaagatagtacttcattttagagagttagtttctcatgtgaagtttgactataacaggagttgttggctctggaagagcgcattggaaatgtgagtactggattgagtgaagaaaccctatcgaaactcttgaaacagagaaagca

SEQ ID NO: 6319 - DNA, 641 bp, Glycine max
tatttctcacactcgcaagtctcaagcaactcacacaggaagcggcaaacaaagcacacagaaagtaaaaagcggaaattaaggagcggtggtgacggtggtagtgaataaataaaagcagcaccataccatggggggagaagaagtagcaagagtcaaagcagagttgttcgacgacaacgaaagcgatcgcaacgacgacgacgttttgagcgagagcaaggactcgggagtgacgacggctcacgcagtgaaagaagagatggatgacggcgccgctaactggtcttcgtcgtcgtcgacttcgcccaaaccgatggaagggttgcacgaggtgggcccccctccgttcctgaagaagacgtttgaaatggtggaggaccctcacaccaaccccattgtgtcgtggagccaaactcgccatagtttcgtcgtttgggactcgcacgagttctccaaaacccttctcccaaagtacttcaagcacagtaatttctcaagcttcgttcgccagctcaacacctatggctttaggaaggttgattcggaccgttgggagtttgcgaatgaaggattccaaggagggaagaagcatttgctgaagaacataaggaggaggagtaagtgcacaaactgcatca

SEQ ID NO: 6320 - DNA, 415 bp, Glycine max
acgcctacgtaaactcggaattcggcccgagattaattttggtttggtttgttgttgttgctgcaaaggaaggaaggaaggaagagcggtgggtgagtgacagagggaggaaacatggctactacggctacggcttcggcgtcgtgggaggaactgacgctgaaagtgaaatggatcggcaacgagtacaccgtcagagtctgcgccgacgacaccgtgggcgaactcaagcgccgaatctgcgagctaaccaacgtcttaccccttcggcagaagctcttgtaccctaaactcgcttccaaactcagcgacgactctctcttcctctcccagctccccctcaactcctctctcaagatgaccatgatcggtactacggaagaggacttgctcgtggatcccgtggagtcccctg

SEQ ID NO: 6321 - DNA, 1826 bp, Glycine max
gacacaagttatgaatatataaggtccacttttttttacagtgaaaacagttgaaacgaagttgttaataatagattgccgagagaaatgggtaaaagaaatttccacccaagatttaataattgatctattcttagcctaggcaaagtccatcttgttgcgatagaaaggaataagaataaataagttttagctagtgtaataaagataccaattatcgttacaaaaactccatatgtttgatttatttcaaaaaagtcagaaacgaatatgtatggaatagagatatttgaaccaccaaagtaaagaactgttacaaataaggaagaaatgaataggtttaaataggaagcaacataaaataaaccaaatttgatacccgagtattcggtttgataacccgctactagttcttcttccgcttccggtaaatcaaaaggtaatctttcacattctgctagggacgagattagaaaaacaatgaaacccataggttgacgccacaaattccatccccaaaaaccatattttgattgtgcatcaactatatcaactgtacttaaactgttagataatcctagtcggtgatgacattactgttaccatctctattacagaaccgtacatgagattttcacctcatacggctcccttaaagccttaaaaaaatctaaggaccggtccgattatttatcccttgatacatctctaaggtagataatattcgattttatcggacggttctgaattagacctattgaattctgtctgttctaaaaaaacaaattttaaaataaatacatttaataaagaaaaaataaaatacattttaacatttctttaaataaataaaaaatacaaaaagtacttctgaattgatctcatcctttaaaaaattcaaattcaaatttgttgagtaataacttaattcttccataaaatactcttttcaaattatcaataactccctcatcattttcgattacgaaaaagaattatacatgttcattttttaaattatgacatgaattctatctccataaatatggatataagacaaacaagaaaagggggatcactttttttttcgttcttatcctagtcttttttgtgtaagtaaaataaaaggggacttccaaaaattaaaggattatttcgtttctgatagttatttatttaatcggtggatggaagtatactctggatcggaattctggggagtactgccttattttttctaccaacggaaagccccaattagtattctttttctattatacataaatataaatgttcttttggatatttttaaaaatatacgttactaatcctttgtgtattttggtgtttctaatcatccattcattttttattaatcccttatttatgttatttatgttaatatatatatgctaattcatacaaatgatattgaaaatttaatttaaaaagggttggtcttttacgcccgcttcaagacaggatgactaatcaaccaaccttgggaaaaacaacaacttctacctataatttaattcatttttttcacttaattcttatacatagaaaatgagactcaatatttttactgcaatttaaaatcatcatcttttctattaactataagtaatatagtattctataaattatattcaaaagaagctgttttattgcactcatataactatctgattaaattcttcaatccgaatgcgaaaaataataaaaaaaataaattcaatagatatatattcaatttattttcctactttactacaaagtactataaagagaggggtatagcaaatagtatcaaaaaatttctg

SEQ ID NO: 6322 - DNA, 1393 bp, Glycine max
cagaaaatgcaaagcaggacaaaaacaaacaacaccagaaaataaaagacgcgagagaacgtaaaatcactattgctcctctggctattggaaatatcagatcatcgaaccaaccaaacgaaggcagaaacaggcaaagagctcatagaaattctcgtcctcttcctacataagtcttctcttatcataaacgcgtgttgctcggataaggttgtgctgcggtgattcactcgtactttgcttaatatggcggttgagaagttgagcattgcaaaagatgtgactgaattaattggcaaaactccattggtatatctcaaccgcatcgtggatggctgtgttgccaaagttgctgcgaagctagaaatgatggaaccttgctccagtgtcaaagacaggatagggtatagcatgattgtagatgctgaggagaaaggactcatcacaccgggtgaaagtgtcctcattgagcctactagtggaaacactggcataggtttggcattcatggcagctgctaagggttataaacttattataaccatgccttcttcgatgagtctcgaaagaagaaccattcttcgagcttttggagctgagttagtcctcactgatcccgccaaaggtatgaaaggagctgttcagaaggcagaagagattcgggataagactccaaattcttatattcttcagcaatttgaaaatcctgccaacccaaagatccattatgaaaccactggaccggagatctggaagggctctagtgggaaggttgatgctcttgtctctgggattgggactggaggtacaataacaggtgctggaaaatatctgaaagatcagaaccctgatataaagctatatggcattgaaccagtagaaagtccaatactgtctggaggaaaacctggccctcataagatccaaggaattggtgctggcttcatccctggtgttctggatgtcgatttacttgatgaagttgttcaaatttcaagtgaagaagccattgaaactgctaaacttcttgctttgaaagaaggtttgctggtgggaatatcatctggtgcagctgcagctgctgcaattaagatagcaaagaggccagaaaatgctggaaaactcattgttgcggtcttcccaagttttggagagcgttatctatcgtctgtgctctttgaatccgtgaagcgagaagcagagagcttggtctttgagccttgaatgtcaagtcatacgagccatttgctgcttctcaagttgcattctgtccttgggttgtgtatatattttttctcttatggatctaaaaaataaaaaggatttctgtttgcttgttaattgactaagattcaataaaaaatatagtagtttgctgaaaaaaaaacgacca

SEQ ID NO: 6323 - DNA, 968 bp, Glycine max
taagaataggaaattttgataaaccgcgatcacaggttgccgcaccttaaaaccggaaacaaaagcaatcgttacttgttctcaagaatcttcaaactttcttctgttttctctgcactcggttctttaggaaaagaaaatcactctctgtattgattacagacttcgtgaatcattttcttttcaactttcagttcacttgctgaacactctcctataaatatataggacttcgtgtcagatttgaacttttcctgtctctttctcggttttctttcttattctcatcttctttaaattttaaggctcgtattttgtttctctaaactttctgttggactcatttgaaatacaacatgaagttttatccaggacaaaatgtctctgaaattgtttaccattttcagagtaatgagacagctaataggcttgatgcttattttgcctgtggctgtgaagaggatactgaagtcctcgctcgtttgaagcaatgtaaccctcggttactgcatttatcttatgctgctttctgtttggaaatgggcagtcattctgttgaagaaatagaatatgatgatggagagttggttttcttgtatttccaaaattttctactctccatagtgtccaattcttccaaaacagcaaatctgagagcatacatacgttcagcttttgcatatcattttcagcactttgttgaatttgatcaatatacaaatgattctctcaatgtgatggatacaagcgtatctgctcaaggaattgcagatttggctctgtccatggtcagatggattcctactcaaattacaaaagttgtgaattttggggtaggatcggtcataggatccttttcggaacatttcaataagctcctaatgcaatattgtccaatagtgttccaagcttttagctgggtgtacaatatctggaccatggttaaagaatggattgaggaggctgcg

SEQ ID NO: 6324 - DNA, 997 bp, Glycine max
cccacgcgtccgctttctttctttcttcttttttctgccgaggaaaagaaagaaatagaaaaagaagaaaaaaaacacagcgccctagatttgctcttctttgcttcggaagaaagagaaaacaaataacaatggcgttcgcttctttcctcggcagagttctcttcgcttccgtcttcatactctctgcttaccaagaatttaacgaatatggagttgatgggggacctgcagcaaaagcactcagacctaagtttgatgcctttacacatcgagtgcattctcaagttggctttcaacttcctgagattgatctgaaatttttaattgctggggctattgctctgaagggtcttggaggggttcttttcatatttggcagctcttttggagctttgcttctgctcctgcaccagctgattgctaccccaatccattatgatttttacaattatgacagtgaggacaaagaatttactcaactgttcatcaaatttacacagaatatggctcttttcggggctgtattgtttttcattggcatgaaaaactccatccctaaaagggtacccaagaaggctccaaagacaaaaacatattagttttgcagcattgaggacccctttcaagaagtgggggctgtgggagctgttgtttcctggtttttcatcatatcctctccaatctggcaggatttgcaccgagtactctcttctctggttcagaaccaatcttcctccctttgagttttgtagttttggcttcacttggattatattattggctactattattatttttgtatgatctgttatcacggcgttaggaactatctttcaattgccaaacttgtctgtcaaaaaggaaaacaaaaggatgagaagcctttgcgcttaatcttcacagtgccactctcattctgttttatctatcttgatgtaaagtctttgaaagtcaggcacgtgatgttattatataactcaacttgagttctcca

SEQ ID NO: 6325 - DNA, 962 bp, Glycine max
gatggaaaaagaagaaaaaaacacagcgtcctagatttcctcttctctgcttcggaagaaagagaaaacaaacaaaacaatggcgttcgcttctttcctcggcagagtcctcttcgcttctgtcttcatactctctgcttaccaacaatttaatgaatatggagttgatgggggacctgctacaaaagcactcagacctaagtttgatgcctttacacatcgggtgcattctcaagtgggctttcaaattccagagattaatctgaaatttttaattgctggggctattgctctgaaagggtctttgcgggagggggggggggtttttttcccctttttttttttttttttttccccaaaaatttggcagctcttttggagctttgcttctgctcctgcaccagctgattgctactccaatccattatgatttttacaattatgatagtgaggacaaagaatttactcaactgttcatcaaatttacacagaacatggctcttttcggggctctattgtttttcattggcatgaaaaactccatccctagaagggtacccaagaaggctccaaagacaaaaacctattagtttttgcagcattggacccctttcattgggggctgttgtttcctggttcttcatcatatcctctccaatctgccaggatttgggttgagtactctctggttcagaatcaatcttcctccctttgagcttggtagttttggcttcacttggattaaattattggctattattatttttgtatgatctgttatcatggcgttagaaactatctttcaattgctaaacttgtctttcaaaaaggaaaacaaaaggatgagaagcctttgcgcataatcttcagagtgtcactttcattctgttttatctatcttgatgtaaagtctttgaaagtctggcacgtgatgttattatataactcaacttgagttctcc

SEQ ID NO: 6326 - DNA, 1074 bp, Glycine max
gggagaaaaggcgaagacagaagtggaagcagtgagaagtgataactcttatcattcttttttccacttgacattgccgacgccaccaaatacacaaccttaactttcccacaacactacccatccatcattcgttttctctctagattttttcagttagttattgctgtcttctttttgtgtgtgccaacaacacagaaagagagagaaagacatggctctgaaccaatcaaaggccgtgttgttgagggtgagtttggtggtggtggcgctgtgtatagcaggatacatagtgggtccccctctctactggcatttcgttgcagtgaacaaccactcttcatcttctacttgtgcaccctgcatctgcgattgctcttcacaacccattctttctattccacaaggacttagcaacacttccttcggagattgtgcaaagcctgacccagaagtgagtggagacactgaaaagaattttgctgagctattggcagaagaactcaagctacgggagagccaagccgtggaaaatcagcaacatgctgacatggcattgcttgaggcaaagaagattgcatctcagtatcagaaggaagcagacaagtgcaattcagggatggaaacgtgcgaggaggctagggagaaggctgagttgacattagtcacgcagaagaagctaactgcattatgggaacttagagcgcgcaagaaagggtggaaggaagggcttgccaattctcatgcacactctcaagggaaagtacagagttcttagatacgttacacggcctccatggaggtgagtggttgcataatactacaatagttttcaaatgctggtgatagcaaaagcgagtcatcgaggctcatatgtgttcacgaaaggtcaagtgtaaaatgcaaatgttgttgtattttctgtcattcttttttgggtctttattccatgtgtaaccccgtttaaagctagaaatcgccaaatgttgggtaaaacttgcataaagaatattgagactgtcttttttgtattattttggcttcagatttgaaccaaggctcggactgttgctt

SEQ ID NO: 6327 - DNA, 454 bp, Glycine max
tcgacccaggcgtcagcgggaagacgacgaagcagtgtagtggtaactcttgtcaatctttccactttgacattgccgacgcctccagataaacaaccttaactttcccacaacaccacccatcattctttttctctctctagatttcatttagttgttgctgtcttcttctgtttgtgtgtgccaacacagagcgaaaaacatggctctgaaccaatcaaaagccgtgttgttgagggtgagtttggtggtggtggcgctcttcatagcagggtacatagtgggtccccctctctactggcatttcgttgaaggtttggctgcggtcaaccactcttcttctacttgtgccccctgcatctgcgattgctcttcacaacccattctttctattccacaaggactgagcaacacttccttcggagattgtgcaaagcctgatccagaagtgagt

SEQ ID NO: 6328 - DNA, 622 bp, Glycine max
gtacatacagtggggttttatcagatggttcaaaagtcgcagttaagagctgaagggggtcaagctttcagaggaaaaaggagttctattctgaaattcgcagggtcgctcggcttcgtcatcctaatctggtggctgtgatgggatgctgctatgatcatggtgaccgctacattgtttatgagtttgtagctaatgggcccttagataaatggctacatcatataccaaggggaggtcgcaacttagattgggctatgaggatgaaaattgcaactacgcttgctcaaggaattgcgtttctgcacgacaaggttaagccacatgttgtgcatcgagatatacgtgctagcaatgttctgctggatgaggagtttggagcacagcttatgggtgttggtctgtccaagttcgtgccatatgaggtaatgcacgagaggactgtgatggcagggggaacttatggatatcttgccccggagtttgtgtacagaaatcgagctcacaacaaagagtgacgtgtatagtttcggtgtgctactacttgaaattgtaagtggacgtagacctgcacaggcagtggattctgtgtgttgtctaatatatttgaatgggctacacc

SEQ ID NO: 6329 - DNA, 374 bp, Glycine max
gccccaaatccttcttcaccatttctggggaggttgacactaaggccattgagaagagtgcaaaggttggattgggtttggccctcaaaccctaaagaattttgagctattctgacaagagcattgaggtagtaggcattaggaaagcacatagttgtctgttagactgaattgtttgttcaaggttgattgtcttggacggaagtgttcatggtattttgatgcattgagcaattcaaggttgtattgtataaataagtgatatagactatttctataagccaaatgtactcgaaaatcacaagattttgaaagtctagttgattccccaaatgttattcaaaattcataaaaaaacttgaaactcaaatatt

SEQ ID NO: 6330 - DNA, 504 bp, Glycine max
gaaaaatcacatactaaacaattcagtagtgtcggtgcagttgtattctccactgcgtccattggttgatgttgcagaagtgtttttatggcttatggctgtcggtaccattctctgtgcttcttactggtctgcctggactgcaagagagtctgccattgagcaggagaagctattaaaggatgcttcagatgaatacataaatgcagagaatgctggttctagtgcatatgtggaaatcagtactgcagcggcaatatcatttgttgtgattgcttcttgtttcttggttatgctttacaaattaatggcatattggtttgttgaagttctggtggttctattttgcattggtggggttgagggactacaaacttgcttggtggctctgttatcatgtttcaaatggttccagcatgctgcacaaacatttgtgaaagtacctttctttggtgctgtatcatatctgacagttgctgttactcccttctgcattgtgtttgc

SEQ ID NO: 6331 - DNA, 1255 bp, Glycine max
aaattcaccatgtagtcatgattgtggcaacgaatctgtaggccagggcatggctcctccacttccttccgagactctttatggggcttctagggttgaactctatcgctgtactgtttgctcccaactaactcgcttccctcggtacaatgatccaatgaagcttgtggaaacaagagagggccgctgcggggaatgggccaattgctttacgttctattgtcgagcttttggctatgagtcacgtctgatcttggactttacagatcatgtttggacagagtgcttctctcaattcttgggaagatggatgcatcttgacccatgtgaaggaatctatgacaagccattattatatgaaaaagggtgggggaaaaaattaaattatgtaatagccatagcaaaagatggagtttatgatgtcaccaaacgatacacaaggaagtggcatgaggtcctatctcgacgtactatcattacagagccttctttgtcatctttactctctaatataacaaaagaaagtcgaagaggttttgcatctcaactactttcaattattgaagtccgtgatatggaggaaaacaaagaacttgagaggagtttacatgctgaagatgacgagtcactctcattacctggaagaagaagtgggaatgaggaatggcgcaaatctagattagaaatgggttctgataagctaagttcctctgcttgcccagttcgtttgtgcgtagatgagcacgtgacaaggatttataatgcattccgtcctatcctttatcaatttgttggggaagaattaacaaagtcggaagctgttgaagtactcaggattactaaaggaattcttttggatcttagcaagtccccctataaaacaagaaggacctccattgactcagttctagataacccaaaatttcagaaactattgccatcttttgatgacttacttggtgctctttctctggggaaaaaggtgaatacagatgggagagttgaattttgtttggttggtgaccctgtagtaacttctttagcattgcctgttgcgttagatgctctggatgacatgatttacaatcttaacaagtgtgaaaactatgggaaagatatgtttctgttgccacttttaaagttaaatagaatacattctggttcagcaattgcaagttcagaggagttgccttttgggattataacatcagcatttgatggcactcgaatgtctaaatgggaagaaccaaatgga

SEQ ID NO: 6332 - DNA, 577 bp, Glycine max
ctttgattcccttgaaatctgatctggcttatctttttttttttccttcttttgggaccaattttcacccactatttccaccctccacttcaattttacttgctttgtgtttgtgagtgcctgttatcaaatctccaaaagctcaaagaaactggtattgtgttcggcataaggaattaggattgatttcagggtgtattctgtacctttttcatttttatctttgttttttcatttgtgctttctgaagagctttggagatgtatgatatagaattgtaggtttgtgttgttagggttgagaaaaatgggatctcagggtggggcagtgcaagagccaaagactactacccctttggctaggcaagggtccttgtataatctgacccttgatgaggtgcataaccaacttgggaatttggggaacccacttggcagcatgaatcttgatgagttgctgaagagtgtgtggagtgctgaagccggtggtggtggtgaggcttctggctgggactttggtgttggtgatgctactaacatgccgcatggcaaggctgctgcttccggctcctctctga

SEQ ID NO: 6333 - DNA, 676 bp, Glycine max
attttatgtggtctggtgtcattggccctatctagatgtacatcatatatgtttactattgttgacaatctgcacaaggccactggcattccacgatcttcattccctgtattgggaggcttatcagttgggttgatagcattgatatatcctgaaatcctctactggggttttgagaatgttgacattttattagaatctcggccatttgttaaaggcctttccactgacctattgcttcagctaatagctgtcaagatagttgcaacttctctatgcagggcttctggattagtgggaggggtattatgccccgtctctctttattggtggtgcaactgcgatggcttatggaaaattaattagtttggctgttgctgagtctaatcccacaattaacctctctgtgttggaagtggcatcaccacaagcttatggcctggttggaatggcagcgactcttgcaggagtttgtcaagtaccacttactgcagttttgcttctgtttgaattgacacaggactatcggattgttctaccacttcttggagcagtaggcttgtcgtcatggatttcatctgtacagacaaaaagaggagatgatggaggggcaaaaaaaattgagttagaaaactcaaattctcctttacttcgagaaacatcttctcgtagttca

SEQ ID NO: 6334 - DNA, 446 bp, Glycine max
tcttccacgcgtccgctgagattggccttggctctcaacctgcctttaaagttcctgagtatgacttccggtcccccggtgggcttctggattagtgggagggtattatgccccgtctctctttattggtggtgcaactgggatggcttatggaaaattaattagtttggctgttgctgagtctaatcccacaattaacctctctgtgttggaagtggcatcaccacaagcttatggcctgttccttttgcaggttggaatggcagcgactcttgcaggagtttgtcaagtaccacttactgcagttttgcttctgtttgaattgacacaggactatcggattgttctaccacttcttggagcagtaggcttgtcgtcatggatttcatctgtacagacaaaaagaggagatgatggaggggcaaaaaaaattgagttagaaaact

SEQ ID NO: 6335 - DNA, 1332 bp, Glycine max
gaagctgcttgttctagagccttcccttcacttcccttgcccttgaaaaggaagcgtgaagcgttttccctctgcattaatttgtatctgcagtctgcaacaacttcttcttcagtgttttctcagttcctcacatcatgtaccgctttgcaacctccctcgcctccaaagctagaattgccaggagcagcactcaacagattggaagtagggtcacttggaacaggaattatgcggccaaagacattaagtttggtgtggaggctcgggctctgatgcttaagggtgtcgaagagctcgctgatgccgttaaagtaacaatgggccctaaggggcgtaatgtggttattgagcaaagttttggagcacctaaagtgacgaaagatggagtaaccgttgctaagagcattgaattcaaggacaaagtcaagaatatcggtgccagtcttgtaaagcaggttgctaatgctactaatgacgtggctggtgatggaaccacttgtgctacaattcttactaaagcaatatttacggaaggatgtaaatcagttgcagctggaatgaatgcgatggacctgagacgaggtataaatatggctgttgatgctgtggtgacaaatctgaaaagcagagcacgtatgattagcacttctgaagaaattgcccaggttggaacaatatctgccaatggggagagggaaattggtgagttaattgcaaaagctatggagaaagttggcaaagagggtgtcatcacgatctcagatggtaagacattgtacaatgagttggaagtcgttgaaggaatgaagctcgacaggggatacatttctccatatttcataacaaaccagaagaaccagaaatgtgaacttgaggatcctctcattataatccatgaaaagaaaatctcaagcataaatgctattgttaaagtattagagttggctttgaagagacaaagatctttattgattgtcgccgaggatgtggaaagtgatgcccttgcaactcttattctaaataaacttcgtgctggaatcaaggtatgtgccatcaaagctcctggttttggtgaaaaccgtaaatctggtctccaggatcttgctgttcttacaggaggtcaacttatcaccgaagagcttggtttgaatcttgaaaaagtagacctggacttatttggctcttgcaagaagataacaatttctaaagatgacactgtcatccttgatggagctggtgataagaaagcaattgaagaaagaagtgagcagattagatcagcaattgaaaataagcacttcagataatgacaaggaaaagttacaggaa

SEQ ID NO: 6336 - DNA, 641 bp, Glycine max
tacctttatgtatctcaccaaaaagatttatcctttttaattctttaattaatactcttaggaccttgaatgattagccggacccaagagtaaattacactttttaacaacttaaaatgtaatatcttgacattttaagataagattatatagacgttgttataagaaggggtggaatattgatggtgaagttttgttaatattaataatgcaatgcaggtaggaaatgcagtgacagacaactactatgataacttgggcacagtgacgtattggtggagccatgctatgatctccgaccagacttaccggcaactaatgagtacatgtgattttcacaggcagaaggaatctgatgagtgtgagtctgtgtatagctatgccatggatcaagagtttggtaatattgatcagtacaacatctatgctcctccatgcaacaactctgatggtagtagtagctctgccacccgccgcaccatgcgtttacctcaccgaccccatgtggattttaggcattggtctggttatgatccatgtacggaaaagtatgcagagatttactacaacaggcctgatgttcagaaagcacttcatgccaacaaaaccggtattccttataggtggactgcttgcagcga

SEQ ID NO: 6337 - DNA, 419 bp, Glycine max
aacgattccctcgttacaaaactcgggagctctatatcactggagagagctatgcaggccattatgttcctcaattagccaaggaaatcttgacctacaacgcaaaaaccaagcaccccatcaatctcaaaggaatcatggtaggaaatgcagtgacagacaactactatgataacttgggcacagtgacgtattggtggagccatgctatgatctccgaccagactttccggcaactaatgagtacatgtgattttcacaggcagaaggaatctgatgagtgtgagtctgtgtatagctatgccatggatcaagagtttggtaacattgatcagtacaacatctatgctcctccatgcaacaactctgatggtagtagtagctctgccacccgccgcaccatgcgtttacctcaccga

SEQ ID NO: 6338 - DNA, 1826 bp, Glycine max
cagcacttgatcaggttggagttgcagaaatgaaagttgcggttgaaagaaccggtggccttgttgtcctgtctgaaagttttggtcattcagtcttcaaggactcttttaagcgagtttttgaggatggggagcaatctcttggtctttgtttcaatggaaccctagagataaattgctccaaggaaatcaaaattcagggaattattggaccttgcacctcgttggaaaagaaagggccttctgttgctgatactgttataggagagggaaacacaacagcatggaagatgtgtggccttgacaagagtacatgcttgactgtgatgtttgatctttcatcaagtgatcgttcaaacacccctggtgctgtcaacccacaattgtacctacagttccttacaagttaccaggacccaagtggtcaatcagtgcttcgtgtcacaacagtaactagaagatgggtagatagttctgttagctctgaggaattggttcaaggatttgaccaagaaactgctgcagttgtaatggctagatttgcttctctgaaaatggagagtgaggaaacatttgatgctacacggtggttggatcggtttctcattcgcctctgttcaaagtttggtgactaccgcaaggatgatccatcatcttttacattaaacccatcattttcacttttccctcagtttatgttcaatctgcgacgctcgcagtttgtacaggtttttaacaacagtccagacgagactgcatatttccgtatgttgttaaacagggaaaatattagtaatgctgctgttatgattcagccgtcattgatatcatattcatttaatgcgctgcctgcaccagcattgttagatgtggcttccattgctgcagacaagattttgttgctagattcatattttagtgtggttatttttcatgggatgacaatagctcaatggcgcaacttgggataccagaaccaacaagaacaccaggcatttgcacaactattgcgagctccacatgatgatgcccaaatgataattagagaacggttcccggtgcctagattggtagtgtgtgaccaacatggttcccaggctagattcttgttagcaaaactgaatccttcagcaacgtataacaatgcacatgagatggctgctggttcagatgtaatctttactgatgatgtgagccttcaagttttctttgagcatctgcaaaggttggctgtccaatcatgaggacagataatagtagagattgacattttatgggttctggactttggtttggggaattcaccaatgatgtgtgtgtcctgcgttgtgctgttgcattcagtacttttcctttctttcctttgttcttaacaaagagaagctcggagcctcatgaattgaacaataaggaagacctaaaacataattctttaaggttctggtcgaattttcttttgtggagaaaataaagggttcaaaagtatgttaagtttgggtattgcggaaagaaaggatagaaaatcgagttaagagcccccacctctgccacagcagcgtaatagcaaatgagggagattttttttactcagtttttcctatttgttttggcccagatctgaatttttgggttcctcagctggattaatttatatagttcttttacttttatatgttccccaggtagcaaagtaacgaaagccattttgtcacgttgagtttgatatcattctcttgatactgttttgtattgtatattgtcaagtaagcgtataggactcatctcggtgcaatggatacttttgaatgctcgctgtttttgtcctt

SEQ ID NO: 6339 - DNA, 562 bp, Glycine max
gacattctggctaaaattctctgcgttttcttcgtcacaacaacccttctctgattcgtcttcaatttttgtttctcttcttacaaaaccttaggtcagatttctgggtttgtcttttctgataatctggagtggagctaagtcaagatgccgtgggtttccttgtttgtggatcacaaaagaaattgtgttcgcttggtggtgttttttcgtgtgattctgtaatttaattgctcaggtgtagtcccattaggttgcaaagcaactcttttcattagctgttctccttttcatttccaaagctgttagggggattgaggatgtactttgcaataacaataaagagataccgagctgtgaaggaagttggacaaattaagatgagtgttggagttaaccaattgatgcttgtttgccaggccgaatattttcgtcagttgcttaaacctgttacgtagtctagcatcgagggacaccggtttaggggggggattgccttatattgtacttcatcattataaagttgcagagagatgaagttttaatttggaaaagttgctat

SEQ ID NO: 6340 - DNA, 566 bp, Glycine max
tctggctaaaattctctgcattttcttcgtcacaacatcccttctctgattcgtcttcaatttttgtttccaaaaccttaggtcttgctctgtcgctcactgtgatctttttccccaatttgttccatttagcgttgttgtcaatttgcaaaatcaggtcagatttctgtgtttgtcgtttctgataatctggagtggagctaggtcaagatgccgtgggtttccttgtttgtggatcacaaaagaaattgtgttcgcttggtggtgttttttcgtgtgattctgtaatttaattagctcaggtgtagtcccattaggttgcgaagcaactcttttcattaggttgctctccttttcatttccaaagctgttggggggactgaggatgtactttgcggtaacaataaagagataccaagctgtgaaggaagttggacaaattaaaatgagtgttggagttattggatacaaccaattgatgcttgtttgccaggccgagtattttcgtcagttgcttaaacctgttacgtagtctagcattgagggacaccggtttagggggggga

SEQ ID NO: 6341 - DNA, 373 bp, Glycine max
gagaaaataaaaaaataaaaaattcaggttctcaaaaactgtacgcaactagaaacaatggctgagatgaagaagaaagcagaactgatcttctttcccataccggagattggccacttagcttcattcctcgaattagcacaactcctaatcaaccatcataaccatctttccatcacattcctctgcatgaaactcccttacgctccctctttagatgcatacatcagatcagttatagcctcacaacctcaaattcaagtcattgatctccctcaagtagaaccacctccacaggaactattgagaccactatcacactacatctggtcctacttgcagaccctcaaaccccatgtcaaaggtatagtgc

SEQ ID NO: 6342 - DNA, 987 bp, Glycine max
  unsure (1)..(987): unsure at all n locations
cacaattttcccttctatagaacgtgtccggtgagaacaatttattgcggccggttgttaaccaaatagaatcttggtggtgaaagtatatatactactagtcgcagtgaagtagctaggggcacatcaaattctttatttataacatggagtactctgtggaaactttggaaagagatcttaagaacacgaggaaatactacgggagtggaaaaacaaaggaagcaccatggagagaatcacagcttaaagggttgcacaattttctcgtggaaaaagaggaagaaattgtgacggccctcaagcatgatttggggaagcattacgtggaggcttttagagacgagcttggaacattaatgaagaccttaaacttggcaaccaagtctttgaaaaattggatggcggggaaagaggcaaagctgccacgaatagcactgctctcaagtgcagaaatagttcctgagccacttggtcttgttctcataatctcatcatggaactttccctttggactttccttggagccactgatcggagcagtagctgctgggaacagtgtggttctaaagccttcagagttgtcccctacttgctcttctcttttagccactttcctcccaacttacttggacaataatgccattaaggtcatccaaggtggaccagaagtggggaagctactcctgcagcaaagatgggacaagattttctccacaggaagcgcaagggtggggcggattgttatgtctgcagcagctgtgcatctgacgcctgtgactttggagttaggtggacaatgcccagccctaattgactctcgttcttcttcctggggacaaagacgtggctgtgaagcgaattttggtggcaaaatttgagggcttctnacggggacaggcatgcatagcaatcgattatgtccttgtggagaagagcttcagttctacattggtgacattaatgaaggaatggattaagacactg

SEQ ID NO: 6343 - DNA, 696 bp, Glycine max
cccaccctgccgtctcgcattcatatatatatgcatgtgttctgaatagtctattcttcattgcaagttttccgcacaactctttcacctcttgttttccccaatccttttcgcctttgtctgcgaatggcgtcgttcgatcaggcacctcccggcgatgtcaaatccggtgacaaaatcttcaggaccaagtgcgctcagtgccacaccgtcgaaaaaggtgccggtcacaagcaaggacccaatctgaatggtttgtttggaaggcaatctggcacaactcccggatattcctactcttcagctaacaagaacatggctgtgacttgggaagaaaagacactatacgattacttgcttaaccccaaaaagtatattccagggacaaagatggtatttcctggtcttaagaagcctcaggaacgtgctgatcttattgcatatctgaaagaatccactgcacaatgattaaattttcatacatgcagttatgcactttactttcaaagttctggagatttagttttcagacattttattctgtggtgcagtaaatactgtatcaacaaataaagtagacttgattggtttgcaatgctattttgttcattttgcattgcttcttaagaggctgccatttattggctaatgttcaattaatttacctgttgagagttaaaacttgttattgatata

SEQ ID NO: 6344 - DNA, 520 bp, Glycine max
ggtctagaattaacgggccgacgcacgcgtccagtggtatccatccgcgcatattctcatttcaatttgccatttcaatttgcatttgcatttcatttggcgttttgtttctttctggaagcttcacttcggcatccatggcgtcgttcgaagaagctcctcccggaaactccaagaacggcgagaagatcttcaagaccaagtgcgctcagtgccacaccgtggacaaaggtgccggtcacaaacaaggacccaatctgaatggtttgtttggaaggcaatctggcacaactcctggatattcctattctactgctaacaaaaacatggccgtgatttgggaggaaaagaccctctatgattacttgctcaaccccaaaaagtatattccagggacgaagatggtgtttcccggtcttaagaaacctcaggaacgtgcagatcttattgcatatcttaaagaatctactgcttaatgattaaattttcatacatgcagttatgcactttactttcaaag

SEQ ID NO: 6345 - DNA, 1530 bp, Glycine max
gaattcccggatttgggcatggttacctgggattcaatagtgataggggaccattgggtgcaattaaagaagtcagggttgtctgtgatgaccaatcatcaaaggagtgcctcaaacaacttaatcaggagatccatttgctcagtcagctttcacatccaaacatcgttcaatactatgggagtgatttgggggaagaaacactttccgtttatttggaatatgtctctggtggttctattcataaattacttcaggaatatggggccttcaaggagcctgttattcaaaattataccaggcagattgtctctggactttcctatcttcatgggagaaatacagtacatagggatatcaaaggggctaacatactagttgatcctaatggtgaaatcaaactggcagactttggaatggctaaacatataaattcttctgcctcaatgctttcattcaaaggaagtccatactggatggcacctgaggttgtaatgaatacaaatggctatagtcttccagttgatatatggagcttgggatgcacaattattgaaatggcaacatcaaaacctccatggaatcagtatgaaggggtagctgccatatttaaaattgggaacagcagagatatgcctgaaatccccgagcatctttcgaacgatgcaaaaaatttcatcaagctatgcttacaaagagacccattagctcgcccgacagcccataagttactagagcaccccttcattcgagatcaatcggcaacaaaagctgcaaatgtcagcataaccagagatgctttcccttgcatgtttgatggaagccggacaccgcctgtgttagagtcccattccaaccgaacaagtataacttctcttgatggagattttgcatcaaagccagctcttgcagcaccacgtgcattaaggagtcctagagataacacaagaatgatcacatctttaccagtatctccctcttcaagtccattgcgacggtatgggccaacgcatcagagctgttttttctctcctcctcatccagcttacacaataatgggacaaagtagttacactttgaatgacatatcatcatatccaatgacatcaaatgccacgtttgctcttgatccttggcatgaaacatctcgatacagagccaatacaccacctggtggatctccaagaatgagactcatttgagttgagattgtaaatagctatagaactaaaatatttccacgtctccccagcatacctcgtggtctgtggttgaacttcaatctggactctgaaacacaaactatcctaaatattctgcgggtccattctttatacttgagaaccagatgacggaagaaatgattctggccctatgctctcggtgcattgcattggggacaccgtgctgcttgtaacaatttcttgattactgtaaatccaaggtgctcactgtctttgtagtaacaattatgttgtataatgatagttcatggcaggagaaaaaataaaaataaaaagtaatatttat

SEQ ID NO: 6346 - DNA, 892 bp, Glycine max
  unsure (1)..(892): unsure at all n locations
gtcagaataaccagggatgctttcccctacatgtttgatggaagtcggacgcctccgccagttttagatcattccaatagaacaagtttaacttcattcgatggagattatgcaacaaagccaattcccgtaacttcacgtacagtaaggagcccaagagataacacaagaatgatcacatctttaccagtatctccctgttcaagtcctttgcgacagtatgggccagcacacaagagctgtttcctttctcctcctcacccaacttacactttgatggggcaaaataccctcccctcatatccagtgagatcaaatgccacattcactcttgacccttttcatgaaactgctttctacaaagcccacacacccggtggatccccaagaagactcatttgagttgccgattgtatatacctcaaaaaccttttggtttccctggcatgccttgtggtctgtggttgaacttcaatctgcactcttacgagtacaaactctatctaaaggattctggtcgattctttatgcatgagaaactagaccacgtgaggtacaagtgaggtgtaggagctctcgatgcaggcattggactggggacaccgtgctgtttgtaacaacaatttattgattactgtaaatccatggtgtttactgtctgtagtaacgtttatgttgtatattgttagttcatggcaggagaaaaaaggagagtaagttttcatatacactctctctctctctctgtttttcttctttttttttaaagattatgtatccattcttgagaatgatacgtgtatggtgtggaacttggccccaaacggtagccagaatgattttgggcccgnaaaaaaaaaaaaaaaaaaaaacaaattcagcggccgctcta

SEQ ID NO: 6347 - DNA, 665 bp, Glycine max
ctcctcctcatccagcttacaccacaatgggacaaagtagttacactttgaatgacagatcctcatatccaatgacatcaaatgccacgtttgctcttgatccttggcatgaaacatctcgatacagagccaatacaccacctggtggatctccaagaatgagactaatttaagttaagattgtaaatagctatagaaccaaaatatttccacatctccccagtataccttgtggtctttccctctgaggttgaacttcaatttggactctgaagcacaaaccatccaaaatattctgctggtccattctttatacaagagaaccatatacacgagaaccagatgacggaagaaatgattctggccctatgctctcggtgcattggattggggagaccatatttgcttgtaacaatttcttgattattgtaaatgcaatgtgcttactgggtttgtagtaacgtttatgttgtataatgatagttcatggcagaataaaaaaaagtaattttcatcgccactctttccattgtgaatcagaaattctatttgagattagatagggaaatctattagagctggcctagaagcgaggggttaggatagtttgtacaagattttgttaccattattgtataccaaaagaaagatattgtacaggagcg

SEQ ID NO: 6348 - DNA, 360 bp, Glycine max
attctttatgcatgagaaactagaccacgtgaggtacaagtgaggtgtaggagctctcgatgcaggcattggactggggacaccgtgctgtttgtaacaacaatttattgattactgtaaatccatggtgtttactgtctgtagtaacgtttatgttgtatattgttagttcatggcaggagaaaaaaagagagtaatttttcatatatactctttctctttttttaaattatgtatccttacttgagaaatgatacgtcatacgtgtatggtgtggaacttggttccaaaccatatccagaatgatgggcttcaaagttttaaaaaccaaaatttttgaatgtccaaaattttggttag

SEQ ID NO: 6349 - DNA, 763 bp, Glycine max
  unsure (1)..(763): unsure at all n locations
atttaatagattctgatcgtaacggtggtgatactagtgatttacttgaaggtcagcggcaatacaattctgccatacattcaattcaagaaaaggtaagcgagcaaccatctattcttcaaggtggagaattaagaccataccaactagaaggcctccagtggatgctttctttgtttaataacaatttaaatggaatattggctgatgaaatggggcttgggaagacaatacaaaccatctcattgatagcatatcttatggaacacaagggtgtgactggtcctcacttgattgtggctccaaaggctgttctgccaaattggatcaatgaattctcaacatgggctcctagcatcacaaccattctttatgatggacggctggatgagagaaaagcaatgaaggaagagttgtcaggggaggggaaatttaatgttctcgataacacactatgatcttataatgagagataaagcatttctcaagaaaatccattggctctacttgattgtggatgaagggcatcgattgaagaatcatgagtgtgctctagcaagaaccctggactctggctatcacattcaacgaagactgctgttgactggtaccccaattcagaacagtttgcaggaattatggtccctgctcaattttctccttccacacaacataaaaacgacaaagaatatcgaggnatggtttaatggtncctttggagagtgagtggatgtctctctanatgatgaagaanaattattga

SEQ ID NO: 6350 - DNA, 585 bp, Glycine max
ggaaaagaagaaagacagagagagaatggaagaagaaaaacgcgtattctgaaaaagaagccacccctctctcttcgccgctgttttctctcttctgataatttcccaatctcaagcaccgaaccaaaacaaagtagggttagggttttccgaaaaccctttcgtttcgcccactgcaactgaaaggggttttcgaagaagctctctgcgatgttttcttcttcttcagtgatcaaatggaggttccgtcacaagcccatgacgctcgtgcgactcttcccactcgcgtccctccttttgctctcgctaaacgacgtcgtttcgtccgattccgacaaatcagtgctcctcgagctgaaacactcgctctccgacccctccggcctgctcaccacgtggcagggctccgaccactgcgcgtggtccggcgtgctctgcggttccgccacgcgccgccgcgtcgtcgcgatcaacgtcaccggcaacggaggtaaccgaaaaaccctttctccttgctccgattttgctcaatttcccctctacgggttcggaattaggaggagctgcgagggctttcgtggagca

SEQ ID NO: 6351 - DNA, 405 bp, Glycine max
cttgtgtgatcccctgacaccacccccatgcaatttgccaaatgcttttctcttgctgacatttgtacttgatcatttctcagggctgatatagatacaatctttgcaaattttcttctgaaacgttttttgctcttcttctcttgaccctttggtgcatagtagcaaaagggggtggttgcataaagcagaaaagttggtaaatggcatggtatatctttaacagttgagcctttttgggttgaatattctgaaaaagttaagttgaaggtgaaaagttgaaagtttagcacttgggagtttagttgttgttgttgttaggaaaaggtgaaaaaggttggaaggagtgaggataataatatgccaactgtgtggttctctttgaagagatctctacattgcaaa

SEQ ID NO: 6352 - DNA, 373 bp, Glycine max
ctcgacccgaaaaacagacacattccccatttcctttcctttctcttcaaacctttgaatcagggttcttctcccactcttttcgccaccattgttgacacctcacaacattctccatagtttcacccttcttcggatcagctcaaatgggtaagcatcttctcttgctggttctcactctccaccgtctccgtctattcgccactctccatgtctcagctgccccttccactacttcccctgcacagattgtcaatgggtttctctccaatgctgtgcctgctttcaccaagtgggtgtggtcgctcaaggccaccaccaagactgcggtttcgagcaggtcgatgatcaagttctatatttggtacaatgt

SEQ ID NO: 6353 - DNA, 1170 bp, Glycine max
ctccattaaggttattcgcaataagcagactggtccgcccgcgcgtccgggatttgtggagttctattcacatgccacagctgagaaagttttgcaaaattatgctggaattttgatgcccaatgctgaacaaccattccgtctgaactgggcaacatttagcacaggagacaagggttcagataatgttcctgacctttctatttttgtaggagatttagctgcagatgttacagatagtttgttgcatgaaacttttgctagtgtatatccttctgttaaagctgcaaaagttgtttttgatgccaatactggccgttcaaagggctatggtttcgtcaggtttggagatgacaatgagagaacccaggccatgactcagatgaatggtgtttactgttctagcaggcctatgcgtattggagctgcaactccaaggaaatcatctggccatcaacaaggtgggcagtcaaatggcacagccaaccaatctgaagcagattctacaaacacaactatatttgttggaggactggaccctaatgtttcagatgaagatctcaggcagccattctcccagtatggtgagatagtctctgttaagatacctgttggaaagggctgtggttttgtccaatttgcaaacagaaataatgctgaagaggcattgcagaagctaaatgggacaacgattggcaagcaaacggtccgtctttcttggggtcgtaatccagcaaataagcagtttagaatggatttcggcagcccttggactggggcatattacggggcccctatgtatgatggttatgggtatgcattgccccctcgtcatgatcccagcatatatgctgctgcttatggtgcttaccccctttatggaggccaccaacaacaagtaagctgaatgaagtgcagtgcaggagtagcattcacaacaagttagacagcatcaagcttgaatgtgcaaattaagtttctctgtttgtaacttgcttgatctgttgaattcttaagacaagaatccctcctaattgtggagtggagatgaattttgatagcctgaggtagctctgtagggattcaattagtcattttgtttaggcctgtaggagtcatgactaatgaggaccttaaacttattataggaataattgtcttaagtatgtc

SEQ ID NO: 6354 - DNA, 498 bp, Glycine max
tgaaaataagggaagaactaagaagagattttattattattattattattattattacattgggttttggtgggaatcgctcgccatgaatggcgaggggagtgaagcaatgcaagtggagatggagattgagaaggagaggttggtgtacatgtggggttaccttcccggagctctgccgcagaggacgccactgttgacgccggttctcgttagggttccgccctctggttactcttggaaggatgtctgcggcggtggttgtggattcgccatggctatctctgagcctggaaagctcataacatggggttcaacagatgatttaggccaaagctatgttacatctggcaaacatggggaaattccagagcctttccctcttccaactgaagtgactattgtaaaagctgcagctggatgggcacattgtgtttctgtgacagattgtggagaagtttacacatggggatggagggaatgtgtaccctttgggaa

SEQ ID NO: 6355 - DNA, 462 bp, Glycine max
cggctcgagctttccgcataacataagaactgaaacaactgaaaataaggggtagaagagatcttactattggtgggaatcggcatgaatggcgaggggagtgaagcaatgcaagtggagaaggagagcttggtgtacatgtggggttacctgcccggagctctgccgcagaggacgcctctgttgacgccgcttcttgttagggttccgccctctggttacttttggaaggatgtctgcggcggtggttgtggattcgccatggctatctctgagcctggaaagctcataacatggggttcaacagatgatttaggccaaagctatgttacatctggcaaacatggggaaactccagagcctttccctcttccaactgaagtgactattgttaaagctgcagctggatgggcacattgtgtttctgtgacggattgtgagaagtttacacatggggatgga

SEQ ID NO: 6356 - DNA, 324 bp, Glycine max
atccgtataataggtgatcgattcccatggcaagtgaagagtgccatgcttgtctactctagctacaatgatacttcacggtggaatctccctgaagccttttcttcctcagctgcaaacaacatttgtcaagtgtctacaggatagtacaagaactgttcgttctagtgctgccctggcgcttgggaagctcagcggactcagtaccagggttgaccctttagttagtgatttgctgtcaagtttgcagggatcagatggtggtgttcgtgacgctattctgaatgctttgaaaggtgtcttgaagcatgctgggaagaattt

SEQ ID NO: 6357 - DNA, 632 bp, Glycine max
ctcaataaataacagaacttcatctgttttctttgtcctcaccaagccagagagagaaatggaagaagcatcatgtgtatgcttagttgtcatactgatacttgctctaacattggcatggagggtgctgaactggttatggctaaggccaaagaggttagagaggctcctaagagagcaaggccttcaaggaaatccctacaggcttttggttggggatttaaaggagattatgaatatgcaaaaggaagtcacatccaaacccatgaatctctcccatgatatagtgcctcgtgtcttttcctttctccaacacactctcaacacacatggcaagaattcttttatttggtttgggcgaaaaccaagggtgatcatcacagagcctgagttaatcaaagatgtacttaataagatgcatgatttcccaaagcctgacacgagtccgcttgtcaagttacttgctactggtcttttaaaccatgagggagaaaaatggaacaagcacagaagaataattagccctgcattcaatttagaaaaattgaagaatatgttaccaatattctacaaaagttgcaatgatttaattatcaagtgggaggaaatgttgtcttctgatggatcatgtg

SEQ ID NO: 6358 - DNA, 1068 bp, Glycine max
ctttcgcgtccgcccacgcgtccgattaaaataaagtaaaagaaaaagaaaagaagcgcaaagggattacttccatttcgtctgtaaaaccctaatatcttcgatcctttattattttttctgtttctctctccaaaacccaactttctctctcaagaaccatcaaatctcgatcctcccctctccctgcaagatccggtggtggttccgattgctcacatagggtttggtctcgggtcggtcaaggctggcgggtatttgggtgaagtaaatggcggatccggccggaatccggctccgtgagtggtgcaagcgtggtgttgcggcggcggcgttgatagggttacagtgcggtgacgattgttgccaacaagagtgaagcatgctgagcgtgctgcgcgtgcaccttccttctgatattcccattgtaggctgtgagctcacgccttacgtgctcctacgccgacctgataagaccgttaccaccgatgatttcccggaaaccgccccgttagacggccatttcttgcgctacaagtggtatcgtgtacagagtgataaaaaggttgctgtttgtagtgtacatccttctgagcaggccgcactgcagtgcctaggttgtgtaaaggctaaaatacctgttgccaaaagttatcactgctctccaaagtgtttttcagatgcatggcagcatcatcgtgtcttacatgaccgtgctgcaagtgcagccaatgaaaatggaaatgaggaagaagagttatatgggcgatttaataattctggatctggatcaatcaataccagcttatctgcctctgcatcaagtgctagcttgacaaatgggtctgcacctgtgtatccggcagccgttacgcaacgaagtggtaggtgaaacttggtttgaagtagggcaatttaagacgtataccccaacagctgatgacattggacatgtccttaaattcgagtgtactgtagttgatgcagagaccaaacttactgtagggcatgtaaacactctactaacttcccgtgtcatcctgctccctcgcctagcccgcgccgact

SEQ ID NO: 6359 - DNA, 269 bp, Glycine max
gcgatattccgcgcgagcaaatgggtctgcagctgtgtatccggcagccggtacgcaacgaagtggtcggtgaaacttggtttgaactagggcaatttaagacgtgtaccccaacagctgatgacattggacatgtccttaaattcgagtgtactgtagttgatgcagaggccacagagagaaatggaagaagcatcctgtgtatgcttagttgtcatactgatacttgctctaacattggcatggagggtgctgaactggttatggct

SEQ ID NO: 6360 - DNA, 270 bp, Glycine max
tctaaaaccaactttctctctcaagaaccatcaaatctcgatcctcccctctccctgcaagatccggtggtggttccgattgcgcagtagggtttggtctagggtcggccaaggctggcgagtatttgggtgaagtaaatggcggattcgagtggtgcgagcgtggtgttgcggcagcggcggcggcgttgatagtgttacagtgcggtggcgattaatgttgtcttcaattttaattttgatttgagtgctatactcccactgcagacc

SEQ ID NO: 6361 - DNA, 451 bp, Glycine max
gaaaatcagtaaacgcacaaaggtttagggcactgaactcaagtgaagtggcgacaaacaccgcacttcaacggctggcaccgagccaggaccacaccggtggttctataaggctacatctatatggaatcccaattagttgatggtaatgatgatatgggagtttctggggatgtgggtttgagtacgtatgaagttcagatgcatcaagaaacatatgaagtggatccaaatgaggagtgtagagtactagagagttcttctgggggagaggtgggtatctgcgatgatcatgctattcaggaaccatatgaaggcatggaatttgaatctgaagatgctgctaagatattctatgatgaatatgcccggcgtttaggatttgttatgcgtgtgatgtcttgtcgacgctcagaaagggatggtaggattcttgcccgcagacttggat

SEQ ID NO: 6362 - DNA, 476 bp, Glycine max
gtgttatcaatggcggaactccggttggccaaaattctcccatataaacaggccggtgcagcctatggcactgccatagcgggcctcccttcacaaattgcctatggtgggtgacaaaaaaaccgccatgccagcctgccatggcggccttagcgcccccatttatcaacattgttggcaaatgagaaaaatgttatctcctgcgatatttattctcatcatcagagaacattctgatgggttcaaaagatttaatttcgtggcagtggatccaaatgaggggtgtagagtactagagagttcttcttggggagagttgggtatctgtgaagatcatgctattcaggaaccatatgaaggcatggaatttgaatctgaagatgctgctaagctattctatgatgaatatgcccggcgattaggatttgtcatgcgtgtgatgtcttgtcgacgctcagaaagggatggtaggattc

SEQ ID NO: 6363 - DNA, 410 bp, Glycine max
cacaaaagtaaaaaaaaaaaaaaaaaaacaggaggaagagtgtaggagaaataacgccatggaacttaaggataatggaagtagcaaaggtgctgcacatgaacgggggcgttggagacgcaggctatgcaaacaactcctttggtcagcaaaaggtgatttgtttgacaaagcccttaagagaagaagccataaaaagcctctattgcggcacactccccagaagggtggcaatggcagatttgggttgctcttctgggcaacatgctttaattggcgtgtcagacttcatcaaaactgtggagaagctttgcctacaattgaaccataaatctccggaatacaagggtttttttaacgatcttcctgggaatgacttcaacaacataattaagtcccttgacagcttc

SEQ ID NO: 6364 - DNA, 754 bp, Glycine max
tttcaatcaaagcaaatatacaataatacgatggtcgagtttggaacgagaatgggatccatatggacggtgttgttttgttttgcatcggttttcgcgatcgtttctgcagaacgaagcattgtgaaaatggaagtgccgagattcaatgtcaccagccgagagcctcaacagagtttcctcaccaaagctttgaatttcttatggcaatctggagaatcagggtaccaacacgtgtggccggatatggaatttggatgggaaattgtgttgggtacttttgttgggttttgtggtgccgcgtttggaagtgttggtggagtaggcggaggtggcatattcgtccctatgcttagcctaatcattggatttgatccaaaatcatccacagctatctcaaaatgtatgatcatgggtgcagctgtgtcaactgtttactacaaccttaagctaaggcatcctacgttgaatatgcccatcattgactatgatttggcacttctcattcaaccaatgctcatgcttggcatcagcattggagtggtctttaacgttgtatttcctgattggattgtgactatagtgcttagtgttctcttctgaggcagatcaacaaaagcattctttaaaggggttgaaacatggaaaaaggaaaccataatgagaaaggaggctgctaaacgacaagaagcaaacggttctggggctgtagtggaatacaaagctcgtcccagtggaccagaaaaggacacca

SEQ ID NO: 6365 - DNA, 1275 bp, Glycine max
gttgtctaaggcgcagctggatggtgaggactcagagccccagctggattgtgacatcaagcccttgcacgaggatcctgtgcccgactctgctgttccagaaaaccaggtatctgaggtcaaccctagtttagggtctcaagtaaaatctgattctatttctactgattctctgtcaattaatcaaaagaatgaactaaaggatactataattactgataatgtcaaattagaacaagatattgttaagccggagatggtggaagaaccatcatccagaaatgatgttcctgtttcttatgatgaatcacattcaatggatgttggagggctgcatgagaaaaaggcatctgttgaagaaaatatcaataatgtttcaagtccagacttgaacaagaccaatagcagtgatgatgtagggtattcagaaaagttgaacttggacagaagttctggtgatgattctatggaagaggatttgcctgagactaagcaaattgattctaagtttaatgttgatgaacttaaagacaaagtagagattgaaaagcctattgtgaaggaggaaagtagtactatagctgttggagatagtctatctgcaggaaaagatgatacccaccaagatattgacattagtcctgctgccctgactgagaaacggaaatttaatgaacaagcatcagttgggaacagtgagcctgccaaaaggcaacgcaggtggaacactgaaacagttaaaggtccagatgcacaaagcactactcccaggcctgctactacacctagagatgagccaattgctttgaaacgcaacttctctaggtctgattcctctgcaactgatgatacacctaaagaacacattgttccaccatcacaaaggtccccaactaattccctcagaattgaccgtttcctccgtccatttaccctaaaagcagtgcaagaacttcttggtaagactgggaatgtcagcagcttctggatggaccaaataaagacccattgctatgttacttactcatctgtggaagaagctattgagacacggaatgctgtatataatttgcaatggccaccaaatggtgggcgtctcttagttgcagagtatgttgatcctgaagaagtgaaaatgaagttagaacctcctcctactcaggctgcatcggacagcactgatcgagcagttcctcctgctccccccttctcacagccagagccttccccccatctgcacagggagcagcatccagttccagtcattctcccacc

SEQ ID NO: 6366 - DNA, 637 bp, Glycine max
acgagccctattaaaaaaaagagtgggttggatcgacacaaagaagcaaggcgaggcaagggttttcactttttcagaaaagtcgaacggcgagcgtagtcgcaagagacgcaacagaatagaacgacgaataggcgtgcagggaaaccatttcattttcgagcgcgtcgctttcgaatccaatggccttcaacaacgcactgagatctgccgcgaagctcgtcgcttcttccgaatcttccttctctaactcagtgagcagaggttttcattcaactggcatgaagaggatgggaggtggacatggtcatgatgagccctactatcttcatgcaaagcacatgtacaacttggacaagatgaagcaccaggggttgaaaatgtcccttgctgtgttcactgctttcagcattggtgttgcagttcctgtgtatgctgtcattttccagcaaaagaaaacagcttctgcctaggctcatcttttacttctatttgcaataaggtggatttggggattctagactagcctattggttctgctgttcattactgctttgaactttatttatgttcaaccttctatatggattttccaaatatatctgataataatcaatttctctgcacgatcaaatac

SEQ ID NO: 6367 - DNA, 505 bp, Glycine max
ggatcgaaacaaagaagccacgcaaggcaagggttttcatcttttccacaacagtcgaacggcgaacgttcgcaagagacgcaacacaaagttgaacgaggaataggcgtgtagggaaaccgtttcattttcaagcgcgtgactttcaaatccaatcttccataccaatggccttcagcaacgctctcagatctgccgcgaagcttgtcgcttcttccgaatcctccctctctaactcagtgagcagaggttttcattcaactggcatgaagaggatgggaggtggacatggccatgatgagccctattatcttcatgcaaagcacatgtacaacttggacaggatgaagcaccaggggttgaaaatgtcccttgctgtattcactgctttcagcattggggttgcagttccagtgtatgctgtcattttccagcaaaagaagacagcttctagctaggctcgtctttttacttccatttgcaacaataacgtggatttggggat

SEQ ID NO: 6368 - DNA, 723 bp, Glycine max
cggacgcgtgggcggacgcgtgggatcgcacatcaattattctttcgcaccttcgaaaatcaattttctgtcttctctgcgtcttcttcctctatcaatcgttttccatggctcgtaccaagcaaaccgctcgcaaatccaccggtggaaaggctcctaggaagcaactcgccaccaaggctgcaaggaaatctgcaccgacaaccggtggagtcaagaagcctcatcgctatcgccctggaactgttgctcttcgtgagatccgaaaataccaaaagagcacagagcttctgatccgcaagctccccttccagcgtcttgttcgtgaaattgcgcaagacttcaagaccgatttgaggttccagagtcacgctgttcttgcgcttcaggaagctgcggaggcttacttggtgggtttgtttgaggacaccaacttgtgtgcgattcacgccaagagggtgaccatcatgccaaaggacattcaactcgcacgccgcatccgtggagaacgtgcttaggcttataataaggataatagcatagttgtcgccttttcgttttgcaatacatttcttgtttcttagggttttagtgttattttccagtttgttatgttttgtatagaagatagatatatcaacagcaacagcttcttaccatttgtagtgtgcctaaacggaaatatttgaataattagattcactttggccaaaaaaaaaataa

SEQ ID NO: 6369 - DNA, 715 bp, Glycine max
gagatcgcacaacattattctttcgcaccttgcagaatcaattttctctctcaatcgtctttcatggctcgtaccaagcaaaccgctcgcaaatccaccggtgggaaggctcctaggaagcaactcgccaccaaggctgcaagaaaatctgcacctaccaccggtggagtcaagaagcctcatcgctatcgtcctggaactgttgctcttcgtgagatccgaaaataccaaaagagcacagagcttctgatccgcaagctcccctttcagcgtcttgttcgtgaaatcgcgcaagacttcaagactgatttgaggttccagagtcacgcggttcttgcgcttcaggaagctgcggaggcttacttggtgggtttgtttgaagacaccaacctttgtgcgatccacgccaagagagtgaccatcatgcccaaggacattcaactcgcacgccgcatccgtggagaacgtgcttaggctaataataagagtaataacgtagttgctgctgcttttttcgttttgcaaaacatttcctgttttaggggtatttttaggggtattgtccgggttgtttggtattggatggaataaaaaatggtaaatccatccaccacttagcctttggaatggtcctaaactgaaaaatttgaaatattaaattccccttggcccaccttggtaggttccaaaaaaagtaaatttttattttttggtt

SEQ ID NO: 6370 - DNA, 413 bp, Glycine max
  unsure (1)..(413): unsure at all n locations
gatcgcacaacattattctttcgcaccttgcagaatcaattttctctctcaatcgtctttcctggctcgtgccaggcagaccgtctcgctaatccaccggtgggatggcccctaggaagcaactcgccaccaaggctgcaagagaatctgcacctaccaccggtggagtcaagaagcctcatcgctatcgtcctggaactgttgctcttcggtaatttgctcctttcagcattggtttggttcctcctcccccttcgcgttttgaattttcgcgaattattgttttttttttcgtggtttcagtgagatccgaaaataccaaaagagcacagagcttctgatccgcaagctcncctttcagcgtcttgttcgtgaaatcgcgcaagacttcaaggtatgttctaaattcaaaa

SEQ ID NO: 6371 - DNA, 683 bp, Glycine max
tatagaaaaccctcgtattacacgcccatataaaaaacaaatcaactgttccatcttttccacatcgcatatcaattattcttttgcatcttcgaaaatcaattttttgtcttctctgcgtcttcttcctctctcaatcgttttccatggctcgtaccaagcaaaccgctcgcaaatccaccggtggaaaggctcctaggaagcaactcgccaccaaggtactattttttttattatttagtgtttcgttttttttttctagttagggtttctcgatttcaattaccttttattcctaatttcccgaaggtttattgacaattgattcttcaattacgtaattatgtgattttggatattaataattcaataaacgcgtgatttctgtgtaggctacaaggaaatctgcaccgacaaccggtggagtcaagaagcctcatcgctatcgccctggaactgttgctatttccagttttctcacccgttattgatcttattacagtgaataacaatacctatgaatatgattataattaaagcattgaaaaatcttttcagaagtgtgtcctgtgcatagtgcataagagcgattcaattcaaagaaagagccccgagagaaacagatgaggggtttgaatcaattaggggtagtagttgagaccatctatgaggaagaatgcgag

SEQ ID NO: 6372 - DNA, 575 bp, Glycine max
ggcttgcttgcaggtggtgattttgaagcgcagcgtggaacatataagatacttaaggttgtgcctttcaattcagtccggaagaagatgtctgtgctagtcggtcttcctgatggaggtgtccaagctttctgcaaaggtgcatcagaaatagtattaaaattgtgtaacaaagttattgatccaaatggaacagctgttgatctttctgatgagcaggcaaagaaagtctctgacattataaatggatttgccaatgaagctttgagaactctttgtttagctctcaaagatgtaaatggaacccaaggagaaagcagcatccctgaagatagctatactctgatagccattgtgggaatcaaggatcctgtgcgccctggggttagggaagctgttaaaacttgtttaagctgctggaataactgtccgcatggtaactggtgataacataaatacggctagggctatagctagagaatgtggcattcttacagaggatggtgtggccatagaaggcccccactttcgggacttgtctacggagcaaatgaagattatgacgccaatattcc

SEQ ID NO: 6373 - DNA, 1914 bp, Glycine max
aaacagtacccattttcttgtgtagaaaaaagagagcgagagcagaagagaagagtgcagcgcaagcttagaagagcaaagtgtgtgatgtggttggacattcagtcccaatcacatggcttcttcttctccttctcctccatcttatctcacacaccttcctcttcatccctctcaccaaggtgagagtgagaagcgcgtggaggacgatgaatcgcgcgttccgattcacatcgtgaccgcggcgacgcaacttcccgtcgaatttctggaaccctcgcctcaatcgaagctcgtcatcggctttgactgcgagggcgttgacttgtgccgcaaaggcactctctgcgtaatgcagcttgcgtttccggatgctgtgtacttggttgatgcgattgaagggggagaggagcttatcatagcgtgtaagcctgcacttgagtctaattacatcacaaaagtgattcatgattgcaaacgggacagtgaggtctctgatttatttgattgcttgcttccttgcttgccctggtccctcttttgtatatgttgaaatttgtggaatgtttattcaaaggaaaaaaagtgtttgagagccttgacttgtggtcttggcattcaccattttgtctggccatttaaagcacttataaacttcttgttgtttactaggcattatactttcagtttggcatcaagttgaacaacgtagtggatacccagattgcttattcacttatagaggagcaagaaggacgaaagagattgcgagatgactacatttcatttgttggcctccttgcagatccacgttattgtggtagtgtggtactatgtatcgtggtatccattgaatgtttttgatggccatgatttttatagtgacctcattattctagacataataatgattaataattcctatatgttccttcgagtcatttggtttgtccctcgttaactttgagggtttgcatgtaggcatatcatatgatgagaaggaagaagttcgtgtccttcttcgacaggaccccaagttttggacacacagaccattatctgaacaaatgatccgtgctgctgctgatgatgttcgttttcttctctatatttatcgccaaatgatggagaaattaaatgagcggtctttatggtatcttgcagtccatggtgccttgtattgccgatgtttctgtttgaatagtaacaattttgctgattggccatctctaccttcaattccagtagataacctgaatgctgatggaaatgatctcgaggaagaaattctttcagttcttgatattccccaaggaaagatgggacttgttattgggaaaagaggggcaacaattttgtcaattaagcggtcttgcaatgccgaaattctcacgggaggtcccaagggcccacctgacaaggtcttcatcatcggaccggtgaaggaggtgaggaaagccgaggccatgattcggggtagaatcttggatatatagttaagaaatgtgttacttctctttgaaccaaacttctgcaataaatcatttttctgatccaatagttactagcttactgcctctgatagttggactgagtttttaggggcaggggtctgttgttcaatacttgaaattccttttcccatgcttgtatctactggaaaagagaaaagaaaaaagaaatagttttcttatcaacaaaactgaataatatttgatctggaagatatttattggaattagaaaatagacttgcccatatggattgccacgaaatcaatcagtttggagctctgatgttgtaaatgataaatcagattgtgaaaatgaatgggggatcctatcatagggtgcttgttcaaattctgtgaatctatttctgacttaagtcactagtagggagctagtcggcgtc

SEQ ID NO: 6374 - DNA, 1318 bp, Glycine max
  unsure (1)..(1318): unsure at all n locations
aaaaaaccaccgaaggggccaaacaacaaccttttatgggttttttttttaaatcaagtttgggtccttagccatttcctaccggggggaaaaatattaaattgccaaattcaatttgcacttgatggatatgggagaaaggaaaaaaccctgtaggacaataaataacccgttccaattacaatgtgaccccggcgttacaactttccgtcgactttctggaaccctcgcctcaatccaagctcgccatcgactttgattgcgagggcgttgacctgtgtcgcaaaggcactctctgcgtaatgcagcttgcatttccggatgctgtgtacttggttgatgcgattgaagggggagaggagcttagcatagcgtgtaagcctgcacttgagtctaattacatcacaaaagtgattcatgattgcaaacgggacagtgaggcattatactttcagtttggcatcaagttgaacaacgtagtggatacccagattgcttattcacttatagaggagcaagaaggacgaaagagattgcgagatgactacatttcatttgttggcctccttgcagatccacgttactgtgccaggcaaatcatatgatgagacggaagaagttcgtgtcctccttcgacaggaccccaagttttggagacacagaccattatctgaacaaatggtccgtgctgctgctgatgatgttcgttttcttctctacatttatcaccaaatgatggagaaattaaatgagcggtctntatggtatctcgcagttcgtggtgtcttgtattgccgatgtttctgtttgaacagtaacaattttgctgattggccatctctacctccgattccagtagataacctgaatgctgatggaagtgatcccaaggaagaaattctttcagttcttgatattccccaaggaaagatgggacttgttattgggaaaagaggggcaacaattttgtcaattaagcagtcttgcaatgccgaaattctcacgggaggtcccaagggcccacctgacaaggtcttcatcatcggaccagtgaaggaggtgaggaaagccgaggccatgatacggggtagaatcttggatatatagttaagatatgtgttatttctcttccaacctaacctttgcaataaatcatttttctgatccaatagttactggcttataggggcaggggtgtgttgttcaatacttaagattccttttcccatgcttgtatctactggaaaacacaacaaaataaaggttttgttataaactagtctgaataatatttgatctggaaggatttgttggactt

SEQ ID NO: 6375 - DNA, 646 bp, Glycine max
attttcttttctctctctcctctcatttcgcaatcctctctgtggcccgcagctagggttttaatttcaatttccaactatttaacgcttggatcgtttattttatgccagaacaacaactctatattgttttttttttaattcgagtttgtgttcttgagctatccgttacggtggggagagattgaaattgacgaattcgatttgcaattgattgattaggtgagagtgagaagtgcgtggaggacgatgaatcacgcgttccgattcacatcgtgaccgcggcgtcacaacttcccgttcgacttccgggaaccctcgcctcaatccaagctcgtcatcgactttgattgcgaagggcgttgacctgtgtcgcaaaggcactctctgcgtaatgcagcttgcattttcggatgctgtgtacttggttgatgcgattgaagggggagaggagcttagcatagcgtgtaagcttgcacttgagtctaattacatcacaaaagtgattcatgattgcaaacgggacagtgaggcattatactttcagtttggcatcaagttgaacaacgtagtggatacccaggaattaatgaagcattgtgtttgaatccagaattgggcttgcgcttgaatccagaattgagct

SEQ ID NO: 6376 - DNA, 709 bp, Glycine max
catagactatagactaaagtgtgtcaaactcactatgatactgacactactgcctcctccaaaatcaccattcttgaatacccttttgctcctctgcactactctcctcctcccaccttgctacctggctctccctgaccctgatgctgatgcggttcagccaatcatcccaaacccctcatcttcaacaggaacaatccctgcattcccagaacaagctgatgctgcagggtgccctctcagcctctcagatgagcactacgaaggcataaagagtgcatgtggctccaacaaacatgctgcagatgatgatgatgacctccaccgtagcagatgctgtcctgtgctggcagcgtggctctattctgcatactcagccactgcccttagtggtggaatgcaacatgaacgtgcctcaaagggccataccacatcctatgacatgcccttgttgcctgatgactcagaaacatgtgtgagtgacttggggaaggccttgaaagttagaggaatccagctttttcagcccaatgagacttgtgatctggtctattgctactgtggcattaggcttcaccctttgacatgtcctgagtcattctcagttactccaagtggaagtcttgttgtcaatcaaagtgtcagaagattggcgagggattgctcgagtagcagcaccaatgtcaacaagtttcccggcctgggtgga

SEQ ID NO: 6377 - DNA, 303 bp, Glycine max
ggggccgcgtcttttgtgccgaaccatggatcctccaaggaagaagaagaacaggacgatacggcgtcgcagagctgaaaaccctagggaaccagcttctctcttccgcctcgcacatcaacaacctccctctcctcctcaccttcgtttccccttcttcccctcctcaccacgtcctcgaatccctcctctcgctccactccttcttcctccctctcctccccaagcttccttcctcctccgccccctcctccgccgacgaccaatccgagttcatctacctcgcctggctccgttccaagt

SEQ ID NO: 6378 - DNA, 810 bp, Glycine max
agacatcaaatgtatttattttgcagtaacggaagagagtggaactggatccccgtcatcggataaacacaatagctgtagctagagaggagcgccagtggagattcgcagaagaagataagggatgtttgggttaatcggaagaaaggccaatttgttggtaggatcgggaacaagaagaaggtggttgagcttcgcagcaacagccacaaccacttctaatggtggtgccatggaggagttgctttcgcaactccaatctaatgtccaaaaggctcttgctggtggaggacccgaggcagtgaagaggaacaagagtaggaacaaatttctgccccgtgaaagaatcgatcgcctccttgatcccggttcttccttcctcgagctttcacagcttgcaggacatgacttgtatgaagaacctttgccttctggaggggttgttactgggataggtcctgtgcatgggagactgtgtatgtttgtggcgaatgatcccactgttaagggaggtacttattatcccattactgttaagaagcacctcaaggcacaggagattgctgctcagtgcaaattgccctgcatatatcttgtcgacagtggaggagcttttcttcccaagcaagccgaagtgtttccggacagagagaacttcggcagactgttctacaatcaggctgtaatgtctgctcaagggattcctcaaattgcattggtgttggggtcttgcactgctggtggcgcttatattcctgctatggctgatgaaagtgtgatggtcaagggaaatggtaccatttttttagc

SEQ ID NO: 6379 - DNA, 1311 bp, Glycine max
ggaaacaaggtaaaccaagattgaagccgcccttcccagccaatgctgggttgtatggatgtcctacccactgtcacaaatgtggaaactgtggctgtgtccccaaccattctaaggcgtggacctgaatggtttgccagttttggtaggaagaacaatgctgggacaaagttgttttgtgtgtcggggcatgtgaacaagccttgcactgttgaggaggaaatgagtattccactgaaggagttgatagagaggcactgtggaggtattcgaggaggatgggataatctacttgcagtgattccgggaggatcatctgttcctctgattccaaagcatgtatgtgatgatatctttatggattatgatgcattgaaggctgttgggacagggttggggactgcagctgtaattgtgatggataaatctacggatgttgtggatgctattgcaaggctttcctatttctacaagcatgaaagcttttggcagtgcaccccatgcagagaggggactggttggctttggacaatcatggaaagaatgaaagttgggaatgccaagctagaagaaattgatatgcttcaggagttgactaaacaaattgaagggcatacaatttgtgccttgggtgatgctgctgcatggccagtgcagggtcttatcaagcatttcaggcctgagcttgagagaaggattagagaacatgcagaaagggagctgctgcaggccactggctaggctttcactaaggggtgtgattgtactgctggatagcaagagtgagaataagacagtgccagtcattttggaaagataggtggctcaggttactgtagctttattgctacttctattttcttttatgctgtagcaattatggctggatcatacctgggaaaccatttgggcgagtttaaactgtacctgcttgtcatttggcacattttcatgtaatttgttaataatatctgtatactgttattagttttgaaacacaattcatgattatgcatgttatcagtgaatatgatgagggatgatgtccactggataacctaacttatttgtgattgagttattcagttggaataactttttagaagaacatgttattgttcaacaacgtcctcaacttgcttgtatgaagtctgttgatccatgcatggactaaaacatgtccatacatgattttcagctagttataatcctggtaccaaggtcgtttgcatatttcttttgccatgcaagagacatatttgcctttcaaggaattttcttgagtgtttccaattccactagtattttctc

SEQ ID NO: 6380 - DNA, 393 bp, Glycine max
agaatcaaatctctctctttccgatcagatcggacaccctctgtctgaatcccaacccaccgcacacaattcctttcttcttctcaacgtttcaattcgcaatttttcaaaaacttttcccgttttcatcaattcgaatcttattgtttttttgcactgttttcgttaccaaattctgtgatctgtggaattccctgtgacttcagggtttgggggtgctcgattcgggttcactgcgacggtgatggcaatttgcgcgttgaagttttgaatttgtggatattttttcgttctgaatcgttttttcgtggttctctaatggcgtcggctcaggtgctgccaaactccaccgcgtcgtcgcggaagcaagagcatcttgaagctggcaagcgc

SEQ ID NO: 6381 - DNA, 632 bp, Glycine max
tttctatcatgttaaatggtcttgattgcacagtgattgaagaaaatgccactcatgatgagaatgtagaaatagctcaggcatttgtcaattcatctattaattctgatgctgctatacaatgtgaaagtggtgctgatgttcctactagcatccacaatgtgccagttgagtccatggaatgcaatggatcatcaaatgctgacgggcagcctcctaatgttgagttaggggactctggttttgaaactcttaatccaggtgattcccatgcatcatcaatttatgctagtgctgatgttgatatgggtggtactgatgctgaaggaaatcaatcagagcaaccaactgtatctgaagacaggagggatgagatgttatcaactcagaacactgaggttgctccagatgcaactcaggccgaccaagttagtgcaaataatgaagcttccggtgctaatactatcgaccctacctttttggaaggccctgccctgaagatcttcgggcagaagttctggcatcccaacaagctcagtctgttcaacctccagcttatgcaccaccttctgcagaagatattgatcccgagtttttagctgctcttcctccagatattcaagcagaagttt

SEQ ID NO: 6382 - DNA, 1334 bp, Glycine max
tttcattttcgctttttctatttttaattgtctctgattttctcgtagaacgcgtttcttgccactccgaaaaacaagaggaaaaaattggaagttttcaaggatgttagaacagttactgatatttacaagaggagggttaatcctctggacttgtaaggaacttgggaacgctctgaaaggttcacctatcgataccttgatccgttcctgtcttttggaggagcgatctggtgcggcagcatacaattatgatgcccctggtgcttcctacaccctcaagtggaccttccacaatgatcttggtcttgtttttgtggctgtttaccaacggatccttcacctcttatatgtggaggatctgcttgctatggtgaagcgcgagttttcgcaagtttatgatcccaaaacgactgcataccccgatttcgatgagacctttaggcagctgaagatggaggccctggctcgcaccgaggatttgaagcggtcgaattcaaatcctgttgccgggaatgcgaagaagcaggtgcaggggaatgataaatctggatttgagggagggaataagaagaagaagagtggtggtggtgcggatggcgacgatggcaagcggaagttggagaatggacactccaatggaaattttcttgttgctaaagatactaacctgagtagggatgtgaatggtagacataatggaagtcccaatgttggggcttttgatgtacataagcttcagaagcttaggaccaaaggtgggaagaagactgatactgttgttgccaaggcctccaaggcagagccaaacaaaaaagtcacgaagaaaaatagagtttgggatgaagctgcaactacagaaactaaactggactttaccgatcattccggtgaggatggggagaggaacatagattttgttgtggctgctgatcaaggtgaaagtatgatggataaagaagagattgttagcagtgaaagtgagcaggaagaggaggacgaggatgaggaggatgcagggaagaacagaaagcctgatgccaaaagcaagggttggttttcatccatgttccagagtattgcagggaaggcaaatttagagaagtcagacttagaaccagctttaaaagctctaaaggataggctcatgaccaagaatgtggctgtggagatagctgagaaactctgtgaatcagtggcagcaaatcttgaaggaaaaaagctggcctcatttacaaggatagcttccacagtgcatgcggctatagcagaagctcttattcgaattgtaacgcctagacgctcgattgatatactgagagatgtgcatgctg

SEQ ID NO: 6383 - DNA, 468 bp, Glycine max
cttccttccctgaccaacacccccgtgtaaggtgggcagctattaatgcaattgggcagctgtctactgatttgggtcctgatttgcaagttaaatatcatcaaggagtgttgccagcactagctggtgccatggatgattttcagaaccctcgtgtgcaggcacatgctgcttcagcagttctcaacttcagcgagaactgcacacctgatatcttaacgccatacttggatggaatagttagcaaactacttgtacttcttcagaatggtaagcagatggtgcaagaaggtgccttaactgctttggcatcagttgccgattccttcccaggaacacctccaaaaatattatgatgctgtaatgccatatctgaaagctatattggttaatgcaaccgacaagtctaaccgtatgcttcgtgctaagtccatggagtgtctaagtttagttggaatggctgttggg

SEQ ID NO: 6384 - DNA, 1771 bp, Glycine max
  unsure (1)..(1771): unsure at all n locations
aacgagaggcccaaagacactcccaattcttgaactcatctcttccccacatcctaatgtggtcacgttatctgaaaggagccaaatccaatatccaacttccaactattacaccacagtttagtcatcaacaatataaggttaaaggaatcatatgtcaaagtcatttccatgcaccaattttattggtcagaaatgagttagtatggttaagtatttcacactggatcatctatttctaatattataagctaaaggaccaagaactgaaattattataacctcaacttgaactatccatacatagccactttacactcactccttctgttgttgccttcatggccaagccagtgtccattgaggtatggaacccaagtggcaaatacagagttgtcagcaccaaaccaatgcctggaactcgttggatcaatcttctcattcaaaatgatgttcgccttgaaatatgtaccgagaagaaaacgattttgtcagttgaagacatcattgctttgattggtgataagtgcgatggagttattggacagttgactgaagactggggagaagagttgttctctgctttgagcaaagccggaggcaaagctttcagtaacatggctgttggttataacaacgtggatgttgatgctgcaaacaagtatggtgttgctgttggaaatactcctggagtgctcactgagacaacagcagagttggcagcttcactaactttggcagctgctagaaggatagttgaggcagatgagttcatgagagcaggattatatgatggatggctacctcatctatttgttggaaacttgctcaaggggcaaactgttggtgtaattggagctggtcgaattggatccgcttatgcaagaatgatggttgaagggttcaagatgaacctaatttactatgatctctaccagtccacacgactagaaaagtttatcacagcctatgctacattcttgaaagcaagtggtgaaaccccagtgacttggaaaagggcagcaaccatggatgaggtcctccaggaggcagatataattagtcttcatcctgtcttggataaaaccacttatcatctagtcaacaaggaaagactagctaagatgaagaaggaagcaattcttataaattgcagtagaggacctgttattgatgaagctgcacttgtggagcatttaaaacagaacccgatgtttcgagtaggccttgacgtgtttgaggaagagccctacatgaaacccgggcttgcagagttgaagaatgccattgtggtaccccacattgcatctgcctccaagtggactcgtgagggaatggctacactagcagctctaaacgtgctggggaagatcaaagggtacccagtttggtttgatgccaatagggttgaaccattcctcaatgagaatgctcaaccaccagctgcatccccaagcattgttaatgcaaaagccctgggtttgccaacttcaaagctataaacatacatggttctatcctacaagggccttcaattgcacaaatgaccaatttttgtctgttgagttgggctctgtggctagtctgttcttttttttgtgtatgtggggtgctgatggcactgtgcatataaagactgtcatgttaataagcatcgtgtgtttgtagtatttcaaacattaattaaacataaatgaagttattccttatgtccctacactagtttagttggtttgtttttacatttaaaggttaacagcatgctcnctac

SEQ ID NO: 6385 - DNA, 848 bp, Glycine max
acgagtggagcagtgtgggaccagcacagcctatggaatcaatgagagcctcttcttcctcttgcacgcaagtgttaaaaaaaagtgcaattagcaacaaatcttgcaaatccacaccccccacttgctcctgagccatacaatacaaaaaaaaaagtcgtttttttattttttttattttcaaccatggctggtgtgaaccccgaggcaggagggtggaaggcttatccttctgttatggagactgctcttgatagtggtgatggaaggagtcatcataacatgagtgatgatgggtcggtgatgcatttctctgctacaaggtcagtggcagtgccatcatctggacagaataaagtgattcctagtccaactcagtttagcatcctctataaggggaaaatgtgtatctatgaaggaattcctgcagaaaaggtgcgtgaaataatgttgattgcttctgtctctgctaagtctgctgaaatgaagagtgggatccgattgacttcattcattcccaaaagcccttcttcttcacagggaaactctactaatttgccttcaccccaatcagtcaagagttccattcgcaggctgcaagatgaatttccactggctcgaaggcaatcacttcaaagatttcttgagaagagaagaaacaggtacagtactagcaacctttcctctttagtgctgtctctaatcagtttggaatttccaatattgtatttgatatcatgaatcactctctttaatgtatgtcaaaatttattggaactataaatcatgaatggaattcataaagtcaggagtcacatccacataattttgtgatctctaacaaattt

SEQ ID NO: 6386 - DNA, 423 bp, Glycine max
ggaccagcacagcctctggagtggtgatattctattcttgggggggcacataaaagttaaaaaaaaagggcaattagcaacaaatcttgcaaatccacaccccccacttgctcctgagccatacaatacaaaaaaaaaggcgctttttttatttttttcatttccaaccatggctggtgtgaacccccaggcaggagggtggcaggcttatccttctgttatggagactgctcttggtagtagtggtgatggaaggagtcatcataacatgagtgatgatgggtcagtggcagtgccatcatctggacagaataaagtgattcctagtccaactcagtttagcatcctctataaggggaaaatgtgtatctatgaaggaattcctgcagaaaaggtgcgtgaaataatgttgattgcttctgt

SEQ ID NO: 6387 - DNA, 688 bp, Glycine max
ggtgcccctcaaaaaatgtaactataaataaaggcaggcacagactccattcttcttccataacaagctctgaaaagaagagagagaaggtggatagggtgatacagattacagagtttgtgtatccatcttcgttcgtcgcttggcttgttcgccttcactctccgacattcacatcattcatcagagactggagcctgcgaagaaaagaataatttatggaggacggcgcaggaagaggtttggaatgccagaagactatggatgggaaggtgagtaacagtaatgggccagagaaggaaattccttcttgttgtctgaaggccaaggcttcaatccccgagtcagaggcaaaattccattccactgttgtttctgggtggttctcagcttctcaaacttgctctgggaaatctgggaaagctgtttatttcaacaacccaatgtggccaggagaagcccattcaatcaaagtagaaaagatcttatacaaggaaaagtcggagtaccaggaggtcttggtttttgagtcatcaacgtatgggaatgtgcttgtacttgatggaatagttcaattgactgagagggatgaatgtgcttaccaggagatgatagctcatcttcccctctgttcaattcattcgcccaaaaatgttttagttgttggtggtggagatggcggtgtact

SEQ ID NO: 6388 - DNA, 372 bp, Glycine max
gatagcaagctctgaaaagaagagagagagagagagaagtgcatagcgtgatagagctttttgttgtctatacatcttccttcgttgtttgggctcgttcgccttcactctccgacattcatatcattcatcagagactggagcctgagaagaaaaggtgaatttatggaggacggcgcaggaagaggtttggaatgcccgaagactatggatgggaaggcgagtaacgggaatgggttagagaaggaaattccttcttgttgtctgaaggctaacgcttcaatccctgagtctgaggcgaagtgccattctaccgtttgttccgggttggtctcaacgtcccaaaacttgccctggggaaagtctgggaaa

SEQ ID NO: 6389 - DNA, 566 bp, Glycine max
atactattcacacaaactctctctgactagtgatatctatccatggaggccaagaacttgtggcgcttcctggttctttcaatcggtgtggtactagttttacttgtcacttggctgcccaacaaggaggctctagactgcaacctttactctggatggtgcacctcaaagaaccggttctactcttcagcacatcctaataatccgattaagaaaccatcattttccacatatcatcatcacaagaaccaacaccatgaatccgagattcctcaacaccctcttgaccctctaaccatccaagagttcaacaaggtccgcaccatccttttgaactaccctctcttcaagtcctcatccagctacactctcaactccgttgtccttgaagagccagacaaaaaacttgtcctcaaatggaaaaagggtgatctacccttgcctaggaaggcttccgtggttgcatatgtgaagggagactcacatgtgctcacggtggacctcgaaaccggccaggtggtgagccaggaagccatcacctggtcggtctcgggttaccccaccat

SEQ ID NO: 6390 - DNA, 967 bp, Glycine max
gacccccaaaacccctcttcactttcaatctctttcccttcctttccttgtctttttatttttttacatcaaaattaaaataataacacccatcaaacaaaccacacttctccccctccctttgaaaacacctcaatcaatctcgatgatcatggcagcactcaattcaagcacttgtgccaaacctcaattccctcaccctctctcctcctctttctcttcttcttcatcattaacaagagatttgggcttccccacaaggtttcagaagaagcccattagaaaggtggtggattgtgctctacactcccccccagtgatccatttcccaaaccagccctacaacaaacctgaaattaccaaagaacccaccacctccaccgcggaaaggcctcagtggaacccattccaaaaagccgcagcaaaggccctcgacatgttcgagagcgcgttgctctcacgcgagctcaaccaaccctttcccaaaaccactgacccacgcgtccaaattgccggtaacttcgcccccgttccggaacaccccgtcgaacattctctccccgttattggcacaatccccgacgccattaacggcgtctacctccgtaacggcgccaacccattgttcaagccaaaagcgggccaccacctcttcgacggcgacggaatggtccacgccgttaaattcaatgacggcaccgccagctacgcgtgccgcttcaccgaaacgcagcgtctcatgcaggagcgcaaattgggaaaacctgtgtttcccaaggcaatcggcgaactccacggccattccggcatcgcgaggttgatgctgttctacgcaagaggcttgtgcggcatcgtcgaccaccgcagaggcgccggcgcagcagacgccggcctcgtcttcttcaacggaaaactcctcgccatgtcggaggatgatttcccctacgaactccgaatcaccgcctcc

SEQ ID NO: 6391 - DNA, 444 bp, Glycine max
gcgtacgcccacgcattcatctcatcttgctagaagacgttttttgggaggaagaagaaacagggacaataagcatagggaactgtgaagagctgaaggaacctcttgtttttgttgttgttgttgttgttcgtctggattgggttggctttagggctttgaatgccatctggggttttgctctcaggcaatcaagctccaaagctgacccctttctctcacttctaactctcataccttgttccattcttcactttctctctctagaactacaatggtagaagacgtgtgtttcctctacaaggaaattcttgttatgaagcctccaaagagatcaccaatgttgttaaggacggcagtcgtaatattttcgatgggttgtgagcgttttatcttccttgtatgtctaaaacagataagcacccaaacttaggactacattta

SEQ ID NO: 6392 - DNA, 327 bp, Glycine max
aatcgtcgtcgttatcataatcgggatagtagaagaaaagaaaaggcaagaaagacaggaagaagattaataaaaagaaagtgtagtattctgggagaaagagagaggaaggagaaacagggacaatatgcatagggtactgtgaagagctgaaggaacctttgtttttgttggttgttgttgttgttgcgtctggattgggttggctttagggcttggaatgccatctggggttttgctctcaggcaatcaagctccaaagctgacccctttctctcacttctaactcacataccttgttccattcttcactttctctctctagaa

SEQ ID NO: 6393 - DNA, 662 bp, Glycine max
atccaatgatttttacagagaataaatcacctatccaagtgggtaagcaattgaccatgatacaaaaacatgaaactggcaaggatgttctcccaggtgctacagatcgagttggtgtagagcttagtgatcatacggtttgtcagacagctaaagcagatttaaaaattcagtcaaatggacaaatttcttctaatcttggttcaaaatgttgtgatgttggaagcattcaagattcacccgatccatcattaccagcaaatagtgaagacaacattagaactgtgaatgattccaatacagcatctgatgcatcagaacataatggaataagccttgaccctgtaatttgtgtggacaaaaatgatgccttttcacctcataatgtcgatgtgcttcagaatgagggtgctgtatgtgaggatgcagagtgcttgaagccagctgttgttgagattggcacctcaaatgatatgcgtgatattgtgaaagaggtaaaatgtaaaggtccagagcaggatatgaattctgtctcaacatctgatgactgtttgggtgaaaagggaattttgggcaatccgtcaaattcaatccttgtcagacgggggagattgcgttccacaaagttcgcctcctactacgtctgtttgcaatgtttcgac

SEQ ID NO: 6394 - DNA, 603 bp, Glycine max
tgttacaagaagcatttggatggtttctctgtcgtttctgtgattattgtagcctatcttatgttcataagggttttacagaacttagttagtttaccgtactggggacggatgtttgcatttgtgattcttatggttctgctagcaacgccttttggaattgctataaaggcccattgggaagagtcacggaagttttcgcaatcctacacaattgagaggggttcttctactaataagggtaccacttcctccagtcattctgcatcagtggatcaagtggagtaccatgaattgcctagtgatgaggggcaggtacaagtgacttcagatgacaaattgccccgtgaagaagataagaatctcttgcaagctatgtgcacggttgatttttggatgctgtttgtgatcatgatatcagggttgggttctgggcttgcaactataaataatatgagccaaataggacaatcccttggatatagcgccattgagattaataatttggtgtcactgtggagtatgtggaacttccttggtcgttttggaggtggccatgtatcagattatatcatgcacagaaaaggtttgcctaggcccctg

SEQ ID NO: 6395 - DNA, 1548 bp, Glycine max
caggataagacccccccctctctctctctcacaaacaaaagacaggaggaaaaaaatctcaaaataaaacaaccaaaccacacacttcacaccctcttcaacatcctcagcaagtacaagaacaagaagaaacaatgtcttgctccaatctcacaatgttggtgtcctcaaaaccttccctttccgatccctccaatctctccttccgctctgtcctcaacccttttcagctcccttcacaaaacccaacttcatgcactccttcacgctcctcaaccacccaaattcagtgtggtctgagagaactcagaacccgcattgattccgtgaagaacactcagaaaatcaccgaggctatgaagcttgtggctgcagccaaagtgagaagagctcaagaagctgttgtcaacggaagacccttctcagagaccctcgttgaagtcctctacaacatcaacgagcagctcctaactgaggacgtagacatccctctcacaaaggttaggcctgtcaagaaagttgcacttgttgtggtcaccggcgaccgtggtctctgcggcggtttcaacaacgcaatcataaagaaagctgaggctagaatcagggaattgaaggagcttggcttggaattcactgtcataagtgttggcaagaagggtaactcttatttcatcagaaggccttatattccggttgacaggtttctagaaggtggcacacttccaactgctaaggaagctcaggccattgctgatgatgttttctcactctttgtgagtgaagaggttgacaaggtggagcttctatacaccaagttcgtgtcgttggtgaaatcggatcccgtgattcataccttgcttcctctttcgccaaagggagagatttgtgatgtgaatggtgtgtgtgttgatgctgctgaggatgagttcttcaggttgactaccaaggaaggaaagttgactgtggagagagatgttgtgaggactaaaaccgcggatttttcgccaattttgcagtttgaacaagaccccgttcagatccttgatgcactgctgccactgtatttgaacagccaggttctgagggcattgcaggagtccttggcgagtgaactcgccgccagaatgagtgccatgagcaatgccacagataatgctattgagttgaagaagaacttgtccattgtgtacaatagggagcgccaggctaagatcactggtgaaattctggaaattgtggctggtgccaatgccttgcaatagtgcaatttgtaggtattgtttacttattataatgatgggtggtggttgcccttttcattttctaatgtggttatctaagacacttgtgcaatttttacgcttctgttgaaacttgaatgaaatgcgcaggctttgtgcaataggaaaaatgcgatcaaatctgaagcggacacttttttttttgttatgtttttttttttttccttctgaattatgtatgtaatgaatcaataatagatctataatataaagattcagagagttatctctgttgatttgatgcacc

SEQ ID NO: 6396 - DNA, 774 bp, Glycine max
caaacgttaactgatactcctgatatcagaaaaagaaaaaagaaaaaaatgtctctagtgactgcagagatcaaagccaaagcagaggtgtatcatggagatgaactctgccaagagaagtcaaagttgctgctaaaggaggtagggctacctaatgggcttttgccattgaaggacattgaggaatgtgggtatgagagggatagtgggtttgtgtggctgaagcagaagaagagcacaaaccacaagtttgagaagattgggaagctggtttcctatgctcctgagatcactgcctatgttgaggttggtaagatcaaaaagctcactggtgtgaaaaccaaggagctcttggtttggatcacactcagtgagatctttgttgatgatcctcccactggcaagatcactttcaagactccttcggggctcttcaggacattccccgtctcggctttcgagattgaagagccagttaaggaagttaaggaaaaggaggaagaacacaaggaagtgaaacaagttaaggaagaactcaaggaagttaaaccagttgccagtgctgttgaagttcaagaggtttgattctcattttgaaggttggttatgatatgataataagttgattttaattataggcttatctaaatcttgcactaagttgtaatgctttcaatttctttctcttgatctacagctaggctagctagctatgtatcagtatcagtatcggcttcagggatataggcatagcagctccctgcactttgaatg

SEQ ID NO: 6397 - DNA, 936 bp, Glycine max
acgagcggcacgaggggagctctgccgcctccaacaaaacagagttcagaacacaaaccctcgaaccgaacgtttttgagggtcagtctctccttcttcattcacataatcgcttcttattttctctcagctttagctgagatcaggaaaaagaaaagcttgctcatccagcagcataggatcaaaaagagcaatgcagagaatcggccaactgttccaaggaagtttgataaggacaagcagttcacatcagaaagaatgggaaggcaactgtcatctttggggcttgatcccagtttggcaattaagagaatgcacagcagatctgtctctagaggtcggaaaagggatagatcgcctgaaacaagaagtgctgatggtatggatactgatggtgacacacctagcaaaaaacagcgtctgagtagatcactgtcacggtccaggtcagtgtcacgcccaccacatgaagttgtgcctggagaaggcttcaaggattctgctcaaaaggtcaaggcaatcaaacttgcaaagaaatctgtcaagaagagaaacaaggatgcccgtcgtggagaagctgatagagtcatacctaatctgaagcccaagcacttgttttctgggaagcgttccaatggaaaaactgagagacgctaggacaggggatgctgtttaatgcattttagaggacacctgttggcatttttcagggctgccaaaaaaaattgttatttaatgtaagtgttttgttggagtttaaggttctgtgctggcaacatagtttacttatacatctctgcattttattattgttatcaaacttgtcattctataagttgcaactttacagctttctttgaatcaaggaagctgctgtttgaattttatgactcaacattgagtgctgttattggaacttggaagttagttccttct

SEQ ID NO: 6398 - DNA, 431 bp, Glycine max
attcccgggcgaccacgcgtccaaacagagtcacaggccaaccctcgaaccgaacgtttttcagggttgatagaacacggtggttcgggacaatcttaagaagattaccgttgtgccaaatgggaaggacgtggtcgacatcatcctctctcgcacccagcgtcaaacaccaaccgttgtgcacaaatgctttggttggtgcgtgatgggatcagtgacaaagtggggagaagactgaaaataaaccaatagatcacataaagaaaggatgttaagtgtcagggctgcttcaacatgcagaagaagcatcatccaggcaaattgcatttgggttaacatagaatgaggtaaaagaatgacaagatgcatgggaagaaagggataaggattttgagaagcaaggaattaataagcaagattcattttggagc

SEQ ID NO: 6399 - DNA, 546 bp, Glycine max
gcaaaaccttggctcgcgttcacaatacagaccctgaatcccaacgaacgtttttgaaggttgttagagcacgatggttcagtacaattttaagaagatcactgtggtgccaaatgggaaggatgtcgtcgacatcatcctctctcgcacccagcgtcagacaccaaccgttgtgcacaaaggatatgctatttcacggcttcgccaattctacatgcgcaaagtgaagtatactcagcagaattttcatgacaagctctccacaataatcgacgagttccccaggctcgacgatattcatcctttctatggcgatctcctccatgtgctctacaataaggaccactacaagcttgctcttggccaaattaacactgccaggaatctcattggtaagattgccaaagactatgtgaagttgttgaagtatggtgactcgctgtatcggtgcaagtgtcttaaggtggctgctcttggccgcatgtgcactgtgatcaagagggttggcccgagtttggctatctagaacaggtcagacagcacatg

SEQ ID NO: 6400 - DNA, 385 bp, Glycine max
ctcacgcgtccgcccacgccagcagggagctctgccgcctccaacaaaacagagttcagaacacaaaccctcgaaccgaacgtttttgagggttgatagagcacgatggttcagtacaattttaagaagattaccgtggtgccaaatgggaaggatgtggtcgacattatcctctctcgcacccagcgtcagacaccaaccgttgtgcacaaaggatatgcgatttcacggctgcgccaattctacatgcgcaaagtgaagtatactcagcagaattttcacgacaagctctccaccataatcgacgagttcccccggcttgacgacattcatccattctacggtgatctcctccatgtgctctacaacaaggaccattacaagc

SEQ ID NO: 6401 - DNA, 454 bp, Glycine max
agagtcggtgtgcgtgcagcagggagctctgccgcctccaacaaaacagagttcagaacacaaaccctcgaaccgaacgtttttgagggtcagtctctccttcttcattcacataatcgcttcttattttctctcagctttcaattgggatctcaaattatgtagctccacggaatttatcttgttttactcttatagtccctttttcttaattttctgtggcaacaaggttgatagagcacgatggttcagtacaattttaagaagattaccgtggtgccaaatgggaaggatgtggtcgacattatcctctctcgcacccagcgtcagacaccaaccgttgtgcacaaaggatatgcgatttcacggctgcgccaattctacatgcgcaaagtgaagtacactcagcagaattttcacgacaagctctccaccataatcgacgagttccccc

SEQ ID NO: 6402 - DNA, 307 bp, Glycine max
agaagaagggatgagacaggaagaagctgaggatgatgattttgcgattgatggaactgaattgacacccgagcagcaagcagctttagctgagatcaggaaaaagaaaagcttgctcatccagcagcataggatcaaaaagagcaatgcagagaatcggccaactgttccaaggaagtttgataacgacaagcagttcacatcagaaagaatgggaaggcaactgtcatctttgggcgcttgatcccagtttggcaattaagagactgcacagcagatctgtctctagaggtcggaaaagggatag

SEQ ID NO: 6403 - DNA, 258 bp, Glycine max
gtgtctgccttcagtctccaacaaaacagagtctataagattcattcatcacataaccgctaaaccttcgctcgcgttcacaacacaaaccctagaagccaacgtttttcagggtaaggttgttacagcacgatggttcagtataattttaagaagatcactgtggtgccaaatgggaaggatgtcgtcgacatcatcctctctcgcacccagcgtcagacaccaaccgttgtgcacaaaggatatgctatttcacgg

SEQ ID NO: 6404 - DNA, 1500 bp, Glycine max
cccgggtccgacccacgccgtccgcctggtcttactgtgtggtgactgtgctctgctctcatctcattcatattcatttcaatggcaactcaaggtcaagtcattacctgcaaagctgcggtggcctgggaacccaacaagcccttaaccgtccaagacgttcaggttgctccgcctcaggccggcgaggtccgtgtccaaatcctcttcaccgctctctgccacaccgatgcttacacttggggcggcaaggatcccgaaggtctcttcccctgtattcttggccatgaagctgcagggattgtggagagtgttggagaaggtgttactaatgttcagcctggggatcatgtcattccctgttaccaggctgagtgtggggagtgcaagacttgcaaatcggggaagacaaacctctgtggcaaggttcgttccgccactggagttggggtcatgctcaatgatggaaagagccggttctccattaatgggaagcccatttatcatttcatgggaacatccacttttagtcaatacactgttgttcatgacgttagtgtagctaagattgacccggtagctcccttggagaaagtttgccttcttggatgtggtgtttcaactggacttggagctgtctggaacactgcaaaagtggagtcagggtcaattgttgctatttttggccttggaactgtcgggcttgctgttgcacagggtgcaaaaactgctggtgcatcccgggttattggcatagatattgacagcaagaagtttgatatatcaaaaaactttggagtcactgagtttataaatccaaatgaacatgataaaccaatccagcaggtcataattgatcgcacagatggtggagttgattatagctttgagtgtattggaaatgtctccgtgatgagagctgcgttggaatgctgccacaagggctgggggacgtcagttattgtaggtgttgcagcatcagggcaggaaatatcaacccgtccctttccagttggtgagtggacgagtctggaaaggaacagcttttggtggcttcaagagcaggtcacaggtgccttggcttgtagacaagtacttgaagaaggaaatcaaggttgatgagtacattacccatactttgacactttcggagatcaacaaggcttttgatcttttgcatgaagggggatgccttcgctgtgtgctttctacacaagaatgaggtgatctgtgccagcctgcctggttttgtgaggaatggatgtgttgtgttgcttttccctcttgtagtggttgtagtttgaacttgaaataaatctcgagtggctatattttgtaagtaagatcattttggtctataatatggaattatggatgttatcttccgagtcttttggcaaacttgtgttcagaaagaaggtctttgcaattaatacttaaaagcatcctttttgagttatgactggtattcttccattttacctgtcaagaatcatcatc

SEQ ID NO: 6405 - DNA, 460 bp, Glycine max
ggacattagccacatggcataggctcatcattttagtaacgtcgtactctagtacaaagacagtacgattattgtcctcatagtgagtagaaggcagagagactagagcggagatagcaatctcatctcattcatttcaatggcaactcaaggtcaagtcattacctgcaaagctgcggtggcctgggaacccaacaagcccttaactgtccaagacgttcaggtggctccgcctcaggccggcgaggtccgtgtccaaatcctcttcaccgctctctgccacaccgatgcttacacttggggcggcaaggatcccgaaggtctcttcccctgtattcttggccatgaagctgcagggattgtggagagtgttggagaaggtgttactaatgttcagcctggggatcatgtcattccctggttatcaagctgaatgtggggagtgcaagacttgcaaatc

SEQ ID NO: 6406 - DNA, 407 bp, Glycine max
  unsure (1)..(407): unsure at all n locations
cgcgccggtggacattccggcgatgcacgtcgtgatgaacggcggcgactctgcttacgtggcgcttctcccgtcggggttcgccatcgtgcccgacgggtccggcgaggagcacggtggcgcgtcgcagcagagggcggcgagtggcgggtgcctcctcacggtggcgtttcagatcctggtgaacagcctccccacggcgaagctcacggtggagtcggtggagacggtgaacaacctcatctcctgcaccgtgcagaagatcaaatcagcgcttcactgcgaaagctgaaagtcacttgaatcgggctttgtcnattattattattattatttttgttttggagaatttacgttacattttgtagttaaaggtggcgcgtgtgaaggacgcnaggggtgggggt

SEQ ID NO: 6407 - DNA, 432 bp, Glycine max
actcgagcgattcggctcacgcaacatagcatagaaagagaaagcgcagggtccgacccgagacctcatctttcgccgtagtgctcgttttcagagttacaaaggaatcgacccaaaagtgagttaaaaaaggccagacacacacacacagagagaaagagatcgagaagatagctttggtgtcaaacgctcccagattcttctgctgtggactccacttctctactgttccaccaattcctgctctctgcttccactccgcactacgattctgtgaaatctctgactggacgctctgtaattggtgattttggagccaaactgtttcgtccaatgaaaatcaatcgcgaaagtttccgttgatataattcgtggagaatttactgataaaatagttattcgtcggcgaaattgagcgaatgcgtctccgat

SEQ ID NO: 6408 - DNA, 418 bp, Glycine max
cacaacataggatagaaagagaaagcgcagggtccgacccgatacctcatctttcgccctagtgctcgttttcagagctgcaaaggaatcgacacagaaagtgattaaaaaagggagaagatatctttggtgtcaaacgctccctgattcttctgctgtggactccacttctctactgttccacctctccacactaccattctgtcaaatctctgaacgaacgctctgtgattggtgattttggagccgaactgtttcgtccaatgaaaatcaatcgcgaaagtttccgttgataaagtcgtggagaatttactggtaaaatttgatccagttaaaacagttattcgttggcgaaattgagtgaatgcgtctccgatcttcagccggccggggacgtaatctgagaagatctgagaat

SEQ ID NO: 6409 - DNA, 1258 bp, Glycine max
aagacaattgtaacactcattttaagtccttaaggattgcgttatttagagagaaaattaacttgttcaaattcttaattaccctgtggaattatagggtccaccaagattgagttgaacaactctattatttttttaactattggatatgctattaagatccattttgcacatcaactagagagtttttttattattttcttatataaatttaaattgtgctacaagtgaagagttggaaacaaaagatggcaggtttgggaatatggatgggtttcgttagcctgtgtcttctgtctgtatcagtatcaggtctgctccaacgcctagagcaccctgtcaaagctgatggctcacttagccttatggtcattggagactggggaaggaaaggaacatacaaccaatctcaagttgccactcagatgggaagggttgctgcaaagttaaatatcgactttgtgatatccactggagacaatttctacgatgatggattgactggtatagatgaccctgcatttgaaatttccttctcaaaaatctacactgccaagagcctccaaaagcaatggtatagtgtgttgggcaaccatgactacaggggtgatgttgaagctcaattgaatccaatccttcagaaaattgatcctagatggatctgccaaagatcatttattgttgatactgaaattgctgagttcttcttcattgattcaacaccttttgtggacaagtattttcttaagccaaaggaccacaagtatgactggagaggagtgcttccaagggaaaaatatttatcaaagctcttgaaggatctggaaatagcattgaaggattctactgccaagtggaagattgttgtggggcatcatcctgtaagaagcataggacatcacggtgacaccaaagagctcataagacagctcctgccaattcttgaggtcattcatttaggccaatatatattttattgtatactatataagaaaatcctagtgataaaattaaacttgcaggaaaataatgtggatatgtacattaatgggcatgaccattgcttggaacacataagtagcagaagcagccaaatccaattcttaaccagtggtggacgttcaaaggcatggaaaggagacatggataaagatgagtcagatgggatcaagtcttactatgatggacaaggatttatgtccgtggagctggaagaaaccaatgccaaagttgtttatttcgatatttatgggagagt

SEQ ID NO: 6410 - DNA, 427 bp, Glycine max
gaaggatggtaaaactcattagtttccttccatcaaggtcatggagtatataaagcactcacatgcattggtactatttgcaatacaagctcagctcttgggaagaaattagtttaagccttagctagaaaaaggagagtgagttagtgagttgagaggcagaagaaaagaagaagaaaggtggagtgagtgagtgaatagaaaaaaaaaacccaccatggggaggcctccttgctgtgacaaagttggcatcaagaaaggtccatggacacctgaggaggatatcatccttgtctcttacatccaagaacatggtccaggaaattggagatcagtgcctactaatactgggttatcaaggtgcagcaaaagttgcaggcttagatggacaaattacctcaggccaggaatcaagagagggaacttc

SEQ ID NO: 6411 - DNA, 1494 bp, Glycine max
aatttctttcagaccaatcaaagatggaaattatggaggcaatccaacaccagcgggggggaggagatcactactactaggttattgttttcaagcctgtagtgcctgagacacgagctgatgtgattgcctcatcatgggcaccccatgtgggtttggaaccttttccaaaagcatctggaggggatttaatatttcatgttaattctacttctaatcctctaagtaacctaagtcatcaaactttatctgttcctggtggtggtatggtgcctcaacacctgcaaccagttcagccacatacatcaaggtggttagaggaggaaatttctcttgctaacaatttaaaaggtcttgggttatttgagaatggacatgtgatgaaacctggtctacaagaagcggtttggcttctccaaccatgtttcacttccttttcctatccaacaatctataggtgctgatactaatggcatgttttatggtttctcaaaagctttggagtctgcagtaccatccaaagttgataccattgcatcttctggagtagttactgataatttagctgtaaaaacgtcagctttgccagttggttcaagaaaagccccagtcagtcgacctactaggcaccttggacctcctcctggtttcagtcatgttcctcccaaacaaggtattgaatccaccgtttcagattcaattagtgggaacccaattatggatgattacagttggttggatggctatcatttgcatgcatcaacaaaaggattaggctccaatggtcctcttaactactctcagtcaaattctcagcaagtcagtaacaacggcttgagtcctactgccagctttccctttcctggaaaacaagttcctcctgtgcctcttcaagtggagaaacagaatggttggcaagattatcaaacttatgatcttttaaaatcacatcatggtcagcagcttcagccacaacagctcacaactggaaaccagcagttttctcctctgcccgagcaatttcaaggacagtcaatgtggacaggtcgttactttgtgtgatgtcagtatgagagtatagatggcatattgcgaatgtgctgcatccttttgctactcaatcaaactccagcttagctgcctcgtcattgaatgttgttggagtttctttggccttggcttgttgcaggcacttgctactacaaaagatttatggtgagcttgtcagctcggacaaaggaagataaacatgcatctttaccgttcaaagttcgtatgaagtaaatgccttgtctggttggttggggtggataggctggtgataaataaaatgactattcagttgtcttggagcttatatcttctgggattggcggcgtcacaatggtttgttcacacttctctagtgaaaatgtcataatgatgcacctgtcaaaattgtcgttactatcatttggttgcaagtgatacatagtgctagcccttttttatgct

SEQ ID NO: 6412 - DNA, 643 bp, Glycine max
  unsure (1)..(643): unsure at all n locations
cttcgaggtggttagaggaggaaatatctcttgctaacagttagaaaggacttagattcttggagaatgggcacgtgatgaaacctgacttaccatttaaagctgctgtggcaatctctgaccatgctgcacttgcagttcctacccagcaatctgtaagtgctagtactaatatgttttatgctcatgatctctcaaaagctgaagactttgcaatatcatccaaaattgatgccattgcatcttctggaacattcactgataactctgttgtgaaaacatcatccaccttgcaagctggtttgaaaaaatctctggtcagccgaccttctaggcaccttggacctcctcctggtttcagtcatgttcctcctaaacaaggttcacccactgtttctgattcaattagtgggaatccaattatggatgattacagttggttggatggatatcagttgcctgcatcaaccaacgatttaggccctgatggtcctcttacttactctcagtcaaatcctcatcaaattggtttgagtgggacagccagttttccctttcctggataacanattccatctacactgcatgtggagaaacagaatggttggcgagatttttagactttggagcttttaaaacacac

SEQ ID NO: 6413 - DNA, 416 bp, Glycine max
ttttattataagctcggatcaaaaggattttagctgctgggaaggctttagcaaatgttgttaaggttgataaacaaatgatctattttgattcaaaggtgaagaaatttgtaattggtcggctcgagcaaactgcagatgattttggttactccacctattcaggacatgtcgaatgcaaaagagttcagtgcaagacaatcctgcacagaaatcgaagatggaaattgttcagtcaaaccaacaccagcatatggaaggagatgatgacgatgaggttattgttttcaaacctgtagtggctgagacacgagctgatgtgattgcctcatcatgggcaccccatgtgggtttggaaccttttccaaaagcatctggaggggatttaatatttcatgttaattctacttctaatc

SEQ ID NO: 6414 - DNA, 1174 bp, Glycine max
gcctcattttcatctgaccaatgtgtggaaggtgtagttgctgttgctggtgaggccttgaggatttttaccattgaaagattaggagagacatttaatgaaactgtaattccattaaggtacacaccaaggaaatttgtgctgcaacccaaacgaaaacttcttgtgatgatcgagagtgatcaaggagcattaactgcggaagagcgtgaagctgcaaggaaagagtgttttgaggctgctcaagctggggaaaatggtactggaagtgcagaccaaatggagaatggtggcgacgatgaagataaagatgatccactttcggatgagcattatggttatccaaaagctgaatctgataaatgggcttcctgcatcagagttcttgatccaaggacaggaaatactacttgtcttttggagcttcaggaaaatgaagctgctttcagcatttgcaccataaatttccatgataaggaatacggaactcttttagctgttggcactgcgaagggactgcaatttttgcccaaaaggaccataactgctggattcattcatatttataggttcgtagaggatggaagatctcttgaacttcttcacaaaactcaagttgaaggtgttcctcttgctctatgtcaatttcaaggaagattacttgcagggataggacctgtgctcaagttgtatgatttgggaaaaagaagattgttaagaaaatgtgagaataagctattccccaacacaattgtctccattcatgcatatcgcgatcggatttatgttggtgatgtccaagagtccttccattattgcaagtataggcgtgatgaaaaccaactttacatatttgctgatgattgtgttccaaggtggcttactgcatcataccacatagattttgacaccatggcaggtgcagacaagtttggaaatatctattttgtgcggttgccacaggatgtttcagatgagatagaagaagatcctactggtgggaggatcaagtgggagcagggaaagctgaatggagctcccaataaggtggaagaaattgtacagtttcacattggtgatgttgtcacatgcttgcaaaaggcttctcttataccaggtggtggagagtgcattgtatttggaacagttatgggaagtgttggggcattacatg

SEQ ID NO: 6415 - DNA, 1591 bp, Glycine max
cgctcgaggcaaatggtctggttgttctaactcctgatcagggacaagaagcctcttcagagatattgcctatcaattttgatggactggctaaggcagtgaagaagggagacactatttttattggtaatacttgttcacaggaagtgaaactacttctgtatggctagaggtatctgaagtcaaagggcaagatgttgtttgtattataaagaacacagctacattggctgggtcattgttcactttgcatgcctctcaaattcatattgatttgcctactctcactgagaaagacaaggaggttataagcacctggggtgttaaaaacaaaattgattttctgtcactgtcatatactcggcacgctaaagacgttcgccaggctcgcgaatttctttccaagttaggtgatctcagccagactcaaatttttgcaaagattgaaaatgttgagggattgacccattttgatgagattctacaagaagctgatggtattatcctttcccgtgggaatttgggtattgatcttccaccagagaaggtttttttatttcaaaaatctgccctttacaagtgtaatatggctgggaaacctgctgttcttacacgtgttgtggatagcatgactgacaacttgagaccaactcgtgctgaagcaacagatgtcgccaatgctgttttagatggaagtgatgccattcttctgggtgctgagactttacgtgggttgtaccctattgagactatatctactgttggcagaatttgttcagaggctgagaaagttttcaatcaagacctttattttaagaggacagtcaagtatgttggagaacccatgacccacttggaatctattgcatcctctgcggtacgggctgcaattaaggtgaaagcatctattataatttgtttcacttcatcaggaagggctgcaagattgatcgcaaagtataggccaacaatgccagtactatctgttgtgatcccccgactcaagacaaatcagctaaagtggagctttagtggagcttttgaggcaagacaatcacttatcgtgagaggtctctttcctatgcttgcagatccacgacatcctgctgagtcaacaagtgcaacaaatgagtctattcttaaggttgcccttgatcatggaaaatcattgggagttattaagtcacatgaccgggtagttgtttgccagaaacttggtgatgcatctgtggttaagattattgagcttgaagattaaactattaaagagcactcaaccaactacagttttagtgttatttatttatttttacaactttggttatttttcttgaagatgcgggtcattctgccacaagtagaagttatctctacttggttttgatgaaacaaattttgatgcaaattattactggctgtcaaacataaaatcaaggcaatgtgcccttgatgccaatttttttagtttaagattcatactagaacacagttcgaaaaatgtgattattgaatcggattaccaatctaatgatgctaattgcttgttatttcagacaccaattgtttataagcatatttttattgtctggtc

SEQ ID NO: 6416 - DNA, 779 bp, Glycine max
cgagctgcaattaaggtgaaagcatctattataatttgttttacttcatctggaagggctgcaagattgattgcaaagtataggccaacaatgccagtactatctgttgtgatcccccgacttaagacaaaccagctaaagtggagctttagtggagcttttgaggttgaattttaaattgagttagctgcttatttgctgttaactatttgtggctgttattaattccccgagagattgggttgaatagatcaactgccaactttcattcttgggaaggcttatatctaatgcaattaatatacgaccgtaatgaatattttataaataatattaatacattttaatttactgttaagtattctcggcatatcataattatgatatttatatcctgtgtaaagtaagtagatacaaccacgaattcgtggttatatttggaagatgctattgtactttcttggatatggacacccctaattccatctaatgttcagaaaattttatttaccaggatgtgttgtgtttacattggcttacaccttgcttaccaaacttaccaagaaattcaatttgtgatgcaggcaagacaatcacttattgtgagaggtctctttcctatgcttgcagatcctcgacatcctgtaagtttttctttttggaattctattcagttatttttcattcttgagttgatggacattgttctgttgagattgttctttggggttagaattagatgctgaaaacagatcagggtgagctggactttggggcta

SEQ ID NO: 6417 - DNA, 679 bp, Glycine max
gttgaattaggagcaactaaccaaaccaccccaatttccaaccacaacacggaatgttcaaccatcgcaaaacggaaaaaatggaaggcgagtgaagacacagagagagacagagagagacagagaaacaaagagaagaagagagagagagagagagagagagagagagtaaggcatggctgggttactggcatgggcggtaggaggtggcggaggaaaagaagcggaggacgacggcatcatcccaatcctgttttctgcagatcagcaaaagtacgtcaacgaactcgatcagaaggcgagctctctccggcgttggatccatgatctacggcaaagattgcctccccaggacatctcccagagcctcccacacctccacgcccactccctggcctccaacgccgccctcgccctccaattaaactcccactccaccacgcgccaacaggcccaacttagagaggtgacgttgaaggaagagaatgctgcgttcgaaaatgcaatatcagattgtgagaataaaataaaggagaaattgcaggaggctgatttactgagggaaaagttgaaggagatggatgaaactgagaagaaactgaaagctgaggtggagaatatgaagcagccaagttgggtatctgatggttaggaggaagagaagaaggcacattctaaa

SEQ ID NO: 6418 - DNA, 1178 bp, Glycine max
  unsure (1)..(1178): unsure at all n locations
ccagtccagaagaaactatccctctaaaggcccacccacctctttttctctctctctctctctctctctaaacacccacaacacaacaaccgaatccttttttttttttgttttgttaaacaaaacagagaaaaaaaaagttgtgaattttccagttgcgtttctgttccatacaatttcgatttcaatggcgaggcctaatcaggaggcagtcgagacgttcgtcagcatcactggcttgccagaagcagtagcgctgcaaaaacttgaggagcatggcggtaatctcaatgaagcagtcaatgcacattttactgaaggagacagaaatctaacgaccggctctcgcaacagctctgctgtatttcctcaagatgatttcatggatatagatgacgaacatgatgcagaaattcccagaagaattccaccactacttccagcttctgcagcaaatgtcaatccgttttctcttcttgatccaacaattgggagaggtatatttggtactcgtttcgattcaacagtcgaggcaccatttgttacacatccaagagaggtaagggagattcctatagaggttaaggatggtagtcaatccactcctcaagctggtcatgttccatccattgaagatgtcactggaaatgttgatgcccatggtccagatatccatgggactgtcataattgatgatgaagatgacgaaaatattccacctgcccagattgctcatcaagatgagcaaacacacaagatcttggctgacacttcactcaatagcagtgctagacctagtgctcctgaatctgagaatttgccagattacagcaatgacatagaagaagaaatgattcgtgcagccattgaggcttctaaacaggaggctgaggaaaattatagaaatcacaaacttgacaggcaaattgacttaagtgaatcaggatcacagccaaggcaatcatatttggaggatcctgagcttgcccatgcagtttcattgtccctgaagacagcagagcaagaaaaagcattgcgagtacacgggggagattctggatcaccaacagcagggccatctaagtcatcagaggctggacntaggggaagtgacatcaaatggaagattacaggcaggaagcttgtcatttcatgatgaagctgaagatgttgaggag

SEQ ID NO: 6419 - DNA, 392 bp, Glycine max
ccacgcgtccgcccacgcgtccggtccgagtttcaactcgtttcaactcggtgtagcaatggcgatgatgcaaggtgtgcagaagaacacactgtacgtgggagggttagcggaggaagtgaacgagtcgatcctccacgcggcgttcattcccttcggcgacatcaaggacgtgaagacgccgctggaccaggccacgcagaagcaccgctccttcggcttcgtcaccttcctcgaacgcgaagacgcctccgccgccatggacaacatggacggcgccgagctctacggtcgcgtcctcaccgttaattacgccctccccgaacgcatcaagggaggggagcagggctgggcggcccagcccgtttgggcggatgcggatacctggtttg

SEQ ID NO: 6420 - DNA, 1129 bp, Glycine max
agctacttgatcggtggtgtatttggtgtgttgatgttttattaaacttttgtactcttgctttgaaactagttggttagatttgaaattcttctaagatggatacttcttataggactggtggagtcaagtacgagtgcttgctttttgatatggatgacactctttacccattgagcttaggtctcaatttgttttgtcgcaagaacatacaagagtatatgttagaactcttgcatattgaagagagtgaagtgccaaaaatgtgtttggatttgtatagggaatacgggacaactatggcaggattaaaggtccttggttatgagtttgacaatgacgagtttcatgcttacgtgcatggaaggttaccatacgagaaactgaagcctgatccagtattaaggaaccttctgctttccatgcctcagcgtaaaataatattcaccaatgcagatcatgcacatgcagttaaagttctcaacagattgggtttggaagattgttttgagggcatcatatgctttgaaacgcttaatcctcccaaacaaatcaattgcatggatgtaccaaatgataatcatgtgctcacagatttaacagaaaatggatgtttcaattcccacccacaaatcctctgtaaaccatctgtggaagcctttgaagctgctattcggattgctaatgtggatccaaagaaaacaattttctttgatgacagtgttagaaatgttgaaagtgcaaaaataactggacttaacactgttttagtgggccattcagatttggtccctggagctgatcatgccctgaacagcattcataatatcaaagaagcgttacctgaaatttgggagattgaagatggcaaccaacagcaaaagattcaacccccaacagttgaaaccatggtcctagcttaagttttacatcgataaaatgtttttagcagacttatcaagcaaatcaagagtttctacctctgcagtatgtttctatctaaatttacaataagtttgaaattgtctccacggcatggtgatgcttgaatatataaatcttgcaatttggcatcacgaaacggatgtgaaattattaagtgtaaatcgcagaactaaaaatttgagag

SEQ ID NO: 6421 - DNA, 464 bp, Glycine max
tggaaacaagccgagaattcatctgtggtgtatttggtgtgttgatgttttattaaacttttgtactcttgctttgaaactagttggttaggcaagttttagttttctattttatttcagacttttcaggtgctcatattcttatgatgatcatcaaactgcaaatatagtgagcccattaagctattactgaaatttgttgcagatttgaaattcttctaagatggatacttcttataggactggtggagtcaagtacgagtgcttgctttttgatatggatgacactctttacccattgagcttaggtctcaatttgttttgtcgcaagaacatacaagagtatatgttagaactcttgcatattgaagagagtgaagtgccaaaaatgtgtttggatttgtatagggaatacgggacaactatggcaggattaaaggttcttggttatgagtttgacaatg

SEQ ID NO: 6422 - DNA, 1158 bp, Glycine max
ggagaaagaaagaagtaaaagacgtgagtctcagccggggcatgttctgaagtcttcttctctgcttgtatgcaacggccacacacacccttagtcgcctgaaaacgattgttgttgcagggaaaacacagagatccgggtcgacccgtcgcagatccgatccaaataagaaaagatgaatattttcaggttagccggggacatgacccatttggccagcgtcctcgtcctcctcctcaagatccacaccatcaaatcctgcgccggtgtctcattgaaaactcaagaactctatgcactcgtttttgcttgtcgctacttagatatctttactaattatgtatctctctataataccactatgaagttgatattcttgggaagctcattttctattgtgtggtacatgaggtaccacaaggttgttcgtagatcatatgacaatgatcaagatacctttcgccattactttcttgtattgccctgcttactattggccctattaatcaatgagaaattcacattgaaggaggtcatgtggacattttccctgtatttggaatctgttgctatacttcctcaactagtacttttacagagaactagaaatattgacaatttgactggacagtatgtctttctcctcggtgcatacagaggactatacattctcaactggatctatcgctactttactgagccccactttgtccattggataacatggatttctggccttgttcaaacactactctatgctgatttcttctattactatttccaaagctggaagaacaacaaaaagcttcatttgccagcatgagtttattcttctgttcttgaaaacaagggtctaagtggacaattaacagtaagcagagaggatccacaaatttgtctggacatagtggtttctgatttacaattgcctatttgttcgttcttgccacctcaaatactactgtactaatgactaggaagattatagacaaaaagcatcaatttgtttgtgattgtaatttgcaattttaacttgaaaaagtatttagatctagattgtggcacaatgcattttgatcttttactcttcccattgttcatttaacttgggtagtattaatacagataaagatcgttcttgatgaacactttgttttc

SEQ ID NO: 6423 - DNA, 2015 bp, Glycine max
acgagatgaggtgcagcaaggtagagagcctcttgatgttgatttttgatcaataacagtggatggagcactcgacaatgatattttgcagcaacagttacataatgttgtcagacaaagacaagaactactgcaaatggagattgaactaatggctcaaatgattgctagaactgagataatggaaatgcgaagcacctttgatgctcaactcagggaccatgttagtaatgcctgcaagcttcaggagcaactttgtgaaagggagcacacaattcatgagcttgaaaggaaaatggaagagaaagacagagagctgcattctattaaattagacaatgaagcagcatgggctaaacaggaccttctccgtgagcaaaacaaagaacttgcaacattcagaatggagcgcgatcattccccagctgaaagagctcagcatataacacaaattcacgatcagcaagaacatattcaagaaaaagataggcaacttaatgagttgcaggaacaacatagggttgctcaggagaccattatgtttaaagatgagcagttcagagaagcccaagcatggatagctcgtgttcgtgagatggatgtttttcaatcaacaacaaatcaaacattacaagctgaattgagagagcgcacagagcaatataatcagctctggatgggttttcagagacagtttgcagaaatggaaagagttcatttgcatgctattcagcaactacagcttgaactggctgatgcaagagagcggagtggaactttcaatgatgattcaagaatgtcccaaattaattcaaaaaataatgtaactcagtttggacaggaaaatggaagccaatttgacttgaatggaagcaatgcttcgggtggaaataatggtctccttccaagtgaaagcactgctaatgatggaccatttgtatctacaggcaatgcatcaatccagactgaacatgttgctggtgttcctattgctccatcatctctaattgtcccaccttcatacctcccacacagccaagtaactgcattgcatccatttgttatgcatcaacaaggagttcccaattcagttgcatcacatgttcctcaatcacatgttgggcattttcacccagtgccgtcaatgtcacctgtgcagcagtggcaaaatcatcagtctgtgtcagagggttcacaggtacctgtacaggaacattcttcaccatctcaaactgatcaacatttgatgagatcagatgctaagtttagctatgaaatgtctgttaatgggaaaactcttcatagagactatctggatgctcacatccagcaaggtgaggaggcacaaaccatgattttttcagctaccagtgaaacacaggcagctcagtcagtcgataaggctcaatttgttgcttcccatcaagatcaaagcatgcaacaaatttcttcacagttctctgaggctttacgattgaactcttttgaaccaaatggtgaacataaggagcagaattctgtgccattatctaataatgaaccagatgtccaagttttattggctgagcaagcaacttctgctgtaaatgcatcatctgtcacaagccattcagttaatcataatgaaatgatccagagcaattccactgattctgttttgtctgaagtgttcacctcttctgggtcgacagcttctacaattgccaagacatcagagactgctctccttgatgaaaaatcattattagcttgtattgtacgcactattccagctggtggccgaattcgaattagttcaacgctccctaacaggctgggcaagatgcttgcacctctacattggcatgattacaaaaggaagtatgggaagctggatgactttgtagctagccatcctgaattatttttgattgagggtgactatattcagctccgtgaaggtgcacagaaaatcgttgctgcaactgcagcagttgccaaagttgctgctgctgctgctgctgcatcaactcctt

SEQ ID NO: 6424 - DNA, 601 bp, Glycine max
  unsure (1)..(601): unsure at all n locations
gtttatgtggatgatggcaagaccaagtatttggatcggtgttatgggaaggttggtangaggaagctgaaggagagattggttcaaggctgtgtccccaatggggttaggtttcacaaggcaaaggtgtggcaagttcagcaccaagagtttgagtccaaagttttgtgtgatgatggggtggaattgaaggggagtttggttgttgatgctagtggattcgcaagtaattttgtagcatatgacaaggtgagacaccatggttttcagattgctcatggtgttttggctgaggtggatgatcacccttttgatttggacaagatggttttaatggactggagggattctcatttggggaatgaaccctacttgagagctagtaattcaaggtttcctactttcctctatgcaatgccatttagttccaatttgatatttcttgaggagacttcccttgtgagccgtccagtgttgtcttacatggaagcgaagaggaggatggttgcaaggctaaggcacttaggcattagagtgaaaagggttttggaggatgagaagtgtttgattccaatgggaggacctcttccaaggatccccc

SEQ ID NO: 6425 - DNA, 467 bp, Glycine max
taaaaaaaacgaacatattcatataaatacttctactgcagattcaacctttcgttctctgacagttctttctccaaacctacctttctatcttttctttttcatcggagcattatttgataccctcttgagtcctctctgcagcaacgcatttttcctcattctcttaaacaatttaacttctcctcgtttgatctgcataaaattgcattaatataaaaaatgaagaagtttgtactcaagttagatttgcatgatgacaaggataagcagaaggccttgaaaacagtttcaactctttcaggaattgatgccatagccatggatatgaaagagaagaaattaacagtgataggaacagttgatccggtaactgtggtgagcaaattgcgcaaatactggaaggcagacatagtagcagttggaccagtgaaggaacctgagaagaatgaggatcccaagaaagc

SEQ ID NO: 6426 - DNA, 445 bp, Glycine max
cacctgctcaataaaaaaacgagcatattcatataaatacttctactacagattcaatctttcgttctctgacagttctttctccaaacccacctttctatcttttccatcagagcattatttgataccctctctgcagcaacgcatttttcctcattctcttaaacactttctcttttctccttcgtttgatctgcattaaaattgcataaatatataaaaaatgaagaagtttgtactcaagttagatttgcatgatgacaaggataagcagaaggccttgaaaacagtttcaactctttcaggaattgatgccatcgccatggatatgaaagagaagaaattaacagtgattggaacagttgatccggtaactgtggtgagcaaattgcgcaaaaactggaaggcagacatagtagcagttggaccagtgaaggagcctgag

SEQ ID NO: 6427 - DNA, 445 bp, Glycine max
cagaatcagaataggtcgttggagcaagctggaccctccggctccggtggacaggtgggagtgagagtagtgaattggagtggttccgataggctttgcatgagccctaagcgagatcacaagcccgaaaactatgacgaccttcaattcgagttcaatcctaatatcttcgcctctctcgagcactatttgcctcctcatatgctcaacctctcacgcgatgttaagcttcactacatcaggaacattcttcttcgctatttgcctgagaatgaccgcatctggattcaaaagctgagggaatacaggctaaagatcatattgaattatccaccgctgcataaggagatatttactatggatgctgagagctttttcgtaccatcatttctcagagcaattaaagaaaacacagaagcgagttttagaagtataatggctgaac

SEQ ID NO: 6428 - DNA, 297 bp, Glycine max
cctcgagccgaatcggtcgaggctggaccctccggctcctccgatggaggggtaggagtgaattggctctgcatgagccctaagcgagatcacaaccccgaaaactatgacgaccttcaattcgagttcaatcctaatctcttcgcctctctcgagcactatttgcctcctcatatgctcaacctctcacgcgatgttaagcttcactacatcaggaacattcttcttcgctatttgcctgagaatgaccgcaactgggtgccctttttttaattaattcaaattttcatttttttt

SEQ ID NO: 6429 - DNA, 925 bp, Glycine max
ccagagtggcaccaaaaagcagattgatgattcaaagagagcttttgagtttgaaaaagaaggctctcacattgagaagggaagggaaaatgaatgaagcagaagaagaaatgcagaagggtgcagctcttgaacgtcaactgatggagatggacaaggcttcgaatgttacaatatcacggacaaataccactgataatgtcccacatacagcacatatggaagctgatttcagtagaaatctgccacttgaggaaggaagtgaagatgacgtaacagatcaagatatgtctgatccaacatatctttcattccttagggacttgggttggaatgatgacaataatgatctttctaattctccaagcaagcctttgaagaaagatgatgatcattttgtgcctgtcaatgatgcttcattaagtaagcattctacaaatatcttggttcaagcgccaagaagtaaagctgaaattcagagggaacttttgggtttaaagagaaaggcccttgctttcaagcgtgaagggaaagctgaagatgctgaggaagttcttaaaatggccaaagcattagaagcccagatggcagagatggatgctgcaaagagtaaagcacaagttgaggccactgtcatgaaagacagacttttcaatcctccagttgatgaagaaagggacatggctgtttcagaacaggatatgcatgaccctacattgaattcaatgcttactaatctaggttggaaggatgatgaatctgaacctatgactataaaagatgagccagttaaggaagctactgttaggtctacacacactgtggatctatctgcacttgattcctcttcaggcattcctgctacagctttgagaagtaagggtgagattcaaagagaacttttaacattgaaaaggaaggcact

SEQ ID NO: 6430 - DNA, 848 bp, Glycine max
ccgggtcgaccacgcgtgcgcccacgcgttcgggccgcaaaaccctagtttggtctggcaggcgaaagagaagatggccaccgttccagggcagctcgtgtgggagatcgtcaagaaaaacaattccttcttggtcaagcagtttggaaggggcacccagagcgtcgaattcagcagagagagcaacaatctctacaacctcaattcgttcaagtactctggtttggcaaacaagaaaactgttactgttcagcctgagggcaaagatcaggctgtgttgttggctacaaccaagacaaagaagcaaaacaagcccgctgcattgctccacaaatctgtgatgaagaaggagttcaggaggatggcaaaagctgttgaaaaccaggtggccaaaaattactacaggcctgatctcaagaaggctgcccttgcaaggttgagtgctgttcacagaagcctcaaagttgccaagtctggtgtcaagaagaggaatagacagggcgtgagagtcgctggtaggaagtgaaagggaattgagaaagaatctgctgttcaatcttcgtttttgccctctctttcgtgtttttagaactccaatctagatttctcgagtttgttttgcaatgcagttatttattaagtattcaatatgaaaacttgaactaccatgttatagatttcaccttgatttgtgtctcggtatattcgcctcatgattgttgctttaaaagtcgctcttccgacaaaatagctggctattattgcctcaaaggagggatatgattagtgtgtctagcattgaaaccctcgatttagaagatatttttaaaaaaaaaatccaaatgaaa

SEQ ID NO: 6431 - DNA, 929 bp, Glycine max
gaagtaaagttacattggaagtgagagcgaagaagaagaagaaaccacgacacaagtccaaagtttgattccaaaatgcgatcctcaagcattcgcagcttcaccatcttcaccctctttctcattgcgatcctcccccacggacacgcaacaactccaacctccaaacttcgcctcaaacctctctcttctcccttttcaaccgccctcgaaaccctccagaaacaactcgggtacaccttcaagagcatcgatcttcttcgtcgcgccatgacacacgcttccttctccgaagaaaacaacaaagctttcgccattctcggcgccagcgtcatcgaaacctccgtctctttccatctgctctccagagacgttgatctttcttccaaagagctgaaccgtcgattgtcccaaatcaccaacgtcgattcctcctgcgccgtcgacggaacgcgattagggttgcacaaggtggttcgcgtctcgcccaagacaaattcctccgcccccgccgtcgtttgcggcgccttccgagcaatctttggcgctgttgctattgacaccggcaagtccgatgacgcaggcaacgttttctggaaccttcatggcggtggtgacctaggagttgccgtggctctttgaactctgactctgtgagttcagttatcaattttcttctgtttgtgtttgttgctcaagatacttcttaattactcttgttagtaatggaccactaattgtgaagtagcgaatgacagtgtagtgtgtgatgctataactatattaactactgtttcccctttttatcggcaaatagttgttagtattgttagtgaagggattcgaacctgcaatctctctccggcttgcttcccttcgtcattcaccaccagaccaatcttatatattcatattaactactggtttgt

SEQ ID NO: 6432 - DNA, 555 bp, Glycine max
  unsure (1)..(555): unsure at all n locations
aaaccacgacacaagtccaaagtttgattccaaaatgcgatcctcaagcattcgcagcttcaccatcttcaccctctttctcattgcgatcctcccccacggacacgcaacaactccaacctccaaacttcgcctcaaacctctctcttctcccttttcaacctctggacttaattttcctttcttcttcccttcattccaatctgttacccatagtgttttctagaaccacaaaatgcttcaacaccaaattgttcagtcccctgctatgctaggccttgcaaatcctaactccccatcaattccgaaccctacccctccaaagctccctccaacacagacccatcacccccaagaccgcaactcttcaaccccttcttcagctctcttgtctctcctcccacctcacctcagagcccaagcacttcttgcccaaatggcttccttagcctccaagctctttgaagtttcccccaatcggtccctttgggtcactgcctttcgtggatcccttccaactttcctctcttnccattcgtctaccccacttgacac

SEQ ID NO: 6433 - DNA, 348 bp, Glycine max
gcaatttaactagtgacttttcaatctctgatactccacaaatttcttccctcaggtctctctctctcctctcacaccgcgtcaccgcccccccactgtcgccgccgccgccgccaccccccctcacagttccattctcttctcgttttcccttcgtctcactctcacacgaaaaccagttctcgtcgcggcggcgctctcgtcagtcgctgccgtcgccgcctccgttgacgtcggaggttccttcaacaccaaattaaaagtgaaaggagatagtgctttgtgtgccttgaagttcaattacccttcaacctctggacttaattttcctttcttcttcccttcatt

SEQ ID NO: 6434 - DNA, 1259 bp, Glycine max
  unsure (1)..(1259): unsure at all n locations
ccttcgcgtccgcccacgcgtccgaccacaccttccctctcttctgttaccaatggctccctcatcaaactacatttctttccttttcctcaccacccttttgtttgctcttcaaatcagtgcaagagacagccagttcttcagcaaagtcacccattttgacaaaaacagtgtcaaagagacagaacttcccaacaaagaagcaccagaagtgaacaagccagagcaacaaccacctttcattccggagactgaaaacagctatggcctatatggtcatcatgatgagtataaccaagtcccttccaccaccaccaaccccacttcttaccacccctacaagaccgagtttgagaactccaacaacaagtattacaacaatgatgcctataacacaaggttctccgaaaccggttacaacaacaacaaggattcttatgacggcaaggattcttatgagggtaaccaatatgagttaagtgacacaaagtacacagaagaaggatacaacaacaagtatcacaactcctatcagaacaactacaacaacgatgctgccaatgacaaatactcctacaacaacaacaacaacaacaaaaattacaatgctcacaataacaggtacaatacttacaacaacaacaatgccgttagcgggtacaatggtgagaggcaaggaatgagtgacacaaggtttttggagggtggaaagtacttttatgacgttgccgccgagaagtacaatccaacaaactatggtgactcatcaagggaagtgaacactaacaactggtacaacaacagaggtggcaactacaacgggaaccagaaccagcaggagtttgaagatgaacatgagaacttcgagccatgagcttggatcattggcaaagtaaagagttcactatacttttgagtatccactatgggtgtttaatgtttttattgtgctttagattcaagaaaacacaaagttaaaggatatgttaactatgaagggcttttattttattttttacttagtagtacttctattaagtcttgcttccggattgcgttgtctctgtcatgatctggaaatacctctacgagagcatgagtaatttttgcttaactaataagttgtataatattgtgaagtaagcttgtttcttgctctcaaaaaaaaaaaaaaaaaaaaaaaaagggcggcccgcnnnnnnnnnnnnnnnnnnnnnnnnnnnnnnnnnnnnnnnnnnnnnnnnnnnnnnnnnnnnnnn

SEQ ID NO: 6435 - DNA, 883 bp, Glycine max
tctgttaccaatggctccctcatcaaactacatttctttccttttcctcaccacccttttgtttgctcttcaaatcagtgcaagagacagccagttcttcagcaaagtcacccattttgacaaaaacagtgtcaaagagacagaacttcccaacaaagaagcaccagaagtgaacaagccagagcaacaaccacctttcattccggagactgaaaacagctatggcctatatggtcatcatgatgagtataaccaagtcccttccaccaccaccaaccccacttcttaccacccctacaagaccgagtttgagaactccaacaacaagtattacaacaatgatgcctataacacaaggttctccgaaaccggttacaacaacaacaaggattcttatgagggtaaccaatatgagttaagtgacacaaagtacacagaagaagaatacaacaacaacaacaacaagtatcacaactcctatcagaacaacaaccagaagtactacaacaacgatgctgccaatggcatatactcctacaacaacaacaacaacaattacaatgctaacaataacaggtacaatacttacaacaacaacaatgccgttaacgggtacaatggtgagaggcaaggaatgagtgacacaaggtttttggagggtggaaaatactttcatgacgttgccgccgagaagtacaatccaacaaactatggtgactcatcaagggaagtgaacactaacaactggtacaacaacagaggtggcaactacaacgggaaccagaaccagcaggagtttgaagatgaacatgagaacttcgagccatgagcttggatcattggcaaagtaaagagttcactatacttttgagtatccactatg

SEQ ID NO: 6436 - DNA, 434 bp, Glycine max
aaggaacctatgctttcatcagggttcttttgagttccaacaccggggctttggaaattgattccacctgatcaagtgaaagagattcttcaggcttcatctttgtttctttcacacaatttgtccaatttagagcacagaaaatgaatggccacaaaaagttgaattctccaaggggagaggttggagagatagacactagggcaccattccaatctgtcaaagctgctggtagttgagttggcgaagtagccatcactagagacagattttctgtcaagagaagatcatcagagaatgtatttgagaaggagacgcagcttatcttggcccaaaaggaattaaacaagataaagaaacacgtggataatgctgaggccatcaaagccaaggcactttctgagcttgagaatgccaaggagatctttcacagt

SEQ ID NO: 6437 - DNA, 680 bp, Glycine max
tacagaagacgacagaaggggaccacagttttttctctcatgcacctactaatagcaaaaaaaaaagctaagagggataattacattccacctctccttcccattctcactctctctctctctttctatttctctctccgtgcgtgaccttgaattactgatattttatattttaaccagctatatatattacaagaaaacatagatagtgtgtgttcatcagcttattctcaaacctgatatggagtttgtggataccagaaaactacaattacaacatcaacaacaactgcaacaacagccgcaacattttcatgtgttggcagtggacgacagtgtcatagataggaagctattggagaggctccttagaggttcttcatgcaaagttacctgtgtggactctggagacaaggctttgaaatatcttgggctaatagatgagcttgatgatacttcttcaacctctttagaatcagaatcttctcatcctccacctcaaccattacaacgagagggaatcaaagtgaatttgatcatgacagactattgcatgcctgggatgagtggctatgatttactcaaacgagtcaagggatcttcttggaaagatgttccagtcgtgattatgtcatcagaaaatgtaccttccagaatcagcatgtgcttagaagaagggg

SEQ ID NO: 6438 - DNA, 795 bp, Glycine max
gagatcacaacatacaatggctgcagtgttctgggctttggctttggtaagcctctgtggccagctaccttccaatgcccaagcacctgcaactgcgccggcaaactcaccacctacaaccccagctgcaacatcaccatcttccggcacgccactggcggtaacactaccaccaacagtggtggcatcccctcccaccacaagtacaccaccaactacatcccagccacctgcaattgtagctcccaaacccgcacctgtgacaccaccagctccaaaagttgcacctgcttcaagcccaaaagccccaccaccccaaactccacaaccacaaccaccaaaagtatcaccagttgtaactcccacatcgccacccccgatacctccaccacccgtttctacgccaccgccattgccaccaccaaagatagctccaacaccagccaaaacaccccctgcacctgcaccagcaaaggcaacaccagcacccgctcctgctaaaattattaggagaattgttggtgtggcacatgttgaggatttcgaatccattactgatgctgctaaacgggcaagttgtgaacggcgggcacttgatttagctaagatgcttctcaaagaaagaagaaaatttgaaggcattgctgaaattatttcagcaattcggcaatactagccataacaaggttttgctatatcaatagttcaatacctccgtaatgtatcgtgttccccaacattttaactgagttgctctagtaacagttttgatcacttaaaaattaaaaaaaaaaa

SEQ ID NO: 6439 - DNA, 984 bp, Glycine max
tatggctgcagtgttctgggctttggctttagtaagcctctgctgccagctaccttccaatgcccaagcacctgcatctgtgccggcaaactcgccacctacaaccctagctgcaacatccccgtcttctggcacgccaccggcagtaacacaggcagcatcccctcccaccacaagtaatccaccaactatttcccagccacctgcaattgtagctcccaaacctgctccagtgacaccacctgctccaaaagttgcaccagcttcaagcccaaaagcaccaacaccccaaactccaccaccacaaccaccaaaagtatcacctgtcgcagctcccacattgccacccccactacctccaccacctgttgctacgccaccgccgttgccaccaccaaagatagctccaacaccagccaaaacaccccctgcacctgcaccagcaaaggcaacaccagcacccgctcctgcacctacaaagccagcaccaactccagctcctgttcctccaccaccaacattggcaccaacgccggtagtagaggtaccagcaccggcgccatcgtcacataagcatagaaggcacaggcacaggcacaggaggcatcaggcaccagctccagcaccaacaattgttcgcaaaagtcccccggcaccacctgattccacagcagaatcagacacaacaccagcaccatcaccaagtctgaatttgaatgctgcatcgtcaaaccaccagcaagggagaaatatatgggcaacagctgcacttgctattgctgttttgctagccgtcaccggctacagctgctagcagtctcatggtgaccatggattcactttaatgagttatttggtttgcaaaatatataatcattttatgtgtatagatctgataatgagaatctatacctatgattctttcctttttctgttgtgatctttgctcagaaatattaatggatacgattttttgaattatgg

SEQ ID NO: 6440 - DNA, 412 bp, Glycine max
gcatgctgattaagcaaatgatcgaaaatcctataaagagtggattcttaagacgattgaagacagttggaatcttttctatcgaaaagattcacttcactttgggatgtgcacacagatggtgctggtgaagcatatcttccagcaatctataacaatcctgaggttcttctgcttgtacagaagaaatacatgacagatttgtttcacgacagtcttggatttggtgctgctagaatgattaggagaattgttggtgtggcacatgttgaggatttcgaatccattgctgatgctgctaaacgggcaagttgtgaacggcgggcacttgatttagctaagatgcttctcaaagaaagaagaaaatttgaaggcattgctgaaattatttcagcaattcggcaatactagc

SEQ ID NO: 6441 - DNA, 828 bp, Glycine max
  unsure (1)..(828): unsure at all n locations
atattctacattacgtgaaggcaatgtcactcatcatgagtacatacaagttggtaaaggaagggatgtgggtcttaaccagatatcaatgtttgaagcaaaaatcgctgctgggaatggtgagcagacaatgagtagagacatatacaggcttggacaccgttttgatttcttccgaatgctatcttgttattacactaccattggcttctatttcagtaccttgataactgtcctcacagtttatgtattcctttatggacgcctctatcttgcccttagtggactcgaagaaggtttgaaccaacaaagagctattcgagacaacaaagctcttcaagtagctcttgcttctcagtcagttgtgcagattggatttttgttagccttgcctatgttgatggaaattggcttggagaggggatttcgtgaggctttaagtgaatttgtactaatgcaactacagttggctcctgtatttttcacattttctcttggaacaaaaacacactattatggaaggacattgcttcatggaggtgcagagtacaaaggcactggtcgtggttttgtggtgtttcatgccaaatttgctgataactataggctctattctcgcagccattttgttaaagggattgaattgatgattctgcttgtggtctaccatatatttggccatggatacagaggagtggttgcctatattttaattaccgtaaccatgtggttcatggtanggacatggctttttgctccattccttttcaatccatcaggttttgagtggcagaagatagttgatgactacacagaattggcaaaaat

SEQ ID NO: 6442 - DNA, 1008 bp, Glycine max
tttacgcgtgggcggacgcgtgggcggacgcgtgggcggacgcgggttgttgagaaggggttttagaagtccacatttttcagatttgattcgcgttcctcttctctcttctcatcatcaatggcgacccccattcctccccctcctgccgccgccgccgccgccgccgccgacaccaaggtcgattacttgaaccttccatgtccgattcccttcgaagagctccatcgcgaactatgatgtctttgaagccagatctttttgagggcatgcgttttgatttcaccaagatgctcaatcagaagttctccctcaatcacagcgtgttgatgggacctactgaggttccttctcagtccacggagactattaagattccaactgctcactatgagtttggctcaaccttcattgatcaccctaggttgttgctctgggggagaattttgactgatgggaggctcaatgccagagtcaagtgtgatttgtccgaaaatctcacttttaaagccaatgctcagctcacaaatgagccgcatatgtctcatgcgatgatcaactttgattacaagggaaaagactatagaacccaatttcaacttggtaatggagccttgctaggagcaagttatattcagagtgtgacacagcatttatcattgggtggggaggtattttgggctggtcagcatcggaagtctggtattggttatgctgctcgctacaacactgataagtcggttgctacagggcaagttgctagcactggaatggttcttctaagctatgttcagaaggtatctgagaaggtttctctagcatctgagtttatgtgcaactacttgtcaagagatgtcacagctagctttggtttatgactacatccttagacagtgccgcctttggggaaagattgattccaatggctgtgtccctgcttttttggaggagcgggtaaatatgggtctgaatttattcttcctggagagcttggacacacggaaaagg

SEQ ID NO: 6443 - DNA, 650 bp, Glycine max
ccctcctcttgatcttaaccatgaccaacccaaaactaggctatgccggaatctccgattccggcaaccacattccctcctccaagaaaaaccacaagaagctcctcctctccctcttggccaccctcctcgtggcggcttcgctggtggccattgttgtcggagtaaaaaataaaaactccgacaactctgccaccagcacccccctctccctctcccaccactcacacacgatcgtgaagagcgcgtgcagctccacattctaccccgaactctgctactccgccatagcctctgagcccaacgtcactcacaaagtcaccaaccaccgcgacgtcatccagctctccctaagcatcaccttccgcgcggtggagcacaactacttcaccgtgaaaaaactctttaccgaacacgacgacctaacaaaacgcgaaacaaccgctctccacgactgcctggaaaccatagacgaaaccctcgacgagctcagagaagcacaacacgacctcgagctctaccctaacaagaaaactctgtaccagcacgccgacgatctcaaaaccctcatcagcgccgccataacgaaccaggtcacgtgcctcgacggtttctctcacgatgacgcagacaaacacgtgaggaaagag

SEQ ID NO: 6444 - DNA, 441 bp, Glycine max
tattaagcaaaaacaatatggaagtaaagaaagtctgttttgttgctctagcctttgctttggttctgagagttgctgagagctttgagttcaatgaaaaggacctggaatccgaggaagggttgtgggatttgtacgagagatggaggagccaccacacggtttctcgaagcctccatgagaagcacaaccgcttcaacgtgttcaaaggcaacgtgatgcatgtccacagttccaataaaatggacaagccttacaagctgaagttgaacaggttcgctgacatgaccaaccatgaattcacgagcatctatgctggctccaaggttaatcatcacagaatgttcataggcacgccacgtgggaatggtactttcatgtatcagaacgttgacagggttccttcttccgtagaatggaggaaaaaaggtgctgtcactg

SEQ ID NO: 6445 - DNA, 605 bp, Glycine max
gtttaaatatgatattgctctttctctgtactctattttctcccaccgtcacacatggctacggctgcgtaggataacatctaacaaacctagcgcacgatagtcttccttcacccatgcttggagtactctgcgccactcgccccaaaccttggcttctctccctcgtccacgtccacgcttccctgcctcgcctacctcattcccctctatcaccttcagcctcgccgccgccccgtcgccgccattccaccgcctgcaaactttttctctccggcggcgctgccgcctccatatggcacgctatcatgccccgaggtgatgacggattacggcgcggcgttgttgccgtccatgacttgaagggagagggatcgtggaatgtcgcttgggacgcgcggccggcacggtggctccaccgccccgactccgcgtggctcctctttggtgtctgtgcttgtctggcgccgccgccgggttgcgtggacgctgacaccaataccgatgcaatcgctgtggacgaaagttgccgccttctcgataaggaacgggaggagtatgaggtttctgctgattacagagtcactggggtaccggcggatggt

SEQ ID NO: 6446 - DNA, 414 bp, Glycine max
  unsure (1)..(414): unsure at all n locations
cacatggctacggctgcgtaggataacatctaacaaacctagcgcacgatagtcttccttcacccatgcttggagtactctgcgccactcgccccaaaccttggcttctctctacctcattccaccgcctgcaaactttttctctccggcggcgctgccgcctccatatggcacgctatcatgccccgaggtgatgacggattacggcgcggcgttgttgccgtccatgacttgaagggagagggatcgtggaatgtcgcttgggacgcgcggccggcacggtggctccaccgccccgactccgcgtggctcctctttggtgtctgtgcttgtctggcgccgccgccgggttgcgtggatgctgacactaattctgctggaatcgctgtggatganagttgcggccttctcgat

SEQ ID NO: 6447 - DNA, 466 bp, Glycine max
cacgcgtatgggcgatgatttgtatttgattttgatgattccaataataatattcatctttctctctactctctagtgctggggcttgtctcacacatggaaactactacgtgcgtaggataacaaccaacaaacctagcgcacgatagccctccatcacccatgcttggagtactctgcgccactcgctccaaaccttggctcttctccctcgtccacgcctcccttcctcgcctatcccatgcccctctctcaccttccgcctcgccgccgccccgtcgccgccattccaccgcctgcaaactctttctctccgctggcggcgccgcctccatatggcacgccatcatgccccgagtgaatgacgacgacggattccgacgcggcgttgttgcgtttcatgacatgaagggagagggatcgtggaatgtcgcttgggacgcgcgaccggcacggtggctccacc

SEQ ID NO: 6448 - DNA, 1236 bp, Glycine max
atttgcctgctccaccattcctacttctcatatctctatcgttagtcccttgtttaattactctcatatcatagcagttgctgaatctagcttttctaagtttttttcaaaaatcaaaatggcacttcccaatctttgctttgtcgttttaatcctaaaagtttccttttttctccttgcatcaacccaagttagagccgccacctctgactcaagcttgttccgagaatacattggagcattgttcaatggtgtcaaattctcagatgtacccataaacccaaatgtaaattttcacttcattttgtccttcgctattgactacgacacatcatctggttcaccttctcccaccaacggaaaatttaacatcttttgggacaaccaaaacctcacccctacccaagtttcttccattaaggccaaaaatccaaacgttaaggtagcccttagtctcggaggagacactgtttcaagtgcttttgcttactttgatccaacttcagttgattcatgggtttccaacgcggtttcttcactcaccaacataatcaaagagtacaacttggacggaatcgacattgactatgagcatttcaaggcagattctgaaacttttgctcagagcattggaaaattgatacaaactctgaaaagcagaggggtcattacttttgcttcaattgctccttttgataatgatgaagttcagagtcattatttggccttgtggaagagttatgggcacatcatagattacgttaattttcagttttatgcatatgacagaagcaccaccgtatctcagtttattgattactttaacaaacaaagctcgaattataatggtgggaaggtcttggtgagtttcaatagtgatgggagtcgagggttgatccctgataatggattcttcactgcgtgtagtatgctcaagactcagcaaaaacttcatggtatctttgtgtggtgtgctgatgactccaaggcaaatggtttcagctatgagaagcaatcacaggaccttttggtgactgccaattaggttttgaagtagaccaattttaatatgttagtgcgcttgatggctattacatttaaattaataacgtttgtgtgtgtaatgatgtatacatacatgtaacctgatgtaggcatgtagcttaagcctcctgtcttgaatgtgtgtaaacagacgtgccccggtcataattttactttactcttttaatagtt

SEQ ID NO: 6449 - DNA, 538 bp, Glycine max
gaaaagattatgagcattatgccaatacatgcttcaaagcttttggagacagagttaagcactggattaccttcaatgagcctcataactttgcactccatggttatgatttaggcattcaagcacaggaagatgttcccttttgggtcatcttctatgtaagaaaggagaatcatccactgagccatacattgttgctcataacattctcttgtcacatgctgctgcctatagaagctaccaactacatttcaaggaacaacaaggaggtcaaataggaatagcactagatgtcatttggtatgaacctataacagaacttgatgaagacaaagacgcagcagcaagacgctatggacttttcacttggatggttccttgacccacttttctttggaaaatatcctctctcaatggagaaacttgtagctaagagattgccggagatttctgatacagcctcaaaatttcttgtgggatctttggattttattggcataaatcactacacctcagtctatactcgtaacgacaggac

SEQ ID NO: 6450 - DNA, 489 bp, Glycine max
gtgacatgcatgcatttttattaagtactagtagtttttaccacacttatgaaatcacaccattatcaccccgttggatcgatggtattggtttcatggtggtccataatgtattgggcggacgggaactggatctcgatggccataggcgggaaatggatctggccggcgataacgacctgttgggcggacgggaactggatctcgatggccatagtcgggaactggcccgccataaccttgttgtagtaattttcgcccgagtggtttggctgcagttgccagcataatagaggacatgagtagtaaaagtattgccaagagagcaccaaatgaagacgtcattttggaagcaccgacgaaggccattaatttacatttctatcaaaatctatatgtgtgtgcagcatatcgctaaaataagtggtatttatagagatgcacacctatatgatcgatggagatcatgttttagaaacttgtgatcat

SEQ ID NO: 6451 - DNA, 579 bp, Glycine max
catttgacacgaagctaatcgcatcgcgcctcacctccactgctgcatctcagaatcgggacgccgtcttcctcactacatcgtccctattagcacactagattttgccaaaaagatcaaattttgaagcaattgtttttgtgggcaacattcattctttcctatccctcgaaaaatcaattttcggcttcgggcatcggaaatggagaaggtgatgaacattctgaagccgaagccaaatccgcagcaactattgagggattggcagcgcaggcttcgccaagagtgtcgcaacattgagcgccaaattcgcgatatacagagagaagaaaaaaatgtgcagaaggctattagagaagctgcaaagaggaatgacatgggctctgcaaaggcacttgccaaggaacttgtgagatctaggcaaactgtgaaccgcctttatgaaaacaaagcacaaatgaattcaatatcaatgcaccttggagagagtgttgcaattgctcgtactgtgggacatctatcaaagagtgctgaggttatgaagcttgtcaataatctcatgaaggctcctgaaatggc

SEQ ID NO: 6452 - DNA, 420 bp, Glycine max
gtgaaaggggaaaaaaagagtgagatggtgccacggtgatgcgtgggtgttattcatagaaccgaatactcatctttgatcagttgatgaaccgagttcttcagcgggatccaattttcatagattttgccaaaaagatcaaattttgaagcaattgtttttgtgggcaacgttcattctttctgatccttcgaaaaatcaattttcggctttgggatcaatcggaaatggagaaggtgatgaacattctgaagccgaagccaaatccgcagcaactattgagggattggcagcgcaagcttctccaaggtgtgtgcaacattgagcgccaaattcgcgatatacagagagaagaaaaaaatgtgcagaaggcgattagagaagcagcatagagaaatgacatgggctctgcaaaggcac

SEQ ID NO: 6453 - DNA, 600 bp, Glycine max
tgattctggattttcctatctcgtgagactccattttgctgaggtatcatcaaatataggcaaaagtaatcaaagagtatttgatatattcctcaataatcaaaccgctatgcctgaagctgatgttattgcctgggcaggcgaatttgacctttcacattctaatggggttccagtgcataaagattatgttgtatttgttcccaatggagaaccacggcaggacctgtggcttgcattgcatccaaatgaaagtaataagcccatgtattatgatgcaatcttgaatggagtggagatattcaaaattaatgatactgcaggtaatctggcaggggcaaatcctattcctcctcctgtgcaagacataattgacccgtcaatggctagggcatctcatcatggtaaatcaaagaatcatacaggcataattgcaagatgtgttgctggaggagttgttttactacttgtagattgggctatttgcttttgctgcatcccgtcgtcgcacgcaaggaaaggattctggtacaagtgaagggccatctggctggcttccactttctccttatggcaattcacactctgcagcttctgcca

SEQ ID NO: 6454 - DNA, 717 bp, Glycine max
gacctagtgctagtagtaaagagtagatgggtttgttttttcattttgttttgctaccctaatagacacgaggactatttaaaaacccggaccgtcgtatcgatcgttccaccggcgccgtcaacctccaaggctcgaaccaccatccttccactcaaccgcgcacttgcactcgtcggctcaagctaccaccgcagcacgcctcagccgccgccagttaacaagcatttgctcataaagaaggaaggaagatggtgtttgggcaagtagtggttggtcctcctggctctggaaaaacaacttactgcaatggcatgtctcagtttctcagtcttattggaaggaaggttgctgttatcaatttggatcccgctaatgattcgttaccctatgaatgtgctgtgaacatcgaggatctcgtgaaactaagtgatgtaatggtggaacattcgcttggaccaaatggaggtcttgtgtattgtatggattatcttgagaaaaatattgactggttggaagcaaaattggaacctcttctgaaagatcactacctactctttgattttcctggccaagtggaacttttttttctccattcaagtgccaagaatgtcatcctgaagctcataaagaaattgaacctaaggctaactgcagtgcatttgattgatgcccatctttgcagtgaccctgggaagtatattagtgcattgattt

SEQ ID NO: 6455 - DNA, 852 bp, Glycine max
  unsure (1)..(852): unsure at all n locations
cttgtagagtcatctatgcttgttctccggttggttgcgcgagtttcatggtcctgggtttctagaagtagtagctcctcagttggtatcaaagaaagtttgggtggttgttttaccagttggctcccgtactcttgccaagccttacaagttggagcttgccatatatgctaggttgcaggacgcacaaccacgtaccgttattggactgtggaacgccgatttacaagaaccaaagcttcaccagtctgatccgtcagtgacagttgttaatcacactactaaaacacgcattaaacttgggcctgcaagtgagaatgacaagcaacaacttacatggttttctaatgcttgcaaaggaattccacaggcaagtcctgcattcttgcaaaataacgtgcctacaggtccacccacagcactaccagttgcagaagacacagagttggctatggccatcagtgcatcccttcagtctgccatgcaggagaggccacccttttctgatacacagccaagctttgaagcaagctcttcaagcagtgcagtgaatacaggcaatcatggttttcttggcacaccaaatcctaatacaagtgatagtgagttggtacaagaagctaacccagatggcaatactcagcacctccaaagccgcgtgaatgctagtgctttggacttgaatccatcagctccaccaatcgccaatgagattctggcagatggtcccattcagtatccatcaattgatttaagccctgttgatatggcatctccagatgctgagaagcttnctaaaggagaaaaaaatgccggtggaagtggttcatcatgcgtgatatgtttagatgc

SEQ ID NO: 6456 - DNA, 548 bp, Glycine max
  unsure (1)..(548): unsure at all n locations
acccttagttaactccggaatccggtccaaggaataatcagggaggcccaagcttccgtagcactaatagtcggtgtgactgggttgactgggctgagcctagccgaaacattgaagaaacccaattgtctcggaggcccatggaaagtttacggcgcagcccgcaggcccccgcctagttggttctctccttccatggtcgaccacttcatcacctttgacgctgaggactcttccgacacacgcgccaagctttcccccatcgcccacgaggtcacgcacctcttctgggtcacctttcagattcacgcagacgaagaatacaatgcaactgtcaacaaaaccatgctactcaaccttctaactgccctgaaatcttccacgacatcccggttggcccatgtaacggtccaaaccggaaccaaacactacatgggcccagttttcgacccggttcactccacgcaactcatcggccaccagccaccctttgacgagaacatgccacggctcccttatncaaacttctactacgcgctcgaggacct

SEQ ID NO: 6457 - DNA, 1022 bp, Glycine max
ttttgattctgataaccccactcaccggtatcgttatcttgattcgtcatcaaatcagtggcttgtaagacctgttttagaaactcatggatgggatcatgatgtgggttatgaagggttgaatgtagagagattgttcgttctcaaggaaaagatacctttatctttctctggtcaggttactaaagataaaaaggatgctaatgttcagatggaaatatccagttcagttaagcatgggaaagggaaagcaacttcattaggttttgatttgcaaactgtggggaaggacttggcttatacattacgcagtgagacaagatttactaattttagaagaaataatgcaaccgctggtctctcatttactttacttggtgatgccttatcatctggattgaagattgaagacaaattggttgctagtaagcgattcaagctggttgtcagtggtggcgcaatgacagggcgtggcgacattgcttatggtggcagtttggaggcccaactgagagataaggattaccctcttggtcgtttcttaaccacacttggcctttctgttatggattggcatggagatcttgctgttgggtacaatgtgcaatctcagatcccagtaggacgttatacaaaccttgttgcccgggccaatttgaacaatcgaggggccggacaaataagtattcgattaaatagttcagaacagcttcaaattgctttgattggtctcatccctctcctaaagaagctagttggttatcatcaacaattgcagtttggacaatactgatgatgatagcgttagtttatttgagctggagcactttgatggtattagggaatgatttcaagatggcatctttcatgaaatgagtgatactgattttcgttatgttttttatactcgaaagtttgtcttatttgatcattttctctgtaagcaattctcttttggtggttttgttatattatgctgctgaactctaagaattacatcaatttattcttgtcttctgcgt

SEQ ID NO: 6458 - DNA, 433 bp, Glycine max
  unsure (1)..(433): unsure at all n locations
gcgtttcaagcaactcttcaagtttgttctcaccaggaacaactttggctgaagtgaataacatgtttgggacatcgtcgtcgtcacagggacagtggctgaattaccgataccccccagaagcaatatcatttacacatgccaatgtttctatggctcatgggctgaagctagagcaagaagaaaacaaaggaaacttgtcgcatagcgtgagctctttgtacccaagtcacatggaatctgcaaggatattgagtgataataataattcggccttcgacaactccaactttggcttgttggacccgaacaacatctcaagcacgtccagcaacaacaaccgccacaacaataacgtggttgaaattcagaaattgttcaggcaanggaaacagctggctgagaacttcaaccacatcgtgaattcccaagc

SEQ ID NO: 6459 - DNA, 1517 bp, Glycine max
agacgacagacggggacaacatatccattttatttacaacaacaatggcttctgtgcctcaaccaaaaatctcccttctaaccttattcttcttctcgtccttcaccatcattgcgcatgcaattgttcctcaaaacgaaaccttcaaatttgagaactcaggtgaacttggaccctacatcgttgagtacggtgcagattacagaatgataagcatcttcaactctccattccaagttggtttctacaacaccaccccaaatgccttcactctagctttgcgtgtagggctccaacgctcggagcagctatttcgttgggtttgggaggccaacagggccaacccagttggagaaaatgccactttttcacttggcactgatgggaaccttgtgttggcagatgctgatggcagaattgcatggcaaactaacactgccaacaagggtgttgtggccttcaggcttctttcaaatggtaacatggtccttcttgatgcacaaggcgggttcgtttggcagagttttgatcaccccacagatacccttttggttggtcaatatcttagagcaaaagggccatccaagttggttagtaggctctcagagaaggaaaatgttgatgggccttatagtttggtcttggagcctaaagggttagccttgtactacaagagcaagaattctcctaagccaattctctattggttttcttctgattggttcaccattcaacgagggtccttggaaaatgtcaccttcacatctgatccagaaacttttgaacttggatttgattaccatgtggccaattcttcatctggtggcaatagaatccttggcaggccagtgaacaatagcaccataacatatctcaggcttggaattgatggcaacattaggttctacacttacttccttgatgtgcgtgatggtgtatggcaagtgacctacactctatttgatagagattctgatgagagtgagtgccaattgcctgagagatgtgggaaatttgggttgtgtgaagataaccaatgtgtggcttgtccattggaaaatggactacttggttggagcaacaattgcactgccaaggctgtgacatcatgcaaggctagtgatttccactactacaaaattgaaggagttgagcattacatgagcaaatacactacaggggatagagtgagtgagagtacttgtggaaacaaatgcaccaaggattgcaagtgtgtgggttatttctaccacaaggagaattcaaggtgttgggtagcttatgatcttcaaacccttactagaggggccaattcctcacatgtggggtatattaaggtgcctaataagtaaaatattaaaaccttgatattgcggttttatacagttttacttcaattaattcctaatactagtttaagttgaaataaagttatggtatgattctgtcctccgtgaagagaaggacatggatgtacaataaagaagtttgtaataaagttttgattggtttggctt

SEQ ID NO: 6460 - DNA, 520 bp, Glycine max
caattcactgtcatactcttctcgaagccttggattggacaaggtcttgtaagctgtgtttagctgaacaaacatcctcgttgattcctctttcatggaaggatcatggcacacatcagggtggtactgaagagccattgacctataagccctcttgatctcatccattgttgcacttcctggacacacagacaatattttgtacaagttttcttgggttaacgttgcggctctgcatgaaacaccaccaaacttcacactagaagctctttgatgatgtttacttgagaattgaaacggcttggacatgcttaggcttgaacttgagcttaaatataaaacattcattgctctgatttttttaatcataaaaatggaagacagatatcagaaagtttacaataactcactcacacacttgctgaatcaattgagctaaacctccttagtatttgctccggtgaattgtattgtacctagctagctatatttgaagtttgatctatgagaacggctcgag

SEQ ID NO: 6461 - DNA, 1190 bp, Glycine max
ctcttgttccaccaaccccaaaattgtgaacctttcaaagagacgaagccttcgaatctctctgaaacttttctcttctctttgattcttctctatcagttaaacattagaatgagccgttcacaggatccacacccttcccgatctttcttcccttttggaaatccttttcggatgatatcacctaaaggctctcgcatgtctccacaacttcttgcagtgttgcaagcttttgaggcaacattggcagagaggctgaaaaatcttatgcctaaaagcaaggatgaaatcctcaccttgtcttggatgactttagctatgaagtcactttgtgaaagtcacaatgacatacggacccttatgactgcccttgagcttcctgtgagtgattgggaggacaaatggattgatgtgtacttggacataagttcaaagttgctagacatttgcaatgcattcagctctgagctttcacgtctgaaccagggaaaccttcctcttaagtgtgcactgcacaatttagactctgcctcttcaaagcagtatcttcgggcatgttccctacttgatgattggaggcagcatgttagttctaggaaccctagaattgagaaatgtagttctatgttagataatcttgtgggctcacttgatcttcctaaggttaaaaattctgccaaaggaaaggttttgatgcaagctatgtatggagttaaggtggagactgtatttatttgcagggtgtttactgcagcattctctggctcgtcaaagaagttatcagacttgaatgtggccgacatacattcatgggctccagattttagaaggttgcaggatcttgtaaatgaggaaattagagttagattttctggtggtaaatttactgtattgaatgagttggaagcggttgatgcctctgtgaagatattatatcctactatccaagctggtgcagataccggtgagacagaatggcttgtgaagactgttgaggaattacgtgcgggtgctgagaagctttcacaaggaattgatcttcttgcaaagggagtagatgggttttttcaagccgttatgactagtcgcgatactttgctcagctctgtgaggtttgataaaactgtaaatatcgttccccaggccgtaacagagacatgcaggtagttcactaattatgcagtagctaa

SEQ ID NO: 6462 - DNA, 833 bp, Glycine max
tcggctatcggtattttcattcgagttgcagtttggcggttaaacgtcttcttctcttctcttctctgcatccatcagatccaaattttctcgcgatacgagggagcaatgtcagatgctaaggttgaggatttgaagaaggaagaggaggttggtgatgattctcctaggaacgaagttgacagtgaaaaatctgcggatgatctgaaagattcggataacgataaaagcgatggaaaccccatgccctcatcccagcaggaggaagcagctgttaagaaaaagtatggagggatgttaccaaagaagcctccactaatatcgaaggatcatgaacgtgcttactttgactctgctgattgggctttggggaagcaaggagcacaaaagcctaaaggaccacttgaagcactccgcccaaagttgcagccaacacaacagcacgctcgttcaagacgctcagcttatgctccagcagatgataatgaagttgatggctgcaacagtgatgcatcagcagagcatcagagtgctactgaagaagttggtggtgataaaagtgatactgctcaggaccaaagctgccattagtagcaatggatttgacctataatttgcattttgacggtgactagagttgcttgtgctaaaaaaactagaagttggagttttgaagcagttgtaaccatgaattagataactcttcgcaagtatgggattatatgacgtgctaagattgcactatgagaccttgatctctcattcatttgcgaaggcacgattgtggcatttgtaacatttgacatctcataatataatcgtctacaataaac

SEQ ID NO: 6463 - DNA, 356 bp, Glycine max
tctcgagccgcttcggcattttcatttgagagttgcaggttgccagttaatcgtcttcttctctgcatccatcagatccaaagtttctcgcgatacgagggagcaatgtcagaggctaaggttcaggatttgaagaaggaagaggaggttgctgatgattctcctaagaacgaagttgacagtggaaaatctgtggatgatctgaaagattcggataacgataaaagcgatggaaacgccatgccctcatcccatcaggaggaagcagctgttaagaaaaagtatggaggggtgttgccaaagaagcctccactaatatccaaggatcatgaacgtgcttactttgactctgctga

SEQ ID NO: 6464 - DNA, 381 bp, Glycine max
ttcgatgctaaattggaaccttgattattgatccgtgcaattaagattgaaatcaataggattcgtattaatttctgttaactttttttcgaaaatcgttgctgcttcgcttcagtgacaattcttcaattgtttggtgtgtagagggagcaatgtcagaggctaaggttcaggatttgaagaaggaagaggaggttgctgatgattctcctaagaacgaagttgacagtggaaaatctgtggatgatctgaaagattcggataacgataaaagcgatggaaacgccatgccctcatcccatcaggaggaagcagctgttaagaaaaagtatggaggggtgttgccaaagaagcctccactaatatccaaggatcatgaac

SEQ ID NO: 6465 - DNA, 1566 bp, Glycine max
actcgagccgctcgagccgaatcggctcgagtttctaagttgcttgaaggaggctctagtgtggtctgcaactatgagcaaggattatctaatcatactttctctccttctttccacggtgcttgcaactgcaagttcttcttcttcttcttcctccctctatcttgggaagggcttctcccatcgcaaattgtctcccagttatcacattcacaaaaccattgacgaatcctatgcagttatcttcgatgctggtagcacgggaagccgtgtacatgtctatcgttttaaccaacaattagatctccttcgcattggccaagaccttgagttgtttgtcaagactatgccaggtttaagtgcttacgctgagaatccacaagatgctgcagaatctcttattccacttttggaggaagcagaagctgctgttcctcaggagtttcaccccaggacgccagttaaacttggagcaactgcaggtttaaggcaattggaaggggatgcttctgataggatattgcaggcggtcagtgacatgctcaagaacagaagcacactgaacgttggggccgatgcagtttcagtgttgagtggaaaccaagaaggagcttatcaatgggtaacaattaactatctactgggaaacttgggaaagcattattcagaaactgttgcagtagttgatcttggaggtggatctgttcaaatggcttatgcagtctcagagacagatgctgcgaaggctccacgagcaccggacggagtggaatcatacataacggagatgttccttaggggaaagaaatattacctctatgtacacagttacttgcgatacggtatgctagcagctcgtgcagaggctttaaaggttcgtgattctgaaaatccttgtattttggctggctttgatgggtattacgtatatggaggagtgcagtataaggccaaagctcccccttctggctcaagcttcagccaatgccaaaatgttgttgttgaagcactccatgttaatgcaacatgctcttacaaggattgcactttcggagggatatggaatggtggtgggggagctggagaaaacaacttttttattgcctcatttttctttgaagttgccgatgaggctggttttgttgatccaaacgcccccaatgccaaagttcgtcctgtggattttgagaatgcagcaaaggttgcctgtaacacagaattaaaggatctcaaatccattttccctcgtgttaaggatggagacgttccttatatatgcttagatcttgtatacgaatatacattgctcgttgatggatttggcatagatccgcagcaagagattacgttggtgaggcaagttgagtatcaagattctctcgtggaagcagcatggccactaggcagtgccatagaagccatatcatcattacctaaatttgagaaattaatgtatttcatttaagctttaaaacgaggagccatatgtatgtgtggaatgaactccatcactcttaaataaaaatcgttttgttcctttttttctaaaaattaaaaaaaaaagca

SEQ ID NO: 6466 - DNA, 1293 bp, Glycine max
tctcgatacgctcgagcagctcgagccgctcgagccgctcgaccgatcgagatgggccgaatcagtttcaatgttgagtggaaaccaagaaagtgcttatcaatgggttactatcaactatctactgggaaacttgggaaagcattattcagagagcggttggagtgttgatcttggaggtggatctgttcaaatggcttatgccatctcagagacagatgctgccatggctccaaaagtagtagatggtggggatccatatctcaaggagatgttcctgaggggaaggaaatactatctctatgttcacagttacttgcactatggtttactagctgctcgtgcagagattttaaagatttctgatgatgctgaaaacccttgtgtcatatctggctatgatggatcctacaactatggaggaaagtcgtttaaggcttcatccggctcttctggtgcaagcttaaatgaatgcaaaagtgttgctcttagggctctcaaagttaatgagtcgacatgtactcatatgaagtgtacttttggtgggatatggaatggtggagggggggatggacagaagaacctttttgttgcctctttcttctttgaccgggctgctgaggctggttttgctgatccaaacttgccagtcgcgatagttcgtcctgcagattttgaggatgcagctaagcaagcatgccaaacaaaacttgagaatgccaaatccacttttcctcgtgttgatgaggggaaccttccctatctttgcatggatcttatataccagtatacactactcgttgatgggtttggtatatatccatggcaagagattacattggtgaagaaagttaaatacgacgatgccctggttgaggcagcatggcccctaggcagcgccattgaagctgtgtcatctgcgtaaaattactgggactatcgcttagatttgtctgaaatctaggggcacatgagtttcatcaccgggattttgtggtgaaatactgtcattcatgatgatcagagattaactttcaggctgaactgagattggatatgggtctgtgattcagaaataatgggagattatagcttcattatttttcatatgtaattaattcacaaacatctaatttgcgattttggaagattcattcgattcattaagggcatctatatatgttctatatatgttgtcttcagagacgaacaaaatggtgatactaacaccatttcatttttgtttctattaatggtttcgttcgtgatcatagttaaaaaaaaaaaaaataa

SEQ ID NO: 6467 - DNA, 661 bp, Glycine max
ctcgagcgaatcgcatcgcgtagtcttgtccctggtgaggaaagagcggcatggaagtagcgaaagaccctaactcacaggcggattcagattcggaactggaactctacaccatcccaagctcttcaagatggttcgcgtgggaagaaattcacgaaacggagagagcagcattcaaggaatacttcgacggaagctcgatatcgcgaagcccgaagatatacaaagagtaccgagacttcgcttcgaagaaggcgcccccagtgggattcgagtcgccgccacgcccaattccttgaagcctatgctgctgcctcgcaatgggaagagtgccgccaatgccactggggcttctctcaaattgccgccgtctggcgtcgtactctgatgtttatggtgatttgattaggcagaaagagggcaactgtggcctttgcggtcacaaatgtggttctggacattaccgatgtacacaggataatttcattatttgtattaattgtttcaaaagcgggaattacggggagaaaaggtccacggaggattttgtattgagtgagtcaagtgaaaatagtggtaagcatgacactgtctggactgaggcagaaactcttctccttctagaatctgttttgaagcatggcgatgattgggaacttgt

SEQ ID NO: 6468 - DNA, 489 bp, Glycine max
cggaacaaaacctagtcttgtccctggtgaggaaagagcggcatggaagtagcgaaagaccctaactcacaggcggattcagattcggaactggaactctacaccatcccaagctcttcaagatggttcgcgtgggaagaaattcacgaaacggagagagcagcattcaaggaatacttcgacggaagctcgatatcgcgaagcccgaagatatacaaagagtaccgagacttcatcatcaacaagtacagagaagagccctccagaaggctcacattcagcgaggttcgaaagtcgctcgtgggagacgtcacgtttcttcacaaggtcttcctcttcttggagcattgggccttgatcaactacggcaccgcagaggatgtggaggaggaccattgcaaggttcgcttcgaagaaggcgcccccagtgggattcgagtcgccgccacgcccaattccttgaagcctatgctgctgcctcgcaatggg

SEQ ID NO: 6469 - DNA, 378 bp, Glycine max
atcctagcgtcgtgttttttacacaaacaaaaacacagggaagagaacaacaacaaagcacaacgtatagcttgctgaatcgttgtttgaggaaccaccgaatctcaatggcttcttcggtgttcttcactcactcccattgctactcttcaaagccctcttctcttgttttccgccaagttggtgtgggtcccacctctctccgattctcttcttctcatgttgcctccgttgctgctatggctatggattcttcggctaaggtgattgatggaaaatccgttgccaagcaaatcagagatgagataacggctgaggtttccaggatgagagaatccattggtgtgattcctgggttggctgtaattcttgttgggg

SEQ ID NO: 6470 - DNA, 542 bp, Glycine max
cactaggactgtgcaaaggttaaaaattcttctcttggtaaaaggctacttttaagccggaatctaatataaatacctgtatgccagatctgcagttctcatgtctcataaggaaagccaagggtaagtgtgggactcaaaacggtgatgatggttgaagttaagaggaaggagccggacaccgaaaccagtcccggagatgacacaacaaggcatactaagaagacaaaggtccaaccaggtgaaacctttttcgcagttaaggtcacagacaacatcaacacatcatctccgtcgtttattcagccaatgcttgacagcgagaaaacgccatcctcggactccaagggttcagcgggaaacgctgcaccgtctaattattcatcaatcgttgacccacattctccccaaggaaatggcagtccacaatctcaaccctccgtctcgaccaatcgtagcatgtcagacgttgattcagcagtacaaatgtttgaggcagggtcaggggtcactgtacatgtggaccttgatgagcgcatcgg

SEQ ID NO: 6471 - DNA, 710 bp, Glycine max
gattaccagagctgatgtggatgtgcagccctatgctttcactaccaagtctctctttgtgggtcatactgattataaatacctgaggtaccaagtaattgatacgccagggattttggacaggccttttgaagatcgtaatattattgagatgtgcagtatcactgctctagcacatttgagagctgcaatcttgtttttcttggacgtctctggatcttgtggttacagtattgctcagcaggcagcgctgtttcacagcattaagtctttgtttatgaacaagccgttgattatagtctgcaacaagactgacttgcagccactggaggggatatcagaggaagacatgaagttggtcaatgagatgaaagctgaagccttgaagactctagttggtcaaggaggtgagcctacagacaataacagtgtattgttgaccatgagcactttgacagaagaaggggtaattgctgtaaaaaatgcagcatgtgagaggttattggatcagagggtggagataaagatgaagtcaaagaaaattaacgactgcttgaataggtttcatgttgcagtaccaaagcctcgtgaccagaaggaaaggcctccatgtattcctcaagcagttttagaagctaaagctaagcaagctgctgacaaggaaaagagaaaaactgaaaaggatctggaggatgagaatggtggggcgg

SEQ ID NO: 6472 - DNA, 478 bp, Glycine max
agaacttggaaaactgccaatgaaagtggccaaacaacgtgatacaattttatcttagtaacaaaaagaaagattcacgtcaccaaataaaatatacaggaaacatgacaaaattcacaaacttttacttagacaagagaaagataacaccaataataagctaaactcagacgactccttccaacaattgaaacaacaatccaccacactaaagttcttttggtatcatcacagtatatggcaagtttcttctgtatccccaggaatagccaatatatgatttacatatgcatttcaaaacaaaggaatttaacggttgatgattttcatgaatgcatgatgatttttgacctacgaaaccaactgacatgtaaaaaaatgcataatgctaggatgtaatctttcccatcctgggtcaacaatcacaatcgatccccagcctagaaaagcaagtatggagaaaaaaaattatatggat

SEQ ID NO: 6473 - DNA, 1659 bp, Glycine max
gtctagtctatctagaattcaataatttactattttaggcaaataaaaacaaattaaacttgagaagaaaaaaaggcctgcaaagggacattgtaccttaaattaaaagattgaagtttcatgtagtttctttttcatcatccattgaactgaaccttaaattaattatagaaccatgtttgcaactaccaattcctccactttgtcacctttattctctttcagtagaacaacagcaacctctctgccttccaaacccacattctggaatttggttccaatgaaacaatcttcttctccggggcacttggccttagccttagacaatccacgtagaacacttcacgtgtcttgtggctccacatcaccacatgcttcccagagatcatcaattcaggggggtgaagcttttttcaggggtgtgttggaaagtatgcaatctgtttacttgaacagaaatcgtactgctaaggccatattggaccttgttcactctgctgagaataactcattatgctatgatcatcttgcattcaggacatttggggtgaatggttatggaattgattccatggctagtttttttctggattatggctatacacaaagggaagagttgaggtttccagccaaaaagttgagggctttgtggttttctcctcctgctgattcactggctagcaatggcagtggcattaatgggcctttgccaagaatatttatatcagagctactggtagatcaaatgagtccacagactcaggaaataattaaaaaatacaccgaatcatctgtggatggaaacaagtatgcagcacttgcaagttcccttggacatttaacatgggaaaagcccttatattctgagtttcaacaattggcaagtgaaagtgagtatgctgcctggaccctagtcaacgggtatgcactaaaccatgttactatatccactcatcggctgaaaactcatttgaaggagataaaaaaactaaatcagtttattaaggatagtggattcagattgaattctgaaggaggagtgctgaaagtgagccctgatggtcttctccagcaaagctcaactgtagcagattcaatttctttcaaattttctgatggtataactgaatcagttccatgctcatacattgaatttgctgagcgactggtgctgccgcagtataaacatttacctgacacagaggttaaagagttccatagaagagatggttttgaggtagcaagtgctgacaagatatttgaaagcacatccaaggagcagttgagcagagtaggctcataagaggctcatctcactccataccaagaatgtgtatactttatttcccttggggaaatatattacaatttatacccagttgtattctggaagtttggatttcatacaattccaatcatgtggatgttgcatcaataatttgggttgattaatttcaaaaaaaataattaactcaaacacaaacataaaataatcgtaagggatttgtctagcagcacaatatagagtctcagattttacatgcaagttcgagattctcccttgtcttcttgcagtgagataaatataagtgcatttgtaagtgttttttagtcggaagactttttttgtctagtacaaatatgtcatttctttcccct

SEQ ID NO: 6474 - DNA, 1293 bp, Glycine max
tatacccctgatcctcatgtcaatctccgcgttgtgttgtgaaactgtgatgtcctcctaaaaaactctatccatgtctatgatgtctctcacaaccgtggctgcattcaagtccctcacaatggcggaatcgtgccttctatccctcccttccctcttctacgccaaaaacaataccctttctctctcaattcccaccaagcccctcaacctccatcttccatgctccaactcttcgctctttcccctcaccaccaaaacaacgcgccactcttctctcctcacattcgtggctcagacatcggattgggccaaagaagaagaggaagaagaaacctcgtgggagaaccaaggcgacaccgcgtggggaactgaagaaggtggccacgaagaagggggtttcgctgaaaaagctgaggaagataagatcttcgttgggaacttgcctttcgacatcgacagcgagaatttggcgtcgctcttcgggcaggctggcaccgttgaggttgctgaggttatttataatagggccactgaccggagtcgtgggtttggatttgttaccatgagtacacttgaagagcttaagaaggctgtcgagatgttcagtggttacgaactaaatggaagagtgttgactgttaataaggctgctccaaaaggagcacagcctgaacgcccaccacgcccaccacgttcctttagttctggtttaagagtctatgttggcaacttgccatgggaagttgacgatgctcggctggagcaaattttcagtgaacatggtaaggttgaggatgctcgggtggtctatgacagagagactggtcgatcacgtggttttggctttgtcacgatgtccagtgagactgatatgaatgatgcaattgctgcccttgatggtcagagtttggatgggagggcaatcagagtgaatgttgcagcccaaaggcctaaacctagctcgttttgagtggtaacttgagtgatcttccaagtccggctgattgagtttccttttaatggctaagtatacagtggcgttttttgtatcttctttgggagctggtttcagattagatttgcaagttgtaatgttattaattttgtgtccagatgaaaatgatttaagttactattccttttctagggattttgaagaaagtcttgatttttttaaccattttgtttgctaatgttgcacgaaaatatagatattgtcttttagcttaaatcttctggtgcattatctggctacttaaatggcacggaagttcaaatgaacaagtctcc

SEQ ID NO: 6475 - DNA, 545 bp, Glycine max
cccacgcgtccgcccacgcgtccgaaaaaaactcttatctatgcctatgtctctgtctctgtcaaccgtgcctgcgttcaattctctcacaatggctgaatcctgcctcctatctctcccttccctcttctacgccaaaaacaaaaccctttctctctcaattcccactaatcctctcaacctgcaattcccatgctcaaactcttcgctttttcccctcaccaccaagactacgcgccactcttctctcctcacattcgtggctcagacatctggttgggccaaagaaggggaggaggaagaagccgcgtgggagaaccaaggcgacactgcgtggggaactgaagaaggtggcgatgatatagaagatggcggcgaagggggtttcgctgaagaagaagctgaagaagttaagatcttcgttgggaacctgcctttcgacttcgacagcgagaaattggcctcgcttttcgaacaggctggcaccgttgaggttgctgaggttatatataatagggccactgaccggagtcgcgggttcggat

SEQ ID NO: 6476 - DNA, 416 bp, Glycine max
catcaaaaacccaacacaagtaacgaagaagtcactgccatctcgcaagtttcgatccccagaaggaaaataaaaatgcacgaaattagagaccctgcaattcggctcttcggtcagaagatccctttccctgaagatgttgacaaagaagaagagagtgctgaggatagagaacaagagatggaagaacatgaagacgaaggagacaaggatactagagttgaaaatgttactaaggaagagctagaagctgatcctcctctagatgctgaagagactaagatttcaggcacatcccctgaggctatcgtgaaccccaaaacaccttccatagaagaagagacagccaaatcaaacggtggcatatcagagaaggaacaaggcgatgcagtcaactcacaagagaaaaccctgaa

SEQ ID NO: 6477 - DNA, 557 bp, Glycine max
  unsure (1)..(557): unsure at all n locations
ggttcaaagaaacttgacaccgattagattaggggcttcgaacaaggagccccgaaacccaaaccctaatctgattcgctttcgattaaggcgtccgagagcgcttctcgatcgagttccgcggccgattcgtacattgggagcttgataagcttgacctctaagagtgagatcagatacgaaggtattctctacaacatcaacaccgaagagtccagtattggcctcaaaaatagtattcttctgctacccacttcttttttcttatgaatttcctttcaagatgttaataatatgcgtcactcgagaatgagttgcatttgcagagcctctctgaccgcatggcggagctagagatcttggggctattcatttttgtgcagattcggttttattgtttgcaaaacagagggagcggtgagtcactgatggcgaaggcagtgatgatgggtggggtcctgtttggaaaaagcactgttgttggtgcttagctcagttggctgagtctaattataggcaggtttgcagtaccctaattgnattttcttatgtatata

SEQ ID NO: 6478 - DNA, 460 bp, Glycine max
ccctaacttaacccaggactccggtccgcccagttcaaagaaacttgacaccgattagattaggggcttcgaacaaggagccccgaaacccaaaccctaatctgattcgctttcgattatggcgtctgagagcgcttctcgatcgagttccgcggccgattcgtacattgggagcttgataagcttgacctctaagagtgagatcagatacgaaggtattctctacaacatcaacaccgaagagtccagtattggcctcagaaacgtgcggtcttttggaacagaaggaaggaaaaaggatggcccacaaatccctcccagtgacaaggtttatgagtatatacttttccgtgggactgacatcaaggatttacaggttaaatcttctccacctgtccagcctactccacaagtcaacaatgacccagctattattcagtctcactatcctcacccggtc

SEQ ID NO: 6479 - DNA, 464 bp, Glycine max
atcccatctctccaattgaaacctgtaacctgatgcctgaaaccgaatagattgagtggccttgggaatttattttaaaaggtacgatcaaagaatgaaactcataccctaatagtacataataatctctcatttacatcccgtcactccagttgaaagaaactcgaaaccgattagattagaggcttcaaacaagaggccccaaaacccaaaccctattctggttcacttgcgattatggcgtctgagagcgcttctcgatcgagttccgcggccgattcgtacattgggagcttgataagcttgacctctaagagtgagatcagatacgaaggcatactctacaacatcaacaccgaagagtccagtattggcctcagaaacgtgcgatcttttggaacagaaggaaggaaaaaggatggcccacaaatccctccaggtgacaaggtttatgagtatatact

SEQ ID NO: 6480 - DNA, 391 bp, Glycine max
aaagaaacttttttggtacaacttggttctagaatcttggaatacatagtgggagatggaacattaggaggatgatccagattttcgtatatgctttttgcgagttaatttaatagctcaataaaaactttgtttagatcatctgtgtcgaaatgctgaatgatgtatgcccatattacacaagaatcagatcatctgagacatctgtcttaatttcttttgcaggatttacaggttaaatcttctccacctgtccagcctactccacaagtcatctatgacccagctattattcaggtgcacgaggaattttttatctgaaatatgaatcagttacgttaatcacatcctcaccatatggacttgcatatgcagtctcgctatcctgccg

SEQ ID NO: 6481 - DNA, 595 bp, Glycine max
caacagaacggggtgcaattgaaagagagatttgatagcctcaactcaagtaagggttttctctttgagaaaatcgtatcttacaccttttggtgaccactttgagtgagagaagagaaattaagagagatactcaaattagattcaagagagatggccatcaaccatgaaacttgggctttcattttcggtcttctaggcaacgtgatctcctttatggtgttcctcgctccattaccaactttttaccaaatctacaagaaaaaatctacggatgggtttcaatcactaccttatattgttgcactattcagttcaatgctctggatttattacgcactcgtcaaaaaggatgctagcctccttctcattactattaactcctttggatgtgtgatagagacgatataccttgcaatcttcctaatttacgccccaagcaaaaccaggctttggaccatcaagcttcttctcatgttgaatgtttttggattcggagcaatgcttctttcaaccctctaccttacaacgggttccaaacgtctttctgtgataggatggatttgccttgttctcaacataagcgtttttgctg

SEQ ID NO: 6482 - DNA, 268 bp, Glycine max
gatagcctcaactgaggggcttctctttgagagaatcgtatctcacaccaattagattccaattagattcaagagacatggccattaaccatgaaacttgggctttcgttttcggccttctaggcaacgtgatctcctttatggtgttcctcgctccattaccgaccttttaccaaatctacaagaagaaatctacagaagagttccaatcactaccttatgttgttgcattgttcagttcaatgctttggatctattacgcactcgt

SEQ ID NO: 6483 - DNA, 1617 bp, Glycine max
cccacccgtccgcccaagagcttccgtggcagtggtagttgccaaactagtagcaagaagtaagtcacgtttttctccgttttcattcatcacaatattaaagcttttagtttccttcagtatgggggacacttacgttttggccacaccgaagcgcaaccgttccgatgacgtggacggcggcgaggcgaagaagctgctgttgcagcagggcgaggcagacccggcggcggcgctggcgagcgcgcggcacgagttcggggagcacggcggggtgaacatgtcgatcgaggcgtcggcgacgttcacggtgatggagccggagacgatgcggcgcatgttcgccggagaactcggccccgaccgcgacttcttcatctacagccgccacttcaacccgacggtgctgagcctcagtcgcctcatggccgccctcgaaggcaccgaggccgcctactgcaccgccagcggcatgtccgccatctccgccgtcctcctccagctctgcagccacggcgaacacgtggtcgcctccagaactctctacggtgggacccacgcgctcctctcacactttctcccgcgcacgtgcggaatatccactagcttcgtggaggtgacggatcttgacatggttgatgctgccatagtagaagggaaaacaaaagtgctttacttcgaatctgtttccaaccccacccttacggttgcgaacatacctgaactgtgccacatggcacaccggaagggagtgacggtggtggtggacaacacgttcgcgcccatggtgctttcgccagcgcgtcttggtgctgatgttgtcgttcacagtatctccaagttcatcagcggtggggccgatatcattgcaggagcggtgtgcggacccgcaagactggtgaacgcaatgatggatctgcaacaagggtcactaatgctgctgggtccaacaatgaatgcgaaagtggcattcgaactctcggagagaataccgcacctagggctaagaatgaaggagcatagcaaccgcgcactagagttcgcaacgaggctcaaaaggctaggaatgagggtaatatacccgggcctggaggagcacccacagcaccagcttctgaaatcaatgcacaacaaggactatggctacggcgggctcatgtgcgtggacatggaaacggaggagagggccaaccgcttcatgagccacttgcagaactacggccagttcggcttcatggctgtgagcttgggctactacgagaccctcatgtcctgctccggcagcagcaccagcagtgaactcagcactgaggagaaggagctcgccggaatctcgccggggctcgtgaggatgtcgattgggtacattggaaccttggagcagaagtggagccagctccaaaaggcgctcactagactaaacgactctggatacagcaacgctcgccggacttgcttgtctcatcatgcacatgcacatgcaccctcgtcttcttcctgctcccataatgttatgttatctataataataatttatgctcagctttatgtcttgtcttgctactcgatcgtccctcctgccccatggatatgaatatgtgtcaaaagtttctaatc

SEQ ID NO: 6484 - DNA, 555 bp, Glycine max
gggcacgagtcttgcagttgcagacaggggtgtcttttctttcatcctttccgcaattcaatatctctctctctctcttgctcactacattttcgaccgaaatggctgaaagcgcggtggtgaacaggaagcgcagcggcacggacgacgtcgtttcggagaacgacggaaagaggaagaatgtggtggcacccgacatggaccctgcggcggcattggccttgacgcggcacgagttcggggagcacggtggcgtgaacatgtcgatcgaggcctcggctacgttcacggtgatggagccggagaccctctgccgcatgttcactggcgagctgggccccgaccgcgacttcttcatctacagccgccacttcaacccgacggtgctcaacttgcgccgccacatggccgccctggaaggcacggaggccgcctactgcaccgccagcggcatggccgccatctcctcggtcctcctccagctctgcagctccggcgggcacgtggtggcctccaccactctctacggcgggacccacgccctcctcacgcact

SEQ ID NO: 6485 - DNA, 420 bp, Glycine max
ttgcggagagggttgtcttttgggtcatccttttcccaattcaataactctctctctctctcttgctccctacattttcgatcactttaaagtctcaaacgtaatggctgaaagcgcggtgacgaacaggaagcgcagcagcggggacgacgccgtttcggagaatgacagaaagcggaagaatatggtggcacgcaacatggacccggctgaggcgttggccttgacgcggcacgagttcggggagcacggtggcgtaaacatgtcgatcgaggcctcggcgacgttcacggtgatggagccggagaccctcggtcgcatgttcgccggcgagctgggcccggaccgcgatttcttcatttacagccgccacttcaacccgacggttgtcaacctgggccgccacatggccgccctgga

SEQ ID NO: 6486 - DNA, 815 bp, Glycine max
gcttgagattctttttgtagaggatttttttctttccgtaagtgtcaatgcattgttgtgcttctggtctttctttctataaaaaccaaccctcgggtctttcatttcacatgttccatagttcttgctctgggtgggtaaagatggaaggtgctagtagagtcttatgcttgtttctggcggcatttttgtggtttaatgctcaacatgcttttgtaagttgtgctttgacatttgagttgcaaagcaaaattgctaaagccaaccaagagggaccttacctaggtttaatcataccaaattcttttgaactagaccctcttcttcagaatcctggctacacagctagtgacaccatcatagacttcgctggaaggagatttcgctttggagccattggtgacaagcctgttatactggtcatgacaggattgagcgtgataaatgcagctataacgactcagcttctgttgagtttattcacggtagaaggagtggtgcattacggcattgctggaaatgcaaacccgtccttgcatattggagatgtagctattccccaatactgggctcatctagcactatggagctggcagaggtatgggctagggcctgatgacacattacccttggaagacaatggagactacaccagggaattagggcacttaaattttgcaaatttcacctcaaacgtaactgctgatagtccatttgataaccaactcaacaatatatggtaccaaccagaggagatttttcccattgatggcgttccggaagtaaagcaacatgtcttttgggtttccggtgat

SEQ ID NO: 6487 - DNA, 444 bp, Glycine max
cttcacttttccgcccacgcgtccgcccacgcgtccggcaaattttaggattcagttgagttctatttgcaaagatcttgtcaaaacacatcttgatatcctggatttgtatgaatattatttacatttttcattagcttggcttcaaaaaaactcggaagcgcttttgtatatgttggaaccattcttggttgcacaatctaatgaccgtaatccttacaacattgatattgtgaatctgaagaagcttatcccaaaaattgggcagttgttggctcaaacttctttcatgtctaatatacaaaaccttcaactatccgaacgtgcagaagataaactagttgcagatataaagcattcaattcctgatgatgaaagatggaagattatagggacctgcttgtggcagcatatgtctagattcatgatatttaatttgaatct

SEQ ID NO: 6488 - DNA, 631 bp, Glycine max
ggagcttttagggaaggaataagaaaagctggaccaaggatgcttgagcctataatgaaggttgaagttgttactcctgaagaacatctaggtgatgtaattggtgatctcaactcaagaagaggacagatcaacagttttggtgacaaacctggtggccttaaggtggttgatgccctggtacctcttgctgagatgttccagtatgtcagcacactcagagggatgacaaagggccgtgcatcctacacaatgcaattagccatgtttgatgtggtgcctcagcacattcagaaccaacttgccacaaaagagcaagaagttgccgcttaatgtatttgcttggtctcctaacaaggaacttcttattgcatagttgtattatgtccattgtcatatagttgggtttgtttttggtattttttttattgtaattttccctttaccgatacaaggttagccaacaaaagaattttcagaagaaaaataggaaacgatttttcttcccaagttggagataataatgcatttttgttttagggggaaggcgcggaaacttggatttacaaaataatattgagaaccaaaaattatttacctatctttagtttttaatacaatatttgtccac

SEQ ID NO: 6489 - DNA, 732 bp, Glycine max
ggcacgtgaggaaagaggtgtgaagtgtgtgagtctgagagaagagaacttagagaaatggaactacgtgagcttggaagaaccggactgaaactcagcactgtaggattcggagcttctccactgggcaatgtcttcggcgatgtttccgaggaacaagccaacgcttccgttcgcctcgctttccaatccggcatcaatttcttcgacacttctccgtactacggagggacactgtcggaaaaagttctgggaaaggcactgaaggctctgggagctccgaggaactcgtacgttgtggcaacgaagtgcggacggtacaaggagggtttcgatttcagcgcggagagagtgacgagaagcattgaagagagcttggaaaggttgcagcttgactacgtcgacattctccaatgccacgacatcgagttcggctccttagaccaggttgtgaatgagacgattccagcgcttgtgaagctgaaggaagcagggaaggcgcggttcattggaataacagggcttcctcttggggattttcagttacgtgcttgatagggttccgcctggggacgctggatgttgtgctttcatattgccattactgtgtgaatgacactagcttggggggtttggtgccctatttgaagaccaaagggggtggcatttatcaatgcttctcccttgtctatgggcccttctcaccgagtctggcccgcctgaatggcatcc

SEQ ID NO: 6490 - DNA, 627 bp, Glycine max
gacggggctagcccttaataacaggagagggtgatggctgtaatatgaagagaagaaaagaataggtgttgtggtggagtaagaatcgaattcgaaggaagagaggtggtagggtttgtgatatagcgatgagtgagagtaacgggaacagcaggaggcgaaatgttgaagatcaagatctgggactgtacttcttggaggcgtgcaggggtagggagatgaaagaggaagaggaagaggaagaggcacccagggagctcaacaccattaacagctctggtggtttcgtcgtggtttccacggacaagttgtcggtaaagtacaccagcgtcaaccttcacggccacgacgtcggtgtcattcaggccaacaagcctgctcctaccaagcgcctcatgtactatttcgagattcatgtcaaggatgccggcgttaagggccagatagccattggattcacctccgagaccttcaagatgcgaagacaaccagggtgggacgccaatagctgcggctatcacggcgatgatggtctgctctaccgtggacatggcaaggggggagagccgtttggcccaacctatacctccggagacgtagttggtgccggaattaactatgctgcac

SEQ ID NO: 6491 - DNA, 644 bp, Glycine max
ctttagagtggggaaaaaagaaatgggatttttttttctttcaacgccaccccaagttcccagctttgaagtttgagctcaaggtccaaacattccaaaaacttgcatagagagatagatacatactacaaagacttcagatttttggggggagagaaaagatctgcgggggtgtaagtttgtggggattttttttttgagaaaagaggaagccgtttgtgtctgtgtgtgtttgtgaaatagtgtgttaatatgagtaactggttggggttctctctcactccacacttgaggattgatgaagaatttgagagagagaaccaagagcgtggaggagggtaccatcatccttctccttcttgtcaccctcacttgtctgttatgcctcttcgctctgatggctctctctgtgttgctgactcctttagccactctgctgcatctcaagaatggagatatgatagtgcaataggtggagggaattccaacgagaaaggtccaaagcttgaggactttttgggtggctactcaaactcccccactaaggtcttttgccaagacactcagcatgaccaaaaccaaagccagaacaatgtttccaaaatcaatgttaatgtagcaccaagcttttgcaccaatgtaga

SEQ ID NO: 6492 - DNA, 1132 bp, Glycine max
cacgcgtcagcaaacgcgtccggaaaaacaatttccggaaaattcaaaaagcttcaaagagttccaaccaaaatgggtcggtcttgcaatcagacgggacttgtttgatgatccagatcatatgatggcaatgaagatgatcaaccaagcacatgtgaggaaggggaaaataaagtctttcacttcttattgtggtggacttccatctcctgaagctgctaacaatccattagcatataaattcagttggaatcctgcaggagccatccgagctgggcgcaatcctgccacctacaaatggggtggtgaaactgtacatattgatggggacgatctttatgattcggctacaagactaaggctaccggaccttcctgcttttgctttggaatgtctcccaaatcgcaattcattactttttggggatttgtatggaataactgaagcatcgaccattttccgtggaaccctccgctatgaaggatttagtgagatcatggggacactgtctaggattggcttatttaacaatgaagcccattcgttgctaatgaatggacagagaccaactttcagaaaattcttatttgaacttctcaaagttgttggtgataatccagatgaactattgataggagagaatgacatcatggagcaaatattagtacaagggcactgcaaagatcaaagaacggcaatggagacagcaaaaacaatcatattcttgggacttcttggcgaaacagaaatccctgcttcctgcaagagtgcttttgatgttgtttgtttccgcatggaggagaggttatcatacaccagcacagaaaaggatatggtgcttttgcaccatgaactggaaatagaatacccagatagccaaattacagagaagcatagagctactttacttgaatttgggaagactcttgatgaaaaaaaccacaactgccatggcccttactgttggtattccagctgctgttggagctttgcttttattgacaaacaaaattcagacaagaggagtcttaaggcctatcgaacctgaagtatacaatccagcactggatattatagaagcttatgggatcaagttgatagagaagaccgagtaatttgcatctatgaattg

SEQ ID NO: 6493 - DNA, 699 bp, Glycine max
attcaagtaaaatttcacttaagcttggtaaagttgaagagaatggcatagagaaggaatctgaccccagaaagaaggctgcggttttaattcttggtgctggtcgggtctgtcaaccagctgccgaaatgctttcatcatttggaaggccatcatcgagccaatggtataaaacattgttggaagatgattttgaatgtcaaactgatgtagaagtcattgtgggatctctgtacctgaaggatgcagagcagactgtagagggcattccaaatgtaaccggagttcagcttgatgtgatggatcatgccaatttgtgtaagtacattgcacaggttgacgttgttataagtttgctgcccccaagttgtcatattatcgtagcgaatgcttgcattgagctgaaaaaacatcttgtcactgctagctatgttgatagctccatgtcaatgctaaatgataaggctaaggatgctggcataacaattcttggagagatgggcttagacccaggaattgatcatatgatggcaatgaagatgatcaaccaagcacatgtgaggaaggggaaaataaagtctttcacttcttattgtggtggacttccatctcctgaagctgctaacaatccattagcatataaattcagttggaatcctgcaggagccatccgagctgggcgcaatcctgccacctaca

SEQ ID NO: 6494 - DNA, 736 bp, Glycine max
ccctcgagccgaatcggctcgagcggctcgagtgttgctggtagtgcttagaaggggttggagatgatgatggggcaaagatatcagggaaagaaggggaaaaaggtacaagtacacaagagtcagaagaaccaaaagaagaatgtgaagcaaaagatgcgaaggatctttgccctgaagatgaggagaaaatggaagactctccagtcttaggtcttcttaaagaacaaaaaagggctaaacttgaaaccaaggatgataaaggcaatggaaccaaagtagttccaattgaggccctaattaagaaagctgttagaaaaagatcttcgtacatcaaggctaatgcagagaaaatcactatggctggtcttcgtcgactcttggaggaagatcttaaacttgataaatttactctggatccctataagaagtttgtaagtcaacagcttgatgaggtattagcatcgtctgaagttcccaaaccttcaaataatgctaagaaaattgttaagaaaaaacctgataccaaagtaactaaaaaggtcagcagtgaagagaactctgatacttcagataaggagactgatgtggaagagagtgaggaagatgaagttaaacctaggaaaaaaattgttccaaaaggcaaggtgaagacttctgtccaacccaaaaagcgtaaaggagaggagactgatctatccagtaagaaaagggtcaaacctgctaaagcaacctc

SEQ ID NO: 6495 - DNA, 655 bp, Glycine max
gtcacaggcacaggtatttcgaacaaacacagcactgaggaacagaggaagtgtgtgtgtgggtgtgtctgaggaagtgtaccctaatttgaatttgaatgcaatttcactactagcattagcaaaacgagaattggaagttgagaattcgcagcgagaaagaaaaagagaaagagacatggcagaagccagcgaagggacggcgaagaaggaggagattttagagtctcagattgaaacggctatgcgctctcgcgtctctctcttcaaggaacaatctgactccttgacgttcgagggtgttcgtcgattgctcgagaaagacttgggattggaggagtatgctttggatgtgcacaagagatttatcaagcaatgcttgctcaagtgcttagaaggggtacgagatgatgatgggccaaagatatcagggaaagaacgggaaaaaggctcaagtatacaagagtcagaagaaccaacagaagaatgtgaatcaaaagatgcgaaggatctttgccctgaagatgaggagaagatggaagactctccagtcttaggtcttcttaaagaacaaaacagggctaaacttgaaaccaaggatgataaaggcaatggaaccaaagtagttccaagtgaggctctaattaagaaagct

SEQ ID NO: 6496 - DNA, 1226 bp, Glycine max
agagagtgtctgactccgagtctgtctttgttgcgtttcgagtgtctgtggaatccctaaccctaatttattgtgtggcgaaatgggatcaattggggtactcctggtggctcaggtgataccgtacctggagcaagagctggacaagcgctacaagctgtttcgggcgtatgatcagccgcagacggcgcaggttctaagccagcacgcgagctcgatccgtgcggtggtcggaaactcgaacgccggcgccgacgcggagctgatcgaggcgctgccgaagctggagatcgtgtcgagcttcagcgtgggagtggacaggatagacctggacaggtgcaaggagaaaggaattcgcgtcaccaacacgccggacgtgctgaccgatgaagtcgccgacctcgctatcggattgatgctggcgctgctcaggaggatctgcgagtgcgatcgttatgtcaggagcggcaagtggaagaaaggggactacaaactgtcctcccagttctcgggggaaactgttggcattattgggctagggaggattggccaagcaattgctaagagagctgaaggattcaactgccccatatgctactactctagaactcaaaaaagagactcaaactacaagtactatcctagtgttgtagaactggcatctaactgcgacatactggtagttgcttgcccactgacggaggaaactcatcacatcatcaacagggaggtgatcaatgcactgggtcccaagggttatcttattaacattggacgaggcaagcatgttgatgaggcagagttagtgccagctctgctagaaggtcgtttgggtggtgctgggctagatgtgtttgaaaatgagcctactgttccagaagagctatttgggcttgaaaatgttgtcttgttgcctcatgtcggaagtggcacaatagaaactcgaactgccatggctgaccttgtccttggaaacctagacgctcatttccttggaaatccactgttaacacccttggtttaatcaatatgccatcatggaactaccaggactgattgtccccctgcattactaccgtttaataactttttgtgacatggaaattgatcattgtaagagcttcttcatatttgtgctggtgcttaatctattgtaaacaatgatttagttcaccttcattgtgacatcttaataagattatcaatcattcaatatagatcgactt

SEQ ID NO: 6497 - DNA, 513 bp, Glycine max
tctgtcgcgtgggcggacgcgcatggcatcatcgtcaaggttcctcaaaatgtctctgtcttttgtgttgctcttcctcatctcaattccaccttctttctcctctccaattcaccccacaagcaacgaccttcgtttttcttcaacagcagaaaaactcataagagggcttaacctgttcccgaaagaccccattaacacactcgagaatgaccctctttttgtgtcaggaagcattgtggagaagagcttcactttccctagtcttgctgcttcttcagaatcttctgttgaagaacttggtcaccatgcaggctattatcgccttcctcgttccaaagctgcaaggatgttctacttcttctttgaatctcgaagcagtaagaatgatcctgttgtcatatggctgactggaggaccaggatgcagcagtgaactagctttgttttacgaaaatggtcctttcagcgtaccaagaacttgtctcttgtgtggaatgactatggctgggac

SEQ ID NO: 6498 - DNA, 758 bp, Glycine max
ttcatctccctctttcttcttttcagctactttaggtctctctctctctctctctctcttctctctctctctttcttcctttctttaatacttattaattcatcttttttatctttctttctttctttccccttttgtatttctgggttcgatattgttatcggttatttgtgcactgcttccgccggggctattcaggaatcatggctagggttttggctcagtctgttaatgtccctggtctagtggctgagcataggcatggtcagcaaaagggatcaggaaaattaaaaagatcgaccaaaatgatgagtgctttacggacaaatggattaagaatgtcaggtttctcagggcttcgtactttcaatcctttggatactatgttgagacctggcatagattttcattctaaggtatccattgcaacgtcttcgcggcaagcaagagctaccagatgcgtgcccaaagccatgtttgagcgtttcactgagaaagcaatcaaagtgattatgctagcccaggaggaagcaagacgtcttggtcacaattttgttggcacagagcaaattctattgggtcttatcggcgaaggaactggtattgctgctaaggtgctaaagtcaatggggatcaacctcaaagatgcacgagtggaagtagaaaaaatatctggaaggggtagtggatttgtggctgttgagattccgtttactccccgggcatagcgtgttttagaactttcactggaggaagct

SEQ ID NO: 6499 - DNA, 499 bp, Glycine max
gcctattcctcaccacaatttgattccttcctcttctcttcttcgctcactatataattcattcatctctctcttttctcttttcagctaccttcggcagccggctattcaggtatcatggctagggttttggcggcagtctattaatagtccctgggctattgtgctgagcataggcatggtcagcaaaaggaatcaggaaaattaaaaagatcgaccaaaatgatgagtgctttacgaacaaatggattaagaatgtcaggtttctcattgcatcgtactttcaatcctttggatactatagtgagacctgtaatttagattcattctaaggtattcattgcaacttctttacttttatcatgatctaccagatgcttgcccaaatccatgtttgatcctttcactgataaagcaatcgtatgtattattctattccatgatgaagcaagacgttttggtcacaatttttttggaacagatcaaattctattgggtc

SEQ ID NO: 6500 - DNA, 642 bp, Glycine max
ctctctttttctctctatctctcaatctctcacagaaatggctctcaaggccgtccatgtcaccgacgtcccttccctggacctggtgaccgagaatgcctctctgtccctctgctcctcccgcttccccaacggggtggaaatgagtcggagtgacttcaagatgccaaagttcgtcgtgatcggacacagaggtaatggcatgaacgttctgcagtcttccgatcgaagaatgagagccatcaaggaaaataccatcttgtccttcaacaaagccgccactttcccgctcgatttcatcgaattcgacgttcaggtgacgagagatgactgcccagtcattttccacgacgatttcatcttcacagaggagaatggttctgtgtttgggaagagattatcggagctgaatctgtctgagtttctttcctatgggcctcaaagagaggctgaaaaggagggaaaggttttgcttagaaaaaaagaagggaagataatgcaatgggacgttgaacaagatgaccctctatgcactcttcaagaggcttttgtcaaggtggaacccactttgggttttaacattgagttgaaattcgatgaccactttgtctatgagcaagattatctcgtccatgtccttca

SEQ ID NO: 6501 - DNA, 1117 bp, Glycine max
tcccattttgatttgcttgttggaggcggagaattgagaagaaaatgagagcagtgtccctttggcttcggcgcaaacaccaattgccgttggcattggcatttcgcagattctcgacatctaattcgaaggtgaaaatctttgatcgcgagttgaagcgcacacaacgtgaccgagccgcatggttgactccctcacacgaccctcttcttcacaccgtcgctcaaaatctcttggaccgcttgcaggactgtaagaagacttttccaactgcgctatgcttaggaggctcattacaacctatcacgcgctctctttctgctcctcctgccccaggtggcgtggaaaagcttattgtcatggatgcctcctatgatatgcttcaagcctgtaaaaatgctcaccacaatgccaccgttgagacccactttcttgttgctgacgaagagtttcttcctatcaaagaaagctctgtggatttggttgttagttgcttgggactacactggactaatgatctgcctggagcaatgatacagtctagattggcattgaagcctgatggcttatttttagcagctattcttggtggagaaacattaaagtgacaatgtttatttttatttcttgaaatttctttggaacagaaatggatgggggcattctaattaatgatatttgtgctgctaccagggagctcagaatagcttgtacgttggcacaaatggagcgtgaaggagggatcagtccccgagtatcacctttggcacaggttcgagatgctgggaatcttttgactagggcaggtttcacccttccaggggttgatgttgatgagtatgtagttaaatatgaaagtgctctggagcttatagaacatctccgtgcaatgggtgaaacaaatgctctttatcaaatgaacaatatcctaaagagggacacagcgttagcaactgcagctatttatgattcaatgttttctgcagaagacggcactgtacctgcaacattccaggttatatacatgacggggtggagagaacatccttctcagcagaaaggcaaaagaaggggatcagccactatatctttcaacgatattcagaagcaatttgga

SEQ ID NO: 6502 - DNA, 470 bp, Glycine max
cgacgagtcaaacaaacaaacccaacattacaaccatggcaacggtgacacaaccgtgtccttcgtggacgcgcggttccgttcctctctcgaagcgcgtcctcccacgacgtcgtttcaccacacgcctcaccacgtacccacaagctgctctggttcaagcaccgcctccaccaccaccttcttcgcccagagacagctctagctccattcagcttctgaccttgtcacgtgccaatgacctgcaagccgaggccagagccatggcacgtgccgccaatgccaccgtctacaacccgcaactcattgcgtccatgtacggttcccaacccatcaaggtggtgcggaggacccttcagattctgactgcgttgggttcgttcgggctgaaactgttgctggaccagaggaatggagcgcttgataagaacagaagagttcgtgctgttgagcttaaggacatattcacg

SEQ ID NO: 6503 - DNA, 395 bp, Glycine max
gtttgagagtgcgcctcctggttgatcctcatatgccaaaggatggaagtagttcacccaatcttgtcatggacaacccactttcacaaaatccagacagttcatggagtcgcttttttcgcaatgcagagatggagaggatggttgatcaggatttagcacgtttataccccgaacatggcaactatttccagacgccaggttgcctaggcctattgagaagaattttattactatggtgtctcacacacccagagtgtggttatagacaaggaatgcatgaattacttgctccggtgctttatgttctccaatttgatgttgagtgtcttttggaagttcgaaagctttatgaagatcacttcacagacagatttgatggcctcttttgtcaa

SEQ ID NO: 6504 - DNA, 429 bp, Glycine max
cgacacttgatggtttttgcgtttaacctaagaaaatcgcccaagacgacacaaagtatccaaaggaagttcccactaaccagaggaacgagtgttgaagcagagtagcagaagagggttaatgggagaagatccacagaagctgaagcgactagcggcggattcctacgactacgacaacgactctcgatggcctggttactggaacaatgttctcattcctccccacatggcttctcgcgacgacgtcgtttcacacttcaagcgcaagttctaccagcgctacgttgatcctgatcttgtggtggagccaatgtctgttggtggcagttcatcccagccagtgcgttcatcaactacctcatcgtcatcgtcgcgcccaacatataatcaacctcgtgcaagaagttctggatcaactaatagaac

SEQ ID NO: 6505 - DNA, 388 bp, Glycine max
ggaagcaagtagtagaagaagaagagggtggaaaatcaaaaatgggagaagagagagaagatccacagaagctaaagcgattagcggcagattcatacgactacgacaacgactctcgatggcccgattactggaacaacgttctcatccctccccacatggcctctcgtgacgacgtcgtttcccacttcaagcgcaagttctaccagcgctacgttgatcctgattttgtggtggagccaatgtctgttggtggcagttcatcccagccagtgcgttcatcaactacctctcttcatcgtcgcccctgacaaataatcaacctcgtgccagaagttctggatcaactaatagaacttcagggacatccacaactgcaggtccaggt

SEQ ID NO: 6506 - DNA, 472 bp, Glycine max
gccagtaggcgtgtaccaatgttggttggaatggttgatgtcatattttctgatgttgctcagcctgatcaggcaaggattttggggctgaatgcttcatattatctaaaagcagggggtcattttgttatttcaatcaaggctaactgcatagactccacagtccctgctgaggcagtgtttgaaagcgaagtgaacaagttaaaggctgatcaattcaaaccattcgagcaagtcacccttgaaccatttgagagggaccatgcctgtgtggttggtggatacagaatgcccaagaagaaaaaagatgctgctgagtagattgctttccagtagccagtaggcgtgtaccaatgtcatttcatgagatttgtgttaattttgtttcgaaaccttggttataaaacatactttgtacctttttgatagtttgatgtcagaatgccccaaaagaaaaaatatgcttctgagt

SEQ ID NO: 6507 - DNA, 966 bp, Glycine max
tcttttctacttctttcgttgtcgccgttcgttcacagcgtacctctgctctcgaagatggctcctcccagaggtggtggtgggttcaggggtggtaggggtgacagaggtagaggaaggggtggcggtggaggaagaggaggagacaggggtacgccgttcaaagctagaggcggtggccgtggtggccgcggaggaggcaggggtggtggccgtggcggcggcagaggtggaatgaagggaggtagcaaggttgtggttcagccccatagacatgatggtattttcattgccaagggtaaagaagatgctcttgttactaagaatcttgttcctggtgaagctgtttacaatgagaaaaggattaccgttcagaacgaagacggttccaaagatgagtacagagtttggaatcctttccgatccaagttggctgctgccatccttggtggagttgacaacatatggattaaacctggagccagagtcctttacctaggagctgcttctggaaccactgtttctcatgtatcagacgttgttggccctactggagttgtctatgcagtagaattttcccatagaagtggacgtgacttggtcaatatggcaaagaagcgaactaatgttatacccattattgaagatgctagacatccagctaagtacaggatgttggttggaatggttgatgtcatattttctgatgttgctcagcctgatcaggcaaggattttggggctgaatgcttcatattatctaaaaacagggggtcattttgttatttcaatcaaggctaactgcatagactccacagtccctgctgaggcagtgtttgaaagcgaagtgaacaagttaaaggctgatcaattcaaaccattcaatcaagtcacccttaaaccatttaacaagaaccatgcctagataattaatgcatacagaatgcccaacaacaaaaaagatgct

SEQ ID NO: 6508 - DNA, 768 bp, Glycine max
  unsure (1)..(768): unsure at all n locations
cgcacatggcggtggttatggtggcggccaaggaggtggagcaggtggagggtatggtgctggtgccgagcatggtggtggatatggcggtggtgaaggaggtggagcaggtggagggtatggtgcagctggagaacatggtggtggttatcgtggtggtcaaggaggaggaagtggaggagggtatggtgctggtggagatcatggtgctgctggctatggtggtggagctggaggtggagctggtggaggctatggtgccggtggagaacatggcattggctatggaggaggtggtggaagtggtggagggagtggaggaggttatggtgatggaggagctcatggaggtggatacggtggcggcgcgggtgccggtggaggaggagggtatggggctggtggagcacatggtggtggttttggaggaggtggtggaagtggtggtggccatggtggctatgttccctaagaactactcttcaatgcacaatagatgtgcaagtgtcccctttcgcgtatcaagaataataagtatgctattaataacaggatcataataattaataacgtaacaatcatatcatcaccattaattctaagcacgttgttatcaactcgtgatttttatgtaacaaaagtatttccataattattatttgcattatcgtgaaactactatcatcttgtaattgctcttctgattatatatatttgcataaaagaaatatgtttagagtttgagnnnnnnnnnnnnnnnnnnnnnnn

SEQ ID NO: 6509 - DNA, 455 bp, Glycine max
  unsure (1)..(455): unsure at all n locations
cgggctcctgggcatccagctaagtacaggatgctggtcggaatggttgatgtcatattttcggacgtggctcagcccgatcaggctaggattttggggctgaatgcttcatattatctgaaagcagggggtcattttgttatttcaatcaaggctaactgcatagactccacagtccctgccgaggcagtgtttgaaagcgaagtgaacaagttgaaggctgatcaattcaaaccattcgagcaagtcacccttgaaccatttgagagggaccatgcctgtgtggttggtggatacagaatgcccaataagaacaaagatgctgctgagtagattgctttccggtagccagtaggcttaatgtcatttcacgagattgtgttaattntgttttgaaacctcggttatcaaacatactttgtaccttttctatagtagtaatgtagtcaagtttg

SEQ ID NO: 6510 - DNA, 617 bp, Glycine max
  unsure (1)..(617): unsure at all n locations
ccatttcttcgtctggcgttgtagccgttcacagcctagcctctgctctagaagatggctcctcccagaggtggtgggttcaggggtggtaggggtgacagaggtagaggaaggggcggtggtggaggaagaggaggagacaggggcacgccgttcaaagctagaggcggtggccgtggaggaggcagaggcggcggtggccgtggaggaggcaggggcggcggccgaggtggaatgaagggaggtagcaaggttgtggtgcagcctcatagacatgatggtattttcattgccaagggtaaagaagacgctcttgttaccaagaatcttgttcctggtgaagctgtttacaatgagaaaaggattaccgttcagaacgaagacggttccaaagatgagtacagagtttggaatcctttccgttcgaagttggccgctgccatccttggtggtgttgacaacatatggattaaacctggtgccagagtcctttacctaggagctgcttccggcaccactgtttctacgtacagactgttatggcccaacatgagctgatgantcagntgagntttcccagagaagntgacgngacattgacaantctgcaaagacga

SEQ ID NO: 6511 - DNA, 372 bp, Glycine max
gttgttcggctggctataaaatcctcttaaccagttgttgctgctgcgttgcacttcagtttacagctcccgaaaatggctcctccaagaggtcgtggtggttttggtggtggcggtgggttcaggggtggtggtaggggtgacagaggcagaggaaggggcggtggaggaagaggaggagacaggggcactcccttcaaagctagaggaggtggcagaggtggtggtggccgtggcggaggcaggggtggtggccgtggtggtggcagaggtggaatgaagggaggtagcaaggttgtggttcagccccttagacattatggtattttcattgcctcgggttgagataacgcttttgttactaagaatttt

SEQ ID NO: 6512 - DNA, 265 bp, Glycine max
ctggtactgtgctggtggggagcatggtggtggatatggcggtggtgaaggaggtggagcaggtggagggtatggtgcaagtggagaacatggtggtggttatggtggtggtcaaggaggaggaagtggaggagggtatggtgctggtggagatcatggtgctgctggctatggtggtggagctggaggtggagctggtggaggctatggtgcaagtgtcccctttcgcgtatcaagaataataagtatgctattaataacagga

SEQ ID NO: 6513 - DNA, 677 bp, Glycine max
ctcgagccgcttcatcccccagttcaaatatatatggctgaatcttctgataaggaccggaatggagagcaaacttccagtgaagaagcacaaaggcagtttcttatcgctggtagaccaccaaatctatcctttcctccaatgcaaaacttccattttctaccttcccaagcacatgcatcccctgtgaattatggagaggggtttgaaaatgatccaaatatcccaaactctcagcttgaagcttatagaaaacttcttcaatgccagattcagaacctacagattctgcaaaatcagctcgagatgctgcagaggataaaggctgatagaagtgtagatgagggcactccatcatcagatagcagaggcaagagtgtcatttcctcatcatctgaatctggtcatggttatcgtgaggatattcgagatggaaaagcataaagtctgctgtttctggtttattccagtagcagactgcctaatgtagatataggaagaggaaaatacagaaatcacagcattgctctaatgtgacatctgttattcgtgatactaatcttgtaaatgcatagtgccccttaaaaatgatttattttggcttccttttttttgtttccatgtggattgtacgcatatattaaataatattaaagtttccttttgatcaaaaaaaa

SEQ ID NO: 6514 - DNA, 852 bp, Glycine max
acgagggtgagggagggaaggaggcagcgccactgcacagcaacgcgaacccaagtgcccactccaattcaaattcaatcaattcagaaccctaactagggttccatccattggttatggcggaggatattccttcttcttctcctccaatagcagcatcagatactgctcctttgggttcgagtgtgatctccttagtgaatcgtcttcaggacatattcgcccgcgtcggctcccaatccaccatcgacctcccccaagtcgccgtcgtcggaagccagagcagcggcaagtccagcgtccttgaagcactcgttggccgcgactatctcccccgcggcaacgaaatctgtacgcgccgccccctcgtcctccagctcgtccagaccaagcgcaagcccaacctcgacaacaacgacgagtacggcgagttcctccacctccccggccggaaattccacgatctctccgagattcgcagggaaattcaggctgaaactgatagggaagcgggtgggaacaaaggtgtatcagacaagcagatccgacttaagattttttcaccaaatgttcttgatatcacactggtagatctcccaggcattacgaaggttcctgtgggtgaccagccttctgatattgaagctcgcatcagaacaatgatcatgtcatatatcaaaactcccacctgtctcattctagctgtcacaccagctaattcagatttggctaattcagatgctcttcagatggcagggattgctgatcctgatggtaatagaacaaatcggtgtaatcacaaagttggatttaatggacagaggtactgatgcccggaatctgttactagga

SEQ ID NO: 6515 - DNA, 473 bp, Glycine max
aaaaaaatcagatttagggaaatttccgatttccccgccgccgccttaatctgcaagaaaaagccctttctgatatataattctccttcattcaaacatcactcacttccaacacaactcattacaaacggagttagttagttatagtttagttcgttactttgaagaatctcaaactttcctttcgaatctcagaagaaaccctagctagctctagctccgatggcggtggcgggcggcgccgctcctctcggctcgtcggtgatctcgctggtgaaccggctccaggacatcttcagtcgcgtggggagccactccgccatcgacctccctcaggttgcggtggtcggcagccagagcagcggcaagtccagcgtcctcgaagccctcgtcggccgcgacttcctccctcgcggcaacgacatttgcacgcgccgccccgtcgtcctccagctcgtccaaaccaaaccccc

SEQ ID NO: 6516 - DNA, 501 bp, Glycine max
ttgaaattagaatagacggtgagaaagccaggcacacacaacacaggaacgggtgagtgagcgagtccccactccacactccaatcaatcaaccatttatttcaaaacaaaaccctagctagggttcgatccatcgatcatggcggacgcggtcccggtcccttctccttcagcagcatctactgctactgcccctcttggttcgagtgtgatctccctggtgaaccgccttcaggacatcttcgcccgcgtcggaagccaatccaccatcgacctcccccaagtcgccgtcgtcggcagccagagcagcggcaagtccagcgtcctcgaagccctcgtcggccgagacttcctcccacgcggcaacgacatctgcacacgccgccccctcgttctccagctcgtccagaccaagcgcaagcccgacaacgacgagtacggcgagttcctccacctccctggccggaaattccacgatttctccgagattcgcagggaaat

SEQ ID NO: 6517 - DNA, 525 bp, Glycine max
aaaccacacacacaaagttgcatcaagatcaagatcagtcttattatactattactattactttccacatcaacaaagagccgctcctaccccacgattgttttagccaccatgtgtgtgaaggaccaagagaaagatatgatggatagcaccacaaccaattcatggcctttgcaacattgccaccttttgctcaagactcacatggacaaaaaaggatctttcctcagaacttcaagtgatgacaccaccaacatcagtgttcaaaattcctttcctctagaaagcatatgtgaggacacagtggttgtagacaagaaacagaatctgatgaattttgttccagctcttcggtctggagagtggtctgatattggagaacgtccttacatggaggatactcacatatgcattggagatttggtaaagaagtttaattatgatgtactttctggggaggctgtttccttttatggtgtatttgatggacatggagggaagagtgctgcacaatttgtccgtgat

SEQ ID NO: 6518 - DNA, 795 bp, Glycine max
gagatcatttgtccgcagcaaaacagacaagatcattcatctttccgaagatgggaaattagaagagattatgcatgcaaaatcatgtgctgatctttataaagttattggtgaggatttttggttggctacctggtgcaacagtactgcatttgaagggaagcagcttgaaggaactaggataaaccttgtaaaaatgggagagcatggttttgactttgcaatcaaaacaccttgtacccctgctagatgggaagattttgacgaagaaatgacagtggcatgggaaactctctgcaatgcttactgtggtgaaaactatgggtctactgacttcgacacgcttgaaaacgtgcgagatgcaattttaaggatgacatattactggtataactttatgccactgtctaggggatcggcaggggttggatttatagttatgctgggtttgttacttgctgccaacatggagttcacaggaagcatcccacagggtttgcaggttgactgggaagccattttgaacttggatccaaactcgttcgtggattcggttaaaacgtggctgtacccatctctgaaggtcacaacctcatggaaagactaccctgatattgcttcaacttttgcaacaacagggtcagttatttctgctttgaacttttcttctgatgattgatctcttgtaaactataaccatgttagctaattgcatgttaactgtgacggccttgtttcattgtaaccatatgttaacaattatacaataaagttatggatttctaatattttttc

SEQ ID NO: 6519 - DNA, 745 bp, Glycine max
  unsure (1)..(745): unsure at all n locations
ggaagaaggaaggggtcattcatatgatcccgtgtttgtttgggtcttttctcaattcttcaaccaacccattccttccccacgcgtcattctccggccaccgtccacgacggagcgccgttaccgctttaatatttccccaaaaggcttcggcgaccgcccgtgatggataaagtcttcaacaagctccgcaatttggacgcttacccaaaagtcaatgaagatttttacaaccgcacgctcgccggcggcgtcgtcaccgtcgtttccgccgctgtcatgctgtttctcttcttctccgagctaagtttatacctctatacagttacggagagtaagcttttggtggatacttcaaggggagataccttgcacatcaattttgatgtcacttttcctgctgttcgatgttcaatactcagcttagatgcaatggatattagtggcgagcagcatcttgacatacgacataatatagtgaagaaaagaattgatgctaatggtaatgtgatagaagagaggaaggatggaattggtgcaccaaagattgagagacccttacagaaacatggtggcagacttggacatgatgaaaagtattgtggttcatgttttggtgcagaagagtcagatgaacactgttgtaattcttgtgaagaagtgcgtgaagcatatttgtcattgcccagccctttnttccnanatgcgtcaccctcatcttcacctcnccttgggcgttgtccat

SEQ ID NO: 6520 - DNA, 373 bp, Glycine max
actcgagccgattcggctcgagaagagggagttataagatattcacagaagcagcaaaaatgcttatgcaacaagttcatgtatcaaatccaagttcatcttgtctcatccttcaaaagccatgcctccgtgacattactcacccttcttttcagctttggtcaaggccatcatcgttcccaaaccaaaggaagcaaaaaagggtttcttatggatgcaggagtaatggcaacaaaatcaaagctgtggctgtgactgaagctgaaaacaaatcagtgaaagttaaagccacaatcactgttcagccaaccgttggtgggattttctcagaaatggctatagagagagggttggatgatataaaggatttgct

SEQ ID NO: 6521 - DNA, 863 bp, Glycine max
tcgcactatttaaacagtaaatattttaaggtgattgcatgtacttaataggcaatccaacacaaaatcacttggtcctggaatctggaaaatcatggttggacttggtgtgagtgtaagtctcaaggttggacatgtgtgtagttgcagcaatggttttggcacggtgactatggaagctcaaaaacaaaaactctctccctccaaaacccgcaggaaatcctcctacggaacttctagaaggtccgttctgaagaaatccttcagccaagagcaagtcaccttcacctctcctctctccgccgaccccctcgtcgccctcatcggcggcggcatctccggcctcatttgcgccctcttcttggagaagcgcggcattcgctccaccgtatttgacaccggtattcacggtctcggaggaagattgggaaccagagtcgtcgatcctcatcctttgaaattcgatcatgcggctcagttctttactgtcagcgattctcgcttcgctgagatcgtcgacgcgtggatggagaagggtttggtgcgcgagtggctgggtaccgttggagaccttaacaatggtggtgaatttgttccctttctaccctctcctgcgagatatgtcgccactcaaaggaatgcgctcccttgctgattctttactgccgcatagtcgcttggttaatgtggtgaggccgtgctggatcagtaaattggagccgttcaatgggatgtggcacttgagtgaaaatggcaagcctcgtggcgagttcgatgccattgttattgcacacaatggaaaatgcgcaaatcgcttgcttatgacatcaggattaccattaattgcaaaacaaatgaagagg

SEQ ID NO: 6522 - DNA, 526 bp, Glycine max
gcttatagtagcaattgacatttattagcactgagtaacacgcccgaatatggcaccctcaatctccgacgaaatgccaagcaccaccacctctctcctccgccgcaaccggtggctcccctccagcatcaaactgaaaacaacccttttctcagaactctccggcgcggtgggtgacctaggcacctacatccccatagttctagccttatccttagtgaacaacttggacctcaccaccacactggtcttcactgctctctacaacatcgccaccggtctcctcttcggcctccccatgccggtccagcccatgaagtccatcgccgccgtcgccatctccgcagcgccccccctcaccatcccccaaatctcggccgctggcctctccgtcgccgccgtgctcctcctcctcggtgccaccggcctcatgtccgtcctctaccgctacctccccctccccgtcgtccgcggcgtccaactctcccaaggcctctccttcgccttctccgccgtcaaatacatt

SEQ ID NO: 6523 - DNA, 865 bp, Glycine max
tctcaagtgtttcctgagtctgaacggaatcccacttaaaagtcgttctccttcctcttcgcagctgttatatagtactattttcatttcatatgtttatgcacctctatatatacatagacacatgtaaatggttgcaaaggaagataagataggtaccagctatcacatagtttatttaatccgttatatgccacctgatatataggcatattagctagttaggtaggtatagtagtttaagttaattcaaccatggaagacagggatcactgttgttccaacaattcaacgatgatcacaacaacaaagaaaagaacgggtagaagaagtccaacatcggataagctcaagaatcaacaccgcgagaagcagtcgatgaaaccttaccgtggaataaggatgcggaagtgggggaagtgggtggcggagatcagagaacccaacaaaaggtcgaggatatggttgggttcttacacgacacccgtggccgccgcacgtgcctacgacaccgctgtcttttacctccggggtcccaccgcgcgccttaacttccccgaactcttgttccaggacgacgaccaggagggcagtgattcggtgcagcacggcgcagcagcggaacatgtccgctgattccattcgccgaaaagccacgcaagtcggcgccagagtcgacgctctccaaaccgcgcttcaccaccacgcgccaagtaccaactctctcaatctcaagcccgacttgaacgagtttccaaaactcgaagagcttcaagattgatatacatcaaatatcaatatcaatcaatatatttacatttcctaagttctttattaatatatagttttatgtgtgtatatatag

SEQ ID NO: 6524 - DNA, 433 bp, Glycine max
caaagtgttttctgagtctgaacggaaccccacttaaaagtcgttctccttcctcttcgcaactgctataaagtactattttcatattcatatgtttatgcatccctatatatacatacgcacacatgtaaatgattgcaaacaaagataagataggtaccagctagcatatatagtttattaatcagttacatatatatacatatataccacctgatatataggcatatagccagttaggtaggtaggtaggtacatagtagttaagttaattcaatcatggaagaaagagatcaccgttgttccaacaattcaacgatgatcacaacaacaaagaaaaaaacgagcagaagaagtcccacatcggataagctgaagaatcaacacccctgtgagaagcaggcgatgaaaccgtacagaggaataaggatgc

SEQ ID NO: 6525 - DNA, 1058 bp, Glycine max
tctcgagccgattcggctcgcggattttgtccatccaaatcttaaaaatattcagtgaagatcaacctcaatggcatctcttggcgtgcgaccagttcttccccctccattaacttccatctccgacccacctcctcttttcgatggcaccaccaggttgtacatcagttattcttgcccctatgcacaacgtgtgtggatcgctaggaactacaaggggctacaagataagatcaatttggtccctattaaccttcaagacaggccagcttggtataaggagaaagtctaccctgaaaataaggtgccatccttggagcacaatggcaaggtgttgggagaaagtcttgatttgatcaaatatgtagatgcaaactttgaagggacacctttgtttcccagtgatcctgccaagaaagagttcggtgagcaattgatatcccatgttgatacattcagcaaagacctgttcgtttcattgaaaggggatgctgtacagcaagccagtcccgcttttgaatacttggagaatgctcttggtaaatttgatgatgggccattcttgcttggccaattcagtttggtggatattgcttatattccatttgttgaaagattccaaattgtctttgctgaggtgttcaaacatgacatcacagaaggaaggcctaaacttgcaacatggtttgaggagttgaataagctaaatgcttataccgagactagagtcgatcctcaggagatcgttgatcttttcaagaaacgcttcctgcctcaacagtgaacgttgtattgctgcaggcttcctctaaaatgtagactctgcccatatagcgtcctttcattcacgggatgggatgcatctgcagtcaaatgtcggttgtgtttatctgccagagttgcaggatagtttgaagtcataatcacgttcatttttcagcttgtttgtttgatgtcataataatgtttatgtaccagtttgtgatcactgatcaatatgatataatgaccaatatggtattattatcctatttgaactatgttatatcacgtactaa

SEQ ID NO: 6526 - DNA, 421 bp, Glycine max
gtttagaaagagttcggtgagcaattgatatcccatgttgatacattcagcaaagacctgttcgtttcattgaaaggggatgctgtacagcaagccagtaagcaagatatttaagtttgtaaatagaggaaaggttttttgtcttttcaaatgcaaaatggttcttaaaatggtaatttaaatcaagtcccgcttttgaatacttggagaatgctcttggtaaatttgatgatgggccattcttgcttggccaattcagtttggtaagttaaaattcaatggtcttcagaaatattgttttccttttaaattcgctgcctttcaggctgattactaatgcttgtcgcgatgcatctgacgaattagagttcgtgaaaataccttatcatatcaagtattatcctctaagattagttttcac

SEQ ID NO: 6527 - DNA, 1009 bp, Glycine max
tctcgagccgcgttagggtttcttcctctttcaaactccatcgcagattcttcgctcctttccattgattcaaaacatggctaccactcctgccagatctttcctccaagtcgccgcaacggaggaggctgcgccgcctctcagagtcgtccagattgaaggactggttatcctgaagataattaagcattgtaaggaccactcgccttctttagtcactggacaacttcttgggttggatgttggcagtgttcttgaagttaccaactgcttcccctttccaatgagggaggaggatgaggaaattgaagctgatggtgccaattatcagcttgaaatgatgagatgcctgagggaggttaatgttgacaacaacacagttggatggtaccagtctacattgcttggctccttccagactgtggagcttattgaaacctttatgaattaccaggagaatattagacgctgtgtttgcataatatatgatccatcaaggtctgatcaaggtgttctagctctgaaggccttgaagctttctgactcattcatggaactctatcgcagcaataattttactggagagaaattgagggagaagaacttatcatggggggatatctttgaggaaataccgatcaaagtttcaaattctgcacttatcagtgcctttatgacagagctagaacctgatactccagtcacccagtgtgattatgatcgcttgcaattgtcaaccagttcattaatggagaggaatacagaatttttgattgaatgcatggatgacttgtcactagaacaacaaaagttccaattctactatcggagcctgtctcgtcaacaagctcagcagcaagcatggcttcaaaagagaagggcggagaacatggctcgtaaagctgctggagaagaacctttgccggaggatgatccttcaaatccaatttccaagtcgctcccagagtcatcccggttggagatgcttctcataacaaattaaattttc

SEQ ID NO: 6528 - DNA, 565 bp, Glycine max
gaattttcttttggatgtcttgttgtctttaagttgaaccacttgatttctgatttttctgtcttgtgagatagattgagggagaagaacttatcatgggtggatatctttgaggaaataccaatcaaagtttcaaattctgcccttatcagtgcttttatgacagagctggaacctgatactccagtcacccagtgtgattatgatcgcttgcaattgtcaaccagttcattaatggagaggaatacagaatttttgattgaatgcatggatgacttgtcactagaacaacaaaagttccaattctactatcggagcctgtctcgtcaacaagctcagcagcaagcatggcttcaaaagagaagggcggagaacatggctcgtaaagcgctggagaagaacctttgaaggatcttcctccggcaaaggttcttctccagcagctttaccggaggaagatccttcaaatccaattttcaagccgctcccagagccatcccggttggagagcttcctcataacaaatcaaattttcaactactgcaatcaaatcaatggggtgtca

SEQ ID NO: 6529 - DNA, 495 bp, Glycine max
ctcaaatctctcatacttcttacgccacatacacccttctcttcatttctcactctccggaacatttttttttttaaaaaagaaaaggggaaaatagaaagaaaagaaaaagggagaaggagtgagaataacatgaacaaacaactcacgctgctctgtctctttatcctcttctcatttctcagtgtgggtttcgccggcgccggagacgcggcggagaaaaacccgttcaccccaaaagccttcgcgattcggtattgggacaaagagatccgcagcgggttaccgaagccaccgtttcttgtatcaaaggcgtcgccgctgagcgcggcggaggcggcggcgttcttaaagctcgtctccgggaactcgctctccacgcggctgccggaattctgcgccgccgcgaagctcctctgcttcccggaggtggggtccagcctcgagaagcacgacaaagacgctaactttgtagtgtacagagacaagaacttc

SEQ ID NO: 6530 - DNA, 482 bp, Glycine max
gtctcacacttcttacaccacacacacaaacccttctcttcatttctcactctcgggaacattttttttttttaaagaaaaggggaaaaattgaaagaaaagaaaaagggacaaggagtgagaataacatgaacaaacaactcacgctgctctgtctctttatcctcttctccttatttctctgtgtaagcacagcttttcctcactgtcactgttccaagtctcgatttttccaattgttttattcctcccattgccagttctgaaatgggtgtgtgttcattcgatgcaggtgggtttcgccggcgccggagacgcggcggagaaaaacccgttcaccccaaaagccttcgccattcgttattgggacaaagagatccgcagcgggttggcgaagccacagtttcttctgtctaaggcgtcgccgctaaacgcggcggaggcggcggcgtttgtgaagcttgcctccggcaacgcgctct

SEQ ID NO: 6531 - DNA, 479 bp, Glycine max
gggggtctgaatcacagtccacacgaaggaacaaaaccaagaacaccactttactttctctttccttctccgccactgttaaggcttgagaagaagacaatggtggcttgtgaaacatgaagaggggcactgtgttatgcatgttcaatggcatgtcattgtgcttcttacaatgccttttcattttcaccaaccagagagttcttcgccaccaaccacatcatgtcaaaaccatcatccactactactagatgcagaccctttctcttgtccatcaccaatgccacaccatcctacaacacccttgtttctgaggctgttaggctcttggttccttcagcaagatttgaaccttcaaaactgaaggttgttctattggaagatcagataaacaaacatgcaagttttactcctagaacctacattctatcccattgtgactttacagctaatctgactttagctgtgtccaatgtgat

SEQ ID NO: 6532 - DNA, 884 bp, Glycine max
ctcatttttttgatctttcaatttttggaaaatccaaattttttacctttcaatttttgatactcggacccggcaccggcatgggtcaagcttttcgaaagctctttgacaccttcttcggcaacaccgagatgagggttgtgatgcttggtcttgatgctgctggcaaaacaactatactttacaagtttcacattggagaagttttatccaccgttcctacaattggtttcaatgtggagaaagttcagtataagaatgttattttcacagtctgggatgttggaggacaagagaaactaaggccactttggaggcactactttgacaacacagatggcctgatttatgttgttgatagcctggaccgtgagagaattggtaaagcaaagcaggaatttcagacaatcataaatgacccatttatgctcaatagtgtcatcttggtgtttgccaacaaacaagacctgagaggggcgatgacgccaatgcaagtatgtgaaggactaggtctctttgatctaaagaatagaaaatggcacatacatggcacttgtgcactcaagggagatggtctttatgagggcctggactggttggcttcaacactgaaggaaagaaaagctgctggatactcttcaataggaacctcatccttctaatctaggtattttgtcattgaggaacgtgcagggtttggccagtttcattcaaggatgttgtaaaaaagtaatcaaattttttgagttacatttcgttacctctacagctgatgaattatatagatgctttgactttcaaggtgcttagatatgactttgcagtgtatagaagtttgggcatgatgaatgaaaatgaatttgagactcacgaattctattggt

SEQ ID NO: 6533 - DNA, 558 bp, Glycine max
cctcgagcgaatcggctcagacaaattaaagttgagtaggctaaatctttgaatctggtcaaaaccgacccaaaacaccctactttcaattcaattcaaagtattgtttgttttttgtttgttggtgcttacaccgggagaagaaagttcttggaaggaaggaagaagccaaaaggcaaagagacaccggcaccggcatgggtcaagcttttcggaagctatttgacaccttctttggcaacaccgagatgagggttgtgatgcttggtcttgatgctgctggcaaaacaactatactttacaagcttcacattggagaagttttatccactgttcctacaattggtttcaatgtggagaaagttcagtataaaaatgttattttcacagtttgggatgttggaggacaagagaaactaaggccactttggaggcactattttaacaacacagatggcctgatttatgttgttgatagcttggatcgtgagagaataggtaaagcaaagcatgaatttcagacaatcataaatgacccatttatgctcaatagtgtca

SEQ ID NO: 6534 - DNA, 1229 bp, Glycine max
cagctacctcttcatctaaatctattatgatgcgccttctgttctgtgatgccatgttgatggacgcacctttcttcttttaaatttcttttcttttttaatttttctccatttatgctatattttttttcttcgccgagattggggtatgggagacttcgagacccagatgttttaaggcttctcactcctcttaggtttcagttgtgacaacctctaagtgacaagagtggaacattcattcttttagtggcaatttggctatatatattaagttctgggctgtgagtatattagaacaaatgtccttccgcagtatagttcgtgatgtaagggatggctttggaagcctatcaaggagaagttttgaggtaaggcttcctggccataacaggggcaagtcacgcagtttggtccacgagttgcaggatcagccaccagttatacagaacagccggtgggctagccttcctcctgagcttcttcgtgatgttattaatagattggaagcaagcgagagtacatggcctgctcgtaagcatgtggttgcgtgtgctgctgtgtgcaagtcctggagagaaatgtgcaaagaaattgttaccagtcctgagttctgtgggaagattactttccctgtctccctgaagcagcctggttcaagggatggaaccatccagtgtttcatcaagagagacaaatctaatctgacataccacctattcctttgtcttagtcctgcattgctagttgaaaatggaaagtttcttctttctgcaaaacggaccagaagaactacatgcacagagtatattatatcaatggatgcagataacatatcaagatctaatagcacttacattggaaaactgaggtcaaattttcttggcaccaagtttataatttatgatacacagcctccctataacaatgctcagctgtctcctcctggccgcagccgtaggttttattcaaaaaaggtttctccaaaggtccctagtggcagctacaatattgcccaggtcacctatgagttgaatgtccttggtactagggggccacgaaggatgaattgcacaatgtactcaattcctgcatcatccatggagcctaatggcattgtcccgggccagccagagctccttccccgtgcccttgaggattctttccggagtacatccttctcaaaatcaattgacaattcaactgagtttagcagctctagattctcc

SEQ ID NO: 6535 - DNA, 864 bp, Glycine max
ctcgagccgtgcaattcatccttcgtggccccctagtaccaaggacattcaactcataggtgacatgggcaatattgtagctgccactagggaccttgaggattctttccggagtatatccttctcaaaatcaattgacaattcaactgagtttagcagctctagattctccgacatcatggggattggcaatgaagatgaggagggaaaggtaagaccactagttctcaagaacaagtctccaaggtggcatgaacagctgcaatgttggtgcctcaactttagaggaagggtcactgttgcctctgtcaagaattttcagctgattgctgcgacaccaccaccagccattgttactacaggaacaggacctacaccatctcagccaacacaatcttcttctgaccctgacaagatcattcttcagtttggcaaggttggcaaggatatgtttacaatggactatcgataccccctctctgcatttcaggcctttgccatatgcttgactagctttgatacaaaactggcttgtgaatagttacaagagatatgtgtgggaagaaaagtaggatttaatctccattttagatatctgtaggaatgttgaaagcttcatcaagtcattgttatcctcatggttaaactgtaaagtacggaacaatctctgcccagtgtatcttttttcttttgctatagccctttttcttttgaacatgttccttttttcttgccattgctcttttctttcggacagtcaatttagtatgctttaaagtttgaactatctttgtcaaactttgatgatgtagacttccatactttgtataaagatgtaatgaaaatttagtagcattcaattcc

SEQ ID NO: 6536 - DNA, 395 bp, Glycine max
ctcgagccgctcggagtcagaggtttgtgtcacagacacggaaagggaaagagaaaacacagagagaaacaaaacattacttctttgaacttgatgtgtattgtagcaaatgtccttccgcagtattgttcgtgatgttagggacggatttggaagcttatcaaggcggagttttgatgtaaggctttctggtgggggcaagttgaatagtttggtccatgaggagcacgaatgcctgccagttgtacagaacagccggtgggctagccttccgcctgagcttcttcgtgatgttattaaaagattggaagaaagtgagactacatggcctgctcgtaagcacgtggttgcgtgtgctgctgtgtgcaagtactggagaggaatgtgcaaagaaa

SEQ ID NO: 6537 - DNA, 443 bp, Glycine max
gagagtcagcctttgagttagatagagaacagacaagtgtgtgagagagagaattgtggtgaagcacaggatctaaaaacgtgttatctgacaagactttggaacatcacgctcctcacttttcaaaggtttcagttgtgacatcctccaagtgacaagagtggaacattcattcctttagtggcactttggttatatattaaattctgggctgtgagtatattagaacaaatgtccttccgcagtatagttcgtgaagtaagggatggatttggaagcctatcaaggaggagttttgaggtaaggcttcctggccataacaggggcaagtcacgtagtttggtccacgagttgcaggatcagccaccggttatacagaacagccggtgggctagccttcctccggagcttcttcgtgatgttattaatagattggaagcaag

SEQ ID NO: 6538 - DNA, 550 bp, Glycine max
  unsure (1)..(550): unsure at all n locations
cagctcgagctcgagcggntttgtgtttcttgaatgctaaatttctagtgctttgcaattgatgcccctttttgttattgcagtccttgttgtttgcttcttcttctttttctttgccttttcatttctttttcttaagtttaattggagtgttgacctgtaattttcttggtctactgaacagtttctcaagtttgctcttctgggttctcttattagcttctctctttgcactgctaatacttgtgagttgtgatatcttagagtggattagtggaacgttttccgttaagtggtgttactcacattaatctcttgggctgttagtgcattgtagcaaatgtccttccgcagtattgttcgtgatgttagggacgggtttggaagcttatcaaggaggagttttgatgtaaggatttctggtgggggcaagttgaatagtttggtccatgaggcgcatgaacgccagctagttatacagaacagcaggtgggctagccttccgcctgagcttctttgtgatgttattaaaagattggaagaaagtgag

SEQ ID NO: 6539 - DNA, 475 bp, Glycine max
ttgaaagggaacgagaaaacacagagagaaacaaaacattgcttctttgaacttgatgcctggttcaagggatggaaccatccagtgtttcatcaagagagtcaaatctaatctgacataccagctatcctgtgtcttagtcctgcattgctagttgaaaatggaaagtttcttctttctgcgaaacggaccagaagaactacatgcacagagtatactatatcaatgaatgcagataacatatcaagatctagtagtacttacattggaaaactgaggataaatggcttcctctccacactcttgctgcatctggagaattttaccttttagattctctgttgaagcacaatgttgatatcaatgttctgaaaaatgaagattcagggccattgaaggaatccacatccttgattaagcaccaactagtcaagctgacagagcaatcactttttctcaagaaaagtccaaacca

SEQ ID NO: 6540 - DNA, 997 bp, Glycine max
ccaaaccgtcgttacggttgcaaaaggacaacagaagggaattgattgtaaaaaattgctgaattggccatatgcatatgggttttatttgccggagcatgagcatgcaaaaaaacagttctttgagtacttacaacgtgaagcagaatctggtctggagagacttcatcaatgtgcggaaaaggaactacagccgttcctaagtgctgatgatccatctagagaattcaatgactttcgtacaaagctagctggattgactagtgtgactagaaactactttgagaatttagtaagggcattagagaatggtctatctgatgtgggaagtaatggagctgccttcagcaaagcaacgagctcaaaaaatgctgctggtagcagtaagggtagagctggaagaggaaagggaacttttcgaactagcttgtccagcaaattgaatgatgatagtcattggtattgtgagcattgtacctatgcaaatgtcaaatctgcctccacatgccagatgtgctatcaacaacgtcgatgaaaacttggttctccatttgaagcacttgtctcctgcccaaggcctctgcaccaaaagctgagatggagacattcctgtatgtttatatatatttatgcactatgcagtctccaattttgtgatgctaaatacaacaggatgaaaggagtaaggcatggaagaaaggttgctctccatgcgctcctattcaatacaaaacccaatttgatgtatatagtgttctatctctttatgtatgaggttttctgctacaggcatttgtaactcaatatcataacacaacagatgttggagaatggagatgaacacaaatgtgcttgtttgtgacaactctttcagttggtctcttggcagcttccaagagggttagtcgtgtataataagctcaggatttgattacattctaagaaatgacaagggactgcaataaatattaaaaaaaaaaaaaaagggcggccgccg

SEQ ID NO: 6541 - DNA, 843 bp, Glycine max
gtcgagtcgaccttgcagccgattcggctcaggtcggatgaagataagcagaaatatgcacgttacctacttagatcttatattgaagacaataagaagtccaagtggtgtcctgctccaggttgtgaatatgcagttacttttgatgctggtagtactggaaattatgatgtctcttgcctctgttcatatggcttttgctggaattgcactgaggaggctcatcgcccagtggactgtggcactgtggcaaagtggattttgaagaacagtgcagagtctgaaaacatgaactggatacttgctaactcaaagccatgtcccaagtgtaagcgaccaattgaaaaaaatcaagggtgcatgcacatgacatgcactccaccctgtaaatttgaattttgctggctatgcgttggtgcatggtcagaccatggtgaaagaactggtggtttttatgcttgcaatcgttatgaagcagctaaacaagaaggagtgtatgatgatactgaaagaagaagggaaatggcaaagaattcgctggagagatacactcattattatgagcggtgggccagcaatcaatcttcaaggcaaaaagctcttgcagatctacagcagatgcaaactgttcatattgagaagcttagtgacatacagtgtcagcctgagtcacagcttaagttcataactgaagcctggctacaaataattgagtgtagaagagtgctgaaatggacatatgcatatgggttctatttgccggagcatgagcatgcaaaaaagcagttctttgagtacttacaaggtgaagcaaaatctggtcttgagagacttcatcaatgc

SEQ ID NO: 6542 - DNA, 959 bp, Glycine max
cccacgcgatcgaagaaagaagcatcataaagcaatacacttttttcccctcattctaccttccttcaccttcttcttcgttgcggtggtgccctagattttctctatccctttgatcgttcctgaattaccagcccccggccctcgctctagggtttcccatggattccgaggacgatatgcacgacgccaacgatgtggagtccctcgacgacgatttctacagtggcgagaccgaggaccctcccatggattactacagtgactacgacgacaacgccgacgattacttcgacgacgccgacgattctgaccggattgagtctcgccgccccgagcaaaactttaccatattgagggaactggatatccggcaaaggcaggaagacgacatagctagagtagcggcagttctttccatacctcgggtttctgcgagcatcctacttcgtcactacaactggagtgttagtaaggtgcatgatgcttggtttgctgatgaagatcaagtccgaaaaacagttggtttgttggagaagccagttttccagaattctaatactagagagcttacttgtggcatctgttttgaaatgtatcctcgtgcacgggttgaatctactgcttgtggccacccttactgctattcatgctgggcaggatattttagcacatcaattaatgatggtccgggatgtttggtgctgagatgtcctgatccctcttgtggtgctgctgttggtcaagatatgattaaccttttagcatctgatgaagataaagagaagtatgaccgttaccttctcagatcttatattgaagacaacaagaagaccaagtggtgtcctgctccaggttgtgaatatgcagttacttttgatgctggcagtggaaattatgatgtatcttgcctctgttcatatagcttttgctggaattgcacagaggaggctcaccgt

SEQ ID NO: 6543 - DNA, 486 bp, Glycine max
gttgttaggaggagaaaggctctaataggcagaagcatcaccataaagcaagacacttttttcctcttcattccttccttcaccttcttcgttgcttgcggtgccctagattttctctatcctttcaatcgttcccgaattccctcccgctagggtttcccatggattccgaggacgatatgcacgacgccaacgatgtggagtcccttgacgacgatttctacagtggcgagaccgaggacgctcccatggattactacagtgactacgacgacgaagctgacgattacttcgacgatgctgacgattctgaccgggttgagtctcgccgccctgagcaaaactttacaatattgagggaattggatatccggcaaaggcaggaggatgacatagctagagtagcggcagttctttccataccgcgggtttctgcgagcatcctacttcgtcactacaactggagtgttagtaaggtgcatgatg

SEQ ID NO: 6544 - DNA, 683 bp, Glycine max
gtttctatctctttttgacgcgcacttgaagatttgaagtacttccacaaagggggtaacctttttcctccgttgaaaacgaggggaagaaggtttctcaactgcccttttcacacctcaacttcccgccttcttcacttgcttctcgaacttcttcccttttgaagctattaatactagttccttattcagtttctagatatcttaggaagaggagcacagaaaaccacccctctctctctaagcacagcctaagatgtcttactcatgatttcctgctatctcaaattgctgctacaagcaagaagaagtggagtctgattgaactctgaagtgggcagaatgcgttttgaaatcaagtggaccttgagtgcttaccgtagtgtacaattttgaattgctttgccaatattgctgggtgaattgatacagtgggaggcaatcaatagttgtaacttggatattcttaaggaaatgtaaacttgataagttggagctccaccaaagtagtaaagatacattccaaagatgatgaagaaacaattgacaggcataccggggtgattctcccctacaatcggcaatccgagttggaaatttagaattggttctggaaatcatctctcagagtccagaggacgaattaaaggagttgctttcaaaacaaaacaactcttttgaaa

SEQ ID NO: 6545 - DNA, 821 bp, Glycine max
gaggggtgatgaatattaagttagaataaaggatccgaacgtttggggggggttttgagaagggttttacattttattcgttctccggtgagaaacagaaacagacagaagacagagtgagacgctactcacgatggagggaggagtatcctacgcgcgcatgcctcgggtcaaaatccgcgagctgaaggacgactacgccaagttcgagctccgcgacaccgacgcgagcatcgccaacgcgctgcggcgcgtgatgatcgcggaggtgccgacggtcgccatcgacctcgtggagatcgaggtcaactcctcggtgctcaatgacgagtttatcgctcacaggctgggcctcattcccctcactagcgagcgcgccatgtccatgcgcttctcacgtgactgcgacgcgtgcgacggtgacggacagtgcgagttttgctccgtcgagtttcatcttagggtaaagtgcatgaccgatcagaccctcgatgttacgagcaaggacctctacagttctgaccctactgtcagtcccgttgatttctctgacccctctgccactgactccccagacaacaacagagggattatcattgtgaagttgagacgcggacaagagctgaagctgagagcgattgctaggaaggggattgggaaggatcatgctaaatggtcacctgctgcaactgtcactttcatgtatgaaccagagattcatataaatgaggatttgatggagaccttgactctggaagagaaaagggaatgggttgacagtagtccaacccgtgtctttgaaattgatccagtgacacaac

SEQ ID NO: 6546 - DNA, 657 bp, Glycine max
aaggaaagggagagagagaggtcaattaatcaagaaatagagagcaaattaaagcatagccagtatggtgcactgtgtggtcttagcatatccagctcaaggccacattaaccctatgcataatttctgcaagctcttgcaacaacaaggtgtgaaagtaacactagtcaccaccctttcctacagcaagaacttgcagaacatacctgcttctattgcacttgaaaccatttctgatggttttgacaatcgtggttttgctgagtcaggaaactggaaggcctacttggaacgtttttggcaagtagggccaaagactcttgctgagcttcttgagaaacttggtagatcaggtgaccctgttgattgtgttgtttataattcattcttcccttgggctcttgaggttgcaaagagatttgggatagttggggctgttttcctcactcaaaatatgtccgtcaatagtatataccaccatgtccagcaaggaaatttgtgtgttcccctcacaaaaagtgagatttcccttcctttgttgcccaaacttcaacatgaggacatgcccacattcttcttccccacatgtgtggataattcacttttgcttgatttggtagtgggccagttctccaatatcgacaaggctgattggat

SEQ ID NO: 6547 - DNA, 484 bp, Glycine max
gagaaagtagcatagttttttgtggttccatttccacctttttgctctgtttctgacacaagatggtgaagagagtgaggtctgattcgggtccattgtccctgcaaaagcacaaccattggtgtgtgaagttaggagtctcaatcttcttggtgggtcttgtcgttcgccttctcttgtgggattcattcagtttctcatcagtggtggtggagacacctcctcctctggaagaggcaaaagcagagtccccggttttcgcttcctctgttcttcaggattctgatgacttcccagaaaatgatcagaaccagacacaaatctccaagaatgaaaaatgtgatctttttgtgggaaattgggtgcaagacctatctgggccagtgtacactaatgagagctgccgtgtgattgagcctcatcaaaattgtatgaaaaatggacgtcctgattcagggtacctctactggaggtggagcccacg

SEQ ID NO: 6548 - DNA, 601 bp, Glycine max
aaagaaaacaaatttcccattctattgagctgaaaacaaacgaaacctcatccatggcttctcttctccgttgcaacggagtcttcctctcccccttacctccccaacccagacgcgaccccatccttcccaaattctttctcccccaatccccaaatcctaaaccgtcacgcctcctgacggtgcgcgcggaggtgaaagagacctcctccgccgccgccaccaccaccaccaccacttcctccgacgacaagatccgcgaaatcctccgcaaccgcgactacgacaagaaattcgggttcagcgtggacatcgagtctttgacaatcccaaaagggctctcgaaagaaaccatccgtctgatctcgtccctgaaagaggagccccagtggatgctcgaattccgcctcaaggccttcgagaaattcctgtccatgaaggaacccacctggtctgataacacttacccccccatcgacttccagaacatctgctactactccgctcccaagaattaaccctcactccaatccctcgacgacgccgaccccgagcttctccgctacttcgacaagctcggtgtccctctcaacgagcagaa

SEQ ID NO: 6549 - DNA, 478 bp, Glycine max
cccacgcgtcccaaaacctcatccatggcttctcttctccgcttcaacggcgtctccctctttcccttaccttcccaacccacacgtgaccccatcctccccaaaccgtcacgcctcgtaacggtgcgcgcggaggtgaaagagacctccgcacccgccgccgccacatcctccgacgaaaagatccgcgaaatcctccgcaaccgtgactacgacaagaaattcgggttcagcgtggagatcgagtccttgacgatcccaaaagggctctcaaaagaaaccattggtctgatctcgtccctgaaggaggagccccactggatgctcgaattccgcctgaaggccttggataaattcctctccatgaaggaacccacgtggtctgacaacacttaccctcccatcgacctccagaatatctgctactactccgcccccaagaataaaccctctcttcaatccctcaacgagcagaagc

SEQ ID NO: 6550 - DNA, 1179 bp, Glycine max
ctcgagccgaagaaaggcaagtggcgagtgaggaatgcagagaaatgagaattcgtcattggctgagtccttctgaggcaggtggccctgccaaacgcagaagctccggcagaaattgccaccgcaaacacgtcgaagacgggtagtaatagcactcggtttcattctcccacattcccaattctgagcgttaagatgagtgagaaagagaaaggcaataatagtgagggacagtcgacgttgctgcacggcaagtacgagcttggtcgtgtgctggggcacggaacgttcgccaaggtgtaccacgcgcggaacctgaatacagggcagcacgtggccatgaaggtggtgggaaaagaaaaggtgataaaggtcggaatgatggagcaggtgaagagggagatctcggtgatgaagatggtgaagcacccaaacatcgtcgagctccacgaagtcatggccagtaagtccaagatctacatctccatcgaactcgtccgcggcggagagctcttcaacaaggtctccaagggacgcttgaaggaggacctggccagactctacttccagcagttaatctctgccgtcgatttctgccacagccgcggcgtctaccaccgtgacctcaagccggagaatctcctcctggacgaacacggcaacctcaaggtctccgacttcggactcaccgccttctccgaccaccttaaagaggacgggctgttacacaccacgtgcggcacgcctgcgtacgtgtcgccggaagtgattgcgaagaaaggctatgacggtgccaaggctgatatatggtcatgcggtgtaatcctctacgttctcctcgctggctttttaccctttcaggatgataatttggttgccatgtataaaaaaatccatagaggggacttcaagtgcccaccgtggttctctctcgatgcgagaaagcttgttacgaaactgcttgatccgaatccgaatacgaggattagtatttctaaagtgatggagtcttcttggtttaagaaacaggtgccgaggaaggtggaggaggtggttgagaaggtcgatttggaggagaagattgagaatcaggagacgatgaatgctttccacataatctacttgtcggaggggttcaatttgtcgccgttgttcgaggagaagaggatggaagagatg

SEQ ID NO: 6551 - DNA, 526 bp, Glycine max
cttaggaatgcagagaaatgagaattgggcattggctcagtccttctgaggcaggtggcgctgccaaacgcagaacctccggcagaaattgccaccgcaaacacgtggaagacgggtagtagtactccatctcccattctctcatattccctttactaattaaagatcatgaacagcgagagacagtcgacgacgacgacgttgctgcacggcaagtacgagctaggtcgtgtgctggggcacggaagcttcgccaaggtctaccacgcgcggaacctgaagacggggcagcacgtggctatgaaggtcgttggaaaagaaaaggtgatcaaggtcggaatgatggagcaggtcaagagggagatctcggtcatgaagatggtcaagcacccaaacatcgtcgagctccacgaagtcatggccagtaagtccaagatctacatctccatcgaactcgtccgcggcggagagctcttcaacaaggtctccaagggacgcttgaaggaggacctggccagactctact

SEQ ID NO: 6552 - DNA, 524 bp, Glycine max
gactccacaaaattcatgattcatcaacgacacgacacccaaaatgaagctagaagaatcggtgtccaactccaacatcactgccccgctccttccaccggaagatccgagtccgagtccgcaaaatggatcaatctccggagcggtgttcaacataacaaccaccatgatcggtgccggaatcatgtccattccggcgaccatgaaggttttaggcatagttccggggttggtggtgatcgtgttggtggcactgataacagatgtgactgtggagtttatgctaaggtacacaagttccggtaaatcctccacttacgcgggcatgatggccgagtcctttggctccataggatccctcgcagttaagatttgcgtcatcataaccaatttgggggttcttatcatctatttcattattcttggagacgtgctctgtggaaatgagtcgaacggtatcacacacttgggtattctacaagaatggtttggcatcaactggttgacctctcgtgcttttgctc

SEQ ID NO: 6553 - DNA, 714 bp, Glycine max
tatcgtaccacgtatttttcgcctatcatcattgaatttgaatcgaagaaaccacccacgcacacgttcgttgattcatgttctgttctgttccttttctaaacccaacacaacatcgtgtccttttcttctcttcgatccactacgtgcctgatcctctgcttcaggcacatactcccgcaggttaaatggcgaggatcaaacctcaggctctgctacagcaaagcaaaaggaagaagggtccttctcggataagtgccgtgactgttatattttactttttgattcttgccttggttgggtttttcctgtttgcttcgtacagacattggtccagcagatcaagattacaatccgaagatcacttgtcagtctccgagggtgaaaatacttttgtggactccaagaaatctgagctgcctggatatgctgttttaaatacctctaaaggttctataataatagaactgtacaaggaaagtgctcctgaagttgttgatgaattcattgacttatgtcaaaaaggacacttcaaggggatgctttttcacaaagtaattaagcactatgtgattcaggcaggggataaccaaggatctggagctactgaagattggaacttgagaggaaagcaacatacaattactagtatgaaacatgaagcattcatgcttggaacttccaagggcaaacaccacaacaagggatttgatc

SEQ ID NO: 6554 - DNA, 603 bp, Glycine max
  unsure (1)..(603): unsure at all n locations
ctctctctctcactcttttctgtcatctgcgcaacttcattcattcaggctaaatggggaggatcaagcctcaggctctgctacagcaaagcaaaaggaagaaggggccttctcgcataagtgccaccattgttacattctatgcattgattcttgtcatgcttgtgtttatcctgtttgttacatacagacattggtccaacaggacaagacttcaacaagagagatacatatcagtctccgaggatgaaaatacatctgtagaatccaaaaaaatctgatctacctggatatgctgttgtaattacctctaaaggttctattatagtagaactttacaaggaaagtgctcctgaagttgttgatgaattcatagatttatgtcaaaaagggcacttcaagggaatgctttttcaccaagtaattaagcactatgtgattcaggggcctggagctactgaagattggaacctgttaggaaaaaaaatatgcaagtatgagacatgaagcattcatgcttggaacatcaaagggaaaatactntaacaaagtatttgatcttttcatcacaactgcaccaataccagatctaaatgaaaagct

SEQ ID NO: 6555 - DNA, 417 bp, Glycine max
aggaggttgacatgctagttgggaactgcgtgaccatttcccttgcttttggttagggtttccagagttttccaacttatcaatccacacaacttcattcattcagagaaagaacaaaaatgatcgagctgttcctgtcggaaccgaattggaacgacgtcgtaaacgacgacgattcaactcgttcgagaatctccattctcaacgacttggaaaccgttatttggtctacggtgggtcgctccgaggcgcggttgtggctctgcaacactgtcgcgggattgaactgcgtaacttccctcgatcagcgtgacctgtttcggaatttgctcagaaccagtggggtgaagcgggatttggcctctcagctcctgcatttgatgttcgacacggcgccgcacaaaccacgttccgttt

SEQ ID NO: 6556 - DNA, 510 bp, Glycine max
aattagtgacgcgcatgaatggattaacgagattcccactgtccctgtctactatccagcgaaaccacagccaagggaacgggcttggcggaatcagcggggaaagaagaccctgttgagcttgactctagtccgactttgtgaaatgacttgagaggtgtaggataagtgggagctggaaacagcgaaagtgaaataccactacttttaacgttattttacttattccgtgaatcggaagcggggcactgcccctctttttggacccaaggtcggcttcggccggtcgatccgggcggaagacattgtcaggtggggagtttggctggggcggcacatctgttaaaagataacgcaggtgtcctaagatgagctcaacgagaacagaaatctcgtgtggaacaaaagggtaaaagctcgtttgattctgatttccagtacgaatacgaaccgtgaaagcgtggcctatcgatcctttagtccttcggaatttgaagctagaggtgtcag

SEQ ID NO: 6557 - DNA, 2363 bp, Glycine max
ctcgagcgttttgtttctcgtttaagccatcatagggaggaggggcttgtcgggtcaaacaagtgcaacagagcgagatctgagtcgtaattcggagtcccttttgaaaaaagaggtcttttttgctgtaattcacttggttctccatttgggttacttggattttgtgaggttgtcttggagttggagtcatggcagttgaggttgtgggatttgagatggttcaaggaccagtggagaatggtactggaggaaaacctgttttaaatgagaaggagaatggcaagctggaaaaagatgtgggagctgcggatgccatcaaatttgggacacatggagaggaatctgcaaaaaagaaagggaatgatgtttcagacgtgaatgccccgaaagatgctgctgaagattggcctgcacctaagcagattcattctttttattttgtcaggtggcggccttatgatgatccaaccatcaagtctaaaatcgacctgtctgacaaagatattagcaagaaaaatcaagcccggtttcagatcacagaagcactgaaggcaaagcgggctgaacgagtagagttgatttctcaggtcaagtctctaagaggcgacagtaggcaatttcagagtattgtggatgagaaattgaaagagattggacctctgcagcaagcactgggcaagctgcggactacaaataatgccggccggggtggtttgtgttcatctgaggatgaacttaacagtgttatatatagtttacaataccgcatacagcatgagagcattcctttgactgaggaaaaacaaatcctccgagaaatcaaacagcttgaggggacaagggagaaagttattgctaatgctgcaatgagggccaagttacaggaatctatggggcagaaagaagccattcaagatcaggttaagcttattggtggggatttggatggagtgaagaaagagagagaagcgattcggtccaaaatcaagcaaattgatgatgcactgaaagccatagacaaggatatccagtctctacaggaggaactgacagctgtttctcagaagagggacaaggcttttgagagcatgcagcagctaagaaaacagcgcgaggaggggaacacctatttctaccaaagtcgtacagttctgaacaaagcacgggagctggctgcaaagaaagatattaatgctcttgatgaagtttcacagacagaggttgagaaatttatggcactctggaacaaggacaaagcatttaggaatgattatgaaaaaagaattttggcctcattggatatgcgacagttgagtcgggacggacggatgaggaacccggatgaaaagccaattctggaagaaccaaaacctgctgaagctgaagcattaccaaaaatggctgcaaaacagccaaaggaggaacctaagccttctccacaagaaactttgcctgctcagtcagaaaagaatccaaaaccactcagaaagattccaaaaacaaggggagggatttgaaatccaaactggagagtaaggatgtagcagaaactgatgaatatgaatttgaaagtccccaaaaggaggcccctgccaaagagcctgaaattgatccagcaaagctgaaagagatgaaaagagaggaggagattgcgaaggcaaagcaggccttggaaagaaagaagaagttagcagagaaagctgcagccaaagcagccatcagagcacaaaaggaagctgagaagaagcttaaggaccgtgagaagaaagcaaagaagaaatcaggcactgcagccgtggccaaccctgaggacgaaccgaaggatgaagttgtcgaggttacagagccagaaaagattaacgatgatgtccaagccccggctccagtgaaggaaaaggtccaaaaggagagtggcatcaggtccaggggccgagcaagaggcccggactcgattccaaaagctattattaagcggaagaagtctaacaattacctgatatgggctgcagctgccaccttgctagtcctcctgttggctgtgcttgggtacatctatcttttttgaaaagtttagatgtggaaggagctgctaaaccaattttctgagtgggtggctaggtttgtgaggtagcataagttatgttcatgttctatacatcctcttgggagaatagtagatcaaacacactttgttgtgcttagctcctgctttggggagaaactgcatgcatatttagctttgactatttactttcaaaattttgttcagatttcattagatgttactggaagcttgaatttgtttctgtagttaatttgtcataggaatggtaccatgataaactgaaaactttatgatg

SEQ ID NO: 6558 - DNA, 456 bp, Glycine max
ggcctcattggatatgcgacagttgagtcgggacggacggatgaggaacccggatgaaaagccaatcctggaagaaccaaaacctgctgaagctgaagcattaccaaaaactttcacaaaacagccaaaggaggagcctaagccttctccacaagaaactttgcctgctcagaaagaatccaaaaacaaggggagggatttgaaatccaaaccggagagtaaggatgtagcagaaactgatgaatatgaatttaaaaatccccaaaaggaggcccctgccaaagagtgtgaaatcgatccagcaaagctgaaagagatgaaaagagaggaggagattgcgaaggcaaagcaggccttggaaagaaagaagaagttagcagagaaagctgcagccaaagcagccatcagagcacataaggaagctgagaagaagcttaaggaccgtgagaagaaagc

SEQ ID NO: 6559 - DNA, 444 bp, Glycine max
gaaataccactacttttaacgttattttactgattccgtgaatcggaagcggggcactgcccctctttttggacccaaggtcggcttctttttggttctcgtttaagccatcatagggaggaggggcttttcaggtcaaagaagtgcaacagagtgagatctgactcataatttggcgacactcttgaaaaaagaggttacttggattttgtgaggttgtcttgtagttggagtcatggcgggtgaggttgtgggatttgagatggttcaaggaccagtggagaatggtactgagggaggaaaacctgttttgaatgagaaggagaatggcaagctggaaaaagatgtgggagctgctgcggatgccatcaaatttgggacacatggagaggaatctgcaaaaaagaaagggaatgatgtttcagacgtgaatgccccgaaaga

SEQ ID NO: 6560 - DNA, 465 bp, Glycine max
actcgagccggggtttggccgtgtaagataagagggcagccaacaagaagcaaaacactgaaacaaaagcaaaaaagagctgtgagacagttatggctcacggtgcttacagcaagcggcgcgtgagcgcaacgcgtagatccaactccaagcctctcggcatcgccaagaagcccaaaccctccgtttccctcaaaaaccagattcgatcccttgagcgcatgctccgcaagaacctgcctcccgaggtgcgcgaggcgcaggagcaaaagttggaggcactgaagaagcagcaggagattcacacgcgcctcgccgccgaacgcaagatattcttgcgcgaccggaagatcaagttcttcgagaggaggaaaatcgaaagacgaatcagacgcctcgagaaactgcaccgtgcttcttcttcctcttcttcctctgcccagtcttaccctgaccagatttccg

SEQ ID NO: 6561 - DNA, 487 bp, Glycine max
gtcgctccagatggcgaaggaaactggaatgtgcgggctgcttttccatttggacatttacactagtgtatttatacctaatgctacctgtactcaagaagagtggcagtagtattggatcaatgggtgctggaataggtttctagcagccattttaggaataaacttctgtaaaaaagaaaatcacgtctgaatcaaaatatgattctttgtagtcttgtccagcattgggtttgtagatagttgtcaatgttggtgaattgtgtgacgatggatgggccatcacattgaatgtgatttttgtgcatagtagttgtcaggggttctattagaagacaagggtgtaattttatgattttaagaacctgccgattatgcagggtagaaccatcagtatattccattagagaggattgcagtggttctttagtgttatattaccgtctttcagcacggagtcacatttcaacattttcttgaattaatt

SEQ ID NO: 6562 - DNA, 399 bp, Glycine max
tggagatggaaaatcctgaggataaaaaggaaacttagaaaagagagtacatatacaatacaagacaacttcacacacacaacactttcctctctctctctctctctctctagggttccgagtttgaagttgaaagtgttgaactatctctagctagcttttcacaaatttggttgcacttgcaactgaggcaggaaagaggggcacgagaggaggaagaggaaagagaagaaaaaccaagaaaagtggagaaagggataggtgttgtacagaaatagaaattaaaattgagtgaaaattaaagagaagaaggagtgatagggagatatgggtaggggaagagtggagttgaagaggatagagaacaagataaacaggcaagttacgtttgcaaagagg

SEQ ID NO: 6563 - DNA, 517 bp, Glycine max
cccacgcgtcaagagagagaaaagccagatagagaaagacagacagagagagagagagagaatgctccgagtttctctttcagagactagtagacagagaaagagagtgtgtgtgactctgtgagagtgtgcgatgatgatgcgaagaagaaccaaacaacgaaaaaacaaaacgacattcacaaatctgcgcgaacctctcaatctcatttcctgagaattctctctcactgcgctgcgctgcgttttgtctccgccaccgtcgtcgtttcggcttctcaaaagcatttcgcgcgcgagggagataaagatatgagtcgtttagggttcaagcacgaggtttacgacggcgacaagcacgttggcgaactcgacgtgattcctctgtcgtcgtcgtcgacaacgacgccgtttcacaatagcttccgcttcccgaacaacgagattcgcatccaccacttcagcgcgaagagcgagcgctgccctccgctctcgatcctccaaaccgttgccgcat

SEQ ID NO: 6564 - DNA, 413 bp, Glycine max
ggcaggctagagagagaaagacacggactgagaaagagagaatgctctgagtttcagagacactgtaatagagagagaaagagagtgtgagtttgcgatgatgagaaccagagaccgaaagagcaaaacgacattcacaaatctgcgcaaacctctcaatcttatttcctgagcattctcttgcgttttgtctccaccgtcgtcgtttttgtttcttgaagcatttcgcgcgcgagggagggtaagatgagtcgtttagggttcaagcacgaggtgtacgacggcgacaagcacatcggcgaactagatttgattcctccgtcgtcgttgacgacgacgacgccgtttcacaacaacttccgcttcccgaacaacgagattcgcatccaccacttcagcgcgaagagcgagcg

SEQ ID NO: 6565 - DNA, 1907 bp, Glycine max
tgttatgcagattgggcaaggaacttacagtactgtatataaggcacgggatgtgattaaccaaaagtttgttgcattgaagaaagtacgctttgacaatctggatcccgagagtgtcaagtttatggcaagggaaatccatgttctgcgtaggcttgaccatccaaacataattaaattggagggcttgattacgtcacggatgtctcgcagcctgtaccttgtttttgagtatatggagcatgatcttacgggacttgcatcaaatcctgatattaagttctctgaaccgcagctgaaatgctacatgcggcaacttcttagtggattggatcattgtcatagtcgtggtgtcctccatcgtgacataaagggctcaaatcttctcattgacaataatggagtcttaaagatcgctgattttggtttggcaagtttttatgaccctcagcacaatgttccattgacaagccgagtagtaactctgtggtatagaccaccagaacttttacttggagcatctaattatggagttgctgtggatttgtggagcactggttgcatactgggggaactatattgtggcagacctatattacctggaaaaacagaggttgaacaattgcataggatatttaaactttgtggctcaccatctgaggattattggcgtaagctgcggacgccacattcaacagtattcaggcctccccaccattataggcattgtgttgctgaaacatttaaagaatgcccatctgctgccacaaggcttattgaaaccctactttctttagatcccacacttcgaggaacagcaactacagccctgaagagtgagttcttttcatcggaaccccttccttgtgatccatcaagtttaccaaaatatcctcccagcaaagagattgacactaaattgtggaaagaagcatcaaggcacggagctgatggaggaaaggagcaaaaatttagaccaggaggtcgacaagagaaagaacctcagacatttatattatccaaagacaatgctgactctcacatatcaatgcagcaagggaaacgccttccaaactcaaggagccggaatgaattcttcaaccctcacagagaacctgcgtttggacatttggtttttccacaaaagcagtcagaagatcataaagaaacactaaattatttctccggccctctttatcagaggcctttgcattcaggtccattggttccaggttatggctatgaaatggctggaagggaagctggtgggcggcctcatgtttcaagcaaagtcaacctaccaaaactatctgggttagtggcatctaggacttcttcattgtctggagatcaaaaagaaaatccagttccctcgaggcctcgggaaacaattgaagtacaaatatctttggagtcaactaatggatcagagtcaagaagaaggcatgataccaaacgccattctcagacaattgatcccaggcaaatcgaaaatggaaaattttcaactgaaacattaattcaggatgggcatggatccatgggaaacaatatctaccacctctctggtccattactgctttcatcaaacaacatggatcagatgctcaaagagcgtgatcgaaagatccaagaatattcaagacgagcaagaatgtacaagtctggtgagatagctcatgcaaagtaaaattaggatgattcatagtcaattacaaattctttttccaattacacagctagatacattttttaatgacagcgatatttatctcaaaattatattaagagaagggaaggggggaaagtgtgtttatgcacgctcctcttgtaaattacatatatagtgtaaattgcaggtttttataataagaatttgattttctactcatgttttatccttatgt

SEQ ID NO: 6566 - DNA, 1472 bp, Glycine max
gccgagtagtaactctatggtatagaccaccagaacttttacttggagccaatcattatggggttgcagtggatttgtggagcactggttgcatactgggggaactatatactggaaggcctattttgccaggaaaaacagaggttgagcagttgcatcggatttttaaactttgtggctcaccatctgacgactattggcttaaatcgcggttgtcacattccacagtattcaggccaccacaccattataggcgttgtgttgcagatacatttaagcactacccatctaccgcggtaaagcttatagagaccctactttctgtagagccagcactcttcagagggactgcagcagctgctctggaaagtgagttctttatgtcggagcctctgccttgtgacccatcaagtttgccaaaatatgttcccagcaaggagattgatgctaaattacgggatgaagccgtaaggcaaggagttgttggaggtagggaacaaaaagttgcctcaggagttagacaagaaaaaggacacagggcaaatgtcacagcaaaagacaatgctgacccaggcttagcagtgcagcaaggacactgttccagctcaaggaaccaaagtgaattatcaaaccctcatagaggatcggtgtctggaattctggttttccctcacaaacagtcagaaaaagaaatgaatgataatttctctgggcatctttataagaggccttcacattcaggcccattggttcctggttctgtctgggcaaaaggcaggaaagaagttgatgatgtgcctcctgtttcaaacagagtgaacctatcaaaactatctgggctagtggcatctaggactttctctgaagatcaggaggttaaaccagttcactcgaaccacagaaaaccaattgaagtaagaaaatccgtggagtccactaatggatcagagtcgagaagaaggcacgatcaaaaacagattgttgatctcaatcaaattgaaagtagaagggtcccggctgaaaaatcaactccgggtgggcgcgagtccatgggaaacaagatatacctctcaggtccattaatggtttcgtcaagcaacatggatcagatgctcaaagagcatgacagaaagatccaagagttttcaagacgagccagaattgacaagtcaagagcaagaggtgagaaagtttttgcacagcggaagtagtcgaattaagataactatttcggattgttcagctgcttacatatttttatgacaccatttatttatctcaaacctaaggagagaaaagagcagggagaggaagagagtgtattcaatcttacagtagcaatgtagcatatatcatgtaaattgcaggctttataagaagagtttggtctttcttcaactcttcatgtttcacccttatataaaatataagcaattcaatttattatgttcaaaaaaaaacccaagcgtacg

SEQ ID NO: 6567 - DNA, 539 bp, Glycine max
tgttgatctcaatcaacttgaaagtagaagggtcccggctctgatccatccgtggagtccactaatggatcagagtcgagaagaaggcacgatcaaaaacagattgttgatctcaataaattgaaagtagaagggtcccggctgaaacctcaactccgggtgggcgcggacccatgggaaacaagatctaccacctctctggtccgttactggtttcgtcaagcaacatggatcagatgctcaaagagcgtgatcgaaagatccaagaatattcaagacgagcaagaatgtacaagtctggtgagatagctcatgcaaagcaaaattaggatgattcatagtcaattacaattttttttccaattacgcagctagttacattttttaatgaccgtgatatttatctcaaaattatagaaagagaggtaaagggtggaaagtgtgttcatgcacgcttctcttgttaattacatatatagtgtaaattgctaataagaatttgatgttccttccattattcatgttttatccttatgtaa

SEQ ID NO: 6568 - DNA, 353 bp, Glycine max
tcaaacaacatagatcaaatgctcaaaaagcgtgatcgaaagatccaagaatattcaagacgagcaagaatgtccaagtctggtgagatagctcatgcaaagcaaaattaggatgattcatagtcaattacaattttttttccaattacgcagctagttacattttttaatgcccgtgatatttatctcaaaattatagaaagacaggtcaaggggtggaaagtgtgttcatgcacgcttctcttgttaattacatatatagtgtaaattgctaataagaatttgatgttccttccatcattcatgttttatccttatgtacatgcgatccaattttgaaaaattgaattact

SEQ ID NO: 6569 - DNA, 711 bp, Glycine max
  unsure (1)..(711): unsure at all n locations
gatgaggctcagggaagaggggtggttgagcctcactgcccggtgccatttgttaaactcaatactgatattctcgagactgagtctttgaacttgctcgcagaagccacatttgtagatactctcttgactgcattgcctgttttgtccgaggaggagcagcacgccctatctgctactccggctcacccggctggtttacacgctttttatgctagttgcttaactgcaaatgtagtggagcagctttggaattttgcttggccttctgccattgccttgattcatccaagccttttgccagttgctgtaatgagtttcttcaccaaagtggctatagttgttggcggtcccttggttggcaaacttatggaccattttccaagagtgtctgcatataattgcttaaccattgttcaggcagcagctcagttgctatctgcagcgatgattattcgtgcccattctgtccaacctacttcattttctacactgcttctgcgtccctggtttgtcatattggtttcagctggggctattgagaggctttgtggagtagctttgggggttgcaaatgagcgtgattgggttgtgctgctggcaggagtgaataggcctattgcattagcacaggcaaatgctgntctaaatcgaattgatctcctgtgtgagatagccgggggcgatgcttgttggattccttctttctaa

SEQ ID NO: 6570 - DNA, 1128 bp, Glycine max
  unsure (1)..(1128): unsure at all n locations
caatgtcggtggatgtaattcgcaaggcactccaagcaacagaagaggggtttctgtcggtggttgccagacagtttcctctgtcaccacaacttgcggctgtcgggtcatcgctgtcttgttggtgttatttgtaatggaaccctttacatagcaaaccttggggattcccgggctgttttgggaagagcagtcaaggcaactggcgaggttttagccatgcaattatcagcagagcacaatgcatcgatagagtctgtaagacaggagctgcatgcttcgcatcctgatgacccaaatattgtggttttaaagcataatgtatggcgtgtgaagggtcttattcaagtttctagatctattggtgatgtatatttgaaaaaggccgagttcaatagagaaccactatatgctaagtttcgacttcgtgaaccatacaagatgccaatactaagctcagaaccatcaatatcagtgcatcatttgcagccacatgatcaatttattatattcgcatctgatggactctgggagcaccttagcaatcaagaagcagttgatatagttcaaaacagtccccgcagtggaagcgctaggaggctggtaaaagctgcgcttcaagaagctgcaaagaagagagaaatgagatattcagatttaaagaaaattgatcgcggagttcgtcgtcatttccatgatgataccacggtgattgttgtgtatcttgactcaaatctcgtgagtagggccagcactgtgaagttccctggcatttctgttagagggggtggtattaacctgcctcataacacactggcaccttgtaccacaccaacagagattggtggtacctgatctaagttgtatcttttatcttcttctttgttgtatcattttcttgtgtgaataccagttgtcttcaaaatagcactgagaggagcagcacttcaattctttgaatgtgaactgtaacttactaggatactaatactcatgtttacggtttttttctttcttggtttcccttcccctcaaaaccaaaagaacagaagagatcttctgatgaccattataagagttgcctcggccccattttatnnnnnnnnnnnnnnnnnnnnnnnnnnnnnn

SEQ ID NO: 6571 - DNA, 1433 bp, Glycine max
cgacaccccaaccaacctcactctctctttctctctgttttctggtaattcatcaattgattcaaaatgcagaggctcaaactgcaactagtgctattcctctcaatctcaacttctcacactgttttctccttcactgatgggttgttgccaaatgggaacttcgagcagggcccaaagccatcacaattgaaggggtccgtagtgacaggccacgatgccataccgaattggacaatttcggggttcgttgaatacataaaatcaggacaaaaacagggtgacatgttactggttgtgcccgagggtgactatgcagttagacttggcaacgaagcttccattaagcagaagctgaagctgattaaggggtccttctactccatcaccttcagtgccgctcgaacctgtgcacaagaggagaagctcaacgtgtcagtggttccaaccaccgagaagagggactggggcatcatccccattcagactatgtatggtagcaatggctgggagtctttcacttgtggcttccgagcagatttcccagaagctcaaattgtcatccataaccctggcaaagaagaggatccagcttgtggtcccctcattgattccgttgccctcaaggtcttgtacccacccaaaagaacaagagccaatttgttgaaaaatggaaacttggaagaagggccatatatatttcccaactcgtcttggggggctttgatcccaccgcatatagaggattctcacggtcctttaccagggtggattgttgagtctcttaaggccgtgaagtacattgattctgaccactttgctgtgcccgagggaaaaagagctattgaacttgttgcagggaaagagagtgcacttgcacaggtagtgattactacaatcggcaagacttatgacctcactttcgccgtgggtgatgccaacaatgaatgcgaagcttccatgatggtagaagcatttgctggcgcaaacactgtccaagttccatatcaatctaagggtaaaggaggttttgtcagaggcaagcttcggttcaaggccgtctcaacacgtactcgtcctaaggttcctaagcacattttacaccatgaagagtgataactctggttcgctttgtgggcccgtcatagatgatgtaaaattgcttggtgttcgttatcccacacatgcttgatgatgaggtttcaatcaaaacacgtacatgtgctacattcatgtagttgagcatatataccacaggattcttgtaataataggagggtttactattgttgagcgactttaccaagtctcacatttatttatgtatctatttttccatcaaatcaaatgcagtaatgacggggagttccttcaatgaatatgatgatatacctatatcatgcttgtgcacgtgatgtaggagacaacatgtg

SEQ ID NO: 6572 - DNA, 569 bp, Glycine max
gttcatcaaaagcatctcgaataaaactgtggtggcggagtagcgccgcagggaggttttggcaatttctctgttctactggtaagcgaaaatgaattattcagtgcgacgagtgtatgccaatgtcaagggctgttcttcggtcctacgccactgtcactgcgaaacccaacgatattccatttcagcccaaacttgctaactccgttaacctcatcggtcatgtccagtccccgattcagttccatgtctctcccaacgatggctacgtctgggcctccaccgttatcacgcgtcaagactcctctgacctctctttctcgattccggttatatttgagggtgatctcgctcatactgccaaatttcatctcaatctaaatgattgcatccacattgctggaaaactcaccactgattcaccccaattggaacacctccccccccaatctaatattcaggttatggtacaaaccctcaattttgttcaacgatatccccaacccaacaccaccacatcaattgatttgaaacctcaacctcaacctcaaccagaacactccataccc

SEQ ID NO: 6573 - DNA, 797 bp, Glycine max
caccatagtccatagagagacaaggctcactccaaagcttgaaagacagagagagaggcaaccttgtttcagttggttggtatcataccatgggacaagtctttgacaagttagagggtaaggagtggaggcaaaggcaaataaggaagataacagatcgagtttttgacaaagtaaagaatcaaatagaaactgataacttgagttttgaagatctgtatattgctgttttacttgtgtacaatgatatcaacaagtatatacctggtccccattttgaccctccatcaaaagacaaagtcagagaagtcaaacagagctgtgatatcaacctcgatggtgatattgaccgtgatgaattttatgatttcatcctgataatgacagctgatacattcactattgttagccaaaaacttattctcacattggttgtagcaccaacagttgcagtggcaacaaagaaagctactgaaggtgttccaggtgttgggagactggtgcaaaagataccgaattcagtttatgcttccctcgtgacaattgcagctgtgtggttccaaaaaaaggctcagagttcttcactgtagccattgctcatcatgtgtttcacacggaatgatatatagaattctcttgattgtacaaaaaggattaaactgtttccatattagttgataaaaaacaattgttgtgttttacattttggacaaaagatcaactcttgatttttctgtcaggttatgctatgcatgtaaattaactgtcttcaataaaattgtattacagttcctgtt

SEQ ID NO: 6574 - DNA, 589 bp, Glycine max
caaaaaaatgacagatgggaatcatggcaaaaaggataaggaagagaaagtattagagcacgaacagttgcagtaattttagtagctccatccaagaattcactaatcgattgtttcaaagaggttgatgacaaccaatcaaagatagtttgagttctactagaataaggtaaggagtggaggcaaaggcaaataaggaagataacagatcgagtttttgacaaagtaaagagtcaaatggaaactgataacttgagttttgaagatctgtatattgctgttttacttgtgtacaatgatatcaacaagtatatacctggtccccattttgaccctccatcaaaagacaaagtcagagaagtcaaacagcaccaacagttgcagtggcaacaaagaaagctactgaaggtgttccaggtgttgggagactggtgcaaaagataccgaattcagtttatgcttccctcgtgacaattgcagctgtgtggttccaaaaaaaggctcagagttctccactgtagccattgctcatcatgtgtttcacacagaaagatagaattctcttgattgtacacataggattgaaact

SEQ ID NO: 6575 - DNA, 239 bp, Glycine max
tgctcactccaaagcttgaaagacagagagagagttaccttgtttcagttggttgatgtccatacgatgggacaagtctttgacaagttagagggccagaatgtgtgaagtttagagtttaattgttttgatatgcgaaatgggaggacaaggctcaagagagatcacagtgggggaagaccaattaatgtttggatttggttatgtgagtcacttgagatgtagaataaaggaaaacc

SEQ ID NO: 6576 - DNA, 1588 bp, Glycine max
  unsure (1)..(1588): unsure at all n locations
cccacgcgtccgcgcttggataatggaggcatgaagttattccaaagcaaaaattaagtcagtgcctaaagtgcctgaccggacgcgtgggtggactttccccaacttacaatgacattacctgatggtcgtgaagaatctgtcatgaagcgtacaacactagtggctaacacttcaaacatgccagtggctgctcgtgaagcttcaatttatacaggaatcacattagctgagtatttcagagatatgggttataatgtcagtatgatggcagattctacatctagatgggcagaagcattgcgtgaaatctctggacgactggcagaaatgcctgcagatagtggatatcctgcataccttgctgcacgtttagcctcgttctatgaacgtgctgggaaggtaaaatgtcttggaggccctgaacgtacaggtagcgtaactattgttggtgctgtttcgccacctggaggagatttctcagatcctgtgacatctgcaaccctgagcatagttcaggttttctggggtttggacaaaaagcttgctcagaggaagcactttccttctgtaaactggcttatttcttattcaaaatactcaacggcacttgaaaccttttatgagcaatttgatccagattttatcaacattaggacaaaggctcgtgaagttctgcaaagggaagatgacctgaatgaaattgttcagcttgtgggcaaggatgctttagctgaaggagataagatcaccttagaaactgcaaagcttttgagagaggattatcttgctcaaaatgcctttacaccatatgacaaattctgccccttctacaagtctgtttggatgatgcgcaacattatccatttctacaatttggcaaatcaggcagtagagaggggagctggttcagatggtcagaagatatcttacacccttatcaagcatcgtatgggagatctgttctaccgattagtgtctcagaaatttgaggatccagcagaaggggaagctgctttggttgctaaatttcagaagttacacgaggacctgactaatggtttccgcaaccttgaggacgaaacccgatgattgaagatttggtatggtagtttgctcaaataatgtgttatttccaattgtaagaggcagtctagcatcgcagggttacaccgtcccgagtgttcttatatttgactgttctgattcattcatatcacatttatttcctttcttggtgctggtttggcttttgatctagtctcatgtgtagctataatcatgtgtttcagtcatcctcagtttgtttattgagaataagaaacgaaacttgctctttcaatatgtatttaggagaataaagttattttagaacatgaagtgcctgcggcaatcggattccggattcatataggtggaatttttggtggaagtggattatcttgaatcctgtatttcatagatggacttcttgtagcaatgagtatttaattatttattcgaaatatgttgcatgtctagttttatcaaaaaaaaaaaaaaaaaaaacccaaaaaaaaaagggcgggccgctcgcgcccncagtccg

SEQ ID NO: 6577 - DNA, 1325 bp, Glycine max
aaaagcgtcgtgggaggaaggaaagagcatacgtgttgcgttagtgtttagtgttatatctccgcagtggatcaaatcaaacaaacacttccatccatcaccctttctctctgcttagggttttgatcgcatcggatcttcactctcttctccgatctcaaaatgcccgccgtttatggagctcgcttgaccaccttcgaagactccgagaaggagagtgaatacggttacgttcgcaaggtatcaggaccagtcgtcgttgcagatggcatggctggggctgctatgtatgaactcgtgcgtgttggtcatgataatctcattggtgaaattattcgtctcgaagggaattctgctaccatccaagtttatgaggaaactgctggcttgatggttaatgatccggtgttacggactcacaagcctttatccgtggagttgggacctggaatactggggaatattttcgatggaattcagaggcctttgaaaactattgctaaacgatctggtgatgtctatattcctcgtggtgtctctgttccagcactcgacaaagatacactttgggaatttcaacctaagaaaattggtgaaggcgaccttttaactggtggagatttatatgctactgtttttgagaacagtctaatgcaacaccatattgcacttcctcctgataacatgggaaagattacctacattgcaccacctggccaatattccttacaggatactgtattggaacttgagtttcaaggtgtcaaaaagaaattcactatgcttcagacttggcctgtacgtacacccaggcctgttgcatcaaaacttgcagctgatactcctcttcttactggtcagcgtgttcttgatgcccttttcccctcagttcttggcgggacttgtgccattcctggtgcttttggttgtggtaaaacagtcattagtcaggctctttctaagtattccaattctgatgccgttgtttatgtcggctgtggggaacgtggaaatgaaatggcagaggttctaatggactttccccaacttacaatgacattacctgatggtcgtgaagaatctgtcatgaagcgtacaacactagtggctaacacttcaaacatgccagtggctgctcgtgaagcttcaatttatacaggaatcacattagctgagtattttagagatatgggttataatgtcagtatgatggcagattctacatctagatgggcagaagcattgcgtgaaatctctggacggctggcagaaatgcctgcagatagtggatatcctgcataccttgctgcacgtttagcctcttt

SEQ ID NO: 6578 - DNA, 414 bp, Glycine max
ccagccttaggttgtcatgaccaatgcccacaaattgttaaaagcctgtttagattatcattatgaaatacccctctggttatttcttcttttatctatccttctataactttcaattcattttgtaagtttatttttgcttaattggcaggttttctggggtttggacaaaaagcttgctcagaggaagcactttccttctgtaaactggcttatttcttattcaaaatactcaacggtatgtcctaaagttggttactttgtaactcatcctccagctttctacatttgtatgcatagtgttttggttccatgactttccccgaatttttaatattttctttttggtatctttaagcacttgaaaccttttatgagcaatttgatccagattttatcaacattaggacaaag

SEQ ID NO: 6579 - DNA, 242 bp, Glycine max
gtgaattatttaatgcgcgaaaatgggcagtgaggagaatagtgtgtgatccacttctttcatcgcttcggatcttcaatctcatctccgatctcaaaatgcccgctgtttatggagctcgcttgaccaccttcgaagactccgagaaggagagtgaatacggttacgttcgcaaggtttcaggacccgtcgtcgttgcggatggcatggctggtgctgctatgtatgaactcgtgcgtgtt

SEQ ID NO: 6580 - DNA, 910 bp, Glycine max
gccagcctcgacctagaccttcaatgattcgcagacaaataaagaactaatgagaccatttgtaataataataaaaatcacatgagataatgagatatgtttttataaataaataaggaacaaaaaagattgacaaattatatttcaaagaaataaacatattttaacccatccttatctgtagtatttaaagagcagtaatgggtttagatgagtttttcgcatacttaaaaatgaaaagaagcactcactcgtgaaccccacgcagtgttcgataatcaaatcttctttctttttcttccgcagtcccaaccttcatggattctcactcacacatcattgcttggggctctggtgaagatggtcagctaggaatcggaagcaacgaagagaaagaatgggtctgcctcgtcaaagccctccagccccaccgtattcgctccgtcgtcgccggcagcagaaactccctcgccatcgctgacgacggcaaattgttcacttggggttggaaccaaagggccacacttgggcaccctgctgagaccaagtctgagaacaagactgagaacactcccagccaggtcaaggctctttccagtgttaaaattgttcaggcggctattggggggtggcactgtttggccgttgatgatcagggcagagcttatgcttggggtggaaatgaatacgggcagtgtggcgaagaacccgagcgcaaggatggcactggtagacctttaaggagagatatagagatccctcagcgctgtgctcctaagcttgttgttcggcaggttgctgcaggaggaactcactcagtggtacttacacgagaagggcatgtttggacatggggtcagccatggccgcctggtgacataaaacagatttcagtccctgttcgggttca

SEQ ID NO: 6581 - DNA, 652 bp, Glycine max
ctttcaatctgttgatagatccagtcatcattcttcaaccacagtttcatctatggccaagtctctgctccctacgaagaggaggctccatcttgatccttccaacaagctctactttccatatgaacctggtaagcaagttaggagtgcaatcgcaattaaaaacacttgcaagtctcatgtagctttcaagtttcaaacaactgcacccaagagttgttatatgcgccctccagctggtattcttgcccctggtgaaagtattattgccaccgtgttcaagtttgtcggagccaccggagaataatgagaaaccaattgatcaaaaaagcaaggttaagtttaatattatgagcttaaaagtgcaaggtgaaatggactatgtaccggaactgtttgatgagcaaagagatcaagtggcaatagagcaaattctgcgggttatttttctggaccctgaaaagcctaatcctgtcctggataagcttaaacgaatgttggctgaggccgacgctgcacttgaagcgcgaaagaaaccactggaggagaaacgtccttgtgttgctggggatggccttgttatagatgaatgggagagacagaagagaaagatacttggctcaacagcatgtccaaggtgttgattcagtgt

SEQ ID NO: 6582 - DNA, 536 bp, Glycine max
gttttcctgatattctctccctttttggtggggttcttttcagttttctcagcctttcttcaaactctttctctgcgtgatagatgtgtttctcctgatcttcagctctggattctgggcttggttgcaaaaaggtcattttttattggcttatgagtgggtgcaggttttcagcagataagtagcttagcttccttgttcataagccttgaaggtttttgatgctgtttttctgcactttttgaacctttttacctttgttttgcatctgggtgttgttttggaactgtgtcactctgttggcatgtgagttttttatgtatgtggatttgagatattggtctaatggtctctctgaaatgatatttggtagagagatttctgttagaatgatggctatttttatttgaagatatatagtgtaatggatgagattgaataaactgttggatgattgagcataaatgggtttgcatgattttaatctgtagataaggtgaaaaggggtgaaagaaattgggttggagcttggattt

SEQ ID NO: 6583 - DNA, 549 bp, Glycine max
  unsure (1)..(549): unsure at all n locations
ctgggagtactagaagcaattaaagcctcttttacagttcagtctcttgttaaagcaaaatggtcttagaagagtgtgtagtgcatgatgtgaggctatcctcagttgggccaggccgggccaccaggtcggaggtgttccacagcccgggtggcttggacttggccatgaagcttcactatctcagggtggtgtacttctttgctagtgaggctgcacaagacctaaccatcatgaaaattaaggaggccatgttcactttgctcaaccattacttcatcacatgtggccgcttccggcgatcggattccggtaggcccttaatcaagtgcaatgattgtggagtaaggttcattgaggccaagtgcagcaaaaccctagatgagtggctagccatgaaggattggcccttgtacaagttgctcgtctctcaccaagtcattggcccagaactatctttttctcctcctgttttgttgcaggtaactaaatttaagtgcggtggaatttcattgngtcttagttgggcccatgtattgngggacccgc

SEQ ID NO: 6584 - DNA, 501 bp, Glycine max
  unsure (1)..(501): unsure at all n locations
accaaaccctcttgaccttgtgatatctctctcttttaatttctaggatcaaaccaaaaaatggtcttagaagagagtgtagtgcatgatgtgaggctatcctcagttgggccgggccgggccaccgggtcggacgtattccacaacccgggtggcttggacttggccatgaagcttcactaccttagagtggtgtacttctttgatagtgaggctgcacaagacctaaccatcatgaaaattaaggatggcatgttcactttgttcaaccattacttcatcacctgtggccggttccggcgatcggattccggtcgacccttaatcaagtgcaatgattgtggagcaaggttcattgaggccaagtgcaacaaaaccctagatgagtggctagccatgaaggattggcccttgtacaagttgctcgtctctcaccaagtcattggcccagaactatctntttctcctcctgttttgttccaggtgactaaatttaagtgc

SEQ ID NO: 6585 - DNA, 629 bp, Glycine max
tgtgggtgaacgtcttaccctcacagtcacaggtacagaataagcgctaaccgatttccgatatattctcatctgtgactcaatcacactgcaatcacttcatcctcagtacctgttcttcttctcctccttcaatcataacattatattaaatatatggtacactgattacatttataatattatattattatatataacttcacaatctctagctattcattctcatacaggattgatttggggattggacatcatggatcgcctaaacatcttctccgcagctcatgattgtctcggatcttgatcacacaatggttgatcatcatgattcctgagaattggtccctttttaaggttcaaggcctttgggaaagcccattatcgccaagattctctgctggtgttctcaactggaaggtcacctacactctacaaacaactgaggaaggaaaagcctctgataactcctgatatagccattatgtctgtggggactgagattacttatgggaaatcaatggtgcctgatgatggatgggttcggtgtttgaaccagaaatgggataaggacatagtcatcgaggaaacaagcaagtttcccgaacttaagcgtcaggctgaaacag

SEQ ID NO: 6586 - DNA, 317 bp, Glycine max
caataatctttccctctttgtgttgaattcctatctgaaggattgatttggggattggacctcatggatcgcctaaaatcttctccgcagctcatgagtgtttcggatcttgatcacacaatggttgatcatcatgattctgagaattggtccctttttaggttcaatgccctttgggaagcccattatcgccaagattctctgctggtgttctcaactggaaggtcacctacactctacaaacaactgaggaaggaaaagcctctgataactcctgatatagccattatgtctgtggggactgagattcttatggg

SEQ ID NO: 6587 - DNA, 355 bp, Glycine max
ctcctccttcaatcataacattatataaaatatatggtacactgattacatttataatattatattattatatataatttcacaatctctagctattcattctcatacaggaatgtactgcataaaattctgattcgataatctttccctctttgtgttgaattcctatctgaaggattgatttggggattggacctcatggatcgcctgagatcttctccgcagctcatgattgtttcgggtcttgatcacacaatggttgatcttcatgattctgaggattggtccctttttaggctcaatgccctttgggaagcccattatcgccatgattctctgctggtgttctcaactg

SEQ ID NO: 6588 - DNA, 219 bp, Glycine max
tgtgatttccatcattgtcgtcgtcattttgatttatttgttaatttggattcaggaatgtactgcataaaattctgattcaataatctttccctctttgtgttgaattcctatctgaaggattgatttggggattggacatcatggatcgcctaaaatcttctccgcagctcatgattgtttcggatcttgatcacacaatggttgatcatcatgatt

SEQ ID NO: 6589 - DNA, 480 bp, Glycine max
ggcagatcaagtctctgtggttattcccatcttgaaactcaaaagatcaacaaaggttgtattctactgccattttccagacttgttgctggctcaacattcaactttcattaggagaatgtatcgaaaaccaatagaccttgcagaagaaataacaactggaatggctgatttgatacttgttaacagcaagttcactgcatctacttttgcaaatacttttaagtatctagatgctaaaggaattcgaccagctgttttatatccagcggttaatgtggatcagttcaatgaacccagttcctttaagctgaattttctttccatcaatcgctttgaaaggaagaagaatatacaattagctatttcagcttttgctatgcttaactcacccgaaggagttcttaagcataaagatattactaatgcttctttgactattgcaggtggctttgataaacggttgaaggagaatgtgga

SEQ ID NO: 6590 - DNA, 470 bp, Glycine max
gaagacgacagaagggggtgtgtgtgcacggcgtcaggtaaggtattacggggtcactcacacatccacatccactctctctctctcttcttcttcttcttcctcctctccacgacgattaataataataatggagcagcttcaaacccccaccaccacccataataacacgaacccagaaacctccaactccaacaatggcgaatcccttttcttccaagacttcgacagcacctgctccaccccttacgtcagcgccccttccagccccggccgtgggcccctccccggcttcttctacagcgctccggccagtccaatgcacttcgccatcactgccgcatcgtcttacgagaacaccccttcttccgcaccaatgggcttcgagttcgaattctccgcccggttcgggtgctccggttcggccgggtccggttcgatgagctcggccgacgaactcttcctgaacg

SEQ ID NO: 6591 - DNA, 768 bp, Glycine max
ctccctttcaaggttgggtgatggcaattgtcatggctctcttgagtggttttgcaggagtatatactgaggctattattaaaaaacgtccttcacggaacataaatgttcagaacttctggttgtatgtctttggcatgtgtttcaatgctgttgcaatattggttcaagattttgatgcggtgatgaacaagggattcttccatggatattcattcattacagttctcatgaatttcaaccatgcactcagtggaattgctgtatcaatggtaatgaagtatgctgacaacatatgtgaaagtgtattctacttcagttgcaatgcttcttacggcagttgtttctgtgttcctttttggcttccatctctcccttgccttcttcctgggcacagttgttgtctctgttgcaatttatctgcactctgctgggaagatacaaagataactatggcttctgtcttctgtttttcctatactggatttttttattcattgttgtttagccttgagcaaacgaatacatattagttcactgtaatagtgtgtgtatctcaacattcaacaaggatagaaccaggcttaggttcgattgtctacattatgcttcttgatgcgtgagatgtaaattcgactagaagctcttgttgtagttaaggatgttgccctgacctagcaattgaatcaccttcccacgccccatcctaaattttttaagttctaaaaagggggcaaaacctatagtttaagcgatgtgactttgttg

SEQ ID NO: 6592 - DNA, 571 bp, Glycine max
caaaccctttcattccaccaattaccgaagtgaatatacgctctcatcattcgccattcgctgtccgctaatttccctttttcctgccttgtcgttttgatccctcccccaaactaaacgacccctctcctcttccggaaccttcgccaccattctccgcccaattttcccgcgctttctcgaacctccgacgccactccggccaccgcagagtgaacaaggtcgtggaagatgagcaacgtgttcgagggttacgaacgccaatactgcgagctctcggcgaatctagcgaaaaagtgcactgccgctggtgctcttaatggagagcaaaagaaacagaaagtttctgaagtaaaggctggaattgatgaagcagaagctttgattagaaaaatggaccttgaggcaagaagtttacagccaaacatcaagggtgtgcttcttgctaagttgcgagagtataaatcggatctcaacaatcttaaaagtgaagttaagaaaattgtatctggtaacttatacccttctgcacgggatgaattgttggaatcaggcatggcagatgctatga

SEQ ID NO: 6593 - DNA, 361 bp, Glycine max
ggtgtttggcgaacttgaattcattggcttgtgtggctttctccctccaaaaaactcccctcttttccgtcggagaatggcgtcatcttcacaaagccgctgtggcagcggcagcgccgcctcacgactgaggaacgcagcttccaccttctgctccgactcacagcctctccttgccgatatccgaaaaaccgtgcttatgatgaaggacatcgcagttcaattggagaaagacaacctccctgacaaggcgaaggaactggaagatgcggttattgagttagtagggctatctgagctcagtgtgcaattttcatcagcggttcaagcttttgctaacgcataccaacctaagggaaaa

SEQ ID NO: 6594 - DNA, 669 bp, Glycine max
caataataaacgccctcacgcattttttgatctcttccagcggctcgagctcccgcaaactcattctgggcggcgatagttttatcgttctctatctccaagatggtcggagaacacggtacgatgtcacttgcctccgatgatcagaaaacaccacttcttcccgtgcacgagccaatggaaggaacacgcaccagcgtctccttcagcatcaaaacaattctaacactggaaaacttgtacgtgattctgggacctatgctgtctcttttcatatgcctcttcgtgaagctcgacgcgccacccacaagccagaaaatgcttggtgtgattgcgtgggtcttcgcttggtgggtcacgcaggccgtgccacttcccgtgacttccatgtgtcctctgtttttgttcccaattttcgggatagcttcagctgatagtgtggcgcactcttacatggatgacgtcatcaccctcgttttgggaagcttcattctcgccctcgccgtcgaacgctacaacgttcaccggagattggccttgaatgtaacactgctgttttgtggcgacccggttaatccagcgctgttactgctggggctgtgcgcgacgatattcttcgtgagcatgtggctgcacaacgtggcgacggcggtgatgatgatgccggtg

SEQ ID NO: 6595 - DNA, 489 bp, Glycine max
  unsure (1)..(489): unsure at all n locations
ttcagacagagactgtcagcttcgccccgccatgaacgccattgcaactgctgcacttctctctctccctttctccttctccaaatcatccaagcttgacaccaaaaagggtttgaaaggaaggtttagagtgtttgctgtatatggagaagagatagataagaagagtgcatggagtgccctctttgatgtggaggatccacgatccaaagtgccgcagtataaagggaagtttttggatgtatatcaagcccttgaatttgcaagatatgatattcaatactgtgattggcgagctcgccaagacttgcttgccatcatgcttcttcatgaaaaggtggtggaggttcttaatcctttagctcgtgattataagtccattggcaccatgaaaaaggagctagcagagttgcaggaagaattggcacaagcacaccaacaggttcatatatctgaggcaagggtgtccaatgctttanataaactagc

SEQ ID NO: 6596 - DNA, 588 bp, Glycine max
ctttctaaaaaataaaataaaaatttaaccctagcaattttctcttattgcctaaaaacatttcaatcactctactttaaacgatccgctaaaaaaaaacctctcgcaaaacccacactcccaattccaaatcgatgtcgtcttcggagtcccaagaccccgccgccgccgcagcatcgtcggaggcccaagtcagcaaaaaggccgccaagaaggaggccgccaagctggagaagctccgccgccgccaggaaatcgccgccgcgtccgccgccacggccaacctctccgtcgacgaggaggaccccctcggcgggaactacggcgacgtgccgctggtggagctgcagtccaagacgccgtcggacgttggcgagtggacgcgcgtggaggcgctcggcggcgcgctggagaacaattcggtgttgatccgagggagggcgcaggcgattcgccccgtcgggaagaagatggcgtttctggtcatcagagagaacggtttcaccgttcaatgcttggtgcaagcgcagctgatacggtgagtgcgcagatggtgaagtttgccgctgcactcagccgcgagtccat

SEQ ID NO: 6597 - DNA, 885 bp, Glycine max
accagggaaacttccggaagaccaattattaattgcatcccgctgtccattgttttgtcagttgaagggcttttgtttctattcccctgcggttggctgctgacgaatctcttatctgcgtccttaaattaaaatggagtctggagccctagtgtcgtccgagaaagaagggcagcaaggagcctcgtatacgtactgggttaggaaaataacggaagatgcagcgcctttgcctgtgcctcgtaagctcaacccagaagatgttcccccttgtcattctcaatctcaatctcggtctgccacgcttggctcagcttggaatcgcgctgggacatgggaggagaaaagtctaaacaattgggcaactccgagaattaaggagttgcttatctcattaggctccatacagttctcctttggcagagcagaagtagaagatgtaacaaaatgtgttggcgatgcattcatggtgatagttcggaacaagaaacgtgttggttacacatatgagttgagcttaaaagtcaaaggggaatggatcatacaaggagagaagaagttcgttgggggtcatatagatgtcccagagttctcatttggtgaactagatgacttgcaggtggaagtgagactgagtgaagcaagggatatcttgcatcaagacaagacacagatgcgcaacgacttgaagctatttttacagcctgttcgggaaaagttgctgcaattcgaacaggaactcagagatagatagatagatagaaagaggaagtattcgtatctgtgacaaaagccatgcagtttttgtaattttagtcgctacttgtatttctagtacaatctcttcccgaaataaagttgtgttaatgtctggaaataacctac

SEQ ID NO: 6598 - DNA, 607 bp, Glycine max
tattaattggatcctgctttgtgagtttaagggcttcgcttttgtttcttctattccactgcggctactgacgaatctcttatcttcttctgcttcctaaatgtgagttcattcatttgatgttgcaacttaaagttttgttttgtatgagatcctgcttgtgaagtaaaatggagtctggagctggaggcctagtgtcgtcgtctgagaaagaaggagcctcgtatacctattgggttaggaaaataacggaagatgcagcgcctttgcctctgcctcgtaagctcaacccagaagatcttcccccttcccaatctcaatcttccacgcttgcttcagcttggaatcgcgctgggacatgggaggagaaaagtctaagcaattgggcaactccaagaattaaggagttgcttttctcattaggctccattcagatctcctttggcagggcagaagtagaagatgtaacaaaatgcgttggcgatgcattcatggtgatagttcggaacaagaaacgtgttggttatacatatgagttgaccttaaaagtcaaaggggaatggatcatacaaggagagaagaagtttattgcgggtcatatagatgt

SEQ ID NO: 6599 - DNA, 1873 bp, Glycine max
acgcgacgtaagctcggaatcgtctcgagggaacccttgcactcctctatacggaggcagcatggccgggaacgggttgttcccaaaggacaacaaaaagggttgcaaggagttcgatgagtatggcatttccttcaaatccaaacccggtgctcttcccactatcgttttgctcgatcgaggaaattgcttctttgctttgaaggtatggaatgcacagaaggctggagcttctgctgttcttgtttcggatgatattgaggaaaagttgataaccatggacactcctgaggaggatgggtcatctgcaaaatacatagagaacataacaataccatctgctctcattgagaaaagttttggtgaaaagttgaaggttgccataagtaatggggatatggtcaacgtcaatcttgattggagagaggctgtcccccacccggacgaccgtgtggagtatgaattgtggaccaacagcaatgacgagtgtggagttaaatgtgatatgttgatggaatttgtgaaagattttaaaggtgcagcacagatattggagaaaggtggttatactcaattcacaccccattatataacttggtactgtcctcaggcattcacattgagcaaacagtgcaagtcccagtgcataaatcatggaagatattgtgctccggatcctgagcaagatttcagcactggttatgatgggaaagatgtggttattgaaaatttaaggcagctatgtgtcttcaaggtggcaaatgaaaccaaaaagccttgggtgtggtgggactatgtcactgattttcaaattagatgcccaatgaaggagaaaaagtataacaagaaatgtgctgatgctgtcattgaatcacttggccttgatattaaaaagattgaaaggtgcatgggagatccaaatgctgattctgaaaatcctgtcttgaaagaagagcaagatgcccaagttggtaaggggtcacgaggtgatgttaccatattgcctactctagttgtcaataatagacagtatcgaggaaaattggagaaaggtgctgttatgaaagctatctgtgctggttttgaagaaactactgaaccagctgtttgtttgagcagtgatgtggagacaaatgagtgtttggagaataatggtggttgttggcaggataaagtagcttacatcaccgcatgcaaggatacgttccgtgggagagtatgtgaatgccccctggtggatggtgtgcaatttaaaggagatggttatacaacctgtgcagctagtggacctgggcgttgcaagataaacaatggaggttgttggcatgaagctaggaatggacatgcatattctgcttgttcggatgatggaggggttaaatgccagtgtcctgcaggctttaaaggtgatggtgtcaaaaattgtgaagacattgatgaatgcaaagagaagaaagcttgtcagtgccctgaatgtagctgcaagaatacttggggaagctatgactgcacttgcagtggggatcttttgtatataagggaccacgatacttgcataagtaaaactgccagtcaggagggaagatcagcctgggctgctttttggttgattttacttggcgtagttatgattgctggtggggcattccttgtgtacaagtacagaataaggcaatacatggattcagaaatcagagcaatcatggcgcaatatatgcccttggacagccaagcagaagttccaaatcatgtcaatgatcaaagagcatgaaggcaaaaatgggccaatcccttggaatttcacggcaggcagcatgggtgtgacttttcctgtgccattttgaactctggtcattgaacttaatagactgta

SEQ ID NO: 6600 - DNA, 781 bp, Glycine max
tgcttaatggttaagacttaagaagagtagttagttagtagtaattttgttcttgtctttgtctcattggactcaacagagagaacgatctttgcgtttccgtgtctccaagtcctctgttttacactgctgcgcgatacttcattttctgaatataaatacgcaactcaattacccaacccaactttcttttctttgacaaaaaaaataaaaattcccacttcctttttcttctttttttgttctttgttttttgtttgataagaaactgcgagaagaaagtaaaaggttcaatttttacccttttttcttcccagaagcgatctctgaagccgacccattttggaattcggaaaacccagtgctgatcgctctctgggtgttcccaaaatgaagcttcggagatcttcgctgtgcgtctttctagggtttctggtgctgttcctttcgccgccgccatcaatggcgaaattcgtggtggagaagaacagcttgacggtgacgtcgccggacgacatcaagggcacgcacgatagcgcgattgggaacttcgggataccccaatacggtggcagcatggccgggaacgtgttgtacccaaaggacaacaaaaagggttgcaaggagttcgatgagtatgggatttccttcaaatccaaacccggtgctcttcccactatcgttttgctcgatcgaggaaattgcttctttgctttgaaggtatggaatgcacagaaggctggagcttctgctgttctttgttcggatgatattgaggaaa

SEQ ID NO: 6601 - DNA, 555 bp, Glycine max
gctaattcccaatttaataaagtagataaatatgcttgaaacggtggtgtgtgggttttagggtttttggcagcaaggatggcgtcgagaccagaggtagttgcgccgcctgagattttctacgacgatgccgaagctcgcaagtacacctcttcttcccgtattgttcaaattcaggcgacgctgtcagagagagctctcgaactacttgctttgcctgatgacagcgttcctaaattactccttgatatcggttgtggatcgggacttagcggtgagacactctccgagaatggacaccattggattgggcttgacatttcagcatcaatgcttaatgttgcggtggagcgagaggttgagggtgaccttttacttggtgacatgggccagggtctaggaattcgtcctggagttatggatggggccatcagtatatctgctgttcagtggttatgcaatgctgataaatcctctcacaaccctcgattaagattgaaggccttttttacatctttatacaaatgcttatcaaatggagctagagcagtattt

SEQ ID NO: 6602 - DNA, 637 bp, Glycine max
gttgagatgtgtcctctctcttcatcccttctcttctttaccagaagattattccacctaaaaccgcacctcgccacactgctgcaccctcaccctccattattctttcttcttctctctcttttgtgttttggggaaaagagaagaagtgaggaaccgaagaacgaagaaaagaaaaagaaacaaaaatggctgaatcaaaattattggaccgtggaagttggaagaaacgcgattatctgatcaagcttctcctaatcggcgactcttccgttggaaaatcctgcttgcttctcagattcgttgttgtggatcgggacttagcagtgagacaatctcggagaatggacaccattggattgggcttgatatttcagcatcaattcctatttattttgaatttttatatatttgttgctaactctatttattcgcgttcaatgtataagatgtcgcggtgcagcgagaggttcagggtgaccttttacttggtgacatgggtcagggtctaggaatttgtcctggagttttggatggagccattagtatatctgctgttcaggtctcaatacggaaaagattgaaaagtgcatgggagatccagacgccgataccgataatcctgttttgaaagaag

SEQ ID NO: 6603 - DNA, 347 bp, Glycine max
gacagagagaacgatctttgcgtttccgagtctcgaagtcctctgttttacactgctgcgcgagacttcatttcattttgtgattataaatacgcaactcaattacccaacccaactttcttttctttaacagcaacaacatcaaaattcccacttcctttttctttttttttctttaataagaaacctcgagaagaaagtaaaaggttcgtttttacccttctttcttcccagaagcgatctctaaagccgacccatttcggaattcggaaaacccagtgctgatcgctctctgggtgttcccaaaatgaagcttcggagatctttgctgtgcgtctttctagggt

SEQ ID NO: 6604 - DNA, 507 bp, Glycine max
gttggaacgcaaagaaaactattagggtacgtgccagaggcaaagaaagctgcattgcaaaacctacaagacgtgcttcttgagcccccacgtgcagcttcagggaaatcaagggtgtacttgaagcgtacgaagtacttgcctgatttgatgggtgattccctcgagggttaccctcgtcgcgttttcattgatgtgggcctgccggagaaggacggagggagtgccaccgattggtttcgcaagacataccctacgaggaacaaggactttgagatgtataagatcgagacggtggcggagggtggtccacagatcgagatgtcggattggttgaggaacaatgtgtgggaggaagaatatgtggtgatgaaatcagaggctgaggtggtggaggagatgatgaggagtaaggccataatgttggtggatgagcttttcttggagtgcaagccacaacaagggaatgtgaagaagaagaatagaagggcctattgggagtgcttg

SEQ ID NO: 6605 - DNA, 449 bp, Glycine max
cggtacgcgtgggtggacattgaacgttttatgtactatgaattgtgggctgagggtttaattatttcagttggctggtttcttaaactggaagcaaagaggtaggttgttcactccctttgagcaatacctcttccgcgctcctttttgtttctagctggtgggttttgaattgaaaccagggattaatttaatcatgtgaatgttttttctagaggcaagtggataatctcccaattgcttgctgctaaggtaggtgttgaatatttcaggtgagtgctgctttcaagaaaatgtgcctaatacttgcttggaaattaaaccatgtgtcattatgtggataaatgcttgcattcctagctcatcccatgtggcatctggttcaagcgggtgatggcattaattaatagaatgctttatgtcagtcatagtgccataaatcaataaat

SEQ ID NO: 6606 - DNA, 917 bp, Glycine max
acggagtggcggtagatccgggcctcctactggatatgacagcacttatggtgctggtaatcgaggtggatttggtggatcttctgctgagccccctgctgcagtgagacagtgtgatgagaattgtgatgatacatgtgacaactctagaatctacatctcaaacctaccaccagatgtgactattgaagaattgagggaactttttggaggcattggacaagttggaagaataaagcagaagaggggctataaagatcagtggccttggaacataaagatttacactgatgataatggaaacaataagggtgatgcttgccttgcttatgaagacccttctgcagcacattctgctggcggtttttacaataattatgatttgaggggttacaaaatcagtgttgcaatggcagataaatctgcaccaagagctccacctgcatataaccaagggggcaataggggtggctatggtggagatagacgcagagacaattatagcgctggacgtggttctgggcctgataggcgtgatcattatggaaatcgttctcgtccatactgagagcttggacattgaacgttttatgtactatgaattgtgggctgagggtttaattatttcagttggctggtttcttaaactggaagcaaagagaggcaagtggataatctcccaattgcttgctggtaaggtaggtgttgaatatttcaggtgagtgctgctttcaagaaaatgtgcctaatacttgcttggaaattaaaccatgtgtcattatgtggataaatgcttgcattcatagctcatcccatgtggcatctggttcaagcgggtgatgacattaattaatagaatgctttatgtcagtcatagttccataaatcaataaatcttggttacaatatttcaagtg

SEQ ID NO: 6607 - DNA, 975 bp, Glycine max
cggctcgcactactcacaactcacagcacaaaccgtaacagaaccaaacaatgagaacccaacggcttaaccatctccttctctccctcttcctcttcgcagccgcattctccagcctccacccgacggccaccgccggagacgaaggcgcaccgtctgcaggcgacggcgaccgcgacgccgatttcatccgcactagctgcaacaccacgctctacccggaagtgtgtttcacctccctctctcgctacgccaatgcggtgcagcagaaccccggccatctggcgcgtgtggccattgccgtaagtctctcgaaggttcaccgtgcggcgtcctacgtctccaacctcacgcgcgacgccgactacggcggaagcacgcgcgccgctcttgctctgcacgactgcttctcgaatctgggcgacgccgtggacgaaatccgcggctcgctgaagcagatgcggcagattggatccgccggcgccggcgcgagttcgttcctgttccagatgagcaacgtgcagacgtggttgagtgccgcactcaccgacgaagagacctgtacggatggattccaggacgtagcggactgtcccatgaaaacgggtgtatgcgatcgcgtcagcaacgtcaaaaagttcaccagcaatgccttggcgctcgtcaactcctacgccaacaagggaatgccttgattgtgttacagtctgattttattacttttcgagatttacaagttaaagaatagattgtgttaaattttccgtcaaaaaacaaaaagtgcagtgtctgtgtgggtgggtggggggggggacgcgtgagtccctctttcttgtatgtaaattttggtattcttgtagacagtatttgctgtcacgcaagaaagtggagaaacgcatcacttcattcacgtgatagaatggagagtgtagatatatattagaccaaaaatatcaagtgaaagtagagtttgcc

SEQ ID NO: 6608 - DNA, 714 bp, Glycine max
  unsure (1)..(714): unsure at all n locations
cttgatgcatcgtgcgccgagttgancatctggaactggttcgttcagtgcttcggagctggatcaggaactggatttcgcgtctgcgttcgcggcttgtaaatcgttggtttgtttgtctgggttcagagagatttggccggattatctccctgctatttatccagcttgtgccaatctcatatccttgaatttcagctatgctgatatcagtgcggatcagctcatatcggtcatacgtcactgtcataagctgcagacgttttgggtcctagataccatatgcgatgaagggcttcaagcagtggctgagacttgcaaggatttgcgtgagcttcgggttttccctgtcaatacccgggaggagatagaaggtcccgtgtctgaggtggggtttgaggcgatttctcgaggttgtaggaaactgcagtcgattctgtttttctgccagaggatgacgaatgctgccgtggtagccatgtcgaacaactgcccggatcttgtggtgtttcggttgtgtataattgggcggtatcggccggaccctgtgacgctagaacccatggatgagggttttggtgccattgttatgaactgcaagaagctcactcggcttgctgtgtctggtttgctgactgatcgggcttttaactacattgggacgtatgggaggttgattacgacgctgtcagttgcctttgctggagacactga

SEQ ID NO: 6609 - DNA, 1574 bp, Glycine max
tcggtattctcctcattcggctctagcacggtaccaaaaccctaaacccttcttctctgatatttaaaacctctctcaacaccttcacctatctctatttcctttctgatcaatcaatctcctcttctcttccagccatggcctccttgctccgctctctccgccgccgcgatgtcgcctccgcctccctctctgcttatcgctcgttaacgggcagcaccaagccagcatatgtagctcacaactggtctagtttgtctcgaccattcagttcaaggcctgctggaaacgatgtcattggtattgatttgggtacaaccaattcatgtgtttccgttatggaaggaaagaaccccaaagttattgagaattctgaaggtgcacgaacaacaccatctgtggttgctttcaaccagaaaggggagctgcttgtaggtaccccagctaagcgtcaagctgtaactaacccaacaaacactctctttggtaccaagcggttgattggtaggcgctttgatgatgctcaaacacaaaaggagatgaaaatggttccattcaagattgttaaggctccaaatggagatgcttgggtggaagccaatgggcagcagtattcccctagtcaaattggtgcctttgttctcaccaagatgaaggaaactgcagaagcttatctaggaaagtcaatttctaaggctgtaattactgtaccagcttacttcaatgatgctcagaggcaggcaacaaaagatgccggtagaattgctggtcttgatgttcaaagaatcatcaatgagcccactgctgctgcactttcatatgggatgaacaacaaggagggtctcattgcagtttttgatcttggaggtggaacatttgatgtgtccatcttagagatttctaatggtgtttttgaggtgaaagcaacaaatggtgacactttcttgggaggagaggattttgacaatgccttattggattttctggtgaatgaattcaaaagaactgagagtattgacctttcaaaggacaggcttgcactgcagaggcttcgtgaagctgctgagaaagctaagatcgagctgtcttcaacatctcaaactgagatcaacctgcctttcatcactgctgatgcatctggtgcaaagcatctgaacataacattgacaagatcgaagtttgaggctttggtgaatcacttgattgaaaggaccaaggcaccatgtaaaagctgcttgaaggatgctaacatctctatcaaggatgttgatgaggttcttcttgttggagggatgactcgagttcctaaagtccaagaggtggtttcagagatctttggaaagtctcctagcaaaggagtaaaccctgatgaggcagttgccatgggggccgcctctccaaggtggtattctacggggggatgttaaagagctactactcctagatgtaacaccactctctctcggtattgagactttgggtggtatctttacaagattgatcaaccgcaacactactattcctactaggaagagtcaggtcttttcaacggagctgacaatcaaactcaggta

SEQ ID NO: 6610 - DNA, 468 bp, Glycine max
ttccccacgggtccgttccaaagcccttgtttcactttttccaatccgatatggccgccgcgaccgccttgctccgctctctccgccgccgcgaccttccctcgtcttctctctccgcctttcgttcgttgacgagtggcacaaagacatcatatgtagggaacaagtgggcaagtttgtctcggccgttcagttcaaagcctgctggtaatgatgtcattggaattgatctgggtactaccaattcatgtgtttctgttatggagggaaagaatcccaaagttattgagaattctgaaggagctcgaacaacaccatcagtggttgccttcaaccagaaagcggagcttcttgttggtacaccagccaagcgtcaggctgtgacaaacccaacaaacactctttttggaaccaagcgtttgataggtaggcgttttgatgattctcaaactcagaaggagatgaaga

SEQ ID NO: 6611 - DNA, 460 bp, Glycine max
aggggagcccaatctattcttcttgttcatcatgcctggagctgttagggttttggttttggtttctccgaccttgaacgcttcccatcttggtgagtaacacgaatctgaggaaaaaaaatgtcgattatgcaactttacgggcgcagcaagagcgtggtgaagcggtcgaagaagtacttggaagaagcgctttacatgaagctcttcaaagatggaagctcccagctcatcgttcgccagagcctcaacaacttcgtcaagagccgaaagcgcgtttacaaatgggaggtaggcgacacgctcaagaagcttcgcgatcgcaagctctatcaacccgctcttaagctatcagaaaccatggctaagaggaacatgatcaagaccgtcagtgaccatgcgatacatcttgaccttcttgcaaggctcgaggaatactgctgctgaaaactatttgtta

SEQ ID NO: 6612 - DNA, 932 bp, Glycine max
gctcgagattttgcgtaagtgcgagacagagaggtggtggaaagctggttaaacattcgcaatcccgacacaccgccaaaaaaccctcgtacccggtttcgatttccaatgggttgcacctgacctaggtttccacctttctcttccttcatatctttgttccttcttcccattcctcttctcttctcgctgccaacaattcctcaattctccctccatcatacgccatgtccaacagggtttgcaagttctatgcccgtggagcatgtttgaagggggatcaatgtgattttgctcatgagaaaaaggatgatatttgcagctattataaaaaaggatcctgtgcttatggtagtagatgcagatataagcatgtcaaagcttctcaagcgtcatcttcagcaaatggacgccattctcctgttttggatcctgttgtgaatcataccattaaaggaacatcaagttgggttccaaaggctgtgaagtcatcttcatcggacaagcgtgcaaggagctcacaacaaaagaatctgccctctcttgaaaatgatgttggtcaatccagtactagtagtgttataccatctgaacatttgttctgtgcatttgctgctgccaactgcccccttgaagataaatgttctcgcattcatggaaatcagtgcttatactgtagaaaattttgcttacatcctactgatcgaaaggaaaaagaaaaccatttgagaacttgtgagaaaaaggaaaaataccttcaggctttgaaagatagtcaagaagtagagtgcaatgtttgtttggaacgtgttctgtccaaacctaaaccagctgattgtaggtttggtctgcttcctgaatgtgaccatgctttctgtttatcctgtatccgcaattggcgtaatagtgccccaacctctggaatggacatc

SEQ ID NO: 6613 - DNA, 553 bp, Glycine max
gagagtgtggtggatgagctggctttacgttcgcaattgtaatttaacggaccccgacacaccgccaaaaaaccctcgtacccggtttcaatttcaaacaaatgggtcgcacctgacctaggtttccaccttcatatctttgtccctttctcttctcttctcactcctaagaattcctcaattcttactccatcaccccaccatgtccaacaggttttgcaagttctatgcccgtggagcatgtttgaagggggatcaatgtgattttgctcatgagaaaaaggatgatatttgcagctattatcagaaaggattctgtgcatatggtagtagatgcagatataagcatgtcaaagcttcccaaccgtcatcttcagcacatggacgccattctcctgttttggatcctgtggtgaatcatatcactaaaggaacatcaagttgggttctgaaggctgtgaagtcatcttcatcggacaagcgtgcaaggagctcgcaaaaaaagaatccagcctctcttggaaatgatgttggtcaatccagtactagtagt

SEQ ID NO: 6614 - DNA, 712 bp, Glycine max
gatggcctccattgttccttatctttccgcattgccacccttctttctctctctctctctctctctctctgttttctctctctcgtctcacttgaaactccacaacccaattttcttttcctatgacccaattccaaatccaaatcaccaattctaattccattcttcaggagttgaattgaattcgtgatgaagagggaccacaaagatagctgcggcggcggcggcgccgccggagggactgtgaagggtgagtgttcctcaatgcagtcaaacgggaaggcgaagatgtgggaggaagagcaacagcagcagcagcagcaacaacagcaacaacaacaacaggggatggacgagttgctggcggcgttggggtacaaggttcgtgcttccgacatggctgacgtggcacagaagctggagcagttggagatggtcatgggttgtgcccaggaagacggaatttcccacctggcctccgacaccgttcattacgaccctacagatctctattcctgggtccaaagcatgttaaccgaactcaaccccgaacccaacaacaacctcgatccatcttctttcttgatcgacaacaacaacaacatcatcaacagcacagcccctgtttttcgcgacgattccgaatatgacctcagagccattcctggcatagcagcctaccctcctcctcttcctcaagacaaccacctcg

SEQ ID NO: 6615 - DNA, 583 bp, Glycine max
gatcacactcaacatcgacacttttcacataaaggaaaaaagaaaaagaaataaagaattcgttccattattatggcctcccttgttccttatcatttccaatttccacccttctttctttctctctccgtttcccctttagacctctctctcacttgaaactccacaaccccattttcctttcctatgaccctattccaaatcaccaattctaattccattcttcaggtgttcaattgaattcgtgatgaagagggatcaccgagatagctgcggcggcggcggcggagggagtgtgaagggtgagtgttcctcaatgccgtcgaacgggaaggcaaatatgtgggaggaacaacaacaacaacaacaggggatggacgagttgctggcggcgttggggtacaaggttcgtgcttccgacatggccgacgtggcacagaagctggagcagttggagatggtcatgggttgtgcccaggaagagggaatttcccacctcgcctccgacaccgtccactacgatcccacggatctttattcctgggtccaaaccatgttaaccgaactcaacccttgacccaac

SEQ ID NO: 6616 - DNA, 330 bp, Glycine max
tgcacaaccaccacaatcgctgccacctttttcttttctctttctttctcctatcaaagcccccccacttttccgatggccgccgtagcatcatcaccgacgccacgcaagcctcgatccaaaaacctcgagaatttcgctcccaacaaacaacaacaaagccctgttttcaaaccctcttgttcctcttcttcttctcctctcgtgaaaccaaagaaccctaataataaagtcaagtacttctcccctcagaacaagatccggcagagaaagttcttggtcgcaaagaagaagaaagagacgaagaaggaagaaaaagagggttcgggt

SEQ ID NO: 6617 - DNA, 339 bp, Glycine max
gcactatggcagctattgtttatattctcctgataaaaagaggaagttgaagttgggttgctgcaacaatggaacctgctactaataacaatccttctccttctgctcatgcttcattacatgaaaccaaatatattgagagggtgaaacatgccctgatcgactttggagtcccagaagagctaaggttgtctgatcgtagcatctacaaggttccttgctatctccgaaaggtgaaggaagatgcctacactcctcagtgcatctcaataagttcaaattacttcaaaaaagaagaactcaagccaatgcaagagcataagctaagatactaccaat

SEQ ID NO: 6618 - DNA, 662 bp, Glycine max
  unsure (1)..(662): unsure at all n locations
agaaaacgacagangggggacagaattgagcagaatgatagcgaaaaccaaaaaacaagtgtcatcaccttcttcttcttctttccctgattctgttggttccatctcttcattcataccttgatccgtgatctcccaatttctcacttgaaagtatgaagaaagaatagataagtaatggcaggagcagaagcaagggctctgtggcagagaactgctaatcgttgctttgtccaagaagatgcaaaaagagctcccaagttggcttgttgccaatcttcatgtgcaacatcaaaatcagttgatactggacctgccagtacagcagatgaatctgatcataatacagttaatgttacccattttaacaggaaatcgtcaatttctaatctatcatcagactgtaggtggtggttgcattcacaacctaattatgggtatcaaaagggtttaacatatgaacagttaaatgcattagaggatgaggtagaaactttgttagctagtgatttaagtaagaattctgaagaatttcatgaattaatggatgtgatggaaaaacatgagacaatggacattgattgtgttggctgctctggatcctccaagaaagcaaatgacttttccttggaatccgattattcttggattgaaagtgataa

SEQ ID NO: 6619 - DNA, 565 bp, Glycine max
tttccgattgaaagtgataaggctttgccatggtggcggactacagatagagatgaattagctccatttgtttcgcagaaatctctcaatcatattgaaaattgtgatcttcccccaccacagaagaagcatcttagagggcacccatgtgctcatggtaatagtgacaacataaagacggcatcttatgactgggaagccaaatccagaagcttttccaatttgacagctcatacaccaggaagtttagattcaagattgatgcctaagaatcagggtcattctgccaatgaaggacttctacattttgcttctgacaaatgttcaagtcaaacccccaagcatgaggatctcaaaaagagtcaacaaactttcgatggagaccccagtaaagctcaactaatggaagcattgtgtcactctcagacacgtgcaagggaagcagaggaagcagcaaaaaaagcctacgcagagagagagcacattgttactctcattttcaaacaggcttcacaactttttgcctataagcaatggttacaattgctgcagctggaaacttctt

SEQ ID NO: 6620 - DNA, 590 bp, Glycine max
ggaaggaagagagattcaggagggagccagagtgagggatacagagaaagaagaaggataaagatttaaaattggaagaggaacaataggaagggaagggagaaaaccctaattaatagataatagaaagagattgcatgatcgatggaaaaaccctagaagaatcatcggagcaggcaggcaagggggcacaatcgacgacgccgtagatgcttgttgcggttggagcgtcgtgggatctgaattggttcctgcaactgttgctctccgtcatcgtcgtggccgttggggttcactatttcgtcaaggccaccgcttccaagtacttcttagtcgacgccaatttcaaaggggaccaccaccacgccctcgccgccgacgccatgcccggtgccctcgctgccgccgatcctctctgtgccgtctgcgccacgccagcccctaagaagtgctcgcgctgcaaagccgttagatcttgttcgcaagcctgccagcagtctcctcggatgtcatccgactcgccagtgtgcaaggatactcgtgagaccactgcaagacgctcggctcagaatggggtccttcatcgtggg

SEQ ID NO: 6621 - DNA, 521 bp, Glycine max
tatcatatgatcatcataacgttctgttcccttaagttgaaaattgctgtgcaaaatgaatctataatactggctattcagaaggggcaaaaatcagaaatcaaaagaggggacattctgtgagagcatcaaatagcatcgagtaattcatgaggtttgcaatagctgacttgaaagtcgacactgaagatgggagaaactacagaaaggtatgcagttgtgacgggtgcaaataaaggaattggattagagatagttagacagttagcttcagctggaatcaaagtgttgctcacagcaagaaatgaggagaggggtctccaagcactgcaaacactcaaggactcgggtctatctcaccttgtactgtttcatcaagttgatgtggctgatgcaacaagcgtagcttctctggcagattttatcaaatctaaatttggaaaacttgatattctgattaacaatgcagggattggtggagttgtaattgatgacactgatttaatcactacagccatcat

SEQ ID NO: 6622 - DNA, 483 bp, Glycine max
ctcgacgggtttaaaagaaaagaaggtagagaaggtgttgtgaaaggttaagatcgagaaattagggtgaagtgaaggagaagctcttgagaaggcatgttctgtcgggaatgattgtagctgacttgaaagttgaaactgaagatgggagaagcaacagaaagatatgcagttgtgacgggtgcaaataaaggaattggattagagatagttagacagttagcttcagctggaatcaaagtgttgctcacagcacgacatgagaagaagggtctccaagcactggaaacactcaaagactcaggtctatcccaccttgtactggttcatcaggtggatgtggctgatgcaacacatgtagcttctttggcagattctgtcaaatccaaatctgggaaacttgatattctgattaacaatgcagggattggtggagttgtaattgatgacactgatttaatcactacagccatcatgaatcgt

SEQ ID NO: 6623 - DNA, 412 bp, Glycine max
actgaagatgggagaaactacagaaaggtgtagcacattggcattctagcttcttcttttatcttttttgtgtttggttttaaacacccaaattccaattctactgctgaacttaaattttacatttgttgaaccctttcacctttgtggggtgggggttgagtttgtcaggtatgcagttgtgacaggtgcaaataaaggaattggattagagatagttagacaattagcttcagctggaatcaaggtggtgctcactgcaagaaatgaagagaggggtatccaagcactgcaaacactcaaggactcgggtctatctcaccttgtactgtttcatcaagttgatgtggctgatgcaacaagcgtagcttctctggcagattttatcaaatctaaatttggaaaacttgat

SEQ ID NO: 6624 - DNA, 316 bp, Glycine max
gaagagtagaaatagaagtttggtttgtcatgtttaaaagaaaagaaggtagagaaggtgttgtgaaaggttaagatcgagaaattagggtgaagtgaaggagaagctcttgagaagctgacttgaaagttgaaacagaagatgggagaagcaacagaaagatatgcagttgtgacgggtgcaaataaaggaattggattagagatagttagacagttagcttcagctggaatcaaagtgttgctcacagcaagaaatgagaagaagggtctccaagcactggaaacactcaaagactcaggtctacccaccttgt

SEQ ID NO: 6625 - DNA, 535 bp, Glycine max
tagggctcgagaaacaattctattataattctggcaggctcgtgagttgtatatgacatgtttctctgtgcacccattgttcttgtctcaaagtaaaagtgtgtgtatataaaagaggtccctcttctcagttctttgaaaacctcaacaactcaacacgttgcctctactctctgcagcctttaatttggttgcaggcacacaaccatggctgctctctccaacggccacgacgcttccttcttcaagatgccctccatcaagttcaccaagctcttcatcaatggggaatttgttgattccctttcagggagggagtttgaaacaagagaccccaggacaggggaggtgattacaagaatcgcagaaggagcaaaagaagacattgatgttgctgtcaaagcggcacgtgacgctttcgactatggtccatggccccgtatgcccggtgctgaaagagcaaaaatcatgatgaaatgggcagacttaattgatcagaacatcgaggaaatagcagcattggatgccattgatg

SEQ ID NO: 6626 - DNA, 520 bp, Glycine max
ctcgtgagtcgtatgtgagatgtaccttttctctgtcgactggttgttcttgtctcggagttaagtgtgcgtaactctgtatatataaaagaggtcccattctcactttttcgaaaaacacgtttgcctttgatcttcttggctctactgcttttatttgcagacacccaattaacgatggctgctctctccaacggccacggctcttccttcttcaagatgcccccaatcaagttcacaaagctcttcatcaatggggaatttgttgattccctttcagggagggagcctgaaacaagagaccctaggacaggggaggtgattacaagaatcgcagagggagcaaaagaagacgttgatgttgctgtcaaagcggcacgtgcggctttcgactatggtccatggccccgtatgcccggcgctgtacgttatcatttctccatttctttctctataactgttgtgttgtgagttatgacaattaatttgtgggtctcactaattaaatctactgcatttt

SEQ ID NO: 6627 - DNA, 374 bp, Glycine max
gaagacgaagatttcaactatcgcttcaattccatcagcttcaaagggaaggaagggtggattgtcggaaaacctgcgattctgttgtacacttccgatgccggagacagttgggagaggatacctctcagtgctgaacttccaggggatatggtgtacataaaggcgaccggtgagaagagtgcggagatggtgaccgacgaaggtgcaatatatgttactgcaaacagaggttacaactggagggctgctgtccaggatactgtgtcagctactcttaacagaacagtttctagtggtattagtggtgcaagctactacactggaactttcaatactgtcaatcgctctccagatggaaggtatgttgcagt

SEQ ID NO: 6628 - DNA, 540 bp, Glycine max
gtgctcctcacacaccctatcatatcatatgaatgaatctgcactctctttgaaaactgtcacgctttcaccggcgtcggaaacatcgtccggttagggttccggctatcgctaagggcacggatcataaaatcttccagaagcttctatgctattactcagtattattaccatttgccaaggtgttgttaggcaccatttttatcacttgaagtcagtcagcaacaacttttctgcgaatttttcaggaatattttcgcctgaaaaagttggagcaaatgtctttgcaaaacaagggattttggatggtaaagggttctggacacattaatgacagagatacagtatttgataatcccaccaaaattgaaccaaaacgacctcatcaatggtttgttgatgctgctgaagtagatttttttccaaacaagaaacaagccgtagaagatgcagatgaaaaatctagtcctggattttcaaatgtaaatattcctccctgggagaacaatcccaattttcattcagtcccaaaccaattta

SEQ ID NO: 6629 - DNA, 660 bp, Glycine max
tatgaatcggcactctctttgaaaactgttatgcgttcaccggcgtcggaaaggtcgtccggttagggttccggccatcgctaagggcacggatcgtaaaatcttctcgaagcttctatgctattactcatctttgcaaaacaagggattttggatggtaaagggttctggacaaattaatgacagagagacaatatttgataatcctaccaaaattgaaccaaaacgacctcatcaatggtttgttgacgctgctgaagtagatttttttccaaacaagaaacaagctgtagaagatgcagatgaaaaatctagtcctggattttcaaatgtaaatattcctccctgggagaacaatcccaattttcattcggtcccaaaccaatttattggccgattatttgggtctgaaaccaggcctgtcaatttcactgagaagaatacttcatatgttttggctgatgattctaatgtgagatcaaagatggttgccaatcaatatggagatgaagcatcttttggtttgtctatatctcattctattgaagattctgaagcatgtgtaaattttggtggaataaaaaaagtcaaagtaaatcaggttaaggaagttgatgtacaagctctggaagggctaattttggtaagccggtaatggtg

SEQ ID NO: 6630 - DNA, 347 bp, Glycine max
ctcaagaaaatggagcgttacgtgacgttcacggcaacactctaccgcgaaatggaggagctcacggttcttgaaaactccttaagaaaagccctgaatcaccctgacggcaacagcgttgggagcaaagatcagcagaagctctacgagcttcagcagaagatcttttggcagaagcaagaggtgaaggatctaaaagaaagatctttatggagcagaagcttcgacaatgttgttgtactcctcgtaaggttcagcttcaccgttttagcaaggattaaggttgtcttcggaatccggtcacacatgccttgtctgtctcgtactttgtcggctttccgcactgt

SEQ ID NO: 6631 - DNA, 752 bp, Glycine max
  unsure (1)..(752): unsure at all n locations
cggaatcggctcgaatcgagcgattcggctcagagnagaatacacagggacaatcacatagatttgtattcttatccaaatggaggatcttacatagattgcatgacaggaatgagactctatattacagagttcttattgataacatcaaagagtttgctccaataatctatactcctacagttgggttagtgtgtgaaaattattccgggttatttagacgcccgcgtggaatgtattttagtgccaaagataaaggagagatgatgtcaatgatctataactggccagctcatgaggtagacatgattgtcttaacagatggaagtcgaattcttggcttaggtgaccttggagttcagggaattggaatccccataggaaaacttgatgtgtatgttgctgctgctggtatcaacccacaaagaatacttccagttatgctggatgttggcaccaacaatcaaaagttacttgaagatcgcctttatttaggacttcgacaaccaaggttggaaggtgaagagtatctatcaattatagatgaattcatggaagctgttcatgctcgatggcccaaggctattgtgcagtttgaggattttcaaatgaagtgggcttttgaaaccctgaaaagatatcagaaaaagttttgcatgtttaatgatgatatacagggcactgcaggtgttgcacttgctggactattgggaactgtaagagcccaaagccggccattgactgattttgtg

SEQ ID NO: 6632 - DNA, 700 bp, Glycine max
gcttttcagaatttttaattttctcgggaaaaatgtggttccacctaagaaaacgacactagcattgcatagcaatagttgatttttctccagaaaattaaggagctcaacttagtagtggtaagaagtaataacgcgcgcacacacacatacacaaagacagtgacagtggtgttgaattttcctcaaagaggatgtggaaactcgtgcgatatgccgccgcctccaacctcgcccgatcgcggcggttctccgccgcgattcctggtccgtgcattgttcacaagcgcggtgccgacatactccatgacccctggttcaacaaggatacagggtttcctttgactgaaagggataggttggggcttcggggcctcttacctcctcgtgttatatcctttgagcagcaatatgatcgctttatgaattcattccgatctttggagaataatactcaggggcaaccagataaagttgtttccttggcaaaatggaggatcttaaatagactgcatgataggaatgagactttgtactacagagttcttattgataatattaaagagtttgctccaataatatatactcctacagttggattagtgtgtcaaaattattcagggttatttaggcgtccacgtggaatgtattttagtgccaaagataaaggagagatgatgtcaatgatctataactggcc

SEQ ID NO: 6633 - DNA, 527 bp, Glycine max
  unsure (1)..(527): unsure at all n locations
attcaacactcttccttctcctccttcctccaacaaagcaacttttttttttctcttcctttccatttcctaatttccatcatataaaatagtgccacccatcaccacaacaataacaaaatcagcagcatcagcagaagcagaagaagcaggtccaaacttcaattcatggaagtgtgatatcttaggtagttctaatctccacaaaaaacctaaccctaaaaagctaacctttttttttaatattgttgttttttttccttttttacgtaccctagatgttagagccatggacataaccccaacagcaacgatcatcaacaccaccaccactcccagtgcagcaaaatccccggaacatgaaacagaaacaccgaccaggatcaccacccccatcactcccacaacgacaaaaaccttatctttctcgaatggtgtcctcaaacgccaccaccaccaccaccttcaccaccctatgcctgcggtggttacctacaaagaatgcctcanaaaccacgccgccaact

SEQ ID NO: 6634 - DNA, 413 bp, Glycine max
gagaggcctgcccaacagtaaattattataatatgcatatggtgctgcagctgtgctgatttggcattttctggtcttgttgcttgcttccatttgatgtgtacatagaggagcaagcttagctactttcggcaaatgaactcagagacccaaagatagcgagtgttgtatgttttagaactgagactaatagtatatatttgtgtttgggatttgtcatcttggctggttgagcattcttgtcaaatgaggtaggtgatttattttgacacgcagattcaaactgcatgcaatacacgcgcaagatgttttaaagaccacgccagaaagagcacaagagtttaagggaaagccttgtttcgaaaaaaattcccaattttcaaggaaaagagaaagagagaaaaaatggattg

SEQ ID NO: 6635 - DNA, 596 bp, Glycine max
cattgaccctattcctttctttattttcggattaaattaactaacatcaatttttgttctttggcttcagtgataaattgtcagcatctatttcaaggttccgtcttttttctgcccccccccccccagaaattcataaattcgtggaagttcgccgctcgatttgtgcattgaattggtgctgcatttactcaacgaattgaacaaggtggcatgatgcgatgagttggtgttctatgagggtattctcagtgtaacactctgaatttgaagcaaaatgttcagtccaagcatggattctgcaagggatgcgagtggtgtggcagggaccgtgctcattcccatgcggtttgtgtggccatacggaggaagaagtgtgtatctaagtggttctttcacacggtggtctgaacttctacaaatgtcgccagtggaaggttgcccaactgtgtttcaagttattcatagcttgatccctggtcatcatcagtacaagttttttgttgatggagaatggcggcatgatgaccatcaaccttgtgtatctggagaatatgggatagttaacactgttttattggctactgatcctaata

SEQ ID NO: 6636 - DNA, 639 bp, Glycine max
tatatttccgctctaacaatgattagtcagtagcagcttcataattcattgaccctattcctttctttattttcggattaaattaactaacatcaatttttgtttttggcttcagtgataaattgtcagcatctatttcaaggtttcgtcttttttggtatttttcttttcacggtcggattctttcctacttacgcatcttcgattttcttttctcaacctgtttcttcttatgtttcaatagggtttctatattttttcttttttttttcctcagtgccttttttcccccagaaattcataaattcgtggaagttcgaggctcgatttgtgcattgaattggtgccgcatttactctacgaattgaacaaggtggcatgatgcgatgagatgatgttctatgagggtattctcagtgtaacactctgaatttgaagtaaaatgttcagtccaagcatggattctgcaagggatgcgagtggtgtggcagggaccgtgctaattcccatgcggcttgtgtggccgtacgggggaagaagtgtgtatctaagtggttctttcacgcgggggtctgaacttctacaaatgtcgcctgtggaaggcctgcccaactgtgtttcaagtattcatagcttggg

SEQ ID NO: 6637 - DNA, 589 bp, Glycine max
gggatctagggttgctcaaacctaaaagactaaactcacgggtccatacgttttccttcatccagatctggcagactagtatccgatcctctgtcctctcgaagctttcatcgttcaacatattctcaccatctcagtcatgggcctgctatcttgttttaggtctaccgtcctgagaaaatgttccaaaggaagctctggcatgtcaagattcctgtatacgaacaattttcaacgaaacttgatttcgtctggtggcaatgaatcgtattatgggtattttaacaggagatcatacacttcactttatatgggaactggaactgtgggtgggattacaagtgctagaatcagggtgccaaatgtaggatgtgaaggattcatgtgctcaagtcatctgtcaatcactcaaagaaattcaagattgatccattctactagcaagattgttccaaattctgaaattcagaatataactactgagatggtgaagacaccagaggtctcaagatggatggatcaagtcatccctacaatagccccttgtgatgagcagaacatggaatagggttcagatgcagcacactat

SEQ ID NO: 6638 - DNA, 1254 bp, Glycine max
tgggaattcactttactccaatccttatgcttggaacaacttggcaaatatactcttccttgattctcctgctggtgttggcttttcatattctaacacaacatctgatctgtatacagcaggtgaccaaaggacagctgaagatgcatatacattccttgttaattggtttgaaagatttcctcagtataagcatagagatttctacattgctggagaaagttatgcaggtcactatgttcctcagttgtctcaacttgtttaccggagaaataaaggaatcgagaatccagttataaatttcaagggttttatggttggaaatgcagtcattgatgatttccatgattatattggaacatttgagtactggtgggtcaatggtttgatttcagattccacatataagaagctgggaattgcctgtgacttttattcttctgagcatccaccagagaattgtgtggaagctctcgaacttgcaactttggagcagggaaacattgatccatatagcatttatacaccagtatgcaatgatatagcagcaatcaaacgccgtttggggggtcgctatccatggttgtctcgagcatatgatccctgtactgagaggtactctaccttgtatttcaatcgtccagaagttcagaaggcacttcatgccaatgtaactgggattccttattcatgggcaggatgcaatgatgttattgtggaaaattggggtgattctccgctatctatgcttccaatatatcaagaacttattgaaggtggtatcagaatatgggtattcagtggagacactgattcagtagttcctgtaaccgcgtctcggtattcaatccgtgccttgaacctatctaccatcatcaattggtacgcttggtatgataatgacgaggttggtggctggagtcaagtttatgaggggcttacattggttacagtaagaggggcagggcacgaggttccacttcataaaccccgccaaggttttatccttttcaagacattcttggaggacaagaacatgccattgccaattgatagacgccttagtggcccaactgataaatcactgaacaagaacattcggttggctaggcccatacgcaagatcactatgccatcatcgacgcagggctttacttattagatttctatctttgttgttctacaataaaacaccccttctacaataaaacacccctttctgcaccgatttagaggggctaaaaaaaaaaacaa

SEQ ID NO: 6639 - DNA, 907 bp, Glycine max
cattgatgttgaaaattgaagaacctaatctgattgctttggagttatggtcatcttttgggaagcaaagacatacctttcaaaggatagacgaagccacaaatggaacattcccccagactttttggtgcttctgacactcgtgcaccagagcttgtggattttccttcttctgaaactaatgcatcttcatctactgaaattgagcatattgcttcaaacagaacccatttaacctgtgttgaatcatcaagcgcctcaacttctgctcctccacatatgcatgatgaaatcactggtagttctggttctagtgcacttattgaatcaaatcgtactggacaaagtggcatttccattttacaaagcctaattgatcgtgctcgaaggaccgtgcgtggatctgccgatgatataggatggcttcaacgtgatcctggaatgcctccggttgaagatggaacagagaggttcctggaaattctggacaacatcaagcatggtgttcacaagttaccaaattcggtggtttatttgttaattccaggtcttttcagtaatcatggtccactttactttgtcagtacaaaagtcagtttttcaaaaatgggtttggcctgtcatatcgcgaagattcatagtgaggcgtcagttgagaaaaatgccagagagctaaaagagtacattgaggaaatttattggggttcaaataaacgtgttatgcttcttggacatagcaaaggaggagtagatgcagcagctgctttatctttgtattggtctgatttgaaagataaagttgctgggttggcattagcacaaagtccctatggtggaactcctatagcttcagatcttctgcgagaaggacagcttggtgattatgtaaatttacggaaacttacag

SEQ ID NO: 6640 - DNA, 387 bp, Glycine max
gcgaacgaacgaactaatcaatacaacgccatatctctgtgcatcgcttccttccctcgtcctcaattcgaatcaatttcctcaaagtcgctcccactttgcttcgcatcacaattcggaagaaactggtttcgatggtgcgagctccggatccgcagcatcgggaatcgaccacgccctttgtcgtacagggagagggtttgacaaatgatgggcttattcctcagatattttcatctatgccagctcgcaatgatgctgcttcttatcgtgcacaaacaacatcatacataactggatgtttctctgattattcagtggaacattcccccagactttttggtgcttctgacactcgtgcaccagagcttgtggattttccttcct

SEQ ID NO: 6641 - DNA, 845 bp, Glycine max
cactttttaggaggagagaaaacaagttataagtgttttatgaagtgtcctgctgctattcatctcattgttttttttttaatatttttggtttgtgcagagagacagtgtaccaaagcatcgacaatacataaagtctaaacctcctgaagcaatgggaactagtgtaagtagtaggattgtggaaacaaaaactaatcatgatatttctgttaagcaagagaactctttgtcttcggggatcccttcggttggttaccaagagatagatactgcaagcaatatcaatagggataaaattttggacagaacaaacaatgatgagaatcagcaaaggcctaaaaggaaacagatggaagatgatctcgatattaacgtggaggcaacgtttcagagagacctgactgtgaaagccgtcaactgtcagctacctaatgataaaaaagttaagcatatagatctttcagatacagttgtggaggcttctgcagttagttgtcagaaaatgccttggaatgaggtaaatggcaaatttgaagacagagaaagttatagcagggagctgcgaacaagttttggtggaattcacggatgttatgattctggagcctgggaatcttttaatggtagttctgcatcacttgtaaatgatcttggttcctgttctttaggggaggacaaacggtgcaaagaaccttgtgatgagaaaatcatccacgaggactttggagcgatggaaagaaccttctttcctgttgatactcgtaaaaaaaatgacttggggatggtgctgaatagcgagtcactgaatgaacctcgtgagtacgtggaccaagttcaagttg

SEQ ID NO: 6642 - DNA, 459 bp, Glycine max
ggggtatatttagggggaggaggatcaatcacttagattccacaaaaaagatatgtattcccagtttgaatgtgatgccaaatgagagagattttccaacagctgtcatgactttgtctgaaactcggtgttcacctaagcgcatggatgaagagttcattgaccaagatcacaatatggtaagtaggaattttgatggcaaagaaactatttttgaccagacacatttgggtttactagtaaacttagagagacaagacgctagaatcaacaccaaatctacatcagggattccaaccatcaggacacaattgtgtcaacaaatgaattccactggttcgtccctgagagatagtgttccagagcatcgacaatacatagagtctaaacctcctgaagcaatgggaactagtgtaagtagtaggattgtggaaacaaaaactaatcatgatatttctg

SEQ ID NO: 6643 - DNA, 439 bp, Glycine max
ggttaagttgaagtctccctccataagatgtatttaaagaatatacttattgcatatacttaggaagtgtggttctgttggtagataacaaaattaaaattgcattaatttgaagttttaataaagaaaagttggaaaatcttactggttaggtaattggatttttagttatctagacaagctaactattgataacacgatcaacaattgtacttactagtgaaatggacctaacctgccctcattttattttgaaatgaatattggcaaaagtatctccgaacttaatgatttggatagaagtatggtacttgatagaacattatggcggaagttgatccatgtagccgaccccacctagtgggataaggcgttgttgttggtggtggtgtatttgcaaaagtatctctggaatggtaacctattgtgttatgaaaat

SEQ ID NO: 6644 - DNA, 877 bp, Glycine max
acgagggaatggctactaactcggataatgcgaagactgttgccatgcccagccagaaatcaggcattgaccattttaacagtagtgaaactgatcctaagaagtcaggtgctatgaggagttctctttgggaaattgatactattcttcaccactactgtcctcctgcctcacggtttgctttgtctcttgcgaatgatttgacagtcagggcaaaaacaactgaagttaatgttggtgattttagtgctggttcatatgcaacaatccttggagcagagatatcacggagggtaaagcaggttcccctagcattcttcaaagcaactccttcctctttattttcagagactgattttgctggttggactttcaaatgtgaagaaacccccaaaatgatcaatgacaacaatgacagcactaaggatttatcgtaacatgaatggtgttctgtgaaatgacacaacagagtgctcgccatcttggaaatatgtctgcttgttcttgtttgatttgtttatttttactcgaggaaacaaatcatataggaagagggttttgggttggggggagcgccaggggacatgctcgagatcccttgtggctcactattggaacataagcttaaattaaattgaagttttaaattaatggtttggatagaagtatgatacttgatagaacattatggcggaagttgatccatgtaaccgaccccacctagtgggataatgcgttgttgttgttgttgttgtatatgtaacagttagaagataagttttgccactttctttttactgcagcagattaatatgttccccactctaaatgggaactaaatatttggaatgaaagttttgccatccattatcatttt

SEQ ID NO: 6645 - DNA, 439 bp, Glycine max
tcacaacttaacaatcttctctatcaccccatcttcatttttctcactcttgttagttattcctggtacccattttgaacagtgatgaagcgtcatcataggtcaccacaccaccaacagctcttctgggcaagggtgctcagtgcgcaagtcgtttaacatggggagctatgagtctgattacagtgctgaccctgttgatgatgattctgaaagtggttcagacaatgaagagcggggaagacagtcgcagtttgcggacaacagatgtaatgaagatgaagcttcatctgaatcatcagaatttcttccaaagttaaggaggcaaaagtcatcaacttatagatctcagtatataaacaaaaatgagctgagggtatgtgtggggacgtggaatgtcgaaagaaagcttacacctgatgaccttgatattgatgat

SEQ ID NO: 6646 - DNA, 929 bp, Glycine max
gccttagttaaacccgaaattcggtccaaaattgcaattctcaattcaaaaccaaaaattaaaattgacaccttccccgatggcccggtcttccccggtttcaccctttcaactttgcatgcttcccttttcattcttcttctccacttccttctccgccaaacttaaccctaccatcgattcactctcactctctttcccactcacctcactccctctctccacagcaaaacctctaaacagaaacccaaatctcagaaccctttcttcttcttcttcctacaacataaaatcctcgttcaaatactccatggccctggtggttactctaccaataggaacccctccacagcatcaacaaatggtgttggacacaggaagccaactctcgtggattcagtgccacaacaaaacccctccaacggcgtcgtttgatccatcactctcttcttccttctatgttcttccgtgcacccaccctctctgcaaaccccgcgttcccgattttaccctcccgacaacctgcgaccagaaccgcctctgccactactcatacttctacgccgacggcacctacgccgagggcaacctcgtccgcgaaaaactcaccttctccccttcccaaactacccctccacttattctaggctgcgccaccgagtccagcgacgccaggggcattcttggaatgaacctcggccgcttgtccttccccttccaagccaaagtcaccaaattctcgtactgtgtccccacccgacaacccgcgaacaacaacaacttcccaaccgggtcgttctacctcggaaacaacccaaactccgcgcgcttccgctacgtcagcatgttgaccttccctcaaagtcaacgtatgccgaatctagaccccttagcctacaccgtccccatgcaaggaataagaatcggtg

SEQ ID NO: 6647 - DNA, 400 bp, Glycine max
  unsure (1)..(400): unsure at all n locations
ccactctccattcaaaaaccaaaacagaaaaatcatggcttcctcaatggctctgtcttcccctgtttctctctttcaactttgcatgcgtctgtttgcattctgcttgttcttctccttctccacttccctcctcggccaaactcaaccctaccaccgactcactctcactctctttccctctcacctcgctccctctctccacagcaaaacctctaaatactaacccgaaactcagaaccctttcatcttcttcttcatataacataaaatcctcgttcaaatactccatggctctgngtggttactctcccaataggaacccctccacagccccaacaaatnggtgttggacaccggaagccaaatctcgtggattcagtgccacaacaaaaccccc

SEQ ID NO: 6648 - DNA, 597 bp, Glycine max
  unsure (1)..(597): unsure at all n locations
cgtccactcctacctatatatacataataaccataaaccgtttcctctgatcgtgtcagaaatataaaagtttatttcctctgatcgtgtggtttctgagttctaagcactcacctctttcatacacgtttgttcgcttgttgagaagccatgggcgaggatttcgagttcccaagtgctggcaacatggaaatgcctgaggaggaagagtttgagagtccgatcctgaaggttggggaggagaaggagattgggaaaatggggctgaagaagaaattgctcaaggaaggtgaaggttgggacacccctgacagtggagaccaagttgaagtgcattatactggaaccttgcttgatggaaccaaatttgattctagccgcgataggggcacccccttcaagttcaagctaggccaagggcaagtgataaagggatgggatgaaggtatcaaaaccatgaagaaaggtgagaatgcccttttcacaataccccncgaattggcttatggagagtctgggtctcctcccactattcccccanatgcaactctgcagnnntgatgtgaagtgctgccttggacaagtgtgaaggacatc

SEQ ID NO: 6649 - DNA, 404 bp, Glycine max
ctcaattgtgattagaattgcttagcttacattctagaactttaatgtattggaatggtatgtcaatggcactgattggaacctatcttaattgatgtattttgaattcaacagtcgttgtacttgtattgcatgggtgcctggaggtgatggttcttttgttgtttctcacactgatgggaatttgtacgtatacgaaaagaacaaagatggcgctggtgattcttctttcccagttgtaaaggatcaaactcagttttcggttgcccatgcacgttacagtaagagtaatcctatagccagatggcatatatgccagggttcaattaatagtatttctttctcgatggatggggcattcttagcaactgttgggcgagatggttatttacgagtgtttgatt

SEQ ID NO: 6650 - DNA, 1336 bp, Glycine max
acgaggcaaagaagccttctcttcagaaaagacgagacgagacgagcgagatcttcattccatttatcattttaaataaaatcgcgtcttctcctctgtattgagacatggccgaagaagaagaagaagaagaatcagagctcagcgataagcagaaagtggagatcgcgaaatggttcctcctcaactctcctcccggagaaatccaatacgttgccaaagatgtgaaatcgattctcaacaacgacgatttgtacaaggaagccgcttccgaggcttttccctattacaacaaatcgcacttgatttccattccaatgcccaaccgaagcggagacgtactggttacttcgttcggtgagcttgagggtaatgcatttcttgaacctaggactgcgcaagtagcaattgttgatcatgctaaacaagtttgtacagaggtgagacctgccacagacgaagaactttcatctccatatattgaagaatttcgatgcaatctggatgctgaaacacttaaatatgttgaagaaacttatccaaaaggtttctgctctgtctactgtgtgagtgggaaggatgtagagggcccaggtgctgatttcgagcttgctgtggtgatttctgctgctaggcatagcccacagaatttctgcaacggaagttggtgttcaatatggaatattgagttcaaagatgaacaacaaacagtggaagtaaagggtaaaatgcaggtcggtgcccattattttgaggaaggaaatgtgcagttagatgcaaaacatgaatgcaaagatgcaactctttttcaggcccctgaagattgtgcacttgccataacaagcattattcgtcaccatgaaacagagtaccttgcttctcttgaggcatcatatctaaaccttcctgattctactttcaaggatcttcggagaaagcttcctgtcacccgcacgttatttccatggcataatactttgcagttcagcttgacaagagacatctcaaaagaacttggcattggaaagtaaatacactacattcacacagaacaaataaaagtttgtgtttactcggtggtgacaagttcctcatatattcactacatgtcatttgatcaagtcaatcattctttgggttgacgttcgttatattcactcatttgcttaacaaagtaccctcctttgtctgagtaagtgagtatcttccgctgatgtactgtagtgtactgtaattctttttttgacattatttgtatagcagaagagttcctgttgtttctagccaatagccatatcatcataacttcgaaaaatgttatttttagttattggtt

SEQ ID NO: 6651 - DNA, 400 bp, Glycine max
ctttggtcccgattctggcatctttcttagagatccctaactcacttgtctcttctcccacccttaaatccttccctctcctctcccgcaatcaattcatctctcacaacacaaaaattgttaaattcccaatccaatagtgttattagtccataaaaggaaaaaataaattaaaaatgaatgtgttggattctaatgtggaggctctagccttcaactacttgagcttcggcttgctcactgccctcaacaacctgtggacctggctcgctctcttaaccgccgccctcagcttctggaagattcgctccgcgggctgccccaagcccaagcccaagaccgaggcccaagcccaaccttttttcaggcctgaggctgtcgcggatttgttaaagtggag

SEQ ID NO: 6652 - DNA, 524 bp, Glycine max
cccacgcgtccggttcatctttcaggttctcctcctccttcctcctactctccgttgcttttcaaaattccccttcccccaaacggcgtcgtctctaacaagagctttctcacaaagcacctccatgtccataaaccttcactctcacgccttctccggcaaccctctgctctccaaattcccactccccggcaaccccctttcgccctctgcagctctcgaagctctcaacgcgcgaattagcctaaacaacactcactcttctccctccccgagcttcaaggtgctgcctttcagaaatgggaggcccttggcttcttcatcggccggtaccggcgactcgccgccgatttgggatctgggttggctcggcttggacgatctcaggggtattttcgagaattcaggtgcccagttgagcgtggacttgttggtgtatctgaattcgagttcagaggacgacgccgtttactgtgcaatcgatgtttctgataaagtacctgaattgggtagcaacaacgcgg

SEQ ID NO: 6653 - DNA, 611 bp, Glycine max
  unsure (1)..(611): unsure at all n locations
acggaacggaacaaaaggcgcacacaatcgccaaagagaaaaagaaccctcaaccaaacaacaacaacaacaaaaaaaaagccctagaaaagattttggagaagcaatttctcactcctgaaaatctcatcctcttcttctttacatttgttttggataaaacattttgctgatactgaattttattttctcttgttttcgtttcttttcgacctttttttttttctgcttcgttgttttcagggagaaagggataggagtaataaaagagagtgcattcggtttggttcttcgcctcgggactcgaatcttcgatgcctctctgttttttcttctctggcgcctctttttctattctcaaattagggtttccgtgagcgttcctttttctcgattctccgcaaactattatcattgttagggaaggtgatttgcgtttggacataatgtcgtcaaaatatcagattcttgacaaccgccctattaatcagtggaaggttacagagctaaaagatgagctgaagaggnaggaagtaagtatcaagggtttgaaggatgatttggtcaagcgtttggatgaagtccttcgtcttgaaagggaggctgacgag

SEQ ID NO: 6654 - DNA, 1045 bp, Glycine max
actaaataaacacaggtaccctgtcaacgttctcatccaccagcatcaatacccacacacaccttgttttcctttctatagagacacacggagagagtctcagagcaataaacacccttcaatggctaccactaaagtttacattgtttactattctacgtacggacatgttgagaagttagctgaagagattaaaaagggagctggttccgttgaaggtgtggaagcaaagctatggcaggtacctgaaacactttctgaagaggtccttgggaagatgggtgcacctccaaagagtgatgtaccgattattacacccaacgagctacctgaggctgatggcttattgcttggtttccccacaagatttggactgatggctgctcaattcaaagctttcatggatgcaactggaggcctgtggcgcacacaggcactagctggaaagcctgcaggaatcttttacagcactggttctcaaggaggtggacaagagactactccgttgacatctattactcagcttgttcaccatgggatgatttttgtgcccattggttacacatttggtgctgggatgtttgagatggagaatgtgaagggtggatccccttatggtgcaggtacctatgccggggatggttccagacaaccaactgagttagaattggctcaagcttttcatcaagggaagtactttgctggcattgctaagaagcttaagggatcatctcagtgagatctctatacatctaccatttcatgtttctatatacttaagcaagcaaaagagttatgtgcgtcatatgtccagtttccagttcataatttccaacagaataagatgttaattagagagagagaatgagagagagagagaaagtaatcaacacttgggttcaatactattgtgttgtcatttgtcataatgatgtatcctcaaaatacaatgttattgtcaataacaagaatttgtcaattgttactatatgcattaagatcaaagtgtttgctataaaattggtaggccggaaccaatctattc

SEQ ID NO: 6655 - DNA, 513 bp, Glycine max
  unsure (1)..(513): unsure at all n locations
atataaatacgaatcaaacatgggagaaaattgttatgtggaaaccgacccaactggtcggtatggcaggtttggagatgttcttggaaaaggggcaatgaagacagtgtacaaagcaatcgatgaggtgcttggaattgaggtagcatggaaccaggtcagactcaacgaggcgcttcgcacgccggacgatttgcagcggctttactcagaggttcatctcctcagtaccctcaagcatcagtccatcataagattctacacttcttggattgatattgataacagggccttcaactttatcacagaattgttcacatctgggtcactgagagaatacaggaagaattataaacgtgtcaacatacaagctataaagaattgggcttgccaaatcttgcaaggtcttgtttatctacattgccatgatccaccagtgatccatanggacctcaaatgtgataacatatttgtcaatggtcatcttggacaagtaaaaattggtgatctggg

SEQ ID NO: 6656 - DNA, 488 bp, Glycine max
aggtggtagacattgttttagaattattgaaagtttatcaaatagagtttgtttcatcttcagatattggtttcttgaagagtatcaatgggaaatcaaacaaggcaactaaaggcctccttaaacttcctaacaataataaggttgaaccctcaaccaagaagccatatggaagtattgtgaaggatcttgtcacaatcaagtcgtttgcatcaggaataatggtcccaaaagaatacatatggccagttaaaccagacaaatatctaggacttcccacaacacttgtggctgatgcccataaatcaggactagaagtttatgcttctggttttgctaatgacttctttactagttatagttatgactacgaccctgttgccgagtaccttcaatttgtagacagaggtgattctgttgatggtgttgtcactgatttcccagcaacagcatcaaatgccatcgcttgctttgcacacaacaatact

SEQ ID NO: 6657 - DNA, 566 bp, Glycine max
gtctaatattctctctctaagcaaagagacgtagaagtagccacttgaatctctccccggtagaaaggcacatgaaggaaggggccaccaaaccaaaccaaacagcaatagcatatgccatttctctctgtaacaaaagtttctgtcttcacactccaaatgagaagcatatctcatcaccaatcaccaccgctaccagtgtcttcacttgcactcttttatttaatttagtgatgatgaacaagctggtggtagaagttgtggaggcgagcgacctcatgcccaaagatggggaagggtcagctagcccctttgtagaggtcaagttcgatgagcagcagcacagcactgaaacgaggcacaaagacctgaatccttgttggaatgaaaagcttgtgttcaacatcaataaccccagagatcttgcccacaagacaattgaggtggttgtatacaataacaatcacaatgatcggaaccacaataacttccttggaagggtgagactttcaggctcctcaatccctctatcgagtcccaggccgtgtggaacgctacccacttga

SEQ ID NO: 6658 - DNA, 412 bp, Glycine max
cttgaatctctccccggtagaaaggcacatgaaggaaggggccaccaaaccaaaccaaacagcaatagcatatgccatttctctctgtaacaaaagtttctgtcttcacactccaaatgagaagcatatctcatcaccaatcatcactgctacagcttactcgtctccctgccctgccagtgccttcacttcacttgcactctttagatcataattgaattgaatttgttgatgatgaacagactggtggtagaagttgtggaggctagcgacctgatgcccaaagatggggaagggtcagctagcccctttgtagaggtaaagttggatgagcagcagcacagcactgaaacaaagcacaaagacctgaatccttgttggaatgaaaagtttgtgttcaacatcaataacc

SEQ ID NO: 6659 - DNA, 450 bp, Glycine max
actccctctacctgagaaggaggatccctgtgctagctcgatcaaagatcaaagatggaggagcggactcgcagcattctgattttgatgaccttgctttccatctccattgctggcggcaatgcaggtggcttgcagcatcataagggtaggcatggtaagcatggtcgtcatatgtctgctcgtaatgtgacttacgacggtaagtcactgttcattaacggaaggcgcgagatccttttttccggctccgtccattacacacgaagcaccccagatatgtggcctgacattcttgacaaagcaaggcgcggaggcttgaacgtcattcaaacttacgttttctggaacgctcacgagccagagcccggcaagttcaacttccaaggcaattatgatcttgtcaagttcattaggctcgttcaagccaaaggcatgtttgtcactctc

SEQ ID NO: 6660 - DNA, 841 bp, Glycine max
  unsure (1)..(841): unsure at all n locations
atcgnctactcgtccgacttaacctgtgttttgtttctactttcttcgatcatatgaactctcttttgtcttctctaaaactcaatatcaaaccaacgagctcaaagaaaatcgaggcaagtgtaagctagcaagaggaaattaaaaacctccgtttagttgtgttttcagggaaatgattgcacagaatatagactcagcaactccagaaccacaggacgcagtagtcattgacattgaggactcaacaacaacaaatacagaactacaactcacatcactacaaaatggggtaccaataaatgccaaaccacagcttaaaagggtcgacacagctacttacaaaaggccttcacttgattttctacaggatacgagtgattaagtcattttttgtgttgcttctgctattcagaggatgcaatggaagttttcttctcccaatgtgtgccactttacaagcatgcattagatggcaattggcaagcagcaaagcacatcttagatgcaaaccctgcactgaagactgctgccatagcacctgggtggcccacagtgctgcatgttgctgcaggcacaaaccattatcactttgtggaggagttgctcaacatattagacaatgatgcaattcaattgcaggataaaaagggcaacactgccttttgctttgttgctgcggctggcaattggcgcattgctgagttaatgctgaaaagaaatatacttctgccaacagtcaagggtggagatggaatgacccctcttcactttgctgctttgcaaggaagatgcccaatggcatgcaagctataccctatgaccaaagagatgtttgatg

SEQ ID NO: 6661 - DNA, 337 bp, Glycine max
gagaaagaataatcaagcaagctctcgtcctttccgttccatcaaaacttgccactttcttctctccctccctctacaacagggagggagtgtgtacggtcaactcttccataccaactccctcatccgtcgttcccatgtcgtagtcgcggtgcaactcttgaatggttaaagacaaactcctcgttgagtgcttatggaggaagagaataagaagcagaagtgaattacacttttcccatacactcaaactagcttatgcgtgaaaatgttgcatcgcgtctgggtggtggatttgtgaataggcacgagttgtttccctgtctacgtagtgtca

SEQ ID NO: 6662 - DNA, 526 bp, Glycine max
taaaaacaaccgtgcacgggttccaagaagaaaaaaatcccgacagagtagtgtttgtgggagagagagactctgttctgtcgtccattatctaatccaaaatgacaacaacggtggtgccggtggcagcagctgcaacttggttgaaccatcctccaaaccaagcattaacatggcgtctctctgtattgccccgaaacgctgcgtttttgtcccaccaccatctcatgaaggagaagaagacaaagctaatgtcttggtcaattggtgcccagccctcacctttcgacctctctcctcctcccatcgaccatgacttcctggatactgtcaaaactgcaggcggagagatcttctggtgaaggatcattgagacatttcataatgatgatgaagcacttggctctgtggacaaatggggggtgtgtgttgtgatctttcacactttggtcggaataagagtagtgggagagaatcgcatcagttccttcacaaaccgagtactgcaaacttcgaatctctacac

SEQ ID NO: 6663 - DNA, 686 bp, Glycine max
acgctccctctacctcgctttctcccccgacgaggaaatcggtggccacgacggtgccgagaagttcgctgactcctctatcttccaaagtatgaacgttggcgttgttcttgacgaaggtctggcttctcccgacccccattaccggtctttctatgccgaaaggagtccctggtggttggtcatcaaggcctttggtgttcccggccatggcgccaagctttatgataactctgccatggagaatctctttaagagcattgaaagtatccgaaggttccgctcctcgcagttcgacttgatcaaggccggcttcaaggccgaaggcgatgttgtttctgttaatatggtctttctcaaggctggaactccatctccaactggttttgtcatgaatttgcagccttctgaagcagaagctggatttgatattcgggtgccacccactgctgatccagaatcgttggagaggcgcattgctgaggaatgggcaccttcatcccgcaatatgtcatttactttcaaacagaaggcgcacacacgagataagtctgggaaaccaatcctcaccaaaactgatagttccaatccctggtgggcccttttagaaaatgctgtccaaaaggctggtgggaaacttggtaagcccgaggtctttcccgccgctacagattcacgctacttcc

SEQ ID NO: 6664 - DNA, 669 bp, Glycine max
atctcttccaattagaaagctttccacaattcaccaaaatttctccaaggctgattcaattccaaaggcagaagagtactgtagttttccacagagccagaacaaactgcagagtttagttgatttaatcatgtggagagatatctctagatcagcatttatcttcgggattggaacattcgccatagttttatcttcttatgcaaaagatatcaatctgagtcttatttctgtaatgtcctatattggccttgtctatctagctgttatcttcctctatagatcactaatatgcaggggggtcatagatgtagaggacacaaactatgtgctacgagaagaagaagcaatttgggtgctaaaatagatccttacttacttgaatgagttactgtcaaaacttagagccatgttttctggagatcctggtaccacaattaagttggcagttttgctctttgttcttgccagatgtggcagctacataaccatttggaagatggccaaattcggcttctttggagtttttaccgtgccaaaaatctgctccttgtattctgcacagataactgcattcgcaaacttttggattcgacgatttcgggatgcttgggattcttgctctcacaaaaaggctgtggctcttggcatttttggccttgtatggaa

SEQ ID NO: 6665 - DNA, 742 bp, Glycine max
tcgtatttatagaaccgtagaatagaggttgctatagcaatacatacagtggagaaattttgattgttgtgagataatgtctgcttcagaggataagggaaaaaaattctctcactcttcttggtccctactatgctgtagaaatggtatctcttcaacaactacttcagcagcagaaagggaaaaaaaacagtgaagaactaagcaggaatagttcaagatcatcatccagtaagaagccaggaggttggaaggccatgccttttattttaggcagtgaaacgtttgagaggttggctgcatttggtttgtttgctaactttatggtgtatttgacgagagagtttcatttggaccaagtttatgcttcaaatattctcaacatatggagtggtatcaccaacttcttccctttgattggtgccttcatttctgatgcctatgttggtcgcttctggaccatagcttttgcttccttttcttctctactggggatggtggtggtgactttaacagcatggttaccagagttgcatcctccaccatgcactcctcagcaacaagcattgaaccaatgtgttaaagctagcacacctcacctaggtgctctacttacgggactttgcctattaagcgtaggctctgctggcataaggccatgtagcatcccatttggtgtggaccaatttgacccctccacagatgaagggaaaaaaggtatcaatagcttctttaattggta

SEQ ID NO: 6666 - DNA, 794 bp, Glycine max
tcggtccaaggaagaaattgtataaccggaataaccttacaatttgaggaataccaaggttccggaataccgaaatggaaagctagttatatcagccaatagtttgtcccatggattgagtctgttcaaggaaggcaagagtattgggaatctgaagactaatgaatctaacaaggaaaatgctggaaaagatattactggtgcaaagaatgaagtgaagtgtgacaaccaagcacctgaaaacaagagtgagacagagaaatccataccagtaacgaagaaagatggcgaaaatcctacacctgcaaaagctgaagttcctgacaacgagtttgagaagcgcataagaccagaggttatccctgcaaatgagataggggttacatttgcagatattggtgcgttggatgagattaaagaatcacttcaagagctggtaatgcttccccttagaaggccagacctcttcaaaggtgggcttctgaagccatgtagaggtatattgctttttgggcctcctggtactggaaaaacaatgctagcaaaggcaattgcaaatgaagctggtgcaagtttcatcaatgtctcaatgtcaaccatcacatcaaaatggtttggagaggatgaaaagaacgtccgagctctgttcacactggcagctaaggttgccccaacaattatctttgttgacgaggttgacagcatgcttggacagaggactagagtaggagagcacgaggctatgaggaagattaaaaatgaattcatgacacactgggatgggctattaacag

SEQ ID NO: 6667 - DNA, 445 bp, Glycine max
tcgactcttacaaacataacacattcagatactcactcacctgtttttagtagtttcttccctattttctgttcataactcagtttgtaactatgactgctgaggttatggctcaagaggagacacaagcagctgaggttgttgttgctgttgagcccctgaaagaggagaaggttgctgaagaaaatgtgaaaccaagagagtcatcagtggaagcatccaaacccaaaatggtggagaaaagctcttcttacaaggaagaaagcaactacctttctgatctcaaggagtttgaaagaaaggctttgagtgaactcaagtcaaagcttgaggaagctatcttggggaacaccctttttgagccaaagaaggaggctttgctagagaatgaagagaagaaaaatgaaggtgaagagaaggaagaagaggaggagaaaaaggttga

SEQ ID NO: 6668 - DNA, 422 bp, Glycine max
cctcgagagaattcggctcgagttcaacgtcatagttcatagaaacgtcaagccatgatggattcctctggtgccaccaacgagaagctcttagaaaatggcactccatcttcttctcaaatgagcaaaggtggcttacgaaccatgcccttcatcatagtgaacgagtctctggagaaagtggcgagctacggactcatgcccaccatggtactgtatctgagggacgaataccgcatgtctattgcgaagggcacaagcgtaatttacacttggactgccgcgtccgacatcttgtccatcttcggggcattcctctcagattcttacttgggtcgattcctcgtcattgctatcggttccttctccagccttcttggtttaaccatgttgtggttaactgccatgatacctgacctaaa

SEQ ID NO: 6669 - DNA, 751 bp, Glycine max
tcttttgaatttgaagactagaagagtggcgtgcagcagtcggaatagaaccggggcatttcacgtattccatacatcctgccttatacactggataatcttgtgtgaatttgagataatcacaaatcatttagtctgtccaaatgttagacgagtagtgaagagaaaggttgcgtcagatgccaacaaaattggaaaagaaaaagattttaggaaaacatataagaactgtattctgcccagagtgccaaggtactggtatgatcattgatggagatggggtggagcagccagaattttctttgtcgcagatgttcaaattcaaaataaaggcatgtgatgcacgcagagattggatcaagagtcctgaagttttgcagaattgctcaactgggtttcacttcccttcacaatctgaagagatatttgaggaaaaagtggaacccataaatttactgcatttttatcgtgctgatgatcagagtggggcataacaaccgggcaaacgtttcgtatacatctgagtatattggtcttatatttttaagagttatgtgtaactttttaggtaaatgttggtcgatagactgggttatatagcctcatagatagtgaccagattaaattgtgtatacctgttgctaatgagtgtgtgtaagtgcacattgcttgatgctgacatagtgacctatgtgtacatggtaaagaacagataacgttcaagaatgccaccattgttgcctcacttttt

SEQ ID NO: 6670 - DNA, 1250 bp, Glycine max
gaggaacgtgaaaggcatagcagcgttgatttcaccatcgctgtggttttctttttctctattgaggttgtcattgggagcactcaacctaaccattcaagttgtgaaaccacatcgcaagaaaattcacaagcgatggatccgaagctgaaagaggtttctcagctcttcgatcgcttcaaggcttcgtttatcaggaacgactttgatacctgttccaatctcctttctcagctaaaggtgttacttacaggtttcagaagccttccaccgttgtttgcagatacacctaatgcagttcatgaattaacaatagcaagggatatatacgagcatgctgttgtccttagtgtgaaaaatgaggatcaagatgcttttgaaagggatttcttccagttgaagccttattatacagatgcctgcaatcgacttccaccatctcctcaggagtacccaattctgggtctcaacctgttgagattacttgtgcagaataggattgctgaattccatactgagttggaattgctttcatctgctgctcttgagaatccttgcattaagcatgctgtggagttggaacaatcttttatggaaggggcttacaatcgtgtcttgagtgcacgacagacagtgccacatgatacatacgtttattttatggatcttttggcaaagactgtcagagatgaaatagctggttgcagtgagaaggcctatgactatctttcaattaaggatgctaagcaaatgttgctgttctcctctgaccaggaactccttgaatatattaaagaggagcatcctgagtgggagattaagaatggtagtgtctttttccaaaaggcaaaagaatctgcaccttgcaaagaaataccctctctgcagctcatcaaccagacacttagttatgctagggagttggagaggattgtctgagtcgaaatgcaatggcggcttttgtgtttccaaaatttttaggtgtctggataatagttactaatattttgaaattgttcatttctgattcaatatggaactataaaattgttcacctctgtattttgatcatttaggtggcagtatggttgcttatattttatttttcttgacttgtgctctggaaaaagaaaaactcttccgtacttatccacctttttatgttgaggattatatgattcatggagctgtagtctaaatttcaaacccatagccaggttcatatcaaattatggggatataatttctgg

SEQ ID NO: 6671 - DNA, 408 bp, Glycine max
aaaaaatcatcatcagcttcaaaaggtgcagcagccaatgatggagttattaagggaggaagcatagattgggagctaagacctggtggcatgcttgttcagaagagacaaccccttgattcctcttctagttccatgatcaaaatcaaggtctctcatggttcttaccaccatgaggtcactgttcctgcacaatccacttttgggcatctaaaaatggtgcttacatccgagactggtcttgagcctaaagagcaaaggttactatttagagggaaagagcaagacgatgacgaatgcttgcatatggtgggagtgaaagacatgtctaaggttatattgctagatgatccagccagcacagagagaaagcttgaggagatgcataagagtgaagatatctcaaag

SEQ ID NO: 6672 - DNA, 418 bp, Glycine max
aaccactctctcataaaatcaaagactcatacatacaataaatacacaagtaattagcgcagccatgaaatacagtgagatatcccatttgcagccaccctgagcacaagctgagattcgagtactcagaattccccttcaaatgtgatggctgcaaggaagtaggcatagggtcacgttacaagtgctccatccgtgacttcgaccttcacatgcactgtgccatgataacctcccccaccttgctccaccctttctacaccaaatgcaacttccagttcatgtcaaagcctccgggtgacacgcctcgttactgcaacgcgtgcgagaaggacgtgagtggcttcttgtaccactgcaaagcgtgcggcttcgacctccaaccgtgttgcgccaagctaccgttgctccttgatga

SEQ ID NO: 6673 - DNA, 503 bp, Glycine max
  unsure (1)..(503): unsure at all n locations
ggttaccgttatcatgcaagctgataatggggcctctgaagttcttgttccgttattataaaactgagtccttcactctctctcgaaccagctcacagaaacaatgatctcctacgccgacatgctcaagggatcacatggatgtcaacaacttcaactatcctccattgtcagagatgtaaactacagctgtggctcgtgtggttatgagctgaacttgaactccagcaaccgcaacacttgttctctcattgactcaaagtccataaagagaggcatcatctccttcttctccgtggatgagagcaggttcactcagatccagcaacttcactggccttcttggatgccctttttcaactccaagcgccaaagaaccaagcttttttgccgcaactgttgggaaccaccttggctatgcttacacttttgccctctcaatctcaatcctgggatggcatctctgatgattccagaatctatgatatcanactaaccgcttt

SEQ ID NO: 6674 - DNA, 800 bp, Glycine max
  unsure (1)..(800): unsure at all n locations
gggatcgtccttgtcctattaaataacaccgcccaccgactgtatgagtgggagtgtgagagaaaccagtgactgacttttcgagaaagaaaaacaaaaatgagtttccggcattccatcatgaacgctcttcccattctcctcttcttcctcttcgtttctgcattagtttctgcgaagaaaactggtgatgtgacggagctgcaaattggcgtgaagcataaaccagtatcatgtgaagttcaggcacacaaaggtgacagagtcaaagtacactatcggggaaaactcactgatggaactgttttcgattctagctttgaaagaaataatccaattgaatttgagcttggtactggtcaagtgatcaaaggttgggaccagggattattgggaatgtgtcttggtgagaagcggaagctgaaaataccatcaaaacttggctatggagagcagggttccccacccactattccaggtggtgctacactcatatttgacgctgagcttgtgggagtgaacgacaaaagtttaggcgaaggaaaaggaaacaacgaactgtagacaaatcaaaacaaatggatagtcgagcttttgctatcttagcttatttttgttcctcaataatatgcttttatgacccaaggtttaactgttttactatgaggctaatttagaaagatttatcctggtgtaccctaaaaaaagaatcctnnnnnnnnnnnnnnnnnnnnnnnnnnnnnnnnnnnnnnnnnnnnnnnnnnnnnnnnnnnnnnnnnnnnnnnnnnnnnnnnnnnnnn

SEQ ID NO: 6675 - DNA, 417 bp, Glycine max
cccacgcgttcgcggacgcgtgggtttttgtcctgacagctcataggactacactgaggggctttgaacatatcatgggggtgagactagagccgcatgcatttgacatggaaagagatttggcgactgcaacactgaagaagaccagaaacaaactgctcaagtattatcaggtggaaatagatgaaatctaccagtgtttgacagggaagaaagcataacgtccgaggttgctaaattctagacacggatatgcctagttagtactacccagtaaccccgttccacaactctcatctatatatataatcctagaagctcaatgctactattttgtgtgacgtattatgcaccaactagcaactgctgaaccatgatatttaaccaaatgtcaaactctacatatacgagaacaat

SEQ ID NO: 6676 - DNA, 455 bp, Glycine max
tttaagtcctgcatatatatgcgtagttttttttatagttttagtgagtgagaatagccatgtctacttcaaagagcgtcagcagttctagtgaagatgacaatgaacttagaagagggccttggactctggaagaggataacttgctctcccaatatatttctagtcatggagaagggcgatggaatttgctggctaaacgttcaggattaaagcgaactgggaaaagttgcagattaaggtggctaaattatctaaagccagatgtaaaacggggaaatttaaccccacaagagcaacttataattcttgaactccactcaaagtggggaaacaggtgcttatcttgtgcatttgattcttgagctccacaggttttatcgtgattcttggtattgtgagaaattgtagacaaatgcggccaatgcagccgcaaaacggtcacaaggactctc

SEQ ID NO: 6677 - DNA, 382 bp, Glycine max
cttcaaagagcgtcagcagttgtagtttagatgacaatgaacttataagagggccttggactctggaagaggataacttgctctcccaatatatttctagtcatggggaagggcgatggaatttgctggctaaacgttcaggattaaagcgaactgggaaaagttgcagattaaggtggctaaattatctaaagccagatgtaaaacggggaaatctaaccccacaagagcaacttataatcctcgaactccactcaaagtggggaaacaggtggtcaaaaattgcacaacatttgccaggcagaacagacaatgaaatcaagaactattggagaactaggattcagaaacaagcaagacatttgtaaatttacactgacag

SEQ ID NO: 6678 - DNA, 436 bp, Glycine max
gaggacattcactcgtattaatattgttccaaactcccaagtcccaaccttctctccctgtctttgcttctgcaattactcccactctggaaatgggttcgctacccgattttgacactctcccccctctgagctcgaggatttcaacggtggttccagcaacccctcgagaagatgaaaacggtgcgtttcaactcaactacatggacctcctcgtgaagctccattacatacgacccgttttcttcttcacttccgaagccgttcaaggcctctcaatctccgacttgaagaaacccatgttcccgcttctcgacccgtattaccacgtttcgggtcgggtcagaagatccgaatccggacgcccctttgttaagtgcaacgacgccggtgttcgcatcgctgagtcgcactgcgacagaaccctcgaagaatg

SEQ ID NO: 6679 - DNA, 378 bp, Glycine max
cactatcattaaccaataaccaataaatacattaatcaccatggggaagtactttgctgttgttgctctctttgtctcagctttgtgcttctcctctatcttggctcgtaagacacctgcccttgataaattcttcgttgagggcaagatttactgtgacccttgccacttcgcatttgagtccaggctcagtttccccttggaaggtgttaaggtaagcctgcaatgtctgaggagtgagaatgataccgtgacatatgtgaaggagggcaaaactgatgcaaatgggcaatacagcatccctgtccatggtgatcacgaggaggagatttgcatagttgttgctgactcacccactgagggtcagtgcaaagaggc

SEQ ID NO: 6680 - DNA, 925 bp, Glycine max
aaacgaatgcgcgaaaaggtgctgtcggaaaagaattattaaaattatgcaacgcgattaaggaataaaaaaatacaaagcttagcgacgcgggtttcttccataattaagcattaattaggggaacagagaatgttattttggcggtaatagattagatgctgaatgatgatggacgaatgagtgttagtttcagcaattctcttccgtaagcaaagagcagtagctgaaacaaacaaacgaacactgtaagcatgaacaagcgccaagaagatttgcgcaacatagctactaccctcgactccagattcaatcagaccctcagaaatgttcaagggttactcaaaggtcgtagcatacccggtaaaatattattgagccgtatggtagatcctcccgataactcagactcgaagatatcctcaccaaattacaaaaggagcttttctcacaatgatgctggtacaagtgataacacatctggggcagtagagttcatcaagtgggacttctactcttgatgcaggaggagtttcagagtaaaagcaaaccaattagtattgccaatgccaataagctaaaagtgtcgacctcccttggagggagcccacccgaagaattccacaagtctaccatgggtgctagagctacagattctgcaagaattatgaagttcaccaaggtgctttctgggacggtggttatattagacaagttgcgggaattagcttggagtggtgttccagacaatatgcgtcctaaagtgtggagacttctgttgggatatgcaccacctaattcagatagaagggagggagttctaagaaggaagcgccttgagtatcttgactgtatttctcagtattatgatattcctgatacagaacgttcacatgacgaggtcaacatgcttcgtcagattggt

SEQ ID NO: 6681 - DNA, 461 bp, Glycine max
ttttctcacgcgtccgcccacgcgtacaatttttttctcctctctctctaaattcaattatggcgtttaagaaaacgctagcccagcggcttctcaacatcacaaaaatctccaattaccgcatttcctcctccgtagtccgttccccgaacccgacaaaacctgacattgctccggatcccggagacagccgcaggttcctccacaagagggcctccgtgctcccgccggagctccgcccgccgctgcccgccggcagcctcctccagaggctccgggaaatggacattgcgcggagccggatccggctagacggtctcgctccgccggagactgaacaaacggtggcgccggaacacgtgaggaaggtgctcagagcggtgcaaatcgaaacggtgaaatcgaagctgagaaaaattccgcagagttgcataagctattcagagttcattcgaatgtgc

SEQ ID NO: 6682 - DNA, 1592 bp, Glycine max
cttgttaggattttcgcagagctatcacgcaacttctcggatctaatgaacaagccgcagtacaggactcttttcagcaatgatgcatcccctgttgatgaatcagcgcttcgccaattggagaaggaagtgaaggagcgcattaagaccacccgccaggtgattggtgatgccaaggagtcctttgataaccagctcaagattcaaaagttgaaggatacaatcttcgctgtgaatgagcagttaaccaaggcgaagaagcagggtgcttgatggaagagaggattgcccggcctgagaagtattcaactgaggggaagccggttcctccagaagttgaagatcctaacctgtaccactatgccttgttctctgataatgttgttgccgcatctgttgtggtcaattcagcaacaaagaatgcaaaggagccgtggaagcatgtgtttcatgttgtgaccgataagatgaaccttggagcaatgcaagtgatgtttaagttgaaaaattatcatggtgcacacattgaggttaaggctgtggaggattacaagttcctgaattcatcttatgtgccagtcctaaaacaattggagtctgctaaccttcagagattttacttcgagaacaagcttgaaaatgctacaaaggacacaaataatatgaagttcaggaaccccaaatatttgtcaatattgaaccatttgaggttctacttgccagaaatgtatccaaagctgcataaaattttgtttttggatgatgacatagtggttcagaaggacctaactgggctatggaagattgatatggatggcaaggtgaatggagctgtagaaacatgttttgggtcattccatagatatgcacagtacatgaatttctcgcaccccttgattaaagcaaagtttaatccaaaggcttgtgcatgggcttatggaatgaatttctttgattcggatgcttggagaagggaaaaatgcacagaagaatatcattactggcagaatctgaatgagaaccggacattatggaaattagggacattgccaccaggtctaatcacatactacgcaacaacaaagccactggacaagtcatggcatgttctgggacttggctataacccaagcatcagcatggatgagattaacaatgcagcagttgtgcacttcaatggcaatatgaaaccatggcttgacattgcaatgactcagttcaagccactttggacaaagtatgttgactatgaattagatttcgttcaggcctgcaattttggtatctaaatggtcaagtttcttgtcacttggtgatgctgtgtcaggtgccgctgcagtttatttgctgtttagttttgatacataatgcttatacgtttaacagagttccctgctggtgcaagaaaaaatcctgcttctttcaattgtaaaatactatagtatagttattctctcatgtcttcctcttatttattcataacgtttaggcaataatgttatttaaagatgtggtttaatgctgaacaatattactgaattaagtcttgtgcctttcactttggctttagttgtttaaaaaagaaaagttag

SEQ ID NO: 6683 - DNA, 1755 bp, Glycine max
caaccttctctcttttcaatctcaattccttccttccttccttcttgttcttcttcttttttcctattattcaattcaagtcggcttctctgcacacgatttatgtgatcgcaacatgggagtttgtttgagcgcccaaattaaagctgaaagcccatataacactgggttcaattcaaagtatgtgagtacggatggaaatgatttcggcagcacaaacgataaggtttcagcaaactcagttcctcagactcctcggagtgagggtgagatcttgcagtcatccaatttaaagagctttaccttgtcagaacttaagacggccactagaaatttccgtccagatagcgtgttaggagaaggtggttttggatcagtttttaaggggtggattgatgagaattcattgactgctaccaaacctggcactggcattgttattgctgttaaaagacttaatcaagatggcatccagggtcacagggagtggttggctgaagtcaactatcttggacagctttctcatcctcatctagtgagattgattgggttttgccttgaagatgaacaccgccttctcgtctacgaatttatgccacgtggaagcttggaaaaccatttgttcaggagaggctcatattttcaaccactttcttggagcctacgtttgaaggtagctcttgatgctgccaaagggcttgcatttctccacagtgctgaagcaaaagtgatatatagagattttaagacttcaaatgtcttgctggattcaaaatataatgcaaaactttctgattttgggctggcaaaggatggaccaacaggtgacaaaagtcatgtctccaccagggtaatgggaacctacggatacgcagcacctgaatatctagccacaggtcatcttactgctaagagcgatgtctatagttttggggttgtcctgctggaaatgttgtctggcaagagggctgttgacaagaatagaccatctggacaacacaatttggtggaatgggctaaaccttacctggcaaacaagcgtaagatatttcgtgtgttggacacccggctcgaaggacaatattcaacagatgatgcctgtaagctagccacccttgccttgcggtgcctatcaatagaatccaagttcaggccaaacatggatgaagtggttacaacattggagcagctgcaagttcctaatgtaaatggaggccatcaaaatgggtctcgtgttcgtagaagaagtgctgatgtgaatagaggctatcaaaatccttctgttaatggatctcgagttcgtagaagaagtgccgatgatattagccctatggagactcccacagcttatccccggccttctgcatcccctctctatacttgatattgcaaacttatcatcatgcatctgttgctggtgatctcatccaccaactcagtcacctcagtagctattagcctattgcactctagtattgtacatatcttatttcacataatgtattcagtattgctagtccaccaattaatattttcggagttctgttttaagtgtttgtaactactaaactagatgcgaaggcaggtacattatatttgtatgatagctctgattagctcatttttgttcttgttgtctatattagggtgctgtggttccctagtctattttgtaacacctagttgccttatgtgacttctacatcaaacataccaaatagtagtacattttaaaggcttgtgctgtattctatt

SEQ ID NO: 6684 - DNA, 667 bp, Glycine max
attgggcgttgcattgaagatgaacatcggcttctcgtctacgaatttatgccacgtggaagcttggaaaaccatttgttccggagaggctcatattttctgactctttcttggagcttacgtttgaaggtagctcttgatgctgccaaagggcttgcatttctccacagtgcagaagcagtagtgatatatagagattttaagacttcaaatgtcttgctggattcagtatgtgaactttgaatctttttcattgaatgcataatgaaagaaaaaaagatctgacgagtgtagaaaccatttggatagcagatctgaaatatgtgttgttgatttgatcacagaaatataatgcaaaactttctgattttgggctggcaaaggacggaccaacaggagacaaaagtcatgtctccaccagggtaatgggaacatatggatacgcagcacctgaatatctagccacaggtattgttgggttcatattacagaagcattggtgaatcatttcatctgagtttgtcaagtggctaaaaaaacaaaacattttaactgtaggtcatcttactgccaagagcgatgtgtacagttttggagttgcctgctggaaatgttgtctgggaagagggcagttgacaagaatagaccatctggacaacacaatttg

SEQ ID NO: 6685 - DNA, 258 bp, Glycine max
ctcttctctcaataaccaaggtaaaaagtaggaacacgcacaaccttcttttctctctgtgttttggagtcagcttctctgcacacggcttacgggatcgcaacatgggagtttgtttgagcgcccaaattaaagctgaaagcccatttaacactgtgttcaattcaaagtatgtgagtacagatggaaatgatctcggtagcacaaacgataaggtttcagcaaactcagttcctcagattcctcggagtgagggtg

SEQ ID NO: 6686 - DNA, 1024 bp, Glycine max
ttctccttcaaacttttcgtcccttttgacacttctctctcactcgcatcacacacaaacaaacactcccattctctctctctctctttctctccgacctagcgagaccgagcgatccgatcctaaccccgcgatgctccgccgcgcaaccacctccctcatctccggcgcctcccgccgccgcctctccaccgacgtgccggcgacccccgcggcggattccgtcttcgcggaggcgtggaagaaagtgagccccaacatcgacccgccgaagacgccgctggcgtacatgaagccccgaccacccactccttcgactctcccctccaagctcacagtcaacttcgtcttgccctactcttctcaattggccgcaaaagaggttgatatggtcattgtaccagcaacaactgggcagatgggtgttctcccaggacatgtagcaacaattgcagagttgaaacctggtgtcctatctgtacatgaagggaacgatgtgaccaagtactttgtcagcagtggctttgcattcatccatgcaaactctgtggctgatataatagctgttgaggccgtgccggtagaccgaattgatgtgaatctagtccagaagggtctccaagagttcactcagaaactgaactcagccacaactgatttggagaaagctgaagctcagattggggttgatgtccatagcgctctcaactctgctctttcaggctaataataagtactgtagtgttgagtcttgccttctgtatttgtttatttccccccactgtgtggcattgatttgtctcggtgtaatcaaagttgctaaaagaacattttcaccctgaatttctgtgttgaaagtggacttgataaaataatatttcaacagcttcaatctagctcaaggatgttgggcaagaccttgaaattagaaacaaaagtttcatttttgttttggattatcctattgtatggcaaatactggttaccaaataaaaaaaagcccataattttgattctattgttc

SEQ ID NO: 6687 - DNA, 679 bp, Glycine max
agacgacagaaggggggggaaagcaagagtagtgacagagagaggcgaggatcgttcacataaaacatcgacagagatcgacgaggaaaagctaagcctaacaatgtggagctccaaaacgacattgatgtttggcgtcgcagccattgctctgatgatgtttctctcatctgcttcagcggacgacgtcgttgcactcacagaggaaaccttcgaaaacgaggttggcaaggatcgtgccgctctcgtcgagttttacgctccctggtgtggacactgtaaaaggcttgcaccggagtacgaacagctcggaacgacttttaagaaaacgaagtccgttttgattgccaaggtggattgtgatgaacagaaaagtgtttgtagtaaatatggggtatctggttaccctaccattcaatggtttcctaagggatctctagagcctaaaaagtatgaaggtgcacgtactgcagaagcccttgcggcgtttgtgaacattgaagcaggtacaaatgtgaagatagcttctgttccatccagtgtggtagttctctctccagataactttgatgaggttgtcttggatgaaacaaaagatgttctggtggaattctatgcaccatggtgcggtcattgcaaggcccttgcccctatttatgagaaggttgctgcagcattt

SEQ ID NO: 6688 - DNA, 876 bp, Glycine max
  unsure (1)..(876): unsure at all n locations
ttacactaaccttaaccgcttagtttcttaggtgatatcatcactgactgcatctctgagatttgatggtgccctgaatgtggatgttactgagttccagactaacctggtaccatatccgaggattcacttcatgctttcatcctatgctcccgtgatttcagcagagaaggcataccatgaacagctttcagttgcagagatcacaaacaccgcgtttgagccgtcctctatgatggccaagtgcgaccctcgccacggcaagtacatggcttgctgtctgatgtacagaggcgatgtggtccctaaagatgttaatgcagccgtagccattatcaagaccaagcgcactatccaatttgttgattggtgtcccactgggttcaagtgtggcataaattatcagcctccaacagttgttccagggggagatcttgccaaggtgcaaagagcagtgtgcatgatctccaactccactagtgttgctgaggttttctcacgcattgaccacaaatttgaccttatgtatgccaagagagcgtttgtgcactggtatgttggtgagggcatggaagagggtgagttctctgaggctcgtgaagatcttgctgcccttgagaaggattatgaggaggtcggagcagaggctaatgaaggtgatgaaggagaggatggagatgagtattgattagggagttactttttcgtgatggggttcttttatgtactttccttggctttattttgtaagttgttgccatatatgcttgctgttatctgcatgaatggtttgtccatttgatggagcttgttctgtcccagcactaaataatttcaatgacatgattgtggcgctttagttaaaaaanaaaacac

SEQ ID NO: 6689 - DNA, 890 bp, Glycine max
tgggactcggttcgagccacttggatgccacaaggtgagaaaagaaagaagctagaggagaagggcattagcatgcgctttgtaattggacacagtgctacatcaggtggtattctagacagagctattgaagcagaggacagaaagcatggagatttcttgaggctgaatcatgtggaaggataccttgaattgtcagcaaagacaaaaacctactttgccactgctgtgaacttatgggatgctgatttctatgtcaaagttgatgatgatgttcatgtaaatatagcaacactgggacaaactctagttagacatcgatcaaaaccacggatatacattggatgcatgaaatctgggcctgtcctatcccaaaaaggggtaaggtaccatgaacctgagtactggaagtttggagaggctggaaacagatacttccgtcatgccacaggacagttgtatgccatttcaaacgatttggctacatacatatcaattaaccagaatgttcttcacaagtatgccaacgaggatgtgtcactaggatcctggtttattggacttgatgtggagcatatagatgatcgaagactttgttgtggcactcctcctgattgtgagtggaaggcccaagcagggaacatttgtgttgcatcatttgattggagctgcagtggaatttgcaggtctgctgagaggattaaagaggtacataggaggtgtggagagggtgagaatgctttgtggagtgccgctttctagggggcacaaaagtgacagcggagttcttcctaactcaggaagattaatactaaggcaatatgagtcaaccctgcaagattttctatttttctttttctttttctatagttttgtgcagtgtagagaaa

SEQ ID NO: 6690 - DNA, 518 bp, Glycine max
tagaagtggaaagtggttgcagagtagaagtcgagatggccaaccttccaaattcaaagctttatgggaaagagaagatgaaaggagagcaagaattagaagatgaagaaagcttctcgcgtgctatgctgctttgcagctccgttgtggtttccatggcgctgcaatcggcaacggagctgggcgtatttgacgtgttgcaagaagcgggggctaagctctctgcgaaagagatagcatccaagctttcctgcgacaacaaccctgaagcagactcaatgctggatcgccttctagcccttctagcctctcactccattcttaactgttctctcattctcgaccaccaaaacctggggacctttcagaggctctacaccatcactcccgtcgccagattctttgctcgcaattctgatggggtgtccttgggacccttgatggccctgcgtcaagacaagatctttctacatagctggtcggagcttaaagattcaattcgggaatggggtattcca

SEQ ID NO: 6691 - DNA, 1010 bp, Glycine max
ccctactctacaagatgttggattcttccttcttccggagcttgggcaagacaaagcttacataagtgaaacactgtttgccatgatttttatatcgtttgtctcgtggacatttcatccattcatattgaagaacagaaagatctacacagttctaatatggtgcagggttttagcattcttagtggcttctcaagttcttcgcataatcacatttcattctacacaacttccgggcacaaactaccattgccgtgagggttctaaacttgccacattaccccgtccagatactgtccttgaagtgctcttgattacattttccgcgtggcgtggtctatggatgtggtgatttgatattctcatcacacatgatctttacacttgtttttgtgctcacgtatcagaaatatggcactcgaaggtcactaaagcagctagggtggttgcttgctgtggttcagagtcttttgatagtagcatctcgcaaacattacacggttgacgtagttgttgcctggtacactgttaatttggtggtgttttttattgacaagaaattgccagaattaccagacaggtcaattgcagctgcaaccttgctacctttgagcaccaaagacaaagacagcaggaccaaagaggagaaccacaagctattgaatgggaattctggagaccctgtagattggaggcagagaacacaagtgaatggcaagatcatggaagatggcaatacactccatgcagactctgccatgaatggtgcatagatataggagcctctgctgtataaattggatccactgcaaagattgctgctgatggaaaagctgcaaccaaccttcaatttgaaggatttgttgtctgaaacattcacctgttaattcaaattagtacgccccaatttgtactagtgaaattgaaactgggttgtgcatttcaacattttgcagctcagattccatgtcatggttaaattatctatacaccatcagcatgtgccatag

SEQ ID NO: 6692 - DNA, 409 bp, Glycine max
cggatctgaccttacgcgaaagaagaaccctggaagagagcgatccataatccattgttaacaacaaacaaggacacgcaagacaaaagctcgaaactcataggtatacacagctatctcttgagcttcttagcaaagagaattttgagcagaaacttggtggtggtgttggaagaggaacaatacatcgtccctttggtattccggcaaacccagaatccactgttggcttggatacaccgttgtgtaagctgtgttgggatgaacaagtcaagggtaaattcagggaaaatattttatttgtcaccttctcaaaaacgcccaacttgaagattattgtagagatattatttgaacactatggatatcaagtgcccgattttcaaagtgatgaagaagcagttaagcg

SEQ ID NO: 6693 - DNA, 568 bp, Glycine max
gaagttgaagttgtggctcaaactcacagatagattagcacttagcatttactaagaaaggataaaggaaggaacactttcgttacatttctccgcccattcctaccttgttcctccttttctccttttctttttcgtattcggggttgctgctttctttcgactctattgtcttcttaataaatacagaaagaaacaaaaaagaaaaaagtttataggtgcctagaagaaaagacaatatagtgtggagcaattacgtttgatcacaagggaaattaaaggtgcaacggttttgcaagatagcatagaagattttgaagaatcttagttgcaatatagttgtgcagttgttgaaatgggggctcctttatcagcatggcctttggagaactttggaacatacaagtatctattgtatgggccgtttgtgggaaaagtcctgtatgaatggttctatggtgaagaacactcctactacaacctcagctggtgccttcatttgctcatacttagtggtctcagaggcctaattcatgtgctttggggttcctacagccacatgtttttt

SEQ ID NO: 6694 - DNA, 361 bp, Glycine max
ctcgagccgcaaaagcaattactactaagaaaggataaaggaaggaaggaacacttttctgatattctttttggtattgggttgctgacctttgctagtgttatagattttttgggtcctcttgtgttctaataaatgcaggatagaaaaagtctataggtgcctagaagaaaagacaatatagggtgtggagcaattacgtttgatcacaagggaaaaggtgcaacggtttgcaagatagcatagaagattttgaagaatcttaattgcaacatagtagcgcagttgcaatgggggctcctttatcagcatggccttgggataactttggaacatacaagtatctattatatggaccgtt

SEQ ID NO: 6695 - DNA, 675 bp, Glycine max
tttcactccgacccatttgcataacttcgctgatctctcgttttcaccatctgggtctccccaattttcgcctcgattcttgttcttctcgatccattggtgatggcatcgatgggttctttaccgtttcttgtggaagccaatgccgactccactttgatgatgatgatgcttcagaacaggaatcacaagttttcttcaccaaagtttaacactgtgaatgcttcatcgttagtaagaggatgggggcgtggaagagtgaaccataggtgtagtagaggggtttgttgtgtttggtggagaagaataagcacataagtgctttagggaagagttctgggacaagtgaggataaggatgattcagatgaagtgcttcaagccacaattgagaagagtaagaaggttcttgctttgcaaagggaattgcttcaacagatttctgaaagaaggaaactggtttcttcaataaatagtgaaaccacccctgaaatagaaggagacagcatttcttatgagcacagtgacgaatccctgtcaagtgactcaaatccacagaaaggttctgccagaagaggcagtgcttttgagaacgaaaatggtggtgttgtttcaagcaattatgtccaatctattgagaaggaaataccagatgtctcatttgtaggcattgatc

SEQ ID NO: 6696 - DNA, 531 bp, Glycine max
actcgagccgagtcggctcgagtcactacacttttttcactttctcgggaaaatcacagcgacgctcaggaaaaactctaaactgtgaaaaaaccactgcgatcaatggcaacgatcaaggccgtgaaagctcgccagatcttcgacagccgtggaaatccaaccgtcgaagttgacgttattctcagcgatggaagcttccacagagccgccgtgcctagcggtgcttcaacaggtgtttatgaggctttggaattaagggatggaggctcagactacctcgggaaaggtgttctcaaggctgtggagaatgttaattcaattatagcacctgctctgcttggcaaggacccaacgaagcagactgaaattgacaattttatggtacagcagcttgatggaactgttaatgaatgggggtggtgcaagcagaagcttggagccaatgctattttggcagtgtcacttgctgtctgcaaggctggtgctgcagtgaagaaaattcctctgtacaagcacattgccaatctg

SEQ ID NO: 6697 - DNA, 421 bp, Glycine max
cccatcgcgttcggcgacgctctaaaaaactcgcagctctgaccaaagtacacaccgctgcgcacactggcaacgatcaacgccgcgaacagctcgccagatcttcgacagccgcgggaatccaaccgttgaagttgccgttattctcagcgatggaaccttccacagagctgctgtccctagcggcgcttcaacaggtgtttatgaggctttggaattgagggatggaggctcagactacctcgggaaaggtgttcttaaggctgcggagaatgctaattcacttatagcacctgctctggttggcaaggacccaaccaagcagactgaaactgactatcttatggtacagcagcttgatggaactgttaatgaatggggatggtgtaagcataagcttggagctaatgctattttggca

SEQ ID NO: 6698 - DNA, 521 bp, Glycine max
  unsure (1)..(521): unsure at all n locations
gtaagcncggaanncggctcgagctcgagccgctcgagccgattcggctcgagccgacagccgtgggcggcggggaccaccacttgggaatgggatgggtttccagcacgtgcaaggggaccattgctgattgcctgggaggggaggagtacgagttggattcggagatcaaccggcgcatcttagccaccaacaagtacatcagctacgttgcgctgcagaggaacactgctccctgctctcgccgcggcgcctcctactacaattgccgacccggagcacaggccaatccttacagccgtggctgcagcgccattacgaggtgcaggagctgaattttccttttttttaaaattttttttttcggatgtgaattggaatgtgttttgttgttgttgttattgttatataaaatagttattattcacgaacatttgtggtaatggtaatccatttcgggttgctgttgtgagaatacacctgcattgcttcttcttaatactagtattgttgtttaaaaa

SEQ ID NO: 6699 - DNA, 737 bp, Glycine max
ggagcagagaggaggggcttgaagttttaaactggcagctagctgtgggcattcatcctcgatttggagaaaagaaaaagaaagaagacatttccttccgaattgaggaagggaaaggtgtcttggatggccaagtcatcttccttagctatcacgttgatctgcgccgccacggtattggtggcgatgagtcggtggccgacagccgtgggcggcggggaccaccacttgggaatgggatgggtttccagcacgtgcaaggggaccattgctgattgcctgggaggggaggagtacgagttggattcggagatcaaccggcgcatcttagccaccaacaagtacatcagctacgttgcgctgcagaggaacactgctccctgctctcgccgcggcgcctcctactacaattgccgacccggagcacaggccaatccttacagccgtggctgcagcgccatcaccaggtgcaggagctaaattttatttattattattctcctttttttttaaaaaaaattttcatattcgggtttcattgtatacatgaccaagattcaatgtttatgtattattgtcctggtgccgataaataattgtcgaatcaatgacagtgattcatcattttatttcttattttggctttttaaaataaggaggtgtacttagaataaagtgcacttatattgttgattttctgaacaactgcccatgcacccaacaaaatcttttgttct

SEQ ID NO: 6700 - DNA, 697 bp, Glycine max
cccacgcgtccgatggactgggtatgacgaatcaacgtgccgatacatctgaaacagaagtgtcttggatggccaagggatcgtccttaactaatacgttgatctgcgccgccaccgtattggtggcgatgagtccgtggccgacagccgtgggcgggcggggaccaccacttgggaatgggatgggcttccagcacgtgcaaggggtccattgctgagtgcctgggaggggaggagtacgagttggactcggagatcaaccggcgcatcttagccaccaacaagtacatcagctacggtgcgctgcagaggaacactgtcccctgctctcgccgcggcgcttcctactacaattgcagacccggggcccaggccaacccttacagccgcggttgcagcgccattacgaggtgcagaagctgaattttttaatttaatttattttttttcggatgtgaattggaatgtgttttgttgttgttgttatataaatttgttactattattattcacgaacatttgtggtaatccatttcgggttgctgttgtttatttggatttgaatgtttctgtaacaagaagagaaaaaaagtgttttttttttttttgcttccctttttactactactttggttttggccattctgtgaagctctgtggtagtcagattctgaatctgagtggttgaggaaaagac

SEQ ID NO: 6701 - DNA, 540 bp, Glycine max
cctcgagccgattcggctcgagcaaatcaagcaggaacagagaaaccgagaggagaggcattgtaatcgtgacctctcaagcttctttcaaagacagagaagaaagaacaaaacaatctcaacaaacacaaacaaacaagcaaacatcaatggcaaactcgtatacgtggctcttcctcgcgatttctgccaccctcttgcttcttctgtcttcgtcgccgacagcggacgcgggagcgctgggcatggaaatgacatggataccctccatgcccatggaagaggagttccagctggacagcgagatcagccggcgcatcttagccacgaccaagtacatcagctacggtgcgctgcagaggaacactgtcccctgctctcgccgcggcgcctcctactacaattgccggcccggggcccaggcaacccttacagccgcggttcagcccattcgaggtcagagctgattcttagttattatttctcgattgatcgatggttgtgtgtgtaaaattgtcatatatccaatttcgacatcgg

SEQ ID NO: 6702 - DNA, 334 bp, Glycine max
ccaaagcaagaaggaacattgtaatcgtaagctccgaagcttcatgatattccaacaaccttcaaagacagagaagaaagaagaaaacaacctcaacaaacaaacatcaatggcaaacacgtattcgtggctcttcctcgcgatttgtgccaccctcttgcttcttctgtcttcgtcgccgacagcggacgcgggagcgctgggcatggaaatgacatggataccctccatgcccatggaagaggagttccagctggacagcgagatcagccggcgcatcttagccacgaccaagtacatcagctacggtgcgctgcagaagaacactgtcccc

SEQ ID NO: 6703 - DNA, 495 bp, Glycine max
aatttcgaagttttatattatgttttggttttattgtaaaccaaaaaaaacccctcctactttctaataaaaaacatatgttttaaataaattttgtgactactattaattttgacacacatcccttacttacatttaatggttcaaacaattctactcaactttaaaataaatgagcccttagattatacatatttatcatgcaggaacaaccagctatcattttacattgaactagaaattcatttagaagatcaaagacaaaattttccgattaaaacgtacttaaattgaagaggggttgttggcattgtgcaccaaaaaggaaaaaaaatgtggaggttaaagatagcagatggagggaatgatccctatatatttagcacaaataattttgtggggaggcaaacatgggagtttgattctgaggcaggtaccggtgaggaacgagctcaaattgaagcagctcgtcaaaacttttatgaaaatcgcttc

SEQ ID NO: 6704 - DNA, 746 bp, Glycine max
tgacggctctgggttattggttcagactgaaaatttgggtgatcaaccacaagtgatcccatcatgttctgcaacagatcttcctccgatggcgatgatagtttctagtatttcagaatatactgaagttaaaaatgaaactgagtctactttaaaaccttctactgaactctcatctgatgaggggattgttgggtataaaattcctgcttctcagttgctggagcccgaggatcggattgcatttgaacataattctcaaatggcattagaaccctccacgaaacagtgtttagaatctgcttctgaaatgaaagttcctgtgagtcctaaagctgttgaagttcagaagcatccagatgcactagaacctgctgatttgcatggtactccattgattgagagttgcccaaaatctctctgtgaagaaaaaagggatgatagggtttccaaatgtgaacagcttcagtcttgtgttgttgaacctataaatattgaccctgtttcccaagaaaatatagtattatccaatcctattaacaatccaaagactgattcttccgaggcttgccatatggaaatggacacatcaggcaggtcagtgttgccacaaccttcttctggtttggaagctgtagggaatgagttagtagatatttctggtgttggcagtcttttagagggaagtaaatccgaagctgcagttctgcccccgtcaaccttgatagaagaacaaaataggggat

SEQ ID NO: 6705 - DNA, 441 bp, Glycine max
aaaagctatattgaccgatctgggggaagatgcagttgtttatatgaattatactccctttggcctgagggagttaaataaaccagttaattcactcaagcttggaggaattactggtcctgtggtggaacacatggaagcacggctaaaagaagatatactagctgagattaggcagtctggtgggcgaatgctattacaccgtgaagaatataacccctcaacaaatgagtcaggtgtggttggatactgggaaaatattcgagcagatgacgtgaagacacctgcagaagtttattctgctcttaaagatgatggatatgatattgtctaccagaggatacctttaacaagagagagacatgctttggcctctgacattgatgcaatacagtattgtcaagatgactctgcaggtagttacctttttgtatcacacac

SEQ ID NO: 6706 - DNA, 466 bp, Glycine max
ggtcatttgctgaggcagtgcatccgaaattctcatctgtgagaatgggaaaaggtggatctctgagcgagggcgtgatgaagaagatcgtcctctcctacagctacgtggccatatggattttcttgagcttcagcgtcatcgtctacaacaagtacatcctggacaagaagatgtacaactggcccttccccatctccctcacaatgatccacatgtccttctgcgccaccctcgccatcctcctcgtccgtgtcctccgcatcgtcgagcccgtctccatgtcccgccatgtctacctctcctccgtcgtccccatcggcgccctctactccctctccctctggctctccaactccgcctacatctacctctccgtctccttcatccagatgctcaaggccctcatgccagtcgccgtctactccatcggcgtcttgctccgtaaagaatcatacaaaaacga

SEQ ID NO: 6707 - DNA, 783 bp, Glycine max
  unsure (1)..(783): unsure at all n locations
gatcattttggtctggagcagcttcaaatgctgtggtggttgagccggatgcttttaaggaaaatgacgtcatatatagagcccttagctccaaaggtcaccatgatgacatgctccaaactgctgaattggtgcatcaatcttccactgatgctgcatcatctctgctagtgacagctttaaatgagggtcgagatgtgatcatggatggtaccttatcatgggaaccatttgtggagcagactattactatggcaagaaatgttcacaaacacaggtaccgaatgggggtaggatataaagtatctgaagatggtacaataattacagaagattactgggagcaagtagatgacgcagaagaacatcttcaatcagaggaaaattgtaatggagaatcacgcacgcgaaaaccttacagaattgagctagttggtgtggtttgtgatggctatcttgctgttgttagaggcattaggagagctattatgacagggagggcagtgagggtgaattcacagttgaaatctcacaaaagatttgctaatgcatttccaagattttgcaaacttgttgatgatgccaggctctattgcacaaatgatgtcggtggtccaccacagctcaaatggcggaagatggtgatcagaatcagaatctgcctgatcccagagatatcaaatgcttggaaaggataggcagtgtaaatgttgaagctgattccatctacgaactttacaaggaacccagncntatcatggaaccaggttctgtttggaaaga

SEQ ID NO: 6708 - DNA, 556 bp, Glycine max
cgctcagcatctctcttctcatccttctccacatcatttcaaaaacacaaaaaaccctaacccccaattcatctctcttgaatcgaatcgatggcacgcatgggtccagggttccgattccaccccaccgacgaagccctggtggtgttctacctcaagcgcaagatgaccggaaacctctcccgctacgaccacatcgccgtcgttgacgtctacaagctcgagccctgggaccttccctctctgtcgaagctgaagacgaaggacttggagtggtacttcttcagcgcgctggatcgcaagtacggaaacggctccaggaccaaccgcgccaccgagaggggctactggaagaccaccggaaaagaccgtcccgtcacccacggcgaccgcaccgtcggaatgaagaagacgcttgtttaccacagtggccgtgccccacagggccgtcgcaccaactgggtaatgcacgagtataagatgctcgacgatgaattggcacgttccggcacagtgctggatgtgtttgttgtgtgtaggattttcgagaagagtg

SEQ ID NO: 6709 - DNA, 459 bp, Glycine max
cccacgcgtccgcacaatcccaaattcccaattctctcttccttctccacaccaattggcacctccctaacccccaaattctccttcagcgattcatctctcttgaatcgaatcgatggcacggatgggcccagggttccgattccaccccaccgacgacctgctggtggtgttctacctgaagcgcaagatgaccggaaacctctcccgctacgaccacatcgccgttgtcgacgtctacaagctcgagccctgggaccttccccgttagcacccaattatcttcttccttccccttttttgtggtctcaatagataggcttttgagaattttggaactgttttaatttgtttcggtgtttcagctctgtcgaagctgaagacgaaggacttggaatggtacttcttcagcgcgctggaccgcaagtacggaaacgggtcgaggacgaaccgcgccac

SEQ ID NO: 6710 - DNA, 1275 bp, Glycine max
cctgcataccgctgcgacaagagacaagaagcggtggcagagagcgaacccaaaactagagctaccttcccttcaaaccttccactcttctctccttttccaatcaagggaataatatttcttagagatattccgaaaccatggctcacgccaatcctatgatttttgttgttggaattctaggtaaccttgtctccttctgttgctttctagcaccagtaccaacattctatcgagtttgtaagaagaaaaccacggaaggtttccaatcacttccttacgtggctgcactcttcacttcaatgctttggatattttatgcttacataaagacgggcgaaatacttctcatcaccattaacgcattcggttgtttcatagagacagtttaccttgtcatctatatcacttattgccccaagaaagctaggttctttaccttcaagatgattttcttgttcaacgttggagtgattttcttggtagttcttcttacccacgttctagcaaaagaacgaacagcccgtatcgagctccttgggtggatttgtgttgtcctctctaccagtgtgtttgcagcacctttaagcatcattaaagtggttattcgtaccaaaagtgtagagttcatgcctattactctgtcactcctcctcacagtaagtgcaatgatgtggatggcatacggtattcttctgagggacatctatgttacacttccgaactttgtgggtatcacatttggaacaattcagatagtgctctacttaatatacagaaagaacaagcccgttaaggatcaaaagctgccagaacacacagacgatgttgccaatgatgaaaacgtcaacacagctgtgagcggtgagaatcgccgagcaaacgccactggattcgttgatattgagatcggagagaagacgcaagttcaggaacaagcagacaaaacacaggaccagcaagctgctaatgctcgtgaccaaacagaacacaacaacaatagcatcataacaagggaaggctgagtaatttaatgaaggcatacatgtgcactgtgtatgcctctctctctctgccagcatgtgtcgtgcaatccgagtgaaatcttaaagaggccactggcgctgtcggcgtatacaatatacgccgtattctggtctatagtctctcgcctgcgggactctctatctaaggagcgccgtctcgctctaggcccagtcgagtatcatcacctacgtcgaacctcctctctacgacagctctcctgcagcgcca

SEQ ID NO: 6711 - DNA, 646 bp, Glycine max
gtgggtatcacatttggaacaattcagatagtgctctccttaatatacagaaagaacaagcccgttaaggatcaaaagctgccagaacacaaagacgatgttgccaatgatgaaaacgtcaacacagctgtgagcggtgagaatcggggagcaaacgccactggattcgttgatattgagattggagagaagaagcaagttcaggaacaagcagacaaaaaacaggaccagcaagctgttaatgctcgtgaccaaacagaacacaacaacaatagcaacaaaacaagggaaggttgagaaatttaatgaagggatacatgtgcacgtgttatgcctctctctctctgccaccatgtgttgttcaattcgtgtgaaatcttaagagggttaatgggggcagaggcgttatacaatataggtcgatatctatgtctatatctcttttgcctagttgttactttctattttatgtaacctctgttttgttttctgtgttacgttgaagtaatcaaataatacaatagaaattgtccccaaatattattgggaggggttattgcatgaaccgattaaatccggcgcaatagattctgtttatgtttttacaaaaattaaaaaaaaaaaaaaaaaacccagcggccgctct

SEQ ID NO: 6712 - DNA, 427 bp, Glycine max
tataaacgcccccatccccttcgtttcccatttccgaggttgttgccggccacccaaacccaattcacatcattatcttttttctttctttcttgtgtttgtgtgtttcctcaaaattcacaattacaatcctcacaatcctcctcccttcatttctcaaattcccaatatttcaccaattcaaaacccttcatcattgatcttttcactcttttcttctttgctcgcaacattcattcacaatttgggtgctccttctgtttcttctcctcaccattggattggataatctgcaatttcttcaattgacaaaagcaacgggagttgggttccaacggaattatggttttcctcattgcgatgtttagggaagccagctatgtcatttgtcctttgctttgagaaacctaatttgtgatttttaaat

SEQ ID NO: 6713 - DNA, 600 bp, Glycine max
acacactctctctctaaaaaaactcaaaaataaaacgaagctctcgaaactgagtccactcgtcgcgacgttgcctttttgaatcgtttcgaatttcactttttcgtttcccttcgttgtttgtatatatatcaccaatcaccggtcaccgttcatcgatcatcgatcatcgatcgtcgattattattgttattgttattattttggtggttgcgattctattgtgttctgtgtgtgtggtttgtactgtacgacgtcgttggagcgatttcatcgccgtcgcgctggtacggagaggttgtttgctacgttgcggtgttgttgaaggatggcggtcggagtggagttgccggaggggagaagcggcggtggcggcggaattgtgatggagtttccggccggtgatgaggaatcgttctcgtcgccaacgaggttgccgaagaggctccggcgacggcttcgtgacgcggagtgcaagtctccgagcacggtggaggaaatcgaagcgaaactccacaacgctgatcttcgcagacagaaatactatgagaaactctcaaacaaggcacgtgctaagccaagaagcccctcaaggtgttc

SEQ ID NO: 6714 - DNA, 418 bp, Glycine max
ttttcgcgtgctctctctctctctctcttactttcgctctctaaaaaaaaaactcaaaaacaaaacgaagctctcgaccactcgtcgcgacgttgcctttttgaatcgtctcgaatttcactttttcgtttcccttcgttgtttgtatatatatctatcaccgatcaccgatcaccgatcatcgattattaattgctgttgtttttaaaattattgttattattttggtggttgcgattctattttgtgctgtactgtacgacgtcgttggagcgatttcatcgccgtcgcgctggtacggagagattgtttgctgcgtcgtggtgtcgttgaaggatggcggctggagtggagtcgccggaggggagacgccgccgtggcggcggaattgtgatggaatttccggccggagatgagg

SEQ ID NO: 6715 - DNA, 733 bp, Glycine max
cttatcttattgcatgttttgtctaaatcaattgaatagtatcaattgcttactttctattccgtgatgttttcagaggacagattggaagaaaagtagttcacgttatattttgacatcttattttcaacctttgctgttgtggactggggtaatgctcatctgcagggatttggatccactagtcctaccatcagaaaccagtcaagctattaagcaacggcggctgagttttgtacgatcgttgtcaaccgtgcttacatttgcttactgttcttcaagcttaattcgacaagcacaaaatatttgtatggggacaaatgactccagtgatgaaagaaatatgagaattgattttactgggaaagctgtatatactgcaatatggattgctgctgtgtcattgttcatgagttgctgggtttctccacacataagtagttgactgctggtggtttgggcacagtatcgatttcccttgcaggtcgcgaggtacagtatatgttctttgatagtgtctatgagaatgattaagtcatctttgtcatttgatttttttattcattgtccagtatattcgatttctcaaattttgtaagagtaactcttcaaggcatagccatagcgatagccattatcaatcaggtagactcttgtttgctgtcattctcacttcatttttgtgatgtattcagatatttacaaacttcctttcgagtataatgattcatgc

SEQ ID NO: 6716 - DNA, 1082 bp, Glycine max
ctgttcttcaagatgagaattgattttactgggaaagctgtatatactgcaatatgggttgctgctgtgtcattgttcatggagttgctgggtttctctacacagaagtggttgactgctggtggtttgggcacagtattgatttcccttgcaggtcgcgagatatttacaaacttcctttcgagtataatgattcatgcaactcggccatttgttgtgaatgagcggattcaaacaaagattaaaggatatgaggttactggtaaagttgagcatgtaggctggtggtcaccaacaatagttagaggttctgattgtgaagcagttcatattcctaatcacaatttgagtgtaaatgttgtgaggaatcttagtaagaaatctcattggcgcatcaagactcaccttgctatcagtcacttggatgttaacaagattaatagtattatagctgatatgcgcaaggttttggcaaaaaatcctcaatagagcagaaaaaattgcacagaagggtttttctagagaatattgatccagaaaatcaggctcttatgatattagtatcctgctttgttaaaactagacattctgaagagtacctccgtgtaaaggaagcaatcctcttggatcttctcagagttatcagtcatcatcgagctcggctagccacacccatccgcacagttcagaagatgtgcagtgatactgatttagatgttgatccatttgatgacaccattcccactcgttccagatcaaagaataaccgtcctttcccactgataaatccaccttataaagttaagccttcaactactacaaatgaggacaaagatactaagattgatgaaaccttgccatctgacttcaaagtagaacgtgacaaatttgctgcgacatcgagttcagtccagaagacctccaaatcccaaaagctcaaaaaggaaagagtaggaagttcagaaaagggaacaacatccaaaaatttgtcaaaatccaacgagtttggttctggagagactacttcaccatcaaaactagatgaagagaaatctgttatgtcatcatcatcagctagtcac

SEQ ID NO: 6717 - DNA, 783 bp, Glycine max
ggttgagaaaataactaaactatcaaaatccgtagagcattgcatcgcatagggtaaggtttgggttggtgtcgttcctttccgatgggttgtatggatttgtgattggtggagatttgacggcacacgcattatcaaaatccttactgtgtttctttcgcggtcattgcctcttttctgttcgtggcttcaggatttttttaattctgcagctccgaaatatagataaaccaatcatcaggctgtagaggagaatggcagaatctatatctagcttctggggtccagtcacgtccaccaaagagtgttgtgaaataaattatgcttattcgtcttacattgctgaattttttaatacaatatccaacattccaacaatacttttggctctgattggtcttataaatgcattaagacaacggtttgagaaaagatttagggttcttcatgtttcaaatatgacacttgccattggaagcatgttgtaccatgccacgctgcaacatgtgcaacagcaaagtgatgaaactcctatggtatgggaggtgctgctgtacatgtacatcctctactctccagattggcattaccgcagtacaatgcccatcttcctcttcgtgtatggtgctctgtttgcagttgcccattcagtgtttcattttggtattggcttcaaagtgcattatatcattctcattcttctctgcgttccgagaatgtacaagtattacatttacacacaagatgtttctgccaagcggcttgcaaagttatttttaggta

SEQ ID NO: 6718 - DNA, 648 bp, Glycine max
  unsure (1)..(648): unsure at all n locations
gtggcacttctcgtgttgctcaacacagacaacaatggcgtcggtttcagtaatggctacgaccagcaacaacaggtggtccatggcttccttgcgcttccctgtattgccatcttcctcttcatccaagctccgaatttctcgaaccaaacccaaatcccttctcacccctttcaccggtctggttcctcttaaccccctcttcctctcctctccttcttcagaatatgccggctctgatcactcttttaccattattgacaatggtggtcgagtctctgccatgagacatgggaggaaagtgcccaaactcaacagaccccctgatcagcgccgcgcactcatccgaggccttacaactcagctccttaaatatggtcgcataaagaccaccagagcaagggccagtgcaattaggaagtttgttgataaaatgatcactttggcaaaggatggttctcttcataaaagaagacaagcccttgggttcatctatgagaagcagattgtccatgctttgtttgcggaggttccagaacgctatggcgaaaggaatgggggttacacaagaattataagaaccctaccaaggcggngtgataatgcacctatggcgtacattgaacttgtgtagccatcgcctttatt

SEQ ID NO: 6719 - DNA, 406 bp, Glycine max
cttcttcttctgtttgtgttctctatccacagtagttatctagtctgcgtggtggcacttctcgtgttgctcaacacagacaacaatggcgtcggtttcagtaatggctacgaccagcaacaacaggtggtccatggcttccttgcgctctgctttgccctctcattctccttctgtttcctcttcattgcgcttccctgtattgccatcttcctcttcatccaagctccgaatttctcgaaccaaacccaaatcccttctcacccctttcaccggtctggttcctcttaaccccctcttcctctcctctccttcttcagaatatgccggctctgatcactcttttaccattattgacaatggtggtcgagtctctgccatgagacatgggaagaaagtgcccaaa

SEQ ID NO: 6720 - DNA, 377 bp, Glycine max
gtgttctctatccacattcgttatctagtgagtgtggtggcacttctggtgttgctcaacaatggcgtccgttgcagttatggctacaagcagcgacagcaggtggtctatggcttccttgcgctctgctttgccctctcattctcctcctgtttcctcttcattgcgcttccctgtattgccatcttcaccgtcttcttcttcaacgaaactccgaatttctcgaaccaaacccaaatcccttctcacctctttcaccggcctcgctcctcttaaccccatcttcctctccgctccttcttcagaatataccggctgtgatcactcttttaccattattgacaatggtggtcgagtcactgccatgagacatggga

SEQ ID NO: 6721 - DNA, 397 bp, Glycine max
attgaatactacaagtacttttttaaattgctggcatgcttctgttatcaatccataacaagattcaaactcactcttgaacctaaaaatcatagagaggttgcaactgtgtgctgcactgtggctagaactacatgttctgtggttcccttcatgctttgcactgtggctggctcctgttctgtcaattttcactctctgggggttcagtttgagttagctcaagataaagacatggattctcagaggtttctcatttgacaaaaattgtcttgtatttctttgagggaagaagaagtagatcaagttaaaagattgcagatatgcttatgtggcttgttttgatgtttacttagttatgagggaaaaacactattttcaagggaagagctgaact

SEQ ID NO: 6722 - DNA, 441 bp, Glycine max
ggtggttcaggccaacgaggtcatcgaggatcacagccaggtcgagaccggctccgatgccgtcttcgtcggcgtctacgacggacacggcggcgccgaagcctcgcgcttcatcaacgatcatctcttccttaatctcatcagggttgctcaagaaaatggttctatgtctgaagatattatcagaagtgctgtttctgctactgaggacgggtttctgactcttgttcgaaggagttatggaataaagccattgatagcagcaatgggttcctgttgtctggttggtgttgtctggaaagggacgctatatattgcgaatcttggagactctcgcgctgtaattggttctgtaggtagatctaacaagatcattgctgagcagttgaccaaagagcacaacgctagcaaagaggaggttagacgagaactcaggtcttg

SEQ ID NO: 6723 - DNA, 480 bp, Glycine max
ccttgttttcaacgctttggcttcctgtcattgaagaaataaaagtgaagttctaattggtgttattgagcagatagcatggagccacagtgtagaatcaagaaggatgccactgaattgatagggaataccccaatggtatatctgaacaacattgtggatgggtgtgtagcccgtattgctgctaaattggagtacatgcaagcgtgctgtagtgtcaaagataggattgctttgagcatgattgaagatgctgagaaaaaaggccttattacacctggaaagactgttctggttgagtatacaagtggtaacaccggcataggattggcattcatagcagcattgaggggttataaacttcaggtgactatgccgtcttacgtgagtcttgagaggaaaattatactgcgagcctttggagctgaggtatatcttacagaccctgccaaaggaattgatggggttattcagaaggca

SEQ ID NO: 6724 - DNA, 386 bp, Glycine max
ctggcgacgtctaaggttttctcttaatccgtagaaacgcgtgatggctcttggatcttagcgaaaaaacaccaccatcttaatattatcatcatattcttaataaaataaaataaattgtttgactatagttacgcaattctatgaatttcggtccacaattggttgactgacttcgttctttttgtgagtctaaaacagtgaaacatctttgttttccacgttttatcttcctatcattgaagacataatagtaagatgttcttgaccagatagcatggaggagcctcaatgtgcaatcaagaaggatgccactgaattggtagggaataccccaatggtatttctaaacaacattgttgtcgggtgtgtagcccgtattgctg

SEQ ID NO: 6725 - DNA, 857 bp, Glycine max
aaaaaagaggagcatcacggccatgatcgcattttgctgaggctaaaaagataagcaaaagcgtgaaaaatcgcaaaataccaaatcaaaataacaagcacaattacagtgactccgcttggttcctcttcttcgatcttcggtttgattctgcgtttgttcacatcatggccaccgcttcagtggcatttaagtccagggaggaccaccgcaagcagattgagttggaggaggcgcgtaaagcggggcttgcgccagctgaactcgatgaagatggaaaggaaatcaatcctcacattccccagtatatgtcctctgctccttggtatcttaatgctgagagacctagtttgaaacatcaaaggaaatggaaatctgaccccaattacaccaaatcatggtacgatagaggtgctaaaatctttcaggcagacaagtatcggaaaggtgcatgtgagaattgtggagctatgacacatgattctaagtcatgcatggaaagacctcggagagtgggagcaaaatggacaaacaaacacattgctcctgatgaaaagatagaaacttttgagcttgactatgatggaaaacgggacagatggaatggctatgatgcatcaacatatgctcgagtcattgagaggtatgaagctagagatgaagctcgaaagaagtacctgaaagaacagcaactgaagaaattggagaagagcaaccaaaatggtgaggatgctgcaagtgatgaggaggaagaggaagatgaagatgaagatgaagatgatttaagggtagatgaggcaaaggttgatgagagcaaacaaatggactttgcaaaggttgagaagcgtgtgcgtaca

SEQ ID NO: 6726 - DNA, 317 bp, Glycine max
gagaaacaaaaaagaaaacgagaagcatcaccgccatgatcgcattttgctgaggctagaaagataagcaacaatctaagcgtgtcgaatcgcaaaatatcagatcacaatcaacagtgactacgtttcgttcctctccttcgtttcgtcttcgatcttcggtttcattctgcgtttgttcacatcatggccaccgcttcagtggcatttaagtccagggaggaccaccgcaagcagattgagttggaggaggcgcgtaaagcagggcttgcgccggctgaactcgatgaacattgagatggaatcaatcctcacat

SEQ ID NO: 6727 - DNA, 1040 bp, Glycine max
ggtggaaaaaattgataaaagttcatactctgaatatctctctctgtatgctccctgactcttgcccttttacgactttttggtgcccataaattgaagttgctccctcgcttctccatcacttatggtctttgaaacaaagctagcatagcatttttcttttacaaagcaagacacccttttccttttcattccatcatctctttagctttgtccaaagaccatgtctgtggtggctgataattctgcaaacaatggaagccaccaagtggttttaaatgtaaacggtgatgcccccaagaagtgtgatgactcagccaaccaagactgtgtacctcttctgcagaagttggtagcagaggtggtggggacgtacttcttgatatttgcagggtgtgcttcggtggtggtgaaccttgacaaggacaaagtggtaacacaacctgggatttcaattgtttggggtctcactgttatggttttggtttactcagttggtcacatctctggtgctcatttcaaccctgctgtcaccattgctcatgctaccaccaaaaggtttccactgaagcaggtaccagcttatgtgatagctcaggtcgttggagccacacgtgctagtggaactcttagacttatattcaatggcaagaatgaccattttgcaggaacactcccttccggttctgatttgcagtcttttgtggtcgaattcataatcactttttatctcatgtttgtcatttctggtgttgccaccgataacagagcggtaatctttcatgttcttgttcaaaaggaaaaaaaaaattgcttgtttgacgatggttgtgtcttaatctttgttgaacattttgaatttagcaaatagggttggcattggcgtatcttgccaaactctttggcctttccacataaaaaaaatggttacttaaattgcctaactgcataagcatatttgtacgtgtcgaatcacttggaatacgtgctagaagtttacaacacaagacatgcaatgcgtgtcaatactatatatatat

SEQ ID NO: 6728 - DNA, 294 bp, Glycine max
cgaggtttcactgaagcaggtaccagcttatgtgatagctcaggtcgttggagccacacttgctagtggaactctcagacttatattcaatggcaagagtgaccactttgcaggaacactccctgccggttctgacttgcagtcttttgtggtcgaattcataatcactttttatctcatgttcgtcatttctggcgttgccaccgataacagagcgattggtgagctggcagggcttgcagttgggtctacggtactgctgaatgtgatgtttgccgggccactcacaggggc

SEQ ID NO: 6729 - DNA, 586 bp, Glycine max
gaacaagagataaccgaataaacccacaaaacaacacaaagcagcacaagaaggtgttccattttcaacactcatcagatcccagtcatcaattgcgttaacaactcgtaaggcaaccatgaggggcattctttctgtaaggacagccttggttcaacatcgtagtgagaaattgggccttggtttcaggctatttagcactcagggtgcttccactgctagtaccccacagccgccgccaccacctccaccaccagagaaaacccattttggtggccttaaggatgaggacaggatatttactaacttatatgggctgcatgatccttttctcaaaggtgccatgaaacgaggggattggcatcgaacgaaagatttggtacttaagggtactgattggattgtgagtgaaatgaagaagtctggcctccgtgggcgtggcggtgctggtttcccttcgggcctcaaatggtcattcatgccaaaagtatccgatggccgcccttcatatcttgttgttaatgctgatgaacgtgaacctggaacttgcatagacagggaaattatgcggcatgacccacataaa

SEQ ID NO: 6730 - DNA, 284 bp, Glycine max
ggagagtaataacggaagcaacccacaaaagcagcacaagaacactcatcagatcccagtgatcaattcaatttgcgttcatcactggtaaggcaaacatgaggggcattctttccgtaaggacagccttggttcaacatcatagtgagaaattgggccttggtttcagagtatttagcactcagggtgcttccactgctagtaccccacagccgccaccaccacctcctccgccggagaaaacccattttggcggccttaaggatgaggacaggatattacta

SEQ ID NO: 6731 - DNA, 495 bp, Glycine max
ctcgagccgctttctttcttgtaacttcaacaaacggcagcttcttcaattcaattcaagtcaaaacagaactctctggggtgttggtgttggtgagggatctgaggcaaaggtgttgatgatatgggagcgtgtgtttcaactccacaagggtgcgtgggagggaggttgagctcttccaagaagaaaaccagaaagagaaggagagagggactcagaagaagagttacttctcggttgtgtaaggaatcatcggagaaagttgatgtggcagggttgcctgattgttcctttgctaaccccactttccaaggaagtattgaagaggcatggtttgattcggttgcagtatttgactctgactgtgatgatgattatcagagtgttcctgatgatgttgtatctctgagtgggattgaaggtggatctgtatcaagttttccatcttcaggagatgccaaccatggagtttccacagatcatgttcagaaacag

SEQ ID NO: 6732 - DNA, 444 bp, Glycine max
ctttcttgtaacttcaacaaacggctgcttcttcaattcaagttctctctttttgtttatttcatttgtttattttctctctcttttctttttctatttgatttcattgtttgtgtgtctgttttccttatcattgtgtctctatgacagaacagaactctcttgggtgttggtgttggtgagggatctgaggcaaaggtgttgatgatatgggagcgtgtgtttcaactccacaagggtgcgtgggagggaggttgagctcttccaagaagaaaaccagaaagagaaggagagagggactcagaagaagagttacttctcggttgtgtaaggaatcatcggagaaagttgatgtggcagggctgcctgattgttcctttgctaaccccactttccaaggaagtattgaagaggcatggtttgattccattgcagtatttgact

SEQ ID NO: 6733 - DNA, 473 bp, Glycine max
  unsure (1)..(473): unsure at all n locations
ttttcattcattttcaggtttagagagaccctaacacacttagcgtgatcaagatcaacaatggcggaaaacccttccgaaacggtgtcgtccagttcccaacctcctcctcctcctcctccttcttcttcttcttcttctcagaaatcgccccaagattcgccgcaggtccctgcattgtcgaattttatgccctttccgagtggatattattatcaaatgattcctggtatgtaccctgcgctagttccagggttgactttgccgcaacatgaggagcatgggaaccgcggagctggcatatatgctgttcccgttaacccgtatgacagacaagttactggacttccatacaacacactgattccgctgacttaccgcacacccaccagcaggccaagttctgaagctactgttgccagtgaaaatcanggacaagcaggacagcaacctcaacagcagcagcctgcacc

SEQ ID NO: 6734 - DNA, 450 bp, Glycine max
aattttcatttcattcattttcaggtttagagagacccaaacactaacacactgagcgtgatcaagatcatcaacaatggcggaaaaccctctcgaaacggcgccgtcgagctcacaaccttcttcttctcagaattcgcctcaagattcaccgcaggtccctgcattttcgaattttatgccctttccgggtgggtattatcaaatgattcctggtatgtaccctgcgctagttccagggttgactctgccgcaacatgaggagaatgggaaccgcggagctggcatatatgctgttcctgtttacccgtatgacagacaaattactggacttacatacaacactctgattccgctgacttaccacacacccagtagcaggccaagttctgaagctgctgctgccagtgaaaatcaggggcaagcaggacagctacctcaacagcagca

SEQ ID NO: 6735 - DNA, 696 bp, Glycine max
atcctcttcaccctccctccctccctcgatcttcgtgtcaacacttcaaaaagtcttcccttatagaacaaagtgtttttccaaatcccttcccttcttccaaatccctttactgtcacgtgaaatctaacaccgagcgtgtagatagtctatgaaatccaattaaatgttcttctgagaacaaagaacataagataacaaacagaaagcgcttataaatggctttccacgaccatctaccgcacgaaatcacgttccagccgtttaccgaggagcagcagttaggtcagagcagggacatgcagcggctgctcccgctctccggcggggcgccgacgtggctgaacaacagcaccgcggcgacgctccgccagcagaatttcctccacctgcagccggaatccgccgcaacgacgcagcaaaacgacgacgttcgcggcggcggcggcagcggcatggatcggaaccggaccgagagcaactctgaaccggatgatttggcagaatacaaagcggacattttaggtcaccctctctacgaccagctcctatcggcgcatgtctcatgcctgagaatcgccacccccgttgaccagcttccaaggatcgacgcgcagcttcagcagtcgcagcgcgtcgtcgacaagtactccggcatcggaaacggaaacggcgtcgtcgacgacaaagagcttg

SEQ ID NO: 6736 - DNA, 585 bp, Glycine max
gaaaaaagtaattttccaaatctcttcccttcttccttcacttcactatctcctcttctcctttccttggtttcatccttttattactgtcgtagtggaaatctatcaccctgtggatcaattaattgacgcgagtttatgaaatccaattaaatgttctgagaacaaacgaagaacataagataacagacagaaagcgcttataaatggctttccacgagcatctaccgcacgaaatcacgttccagccgttcgcggaggagcagcagcagcagcagttaggtcagagccgggacatgcagcggctcctgccactctcgggcggggcgccgacgtggttgaacaacagcaacgccgccacgctccgccagcagaatttcctccacctgcagccggaatccgccgcgacggcggcgcagcaaaacgacgacgttcgtgctatggatcggaaccggaccgagagcaactctgaagcggacgatttggcggaatacaaagcagatattttaggtcaccctctctacgaccagctcctatcggcgcacgtctcgtgcttgagaatcgccacgcccgttgaccagcttc

SEQ ID NO: 6737 - DNA, 801 bp, Glycine max
gtcccatgaagcgaaattgcaaaaataaaaacctaggtggcggaaacctaggtactgctgcgactggagtgagtggttccctcagacatatctgtaacgctgcttcttctgtgaggcatcaatggagacaaaagctttgtccttcgctctgtctctcaatgacctcaccaacaaccgcttcacttccaatacgccacatgctgccgccaaagtttccgtctttaccgtcagatgctcttcttcgggtagtggagagaggccttggaagaattcagatgctagacttgtgcttgaagatggttcaatttggagagcaaaatcgtttggtgcttcagggacccaagttggcgaagttgttttcaatacatcattgacagggtatcaagaaattttgactgatcctagttatgctggccagtttgtgctcatgacaaacccacatattgggaatactggcataaattttgatgatgaggaatcaatacagtgtttccttgctggacttgtaattagaagtttgagtatcagtacctctaactggagatgtaagaagcctctgggggattacctagctgaaaggaatatcatgggaatttatgatgttgatactcgtgcaatcacgcggcgattgcggcaagatggcagtcttattggtgttttgagcactgacaattccaaaaaggatgaggaactgcttcacatgtctaagtcatggaacatttgtggtaaggatctaataagtggagtatcatgcaaaactccacatgaatgggttgactaaaacaaaacaacaatgggagt

SEQ ID NO: 6738 - DNA, 562 bp, Glycine max
  unsure (1)..(562): unsure at all n locations
tgaaaatttgtttttttttccgcccatttggtgtgaatgtcgtatttttcgcttttaatgttggagggtattgttaaaattgttaattgatgcagttctgttgcatgtgacataggtagtggagagaggccttggaagaattcagatgctagacttgtgcttgaagatggttcaatttggagtgcataatcgtttggtgcttcagggacccaagttggcgaagttgttttcaatacatcattgacagggtatcaagaaattttgacagatcctagttatgctggtcagtttgtgctcatgacaaatccacatattgggaacactggcataaattttgatgatgttgatactcgtgcaatcacgcgccggttgcgtcgtgatggcagtcttattggtgtcttgaccactgacaattccagaacggatgaggaactgcttcacatgtctaagtcatgggacattgttggtaaggatctaataagcggagtatcatgcgaaactccacatgaatgggttgataaaaccaagcaacaatgggagtntagtaaagtgcctggagaga

SEQ ID NO: 6739 - DNA, 1959 bp, Glycine max
ggtcacaccaaacagagcgcagaaaataaaataggtgaaatgaatatcgatttcaattccgccactgaatttcgaaaccaaaaaaccattccaacgaagaagatgaacctcgaagaagagggttagttacttctgagtgagtgagtgagttagtggttcctctgaggaacggtgaggaccttcaatttctcaagttctcaaccgttcgttttctctttcgttcccctaaccgccgtggatgggacaatctgtttcctccgccgccgtcgctagccgtcgcgagagggaccaaggccaccgctccgtcaactcttccaagaccagattcaccgcctcggtttcgccgatggccggttattcctccggcgccgccgaagaaggcgaaaaccatcgcgtggaggccgttgccgatgaatccaccgactacatctccgatctcccgaacgagtgcctggcttcggtgtttcagtttctcagctccgccgatcggagccgctgttcgctcgtttgccggcggtggctccagatcgaaggacagagccgccacaggctttctctgaacgccgaactggatctgtttccggcgattccgtcgctgttctctcggttcgattcggtgacgaagctcgcgctgaagtgcgaccgcagatccgtgagcataagcgacgacgcgctcgtgctgatctcgcagcggtgccctaacctcacgcgcctcaagctccgcgcgtgccgcgccctcaccgacgctggaatggaagcgttcgcgaagaactgcaagggattgaagaagctctcctgcggatcgtgcacgttcggatccaaaggcatgaacgcggtgctcgacaactgcgccgcgctggaggagctctccgtgaagcgcctccgcggaatcgccgacgcggcggcggcggagccgatcggtcccggcgtggctgcggcgtcgctgaaaatcgtttgcctgaaggagctctacaacggacagtgtttcggaacgctgattctcggcgcgaagaatctgaaaaccttgaagcttttccggtgctccggggattgggaccggctctttcagttaatggcagatcgagtcacgaacatggtcgaagttcacctcgagaggcttcagattagcgacgttggattgcaagcgatcgcgaatttttcgagtttggagattttgcatctcgttaagactcctgaatgttctgatattggacttgttgctattgcagacaggtgcaagcttttgcggaagcttcacattgatggatggaaggcaaatcgaattggcgacgaagggttgatagctgttgcaaaaggttgccctaatttgcttgaattagtgctaattggggttaaccctactaaggcgagtttggaaatgttggcgtctaattgccagaatctcgagcggttggctttgtgtggaagtgattcggttggtgatcctgagatatcttgcattgctgcaaagtgtgtggctttgaagaaactgtgtattaagagttgtcccgtttccgatcaagggatggaggcattggggaatgggtgtccgaatttggtgaaagtgaaggttaagaagtgtaaaggggttacccctgagggtggtgattggttgaggaggactagagggtcagttgctgttaatttagatactggtgaggcagagcttcaggaagccagtgctagtgatggaggggcacaggacaatggtgtagagttccctcaaatgcctgcccaaatcgctgctgcatcgagcagcactcggtctagttcgtcgaggtttgcgcttatgtctgcgaggatttcagcggctgcattgaggagcactcggtctggttcgtcgaggttagggcttttgcctacgaggatttcagcggctagcacttttaagagatggtctggtggtagcactagtgcacgccatggttagggacagggccaaagcaaaacctgagtctt

SEQ ID NO: 6740 - DNA, 530 bp, Glycine max
gagttgtcctgtttcggatcaagggatggaggcattggcaaatgggtgtccgaatttggtgaaagttaaggttaagaagtgtaagggggttacccctgagggtggtgattggttgaggaggactagagggtcagttgctgttaatttagatactggtgaggcagagcttcaggaagcgagtgctagtgatggaggggcacaggacaatgttgtagagtttcctcagatgcctgcccaaatcgtggccgcagcagcatctgcatcaagcagcaccactcggtctagttcgttcaagttgaggttagggcttttgcctgcgaggagttcagcggctagcacttttaggagatggtctggcggtagcactagtgcacgccatggttagggatagcagggccaaagcaaaacctgagtctttggccatttttcattgttttgggctgtcgtatcatttgatttttatatttcttgtacttaaatttgaaatttatgccgtgtgatgttttttgcctttggaattgaagcttcac

SEQ ID NO: 6741 - DNA, 491 bp, Glycine max
atcagccgccgcagaaaaatcaattttttttctctttaactcttcctgcctcgtcacggaagaaatcctaatttctttctcttctacttactctgcctaacggaaagctgtataacgcctctgcctcgccggaaaacttaaaattcgacgcctcgacggaaaagcggctgctaaactgcgcgaccacccaattttcttcgcaaatcagatccagaaacagctatgtctggcaattcgaattgcagtgtttacataggcaatctggatgagagggtgacagacagggtcttgtatgatatattaattcaagcaggacgagtggtagacttgcacattcctaaagataaggaatcagagaaaccaaaaggttttgcctttgcagaatatgaaactgaagagattgcagactatgctgtccggcttttttcaggcctcataacactgtacaacagaacacttaagtttgcgatatctgggagagacaaaactac

SEQ ID NO: 6742 - DNA, 472 bp, Glycine max
atcacatccatgcagtattggactgcaacctaacgtttgagttgactcagaacaaggaagcaataaataacctcccaattttattattattattatttcccagaaatcactctcttcttctgcacttggacaaaccctaaaagcccattcagctgtggttactgttttctctagaaagagacgctgcgagagtggggaaaatgtacaagacccagcttcaagagctggcccagcggagctgcttcaacctgccttcgtacacgtgcattcgggaaggtcccgatcacgcgccgcgcttcaaggccaccgtgaactttaacggcgagatcttcgagagtcctcactactgttcaacgctccgtcaggcggagcactccgccgccgaggtcgctctcaattccctctccaatcgtgctccctctcactccctcgccgccaggatcctcgatgaaacgggagtgtacaagaacct

SEQ ID NO: 6743 - DNA, 388 bp, Glycine max
cccacgctttcgcccacgcgtccgcccttcttcttcttaactttctctctcttctctgttctccgtgccggtgctgtaactgcacgcgtgttttctgttttcgtttgttgtttttttttgctctcatttgcgaaggtgagaaccctaaatttgagagagagaggtttgatttggccggaggtgattctccggtgagattttgcggcggatcagggtggggccggtcacttttctagagagagaaagaaagtgtggttttgagagttagagagagagacagtgcgagagtggggaaaatgtataagaaccagctgcaggagctggcacagcggagctgcttcaacctgccttcgtacacgtgcattcgggaaggtcccgatcacgcgcc

SEQ ID NO: 6744 - DNA, 1655 bp, Glycine max
ggctttcgtcaattctgaggtaaaagaaagtaaagagaaagagagagagagagagagagagagagtcataatcataagtcatacctgatttccattctctctgagagacagtgcgagattggcataatggcgaaaaaagccgttttgatcggaataaactacccgggaacaaaggcggagctgaaaggatgcataaacgacgtgtggaggatgcatcgctgcctcatcgatcgatacggtttctccgaagacgacatcaccgttttgatcgacacggacgagtcctacacggagcccacggggaagaacatccggtcagcgctgaccaggctggtccgatcggcgaagccgggggacgttctgttcgtgcattacagcggacacggcacgcgcctccccgcggaaaccggagaggatgatgacactggctttgatgaatgcattgttccttctgatatgaacctcatcactgatgatgacttcagagaatttgtagatggggtccctagagaatgtaagctcacaatagtatcagattcttgccatagtggtggcctaattgatggagctaaggagcagataggaactagcacaaagggagaagggcaacaacattctggttctggttctggctttggattatccagttttcttcgtcgctccgttgaagacgccatcgaatctcgtggagtccatatcccttcagcgttgctccacaacagaggcagggatgatgatggtgatgcagctcaaaataggtatattgaacttccggatgggggctatgtaaagaacaggtctttgccccttttcacccctcattgatctactcaagcagaaaactggaaaagatgatatagatgttgggaaactgagacctaccctcttcgatgtttttggagaagatgctagtcctaaagtgaagaagttcatgaatgttatttttaacaaactccaacatggaagtggtgaaagtgggggtggaatattggggttggtaggtggtcttgcacaagagtttctcaagcaaaagcttgatgacaatgatgagggatatgcaaagcctgcactggagacaaaagtggaaagtaagcatgaggcatacgctggaccaaccaaacgcggccttccggatggtgggatattgatgagtggatgtcagaccgaccaaacttctgccgatgcaagtcctgcaggaagcgctgccagtgcttatggagcttttagcaatgcaatacaggctataattgaggagactgatggtgcaatcacaaaccaagaacttgttcaaagggcaagagagaagctgaagaactccggtttcactcaaaaaccgggactctattgcagtgatcatcatgttgatgctccttttgtgtgttgatctgttctcatctgatgcagagaaagagagaataatatgtgttgtttatagtctgcttgtgtattgctgtatagttggagactcaaaatgaagttaatgttttcatccagttatcatatgctgctctattatcaggaattatattccttcaacattttagcccttgttgtgtctttgctgctacatgaccattgggctgggagaccaaactatcagagcaggttccatgcaccaaaccacagattttggctttggaagtctgaatatattg

SEQ ID NO: 6745 - DNA, 791 bp, Glycine max
ctaaagtaacgcgcaagataaggagtcgcagtcacacactacagactacagaggcttccttggcagatcagagggagagagagagtgtgaaagttggaatggcgaaaaaggcagtgttgatcggaataaactacccaggaacaaaggcggagctgagaggatgcataaacgacgtgtggagaatgcatcgctgcctgatcgagcgatacggtttctccgaagacgacatcaccgttttgatcgacacggacgagtcctacacggagcccaccgggaagaacatccggtcagcgctgaccaggctggtccgatcggcggagcccggggacgttctgtttgtgcactacagcggacacggcacgcgcctccccgcggaaaccggagaggacgatgacactggttatgatgaatgcattgttccttttgacatgaaccttatcaccgatgatgatttcagggaatttgttgatggggtgcacagaggttgcacgatcacaattgtgtctgattctcgccacagtggtggcctacttgaagaagctaaggagcagataggagagagcacaaagggagaggaggaacaatctggctctggctttggattttcaagttttctacaccggaccgtggaagatgccatcgagtctcgcggattccatatcccttcagcattgcgccacaacagaggcagggatgatgatcgtgatgaagctcaagatagggatattgaacttccggatgggggctatgtaaagaataggtctttgcccctttcaaccctgattgatata

SEQ ID NO: 6746 - DNA, 1040 bp, Glycine max
ctgtttacggacaatagaaaccttcccgacgacggggtgataaatatcagaacagcaaagacactggtttttctccgaactccgaagctttgttggcggcaaggcaaatctgcattgcgatggcgcctccgaagctcttcgtctttgcgctttctgtaaccctaattttcgccatcgttggggccgaagccgatatttccatcgaaggaagcactccagagcctgatacctccgccatcaggatccaattagatcaactcaattccaagatccaaattctcgagtctcaaatcagcgaaaagttggaagaagtgaagaagaaggacaaaattatagcagaaaaagaaaattccattgaagataaatcaattaccatacaatccttgcagaatgagattgcttctctccagaaaaaagggtcactggatgctgaggagcaggttggaaaggctcatgcacgtgctggtgaactacagaagcaggtggacaaacttaaaagggaactagaaacacaaaacaaggagaaagtgaactgggaaactcgagtacctgagttagagaataagattcatgacttgaactcaaaattagaagatcttcaaaagataaatgaggaacagaagacaaaaattcaaaaaagtgaacgcgctcttaaagttgctgaggaagaaatgttaaaggcaaagtttgaggctactgccatagaaaaagagctgagggaggctcatggtgcttggcttcccccttggcttgctgttcactatattcatagtaagtcttttgttgatagtcattggaacaaacatgggaaacctgctttggaaatggttactcaaaaggccctagagaaaaaggcacaagctggaaagtgggctgaacctcatgtggaaaccattaaaactaaatgggtcccggccgtaaaagaacagtggtctgtggtgaagacaaatgctgaacctcatgtgcaattattgaccacgaaaactgttgaagtttatgaggcatcaaagaatgcaatttccccccacttaagcaaggca

SEQ ID NO: 6747 - DNA, 398 bp, Glycine max
ggcttccttccttttacttcacttatcaaaaaattcccctctctttttctctctcttcctctcagccatggtcgaccttcaaaccgtttgctgcatgtgcggtgacgttggtttccccgacaagcttttccgctgcaacagatgccgccaccgtttccaacactcgtattgtagtaactactacggggaattagcagagatagagctatgcgattggtgccaaagcgaggggagaaattactcggggcatagctccaattcgaagaaattaccagtggccggaaatgacgccggaacgaccacccgttctgagtattccggcgagacaatcaggcagcatgatcgtcatgaagacattagtggatcttccgagaaaggaaacagccctgtgcctttcg

SEQ ID NO: 6748 - DNA, 679 bp, Glycine max
gtgaagtgtgcgtgagaaaggaacagagagaagaaaaaggataaagatggaaggagagaaagaaaatcccgatggtaacgccgctttggtgaactccttctgcgaaatcacttcctcttccaaggaagaagctcttttctttttggagagccacaatttcgacctagacgctgccgtttcgactttcctcgacaacgccaacaaccccctcatccctctcaacgacgaccttgccattcccaaccccaacgccgtttcccctccctcagattctcactctccggacttcaacccttctcgctcgccgtctccgtctccttcgcccacccgcaccccctacgagctccgatcccgtaggtctctcggcaagaaaccctccaccagtcgccaaggcaaaattcgcaccctcggcgatctcaaacgcccctcccgcgacgaccatgattccgggtccgatcctgatttcgaacccgaccagtactacaccggctgctaaaagagtgggatgcttgttcgagatcctaccagaggaaacaacaacaacaatttggatgatattttcgatcaagcaaggcatgttgctagtgatgcgcccccggagaatcctcgaagctcttcgaggtcgagaagttttagtggcacggcgaggttgctctccggagagactgtgccatctgct

SEQ ID NO: 6749 - DNA, 1778 bp, Glycine max
cccacgcgtccgtttcttacaacttattcaccactcgttcccgttactccccagcaaccataattatttttttttgacaagcagctcaagaaaaatctgcaaagaataaaacaagaggaggaaatgcaacttacttgttgatataaacttcagacagagcgagttgttgtaaagctagccttgttgcagccatggccacccacgcggctctagcttctacaaggatccccactaacaccaagttcccatccaaggcttcacactctttcccaacccaatgcgcctcaaagagacttgaggtgacagaattctctgggctaagatccacttcatgtgtgacatatgctaacgatgctagagaatcttccttttttgatcttgtagcttcccaactcactcccaagaccaatggatcatcaactcctgtgaggggagagacagtggccaagttgaaggtggcaatcaatggtttcggacgcattggtagaaacttccttcgctgctggcacggccgaaaagactcaccccttgaagtcgttgttgtcaacgacagtggtggtgtcaagaatgcttcgcacctgcttaaatatgattccatgctgggaacttttaaagcagatgtgaaaatactggacaatgaaaccatcactgttgatggtaagcccatcaaggttgtttcaagcagggaccctcttaagcttccttgggctgaacttggaattgacattgttattgagggaaccggagtgtttgtggatggccctggggctggtaaacacatccaagcaggtgccaagaaagttattatcactgctcctgcaaagggtgctgatattccaacttatgttgttggtgtaaatgaaggggactacactcatcagatctctaacattataagcaacgcttcctgcaccacaaactgtcttgctccctttgtgaagatcctggatgaagagtttggaattgtgaagggaaccatgacaaccacgcattcctacactggagaccagaggcttttggatgcttcacaccgtgacttgagaagagccagggctgcagcactgaacattgtcccaaccagcacaggagctgccaaggccgtgtctctagtgttgccacagctgaagggcaagcttaatggaatagcgctccgtgtgcctacacccaatgtttcagttgttgaccttgttgtgaatgttgagaagaagggtcttactgctgaagatgtgaatgcagcattcagaaaggcagctgagggtccactgaaaggtgtgttggacgtgtgtgatgttccacttgtgtctatcgacttccgctgctctgatgtttcctctactattgactcctccttgactatggtcatgggagatgatatggttaaagtggttgcttggtatgacaatgaatggggttacagccaaagagtggtcgatttggcacatctagtagcaagcaagtggccaggggcacctaaagcggggagtggagacccattggaggatttctgcgagacaaaccctgctgatgaggaatgcaaagtttatgaatagaggagagctccttttctaacgtatcatgtgaaaaagaaggaaattgttcagacagtctatctgaggagagattttcaaagtttatatttatttgcagccaataataagttttggcgtgactgaatgaatatcacccatatattgattgatattgaatttctgaattcttgtaactgatttgcaattcttcgaatcttttaatcattgctcagtgttaagtggaaggct

SEQ ID NO: 6750 - DNA, 662 bp, Glycine max
tgaagggcaagcttaatggaatagcgctccgtgtgcctacacccaatgtttcaggggttgaccttggtgtgaatgttgagaagaagggtcttactgctgaagatgtgaatgcagcattcagaaaggcagctgagggtccactgaaaggtgtgttggacgtgtgtgatgttccacttgtgtctatcgacttccgctgctctgatgtttcctctactattgactcctccttgactatggtcatgggagatgacatggttaaggtggttgcttggtatgacaatgaatggggttacagccaaagggtggtggatttggcacacctagtagcaagcaagtggccaggggcagctaaagcagggagtggagacccattggaggaattctgcgagacaaaccctgctgatgaggaatgcaaagtatatgaatagaggagagcgcctttttctgatttgatgattaccattaccagcagcaaaccatttttactctttgccttgtgttaacgtatcatgtgaaaaagaaggaaattgttcgttcagacggtgtctgaggagagattttcaaagtttaacattatctgcagccaataataaattttggcgtgactgaaattcatgaatatcgcccatatattgattgatatggtatttcttaattcttgt

SEQ ID NO: 6751 - DNA, 507 bp, Glycine max
cccacgcgtccgcccacgcgtccgcccacgcgtccgcccacgcgtccggccttgttgctgcgatggccagccacgcggctcttgcttctacaaggatcccttcaaacacaaggttcccggccttcgcctcgcgctctttcccatcccaatgcgccttaaagagacttggaggtgacagaattctctgggctgagatccacttcatgtgtcacatatgctaacagtgctagagaatcttccttttttgatcttgtagcttcccaactcactcccaagaccaatggatcaactactgtgaggggagagacagtggccaagttgaaggtggcaatcaatggtttcggacgcattggtagaaacttccttcgctgctggcacggccgaaaagactcaccccttgaagtcgttgttgtcaacgacagtggtggtgtcaagaatgcttcgcacctgctgaaatatgattctatgctgggaacctttaaggcagatgtgaaaatactagacaat

SEQ ID NO: 6752 - DNA, 384 bp, Glycine max
ttttcattttattatttttttgacaagcagctctagaaaaatctgcacagaataaaacaagaggaggaaatgcaacttacttgttgatatagacttcatagagagaaagtatgtagataagccatgatgctgccatggcctcccacgcggctcttgcttctacaaggatcccgtcaaacgcaaggttcccatccaaggcctctcactcttgcccaacccaatgcgccttatagagacttgaggtgtcagaattctctgtgcttacatccacttaatgtctcacatatgctaaccaccctagagaatcttttcctactaaccttgtatactttttaactgattctttagaccattctatctactattgctattttctaatcccat

SEQ ID NO: 6753 - DNA, 238 bp, Glycine max
gaaatcgctcttcaaccgcaacaaggacgcgatctcctcccacacggcgtcccgatcgacgtctttatccgtgcgttcacgcacgcgtatggcggatgagctggagcaggtgttcaacaagttcgacgtgaacggcgacggcaagatctcggcgtcggagctggggtcgatcatggggagcctggggcagccggcgaccgagctggagctggacaacatgatccgcgaggttgacggc

SEQ ID NO: 6754 - DNA, 243 bp, Glycine max
gaaatctctcggcaaccgcaacaaggacgcgatctcctccgacacggcgtcccgatcgacgtctttatccgtgcgtgcacgcacgcgttaacatggcggctgcgctggagcaggtgttcaacaagttcgacgtgaacggcgacggcaagatctcgccgtcgcagcggaagaccgctccgtgtgcctacacccaatgtttcagttgttgaccttgttgtgaatgttgagaagaagggtcttact

SEQ ID NO: 6755 - DNA, 982 bp, Glycine max
gatacttgtaattcataggcagatatctaccgagagggttaaacacttagcatctgctgagggtaccttggtagacaccacactacccataatatggtcgaaaacaacaacccaagggtttttggttcttctatgtttctatgtttgcttgtgttgatgatttggaacaagattgttgttgttgttccacaagccgaggctcgagcattttttgtttttggtgattcgctagttgacaatggcaacaataactacctattcaccactgctcgtgccgactcatatccttatggcgttgactatcccactcacagggccactggccgtttctccaatggcctccataatcccggacattatcagcgagaaaattgggtcagaacccacattgccgtatctaagtcgcgagctcgatggagagaggctactcgttggtgccaattttgcttctgcggggataggaattctcaatgacactggaattcagtttataaacataattcgaatcaccagacaattacagtactttgagcagtatcaacaaagggtgagcgcactagttggaccagagcagactcaacgactggtcaaccaagcactagtcctcataaccttaggtggcaatgattttgtcaacaactattacctggtgccattctctgcaagatcacgccaatttgcacttccaaactatgttgtataccttatttccgagtatcgcaaaattcttgtgaggctttatgagttgggagcaaggcgagttttggtgactggaacgggacctttaggttgcgtgcctgcagaactggcgcagcgtagcagaaatggggagtgtgcagcagagctgcaagaagcttctgctttgttcaatccacaactcgttcagttggtgaatcaactcaactctgaaattggttcggttgtcttcatttcagccaatgctttcgaatccaatatggattttattagtaacccacaagcg

SEQ ID NO: 6756 - DNA, 626 bp, Glycine max
gtcaattacagtggagctgtattccgccagtacccaggtccttggcaggtgatgcttaaacaagcagatggttcttatgcttgcatagcagaaagtgcaaaccgcttcagccttggcgaggccaaagaggaattgttgagggtcttgggacttcaagaagaagagggaagttccctagaatttcttcgaagaggctacaaggcaagcacgtggtgggaagaagattttgattcagaagtatcttctgcatggcggagttgagtagtacactgttagaagagactgttttattgcatctgcatgtagtagtcattgaatgggctcccgtatattcaagaaagacatttcctgcagaactgcccaatttttatttttatttgttaatatttcgtaaggtaatatttttccattcttcccctttctgtttgaaaacggatgtcacgcatggcaaagaaatgtaaggacatcacgaactcaattgtaatttgcaacatgtctattgtgggcatctacccgtccatgtcaatagttagtgtgtacaattgttagggataccgcatgcgcatatccctgtagggagagcgccatgcaaccctattttgtaaaatcttgttacattcctcgcc

SEQ ID NO: 6757 - DNA, 531 bp, Glycine max
acggagtaagatttttcttgttcctttgttggtgggtttcctttccgcttcaggttcagcttcaacttcaaattctcagtgaaaccaattcagctgagtccaaatcccaaatccgaatcaaaatccgaagtgagatttgcgatggagaggcttcagcgaatgtttgcaggtgcaggtggagcgctagggcaccctcccccagattccccaactctcgattcctccgagcaggtctacatctcctcactcgctctcctcaagatgcttaagcacggaagggctggggttcccatggaggtgatgggtttgatgcttggagaattcgtggacgagtacaccgttcgtgtggttgatgtcttcgcaatgccgcagagtggcactggtgttagtgttgaggctgttgatcacgtttttcagactaatatgcttgacatgctcaaacaaaccggaagaccagaaatggttgttggttggtaccattcccatcctggatttggctgctggctctctggtgctgacatcaatacacag

SEQ ID NO: 6758 - DNA, 443 bp, Glycine max
cccacgcgtccgcccacgcgtccgggattttctggttttgttgttggtgggtttcagcgttccgcttcaacttcaaattctcagtgaaaccaattcagttcagtccaaatcccaaatccgaagtgagatttgcgatggagaggcttcagcgaatgttcgcaggtgcaggtggagctctagggcaccctcccccagattccccaactctcgattcctccgagcaggtctacatctcctcactcgctctcctcaagatgctgaagcacggaagggctggggttcccatggaagtgatgggtttgatgcttggagaattcgtggacgagtacaccgttcgtgtggttgatgtcttcgcaatgccgcagagtggtactggtgttagtgttgaagcttgtgatcatgtttttcagactaatatgcttgacatgctcaaacaaaccgga

SEQ ID NO: 6759 - DNA, 1506 bp, Glycine max
acaagccataatagcattgggttcttctctagtctctgtcctaccacaaaaatggtcccaaaaccaatcttagtcacaacaccaccgccggcaacttctgcaccctctccactgctcaacgcagtttcacccctcaaaacagaagaaaaaccccaaacacaaaccctaaaaacccccaccaccaccactcaaaaagctataaccaaaccaagcccatcatcatccaccaccaaaacgacgccgcagcagcgcgtggagctaaagagaaaaacaaactcatgggtccccgcactaatgctaaacgcattcgacgacatcatcaacaacttcatagaccctccactcaaaccctccatagaccctcgccacgtgttgtcacaaaacttcgcccccgtccacgagcttcctccgacggagtgtgaagtcattgaaggctctctcccaccgtccctcgacggcgcctacatccgaaacggccccaacccccagttcctcccgcgtgggccctaccacctcttcgacggcgacggcatgctccacgcgcttcgcatctcccatggcaaaaaacccacgctctgcagccgctacgttaaaacctacaaatacaccatggaaaacgacgccggtttccctctcatccccaacgtgttctccggcttcaactccctcgtggcctccgcggcacgtggctccctctccgctgcacgtttcttaacggggcagtttaaccccgctaacggcattggcctggccaacaccagcttagccttcttcgggaatcgtctcttcgcgcttggcgaatccgacctcccttacgtcgttaacgtaacccctgacggcgacatcgaaaccctcggccgtcacgactttgacggaaaactcacgttcagcatgacggcgcaccctaagatagaccccgacacagcggagtgcttcgccttccgttacggccccgtgccaccgttcctcacctacttccgtttcgacggtaacggcaaaaaacacgaggacgttcctattttctccatgctaacaccttcgttcctccacgatttcgccattacgaagaaatacgcgatcttctgtgatattcagctcggattgaaccctcttgacatgatctccggtggctcccccgtcggctccgtcgcctccaaggtcccaaggatcggaatcctccctcgtgatgctaaggatgagtcgatgatgaagtggtttgaggtgccggggttcaacatcattcacgcgataaacgcgtgggaggaggacgagggaagaacggtggtgctggtggcgccgaatattctttcgatggagcacgcgctggagagaatggagctagttcacgcgatggtggagaaggttcggatcgagctggacacagggataatcacgcggcaaccggtgtcggcgcggaatctcgatttcgcagttataaaccctgcgttcgtggggaagaagaacaggttcgtttacgcggcggtgggggacccaatgccgaagatc

SEQ ID NO: 6760 - DNA, 488 bp, Glycine max
agctatgacgtcgcatgcacgccttccttagcctgggatttgggttgagcacatttcaaaatgaagcattgcatctcaaaacattttctaagttgtttcgctttgtttctgttgctagtcgcaacaacctatgccactgttgtccctaccaccacccaaaagccaccaagaagctttgcaaaccaattcctcatcccccagaacgcggcacgtgcggtgctgaggctgcggccattggtgtgggactccaaattagcacactacgcgcaatggtatgccaaccagaggcgcaacgattgtgccctagagcactccaacggaccttacggtgagaacattttctggggcagtggcacggggtggaagccagcacaagctgttagtgcatgggttgaagagcgccaatggtacaattattggcacaattcttgtgccaatggacagatgtgtggacattacactcagattgtgtggagcaccaccagaaa

SEQ ID NO: 6761 - DNA, 575 bp, Glycine max
gtggagatttaactgtgggctttatcacaatcaagtccaaagttcactcaagtgatgcgaggtgtttatgctgtgaaagctcttcgtttttccactgctttaaatattttgaaagatgaatttctgcgttccagagattatccaaaatgtcctccaacatctcatttatttcatcgattcaggcagttgggttatgcctgtatcaggtttggtcaatttgatagtgcaaaggaaacatttgaagttatagcagattatgaaagtatgcttgatctgtttatatgccaccttaatcccagtgccatgcggcgtcttgctcaaaaattggaagaagaaggtcttgactcggaattgaggagatattgtgataggatattacgtgctcgatctacaggatggacacaaggtatatttgccaacttttctgctgagagtatggttccaaaaggacctgaatggggtggtggaaactgggaaattaaaacacctactgctgtgaaggatatacctcagtgggagcttgctgcagaggtgacaccatacatgaaaactgatgatggtacaattccatccat

SEQ ID NO: 6762 - DNA, 738 bp, Glycine max
gcgagatctcagcctcagactgttgcaaaggctagttcagagtcagattcgaaggctgtgaccggtgattcgtcgcctccggtggcggtggaggctccgccgccacttgtaccgcctgttaggtctcactcaaacagtgttgttgtaccatcatctagcttgcagacactaaaaccagagttgcctgaaaattccccacaaatcatagaagaaccaaaggtcaatactgctatgaatgggagctgtagcagtaccagtaccagcactaccagctcaacaagcaacagcaacagtggtgctagcagcagtgtatttgcaagcttgtttgcctcatcatcagcatccgcaactgcaagcctccactctcaaacaccagcattcactgacctaattagggccatggggcatccggatcatccagcagacctctcaaggccttcatcttcagagcccatttctctgtgcccagccaccaatcatggctcatccatttttggaacgggaaggcaggaacgccgtcagtatgccccaccgccacagccagccatgtctgccactgcattgctgcagaaagccgcccaaatgggtgcagctgcaacaaatgcctcttttcttcgtgggttaggcattgtatcatcttctgcatcaacgtcatcagttcagcaagataatttgcattggggcaatcagcaattggaaccagaaattgcttcagttcttgaaggtcttggacttggg

SEQ ID NO: 6763 - DNA, 542 bp, Glycine max
gctgctacaaccgctacttgtagagcctcagcgaagtcacagcattcagaatcagtatcggagaattttatatttttctctaggattctctctgttagtttgaataaatagacatgtctgagactgaggtaaatccaactatcagcaagtcaactggattgcctcgaaagcgcttctatcgagcacgagcacacagcaatccactgagtgactctcacttcccagtgccaatttcacccagccatgttgactattctctccattaccctcagttatttcccttgtctggtcaagctgatagttccaaaaagatccagtttgctgatgttggttgtggttttggagggctgctcataagtctttccactctgttcccagaaacattgatgattggaatggaacttagagacaaagtgactgagtacgtcaaggagcgatttcatctttaagggtagcaaatcctggtcaataccaaaatgtttctgtggtgcgaactaactccatgaagtatattcctaattactttgagaaaggaacgctct

SEQ ID NO: 6764 - DNA, 1276 bp, Glycine max
tccgcttttattgggcttcaggtgcgtgtgtctgattctgaaacagtccggtggttgaaccatgcagttgaaaacatatggccaatatgtatggaaaacattgtctctcagaagatattattccctatcataccgtggttcttagagaagtacaaaccttggactgctaaagaagctgtcgttcagcacctatacatgggaagaaacccacctttgatcactgaagttagggttcttcgccagagtgatgatgatcacttggttctggagttaggaatgaattttctcacagctgatgatatgagtgcaatacttgctgtgaaactaagaaaaagattgggctttggaatgtgggcaaaactgcacatcacgggaatgcatgttgaagggaaggtcttagttggggtgaagtttctcccaacatggccttttattggccgtttgcgtgtatgctttgttgaacctccatattttcaaatgactgtcaaacctatgtttactcatgggcttgatgtgactgaacttccaggcattgctgggtggctagataagctgctgtctattgcttttgaacagacccttgttgagcccaacatgctggttgttgatgttgagaaatttgtttcaccacaacaagagtcttggttcaaagtgaatgagaaggagcctgttgcttatgcaaaagtggaagttattgaagcatctgagatgaagccatctgatctaaatggattagcggatccttatgtgaaaggtcaaatgggtgtatacagattcaggacaaagatacaaaggaaaacacttactccaaaatggcacgaggaatttaaagttcccatcataacatgggagtctgataacgtgctggttattgcagttcgtgacaaggaccatttctatgatgatatccttggggactgtaccgtgaacatcaatgaatttagggatgggcaaagacatgatatgtggctgtcacttaagaacatgaaaatggggaggttgcgtttggcaataactattcttgaagataatggaaagggagttgatactactacacgtgaccaggaaacaatggactttgaagaacgaaaaatctcctttgaagcaaatgagactactgataatagttccttctcacctgttccacctgaaaaatctgagaagttggcagataactatgagcctatagacatcgacgggcaaaaagagacaggagtttgggttcatcacccaggaagtgaagtttcccaaaggtgggagcctaggaaagggaaga

SEQ ID NO: 6765 - DNA, 322 bp, Glycine max
ctcgagccgaatcggctcgagtaaggatccgctaatccatttagatcagatgggtgtatacagcttcaggacaaagatacaaacgaaaacacttactccaaaatggcacgaggaatttaaagttcccatcgtaacatgggagtctgataacgtgctggttattgcagttcgtgacaaggaccatttctatgatgatatccttggggaaaaaaactaaaagataataaagaaaaaaaaagggcggccagtctagaagatccaatcttacctacccttgcatggcatgcattagctgttctatagggtctactaagttaaattc

SEQ ID NO: 6766 - DNA, 623 bp, Glycine max
ggaaaaaggaggaggaagaggcactctcaatcaagtttataagtgctatagcctgcagcaatgtacacatgaaatgaagtgtctttccaacagcatttgcaacattcagacataacataactttcctgcgaaggaagtgttatgccattacatcatcagaactcttttgtctctctggcttgcaactcaactctgctgctgtagcaaagcctcggttctatggcttcctagttgcccatttgagaaaaaacccacaaagatcttgaatttggctgattctggaaatgggttctcagataaggcttctgggtctgtgtctatggatgtacttgtcaagcttaagcttcattggagccggtgctgtgtatggaagagaaggtgaagttgtggaagggattgttttagttcatgggaaaactgctattggaaggattgatgatgattctatctgtgcaaccctggattggtggccttctcagaaatgtgactatggaaaatgcagttggggtcatgcttctctgctcaatctggacctcaacaacaaaattttgttaaatgcagtaaaagccttttcacccttgaaaattagattaggtggcactttgcaagacaaggtcatatat

SEQ ID NO: 6767 - DNA, 354 bp, Glycine max
ctttccaacagcatttgcaacattcagacataaataacataactttcctgcgaaggaagttttatgtcattacattatcacaactcttttgtttctctggcatgcaactaaaaaactctgctgctgtagctctggcttgcaactaaaaaactcggctgctgtagcaaagcctcagttctatggcttcctagttgcccatttgagaaaaaaaaaaccacaaagatcttgaatttggctgattctggaaatgggttctcagataaggcttctgggcctgtgtctttggatgtacttggcatgcttaagcttcattggtgtgggtgctgtgtatggaagagaaggtgaagttttgga

SEQ ID NO: 6768 - DNA, 602 bp, Glycine max
acagaataatgaaaattttgattgtaactgtgaagactatgtggggtctgaaaggctgaagttcaaatttgatggtagtttcaagcggactttcccttcagaagacaattcctccagcagtccagattcatcaaaaagttttggtgagacacaattagatttatttcaccatcgccatggcttgttgatattgcatcttgttgcaacgatgatgtttgccccatccgttgtagcttggatccagaggttggcgttgggtgagagcctcccgtggctcctggattcagcgctttgcatcggcgtcattcttcatggcatctgcaactcgaagcccgaattcaattccttcttcttgtcctatactgggatccccatccgcaatgttaggctatattttatctatctcatagctggatactggtcttatttttctggtctcactttggctccgtacagggcgttttatgttatgggtgctgtggggggcatttccttcgccttatggatgtcgcgtacacggaatggggaagagaaagaggttacttatagcagccggaagcattctcacaggcactgaaagtttcgaaaaaccactttcttac

SEQ ID NO: 6769 - DNA, 470 bp, Glycine max
ggattaacaaaataaaaagtttcatgagtggggagagtttgtaaattgcgacttcgaatggcgagttgcgaataaagcgaagatagaaaaagtgcggcaaaggatgtgtgtgcttgcttcattgtttgcgttgtgaagtaggtgatcgaagtcgttgaatgctatattcgtttacgaaatgaaggaggacgcggagaaagataaaggcaaagacaacaataggatttggggagctattctcttcggcttaattggcgccaccgtcactacctttgcggtcggtcagctgcggaggagtgctgaatggttctatactcagttatcgaggacacagtcatcgtggaaagggaagagagtggtgggttctttcccgatcaggcttttcaaggaagaggcattggaggaggcacaattaaagcgcattgcaagaagagttagaggaggagatggaaagagtggaacgaataagg

SEQ ID NO: 6770 - DNA, 629 bp, Glycine max
cacactcattattactatacacaccctctttctcctcctcctccttcttcttcttctccttctttctctttttcattctttctttcaacatgggtggcatcagcctcgaagaaataaaaaacgagaacgtcgatctggaacggattccaatagaggaagtgtttgagcagctgaaatgttcaagagcaggtctaacatcagaggaaggggccaatcggctccaagtctttggaccaaacaaattggaagagaaaaaagagagcaagtttttgaagttcttgggctttatgtggaaccccttgtcttgggtcatggaagctgctgccataatggccattgctttggcaaacggaggaggaaggccaccagattggcaggactttgtcggaattatcgcgctgctagtgatcaactccacaatgagttttattgaggaaaacaatgctggcaatgctgctgctgctcttatggctggtttggctcccaagactaaggtactaagggataaccgatggagtgaacaagatgctgcaattttagtaccaggcgacataatcagcatcaagttaggagatatcattccggctgacgctcgtcttcttgagggtgatcctttgagtgttgatcag

SEQ ID NO: 6771 - DNA, 396 bp, Glycine max
atcaggttcctttgtccagacaggagcattcccagtttgccttaaacaaagataaacaaacacgggcatgtagcagacaggcacatacataccccaataaccccatcatcgttgaagaagatgggacgagccaggcttctggtttcagacttcgttctgtctttcatgtgggtatggtccggtgttctccttcggatcatcgtcttcaaccaccttggcttcgctcatggccccctcggtgaggttatcaaaactaccttctccatcgccaacatgttcttcttcgccttcctcgtcaaggttacacgtggcggcgcctacaaccccctcaccgttctggccgatgctatctccagggattttaacaacttcctctactgcgctggtgccagaatc

SEQ ID NO: 6772 - DNA, 481 bp, Glycine max
agctcggctgtttctattcagactggtatgcgagggatggctgctcgtactgagctacgcttcaggaagcaaactcgtgctgctattgtcattcagagccactgccggaaatacctggctcaacatcattttacaaacttaaagaaggcagcaattgcaacacaatgtgcatggagaggaaaagttgctcggcgagaattacgacagctcaagatggctgcaagagaaactggagctctccaagctgccaaaaataagcttgaaaaacaagttgaagaccttacattgaggttgcagctggaaaaacgcctgaggattgacattgaagaatcaaaaacacaagaaaatgaataactacaatctgctttgcaagcgatgcaacttcagtttaaagaaactaagttgttacttaaaaaggagcgtgaggctgcaaaaagagaagctgagagagcgcctttcatacaggaggttcctgttgttg

SEQ ID NO: 6773 - DNA, 488 bp, Glycine max
cttggttgtaggttgtcttctctattattgacctgtgctataaatctttgttttgtaacaacaaacagatctataatgtaaagggaagggaggttcacattcacattacaagcaacaacttaacgcttaacaacagcactctccctaatccttctgtgtatgcaaaatgagaccatgcaaatgcaaatgcaatgttctctctgctctcattcttcttgtcacattcctttttattgcttcttccgtccactgtgaagacccatatcggtacctcacttggaaggtcacctatggtgacatctatcctcttggtgtcaagcaacaagggatcttaattaatgggcagtttccagggcctcaaatagatgctgttacaaatgacaacttgattatcaatgtctataactacctcagagaaccgttcctcatttcatggaatggcttacagcataggaggaactcatggcaggatggagtgtatggcacaa

SEQ ID NO: 6774 - DNA, 359 bp, Glycine max
ctgattactgccttgaggttattgccaatctgcgttttgctgatcccactccaattcaagctcagggttggcccatggctctgaagggtagagatttaattggcattgccgagactggctcgggtaaaactttggcgtatttgcttcctgcatagtgcacgtcaatgcacaacctcgattggcacatggggatggtcccattgtcttagttttcgcaccaactagagagttggctgttcaaattcaggtagagcctctgaaatttgggtcccgggcaaataaaagaagtacgtgcatctatggcggcgcaccaaagggcccccaaattcgggagcttaaaagaggcgttgaaatagtta

SEQ ID NO: 6775 - DNA, 571 bp, Glycine max
gataattgctttgatgcagacgtcatctatgcttttctggatgcaaatggaattggcaaaactcattccattttctacatttcatatgctttgcatttggaatctaagaacaagtttaaagctgccaatcagatgatggagcttggcatatctaggaatgctcaaccggttgataaattgaaggctgcttatagacaattcgtggcacgctcaatggcaaggcctatagctatagatgatgcagtagaaggactggcacccacgcgtagctgtggaactgttcttgccaagggagaaaatcgtgcaccgctgtccattttgaactcgaaccgtgatccttgtgctaagaatgataggtcccgagcagctccactttcccatttataaagattcagctgacactggtgatactgatcctcataagccagacctgtcgcactcttggcacacacttggagctcgagctgacagaaataaggaaaacaatgctattcctggcaagtggaagtgctatatgaattcacagcgacctgggacttataactggaggggctactgcaagtgcctttta

SEQ ID NO: 6776 - DNA, 513 bp, Glycine max
  unsure (1)..(513): unsure at all n locations
caacaaacaactaacacgaagaagaagaaatttctctgcgcttggattcattcatttattctctgaagaaaaccctctcctttctcccaaggatggctaaagacttttacccctcctattgcttggtagcttataatctgggtgttttgttcaaaatctgtgcaatctgactggaggaacttgatttcagtttctggtgttcaaagcctttcttccagtgtgcaaagtactcctgaaaaaatggccattcagatgatgcttcaaaaagttcagaacttcttcagcagttcctaaaatgtggtccaaagaaggaacttcttcaaatgtgttttgacaaggacaataaaacatttcttcaaaaagcagaatgaccgaaaataagtcaaccagtaagatcactaagaaacaagagacaaaaaaagtttctagtttcagccatcagccccctagaaagcaacctcggaagggtgaaaaccctactagactcatacctnctactgaccagtcttctga

SEQ ID NO: 6777 - DNA, 1239 bp, Glycine max
cccacgcgtccgctcagctataaataatcacaaaacccttccaaacccttttcctctttcagctcgccttcagcttccacaatcctatcgcacatctttctcagttctacgatggagttttggggtgccgaggttaaggttggagagtctgttaaggtagacccagccgaatttgaggcatgcatacacctttctcaggctgctcttggtgaggcaaagaaagataagcctgaaccggtggttctctacatgaaagttggtgaacagaaatttgtcttgggaaccctttccagggagaaaatccctcaaatatctctggaattggttttggaaaaggagtttgagctttcccacaactcaaagaatgccagtgttcatttctgtggatacaaggcattttatgatgctggcgatgatagcgaggaggatgaatttactgatagcgaagaggatgttccattgcttaaagcagagaatggaaaacctgaaacaaaagctgaagagttgaaggtacctgaatctaaaaaagctgttgccaaggctagtggatcagcaaaacaagtcaaggttgttgaaccaaaaaaagataacgaggaggactctgatgatgattctgatgatgatgattttggatcttctgatgaagagatggaggatgctgatagtgacagtgatgatgagagtggtgatgaagatgatgatgaagagacccctcccaagaaggtggatctgggaaagaagagacccaatgagtctgcatcaaaaactccagtttcttccaagaaagccaaaaatgctactcctgaaaagactgatggtaagaaaggtggacatacagcaactcctcaccctgcaaagaaaggcggaaagactcccaacagcgaagccaaagccaagactcccaacagtgaagccaaagccaagactcctaagtctggtggactctcttgcaaaacctgcagcaagtctttcaccaatgaaagtggtctgcaacaacataacaaggcaaagcatggtggtcagtgatatttttgctgttggttatgactcattcatgtattatttttggcttatgtaatagagtgagtttcctaaggacgttaggcatctgtccttgtttttcggcccagtaaaccgtggtattgtggtagtgttgaaggtgaatgcatgtttgataagtttttgtttgaaattttaatgggaacttcaattattgtctataattattgcgtttagatt

SEQ ID NO: 6778 - DNA, 743 bp, Glycine max
cggctcgagctatcagcatcctccatctcttcatcagaagatccaaaatcatcatcatcagaatcatcatcagagtggtgatgaagatgatgatgaagagacccctcccaagaaggtggatctgggaaagaagagacccaatgagtctgcatcaaaaactccagtttcttccaagaaagccaaaaatgctactcctgaaaagactgatggtaagaaaggtggacatacagcaactcctcaccctgcaaagaaaggcggaaagactcccaacagcgaagccaaagccaagactcccaacagtgaagccaaagccaagactcccatgtctggtggactctcttgcaaaacctgcagcaagtctttcaactctgaaagtggtctgcaacaacataacaaggcaaagcatggtggtcagtgatatttttgcagttggttaaccaggtctttcatgtattatttttggcttatgtaatagagtgagtatcctaaggacgttaggcatctgtccttgtttttggcctagtaaaccgtggtggtgtcaaggtgaatgcatgtttcggaagttttgtttgatattttattgggaacttcaattattatctaagattattgcggttagatcttttgctgcttatctttgtttatattaaatttatgctggtgaggatatatgggttctataaaggtgccttcccttctcgagcttggtaaagaaaaacattggcttgccctacattgagtat

SEQ ID NO: 6779 - DNA, 893 bp, Glycine max
  unsure (1)..(893): unsure at all n locations
ttaatttcttaaaaaaaccctagntggcgcggcacaacccacccaaaatacaaaccttcatttttctcattcacggctataaataatctcaaaaacccttccaaaccctcacttcgccttccgcttccggcgccatatcgcgtatctttctctgttctattcctacgatggagttttggggtgccgaggttaaggttggtgagtctgttaaggtagatccagccgaattcgaggcatgcatacacctttctcaggctgctcttggtgaggcaaagaaagacaaatcaaatgaaccagttgttctctacttgaaagttggtcaacagaaatttgtcttgggaaccctttccagggagaaaattcctcaaatacctctggaattggttttggaaaaggagtttgagctttcccacaactcaaagaatgccagtgttcatttctgtggatacaaggcattttatgatgctggcgatgatagcgaggaggatgaatttactgatagcgaagaggatgttccattgcttaaagcagagaatggaaaacctgaaacaaaagctgaagagttgaaggtacctgaatctaaaaaagctgttgccaaggctagtgcatcagcaaaacaagtcaagattgttgaaccgaaaaaagacaatgaagaggactctgatgatgattctgacgaagatgatgattttggaagttctgatgaagagatggaggatgctgatagtgacagtgatgatgagagtgatgacaaagaagatgatgatgaagaaacccatcctaagaataagaaggcagatctaggaaagaagagacccaatgaatctgcatcaaaaactccagtttcctccaagaaagctaagaatgccactcctgaaaagactgatggtaag

SEQ ID NO: 6780 - DNA, 416 bp, Glycine max
  unsure (1)..(416): unsure at all n locations
ctttcgtgtttcatacaacttttgtttaatgccaaaagtctttggtgtttaatgagcaccatgaaattaagattgttttggaagaagaaaaaacaattggtattttgcagacactaaaacgagggacagagatgttaaacttgaaatcctcttcatcccacttgctactcctctttctcttcaccttggtgaccattgcaagtgaagcagcagctcctatatacagcgcacatgcctgcacagatgatggaccattttaccaacccaacacaacataccaaaccaacttgaagctcctcctctcttccctcgtctccaacgccaccctccaccagggcttcttcctcaccaacatctccctcggaaaccccgatgaggtcaagggactcntcctctgccgcggtgacgtcaccccc

SEQ ID NO: 6781 - DNA, 945 bp, Glycine max
  unsure (1)..(945): unsure at all n locations
gaataacgcaacatatgtctttatctcttattctaaactctgaaaaaacctgaagtatactactagggaagcatcagattttcatgctcctcctttcattaaattaaaggtagagattccataaacaagtcaatttttttggagcaggaagagatttttttttcttttcaatttgaattatttattatctatgaaaagcccttgactgatgcgtcccaaatccaaaattgctatattttctgttcagttctggctagtggctacaaaatctttgtacaaatttctgaacagtttctaggtatggaaactctttcatatgggtcagcaccatgctgccaagttgtgaactcaaagtggaaattagttgaaaagagtttgagttcacgtcaatcaagagtttcctctataggaaaacttggagtttattacacaggtactatttctgcatgtgcgcctgtgagattttatgagatgggtactagggtgcagctaagaagctcaaaaagattcaatttcaaggtttgtagtggaagttatgatgatggttatgtgattggtgaagaggaagcaagggatatttcagggttagaggagcctgtaacaaccaaggttctgattccaggtctgcctgatgattcaaaaggtgaatctggtgctccaataagtagttgtttttggggatggaaacctaaactcaatgtgcactatgagaaggccgggtgcgaaaacgtcaatgatttgcctcgtgttctctttttaccaggttttggtgttggctctttccattatgagaagcaacttaaggatttggggcgtgactacagagtgtgggctctggattttctaggccaaagggatgtctttgcctttttgaagatcctgcccctttgtctaatgaagaggctgcatcaaatggaagtgtttcttcatggngttttggagatg

SEQ ID NO: 6782 - DNA, 241 bp, Glycine max
gaaaaaacctgaagtatactactagggaagcatcagattttcatgctcctcctttcattaaattaaagtgcagaacagtttctaggtatggaaactctttcatatgggtcagcaccatgctgccaagttgtgaactcaaagtggaaattagttgaaaagagtttgagttcacgtcaatcaagagtttcctctataggaaaacttggagtttattacacaggtactatttctgcatgtgcgc

SEQ ID NO: 6783 - DNA, 459 bp, Glycine max
cagattttcatgctcctcctttcattaaattaaaggtagagattccataaacaagtcaatataaatggagcaggaagagattttgtgttcttttcaatttgaattatttattatctatgaaaagcccttgactgatgcgtcccaaatccaaaattgctatattttctgttcagttctggctagtggctacaaaatctgtgtacaaatttctggtaatgcattcattgctttgtttgctagaaggaaaaaagaaatcaatttgtacttcagaactacgaatttttcattgttaaatttgactctccttgtccatcacagagaaaatcgagttgaattttcactgaatcatttgtttttttttggttagtgcagaacagtttctaggtatggaaactctttcatatgggtcagcaccatgctgccaagttgtgaactcaaagtggaaattagttgaaaaga

SEQ ID NO: 6784 - DNA, 1764 bp, Glycine max
cacacacacacatactcgcttccctctctctgcgttcggcaccagcgaaacgctcttcgttatctttttctcgactccgcggcgtagatccgaggagttcgggaaaccctaactcatcttccttcacaacagaacaacgcttcttttccctatccatcatctcaactgaagtcatggctggactagcacctgaggggtcacagttcgatgctcgtcaatatgattccaaaatgagtgacttactttcatctgatggacaggacttcttcacatcctatgacgaggtttatgacagttttgatgctatgggcttgcaggagaatctcctcagaggcatttatgcatatggttttgagaagccatcagctattcagcaaaggggaatagttcccttctgcaagggacttgatgttatacaacaggcccagtctggaactgggaaaacagcaactttctgctctggaattctgcagcaacttgactatagtgtgactgaatgccaagccttggttttagcaccaactagggagcttgctcagcaaattgaaaaggttatgcgggcactcggagattatcttggtgtgaaggtgcacgcatgtgtgggaggtaccagtgttcgtgaagaccaacgcattctatctagtggtgttcatgttgttgttggtactcctggtcgtgtatttgatatgctgcgcagacagtcacttcggccagactacatcaagatgtttgtattggatgaggctgatgaaatgctttcccgtggttttaaagatcagatctatgatatattccagttgcttccatctaagattcaagtgggagttttctctgctacaatgcctcccgaggcacttgagatcacaaggaagttcatgaacaaacctgtgaggatccttgtgaagcgtgatgagctcaccttggagggtatcaagcaatttcatgtcaatgttgagaaagaggaatggaagcttgacacactgtgtgatctttatgagacattggcaattactcagagtgtcatttttgtgaacaccagaagaaaggttgattggctgactgacaagatgcgaagccgagaccacacagtctcagcaacccatggagacatggaccagaataccagggacattattatgcgtgaattccgttctgggtcatcccgtgttttgataactactgatcttttggcccgtggtattgatgtccagcaagtgtctctagttataaattatgatctcccaacacagcctgagaactatctccatcgtattggtcgtagtggaaggtttggtaggaaaggtgttgccattaactttgtcacaagggatgatgaaaaaatgctgtttgacatccagaagttttacaatgtgattattgaggagctgccttcaaatgttgctgaactcctttgatgagtttttttgttccatcatattagaggaaagttggtttctgaggtaagtgttatgtaatgtctcttgttcctttttgccccttttgttgtatttctgctcttaaaccttgtttgaccttcttaataggtgtagttatttaatttacatatcagtcgtctgaatgtcccaagtgatgagtacttgcaatgtggagtcacattattttctgaattgatgtattggtagttgttgcacctttctaacaagcaaggtttttttcatacacgttttggttattctaacatacgtagggataatttgattctttttttcgatttattcaaagttgatccatggcatggcgtgg

SEQ ID NO: 6785 - DNA, 687 bp, Glycine max
gttgattggttgactgacaagatgagaagccgtgaccacacagtctcagcaacccacggagacatggaccagaataccagggacattattatgcgtgaattccgttctgggtcttcccgtgtcttgataaccactgatcttttggctcgtggtattgatgtgcaacaagtgtctctagttataaactttgatctccctacacagcctgagaactatctccaccgtattggtcgtagtgggaggttcggaaggaaaggtgttgcgatcaattttgtcacaaaggatgacgagaaaatgctgtttgacatccagaagttttacaacgtgcaagttgaggagctgccttcaaatgttgctgagctcctttgatcagattttgtcctccgtcgtagtagatgaaattagtttgcgtttggaaactgttatgtaatgtttctcactctaacctgtctcccccccctttcgtttctttggttgtacttccgctcttaaactttgtttaataggcttagtaatttaatttaaactgcgagtttgtctgaatatccaagtagttattacttgctatgtggaaacccattattggcccaattggtgtacgactttcattgcatattcgattcttatgcaatcaacttagttcagttgtaatttggtcactaaatgaacttgaattggtgttatagt

SEQ ID NO: 6786 - DNA, 524 bp, Glycine max
tgctgtttgacatccagaagttttacaatgtgctaattgcggagctgccttcaaatgttgctgaactcctttgatgagtttttttgttccatcatattagaggaaagttggtttctgaggattggaggatcattgtgaggcaagatattcggttgtggttctctactcaacagctatatggattgcaataaccgtggattcgccgaatcatcagtcggaggttttttttttcctggtttgttgtcacaatgttgtaagcattgatggagcacgtagtttacttgtttatgagcaggatgttattgaaattgtaagattttaaaatcataatgtttgactcttttgaccaacttttcaagtaacttcaaatattgaatattgtgttgaagcattggaagtctaacggtaattctggtgccatatgtaattacaattacctcttagaggtctattttgtcgaggcacaaaacgaagtattactactaataaaacataaatgctttttcttaaaaaacccccacaaa

SEQ ID NO: 6787 - DNA, 523 bp, Glycine max
tccctcgcgtccgctcatagctcccactcactttctcgcagaaacgtattgtttttctctctttccgcggcctagatctgagcagtttggaaaccctaactgctctcaccaacgacatcaccactctctccgatcaactacctctttcgtcgccctaagtcatggcaggaattgcacccgagggatcacagtttgatgctcgtcaatatgataccaagatgaatgagctgcttacgtccgatggacaggatttcttcacatcctacgatgaggtttatgacagttttgatgctatgggcttgcaagagaatctcctgagaggcatttatgcatatggttttgagaagccatcagctattcagcaaagaggaatagttccattctgcaagggacttgacgttatacaacaggcccagtctggaactgggaaaacagcaactttctgctctggaattctgcagcaacttgactatagtgtgactgaatgccaagccttggttttagcacctactagggagcttgc

SEQ ID NO: 6788 - DNA, 440 bp, Glycine max
ccataagtccagatgcggggaaatttcggcaccagcgaaacgctcttcgttatcttttctcagactccgcggcgtagatccgaggagttcgggaaatcctaactcatcatctcaactcaagtcatggctggacttgcacctgagggatcacagttcgatgctcgtcaatatgattctaaaatgagtgacttactttcatctgatggacaggacttcttcacatcctatgacgaggtttatgatagttttgacgctatgggtttgcaggaaaatcttctcaggggaatttacgcatatggttttgagaagccatctgccattcagcaaagggggatagttcccttctgcaagggacttgatgttattcagcaggctcagtctggaactgggaagacggctactttctgctctggtattctgcagcaacttgactatagctt

SEQ ID NO: 6789 - DNA, 397 bp, Glycine max
gctcggattcggctcaatcgagcgagtcggctcagaacgcattgtgtttctctctttccgcggcgtagatctgagcagtttgggaaaccctaactgctctcaccactctctttgctttttttcctctccgatcaacgacctctttcgtcgccctaagtcatggcaggacttgcacccgagggatcacagtttgatgctcgtcaatatgataccaagatgaatgagttgcttacatctgatggacaggattttttcacatcttatgatgaggtttatgacagttttgatgctatgggcttgcacgagaatctcctgagacgcatctatgcatatggttccgagatgccatcaactattcatcatatactgatagttatcttctgaccggtacttcttg

SEQ ID NO: 6790 - DNA, 639 bp, Glycine max
gttgatttgccagatcatcatgacagttgctattgcagttacatttggtaccaatggaaacccaggtacactgcctaagtggtatgcaattgttgttgtgggggtcatctgtgtatatgtttcaggttttgcttggtcttggggtcctttagcctggttggtacctagtgaaatctttccccttgagattagacctgctgctcagagcatcacagttggtgtcaacatgatcagcactttcttcatagctcaattcttcacatcaatgctctgtcacatgaagtttggtttgttcatcttctttgggtgctttgtggtgatcatgaccttattcatctacaagttattgcctgagacaaagggcatcccacttgaggaaatgagtatggtttggcagaaacaccccatctggggcaaatttttggagtcggacaaccccatccaaaacgacaaaatgaactccaaatgttgattactagttgtgttggtttcagtctttgatttatccacgtctgctttaacaacttgaatttattggcctagctttctttatgatactctaatgtacataacattttaagatgaaatcttcactttgtatactgcaaagacctttaacaattgattatcaacttgatt

SEQ ID NO: 6791 - DNA, 1422 bp, Glycine max
agccgaatcggctcgaggttcctggtctttacgaggtacctgaggacatgattacattctaacaccacacattcctgttatttctttctctctgcgttcttcttcaatgcaactctattctgttcggtgacacaacatcactctgaagaacgtcgcacgcaccacccttctctctcttcaacaactcagctctcagaacagatacagtttccactgagtaaatcgcaatgcaggtaactgagacgaggactgttcaagttaagcagctttcagatctagctggtgtgagagagattcacgagttcttctccttttctggagaaatcgagcatgttgagatcctgagtgaagatgggaaatcaaagactgcatatgtgacatttaaagatcccaaagcccttgaaattgcattattgttgtcgggagcaactatagtagaccaggttgtgaagataactccagctgagaactatgtaccaaatcgtgaaatggaggaagtaagggtggtggaaaatgctataaatgttgctccttctgagaattctgagaatgtctccttgagtattgaggaggggaaagccagccccaccaatagaagaatctaccttagtaaagcacaagatgcagttacaagtatgctggcaaaaggttcagcaataagacaagatgcagtgaacaaagctaaagcatttgatgaaaagcatcaattgactgccaatgcatctgcaaaggtcatttctttggacaagagagttggactcacagagaaattgacagtaggcattgctgcagtgaaccagaaagtcaagtctgtggatcagaggcttcaggtgtcggataagacaatggcagcaataattgcagctgagaggaagataaataacactggatcagctgtcaaaacaagcagatatgtgactgctggaacagcatggtttaacggtgcttttagcaaggtggcaaaggctggacatgttgcaagtactaaaactagagaaaaatttcatttggctgtttcaaacttgacagcaaaggaaccgtcagtggctgctgcataggccacaatttttggtaatcaagtcatttcatcaggtctttcagaacatgtgtttgaaactatttggtctttcagagcatgcgctgctttctttctgcccttcaacagttagatgcatgtggcaagtgcggtgattcaatttaatcctattttttgtattcttttgtcactctgttgttttagttgttgcttctatatcatttagcacgagtgattttggctttttttcccttttgtgaaaaggaaattataggtgtgatgctactgcatttcttctgtcaaagttcaaaaaaattgtgcgtgtataacttgacatatggttcaaagatttccgtgggaaattatcatcttgcagaccaaaaaaa

SEQ ID NO: 6792 - DNA, 725 bp, Glycine max
cccacgcgtccgcggacgcgtggggcaaaacggtccacgaaaaaaagaaaacccagaaaaactctgaagaagagttcgttgctttctgcttcactgcgaagatgaacggaggcccatctggtttcacaaatgctcccgtcacaagggctttcatcatcacttcggcgcttttcacaatcttctttgggatccaaggccgtttcagcactctggggttgtcgtatcaggatatttttggaaagcttcgcctttggaagttgatcatttccatattttccttctcgtcaacaccagagttgatgtttggattgtatcttctatattacttcagggtctttgagcgacagataggttccaataaatactcagtctttatcgtgttctccatattaacttcactactgcttgaggtccttgctgtagcacttttaaaagatcctacagcaaacctagtcactcctggaccatatggccttatatttgcttcatttgtaccctttttctttgacattccagtttcaacacggtttcgtgtgtttagcttcctcttctcagacaagtcattcatatatctagctggtcttcagcttcttttgtcatcatggaaaaggtctatcttaccggggatgtgtggcatccttgctggttccttgtaccgtttgaatgtcttttacattcgcaaagcaaagttcccagagatgatctcatcattattttcaagaatt

SEQ ID NO: 6793 - DNA, 877 bp, Glycine max
gaggattttcataaatacaatttcttttcaattcttccgagagacacaagccagcaaatcttcaatgaattggttgattctcactgcctgaccgaagtgtcccttgaagccttcagagattgtgctcttcaggatattgacctgcgtgaatatgttggagtctaacgatgattgttgggttcccgctcatttctcgttcttcttctgccgtcatactcacaccactcttcttccattttcattttctctgcgaattcctattcccatacacaaaccaaatgggtattaagggtttaacaaagcttttggcggacaatgccccgaagtccatgaaggagaacaaattcgagagctacttcggtcgcaagatcgccattgacgctagcatgagcatttaccagttccttattgttgtgggaagaagcggaactgaaatgctcactaatgaggctggtgaagttaccagtcatttgcaagggatgttttcgcggacaatcagacttctagaagctgggataaaaccagtatatgtttttgatgggaagccaccagatttgaagaaacaagagctggccaaacgttactccaagagagctgaggctactgaagatttgtcagaagccttagagaccgccaataaggaagacattgaaaaattcagtaaacggacagtgaaggttacaaagcagcataatgacgactgcaaaagacttttaaggctcatgggagtgcccgttgttgaggcaccctcagaagcagaggctcagtgtgctgctctttgtaaagctggaaaggtttatggtgtggcttctgaagacatggattccttaacatttggagctcctaaatttcttcgccacctaatggatccaagctc

SEQ ID NO: 6794 - DNA, 820 bp, Glycine max
  unsure (1)..(820): unsure at all n locations
gaagatgcgtgaggattttcataaaacaattccttttcaattcttccgagagacataagccagcagatcttcaatgaattggttgattctcactgcctgacccaactgtctctcgaggccttcagagattgtgctcttcaggatattgactctgggcgaatatgtgggagtgtagcgatgattggatggatgtcatctcttcccaagggttgtccttactttcagttgatgttgctggttctcaggtgacagataacggactgcgattcctaaaggattgctcaaatcttcaagcattgactctcaatttttgtgaccaattttcagaatatgggcttaagcacattagtggtctttcaaacttgacttccttgagcatcaggaagagcagctctgtcaaacccgatggaatgcgtgctttctccaacttatttaatttggagaagttggaccttgagaggtgttcagagatccatggtggatttgttcatcttaaaggtttgaaaaagctcgagtatcttaatattggatgctgtaaatgtgttacggattcagacataaagtctatctcagagcttataaatttgaaggagttacaaatttccaacagcagtattactgatattgggattacctatttgagaggtttggagaagcttaccacattaaatgttgaaggatgcaatattactgctgcatgtttagagtttattcatgccttaacttccttggcatgcttaaatctcaacagatgtggtctctctgatgatgganttgagaaaatttctggtcttaaaaacttgaagaggttaagcctggc

SEQ ID NO: 6795 - DNA, 1213 bp, Glycine max
gggtattcgtgaaatcatgcttaatgcagataagcacgggcagatacttgcttttcaaaaagttctgctgaacagatctgatataatcttggatgtcctattgaagtgtcacagagtgcaactggaaattttggttgctttaaaaactggtttgactcattttcttcacctagagagcagcatttcatcttctgagttggctcaaatttttctgaacttaaggtgtaagaatctttcatgtcgaagtcagttgcctgtggacgaatgtgattgcaaggtttgtgcaaagaagaatggtttttgcagggagtgtatgtgccttgtgtgttcaaagtttgataatgcctcaaatacatgtagttgggttggatgtgatgtttgccttcactggtgccatactgactgtggattacgggaatcttatattagaaatgggcatgggacaaaagggatgaccgagatgcagtttcactgtattgcttgtgatcatccttctgagatgtttggctttgtcaaggaggtgtttcaaaattttgcaaaagaatggtcagttgaaaccctttgcaaagagcttgaatatgtaaagagaattttttctgcgagcaaggatatgagacggagacagttgcatgacattgcagagcaagtgctgccaaggttggcaaataagtccaatctccctgaggttttgaggcacatcatgtctttcctttcggatggtgattcttccaaattacccatgacaacaaacttttctgggaaggaacaaattaaagaaaacaatggagtagctgggcccagccaggaagcaacttggatgaaatctatttattcagaaaagccacctctgttagaaaggcctgcaaatatccttcctacctttgaccagaatgataaaagaactcttgtgcaagaattgcagatgagtagtatccagaaggacttctgttttgatgaattggagagtatagtaaaaattaaacaggcagaggctaaaatgtttcaatcacgtgctgatgatgctagaagagaagctgaagggttgaagcgcattgcccttgcaaagaatgagaaaattgaggaagaatataccaatcgaattgccaagttgcgattgactgagactgatgaaattcgtaaacaaaaatttgaagaagcccaagcattaaagagggcacatctggagtatttgaacatgaaaatgagaatggag

SEQ ID NO: 6796 - DNA, 907 bp, Glycine max
gacgtcggacgcattaaaaccggaattcggtccaagaaaaatcaattcaccaattaaaaaaatcaactgtatttccaaaataaccaaaattggtttccttcctttaaaataaaatccctggaaaggggaataattcaacaactggttaattggcctcaaataaatcattttttctgcaactattgctggtggtgatgcatctctcgatgggagctttgtgatttaaaggttcgattagttgctgacaaagatacaaataagcccaggggttatgctttcattgagtatctgcatacaagagacatgaaagctgcttataaacaagctgatggtaggaaaattgatggtagaagggtgcttgtggatgttgagcgtgggaggactgttccaaattggagaccccgtcgcttaggtggtggacttggtaccactagagttggaggtgaagaagttaatcagcgacattctgggagggagcaacaacagtctcgttctgaagaaccgagagtgcgagaggaccgacacgctgatagagacagggaaatatcacgtgaaagaggtagggacaaagacagagaacgggagcgatcacgtgaacattctcatgaaagggtcagggatcgcgatcatagggaggataggcaccacagagaccgggataggaacagggacagagaccgagacagggaaagagatagagatcgtgggcgtgatcgagatagaacacgggaccgtgatcgtgagcgagggagggaccgtgatcgggatcgagaatatgatcgacatcgtgagagggatagagattatgaagttggtgaccctgatcgaggacgctcacgtgatacggagtctgattatgatcgtgttgaatctaaacatggggaaaggaatcatgactattaacctg

SEQ ID NO: 6797 - DNA, 267 bp, Glycine max
cccaaatgtgtcgggagatccatacaagacattgtttgtggctaaactcagttacgagaccactgagagcagaatcaaaagggagtttgagtcatatggtccaatcaaacgggttcgattagttgctgacaaagatacaaatgagcccaggggttatgctttcattgagtatctgcatacaagagacatgaaagctgcttatcaacaagctgatggtaggaaaattgatggtagaagggtgcttgtggatgttgagcgtgggaggac

SEQ ID NO: 6798 - DNA, 627 bp, Glycine max
aatttttattttttaacagctctgtactgaagaaaacggcgattgagagggagagtttgagaatggtgaagaaggaggagttcttgagagaaaacggcgacaacgaaaaccgttccgtctcgcggagtgacttccctcccaacttcatcttcggagttgccacttctgcatatcagatagaaggtgcttgtaaggagggtggtagaggtcctagcatatgggatgcctttacacacacggaaggaaaaattcttgacaaaagcaatggtgatgttgcagttaatcattatcatcggtacatggaagatattgatcttatagccaagttgggatttgatgcttatagattttcaatttcttggtctcggattttccccgatggcttaggaacgaaaatcaatgacgaagggataactttttataacaacattattaatggtcttcttgaaagaggtatacaaccttatgtaactttgtaccattgggatcttccgctgcatcttcacgagtcgatgggaggatggttaaataaacaaatcatagagtactttgctgtttatgcagatacttgctttgcaagttttggggatagagtgaagaactggattactattaatgagccccttc

SEQ ID NO: 6799 - DNA, 454 bp, Glycine max
ggcaatttttcttcccttcagatggtgatgtttcagatatctccgtctgttataaattactatcgttaactactattctcattctcacacttatcatacttgaattttctctacccttccatattaaatatatagaaatattgcatattgattgctagtgtgtccaagaataaacatgtcggccaagttcctgaccgtgccgccatttgagtgcgcctggagagaggatttgaaattccgggaggcaggccggggttgcgtcgcctttgaagcattcgcctgcaacgatgtcacactggttttccgggagaatgtgggaagccagggctaccattataaaagagatagcagtcctcactacacaatcatattggggagtcacaggaatccgcgactcagaattgaggtcaatggaaaagctgttgtcgatgtggcaggggttggcctctgctgc

SEQ ID NO: 6800 - DNA, 629 bp, Glycine max
gcaatatattcgttccgttccttctttctccgctcctcacttcgctctctcattctccattctcacttctcaaattgaatcgaacgaattcacaaaccctagttttcgaggatgggtcagatccagtactccgagaagtacttcgatgacacttacgaatatagacatgtggttcttcctcctgaagtcgcaaaactgcttcccaagaatcgtcttctctccgaaaatgagtggcgggcaattggggttcagcagagccgtggctgggttcattatgcaattcatcgccctgagccacacataatgctcttcaggaggcctttgaattatcagcagcagcaggaaaaccaggcccagcaaagcatgcttgtcaaatgaacactatctatgcaaatctgaaagtgggattacaatgttatataggttttaattttgttggtaatatggatgttatgaagaatgaagaaccctggtggaattctctttttgtggagaattttcatgtggtttcaactgtcattttaatgtgttgttgacatgatgatgtgtcatggatttttattggtgtacctctcgtgtactcttatgctcggtggattatataatagtcattaacggttaaaaaaaaa

SEQ ID NO: 6801 - DNA, 446 bp, Glycine max
cttcatacctatcccaatccaattattcaccctcttcctatttcactccctcattctctcctcacacaatccacactcataacaaaaccctcccaaaaatcaaaattgaaattattaactttttttttctgttattctttctctccaccaccatggctactaccataacagagcaagacacctcatcacgtgccccacacgtgctcgattacgccaccactacatctgacgaggagacggaacaggacgaggaggaggagctggtgccggaggaaaacggcttcgggaacggcgtacggtggtttccggcggcgagcggttgccgacggcgacggcgcggcggacgtgcgttgggtatggttcttgacccgatggcgaagtgtgtccaggaatgggacaaggttttcccgctagtgtgagccgcggcgctgttcgtggactcgctc

SEQ ID NO: 6802 - DNA, 1190 bp, Glycine max
gttccttgaagttagtttgctttcaatttgatgtgaataataacatagcataagaatagtttatatgaacacgcaaggtaagttaattagaccaaaggaagaagaagaagtagtggagtgatcctggttgggtgtgaaaatgtcgcacagcgataccataccccttcacccatcttcccaatccgacatcgacgagatcgagaacctcatcaatgccagcgttcaccaatcagtcccttcggcgagacctcccagtcccccacgcgcctccatccccgtctccgtctccgccctgccccttcccccttcatctcctccaacctccctccaccgccacccctccctaaatcctccgtctccgccgtccctccgccccctcccccgccgcgcgccgacatctcctcctccgggttcggctccgcccccaacacgctcactgagcccgtctgggacaccgtgaagcgcgatctctcgagaatcgtgagcaatctgaagctcgttgtgttccccaaccctttccgcgaggaccccggtaaggccctcagggattgggatctgtggggccctttcttcttcattgtcttcctcggcctcaccctctcttggtctgcctctgtcaaaaagtctgaggtttttgctgttgcatttgctttacttgctgctggcgctgtaattttgacattgaacgtacttcttctgggtggacacattattttctttcagagtctgagtctgttgggttattgcttgttccctctggacgtcggtgcattaatttgtatgttgaaggacaatgtcatagtgaaagtggttgttgtgtgtgtgacattggcttggagctcttgggctgcatatcctttcatgagttctgcagtcaaccccaggagaaaagctcttgcactctacccagtttttctcatgtatgtatctgttggttttctcatcattgccattgactaaatgcatcaatgcttctgatttctttattacgataaccacctggaatctgcgtctaaataggaatttttgtttgatgatcaaccatttttttttaattcttttctgcccctccttttttctgtttaaaatttggttagatatatttgaagacaaacagttgtataatattacgtggaaagtatacggtcggatcaaacttgctacataagtattgtttttctctttctatt

SEQ ID NO: 6803 - DNA, 1388 bp, Glycine max
  unsure (1)..(1388): unsure at all n locations
ctttctgctgtctgctaaacttgattttttgtttactctttcttgcttccttcatatttatattatattattattttgcccacatttcttcttcaacgactacactctctctcaaccttcaaagcttcaaactcaaaagaaatggcatccgatcccgagcaacccgctcattcctctttcgcaaaggaagcaaggtcaggtggtgagattgggagtgcaatagagcctctgcttaatggggttcatgactctgaaagctattccgtctctgctgcaattctcccatttctcttcccagctttgggtggcctactatttggctatgatattggtgccacatcttcggcaaccatttccattcagtcaccaacacttagtggagtatcttggtacaagttgtcttctgttgaaattggtcttcttactagtggatcattgtatggtgccttaattggctccgtgttggccttcaatgttgctgacttcttaggtagaagaaaggagctgattggatctgcagtagtttatcttgttggagcccttgtaacagcattagctcctaattttcctgtattggtgcttgggagacttgtatttggcacaggaattggactggcaatgcatgctgctccaatgtacattgcagagacagctccaacaccaatacgtggacaactaatatctctaaaagagttctttatagtacttgggatggttgcaggatatggaattggtagcttgttcgttgaaactgtagctgggtggcggtatatgtatggagttagtagtcctgtggcaataatcatgggagttggaatgtggtggctcccagcttctcctagatggttacttttacgtgctatacagggaaaaggggatgttcagaattcaaaagacatagcaattcgtagtttgtgccagcttcgaggtcaagcttttaatgattccattccttggcaagtagatgagattctggcagaactttcttatctaggtgaagaaaaagaagctacctttggagaactgttccaaggaaaatgcttgaaagccctctggattggcgcaggattggtcttgtttcagcagatcacagggcaacctagtgtgctctactatgctggatcaatctttcagagtgcaggattctctggagcatctgatgcaacccgagtctctattctccttggggtttttaagttgattatgactggagttgctgttgtcgttgttgataaacttggaagaaggcctttactacttgggggagtttcagggatagtaagttccttcttgtttctttgattgtgtagtaatatcctgagaagagaaaacttcctcagttcctcatntctacctcaaattgagagggttatgccaatctgctaatc

SEQ ID NO: 6804 - DNA, 454 bp, Glycine max
gactgcaaactatgaataagcccttttctcatttctttcatcttctcttactgctgtctgctaattctaatcttaattttctgtttactgtttctttcttccttcatattttatacgcttcttcttcttcaactactactctctctctcaaccttcaaagcttcaaactcaaaagcaatggcatttgatcccgtgcaacccgtcgcaaagaaagcaaggtcaggtggtgagattgtgagtgcaagagagcctctgcttaatggggttcatgactctgaaagctattccgtctctgctgcaattctcccatttctcttcccagctttgggtggcctactatttggctatgatattggtgccacatcttcggcaaccatttccattgagtcaccaacattaagtggagtatcttggtacaagttgtcttctgttgaagatggtcctcttactagtg

SEQ ID NO: 6805 - DNA, 924 bp, Glycine max
ctcgagccgctcgagccgctcgagccccacagtttccgttaacgctctccaatacaaataatcactaactgaatattcgatcggagatgtctgccgccgccgaagaagctaacgctcccgccgtcgaaaagccggttgaggaggtgaaggcgccgaaccccgcgaaggagaagaaacctaaggctccgaaggaaaagaagccaaaacaggccaaaacagcttcacatcctccatattttcagatgattaaggaggctttgatcgctttgaacgagaaaggaggatcgagtccttatgcgatagcgaagtacatggaggagaagcacaaggcggtgctccctgcgaatttcaagaagattctaggtctgcaactaaagaaccaagctgcgagagggaaactcgtgaagatcaaggcttcgtacaagttaaccgaagccgcgaagaaggagaacaccgccaaagtgacgaaggccaacgctgagaaaaaggaatcgcgtccaaaacgaagcaaaaccgcaaccgccgctgctccgaagaaaaccgaggcggttaaaagggcagcgaagaaggtagggccgaagaagacgaagaaagtgtcgacgcctgcgaagcccaagcagcccaagtccattaggtctccaaccaagagggcccggaaagcagccgttgctgcggcttgatacttgtcttgtttagttaaaactatgacatatatatgtagatatgaaaaggtgtgggtgtgggtgtatgtgtgtgccttgctgcacaatcttgaagaaagttgtgtagtgtaggatggtagatagtttagtgttctgcaatgttcgctctaataagtgatctaatggagatgagttttactgttttaaatcatcaaaaaaaaaaatggacggccccctagcggacgcacgcgtgcgtccgcgt

SEQ ID NO: 6806 - DNA, 852 bp, Glycine max
tttccgttaacgctctccaatacaaaataaccactcactgaatattcggtcgaagatgtccgccgccgaagaagctaaagttcccgccgtcgaaaagccggtggaggaggtgaaggcgccgaagcttgccaaggagaagaaacctaaggctccgaaggaaaagaagccgaaacaggccaaaactgcttctcatcctccatatctccagatgattaaggacgctttgattgctctgaacgagaaaggaggatcgagtccatatgcgatagcgaagtacatggaggagaagcacaaggcggtgcttcctgcgaatttcaagaagatactaggtctgcaactgaagaaccaagctgcgagagggaaactcgtcaagatcaaggcttcgtacaagttagccgaagccgcgaagaaggtgaaggagagcaccgccaaagcgacgaaggaatcgcgtccgaaacgaaacaaaatcgcaaccgccgttgctccgaagaaaaccgaggcggttaaaaagcccgcgaagaaggtcgggccgaagaaaacgaagaaagtgtcgacgcctgcgaagcccaagcagcccaggtccattaggtctccgaccaagagggcccgtaaagctgccgtcgctgcggcttgatgtttgatgtttttcttgtttagttaaaactctggcatataatatatgtagatatgaaaaggtgtgtgttaaccttgttgcacaatcttgaatatagttgtgtggtttaggatcgtagatagtttagtgttctgcaatgttcgctctaagaagtgatcaattggagatgaattttactgttatcaatctccttctttcaagttgattgttttttttcc

SEQ ID NO: 6807 - DNA, 748 bp, Glycine max
tcgcgaaaaagaagaaaaaaaaagcaaagaaaatcctgtttcccgataaaaaccccgtccgtacatggtctggtcacgcggatcgggttgattgagatgcacaccgcgagcaggagcaacggcggcggcggcggcgtgctggcgtcgcggacgagttcgcggtcggtgacggagacggtgaacgggtcgcacaagttcgtgataaagggatactcgctggcgaaggggatcggagtcggaaaacacatcgcgagcgagacgttcacggtaggagggtaccagtgggcgatatacttctaccctgacggcaagaacccagaggacaactccgcctacgtctccgtcttcatcgcgctcgcctccgagggcaccgacgtccgcgccctgtttgagctcacgctgctcgaccagagcggggaatgggaagcacaaggtgcatagccacttcgatcgctcgctcgagagcgggccctacactctcaagtatcgcggcagcatgtgggggtataagagatttttcaaaccggctcaacttgaggcgtcaactttcctcaaagaccaccgcttggagattaaccggaccgtgggtggtggggtgtgccccattggatggtccaaggtaaacacacaacacggttcccagagtgatatttgggcacacttttctatatgcttttagagaatgagggggtctcatattacactctctgtggggggggaaaagggtcatacacataaactcgggttg

SEQ ID NO: 6808 - DNA, 314 bp, Glycine max
ctcgagccgatttcccttcactttcccgggagaaaaagaaacctccgtttcgcgagaacccccgtccgtacatggtctgttcacgcggatcgggttgattgaccaccaccaccaccaccaccaccaccatcgcgcgtgagatgcacaccgcgagcaggagcaacggcggcggcgtgctggcgtcgcggacgagttcgcggtcggtgacggagacggtgaacgggtcgcacaagttcgtgataaagggatactccctggcgaaggggatcggagtggggaaacacatcgccagcgagacgttcacggtgggaggg

SEQ ID NO: 6809 - DNA, 896 bp, Glycine max
aacttggggaaaaaataaagaaggggttgttttgtacttggtgtgtgaaatgagagataacattgagaatagtttatgaagtcgagcactagagtcttgtactgctagactgaaagagcttccttgttcaatggctccatttggctccctgctcattctcctatttttgttgacagccaagttacttgttatggttcagagaaggaaaagagtaaaactttcataatccaagtccagcacgaagccaagccttccatattcccaacccacaaacactggtacgactcctccctctcttccatctccaccaccgcttctgttatccacacctaccacaccgttttccacggcttctccgcaaagctctcaccttccgaggcacagaagcttcaatctctcgcccacgtcatcactctcatacccgaacagcttcgctcgcctcacaccacccgctcccctgagtttctcggcttaaccaccgccgacagaaccgggttgctccacgagaccgatttcggctccgatctcgtcatcggagtcatcgacaccggaatctggccggagcgacagagcttcaacgaccgcggcctcggccccgttccctccaaatggaagggcaagtgcgtcgccggagaaaattttccggcaagttcgtgcaaccggaaactcatcggcgcgaggtggttctcaggcggatacgaagccacccacgggaagatgaacgagaccactgagttccgctcgccaagagactccgacggccacggcacgcacactgcgtcgatcgccgccgggaggtacgtctctcaggcgtccacgttggggtacgcgaagggcgtcgccgccggcatggcgccgaaggcgcggctcgcggtgtataaagtctgctggagcga

SEQ ID NO: 6810 - DNA, 448 bp, Glycine max
tgttgaaaccgcgaaaattccctcttttctctctttctctttcacacgtctttgttttacaaagcggcttcgatttatttttgtgtttgtttcttcccctttccctcttctctgttttcaccgacccttgttttctatctgggtcggcaaatggttttcaattagtgtttctgtgttgtttcttcattgttgctttctctcgaagctagctcaacccgagatggatctgagagaaagtttggtacctcttcttgtgggctcgttcgtcgttgtgcaactttgttgccacgccaatgcgaatttggtgttccccgttgtgcgcaaattcaaaggtcccgctgaaaacctcgctgctatcaaagctcatgatgctggtcgccgaggcagatttctctcggtccttgatctcgctctcggtggcaatggccgtcctacttcaaatgggctg

SEQ ID NO: 6811 - DNA, 944 bp, Glycine max
attcatccgttgtgttctaagattaaggccattatatataatattttgtttacaacttcctgactcagtgacaggcatgctagttccctttatgctgttcaaaaacatgtcttttttctcccccttggtctgacacaagatttttcggtgaatgagactctagcatggaaagaaggaagtgagtttcttttcttattttgaacaccacagtgatgaacgaacacccatttgaggactgttaacgttccatattaacatctttgttggttacacttgaagttagaagcctcaagtgaagtgtacttgcatcttgttcttggaaaagttcagttgaatggggactccaagaggaatagctcttctcagtttcacatccttcttgttttggagctcagcgaatgctttgctttctcctaagggagtgaactttgaagtgcaagctttaatgggcataaaagattctcttgtggatcctcatggtgttctagataattgggatggggatgcagttgatccatgcagctggaacatggtcacatgttcccctgagaatcttgttattagcctgggcattcccagtcaaaatttgtctggcactctatctccaagcataggaaacctaacaaatcttcagactgtggtgctacacaataacaacataactggaccaatcccttcagagctaggaaaactttccaagcttcaaacacttgatctctctgataacttcttaagtggggaaattcccccctctttgggtcatctgagaagactacaatacttgaggcttaataataacagttttgatggagaatgcccagagtcactagctaacatggcacagcttgctttctttgacttgtcttacaacaatctgagtggccctatacctaaaattttggccaaatcattcagtattgtagaaaccccctcgtttgcgctac

SEQ ID NO: 6812 - DNA, 390 bp, Glycine max
gaagattaaggccattatatataatattttgtttacagcttcctgaatcagtgacaagcatgctagttccctttatgctgtccaaaaacatgtcattttccccccccttgggctgacagaagatttttcggtgaatgagattctagcatgggaagaagggattagaaaagcctcaagtggagggtacttgcatcttgttcttgggaaatttcaggtgaatatggggacccccagagggatagctcttctcagtttcacatccctcttgttttggagctcagcgaatgctttgctttctcctaagggagtgaactttgaagtgcaagctttaatgggcataaaatattctctagaggattcacatggtgttctagataattgggatgggga

SEQ ID NO: 6813 - DNA, 533 bp, Glycine max
tcggaattgcccgcttcagcgaatcggtctgtcgatttgaaaggcgaggttgtcgcaaacccagacccaatctctcttgcgaaggaagacgatgggtccgatgctacaaaccattctcactgtgcttcttctccttatgcttcttctcatcgtcatcttcctcttctttctcttcaaaccatggcgcttctttttctctccgcgtttcctctcctccatcaagggcgagctagagcggcccctttttgtgggggacgaaggtgatgcgtcgtcgtttaatcagtgcaatgaattgcctcgagattatgatctcgagggtgcgtgttatcccagtgaagttcattttcgctctcctcgaacccatggccaaggccttgttcataagcaaaggcttcaaacccttaacatgccccagccacatgctggtgatactttggttgtcgatgtcatctctgatcattcctcctccgaggatcttgatgttggtcaaacccttaagcttgcctcatctcatttagctcaaattcaaaagc

SEQ ID NO: 6814 - DNA, 373 bp, Glycine max
gttgccttctcatgttaatttgtgttgggttgcataaaacataaacgaatcttgtgctttttccgtgggtttgagatggatgagaatgatgatgatgaaggaaaactatgtgatctttctctctcttcaaggatcaaagggaaattagattaattgtgacgatgatgatcagagaggaaaagggtgtgaagcctgttctactaaaatttggtttggctttggctctttcatttgctggatttatctactcacgcctcagaaccagaagaatcaagccctccaagtcacgcaaggggtgttctttcggggcagcattaagtacttgcaacgccatttcagagggaaatattctatgttctgaagagacatgcat

SEQ ID NO: 6815 - DNA, 357 bp, Glycine max
atagatctctctcttcaagaatcaaaggaaaattagattaattgtgacgatgatgatcagagaggaaaagggtgtgaagcctgttctactaaaatttggtttggctttggctctttcatttgctggatttatctactcacgcctcagaaccagaagaatcaagccctccaagtcacgcaaggggtgttctttcagtcatgagaatgaagataatttaggaggaggtataggggcagcattaagtacctgcaatgccatttcagagggaaattttcgatgtacttcatttgtggcacaagaagaagcatgcatcaacatggtgataaatgatcaatctcgtattgctctctcttctga

SEQ ID NO: 6816 - DNA, 2082 bp, Glycine max
tgccacgcattccctccaatctgcacccacccccacttacctaccttatctctctctctctctctctctcaatcgttcttcacgagagagagagacatggacgccgtcgttcaaaccagaggccttctctctctccccaccaaccccaaaaccagggtttcgcatcatctgcatccatctcacggcctcaaacaccgttttctctctctaaaacccaaacccctctccgccccttctctctccgccgccgccgccaaatttcacccctttggcccaaagccccaaaatttattcatctgccgggccgaggccgctgctgccgcagatgggcctgcccagcccgccttcggggaagccgaggtcgccgaaaaacccaaacttttgggaatcgagatcaccaccttgaagaaaatcatccctctcggtttgatgttcttctgcatcctgttcaattacacgattctgagagacacaaaggatgttctggttataactgccagagggagcagtgcggagattataccctttctcaaaacgtgggtgaaccttcccatggccgttgggttcatgttgttgtacacaaagttgtccaatgttttgtcaaagcaagctcttttctacaccgtgattcttccattcattgctttctttggggctttcgggtttgtgttgtaccctctcagcaattatattcaccctgaggcatttgcggacaagcttctcaacatcctcggacctaggttccttgggccccttgcgataatgagaatttggagcttctgtttgttttatgtcatggctgagttgtgggggagtgtggttatttccgtactcttttgggggtttgctaatcagataactactattgaagaagcaaaacgattctacccactgttcggactcggggccaatgtagcccttattttctctggccggacagtcaaatacttttctaatctgaggcagaatttaggtcctggagttgatggttgggccatctctctgaaagcaatgatgagcatagttgtgggtatggggtttgcaatctgtttcctgtactggtgggtgaacaattatgttcctcttcctactcgtagcaagaagaagaaggagaagcccaaaatgggaacaatggagagcttgaagttcttggtgtcttcaaagtacatcagagatcttgccactttagtggttgcttatggaatcagcatcaatcttgttgaggttacctggaagtctaagctcaaagctcagtttcctagtcccaacgagtactcttcttttatgggtgacttctcaactgcaactggaattgccacattcacaatgatgcttgtcagccaatttatatttgacaagtatggatggggagttgctgccacgatcacccctacagtcctgcttttgacaggagttggtttcttttctcttatattgtttgggggcccgcttgcacctggtcttgcaagtcttggaatgactccacttctagctgctgtatatgtgggtgccttgcagaacatatttagcaagagtgccaagtacagcttatttgatccctgcaaagaaatggcctacattccattggatgaggataccaaggtcaaggggaaggcagccattgatgttgtgtgcaacccattggggaaatctggaggagctcttattcagcagttcatgatcttaacttttggttcactagctaactcaaccccatacctaggaggggtccttctggtgattgttcttgcctggctatcagcggccaagtcgcttgatacccagtttactgcattgcgtcgagaagaagaacttgagaaagagatggaaagagcagcagctgttaagataccagtggtggccaaggatgaggatggaaatggttctcttaaaagtgttccactgttaaatccaacagctggtgactcctcaagtatattgaattgaactcaactcacagtatttaaagcttaaactacattgaattgcaaggcaggaggagtaagccaaactcatgagatttgttagctcaaactatttgttgtaggtcattatctcatctgagtttgattgtcacttttt

SEQ ID NO: 6817 - DNA, 640 bp, Glycine max
ggatgaggataccaaggttaaagggaaggcagccattgatgttgtgtgcaacccattggggaagtctggaggtgccctcatccagcaatttatgatattgacttttgggtcactagctaattcaaccccatacttgggaggagtgcttctgctgattgtttctgcctggctagcagcggcaaaatccttggatacccaatttactgcattgcgtaaagaggaagaactcgagaaagagatggaacgagcagccgccgtcaagataccagtggtggctgagactgagagtggaaatggttctcttgcaactggttcaccactgaatccatcctcaggtgactcctcaagcagtccatctgaagcctcaactcctcgcaattaaaatgtgccttctttctgtgagaaattgcctcacagaatgagcaaatagagctcttttgagagcagtgttaggtgaaactatttgttgtaggtttatatataagctcttatagaataagcttgctagctactttctcaagtcagataatttttttgtccccatagatcaggtgattttctttacttgttatcatggtttactgtttttagtgagccgcaatttgttttcctatgaaagatagaagtcatttaactgttc

SEQ ID NO: 6818 - DNA, 409 bp, Glycine max
cgacgtgagcggttcgctgcccgccaccgtggggggaggccactgaaccttatcattaagaagaacgagaagcccaaaatgggaacaatggagagcttgaagttcttggtgtcttcaaagtacatcagagatcttgccactttagtggttgcttatggaatcagcatcaatcttgttgaggttacctggaagtctaagctcaaagctcagtttcctagtcccaacgagtactcttcttttatgggtgacttctcaactgcaactggaattgccacattcacaatgatgcttgtcagccaatttatatgtgacaagtatggatggggagttgctgccacgatcacccctacagtcctgcttctgacaggagttggtttcttttctcttatattgtttgggggcccgcttg

SEQ ID NO: 6819 - DNA, 562 bp, Glycine max
  unsure (1)..(562): unsure at all n locations
cacactttattttccctttttatgttcacactcacacacactccttctggcttctgattcccctcgtataaaaacgcaacctttttttctccccctttctactctctctgctctctccgtgcgtgtcttttatcttgaacaaaaaaatcacctttcccttattagggttttgaaatgtggagggagaatggaaggctctgaatccgattctgtgtcactttccatttccaatggcgaagagccccaattggggcgaccttcttcccccgccgctcctcctgagccgtcagatctcaatcatgcggcggaggaagagacactctccggggagcttcagagcaagttggatttgaaggatgtggatgaaagtgaggagaaagtttcggactttaacgatggtggaggagtttgtgatgaagaaactggtaagggtgatggagatagtaagggttgggagaccaatagttggaatgaggaagtgggtgttgatgctgaagttcatgtntctggtgatggtgatgttcatgatgctggtgatggtgatgttcatgatgttggtgat

SEQ ID NO: 6820 - DNA, 2574 bp, Glycine max
cacgcgtcagccagcgcgtccgaaaaaaaatactccgaaagaagagagagaaagagaaaagagaaaagggaaacaaaagaaaagagagagagaacaaaggaaaaaaaagaaaactgataactgagataacaatactgtagatatagagagatagttccaagctccaattcccagaaaaaaattaaaactttgcttcttcactttttctcttaccccttctgatctcatgcaatttcccctcatggatccctttgatttgattcgcaaagggtttggctgaagctatctggaatatttctgttacagtttttaaggtctatctatgttttagtcatttttgtccatattcttgtcaataatgagcttatccaagaaaggttcccaaacagacgcaaaattgagctccttaaacaaagcaacctatttgaatccaaatgcagcagagtttgttccatttgccctcagatcatcgccatctggaagcaccagcttggtagatgcaacagcgaggtttgctgctgccggatctcttgggaaagcagttttagatcgagcagaatcatccatttcaaataattccgatgatgaggctcaccagtactggcgttgtcagcttcctgatgatatcacccctgacttcaaggtcatgggagaggatgaatcccaaggtcttaacaacctctctttagcaggcttatctataaatgatgataatgaatcctcaatgtttccttcttccaagggatttagatatatactaaatgagcagcaggaactgtctccacagcaccttaatggcaatacttttgctgataaattaaggttttccaattcaacctacagggaggagccatcttcaggaagcattttgaactcatcagcaaagccttgggataggcaaattgggaataccgatttgcacgttaccagtggtcaagaggaacttgtttatgatgaaaactctggacatggattcttaaatgatgtttttgcagggaattctcttgtgaatgatacagatttgaaccctttggagtttttagcttctctattccctggttttgcttcagaaagcctttctgaagttttctttgccaatggatgcgatttacatctgacaattgagatgctcactcagttagagattcaagttgacagtagcttcaatcagaatccgagtccaaagactctgtcatctccgaatctgagtgcaatggactttccagctcttacttcatcaaatggccagaatgcttcaaaatatgctgcagataacgttcaacaaagtggcaatccttacttatcatctgataaagacatgctcatgttcaaatctgggtcttctattccatctagaggtgctgttgactttgcttcagctgtcaggaaattggcttctcaggattctggtatatggaagtatgataaaaatggttctggtgatgcttccactggctctagtaggagtttaaatgctctggctagtgcctacaatggtggacaggggagagtcaacaatggtgatagattacagaatcgtggctctgctcgggcagctcctgtttggcttgaaactggtgacgcagttggtaaatgtttatgcttatacgcttcaactgtgagatgaattctttctataccgtgtttcctttaacaattttgaatggcagcaaatatgtattctgagctgcgggaggaggctcgtgatcatgcacgcttgcgtaatgcatattttgagcaggcacgacaagcctaccttattggcaacaaggcccttgcaaaggagctaagtgttaaggggcaactgcacaacgtgcatatgaaagcagctcatggaaaagctcaagaatctatttaccgccagaggaatcccgttgctccagagaatggaagagggcaccagagaatgatagacctacacggtctgcacgtaagtgaagcgattcacgtgctgaaacacgaactgagtgtgctaagaagcacggccagagccgctgagcagcgtttgcaggtttacatctgtgttggcactggtcaccatactcggggctcccgcactcccgcaagactcccgatagctgtacagcgttatcttctcgaagaagaaggccttgatttcacggaaccgcagccgggcctgctttgtgttgtgatatactgaaccaaggagatatacaagtttctgacacggtaaaaaaattcatcatgaacacatagacattgtagtcattcttgtatctgtatatgggaagtaatggcaatggtcaagtcaaaaagaaaaatgaaaaaaaagaggttttacgggttgagaaaaaaaactggaaaaggttagaagtaaagagaggggttgtagcagaattgtaccattaaggtttccgaggcatctgatcacattagtcagtcagcaggaactccactttagcatttaccttctgttaattttgtaccctaattttcatttctttgtcaaattcccttctcttttttttggattcagatgtaactgatagaactcaattacatgatagaacaattcactttgccaattagattcaatgccaatttacagctcgg

SEQ ID NO: 6821 - DNA, 605 bp, Glycine max
gaaagtttgtagagagagataggggtcaaatcgagcggcgaaaggttgggtgtcttctttagtatttttgtggtgcttgctggtgttggttttaactaagagcctttcaaaaaaaaaaaaaactcagaaagaagagagagaaagggaagaaagagaaagaacaaagaaggggaaaaataactgataactgagataacaataccatagattaaaactttgcttcgctttttctcttcattgtttttcttcctcttctacccctttgatctcatgcaatctcccctcatggatccctttgatttgattcgcaaagggtttggctgaagctatctggaatatttgtgttacatttttggaggtccatctatgttttagtcattttgtccatattcttgtcaataatgagcttatccaagaaaggttcccaaacagacacaaaactgagctccttaaacaaagcaacctatttgaatccaaacgcagcagagtttgttccatttgccctcagatcatcgccatctggaagcaccagctcggtagatgcagcagcgaggtttactactgctggatctcttgggaaagcagttttagatcgatcagaatca

SEQ ID NO: 6822 - DNA, 660 bp, Glycine max
aaaaaaaaaactcagatagaagagagagaaagggaagaaagagaaagaacaaagaaggggaaaaataactgataactgagataacaataccatagatatagagagatagttccgagctccaattcccagaaaataaaaattaaaactttgcttcgctttttctcttcattgtttttcttcctcttctacccctttgatctcatgcaatctcccctcatggatccctttgatttgattcgcaaaggggtttaattgcttgagatctcgtaaaggttttggctttcgtaatggaagggtttggctgaagctatctggaatatttgtgttacatttttggaggtccatctatgttttagtcattttgtccatattcttgtcaataatgagcttatccaagaaaggttcccaaacagacacaaaactgagctccttaaacaaagcaacctatttgaatccaaacgcagcagagtttgttccatttgccctcagatcatcgccatctggaagcaccagctcggtagatgcagcagcgaggtttactactgctggatctcttgggaaagcagttttagatcgatcagaatcatccatttcaaataattccgatgatgaggctcaccagtactggcgttgtcagcttcctgatgatatcacccctga

SEQ ID NO: 6823 - DNA, 443 bp, Glycine max
gttctggtgatgcttccactggctctagtaggagtttaaatgctctggctagtgcctacagtggtggacaggggagagtcaacaatggtgatagattacagagtcgtggctctgctcgggcagctcctgtttggcttgaaactggtgacgcagttgcaaatatgtattctgagctgcgggaggaggctcgtgatcatgcacgtttgcgtaatgcatattttgagcaggcacggcaagcctaccttgttggcaacaaggcccttgcaaaggagctaagtgttaaggggcaactgcacaacgtgcatatgaaagcagcacatggaaaagctcaagaatctatttatcgccagaggaatcctgttgctccagagaatggaagagggcaccagagaatgatagacctacacggtctgcacgtaagtgaagcgattcacgtgctgaaa

SEQ ID NO: 6824 - DNA, 389 bp, Glycine max
ttgcgtgcgataaaaaaaaaaaaactcagaaagaagagagagaaagggaagaaagagaaagaacaaagaaggggaaaaataactgataactgagataacaataccatagatatagagagatagttccgagctccaattcccagaaaataaaaattaaaactttgcttcgctttttctcttcattgtttttcttcctcttctacccctttgatctcatgcaatctcccctcatggatccctttgatttgattcgcaaagggtttggctgaagctatctggaatatttgtgttacatgtttggaggtccatctatgttttaggcattttgtccatattcttgtcaataatgagcttatccaagaaaggttcccaaacagacacaaaactga

SEQ ID NO: 6825 - DNA, 628 bp, Glycine max
ggagaaaggggtgcattctgttctgtgtttcggggttacgctttgcgagtgagaattgataaacaaatcgttagggttttttggttgtgcgagtgagagtgagagagaacaatggaagacataacagagggagtgaacaacatcaacatctctgattcgtataagaaaaatcgcattcaggtctctaacaccaagaagcccctcttcttctacgttaatctggccaagagatatatgcaacagcatgatgaggtcgagctctcagctctaggaatggctattgccacagtagtaactgttgctgaaattttgaaaaacaacagacttgctgttgaaaagaaaatcaggacatcaactgttgacataaaggatgactctagaggtcgacctgttcaaaaggccaagattgaaatagtactagggaagacagcaaacttcgatgagttgatggctgctgcagctgctgaagatggtgaaaatggagatgttgaagagcagagtgcatgaacaacaaatttatttgtatttttgttgtcgtgaggtagagggcatgtcattatttgactgaccaacaatattgaacaacaaaattccttcgtttcttttctctataaaataagcttttctt

SEQ ID NO: 6826 - DNA, 381 bp, Glycine max
ttttggttgtgagagtgaaagagaacaatggaaggcataacagagggtgtgaacaacatcaacattaacatctccgattcgtataagaagaatcgcattcaggtctctaacaccaagaagcccctcttcttctacgttaatctcgccaagagatatatgcaacagcatgatgaggtcgagctctcagctctaggaatgggtattgaaatccctctcgccttttttcctcttttattccttgaatttcgcttgttggttctattggttgcttattgattagtaacgtggactcgttcttttcgtcattcaggtattattctagttatagccttataggcttgctacatataactttatgtgaaaaactcacagaatgataac

SEQ ID NO: 6827 - DNA, 610 bp, Glycine max
aagacctattcacactgtgcaaccattagccaataaccaaaccccccaacacacatatcagaacacacagcacaacacagttcaagtttctcgtttccctaaacagatcctaacaacacaacacaaacacggagaaacaaaaatgcacgcaaagacagactcagaggtaacaagcctcgccgcgtcttcccccacgcgctcccctccacgccgtcctctttactacgttcagtctccctcgcgagattctcacgacggcgagaaaaccgcaacgacgtcgtttcactccacgcccgttctcagcccctctgcttcccctcctcactcgcgccactcctcttccacgcgcttctcgaagaaggaccatagccatagtcttaagccgtggaagcaaatcgatgttattgaagaagaagggcttcttcaaggggatgatcgccgcaacgggcttccacgtcggtgctactttcttgctttcgttgttgggtttttggttctcttctcgttcttctcgcttatcctttggggggctagtagacccatgaagcccaagatcaccatcaggagcataagtttgatcatgtaagggtccaagctggttcggatgcaa

SEQ ID NO: 6828 - DNA, 711 bp, Glycine max
acgagccacttcagactttacctctttttatatattctgttctcttatcgtctttccactgctcaaactctcttatctctctcttacacaccgaagcactgctactactactactttctctctagatatgggttctggtgctgtgcaactgtttctgatcttggggctcttggctagctcatgcttagcccaagcaccaggtgctgcaccgtcacaaccacccactacaaccccatcaccaccaccacccagatcagcacctgcaccagcacccaccacaccagcaaccccaccaccagcaaccccaccaccagcagcaactccaccaccagcagcaactccaccaccagcagcaacaccaacaccagcaccagcaccaccaacggctgcacctacacctgcttcctctcctgcagcctctcctccttcaccttctcctacagtgacaccaagccccacctctcctaacactccaccaggaccctcacccggaccctccggtagcgccgagcctccaccgccctccgctgcattctccgccagcaaggccttcattgctacctctgcactcgctggaaccttcgtagccatggccttggtggcttaagatctttcatgagaacaattgtctttgattcgtcccacgtggtggcatttccgcccttgatctttcttttccgcacacggacgggacggatctatttgatttat

SEQ ID NO: 6829 - DNA, 1767 bp, Glycine max
gatcgttgcttaacactgttcactcactcaaccgttcctttatcttttggattcccttctcattcactttcactttcactccttagcctggttataggagctagggtttatcgagggtttcgttccttcctctctgcaacaacaatggcgaaacctgggcgaggtcgtcgctctccctccggttccgtttccggctcctcctctcgctcctcttccccctccgactctcgttcctcctctcgctcgcgctccctttctcggtcccgttctccctcgcgctccagatcctcttccccctcctcctcctcttcctcccgaagctcccgcagccgcagccctcccccgcagaggcgccgaagtcctgctgacgcaactaggcgaggtcggtctcctccacctcagtctaagagagcttcacctcccccaaggaaaccttctcctgtacgcgagtcacttgttcttcatgtagaaaagctcagcagaaatgtcaatgaagggcatttgaaagaaattttcagtaactttggtgaggttataagtgtggagttggcaatggatcgaactgtcaatcttccaaaagggtatggatatgtgcagttcaagacaagaggggaggctgaaaaggcattattgtacatggatggtgcccaaatagatggcaatgtcatcaaggcaagatttactctacctccaaggcagaaagtttcaccacccccaaaggcttctgctgttgctccaaagagagacacccccagggctgataatgctagtgcagatgttgacaaggatggaccaaagcggcaaagagaatcttctcctcgtagaaaacctcctccctcaccacggaggagatctcctgtacctagaagagctggatctccaagacgaccagattctccacgtcgccgtgcagattctcctgttcgtcgccgattagactctccttatcgtcgtggaggagacacacctcctaggaggcggcctgtgtctcctggaagaggtcgttctccatctccacctagacgccttagatcccctgcaaggctgtcacctagaaggatacgtggaagtccaggtcgaagacgttcacctccacctcctcccaggcgccgatcaccacctagacgaccacgtagtcctcctagaaggtctccaattggtcgtagacgtactcgctctccaatacgtaggtctgcacgctcacgctcaaggtcattctcacctcgcagaggtagaccaccggttagacgtggaaggtcatcatcctactctgattcccctagtccacgcaaggtatcccggagatcaaagagtcggagcccaagaaggcctttgagaggaagaggcagtagcaacagcagcagcagcagttcaccaccaccaccaccaccaccaccaactcgcaagccatagataattcttgtacatctactgtctatttctgttgatgtatttattgagattctgtaccggctgagttctagcttgatgtgcttggggatatatgttgcttttcattgtggtctattaacacattttttcttattagcacttaaaagttgtttggaaactaggcattccgtttttgtttggatcctactttagttgttactttgctcaaaaatgcaaaacatgaaagacgatagtgctctgctttattgtatttctagaaattcagtggaattccatgtaactggtagtttctttagaaatttgattatgcgaaggaagtaaaaaaaaaaaagtagcaaagtatttaaaaaagaa

SEQ ID NO: 6830 - DNA, 536 bp, Glycine max
tgtgacacaagaagatggccctgaagttgacggggagctcacacagcttactcgtggtgttgatgggtcttcaacaaaggctctacctacaatctggttagaagtgatgcgtttcttcacaaatcctcataaacctatgatcttagccttgtcaaggccagatccgaaaaagaacataaccactttgttaaaagcctttggagaatgccgccccttaagagaattagctaatcttacgcttataatgggaaacagggatgacatagatgaaatgtcctctggcaatgctagtgtgctcacaacagtgttgaaattgattgataagtatgacctgtacgggcaagtggcatacccaaaacatcacaatcaatctgatgttccagagatatacagattcgctgcaaaaacaaagggtgttttcataaatccggctttagtggaaccctttggcgctactttaattgaggcagctgcccatggacttccaatggtggccactaaaaatgggggacctgtggacattcatcgggccctga

SEQ ID NO: 6831 - DNA, 537 bp, Glycine max
acgaggtccccttcccttctattctatcatcagattccgcaaagacgtcctttcttgtccaaacacagacccactgacaccatcatcatcataatcaccaatgttctcatcgacaccacaattgtccttgtcctctcctccaccattccccatccccaattttctcgatctcatctcccaccaccatcaaaaataataatctgaaaatgaaaagaaactaaaaatccaaaccaaaccaaaccaaattcaaagacacgatgaaattgaactatcaattttgataccaattgaaggactaaagaagtttcatcaaaatgagaagaaactaaaaaccgaaccgaactccacgaacacccatttctccccactaatggtgtcatctccattgttagtgtccctcactttttttctttctctccctctcttgttgtttctatctcctcatattttgtcgcctcccgacgcggacgacctcgccctcttccgccgcgcagccgccccccatacaacctcccacctctccgccaccccgaaaat

SEQ ID NO: 6832 - DNA, 435 bp, Glycine max
gagagagtataaggttgatgcttcagttggaaaaccccgtgttaacttcagagaaactgttactcagcgtgctgattttgactatgtgcataagaagcaaagtggaggacaaggtcaatatggacgggtaattgggtatattgaaccacttcctgcagggtcatcaactaagtttgcatttgaaaacttgcttgtgggtcaagctattccatcaaattttatccctgcaattgagaaaggttatcaaagaagctgccaactctggtgccttaattggacatccaggtgaaaatcttcgagttgtcttgacagatggtgctgcccatgcttgctgattccagtgaacttgcgtttaagttggcttctatctatgctcttagacagtggtatgcagcttccagaccggttatattagaacctgttatgcttgttgag

SEQ ID NO: 6833 - DNA, 827 bp, Glycine max
atcgcacacgctttcgctttctttctctcactgtttctctggagtttgtgatctgagtataaagatggagctgagtagcatcaaagatgcatttgatcgtgtagccaagaagcaaaaattatcctcttccaagtctcaagaagttgttgaccaggtggggtgtgaaattgagcaagcattggcaacaattcagtcatcacatgacccctcagctcctgttgaccagaaatctgttctcacagaacttaagtttaagcttaatgctattggaccacttcaacagttggaaggatcaaataaggaattgaacataagtcttaccaagtatcaaaaactccttgaaaaattgttaaaccctgacatatcaaaggcatacagaaatgtggactttgatactcatattgtcgatcagataattgcaaaccacttttaccgtcaaggtttgtttgatcttggagatagcatcataaatgaggctggagagcctgatgcagctgcacttagatctcaatttttggaaatgcatcagattattggagctatgagagagagaaaccttcagcctgctctcacatgggtgtctgctaatcgagagaaacttgtccagattggttccaatcttgagcttaagattcacacgctgcagtttgtagaggtcctgcaaaatggaacccgagctgatgccttaaaatatgcccgaacttaccttgctccttttgcttccctcaacaagggtgagttcccaaagcttatgggttgcctcttgtatgcaggaaggctggagagctctccttattctgaactgttgtcccaattcattgggagat

SEQ ID NO: 6834 - DNA, 445 bp, Glycine max
gagttttcactgcacgggggctcctatttgtgtcccaacagacccagagttcatggaaatgggttggtttacaatcccttcgctatctgagattgtggagaatctcgcaatttctagttaccagattttccaaatttgagatttttacgcacttagagtaaatgcaagaactttaagaaagattgggtattgggtatcttgttttccaactcaataagatagtggggaggaaagagatatggctgtaggtagcaaaaccagaaatatgcttgaaggtctggttaaagaaggatcatttaaatggttgcttggcaagaagagttacttttatgaagaatttgaagagatggaaaattctccttctgctgggaagaacttttatacgagagctctctcctgttgcaaacctagttgttcgtagatgctcaaagtcgatgaagacata

SEQ ID NO: 6835 - DNA, 445 bp, Glycine max
ctcgagccgattcgccccgagattcaaactgcgagaccaagaaaaatacaaaacttgatcgcaccacgaagcctcaaaactctctccccatcccacatctccatgcatattagatcgatgaaggtgaagtacctaacataaaagagccttggtaacagaaaaaacacatcatgagctcctgaaccaccttcatcgaccaggatcataagtttaaaacatggagatgcagcggatgagggagttgctgttactgtggtcatcatttgaaagcgagggaatgtcccttgtgggtggaaatcacactgccgccaggttttgcactcgctaaaacaatattccacaacccccttttctctctcttttctctctaattatctcttcttttgtattcctctctctttcttcttctacatatatataacaactctctttaaaatttcaacac

SEQ ID NO: 6836 - DNA, 573 bp, Glycine max
cagcacccccatccactggtccctccccactccatcatttcttatactttcttcttcttctttattattgttgattaatataacatacacccacatatttcatatgggtacttgttaatttgggtgtggattgttggtttgttacttgttttgttccgttcaggtgattgtttgattgagccttgaagaaatggaccacagcgctgatgcacatcgcacggacttgatgaccataacgcggttcgtgctgaacgagcaatccaagcaccccgagtcacgcggcgatttcaccatcttgctcagtcacattgttctcggttgcaagttcgtttgttccgctgtcagcaaggctggtcttgctaaacttattggactcgctggagaaaccaatgttcagggtgaagaacagaagaaactggatgttctttccaatgaggttttcatcaaggctctcataagcagtggccgaacatgcatcttggtttctgaagaagatgaagaagcgataattgtggagccttctaagcgcggaaagtactgtgtttgctttgacccattggatggctcgtccat

SEQ ID NO: 6837 - DNA, 439 bp, Glycine max
ggcaatccttgaaggcttaaaccttctttttaggctggagaaccgatatcaaaatgtaatgcacacacaacacaacacaacagcgtggaacgagacaactaagtacgaaaatcgttatccgccgcaacagccactaagatgttctttgagtcttggcacgccacgtgtcagaactgccaacagatagccccatctctttctccttctccctaaacctcgaactcagcacccccatccactggtgattgtttgattgagccttgaagaaatggaccacagcgctgatgcacatcgcacggacttgatgaccataacgcggttcgtgctgaacgagcaatccaagcaccccgagtcacgcggcgatttcaccatcttgctcagtcacattgttctcggttgcaagttcgtttgttccgctgtcagcaaggctggtcttgct

SEQ ID NO: 6838 - DNA, 1735 bp, Glycine max
ccagaacctcgctctcttcaccctcttcttcttcttcttcttcttcactttgtaactttcgaatcttcttccttccaccgcaatggccacccccacgcttagccccgccgacgccgacaagctctccaacctcaaatcctccgtcgctgcattgagccaaatcagtgagaatgagaagaatggattcacaagcctcgttgctcgttacctcagtggcgaacacagcatgttgagtggagtaagatcgagacgcctacggatgaagtagtggtgccttatgactctttggcaccgactcctgacggttctttggaggtgaagaacctcttggacaagcttgtggtgttgaagctaaatggaggcttgggaacaactatgggttgcactggtcctaaatctgtaattgaagttcgtgatgggttgacatttctagatttaattgtcatccaaattgagaatctcaattccaaatatggaagcaatgttcctttgcttttgatgaattcattcaacactcatgatgacactcaaaagattgttgaaaaataccaaaactccaatattgagattcatacttttaaccagagccagtatcctcgattggttgttgaggactttttgccattgccttccaaagggcatactgacaaggatggatggtaccctcctggccatggagatgtcttcccatcattattgaacagtggcaaacttgatgcactattgtcacagggtaaagagtatgtgtttgttgccaattcagataacttgggagctatagttgacttgaaaatcttgaatcatttgatccagaacaagaatgaatactgtatggaggtgactcccaaaacattggctgatgtaaagggtggcactttgatttcttacgaaggaagggttcagctcctggaaattgcacaagtccccgatgaacatgtcaatgagttcaagtcaatagagaagttcaaaattttcaacacaaataatttgtgggtgaacttaaacgcagttaaaaggcttgttgaagctgatgctcttaagatggaaattattcccaatccaaaggaagttgacggaataaaagttcttcagctggaaactgcagctggtgctgcaataaggttctttgacaaggctattgggattaatgttcctcgatcacgattccttcctgtgaaggcaacttcagatttgcttcttgtccagtctgacctctacactttggaagacggatttgtcattcggaacaaagctagggaaaatcctgaaaacccttctattgaactgggaccagaatttaagaaggttagcaacttcttgggccgcttcaagtcaattcccagtattgttgagcttgacagtctaaaagtggctggcgatgtatggtttggagctggtgttatcctcaagggaaaagtcagtattgtagcaaagcccggtgtaaagctggaagttcccgacggtgttgccattgtagacaaggaaattaatggcccagaggacctgtgaggaagacagatgactttaactaaagaatgaattgtatcagaccgtatcttatctatctatatggtctagtgtttttactactcccatgtttgataggtaaagaaaataagaagtctttttgttgagaggatgtcttggtgtggatctttactccattgtcttggaattctgtttagaacagcaaaaaaatgacaagtttggtgataagtttcatgtcatttggtac

SEQ ID NO: 6839 - DNA, 676 bp, Glycine max
gaagatggtcacagaaacaaggggcttacacatcacagcacgaaatttcttaccttacataccggttgcgtgaaagacgcgccactcatccttttccgattgggcgagaggcatcagatcagagcagggtcccctgatatctacatattctcattattctgtccagaaactaactacactgacctttttgttctcgtgtcaatttctaaatccaccaccacaccctctcttctattctctattattattatctccacacccttcactctctctcactcttctctcgaatcttccaccgcaatggccaccgctgccgagaaactctccgctctcaaatccgccgtcgccggattgaacgaaatcagtgagaatgagaagaacggattcatcagcctcgtcggccgctatctcagtggcgaacgcagcatgtggaatggagcaagatccagacgcctacggacgaagtggttgtgccttacgacactttggcgccaactcctgaaggttcttcggaggtgaagaatctattggacaagcttgtggtgttgaagctaaatggaggcttgggcacaactatgggttgcactggtcctaaatctgtaattgaagttcgtgatgggttgacatttctagatttaattgtgatccagattgagaatctcaattccaaatatgg

SEQ ID NO: 6840 - DNA, 443 bp, Glycine max
aagtcaatccccagtattgttgagcttgacagtctaaaagtggcagcccatgtatggtttggacctggtgtaatccttaagggaaaagcaagtattcttgcaaaaccgggtgtgaagctggaaatacctgacggagctgtgatcgcagacaaggaaattaatggccctgaggacctgtgagagaaagctgatgatgagttttgaaatccatgtgactgtgcaatctttgagtattgacagtcttaaactaaaatttgtgtattgcttctagtttggtaggggtaaaaataagaaggcagtttctactgagcatgtctgaagactaagctttgtatttctcataattttgtttttaaacatttcttacaaggactcaaggaggatccgatcatgtttcctttccatatcatattaagcgtttacgccttcatcttttgttgagc

SEQ ID NO: 6841 - DNA, 369 bp, Glycine max
gcaatgtatggtttggagctggtgttatcctcaagggaaaaatcagtatcgtggccaatcctggtgttaagctggaagttcccgatggtgctgtcatttcggataaggaaattaatggcccagaggacctcctgtgaggaagcccgctgagtttagaagtatcagactgtatactatctttatggtctcatgttttttccaattattactactcccaagtttgatgggcaaagaaaataagtccctttttgtttgtcttctgatgcgatttagaccaagagagacagagacatgagttcttccccattatgtcattttgtataatcacattttctttcactaccacaagtactaagaagtgatataatt

SEQ ID NO: 6842 - DNA, 477 bp, Glycine max
ctggtcacagaaacaaggggcttacacatcacagcacaaaatttcttaccttacataccggttgcgtgaaagacgcgccactcatccttttccgattgggcgagaggcatcagatcagagcagggtcccctgatatctacatattctcattattctgtccagaaactaactacactgacgtttttgttctcgtgtcaatttctaaatccaccaccacaccctctcttctcttctcttctctccactcaacacaacgtctccctcttcttcttcttctctcgaaccctccaccgcaatgaccacccccaccgagaagctctccgctctcaaatccgccgtcgccggatcgaacgaaatcagtgagagtgagaagaacccattcatcagcctcgtcagccgctatctcagtggcgaacgcagcatgtggaatggagcaagatccagacgcctacggacgaagtggttgtgccttacgac

SEQ ID NO: 6843 - DNA, 1284 bp, Glycine max
aacgggtgcgagtacaggtgagaagggggaagcatgaagttttctcattcagtgggcggctcgtaatttagaggtgtggaaagttctccaagcacacgacacatagtataagtcatatattgtttctttctagatacacgcacgcgccctgtgtgtctgttttcgacatcgcatctcacacaatcatcaaatctctctttatatataaccctcacaatgcggaaatatgctgcagacagattcaggcaccttttcaaccgttcactccttcttctgcgtcaccgtcaccatcataatcaccatccctttccttattcttcttctgtttcatccctctccccattttctcgctctcgtttcttgtcctctactcctttctccatggcttctgattcccctttccctgtcaccgctcaaaacatcaaccccaaggttctgaaatgtgagtatgctgttagaggagaggttgtcacacttgcccagaatttgcaaaaggatttacaggccaatccaggttctcacccatttgatgagatactttactgcaacattggaaatcctcagtctctgggccagcagccaataacttttttccgagaggttcttgcattatgtgaccatccagctatattggacaaaagtgaaacacagggtttgttcagtactgacgcaatacagcgagcatggcagattgtggatcagattcctgggagagcaactggtgcctatagccatagtcagggtgtcaagggcttgcgtgatacaatagctgctggaattgaagagcgtgatggttttcctgccaatcctgatgacattttcatgactgatggtgcaagccctgctgtccataatatgatgcaattactcattagatcagaaaatgatggtattctgtgtcccattccacagtaccctctgtactcagcctcaattgccctccatggtggctgcctggtaccttattatctagatgaagcaactggctgggggttggaaatacctgaactcaagaagcaattggaggctgccaagtctaagggcatcaatgttagggctttagttgttataaatcctggcaatccaacggggcaggttcttggtgaggcaaatcagcgagatatagtagagttttgcaagcaagaaggtttggttcttttagctgatgaggtatatcaagaaaatgtttatgttcctgagaagaaatttcactctttcaagaaggtgtctcggtccatgggatatggtgagaatgatatcaccttagtatcttttcaatcagtc

SEQ ID NO: 6844 - DNA, 337 bp, Glycine max
gtctttatatataaccctcacaatgcggaaatctgctgcagacagattcaggcaccttttcaaccgttcactcattcttctgcgccaccgtcaccatcaccatccctttccttcttcttcttctctctccccattttctcgctctcgtttcttctcctctacgccgttctccatggcttctgattccccttttcctgtcaccgctcaaaacatcaaccccaaggttctgaaatgtgagtatgctgttagaggagaggttgtcacacttgcccagaatttgcaaaaggatttacaggccaatccaggctctcacccatttgatgagatactttactgc

SEQ ID NO: 6845 - DNA, 1525 bp, Glycine max
cttagtctcactatcaagcaatgcaataacatcagtacaaaacacaacataacatcctcaagcctttgaacatcgttttgcagccatggaaacaggcatagcatgctacactcgcgggcctttcttgcctagtgtttcttccaagcactctccaccctccatctctccatcttttggcttgaggagtctgaaatcgagctctttatttggagaatctctaagagtggcatccaaatcaacactaaaggtttcaaagacaaagaatacttcactcgtgaccagatgtgaaattggtgacagtctggaagaattcctcacaaaagcaacaccagataaggggttgatcaggttgttggtgtccatgggagaagcattgagaacaatttccttcaaagtgaagacggcttcatgtggtggaacacaatgtgttaatacttttggggatgagcagcttgcagtggatttgctagctaatcagcttctttttgaggccttaaattactctcatttctgcaagtatgcttgctctgaagaaaatcctgagctcctggacatgggaggtccagttgaaggtggatttagtgtcgcatttgatccccttgatggctccagcattgtggacacaaatttcacagtaggcaccatctttggtgtgtggcctggagataagttgactgggatcaccggaagagatcaagttgctgcagccatgggggttttgggtcctagaacaacatatgtgcttgctctaaaagacttccctggcacccatgaatttcttctgcttgatgaaggaaaatggcagcatgtcaaagagaccacagaaattggtgaaggaaaactgttctccccaggaaatttgagagccacatctgacaaccccgattatgctaagttgatcgattactatgtcaatgaaaagtacacattgagatacacgggaggaatggtgccagatgtcaaccagattattgtaaaagaaaaaggcatcttcaccaatgtgacatcaccatcagccaaagccaagctgagactgttgtttgaggtagctccgttggggttcttgattgaaaaagccggaggttacagcagtgatggtcatcagtctgtgctagacaaagtcatcactaacattgatgacagaactcaagttgcttatgggtccaagaatgagataatccggtttgaagaaaccctgtatggtaaatccaggctcaagggtggtgtagctgttggagcagctgcttaatctgttaaacctgcaattcattgtctattttatctgcttttagaaaaaaagatttgctatcttcagacaagtacctgcaatttagtcacatatttctgttaatcactataataacaaggtaaattatgttggtatggctgattggatctggacaaaaataaaaaaactgtccttaatagaaaacaacatggtcataatatttaaagggtctataaatatagattacaattcaatagtacataccagcataaatgcaaaatgatgaaatcttctttc

SEQ ID NO: 6846 - DNA, 449 bp, Glycine max
cccacgcgtccgatcgttttgcagccatggaaacaggcatagcatgctacactcgcggggctttcctgcctagtgtttcttccaagcactctccaccctccatctctccatcttttggcttgaggagtctgaaatcgagctctttatttggagaatctctaaaagtggcatccaaatcaacccttaagggtttcaaagacaaagaatacttcactcgggaccagatgtgaaatggggacacaggctggaaaaattccttaccaaagccacaaccagttaagggttgatcaggttgttgtgtccatggagaagcattaagacaatttcttcaagtgaaacggctcttgtgtggacacatgtgttatactttgggacagcactgcaggattgctagctatagctcttttgagctaatacttattctgagttgctgttgagaatctactctg

SEQ ID NO: 6847 - DNA, 1196 bp, Glycine max
tctaaactttgaacttgatagatactgtgagtgtttttgttcctcaatcaatctaattctcccatttctcttccaatggcgtcttctctttccaccaaaccattctcatcaacgacgctctctccgccttcgcttctctcaattccgatctccgatccctctcccccgcctacctccgactctcactccgtcctcgtcttcccaagagacttcacatacaggctgctgggagtatctatggaaatcactttcgtgtttcaacatatggagaatcacatggaggaggtgttggttgtattattgatggatgtcctcctcaccttcctctctccgaagctgatatgcaattggatcttgacagaaggaggccaggtcagagccgaattacaactcctagaaaggagactgatacatgtaaaatattttcaggagtttccgaaggaatcactactggaactccaattcatgtatctgtacccaatactgatcaaagaggacatgactatagcgagatggcagtagcttataggccctcccatgcagatgctacctatgacatgaagtatggtgtcagatcagttcagggtggtggtagatcttctgcaagagaaacaattggaagggttgcttctggtgctgttgctaagaaaatccttaaagaattttctggaactgagattctggcctatgtctctcaagttcataagattgttcttccagaggaccttattgatcatgacactctgactcttgatcagattgagagtaacattgttcgatgtccagacccggagtatgcagagaagatgatatctgcaattgatgctgtgcgagtgagaggtgattctgttggtggtgttgtgacatgcattgtgaggaactgtccacgaggtctcggttcaccagtatttgacaaacttgaagctgagctggctaaagctgctatgtcattgcctgcaaccaagggctttcagtttggtagtgggtttgcaggcacctttttgactgggagtgaacacaatgatgagttctatatagatgaacatggaaacacaagaacaagaacaaatcgctctggtgggatacagggtggaatttccaatggggaaatcattaatatgagaatagctttcaggccaacatcaacaattggattaagtcttaatctcttctctttctgtcttcatcactatctc

SEQ ID NO: 6848 - DNA, 1682 bp, Glycine max
ggaatacccgattgatccatcgctgcctgatataaagaacagtatatatgcgactgatgagtttcggatgttttcgttcaaggtgagaccttgttcccgggcatactctcatgattggactgagtgtccttttgttcatcccggagagaatgctcggaggagagaccccaggaagttccattacagctgtgtgccgtgccctgattttagaaaaggggcttgcaggcgtggagacatgtgtgaatatgctcatggggtgtttgagtgctggctgcacccggctcagtatcggacacgcctctgcaaagatggcaccagttgcaatcgaagggtgtgtttttttgctcacactgcagaggagcttcgtccgctgtatgtgtccactggatctgctgccccttcgccccgttcatctgcttcaggtcctaatgtcatggacatggctgctgccatgagcctttttccgggatcgccttcatcgggctcttccatgtcgccgtcccactttgggcagccaatgtccccatctgcaaatggcatgccactgtcttctgcttgggctcagccaaatgtgccggctcttcatttaccaggaagcaatcttcaatctagtcgattgaggtcttccctaagtgctcgtgacattccaccagaagacttgaacatgatgtctgatcttgatggccagcagcagcaccatctgaatgacttgagctgttacatacagcctcgccccggtgccagttctgtgagtagatctggtcggtccaagaccctaactccatcaaatctggaagagctcttttctgctgagatttctttgtctccccggtattctgatccagcagccggttctgtgttttcccctactcacaaatcagctgttctcaatcagtttcaacagctccaaagtatgttatcacctataaatactaatttgctgtctcctaagaatgttgagcatcctctttttcaggcttcttttggtgtctctccttctggaaggatgtcaccaagaagtgttgaaccaatctctccaatgagtgctcgtttatctgcatttgctcagcgagagaaacagcagcacaacagctgcgcagtgttagttcaagagaccttggtgccaacagtcctgcctcacttgttggctcccctgcaaacccttggtcaaagtggggttctcctattgggaaagctgattggtcagtaaatggagactcccttggtcgtcagatgcgaagatcatcctcgtttgagcgcaagaacaatggggaagagcctgatctctcttgggtccaatctctggtgaaggagtccccacctgagatgatcaaagagaagtttgcatctcctatgcctactgcatctgctgatggaccgaattcaaattcccaaattgaatccattgaccattctgttttaggagcctggcttgagcaaatgcagctggatcagcttgtagtctagtcaaaattgaccctttacatatcttgttgagataggtatttaatttcgtaaggtacatattcttttggtgaaattttttggaaagacaacaaggaaagaagtgtagtaaaaggaatggaggattggttggctgcgaagttacctgaaggatattctattttttcttctttttttaaataataattgtcattcattattttactacagagcttcaa

SEQ ID NO: 6849 - DNA, 919 bp, Glycine max
gaagagctatgacggcgcatgcaccccttccgtaggttcggatttcggttcgggcaacacccaattaccgtcttcgtcacagtcacacaaagaagcgtcaccgccgctgaaactatcacacaggtgcaccgtttgcaacaaggcttttccttcttaccaagcactcggtggacacaaggccagccaccgcaaggcctcgtcggaatccaacaccaccgcctccgccgtcgccgtctctgccctagccaacgacagcgtttctgcttccaccgtcggcggcggaaggatgcacgagtgttccatctgtcacaagagtttccctaccggtcaggccctgggtggccacaagcgctgccactacgacggcgggaacaaccacagtaacagcaacgccaacggaaacaacagcagcggcgccactacctccgacggcggcgctgcctcctcctcccacacgctccgtgggtttgacctgaaccttccggcgccgctgacggagttctggtcgccggcggggtttgatttcggaaagaagaaggttggcgttgaacaagaggtggaaagcccgttgccggtaaccgccaagaggccgcgtttgttttcgggggaagataatgaagaggcgtagatttgttcacagaatgtttattttaatttgattgaaattgaatttgttggtacggtgaatatgaattcacaccagttaatttaattttcattttatgtttttttttttgtttgtttttagtatatatataggtgggatcgggattaggttcggattttgtttctgctcctctgtacagacaaaatttgttcattgcttttggattcttgtttgccattgattgaatctaacaattgttttcatcatcagtaatatttatgccaaagataaatatacaggtaaattcacatt

SEQ ID NO: 6850 - DNA, 538 bp, Glycine max
cgatctacactcataaatcattacatggtcatagtctacacctaattagccaaacacaccaaacaccaaacaccaaactagttggctcaattctctttgaatggctttggaggctttgaattcaccaacagcagccaccactcccttccgtggttaccaagaagaggaggaggaggttgaccttcacctacgcgagccttgggccaagagaaaacgctccaaacgacctcgttttgagtcggaggaagagtacttggctctttgcctcatcatgcttgcacaaagcggtaacaacaacaacacccaattaccgtcttcgtcacagtcacacaaagaagcgtcaccgccgctgaaactatcacacaggtgcaccgtttgcaacaaggcttttccttcttaccaagcactcggtggacacaaggccagccaccgcaaggcctcgtcggaatccaacaccaccgcctccgccgtcgccgtctctgccacagccaacgacagcttttcggcttcgaccgtcggctgcggaaggatgcacgag

SEQ ID NO: 6851 - DNA, 438 bp, Glycine max
gatctacactcataaatcattacatggtcatagtgtacacctagttaggcaaacacaccaaacaccaaacaccaaactagttggctcaattctctttgaatggctttggaggctttgaattcaccaacagcagccaccactccgttccgtggctaccaagaagaggaggaggacgaggaggctgaccttcacttacgtgagccttgggctaaaaggaaacgctccaaacgaccgcgttttgagacggaggaagagtacctcgctctttgcctcatcatgctcgcacaaagcggtaacaccagaaacatccacaacaacaacacccaattaccgtcttcttcactgtcagacaaagaagcgtcgccgccggtgaaactaacacacaggtgcaccgtttgcaacaaggcctatggttcttatcaagcactcagtggacac

SEQ ID NO: 6852 - DNA, 544 bp, Glycine max
gccaacggaaacaacagcagcggcgccactacctccgacggcggcgctgcctcctcctcccacacgctccgtgggtttgacctgaaccttccggcgccgctgacggagttctggtcgccgatggggtttgatttcgggaagaagaaggtaggcggtgaacaagaggtggaaagcccgttgccggtaaccgccaagaggccgcgtttgtttacaggggaagatgatgaaaccgcgtagatttgtttgcagaattttattttaaattgattgaaattgaatttgttgctggtatatcgcgaatatgattatgaattcaaaccagttagtttaattttcattttatgttttttttaagtataaaaggtgggattgggattttgtttctgctactctgtacagacaaattttgttcattgcttttggactcttctttgtcattgattcaatctaccaatggctttcatcagtaatgtttatgccaaagataaatataagttaattcccatcatatacagattcctatataaatttatttcttggcttc

SEQ ID NO: 6853 - DNA, 492 bp, Glycine max
gttccctctcttgtctcgagtgcaagtgacgaactaaactaaactagcgaagagaaatgtccgaaaacggagaagagaaattactcgctgtggcgcggcacatagccaaaacgctgggccacaacaacaccatgtctgatgacatattccaaatactatcgaacttcgatggaagattctcgagagagaatctttctgagaagggcgcagatgtggatcccagaggctgcgccgcactggatcattccctcaaatccctagaccgccggatctctccctacgtctcctccgaccgcacaatctgggccgacgccgccgattctgctgccttcctcgacgccgtggacgagctcgtcgccgtcgtcgccgagtggaaccacctcgcctccgacaagtccgtcgccgcctgcctcgtccgcgccgaggacatgctccagcacgccatgttccgcctcgaggacgagttccgctcgctcatggagcgcggcggcg

SEQ ID NO: 6854 - DNA, 1796 bp, Glycine max
cgagatcaaaacaataacttgttcacccttccccttctccttacttctcactctctttccaaaacactccctttctctttccccttacccttcttctgtgtgtgatgatgtagatagagaataaaaagagaccagtgtgcagtgagaaagaggttggtcacttcttgtgtggctttgttttgttctttgtgttggaatttgttgatgggtgaagagggagaagaggtgtcaagagataaggaacagcaacacatgggagtttatggaaatgagtggttgtttagtagtttctgtgcaaattggcgccgtttaagacaccagaattcctgttctatgcctccttttgagtgaaaaaaaaaaaacatcaaaacaaaaacttgttctctctcagcttttcatcttccgatcttaatatacattgactaaaagaaaaataaagggatcaaatttaagttccttgatctaataagatccttgcttttaattgtactactcatgaagagacttggcagttcggatacactgggtgctctcatgacgatttgtccaccaacagacgaacacagtccgaggaacaaccacgcgtatgggagggagtttcagtccatgctggaaggactcgacgaagaagggtgcgtggaagaaccagggcaccactctgagaagaaacgacgactaagcgtggatcaggtgaaggctttggagaagaacttcgaagtagagaacaaactcgaacctgaccgaaagttgaagctggcacaagaacttggcttgcaaccaagacaagttgcggtttggttccaaaaccgtcgtgccagatggaagacaaagcaattggaaagagattacggcgtcctcaaagccaattatgaatcacttaaacttaactacgacaccctccaacaagaccacgaagccttactcaaagagataaaggaattgaaatcgaggctggtgcaagaagagaacaacaacaacactgaaagcgatgtttcggtgaaggaagagatgctgaccaccacgctctgtgaaaccgccattcctggatcggacacgaaggagttgagttacgagtgttttaacaagagtgatgaggtgggagggggttcttctgtgttccatgtggatttcaaagatggctcttctgatagtgactcaagcgcgatcttgaacgaggagaacaacaaccacagccccaacaataacgcggcgatttcgtcgtgtggggttctgcaaagtcacgggcttttgttgtcgccttcttcgtcgtcgatgaacaactgtttccagttccagaaacagtaccagacgacgacgacgcagtacgtaaagatggaggagcacaattttcttagcgccgacgaggcctgcaatttcttctcggatgaacaagcaccaactctgcagtggtactgttcagaggaatggagttaagaggaagaagcttaatgaggtttaattaattgagagcgagggagggcattttgcagggtgtatagtaatgggattgagagagaaactttgtaaaaatgaaatgctgaagattgaagaagagagggaatgaattgaagagcttgagagagagagaggggagggggttgaagcacacgcatggcttggggtcagagatgagaggttgatgacgataaaaaggggtaataataatactaataatcatcaatctctcggccgtgcgggggtaatttatgaataataatgatgattaggtcctaatgaaatctatctatctagtgagtaatgctgtaaaaatcagtccacaattcacctctgcttcc

SEQ ID NO: 6855 - DNA, 1034 bp, Glycine max
aaagccaattacggatcacttaaacttaactttgacaccctgcaacaagacaacgaagccttactcaaacagataaaggaattgaaatcgaggctggtgcaagaagagaacaacaacaacactgaaagcgatgtttcggtgaaggaagagatgatagccactctgcaggatagtaacccgctctgtgaatccgccattcctggatcggactcgaaggagttgagttacgagtgtttcaacaagagtgatgaggtgggagggggttctgtgttccctgtggatttcaaagatgggtcttctgatagcgactcaagtgcgatcttgaacgaggagaacaacaaccacagccccaacaacaacgcggcgatttcgtcgtgtggggttctgcaaagtcacgggcttttgtcgtcgccttcttcttcgtcgatgaacaactgtttccagttccagaaacagtaccagacgacgacgcagtacgtgaagatggaggagcacaattttctcagcgccgacgaggcctgcaatttcttctcggacgaacaagcaccaactctgcagtggtactgttcagaggaatggagttaagagggaagaagaagaagcttaattaattgagagcgagggagggaatagaaagaataaggcattttgcagggtgtatagtaatgggatggagagagaaacattgtaaaaatgaaatggtcaaggattgaagaagagagggaaattgaagagcttgagagagaggggatggggttgaagcacgcatggcgtggggtcggagatgagaggttgatgacgataaaaaaaaaggggggtaataataatcatcaacatccgtgcggggaaaggggagtaatttatgaataataataatgattaggtcgtaatgaagtgaaatctatctagtgagtaatgctgtaaaaaatccacaattcacctctgcttccacctttctttctagctctccccagttttatcggcttttgtatttctatatctagcccaatttcttttataaaaaatctggaatt

SEQ ID NO: 6856 - DNA, 694 bp, Glycine max
gggcctgtgaacttgttcacccttcttccctttctcacttaccactctcccccttctttccaaaacactccctttccctttctattcacttcccctacccttccgtgatgatgtagatagagaataaaaagagaccagtgtgcagtgagaaagagattgctcacttcttgtgtgggtttgttttgttctttgtgttggaatttgttcatgggtgaagaaggagaagaggtgtcaagagagaaggaacaatacatgggagtttatggaaatgagtggttgtattgtggttgctctgcaaattggcgccgtttaagacaccagaattcctgttccatgccttttttcaagtgaaaaaaaaaaacaattacttgttatctctcagcttttcttcttgagatcttaatatacattgacttaaaaaaaaaaaaaaaagggatcaaatttaagttccttgatcttaataaagttccgtgcttttgtttgtactcatgaagagacttggcagttctgattctctgggtgctctcatgacgatttgtccaccaacagacgaacacagtccgaggaacaaccacgcgtatgggagggagtttcagtccatgctggaaggactcgacgaagaagggtgcgtggaagaaccagggcaccactttgagaagaaacgacgactaagcgtggatcaggtgaaggcttt

SEQ ID NO: 6857 - DNA, 978 bp, Glycine max
ctgaagaaacagtggtcgttctctctgaaatgggtttcgctttggcattcacagcttcttctacttgctgctcaaatctacaatctcagtctctgttattcgctgctgctgcattgagatcaaaaccgtgtctctctctctgcaacacttatcgacccaaacgcattcggaagcgttctccaattgttggcgctcaatctgaaaacggagctctcgttacttccgagaagcctgacactaattacggaagacaatacttccccctcgctgctgttgtaggccaagatgctataaaaactgctcttttacttggggccattgaccctgggattggaggaattgccatatcaggaaagcgaggaactgccaaaactgtaatggcacgtggactgcatgcaatactgcctcctattgaagtagtagtaggttccatagccaatgcggatccgacctgcccagaagagtgggaagatggtcttacagaatgcctggaatatgattctgctggaaatattaaaactcgtattatcaagtctccctttgttcagtttcctctcggagtcacggaggacagactcattggatcggttgatgttgaggagtctgtgaaaacaggcacaactgttttccagccaggcttgcttgcagaagctcatagaggtgttttatatgttgatgaaattaatcttttggatgagggtatcagtaatttgctccttaatgtattgagtgaaggagtaaatactgttgaaagagaggggatcagtttcaagcacccttgcaggccccttctcattgccacctataacccagaagagggtgctgttcgtgaacatctgctggaccgcattgcgattaatgtaagtgcagatcttccaatgagtgttgaaaaacgtgttgcagctgttggaatttgcacagagtatcgggagatcagtagccaaagtattgagatgggtcgagaggaacagacaatgc

SEQ ID NO: 6858 - DNA, 777 bp, Glycine max
acgtcggacgcacgcgtacgtaagctcggatcgagtggctaccttgtttagactagtaagttttcatcaacagcagcaaccataacaacaacctgatccatccctcaactccaccaccagcagaacctccagcagctccagatcctccagacaaaactactagccttattcccatcaagaagaagaagaatgcttcaacttttacatggatgaagaagacttatcctcgtcttcttccaaacactactcccaccccccttatcaaccccatcatcatcaacaacacaacgtatccaacatttctacaaacaccttcagcaccacccctaacactgattactcctactcctactccttctctcccacgcaacctgttcaagacttcaacttcgaattctcctcccccaactggtcccacaacctcctcctcgaatccgcacgcgccgtcgccgacaacaactccacgcgcctccaccacctcctctggatgctcaacgagctcagctccccctacggcgacaccgaacaaaaacttgctgcgtatttcctccgagccttgttcagccgcgtcaccgaagctggcgaccgaacctaccgaagcttagcttcggcgtctgagaaaacatgctcatttgaatccacaagaaaaacggtcctgaaattccaagaagttagcccttggactaccttcggacacgtggcatccaatggcgccatcttggaagccttggagggaaactccaaattgcatatacttgacatcagcaacacttattg

SEQ ID NO: 6859 - DNA, 515 bp, Glycine max
acgcgtacgtaaactcggaattcggctccgagtggatttggagtgtcctagattcgtgtcctggtttggtttggtttggttcgtactgttgtacgagttttgactttttctggatttggagttttcaatcagataatgttcaacggagccgcttggtgggttcagattcagaagcagagggagagggtgtttgtgattgcaagtgttggtgaattcaaaagagagagtaagaagagtgtgcatgaacatcatgagtagtagtagaagcagaggcagctggtgcggtttgtggcctggttccttcaatatggaaactgagttgactattagaggaaagagttttggtggcatttttggctcctctgctaagcctagatccctcagggttcagtcttctgatgaagatgttgaggatcttgtcccctctaatatttcgggcaaaccttctggaactgttctgccctatgttggtgttgcttgccttggagccatgttatttggttatcatcttgggg

SEQ ID NO: 6860 - DNA, 463 bp, Glycine max
cagagttcttctcccgatggaactttcctcaaagaaagagttactatctcgaatagtatcaacactaacgcccaccatcacactcatcttcttcttccttgtgctttctccgagcctgtgcacatcactcggaagcaccaacacagttggatcggagttgctgaaggttgctccttctgaatttgaggggacagtgagaaccgtcgttgatgtgttgcaagaagtcacctctattctctccgagttcggttctggcttcggcgattcacgtctttctaacgccgtttctgactgtcgtgatttgcttgacatgtccgctgatgaactcgattggtctgtctccgccacacagagtcccaaagggaagcacaacagcacagggaacacaagttcggatttgagaacatggctgagcgcagcacttgcaaatcaagatacatgcattgacggattcgacggcacg

SEQ ID NO: 6861 - DNA, 377 bp, Glycine max
gcgctgttcttcccaatggcactttcttcaaagaaagagttatctcaaatagcagcaacaccaaaactcactatcacactcatcttcttcttcgtgctgtttctgaccgcacttggcaacaccaacaccaacacggtgggatcggagttgctgaaggttgctccttccgaattcgctgggacagtgagaaccgtcgttgatgtgttgcaagatattacctccattctctccgagttcggttctggcttcggcgattcgcgtctttctaacgccgtttctgattgtcttgagttgcttgacatgtcctctgatgaactcgattggtctgtctccgctacccagagtcccaaagggaagcacaacagcacagggaacac

SEQ ID NO: 6862 - DNA, 271 bp, Glycine max
ttcgagccgctcgagccgaatcggctcgagattctggttacatgtgatcttttatgaggtttagttattctctgtgttagaattgtttggggaaaatcgttaattttatcagaatttagctagtttcatgtatccgttttctagatatctgccatatccatagctagctttgtatattttgagtttctaacttgaaaggtagcaaaacacaagacatgattttttgtaataatttacccttggaagtaatgtcatctctaaagtagatggg

SEQ ID NO: 6863 - DNA, 438 bp, Glycine max
gttcatgcattatctggatctacttactgtagattgctggaaatgaactgagttagttgtaattcagaaatattattgaatcaaggtggagattgatgattgttggacaatacatgatagacatagaatggacatcaatgatcgtctggtccagtacttttatcttttatataggtcatccaatcctatgtcacctggtggagcatccagtcacgtgcgaggggccgtccaacatggtgattcactaacataagttgtgttgtaactgtaactattttctatttttttccgtttgtaaccattttcggttagatagatagtagttgtctcctttacaaggagctctgtattttgggtttagagagtttgagagtattttgaaccccttcattgtaaattttgttattcgtaataaacttaacaattttgcacaataag

SEQ ID NO: 6864 - DNA, 2778 bp, Glycine max
tatcgagcaaaggagagcgactgaagaataataataaggttgcaacaaagcatattattattcttcagtcgcttttctttgctcgattggaaaattttcctcttttcttctatgtgattttaactggcggtctttaaattggtgactgagacatgtggggatgggttctctctgagtaggattttaggttgatacctcacacaaaggcaaagtggcatccaagttggactttcatgataagctacttgtttgttggtcgactttggtagcgatttgaggctcttatacccccatgctgctatagatatctttatattttccccaaaaatccagatccaatctttgcatctaatatctgggatatcaatcttcatatattttcttttgataaggatcttgattaggagagctcggtgttttttttatattattattgggggcgtgagaaacttttttttggaaggcaagggtgtgtgagaaacttgttttaagaagaagctactgagagctgttatatgaggttcaaagctttggctatgccatgaaaattttgaattatacaatatgggtagcaacaggactattgtttggtttagaagggaccttagaattgaggacaatcctgcattagctgctgctgcaaaggagggttctgtactccctgtgtatatatggcgccctaaagaggaaggacagttttatccaggaagagtgtcaaggtggtggctgaagcagtctcttgctcacttggatcaatcactgaagtctcttggatccagacttgtgctcatcaaaacccacagtactgtcacggctctcgtggagtgcgtaaaggccattcaagcaacaaaagtagtgtttaaccatctgtatgatccggtttcacttgtccgtgatcacaacatcaaagaaaaactagtggaacaaggcatatcagtccaaagctacaatggagatctgttgtatgagccatgggaagtaaatagtgagagtggacgtgcttttactaccttcaatgctttttggaagaaatgcttgcacatgcaaatggatattgtttcagttgttcctccatggcaattaattccagctgaaggaaaagttgaggaatgtccactggaggagcttggtcttgaaaatgaatcagaaaaaccaagcaatgcattactaggacgggcatggtcgccgggttggagaaatgctgacaaggctttaacagaattcgtggagcagcatctactagactactccaagaaaaggctgaaggttggtggagactccacctcactcttgtccccatatcttcattttggagaattgagtgtgaggaaagtttttcaagtgacacgtatgaagcaaatattatggacaaatgaaggcaacagtgctggtgaagagagtgtaaatcttttcctcagggccattggacttagggagtactcacgctatctttgtttcaactttcctttcacccatgagaaagcacttctgggacacttaaagttttttccttggaatcctgatgctgatatctttaagaattggagacaaggtaggactggctttcctttggttgatgcaggaatgagagaactttgggcaactggctggattcacaacagaataagagtaatagtttccagttttgctgtgaaaatgttgcttctaccctggaaatggggaatgaaatatttctgggacacacttcttgatgctgaccttgaaagtgatatcttgggttggcaatatatctcaggaggcttaccagatggccatgagcttgagcgcttggacaatcctgagattcaaggggctaaatttgatccagaaggtgaatatgtgaggcaatggctacctgagttggcaagaatgccaactgagtggatccatcatccttgggatgcaccacttactgtgcttcgagcagcaggagttgagctgggccagaattacccaaagccaatcattgatatagatttggccagagaaagactcactgaagctatattcaagatgtgggaatctgaagcagcagcaaaagctgcaggctctgaaccaagggatgaagttgttgtagacaactctaactctcttgaaaatttggacactcgaaaagttgtcgtcctgggaaaggctccatgtgctactatttcagctaatgatcaaaaggtgcctgctcttcaggattccaagaatgaaccgcctacgcggaagaggccaaagcacatggtagaggaggggcagaaccaggatcactctcaaaatcataacaaagatactggcatgtcaagcattgaccaagacatttgctccacagctgattcttcatcatgtaagaagcagtgtgccagtacaagctcatattcattttcagttccacagcagtgctcctcatcttctaatctgaagtggccatggcaagatcagactgacatggagcagagttcaagcaaagatggagctatgtgaggttaatgttgttcttgttgataaaaccagtagcagctacattactcacggaaagaaaatggtgccatatttaaatactgcagtttgtttagcccatgctatcaatcagttgtgtaataggttatgaaatccaacaggaagaacacggattaaaacaatagtgaacattgtatattatgaacttgtgctgatgggctggtccatacacattctgacaagcccgtaattacaaactatataaaccaaatactctacacaatgtattactctgatatcacttgcattttatccttattactcgagctttat

SEQ ID NO: 6865 - DNA, 490 bp, Glycine max
aattccgagggacgcgtcacgcccacgcgtccgattgaatatccatggttctcttagttcttttatccattaaaaaactctagattaatatttctaagaagaactatagtagttgaaagatatcttttgcaaatatgcatatttaactgaggttgttataacttgttccttccctcaaaaaaaaaaaaaaaagaaagaaaaagaacctattagcctccttcattggatatattacatctataaggagtaaattctaccggttcagagaatagaaaaataatcaaaataaaagtcagcagtctcacatctctaattttggtgacagattcaaggggttaaatttgatccagaaggtgaatatgtgagacaatggctacctgagttggcaagaatgccaactgagtggatccatcatccttgggatgcaccgcttactgttcttagagcagcaggagttgagctgggtcaaaattatccaaagcccataatt

SEQ ID NO: 6866 - DNA, 851 bp, Glycine max
gtctaattatcttcagctaaacttcgatggggttgtgaatattaaaatatctagccggtgggtatttcacatctcacttatattatagtccgagtttgaggtgtgtttttttaggctagatttgaagaactttccagttagttatctcttattttcaaggattattttattatataacatattgagtggtttgtggatattgttctttaattttatatatacttctttgccaccttattattcttcagtcgcttttgtttgctcgattgaaaaatttcctcttttcttctttgtgagtttaactggcggtctttaaattggtgactgagacatgtggggatgggttctctctgagtaggattttaggttgatacctcacacaaaagcaaagtggcatccaagttggactttcatgataagctacttgtttgttggtcgactttggtagcgatttgaggctcttatacccccatgttgctatagatatctttatatttttttcccccaaaaatccaagatccaacctttgcttctaatatctgaggtatcaatcttcatatatttgcttttggtaaggatattgattaggagaactcggtgttttttgttttattgggtgtgtcagaaacttgttttaaggagaagctactgagagagctggtatatgaggttcgaagctttggctatgccatgaaaattttgaattgtacaatatgggtagcaacaggactattgtttggtttaaaagggaccttaaaattgaggacaatcctgcattaactgctgttgcatacgagggttctgtactccctgtgtatgtatggtgcccctaaagaggaaggacaatttta

SEQ ID NO: 6867 - DNA, 689 bp, Glycine max
  unsure (1)..(689): unsure at all n locations
acgcgtacgtaaactcggaattcggctccgagatttgttcaacaaggtgaaaatttaaggcatgggcaacctaagtttggcaaaattgcaactattggattcacatccttgggatgcaccacttactgtgcttcgagcagcaggagttgagctgggccagaattacccatagccaatcattgatatagatttggccagagaaagactcactgaagctatattcaagatgtgggaatctgaagcagcagcaaaagctgctggctctgaaccaagggatgaagttgttgtagacaactctcactctcttgaaaatttggacactcgaaagtatgtcgttctgggaaaggctccatgttctactatttcagctaatgatcaaaaggtgccagcacttcaggattccaagaatgaaccgcctacgcggaagaggccaaaacatatggtagaggaggggcagaaccaggataactctcaaaatcataacaaagatactggcatgtcaagcattgaccaagacattatctttgttatggtagaggaggggcagaaccaggataactctcaaaatcataacaaagatactggcatgtcaagcattgacaaagacacctgccccacagctgattcttcgtcatgaaaaaaacagtgtgacagaacnagctcatattcattttcgnacgcctgggtcg

SEQ ID NO: 6868 - DNA, 496 bp, Glycine max
ctgatacactttgatagggttgtgaatattacatatctagccggtgggtttttggtatcttactaattatattatctagttcaagtttgaggtgtgtttgaggctggatttgaagaactttccagttagttatctcttatcttgaagaatcattttattatataattatattgaatattccagctcaagtggtttgtggatattgttctttgattttatatatgcttttttgcaaccttattattattcttcagtcgcttttctttgctcgattggaaaattttcctcttttcttttatgtgattttaactggcggtctttaaattggtgactgagacatgtggggatgggttctctctgagtaggattttagattgatacctcacacaacgcatagtggcatcaagctggactttcattataagctactctgtctgtggtcgactttggtaatgatacgaggctcttatcccatgttgctatacatatctttata

SEQ ID NO: 6869 - DNA, 464 bp, Glycine max
agagtatgaactgaggctcatttgagatatgtgtctttgtttggtattcacaaaataattgtctcatttaacgatcgtggatggaagagggagtctttaatcgatttttggctgaccgcatcaaattataagttactcattgtctagaaagttgtcagctaaatctaagctagaaactcttgcaagtccctttggtcaaatctgttttgataggaaaaatgattggttcttcctcttcattctcaggccttttttgtaatcacaatctgtccatctttttctatcgtcttcaaattgtagtctgatcttcattttacagagaattctagggttttgtataattggtcaaattgtagtctgaccaattatagatagggaaataattgtccctcaaccatgtatgcacgataaaatatacatgtatttttcaaatatctattcacagttttacagatttattgcaa

SEQ ID NO: 6870 - DNA, 852 bp, Glycine max
gtacgtaaactcagaattcggcccaacctcaataaaagaatttgggagtttttcccccttccttggtagccgagccttggtatctcaaggtctcaatctctaactaggacgacatgccttctctctccgttttcccatcactcccatcgcttcaaaaccctaacttgagccaacccaatttcttcaatttccgcttaccgtcgctctgtcaccgtcccctcgtcaaaagcactgcaacttttcaccgtagaatcctctgcaaagccttcagagattccggcgaggacatcaaggcggtgctcaagtccgacgacggtggtggcagcggcgacggcggcggcgacggtgggggtgggggtgaccgggatgcggagaaggaagaaggtcccttgtcggagtggttgaatttcacttctgatgacgcaaaaacggtgcttgcggctctcgcaatttcgcttgcgtttcgatcattcgtggcggagccgaggttcattccttcgctgtcaatgtatcctacatttgatgttggagatcgaattgttgctgagaaggtttcatactattttagaaaaccatgtgcaagtgacatagtgatatttaaaagccctccggtgcttcaagaagttggatatagcgatgatgatgtttttataaagcgtgtggttgcaaaggcaggtgatattgtggaggttcgtaaagggcatcttgtagttaatggggttgagaggaatgaagagtacatccttgaaccacctgcttatgagatgaaacccacacgtgtgccagagaactacgtctttgtaatgggagacaaccgcaataacagctatgactcccatgtgtggggtcccc

SEQ ID NO: 6871 - DNA, 617 bp, Glycine max
cccattcgtccgcccacgcgtccgaaaagaggttctaaaaaacccttccttttgtgcgctgtagcgcttgaaccttgaggcacattcaaacattaaaaccctctagctggcacaataaaacaacgacacacaagtaaaaccttagagagagagagagagagagagagagggtaaaagggtattagatccttgaaccagatcaaatcatcaaaatctctgtctatggggttgtgaaaacaacaatcacattgttgttgctgtaaaaggggattccttagtctagatttgtttgcattgcagaagaaccagataccccattattgttcttatctatctatctgtctatattctatttatcttcttattgtagttctcattgtgtctgatttcagtgatttgtgttgtttttggttaacacaagcaatggaagttgttgagaaggagaagaagtacataacctcagaggagctgaagggtcacaacaaggagggagatttatggatctcaattcaaggtaaggtgtacaatgtctcagaatgggtcaaggagcaccctggtggggatgtttcaatcttaaaccttgctggccaggatgtcactgatgcattcatagcata

SEQ ID NO: 6872 - DNA, 357 bp, Glycine max
cgacacacaacaagtaaaacctgagacagagagagagggtaaaagggtattagatccttcaaccagatcaaattgaaaacaacaaacccatttcttggtctagatttgttagcattgcagaagaaccagatacccccaacaatggaggttgtagagaaggagaagaagaagtacatcacctcagaggagctgaagggtcacaacaaggagggagatttatggatctcaattcaaggtaaggtgtacaatgtctcagattgggtgaaggagcaccctggtggtgatgttcctatctcaaaccttgctggccaggatgtcactgatgcattcatagcataccatcctggcacagcatgg

SEQ ID NO: 6873 - DNA, 542 bp, Glycine max
  unsure (1)..(542): unsure at all n locations
cagaagacccatctttgggagagaaaaaatgggtgtaatagcacccggcccggcctcaactggaaaccaaaccctaaaatactagccatgccaatccataaatacccctccctcttagcccaataaaaaactttatttgcaactccaacaactaaacgaaacgaaaacactttctctccgattcttagcatccaatcagaggttccatttctcttccttctttcgcaccgaagttccaatcgctcattactgcactatatgcttccaactaagagaccttgcgaaggactggttgcagaagaagagatcgaccacaacatcaacaacaacaacaacagcaacagcagttctctcaagaagaaacggattgccgccggaaccgccgattcgacggtgaagaacgacgaaagcaccgtccggagcttcaacaacagcaacagcgacaacagcagcaacagcggggacgcgagtgaaggagcgtcggatatggctttgggcgaatcgaacccgccagacatcgatgaggatcttcacagncgaca

SEQ ID NO: 6874 - DNA, 726 bp, Glycine max
ctttgagagagaaaaaatggtagtagcagctgtcctgtcctcactcgaaaacgaaaccctagaatactagcatgagcattgcaaatccataaatacccctccctctaaacccaataaaacccccaaaatccaataacaaaaccaaacgaaaacactttctctccgattctcagcatccaatcagaggttccatttctcttgattccctctcacccaagttccaatcgctcactactgcactatatgcttccaactaagagaccttgcgaaggactggttgcagaagaagagactcacatcaccaacgacatcagcaacaccagcaacgacatcaacatcaacaacaacaacaccaacaacaataacaacagcaacaacagcagcagcagcagcagttctctcaagaagaatcggatcgccgctgccagaaccgccgattctacggtgaagaactacgaaagcaccgaccagagcttcaacaacaacaacagcaacagcggaaacgcgagtgagggagcgtcggatatggctttgggtgaatcgatccagccggacatcgatgaggatctccacagtcggcaactcgccgtgtatgggcgagagaccatgcggaggctctttggttccaacgttctcgtctccgggatgcagggtcttggcgttgagattgctaagaatctcattcttgctggtgtcaagtcagtgaccttgcatgatgaggggact

SEQ ID NO: 6875 - DNA, 473 bp, Glycine max
  unsure (1)..(473): unsure at all n locations
gtgacggctgcaccgggagggcctcgctcccggcgccgcagaggaggcccaagtcgaagagtgggcctcttggcccccctggagttgctgctgttgcgtattcattccatgtattcccctgcggtgcctttgtttgaaggtgcgaattcaaggagctttatggcggcatctccgttttctgctgctgttagtgtcccagctgctgctgctgatgggttaactgccagttccggtggcagttgtggggtgctctcaaccagaactgatccttgcatggctcgctcggttagtgtccatggttgctctcagatgcatagtcagtcatcactgcctgcccaaggggagaagtttgatggtttcaaagatgcgggcaccaatgtatctcctgctctttcaaggagggatatggccacccagatgagccccagagggtagctcatgctcctctcccagtntgaggccttctttctctg

SEQ ID NO: 6876 - DNA, 690 bp, Glycine max
cctgaatatcttctctttttaatctgattcacgctttcctttgtctcttagctttgttgtcggtggatcccatccccctctagctaaactcgtttgtcttctatgccaccttcaggctgatcaaaacaaaacaaaacaaaacttgttttttcgctatcttcttctccctttgaggtaaacagcataaataaataaaataaaaaaaagcgacagaaagtgatcgatagaaaaagagacttgtggagtagctctcagtgtaaagatgggtactggttggagaagagccttctgcacccgcgaccctgcttctaccatatcggataaacagcccagaagcccgagccaaagcccgagcccgagcccaagaagctgcgccagattgggttttctctccggaggtagcaacccttccaccccacgcttgcgttgtacaacaacagcggaaactgtttctcaaacagttacagtaagtgagagtcccagagttcatagcaagaataccacccccagagcagcgaaatcaccaaaaacgctatcggtctcaaatccaacttctcctcgctcccctctcaagctctccctcttcaggaacagcttcaaattcaggagtagctgcggaatttgcttgaacagcgtgaagacgggacagggtacggcgatttacacagcggaatgttgtcacccgtttca

SEQ ID NO: 6877 - DNA, 785 bp, Glycine max
atagaagataatgacgtcgcacgcacgcgtacgtaaactccgaaactaggcattggtttctctctctagcttggacgagtgaattagattcatcatcaagatgtcgtctctgatagcagaagatgtgaagagcagatcagaggtgtaccacggggacgaaatgtgccaagtgaagtccaaggagcttctcaaggaaatcgccctccccaacggccttcttcccctcaaggacatggaggagtgcggctacgacagacaaaccggcttcgtctggctcaaacaaaagaagagttacacccacaagttcgacaagatcggaaagcttgtctcctacgcgcccgaggtaactgctcatgtccaacaaggtaaaattaccaaactcaccggggttaagaccaaggagctcttgctctggatcacgctcagtgatatctatgttgatgaccctcccactggcaaaatcaccttcaagacccctgccggcctatttaggtcttttcctgtctccgctttcgagattcaggaggagcctgaggctaaggacactactaagcgcgtgccggataccgctgagcctgtgcaagtcaaggaactctgattttattctcaaacaaggtcgccgtggtggttagcgtgcaaaatatatttatatatatatatgtttattaataagtttatttatgttaccttttatgttaagctttcagatattgtgcggctttattgctaattaaccatcatctccttgttctggctttgaaaagaaaatggattacgatattgtt

SEQ ID NO: 6878 - DNA, 497 bp, Glycine max
caaaagcctacaagaaatggacaaagaaaatatcagaaatcaagccaccaactcgtcccttaagaaggcgggcaaaatcatcaaagaagcaaccagaaaaagagctttatgctatcatatcacaacgcaaacatgagaggaaagaccactttgattccatgttctcatctctaatttcaaagtatggtgggggtcaaatgccagaaccctctgaagaggaatttgaagctgcacagagaaaggtggaaagtggaaggtcctcaaaaaaattaaagcgaaaataacaaacttatatctgtgtacaattcgtttaagtgtgaacggtacttcagcttttgttagtggaaattcttcttttctgatgaagtacgggaagttagttattttcatgtgtatgttaatgttactggttactgtcaatagtgtcaatggtgaaacagccgcaacttccccaaaagttttagggattttatgttatcttccatcaattttctctg

SEQ ID NO: 6879 - DNA, 438 bp, Glycine max
caggcgtacgtaaactcgaaattcggctccagggatgaacttctgcgattctcagtatcagctgggagcaattatgtggcagtgttgatagcacatggggaatcagtttgcatttattcacatttgttgaaaagaattttgctgtatttccttatgcaatttgtacgcttcaaagcaacaggaagtggatcagtgaaacggattcgctgttgtctacaacagcatctgctaccagtgttcgttgtacagaaaataacttctaatagccaaattgtggatatttatcaatgaagataacaacaactgaagttatttctagccgttggagctcacagtaaattgcttttaacgtgttccatcaaaaagttggtacaaatccctgtaatcttcatttttggtaaaaatcctagtaatcttctgatggatcaaacgggggtc

SEQ ID NO: 6880 - DNA, 522 bp, Glycine max
ggaagaggcagagaagttctagtggttcagcaagtaaaaagacaaaaaaaatagttaatggtgagaaatctccaagcaaccatgtaaaacatggacaaaaaggtgcctcaaaaactaattcccatcatgaggatgccaaagagagttctgagttatcaaaccctgaagatatatctaaagctgagattaactcaggtggttctgaagcagaacaggctgaagggtctgatgtaattgtaactaagcagaagaaatctaacaagaaaccaaaatcagtttcacgtggaaagaaacttaaaaaagagaagagcttgaggtataagaaagagtcacatgaagagaagcgggaatcagaccaagagaagcaggatcatggtgagaggcttgctgaagagaatatcccacaaggagatcaacatgatgatgcagaaagtattctaaaagagacagatggcgatgaatcaagaggagctttgggagaaaatggtaatgaagaagaatcaggttctggagggaatgaaa

SEQ ID NO: 6881 - DNA, 441 bp, Glycine max
  unsure (1)..(441): unsure at all n locations
caagaatatgacatcgcacgcacgcgtacctaagctcggaattcgggtcgagaaaggaatcagaaaagggacaaaacagattatggcagtgaagcaaaagacagagtgaaacagcacagtttaaggcacggggagaaggcaaaggaatcagactcaaggaaaagatcctctcatgttgatgtcaaggatgataaaaaggaagcagaaaaatcccatagaggtagtgctcactgacgatactagccggaaaagggagcatgcaaaggataagggggaacataaatcaaggcaaaaagatgcaagtaataatgacaggcatagaagaaggcgttcatcttcagtaagcagtanaggtagaaccaagaaggattgtattaatcatgctggtgattcaagtggtgaaggatcagatggctcaaaaaggaagctgcattcaagaaa

SEQ ID NO: 6882 - DNA, 385 bp, Glycine max
  unsure (1)..(385): unsure at all n locations
aattcggctcaagcggctcgagtcttgtttctctcataaccttagggaggacaatcaatcaagaagagaccttgcttggttcgttctcccacatctaataatctaataaattgaaacatgggcaactgtgctagctaccccaagaccaacgaaggtgaggccccagtgcctgtgccggtgccagaacctgtcgccgaggaggtcaaggttgagcagcaagagaacaaggctgaggaaaatgtcgtcgaggccaagacagaggaaacccctgtcgcctctgctgacaactctcttgtcaccttgctcaatgagaatgaagaaaagaaagaagagcaatttgaggccaaggangtgaaggctgaagccccgaaagaagagaaagcca

SEQ ID NO: 6883 - DNA, 403 bp, Glycine max
ggtttcttcgcttcttcatcctgtaaaagtaaaaatttaagcattaagactgcagagttttatctctctcgggttacataaattgccgtagctaaattttgctttgagcaagtacatgaaaggtagatagcttctcatcaagctctttaactgatttttggcatttcagtttcgacagtattcctttgattttgatggcaaaggtatctttactccctgaaccagtggagcagagctgttaacctctgagatcccaatatttttgcatcattttttgcatgattgcttctcaaacggtgaatagtctccatatttttatagttgattgttgacgcagacagggaaagattgtttgtatgacttaaaatatttgattagagattactctacaatagttttgtct

SEQ ID NO: 6884 - DNA, 699 bp, Glycine max
actccggaatccggtccaacccaaaatggttccggtttttcaaatcccctcatgcttcattgagaaagcaaccattgggttcggtaaatcaatacattaggttaatgccttcggccttatatgtatccatggatcaatatcttcaaggtttgtttattctcgctaatgaccctgttgctgaagtacggaagttggtttgtgcagcatttgttcagctaattgaagtccgcccatctttcttggagccacatttacggaatgtgattgaatacatgttacaagtcaacaaggatacagatgatgaagtagcccttgaagcctgtgaattttggtctgcttattgtgatgctcaactgccacctgaaaacttaagagaattcttgccccgtcttattccagtattgctgtcaaacatggcttatgcagatgatgatgaatcagttattgaagctgaggaagatggttctcagcctgatcgagatcaggatcttaaacctcgattgcacgtatcaaggtttcatggatcagatgaagtagaagacgatgatgatgatgttgtcaacacatggaatttacggaaatgcagtgcagctgctcttgatattctttcaaatgtgtttggagatgagatccttccaactcttatgcctattgctgaggctaagttatctgctggtggggatgatgctcggaaagata

SEQ ID NO: 6885 - DNA, 448 bp, Glycine max
  unsure (1)..(448): unsure at all n locations
ttgacgcgcttgctgggatggaaatanattccactgcttgcaatcttattctgaacatattcgtacaggtatgtctgttgcagagacaagagtcctgtttgtagagaattattctttgcacgagctgcttagcctcattgaagattttcttattgagggaaaagtaatagtaaacagtggagtagatgctgaaactttgtcttgtgatttgagagccaatgattttctggattgtgttaatgaagtatcatccaatgtagcttcaagtgaacaattggtggcagcaagtattatattagcgtcagtatgtgcggcgactgattatgttggatttatttgtgatgcttcatatcatattcttcagtcatgcaagtgggattccctgatggtgctgactattctccatatttttgcttaattgggcggagagaagttttttaacatggat

SEQ ID NO: 6886 - DNA, 1181 bp, Glycine max
cggacgcgtgggggcgattcagatcttagggtttcaatttttttttctgtggagccccattggccatagccgccagccagagaagagtagaagccttcgatcctaggttttctttccccccctttctcccaaatcggacctttttcgcttctcgattcgcttccgtagccgggcgatttgaggacccagaaaagaacgaaccgaacgttttatattttttcggataatcaatcgaagatgtctcgttgcttccctttcccccctcctgggtatagggcacgtggcgaggccttgatcaaatcgattaagctccgagaggagatggagaaagcagagaaggaccggagggagaagaaggagaagaaaagggaaaagaaagagaggaaaagagagaagaaggagaagaaagagagaaggaaagcggagaaagaaaggaaacttaaagaaggagcaagtgcctcccctggcactgatgatggcaaaaagtttaagctcatcaacgaactaaaggaaaccaaagcagatggaaaattgcaaaagggtgaagacagtgagaatgaacaacatgagaggagtggaattacagaggaacttgacctacctgtcacttctgtggagccttgctgcctttctgactgtactcaaagcagtaagagaaaaaggagctccccagaatcaactcatgatcatggatctgctattaaaattcgacttccgttgaggaagcatagagaacctgaagaattgaaatccaaatcaaaatttcaagcggggtgttcttctggaagtgtgggggcaactgcaaattccttcactaaaactacacttggaagtgatcgtcagtcacaatgtctcaggattacagagctgaatcgggtacttggaaactctgattcaagacatggcaaagcaatgcagaattcagttcatggagatgttgtggtcactaagaataccattggaagtaatcgtcagtcacaatgtcacaggactacagagcccaaacatgttattggaaactccggcaaagtgatgcagaattcagttcatggagatgctgcggtcattaagaataccattggaagtgatcgtcagtcacaatgtctcaggaccacagagcccaaacgggttcttggaaactctggcaaagcgatgcagaattcagttcatggagatgctgc

SEQ ID NO: 6887 - DNA, 806 bp, Glycine max
ccattcgtacgcccacgcgtcgattcagatcttagggtttcaatttttttttctgtggagccccattggccatagccgccagccagagaagagtagaagccttcgatcctaggttttctttccccccctttctcccaaatcggacctttttcgcttctcgattcgcttccgtagccgggcgatttgaggacccagaaaagaacgaaccgaacgttttatattttttcggataatcaatcgaagatgtctcgttgcttccctttcccccctcctgggtatagggcacgtggcgacgccttgatcgaatcgattaaggtttgttgagccgtttcgattttgcgttcgtgcgcaactctctctgcatgttgtttcttgcataaatctgccaccccttttgcgattaggttaaaataggaccaaacgctaccgtttagatgtgttttgatcgaaccctagagccgagatttggccttgttgtgagcatagatctgttgctcccgagtcttttactgaaaacctataaattgtttagggttttcttttgggtaattagtaaacagatgttatttggtgagaccgagaaaagggtttcgtttttttataaggattttaaaatgcatgcggttctttcctatcgctaacaattgtttttaatatttagtgggtctttttcacctatgtgattataattgccaaaaaatcgaaacgctttttctaaaactaatagtctctgttatttaaatggtgaattcaaatcttggatcggttttttgtataaagatcactgcatgttgtgattacagtag

SEQ ID NO: 6888 - DNA, 1349 bp, Glycine max
gggggacagaagactttcatttcagacaccaaacgaaaactccaatggctccaatcaatacaagttataacactttaattaataaaagcgaacaaaacctttttttggctggggtgggggtgtccattcctctattgctttcttgtactcgagcaaacaaaaaaggtcgacccgagtcaatacccgaaccacgacccttgccttgtgttaaggaacataacccatgcaaggagttttctctttttttccccacgcgcggttcgttcttgactcaaccaaccaacccacgcgccacctattacacgtttcaaggtccattcgctacaacgttaaaattttccacaagaacaagaacctcaataaatacaaaaaaaaaaaaaaaaagattcacgtgacccgagagatggtaatcacgtgacccgaagatggtaatcacgtgacggttaactttcgcagtgtagcgcggctttgatcttttgaacggtgcaggagatgaggttgttcacggtttccacggactctaccgtgagcttcgccgtagggagactattcacaaggatctgaaacgccaccgttaggagggacccactcacgcgcgtcacgccgttatcaccgccgtttgttgttgttgttgttgagcaagtgggcccgttctgatgaggcccacgagacccaggcccatcggggacgatcgcgaaccctgaaggtaacaacgccacgtaagccgaatcgccaccgttcatcaccacgtgcatggctgggatatccaccggcgcgtacaccacaagcgaccctgctgcgtctatgcatgtctcctgcagtatcagcatgctactctggttggaatttatcgcactggctctaaggagagagacggcgttgccgtggtcttggcccttggcgatgtgggccatctcctgcatggggccaccgttggagaggatgtcccactcgctgcggaggcgctcgtcgcggaggaagtcgaagaggcggtggggggagacgggtagccagacggaggtggcggcgctgaggacgatccccggtggctccccgggatcgtcgacgctcttgcgagtcatgaccctgacgtcctcgtcgacgttgccggcgttgagcttgttccacttgtgcaccgtcgacgcgcacacccccgcgcagaagttgttcgtcatccgctgcgccagcttcatcatgctccgccttccccctgctgttattgccaaacacatgttggacaccaaacataacaagaaattagagtgttgatgcttcatagattataatcctagagtgtatatgccctcgccgctggggatgtcattagtctcagaattacagttacaccg

SEQ ID NO: 6889 - DNA, 954 bp, Glycine max
  unsure (1)..(954): unsure at all n locations
nnnnnnnnnnnnnnnnnnnnnnnnnnnnnnnnnnnnnnnnnnnnnnnnnnnnnnnnnnaaacagaagactttcatttcatacaccaaactaaaactccaatgactccaatcaatacaagttataacactttaattaataaaagctaacaaaacctttttttttcttgtttttttttttccattcctctattgctttcttgtactcgagcaaacaaaaaaggtcgacccgagtcaatacccgaaccacgacccttgccttgtgttaaggaacataacccatgcaaggagttttctctttttttccccacgcgcggttcgttcttgactcaaccaacccacgcgtctttcacacgcgccacccatccatccatcgtcaacaacgttaaaattttcaacaagaacctcaataaatacaaaataacaaaaaaaaaccagactcacgtgaccgatcacgtgacgtttaactttcgcagtggagcgcggctttgatcttctgaaccgtgcacgagatgaggttgttcacggtttccaccgactctaccgtgagcttcgccgtagggagactattcacaaggatctgaaacgccaccgtcagaagggacccactcacgcgcgtcacgccgttatcgccgccgtttgttgtggaagtgggcccgttcggtggcccacgagacccgggcccatcggggacgatagcgaaccctgaaggtaacaacgccacgtaagcagaatcgccaccgttcattacaacgtgcattgctgggatatccaccggcgcgtacaccacaagcgaccccgccgcgtctatgcatgtctcctgcagtatcagcatgctactctggttggaatttatcgcactggctctaaggagagagactgcgttgccgtggtcttggcccttggcgatgtgggccatctcctgcatggggccaccgttgcagaggatgtcccact

SEQ ID NO: 6890 - DNA, 408 bp, Glycine max
cgtcacatgcccgcgtacgtaagctaggaatacggctcgagggtttcaggacacgttctgttagtctggaccactctatgtggtttcaccgatccgtaaaagctgatgactgggtgctattcgcgatctttactcctagtgcccatagtgcacgtgtctttgtcaccggccaaatgttcaatcagaagggagagcttcttgtatcattggttcaagaaggactagccaggaaaattaatcccggaaattcagccattaaatctatgttatgaactgctgaaaaatgcacagattagcatgtatccattttatagttttattttagaaaaattccacgtatccatcaccataacatcttagtatctaaattatatatgtaaatttttgtattgctctaaaaaaaacaag

SEQ ID NO: 6891 - DNA, 527 bp, Glycine max
cttgactattacaccttccccattttgatttgatctgattgaattggcctcttgccagcaaaacagaatgtggaagctcaagttcgccgaaggagggaatccatggcttcggacattgaacaatcacgttggaagacaggtgtgggagttcgatcctaagcttggatcgccgcaagatctcctcgagattgagaaagctcgccagaattttcacgataaccgctttacccacaaacacagcgctgatctacttatgcggatgcagttcgcaagagagaacccaacacgtgaagtcttgcccaaagtcggagttaaggatattgaggatgtgacccaagagattgtgacaaaaacattaagaagggccgtaagtttccattcaactctccagtgccatgacggacactggccgggagattatggaggtcccatgtttctgatgcctggcttggtaattactctgtctatcactggggcgttgaatacagtcttaactgaagaacatagaaaggaaatatgccgttacc

SEQ ID NO: 6892 - DNA, 1148 bp, Glycine max
ctacaacactccacttttttctttttctttttcttttcatttgagagttttagtgagacaatgacgtcttcagtggtggaaggtggacgcgacgaggggaaacacgagccgtcggatttgatcacggaaaccatgaatctgacggctccaaacctttcacttcccagtgaaactgaaacattcttgagcgcagcaatttccctcaaggacaaggtggtggaggagacttggaaccggagagatcaagtggttgatccgacggtgtacacgggactgttgggcaccgcctttacttgcttgcggtcctaccaggttaccggttgccggaacgacttaatattatccagcgaaatcattgacacgtgtgtcaccgctgcacgtgcctccctcaggcacgtgacttttttgtgtggtagaggaggcgtttatgcgcttggtgctgtcgttgccaattacatgggggaccttcaaaagcgtgacctgtttttgggtctattcattgaggtggcaaaagagagagccctaccagttggaccagaggaaggtggttttggaatgtcatatgatcttctgtatggacgagctggattcttatggggtgcattgttcgtgaacaagcacctaggagaagatgcagtgcccaaagacattttgatgcttattattgatgcggtgttggctggtggtagagcaggagcatctgatattaaagactgcccattgatgtatagatggcatggaacaaggtacttgggtgcagcaaatggccttgctggtatccttcatgtgctgctacattttccacttccaagtgaggatgctgaggatgtcaagggaactttgtggtacctcatgagtaagcgtttccctcacagtggaaactatccctccagtgaaggtaatccaagggataagttagtgcaatggggtcatggggcgactggcatggccatcacgttgtccaaagcagcagaggtatttcctaatgacagagaactaagagatgctgcaatagaagcaggtgaagttgtatggaagagtggattggtgaagaaggtgggacttgcagatggggtatctggaaatgcctatgcctttctttccctctacagactcactaaagagggtatatacgaagagagagcaaa

SEQ ID NO: 6893 - DNA, 534 bp, Glycine max
gtccgtaagctaggaatacggctcgagctaaaagataaaagataaggactttactttccaaagttgatgtgctcaaactcaaacttatatatctacttgccactttaaccccaccagaggcacaggtgcaagttgagattttgattggtgtttggctcccaaattcccaaaacagtgatggtctcaagtaaaagaaatgtttttggcaccaagggggaaatgggtatagatttcatggttttggtgttatcagtgtcatggttttgtttgactagtatatgtgtctctgctacaaaacaagcatacccgccaacaccacaaccgaaccagaacctaaggtttgaccaaaatggagaattcaagatattgcaggtggcagatatgcactatgcaaatggcaagaccacgcattgcttgaatgtgctcccttcccagaatttttcttgctctgacctcaacaccactatctttcttaacagaatgatcaaagcggagaaacccaatcttattgtcttcactggagataatatcttt

SEQ ID NO: 6894 - DNA, 408 bp, Glycine max
gcgtacgtaagctaggaatacggctcgagccatgttccccttcagtctcactctcactcaacaacaataagatccttttccctctctttcttcacaaaacaaacctaaccaaacaatcgaatttcaatttcaatttgatcgctccgataacttccatctatggcggcggcgaaaccccaacgcactccgcaggaagtggaggacatcgtcatccgcaaaatctttcttgtctcgatcaccgaaatcgccaccactacggattcgagaatcgtgtatttagaactgaccgcggccgagattctcagcgaggacaaggagctccgcctctcgcgcgattgcatggagagggttttaatcgaccgtctctccggcgaattcgccggggccgtagacgagtctccgttccag

SEQ ID NO: 6895 - DNA, 807 bp, Glycine max
acgtatgcggtgagttcggttctcgcccccaaacgctgcatcggaagaaaccctagccactctcccggcgtcacgatgcagatcttcgtgaaaaccctaacggggaagacgatcaccctagaggtggagtcttcggacaccatcgacaatgtgaaggccaagatccaggacaaggagggcatcccgccggaccagcagcgcctgatcttcgccggaaagcagctggaggacggccgcaccctcgccgactacaacatccagaaggagtccacgcttcacctcgtcctccgcctccgcggcggcgccaagaagcgcaagaagaagacctacaccaagcccaagaagatcaagcacaagcacaagaaggtcaagctcggcattctccagttctacaaggtcgacgattctggaaaagtccagaggctccgcaaggagtgccccaacgccgagtgcggcgccgggactttcatggccaaccacttcgaccgccactattgcggcaagtgtggcttgacctatgtctaccagaaggccgatgcttaaattcgttggaagtgaattctctgtggttctattttaattttagttatttaaaagttttggttaatgtttttgttcaattagtgttatgactgtttgggctttgattaaacctttatgaatactgtttcgctttggattacttattatctttcgctttaaatatattgttagtttggtttaaaaaaaaaactaaacaaaatcgggctggccctgaataagtacgtcagacaacccggtattagatgcggaccgagcaccaaggag

SEQ ID NO: 6896 - DNA, 570 bp, Glycine max
  unsure (1)..(570): unsure at all n locations
aaacagctatcaatgcttaggcttgtaatgacatcattttttctcgccgactacaacatccagaaggagtccacgcttcacctcgtcctccgcctccgtggcggcgccaagaagcgcaagaagaagacctacaccaagcccaagaagatcaagcacaagcacaagaaggtcaagctcggcattcttcagttctacaaggtcgacgattctggaaaagtccagaggctccgcaaggagtgccccaacgccgagtgcggcgccggcaccttcatggccaaccacttcgaccgccactactgcggcaagtgcggcttgacctacgtctaccagaaggccgatgcttaatttgcggttttaattttattttagtatttaaaagttttggtttatgtttttgttcaattagtgttatgactgtttgggctttgattaaacctttattcaatactgttttgcgttggattacttatcatcccctttaaatatattgttagttcggtttataaaccgccaatgcttgcttccttccnnnnnnnnnnnnnnnnnnnnnnnnnnnnnnnnnnnnnnnnn

SEQ ID NO: 6897 - DNA, 407 bp, Glycine max
cgtcctccgcctccgcggcggcgccaagaagcgcaagaagaagacctacaccaagcccaagaagatcaagcacaagcacaagaaagtcaagctcgccctcctccagttctacaaggtcgacgactccggcaaggtccagaggctccgcaaggaatgccccaacgccgagtgcggcgccgggactttcatggccaaccacttcgatcgccactattgcggcaagtgtggtttgacctatgtttaccagaaggctgaggcttagggttacatttcgttttttctagtttctggattttggaattttattattagtataatactctgtttttttgtctgtattttggtcgcatattattatgactgcctgaatgttctgccttttcataattcaaaatataaaacaaaaa

SEQ ID NO: 6898 - DNA, 1362 bp, Glycine max
gcctccagtaacagtggagaagaaagtacaaagcgaaggagagtgtcttcagcaaagcaaacagctgaaagctcgtcatccagtgatgatagtctgacagcattcccgtgtctagtcacactaaatccagggataaggatagctagtgttgctgctggtggacgtcatacgctagcgttatcagatacaggactggtgtgggcttggggctatggaggtgaagggcagcttggtttgggttccagaatacgcatggtttccactcctcatcttgttccttgtattgattcctcttattatagtaaagatagatctgctacactggctcgaggaaacatgggttcagagggacaaacttttagagttcctggaagttatataaagagaattgcttgcggaggtcgacatagtgcagtaattacagatgctggagccttgcttacttttggttggggactctatggacagtgtgggcaaggaattaccgatgatgaactaagcccaacttgtgtatcttccctattgggtatccacatagagggaattgctgcaggactgtggcatacagtctgtacatctgctgatggtgatgtgtatgcatttggtgggaatcaggttgggcagttgggaactggtgctggatcaagccgagactctaccaagactactggattctccgagtttggataatttgcgtgcaaagaatatatcttgcggtgctcgccacactgctttagtaacaagagggtggaaaagttttctgctggggatggaacaaatatggacagctgggcctcggtgacgtaattgaccgaaacattccttctgaagtcatcattgaaggttgtgcccctaaaaatgttgcttgtggttggtggcatactcttcttctggccgagtcccccacttgatgtcatggtttatcagaggctcttgacccaattgttagatagtggttctgcaatgtatatgaacatacggcagtggtatacataacataggcttcatacatgtttgcattgtttcatggcgtgtgaataaccgtgactagctccagtatttaacaccacagaagactagaagagtgatatctggcgtggaaggaagtattttccacctatgtaacattcttaaccattatgtatattttattttattgtataaactgtccagtaaagttatatgcaccggaagttagtatgctggcatgtaatagttgggtaggtataaatgtaatcctttaaattagtatctgcaaccatattttacccaattcaccgtgtgtttggatgagggttggtaaaatttattgtggttaaaattgattttgaagtaatatgatttatgtttggatgttttatt

SEQ ID NO: 6899 - DNA, 576 bp, Glycine max
ggacaaaagcaatgtagatgttgaagatgtggttcactctaacaagggattatctattctattcctttacaatatttcatatttcttgtcacctgttggtcaatgcatggtgttgttcactatactttatttatgtcatcttgttttttatcaagtgtgggcaaggaattaccgatgatgaactttgcccaacttgtgtatcttccatattgggtatccacatagagagagttgctgcaggactgtggcatacagtctgtacatctgctgatggtgatgtgtatgcatctggtgagaatcaccttgggcaggtgggaactggcgctgatcaagctgaggtatgctgaaattagtgtcatcccatatattcactactcatttgtgccttggcgacttgttggtcatgggttcgaatactgaaacagcctctttgtatatgcaagggtaaggatgcgtacaatattcctgccccataccttctcatagcgaaaagcctccgggcaatggggtacgaagtttatatatcaatcaccactgtactgtgattgcgcattcatcataaatattgatgtcact

SEQ ID NO: 6900 - DNA, 519 bp, Glycine max
atacaatctgtacatctgctgatggtgatgtgtatgcatttggtgggaatcagttagggcagttgggaactggtgctgatcaagccgagactctaccaagactagtggattcaccgagtttgaaaaattcgcatgctaggaatatggcttgcggtgctcgccacactgctttagtaacagagggcggaaaagtcttctgctggggatggaacatatatggacagctgcgcctcggggacgtgattgaccgtatcattccttctgaagtcaccattgaaggttgtgtccctaaaaatgttgctcgtggtcggtggcatactctgcttctggccgagtcccacacttgatgccatggtgctcctgacccaatcttgtttgttagccggtctattggaaggcaatgtctatgtgtacatacagatgttgtgctacagatacatacttgtacggattgttgcatggtgtgcgaatgaccatgactagctatagcatgtaacaccacagaagagcgatatttgg

SEQ ID NO: 6901 - DNA, 547 bp, Glycine max
cgtcatatgcccgcgtacctaagctcggaattcagctcgaggtgtattcggatgaacaagcagagagtgtgtagtgcgtagggtttaagatcgcgttctttagatgaacgagttatctcagaagcagactcttgttgtccatgggattgctggtgctggttcggtggctttagccaccgccttcacttaccctcttgacaccatgaaagtcctcattcaggttggttccagcaccggtaaagaattggaccatgcccatgttttgaccagactactctctgtatccggcaatgcaggtttgttcaatggttttggctggttgttggttggaaggatttttggtctgggagcacgatttggggtttatgaaatcctgtctgccttttataaagatggtcgggaaaataattatttgtttgcttctgaagctcttttggctggcgttgtaactggtgccattgaggcagtcataagctctccattcgaaacttcatcaagcttagtatgcaagttaactctgcttcatatgttcctagctgcaactttg

SEQ ID NO: 6902 - DNA, 297 bp, Glycine max
tgaagaagcagagagtatgtagggtttaagatcgcgttccgaaactctggcgaagtttctccattaattcttcttgtgcgtttctcccacactttagatgtgaagatgaaggagttatctcagacccagagtgttgttgtccatgggattgctggtgctggttcagcggccttagccactgccttcacttatcctctcgacagcatcaaagtcctcattcaggttggttccagcaccggtaaagaattggaccctgcccaggctttgacgagactactctctgtgtccggcaatgca

SEQ ID NO: 6903 - DNA, 865 bp, Glycine max
tggggacacaaccaattccattattaaagggataagcctcaaccttgcaacccaacacaaccaaaattcgctacttgttaagggctgcactataccagaatgtctcagggaagaggcagtgcatctttgcctattgtggtcactgtggtttcactactgtgccttttggaacgtgctaacgcagcaacttactccgttggaggacctgggggatggaccttcaacactaatgcttggcccaatggaaaaagattcagagctggtgatatcctaatcttcaactatgactcaacgacccacaatgtggttgctgtggacagaagtggatacaacagctgcaagacaccagggggtgctaaagtgttcagttcagggaaggaccaaatcaaactagcaagagggcagaactacttcatatgtaactaccctggtcactgcgaatctgggatgaaagttgccattaatgcgctgtgatatactagtagtgctcaatacttcttgaaatgaagtaactgttaagttaatggtcaattaactagcattagtaaatgttagtgtgtgatattgtatgtagtcttttttttatatgaagctgttatatatattaattactatagtttgtgaagcaagtgggagtgagctggcttggtagatcaattgttcctgtatttggtatgtgttgtgtggtgggagtatgataatggtccattagtcacgggctcttcttattagacattggatctgcatattttgaaattattcaagtctgagccaattatctgtatctagtgtctcggtgtcacagtgtgtggttgtattactgaatttgttgccttcaataaattaaattttctaaaaaaaaaaa

SEQ ID NO: 6904 - DNA, 623 bp, Glycine max
ggacacaatcaatcccattattaaagggataagccttcaaccttgcaacacaacactacaacctaaggtctgcactacgagaatgtctcagggaagaggcagtgcatctttacctattgtggtcactgtggtttcactactgtgccttttggttcttttggaacgtgctgatgcagcaacttacaccgttggaggacctgggggatggaccttcaacactaatgcttggcccaaaggaaaaagattcagagctggtgatatcctaatcttcaattatgattcaacgacccacaatgtggttgctgtggacagaagtggatacaacagctgcaaaacgccagggggtgctaaagtgttcagttcagggaaggaccaaatcaaactagcaagagggcagaactacttcatatgcaactaccctggtcactgcgaatctgggatgaaagttgccattaatgcagtgtgatggtgcttaatacttcttgagttgaagtgaaaattaagttaatggtcaattagctagcattagtaaatgttagtgtgtgctcatgtatgtactttttttatatgaagctgttatatatatttattaatcactatagttttgtgaagcaaagtgggag

SEQ ID NO: 6905 - DNA, 946 bp, Glycine max
gtcaattgtgtataaacagcagggacttgtcttctggatctgaatcaagacctcctacagtaaacaaacagcaagataccgtggacgtgaatggttttggggctatcagtgcttcctcagttggctgcacttctgaaagtgaagtacagaaggtccggacccggcccgtccaaacctcaagtaatgttttggttgacaaatttgtttcaagttcttccaaccaagatttacaaagttgttctagtggagaaacaatagtaaaaccagaaatagaacaagatgttccgggctgtaagtgaaagacaaaatgtaactgaacctgccaaagctgctccactaggattgggtgtgggtggtttagagcgcaagaggcgaactagacttcaacctcctgtaagtaaaggtgctgatgatggatcatccagttcttctgtcaatcaaaatcagcaaaccagaacagatggtcaacatatattgcaaactcttgcaagtcatggatccgggtttgaattcaagaaatgctaatgggccatcccagcggcccttgccctccagtgatcgtccaattgatgtggctggtttaatgtctcaggctttacatagtcctgccttgaatggtttgttggaaggagtttcacagcaaactggagttgactcacctgatggcctgaggaatatgttgcatcagttcacccagagcccgcagatgatgaacacggttaatcaaattgtccaacaggttggcagtcaggatgtggggaatatgtttgctggaacggaaagagggcagggtggtggtattgacatttcaaggatgtttcaacagatgatgcccattgtatctcgagcccttggtgggggaaatccttcctcactattctctgctgaagaagctgaaccccatgcaccctaccgagatggaacagttgacagagatgaatattct

SEQ ID NO: 6906 - DNA, 444 bp, Glycine max
gcggacgtaagctaggaattaggctcgagcaatagtaacttcccgctcgctatcacaatctagggttttagaattttcacaaaaccctccatggcagaagaagcagcaccgaaagtcgtcgatcccaacaccgtcgtcgccgccgccgccgccgccgccgtggacatggacgtcgagaacatcgaggccggcgacaacggcgccgagccgaaccagaagcgcgccagggaggaagaggagcccctgggcgacgacgacgacgttttgaagaagcagagggtggacgaggaaaacgaaaagtccgtagaggaacagcggctggagaagcgcgatgaaaaagaagaaaaggaagcagaaaaagaagaggaagagaaggaagcaagtggttccgtgaacttgggattcaagagcttcgtttcttcctcggagaatgtttcattactt

SEQ ID NO: 6907 - DNA, 355 bp, Glycine max
cggacgcgtgggcggacgcgtgggtcacaatccagggttttagaatttacccaaaaccctcgtccatggcagaagaagcagcactggaagtcgttgatcccaacaccgccgctgccgccgccgccgtggacatggacgtcgagaatgtcgaggccggcggcaacggcgccgagccgaaccagaagcgcgccagggaggaagaggagccccagggcggcgacgacgacgtttcgaagaagcagatggtggacgaggaaaacgaaaagtccgtagaggaacaacgcttggagaagcgcgatgaacaaggagaagaaaaaggagaagaaaaagaagcagaaaaagagaggaagaagag

SEQ ID NO: 6908 - DNA, 1123 bp, Glycine max
cgtaacatgcacgcggacgtaagctaggaattaggctcgagagccaatcttcctgataatttaccttcaaatattgaagctatggctcattcattcattttgacactaattgtcttacgcatgaagaacctgaaagacagagataacctggttatccgcttcttccagcttcctctgtctctctggactatgttgttggaccaaagtaatgcaggaataatgccccctgcttgccagaggtctgtctatgtattgtctgctggcatgttggcgtttgcctgcaaaatatatcagattcatgatctgaatgatgtgtttgcgtcattgccaatgtctgatgttgatccattcttgagtgtcagtgatgattatcatgtatatgctaagatccatgtggatgtgagagaatatggtactgctgctgataatcagttagcatgttcaatgttgtcagagttacagaacaaaatacgggaatgtcaatcgatcataagggatgctttggttcataatttagctaacgtcactgagctggatgcagatgaactggctatgctattgtcagagaaattcaagcccggtgaagagtttgtgttcggtccacagtcaatgcttgatcagaatcaaataatttttcattcccaggagtcactgtcatttgatggggattttccctcaaattcagcaggtgaagatgacacaatcagtgaagcatctgtctctgacctttctcgatttattccaaagatgcctctatccccttcggcacctcatgttatcagcattggacaacttatggaatcggcattagaggtagctggtcaagtggcaggaacagctatctccacttcgccccttccgtacaacaccatggctagccagtgtgaatcactcggtacatgtgcaaggaaaaagctttcaaattggctggcctttgagaatcattacagccaagcacttgatgataaatcgtttttggcaattgctgatattaggaactcagcacctgagaaggtttgatgtgcccttatttgtcattattaccaggatacagactctcttctttccttcactcaatgcccactgtactaccactatcgatcaatcgtcgttatttttagat

SEQ ID NO: 6909 - DNA, 622 bp, Glycine max
gcaggaacagctatctccacttcgccccttccgtacaacaccatggctagccagtgtgaatcactcggtacatgtgcaaggaaaaagctttcaaataggctggcctttgagaatcattacagccaagcacttgatgataaattcgtttttggcaattgctgatattaggaactcagcacctgagaaggtgacaaatggtggtgggcatgcccaattgccaagggaccccatgaagctgcctcctgctagcccctttgacaatttcctcaaggctgctgggtgttagattaggtggtttcatgcttacatctttctgctatgtatagttctaatggtaaatgttctttccagacaggagtttctagggtctgtatccttgtaaggactagtaggtagttccagtattttgacttcagtgatcagtgatatatataattgtagaatgacaatttctctactgaattgttcaagactttatggtatacagagcctggaactgtttaaagtgggggccagtgctgcatgccttccctacacactgttttggattcaattgcactggcaatttgctattttgtgaaaatccagtgtataatggcactggcactgccacactccggtg

SEQ ID NO: 6910 - DNA, 520 bp, Glycine max
gtcgatttcttttttaaattttttatctccaaaaacggggtcgttctattgaattttgttcttccttacaccctaaatccctaatctccttcagcggtgtttatagtttaacccaaaaaatcaccgaattctgatcggatcaccgcagtgccccactctccaccaccgcgccatcgcaaaccctagatggacctactgaagcaagagcttctcaagaagcgccaatccctggcgcaagacaccggcggcaagaaattcttcaagcgctccgagatccagcagaaggaaatccagaaactccgggagcaagagaagcgcgaattggaagccaagtcacagaagcgcctcgcaacgtcctccgacaacgctgccaccgctccgtcctcctcatccaccgcctccgcctcggcctcttccacaatcgcatcctcctccgccgcctccctcaccaacgagcaaaacatcgacaacctcgtcctcccaaagcccgaagtcatccgccggcctcgcttcctcaagc

SEQ ID NO: 6911 - DNA, 1947 bp, Glycine max
gagagacaagctagcatgcctgcacgtcaactccggatttcggttcgagccgttattgtccccaatgacccggacctcatcgacctgcccgccatgaacggcgtcgacatttccgtcgccgagggcgaatcccccaacagcttgttcaacatcataggcaacttgctcttccccttactcgcattcgcgggcctgttcttcctcttccgcagagcccaaggcgggcccggcgggcctggcgggctgggagggcccatggacttcgggcggaacaagtccaagttccaggaagtccccgagaccggcgtgagcttcgctgacgtggcaggcgcggaccaagcgaagcttgaattacaagaggttgttgatttcttgaagaatcccgataagtacaccgcgctgggcgcgaagattccgaaagggtgtcttttggtgggcccaccgggaaccggaaagacccttctggcgagggctgtggcgggggaagctggggtgccgtttttctcgtgcgcggcttcggagttcgttgaactttttgtgggagttggtgcgtcgagggtgagagatttgtttgagaaggcgaaggggaaggcgccgtgcattgttttcattgatgagattgacgccgttgggaggcagagaggggcggggctcggaggtgggaatgacgagagggaacagactattaaccagcttctgacggagatggatggcttttctggcaattctggtgttattgttttggctgccactaacagaccggatgttcttgattcggcgttgttgaggcctggccggttcgacaggcaagttactgtggatagacctgatgttgccggcagagttaaaattcttcaggtgcattctagaggaaaagcacttgcaaaggatgttgactttgaaaaaattgcaaggagaacccctggattcactggggctgatctgcagaatctgatgaatgaggcggctattcttgcagccaggcgtgacctcaaggaaataagtaaagatgagatatctgatgcgcttgaaaggatcatagctggacccgagaagaaaaatgctgttgtctcagatgagaagaagaaattagtagcctatcatgaggctggccatgctctagtgggtgctttaatgccagaatatgaccctgtagccaagatatcaattattcctcgtggccaagctggtggtctcacattttttgctcccagcgaagagaggctcgagtctggattgtacagtagaagttaccttgaaaatcagatggctgttgccctgggtggaagggttgccgaagaggttatttttggccaggaaaatgtcaccaccggagcatcaaacgacttcatgcaagtttcacgagtggcaaggcagatggttgagagatttggattcagcaaaaaaattggacaagttgccattggtggacctggtggaaatccattcttgggtcaacagatgtcatcgcaaaaggattactccatggcaactgcggatgtagtggatgcggaagtgagggaactggtagagagagcatattctagggcaacacatattatctcaactcacattgatatccttcacaagcttgctcaacttctcatagaaaaagaaactgtggatggtgaagagttcatgagtctattcattgatggaaaagccgaattatatgttgcataatcatacacgcaagtcacagaattatgtttgtactataaaatacgctctgacttgtacactgtaagaatcaataattattttatcaaattcaaggagaaaaaacaattagcacagcagcttacgcaataaataaataaaaaatatggttctacggctgagttacactttagaatgaagttcattttcaactgtatacaaaggatttactgctaaaataacagaatgttatgaacctatggttatttccctctgcaaaaaaaaaaa

SEQ ID NO: 6912 - DNA, 888 bp, Glycine max
cacgtacacgcgagagaagaccaggaaaaatctatggcatagaatccagcaagtagggcatatatagacgctttgtatgaaacggtgagggtgtgtttcaaaatcgaaaatctagagcaaagtgattgattccagttccaatggccttgggcaccagcgccttgatcggaaggaaggttcttgtctcacccccaacccccaaaacaaccaaatcatctactccgctacaattccttttcaagagaagcatcttaaatgctcacaattcacaagctgctctagctgcccttatcttttcctccgcgagcctctctgtgaccccacaagcccttgccgctgataacgtcacccctccccctgtaattgaagcccaacagagccaattaaacccctccaactcatcctcccctttctcacagaacctcctcctcacagctccaaagccacaagcctcctccgacctccccgaaggcaccaactggcgctacagcgagttcttgaacgccgtcaagaagggtaaagtcgagcgagtcaggttcagcaaagacggttccgccctccagctaaccgccattgacggccgtcgcgcctccgttattgtccccaatgacccggacctcatcgacatcctcgccatgaacggcgtcgacatttccgtcgccgagggcgaatcccccaacagcttgttcaacatcgttggcaacttgctcttccccttgctcgcgttcgcgggtttgttcttcctcttccgcagagcccaaggcgggcccggcgggcctggcgggctgggagggcccatggacttcgggcggaacaagtccaagttccaggaagtccccgagaccggcgtgagcttcgctgacgtggcaggcgcggaccaagcgaagc

SEQ ID NO: 6913 - DNA, 481 bp, Glycine max
taagctaggaatacggctcgaggggtcatcatcatcatcattaaacatgggtggcagtgttagcaagagtaggaggatgagttctgagaaatatgtgatgaatttgaaggagaaagtgaggctcttgcaagaggagataaaggagatgatgtatgagagggagaaggagacaaggagatatgagagggacataatggtgttcactttcaaggaggcagattcgaagcaagaggggaagaggctgagagaggaagtgaagcaattgaggagtttggtggaagagaaagatgagaagataagagagattgaggttggaatgatggagaagaacagtgagaaagagtgggaattgatgggaactaacctcttggttgagcagatgaaggaggagagagcaaggagagatgaagctgtggagaagtggaagcaactttatcttgcaattaagactgagctagatggactcattcaaagaacatat

SEQ ID NO: 6914 - DNA, 950 bp, Glycine max
ttaggatttttgttattattttgtggcagcagtgacagagtgattggtgtgagtgcggcaattactggaacagcggttgagtgtgcgatcgagaaagcagaaagcagaaagatggggttggaatcggtgggagatttagcgattaacgtgattctgaaaaaattaggagcccaagacattgcgagagtggcgtgtgtgagcaaaaggttcagttcttccgcttccgatgacactctttggatcaatctctgcttcaatgaactcgctttgacacaacccctcgatcatctcggaaaccctctctcttccttcaaggaatgctatctagcatggagaggagcttttgttatgtacccttggtctcttgttaagcgtgtaaaaaggtgctgggatagaataaaaacctggttgaccaataattttcctgaagcggaggccactctttgtaaaggtgcaactgaagctgacattcaggagttggagaatgtattaaaggtgaaattgcctcttcctacaaggatcctttatcgctttcacaatgggcaagaatttgcaaaggcagatccagaaactagtacatttggcagatctttgggtctaattggtggctactccttctatggtcatttggtgaatgtttatctattacctatatgtcagataatcctagaaactcagcaaactaggcgtcgcttgagctttttaagaagatcaaagtatgttcttgtggctgcttcatccacatacagtagaaagttgtttttcctcaactgtaccaatggtcaactatatgtcgggaccaggtctcctcttaccgaaagagacataatcccttgtgtacctcatgacctgattagtttacatcaggaattgaatagttcagagcaacaagatgccatgctactgtggttagaagaacatggtcgccgtttagaacacggctttatcaa

SEQ ID NO: 6915 - DNA, 598 bp, Glycine max
ggcgcgtggacgatgccaccaagcacgcatcaaaatctgccgcttcaaccagcaatttgtgcaggaattccggctcgaggtcaaactgcagagaagagggcaaacaattagggtttttcaaattcaacatttcttcgtttaccaattttaggtttttttctctcctcactctgttgccttacctttcaattgcaattcgtacaggaggttgttgtattctcatgcacaattgaaactggcaaatgagtgatgcaaaagaaaacgaggaagctggccagggggtgccctcggtcgtggaagaaaaccagcagttggttgatgcagaggttcaagatcaacctgaagctgcctctgctcctgttccagtagaggaaacttcaaatcatgttgaaattgggtcagatcatgttgaaaatacgaaggaagagccacctgctgaggataaaaatgtagaattagagggttgtttcagagggaattccacaagatgttcaaaatactcttctctctgtcccagtagaggctgatgctcaaattttggataggactgagtctgaagaagctgaagcttctggtgcgaaggtggaggctgatgaat

SEQ ID NO: 6916 - DNA, 403 bp, Glycine max
ctaagctaggaagaaggctcgaacaaattaacaccttctcgagaagaagaagaatgtggacgcggatactcgcacgagcaacacgtgctgttgccgttgccggcaactattcactcattaatcaacccatctctgaccctatctttctcaaaatccccaaatcaacttttccccaaattttcaataaccctcgatttttggtcacctccaacctcgacaatgagctctcaccggattcttcagtgaacggcggtgacagacagctcgcagaacaagaagaaggaggaggaggaggagacacgtacgaggttgattccgacacgttggagagtgtgctacgtcttctcgcaaacagcgctgatgggtcccttgagtcgtgtttggatgacatggatttgacact

SEQ ID NO: 6917 - DNA, 1064 bp, Glycine max
  unsure (1)..(1064): unsure at all n locations
atgcacgcgtacgtaagctcagaatacggctcgaggcaagacgcaacaatagcgttagcagaagagagccaaatccgtcttttgactcataagtaaccaaccgcttctttcaatcaactgaaagtctttatgttttcttaaggttactgtctgtctctgttttatatgtggcatgggcatgagatggatctgtattccatcatgtccatggaagaatagttaactactttccttttttggtgatttctaaggttctaatttataatatgggagtggaggagaacacccctaactccatttctacctcacaatgccacgaagaacaaagcaacaacaaaatcaacacgcatgtgctcttgaatgtctacgatctcacccctgtcaataattacgtctactggtttggatttggcatctttcactctggcattgaagtacatggtaaggagtatggttttggagcccatgacttcccagctagtggagtttttgaagtggagccaaggaaatgccctggattcatatatagatgttccatctctttgggtcaaaccaatatgaatccttctgaatttcgtacatttattgaaaacatggcttctgagtatcatggagatacctatcaccttataactaagaactgcaatcattttacagacgatctctcttatagattgactgggaaacaaatcccaggttgggtgaatcggcttgctaagctaggtgctttgtgcagctgtctacttcctgaaagtcttcaagtaacaagtgttaaacagctacctgaataccatgaatgctcggaagatgaatttgttgaatctctttcacctgccacaccccgtgagtcaacagaaatagatgaggagcaagaaaaacaccttcttttgccatcagatagaactgaggatgttcatttcggtaaagagactcaagtgaaataagcggtgtctttgaggtgagaaataacacaggctgtcttcgcattgaatatttatccattagatttgcagngattcttttttctcaaagggttctcattcttgcatggctttctacattct

SEQ ID NO: 6918 - DNA, 1393 bp, Glycine max
cgtaagtgtacatttcatcttagttagggttcaattctcaatcttggtctttgcagttcctagttcctactaccgtgaccttaattctcgggtttcttctgagcgagcagaaggatttcagcatcggagaccgaatcgttcgggtgaggggagtaaataaacagagtgaaccaactcaagcccccaagtagaactgataattagttgcaattttaaaagattgtgattgttgggattgcagagagaagggtggttagtgttagaataggctgagtgtggatggggaaagaggaggaagagatgaggggtgagattgaggaacgactgattaatgaagagtacaagatatggaagaagaacagtcctttcttgtatgatctggtcattacgcatgccctcgagtggccttccctcactgtggagtggcttcctgaccgccatgaaccacctggcaaagactactccctccagaaggtcatcttgggcacccacacttctgagaatgagcccaattacctcatgctggcccaggtccaactccctcttgatgatgctgagaatgatgcccgccactatgacgatgatcgccccgacattggtggctttggctgcgccaatggcaaggtccagatcatccagcagatcaaccatgagggtgaggttaacagggctcgctacatgccccagaaccctttcatcattgccaccaagaccgttagtgctgaggtttatgtatttgattatagcaagcatccctctaagccccctcttgatggttcctgtaaccctgatttaaggcttaggggtcataacactgaaggctatggcttgtcctggagtaagttcaagcagggccacttgcttagcggttctgatgatgctcagatttgcttgtgggatattaatggcactcccaagaataagagcctagaggcaatgcagatttttaaggttcatgaaggtgtcgtggaagatgtggcttggcatttgaggcatgagtacttgtttggttctgttggtgatgatcaatacttacttatatgggaccttcgaacgccggctgccagcaagcctgtccaatctgttgttgctcatcaaagtgaggttaactgcttggctttaaattcctttaatgaatgggttgttgctactggttctacggataaaactgtgaaattgtttgatctgcggaagatcaatactccgctgcacatctttgattctcacaaggaggaggttttccaggttggctggaatccaaagaatgagactatcttggcttcttgttgtctgggtaggagactcatggtgtgggatcttagcaggattgatgaagagcagtcaccagaagatgccgaagatggtccaccagagttgctctttattcatggtg

SEQ ID NO: 6919 - DNA, 272 bp, Glycine max
ggcgcgcacatcaccggcacttgttttcattttcagttcatcttagggttcaattctcaatatcctcattccccggtccctcgcctttgcttcctagttcctactgtgacctttaattctcgtgtttcttcggagcgagcagatggacttcagcatcggagaccgaatcgttagggtgaggggagtaaataaacagggtgaaccgactcaagcccccatgttgaacggataattagttgcaattgcaaaagattgtgattgttgggattgca

SEQ ID NO: 6920 - DNA, 353 bp, Glycine max
tgtgagagacgcgcgcacatcaccggcacttgtcttcattttcagttcatcttagggttcaattctcaatatcctcattccccgttccctcgcctttgcttcctagttcctactgtgacctgtgagtctccccttcccggcctcgccaacgggaaattcaacggattaattctcgtgtttcttcggagcgagcagaaggacttcagcatcggagaccgaatcgttagggtgaggggagtaaataaacagggtgaaccgactcaagcccccatgttgaacggataattagttgcaattgcaaaagcttgtgattgttgggattgcagagagaagggtggttagtgttagaatag

SEQ ID NO: 6921 - DNA, 394 bp, Glycine max
tacttaggggactttaccggcacttgttttcattggcagttcagcttagggttcaattctcaaggtcctcattccccgttccctcgcctttgcttcctagttcctactgtgacctgtgagtctccccttcccggcctcgccaacgggaaattcaacggagttgtgtttgcgaatcgccttttattatctcatttctcttgccattcacacacttcttcatttttgcgtttctcttttcttacgctcttttgctttcattttcatttaagctaaccgcgttttttttcttttcttatcttttcggtttcctcagttaattctcgtgtttcttcagagcgagcataaggactttcgcatcggagaccgaatcgttagggtgaggggagtaaataaa

SEQ ID NO: 6922 - DNA, 783 bp, Glycine max
taagctaggaatacggctcgagcagcaactccactcaattgtatgcattgatccatggctagatacattaatattgtacttttgggaatagtgttggtagtggtgagattgaaaggtgcagaggcacagcgggcgttctttgtgtttggggattctcttgtggataatgggaacaacaactttttggcaactacagctcgagcagatgctcctccttatggcattgattacccaaccggaagacccactggccggttctctaatggctacaacattcctgacttcattagtcaatcacttggggccgaatccacattgccttatttagatcccgagctcgacggggaaagattgcttgttggtgccaactttgcttctgctggtattggaattctcaatgacactggaatccaatttgtaaacataatcagaatatatagacagttggagtactggcaagaataccagcagagggtgagtgctctgataggacctgagcagactgaacgcttaataaatggagcattggtcctcatcactcttggaggcaacgactttgtcaataactattacttggtcccttactctgcaagatcacgccaatacaatttaccagattacgtcaagtatatcatctctgagtacaagaaagttctcaggaggctatacgaaattggagcacgtagggtgctggtgacgggaacgggtccttgggttgtgttcctgcggaattggcccagcgaagcaccaacggtgactgctcagctgagctgcagcaagctg

SEQ ID NO: 6923 - DNA, 333 bp, Glycine max
cttgattatattgtgtcttcctcgatccatggctagttgtatggtttatgcgtgttacatttatattgttctgggaatattagtgttgaaaggtgcagaggcacagcgtgcgttctttgtgtttggggattctcttgtggataatgggaacaacaactttttggcaactacagctcgagcagatgctcctccttatggcattgatttcccaaccggaagacccactggccgtttctctaatggctacaacattcctgacttcatcagtcaatcacttggggccgaatccacattgccttatttagatcccgagctcgaccgggaaagattgct

SEQ ID NO: 6924 - DNA, 404 bp, Glycine max
cgtccgtaagctaggaatacggctcgagcagtaaagcaagtgaagtcgtgcacttccccaacactcacaccatggatttgctctcaatctctccctctcaccctttaccttcttccattcgcaccctttcctcaaaccctaagtcccccatttcctcctccttcttcacccccaaaccccattcacgcttctccaaaccctccaaaacccccgcaaggtgtgtcttcacggcctcgccaatcccctccaaaatcccaaactttgggtctcaatctcggaacccgggcctcactttcgagctctccgcgccccagacgccttcgacggctgcgataggcacggacggcgacctgatggggctgttgctgagggagaggattgtgttccccgggagcagcatcgac

SEQ ID NO: 6925 - DNA, 1296 bp, Glycine max
  unsure (1)..(1296): unsure at all n locations
ggtangagtaaaattacttaagagccaccatacacaatatntttcttgttattcccctctcacacacacacacaacaacactctgaaactaacaacaacaataaaagaccatgtcggtgaaggagtgcgagcaccacaaggggaagaagaggaagatcttccggcaagtgttctggtgcttagtggtgttccttttcatcgtgctggtcacaattcttttgatatgggcaatccttagacccaccaaacccaccttcacgctccaagacgtcaccgtctacgccttcaacgccaccgtggcgaacttcctcacttcgaattttcaggtcacgctcatctcgcgtaacccgaacgaccgcatcggtgtttactatgatcgcctcgaaaccttcgtgacctaccggagccagcaggtcacgtaccgaaccgccatccctccgacatatcaaggccataaagagatcaatgtttggtctccgtttgtttatggcaccaacatccccgtcgcgccgttcaatttcctcggcctcagccaggaccagagtaacggtaacgtcctcgtcaccatccgagccgagggtagggttcgttggaaggtcggcaccttcatctccggccgctaccacctctacgtccgctgcccggcgttcatcagctttggaccccgcagcaatggaatcgtcgtcggagagaacgccatcaagttccagattatccaacggtgctccgttagtgtctaaacttaatctcagacaagaaaaatgttaataacatattttctaatacactcttttaaatatgtttattagtgacggaatttagtgatgtattgccttttcgtcactaattctaaagttacaaaaactttagtgatgaatttttcaaaagttacatatgaaatatttcgtcactaaaatttattgaaaattaaatctggaaaattcatggttattttttttatgtgattttatagtttttaataaatttaaactaatcataaaaaatgtgttaaaatgagtgtaataaagaatatgttattgacacttgtggtatgtatactctactcgatccgatccagtgtatttttataggtaccaatttcttcttccactgttgttattgtacgtgtaccttgtgtacgaattggtcgttagatgtttctattttacgttttgctatagaaatgtgaagcagacaaaagagtctcagatatagcaaaattacaagatgcaagatggagactaaatgtaattgagctacgatggcaataaaatttcttgtttcaatttggataac

SEQ ID NO: 6926 - DNA, 737 bp, Glycine max
caaaaaagtaatttgctgaaaattcgtcctcaacaaccaaaagcagcctccaccattcaaataccatccccaactctaaaaaacatagcacgatcttatcatcacatcctccgaatacaaaagtttaccttgcaaataaatcaacaccaaacgcgcccacaacacacacacagagacatttttctttcttagaagcgtccaccacacggaacctcgcaattccttcacacccaccataataataatatcttcattgttcttttcttctttgttaccattaaaaacacacacacacacacaacaacactctgaaactaacaacaacaataaaagaccatgtcggtgaaggagtgcgagcaccacaaggggaagaagaggaagatcttccggcaagtgttctggtgcttagtggtgttccttttcatcgtgctggtcacaattcttttgatatgggcaatccttagacccaccaaacccaccttcacgctccaagacgtcaccgtctacgccttcaacgccaccgtggcgaacttcctcacttcgaattttcaggtcacgctcatctcgcgtaacccgaacgaccgcatcggtgtttactatgatcgcctcgaaaccttcgtgacctaccggagccagcaggtcacgtaccgaaccgccacctctacgtgcgctgcccggcgttcatcagctttggaccccgcagcaatggaatcgtcgtcggagagaacgccatcaag

SEQ ID NO: 6927 - DNA, 2027 bp, Glycine max
gctactatctctcacatccacatgcaaatgcaagaggtggttcccttaatgatccattgcttctgttaaagaatcctttggtttctctctctaccgacattatctccctttatatcagttgtcctaggcagagtttctaaagcaaaagaaaaaaaaaagaaagcaaagggtaggcattgacccctttgcacaaaggaaaagaggggtggtgttgtgttaaaaaaatattgaacttggttggttctaagtagaaacaaaaattgtcattttcccatttctgcatttttggtttgggagaggagaaaccaagaattaagaaatgggttgctccgtaagagtttgttgtgtcttatttttggtgttgttggtggcatgtgttagaggggaggacccttatagattctacacttggaatgtcacatatggagacatttatccacttggtgttaaacaacaggggattttgataaactggcaatttccagggccacaaattgaagctgtgaccaatgacaacttgattatcaatgtttacaacagcttggatgaacctttcctcttatcttggaatggagttctgcagaggagaaactcatggcaggatggagtgtatggtaccaattgtccaattctaccagggcataacttcacttatgttcttcaagtgaaggatcagataggtagctacttctactacccttcccttgcattccacaaggcagcaggaggttatggtggattcaaaattgagagccgccccgggattccggtgccttttcctcctccagcaggagatttcacgatattggcaggagactggtacaagagaaatcacacagatttgagggctattttggatggtggaagtgaccttcccttcccagatgggattatcatcaatggacgtggttccaatgcctacacatttacagttgatcaaggcaagacgtacagattcaggatatcaaatgtgggactcacttcttccatcaactttagaatccaagggcataaaatgacaattgttgaggtggaagggacccacactctccaaaacgtttatgactcacttgatgttcatctggggcagacttactctgtgttggttactgctgatcaaccaccccaagactacctcattgtcgtcacgacacgattcacctcccaagtgttgaatgctacctccatttttcgttacagtaactctggtggaggtgttactggccttttcccttgggggccaactattcaagttgattggtctttaaaccaagctcgctctcttaggaggaatttgacagcaagtgggccaagacctaatccacaaggatcataccattatggtttgataaacacaactcgaacaattagacttcaaaattctgctccagttatcaatggcaaacagtgatacgctgtcaatagtgtgtccttcatacctgctgatacaccacttaaactggctgattactacaagatccaaggggtgttctcccttggaagtatccctgactaccccactggtagtggtggctaccttcaaacttctgtcatggaagccgatttccgaggctttatagaggttgtgtttgagaccactgaagacactgtggagtcatggcacgttgatggccacagcttctttgtagtaggaatggatggagggcaatggtcatcagcaagcaggctaaattacaatttaagagatacagtttctcgttccacagttcaggtgtatcccaagtcatggactgcaatttacatgcctttggataatgtgggaatgtggaatgtgaggtctgagaattgggttcatcagtatttgggccagcaattttatcttagagtgtattcccctgcaaattcatggagagatgagtacccaattccaagcaatgctattcggtgtggcaaggctgtgggacactactaatgccaccaccaaaccaacattgggatttttatttgaacagtgtcattcatttccattcatggcttgactcaagcctcttctcttgttctcttgt

SEQ ID NO: 6928 - DNA, 1155 bp, Glycine max
gtgttgtgtgagacataagagcgtagaagatggtgagactgagataattgagcatcaatgagtggaagctgatcgatgggagtcgccacacggaggcatgccacgtgtgctgccagaagctgctcgtacagcggatgagtcgctatctccgccttcagcttccactcatcgatgctcagttatctcagtctcaccatcttctacgctcttatgtctcacacaacactcattctctctccccccatcaccgccaagaacttgacaacttcctggcacaatatttgatagttttgtgtacattcaaagagcagcttcagcaacatgtgagggtccacgccgtcgaggctgtcatggcctgccgtgatatcgaaagtaccttgcaagctctgactggagtgagtttgggagaaggaactggtgcaacaatgtcagatgatgaagatgatttgcagatggatggctctttagatcagtctagcgctgacgggcatgacatgatgggatttggtccattgcttcctacagaatctgaaaggtccctgatggaaagagttcgtcaggagcttaagattgagctcaagcagggttttaagtcaagaattgaagatgttagggaggaaatattaaggaagcggagagctgggaaattaccaggtgacacaacatcggttttaaaggcctggtggcagcaacatgctaagtggccctacccaactgaagatgacaaggcaaaacttgtggaggagacagggttgcagctgaagcaaatcaataattggttcatcaatcaaaggaaacgcaactggcacagcaactctcaatcggttaactctctgaagtccaagcgcaagagagagtatgcccactaaggattccagtctggtgcagaagataacaggtgatgcactacaacataagatggcttacaatagtgatggttgtaaattcttggaatacataacggatacgaactattcttcttgttgtgcacggtcgcctccatttctttcaagtgtttttttatttgtaaatttgtttgctatgatttgactggccgaagaagtatttttagcagctgaaagcctgcaagtgtttcctatacttgatttctttgcatgtactattatgtaaattttgtgttgtacttgatatcag

SEQ ID NO: 6929 - DNA, 523 bp, Glycine max
gaaaaatccatctgtaaatcatcttcgtcatctgacattgttgcaccagttccttctcccaaactcactccagtgagagcttgtaaggtattttcgatatcacggcaggccatgacagcctcgacggcgtggactctgacatgttgctgaagctgttctttaaatgtacacaaaactatcaaatattgtgccaggaagttgtcaagttcttggcggtgatgaggggagagagaaagagtgttgtgtgagacataagagcgtagaagatggtgagactgagataattgagcatcaatgagtggaagctgatcgatgggagtcgccacacggaggcatgccacgtgtgctgccagaagctgctcgtacagcggatgagtcgctatctccgccttcagctgacggtgctgatcgccggagacctcacccatcattcccaagcctgcttcttgcatctcttcctttcttttcctcaaaggcccccttctgtcgtcttccgcctgacgcgtgctcgagcccgataatt

SEQ ID NO: 6930 - DNA, 533 bp, Glycine max
tccacgcgtccgcttcaccctctcacaataaaatcattgcaatagagaagccccttaaataaatctgaatttccctgctttgcttcaccaccccccttgcttgcgtgggtagaaatgcaagaagcagggctgggaatgggaatgggaatgatgagcggagaagtatccgccgccggggaccaccaccgtcaagtgaaggcggagatagccaaccacccactctatgaacagcttctatctgcacacgtgtcatgcctccgcgtcgccacacctatcgatcagttgccgctcatcgacggacagttatcgcagtcccaccatctcctccgctcttatgcctcacaccattcccattccctctcgccccatgaccgacaagaacttgacaacttcatggcacaatatttgattgtgttatgtacgttcaaagagcagcttcagcaacatgtgagggtgcatgccgtggaggctgtgatggcctgccgtgatattgaaagtaccttgcaagctctgacaggagtcagtttgggaga

SEQ ID NO: 6931 - DNA, 543 bp, Glycine max
gacacaacttctgtgttgaagaactggtggcagcaacatgcaaagtggccttacccaactgaagatgacaaggcaaaacttgtggaggagacagggttgcagctgaagcaaattaataattggttcatcaaccaaaggaaacgcaactggcacagcaactctcaatcggttacctctttgaagtccaagcgcaagaggtagacattatattattttgtccctaactatgtggaacagctagcaagcaacacaactatatataaggacatgcttaatattgctgatagagtgtagtcccactaaggatgcagaagatggtagatgcatgtgggttactgtaatattgtaagatagctgaaacaaattctagactggctgtaaatttgtggaatttaacgtatgcaaacttttcttttaggtgtggttaagttgcctctctttttaactgtctttgtaaattggtttgctacttttctgcccggcgggacaattattactattcctactactacacagatgattgaaagattctcggttctttat

SEQ ID NO: 6932 - DNA, 261 bp, Glycine max
agggacaaaaggaaaggcagaaatgcaagaaccaagcttgggattgatgggtgaggtctccggcgatcaccaccgtcagctgaaggcggagataacgactcatccgctgtacgagcagcttctggcagcacacgtggcatgcctccgtgtggccaccccgatcgaccagcttccactcatcgatgctcacttatctcagtctcaccatcttctacgctcttatgtctcacacaacactcattctttctcccctcatcaccg

SEQ ID NO: 6933 - DNA, 764 bp, Glycine max
ggccaaaggtggcgcattccagatccataaccatggcgtctaactctgcttccgctctttacttccttttatgcctatcgcccatcactttgcttctttctgcgtttcgtgctcaagctcaatctcatgctccagctcccactttcaagtactgtgaaaagaatgcagactatgctgtgaaggtgagtggagtggaaatattgcctgaccccgtggagagaggagtgccattcacctttaagatcccagcttatactcctgaaccaattcaaagcggggacttgttatatgaaatttcttatgctggaatagaagcacaacctgctacatttctccatgatctctgtgaggaagcaccatgcccagtacctgcaggcaactttgtgctcgttcacaccgaattattgcctccggttaccccaccaggcacctataatgtgaagctgaattttaaggatcataacgacaagctgttaacttgcatcatctttcccttcaaaatcggttctaaatcttcagtgtctgctatctaactgtccagcgcaaaactgctcctagatgctacctcaactttgcgtattacttttgtttagggtgtagttttagtgtgtactagttgagtgcaatgctgtgggctatgaatgatgctttttcgcacccaataatggtataaatagccctacgagaagtgattgtcacatctattttgtattgttgtcttcaataaatttggacttctaaaaatcctaatagccggtgcaaat

SEQ ID NO: 6934 - DNA, 596 bp, Glycine max
actcgagccgaatcggctcgaggttggaaacaacaaaaccaccgcacagggatcgtgttgagtttgagaatggagaagacagcagttaaagttcgatgccagaggattgggtgcgacgccatgttctccgaggacgacaaccccgacggttgctgtcgataccatgattcgggacctatatttcatgacgggacaaaagaatggagttgttgcaagaaaagaagtcatgattttagcttgtttttggaaattccaggatgcaagacaggaaaacatacaacagttaagcaagtaattacaccagtgaagaagaacaccatgccttctccaaccgctgtttgttcaaccaatgcatcatcaaaggactcttgtcccagatgtcagcagggtttcttttgctcagatcatggctcacaaagcaaacctgcaaatattattggagacaaggccgcaaatctggctggagatgcatctgttgataacaattcaagtgttcatgctccgaaacctaagaagatagttgatataaatgagccacaagtatgtaaaaataaaggatgcggtcaaactttcagggaaaggataatcatgacact

SEQ ID NO: 6935 - DNA, 451 bp, Glycine max
ctgctaacccaactcaaaaactggaacttgttggaagttgagtggaaactgagattctgagaggaatcagcccttttccgtatactttacttgaacaagccgtttgagttcggcgtgtttaataaataaaatcacaagacaacgttgtcttgcgcctgaaagtgttgtggagacaaaaccacaatacagttttagaatggagaagacagcagttaaagttcgatgccagaggattgggtgcgacgccatgttctccgaggccgacaaccccgacggttcctgtcgataccatgattcgggacctatatttcatgatggaacaaaagaatgcagttgttgcaagaaaagaagtcatgattttagcttgtttttggaaattccaggatgcaagacaggaaaacataccacagttaagcaagttattacaccagtgaagaagaacaccatgccc

SEQ ID NO: 6936 - DNA, 701 bp, Glycine max
  unsure (1)..(701): unsure at all n locations
ggggtgactttgtgcgttgaagttatagagagagaggagtttggagagaagagtgaagaaggcaaatcgcgaagactagatctgatctgagagaatggctcctcggtctagcagcaaggacgcccaagaccttttccgcgctctttggtctgcttatgctgcaacccccactaatctcaagatcattgatctctatgtcatctatgccgtattcaccgctttcatccaggttgtttacatggctttggttggatcatttccatttaactccttcctatcaggagtactttcttgtgtaggaactgctgttcttgctgtttgtctcaggatccaagtgaataaagagaataaggaattcaaggatcttgcacctgagcgcgcttttgcggattttgttctctgtaatttggtgcttcatttggtgatcatgaacttccttggttaaattgggtttgtgtggcggttgttgtttctgattgaacccttggataataaaaattaaatagtagtatacctagacttttgtaatagtatttatagacagtagccggcattctactaattgctttagctttatgttgattacccccaccccccatttttggttccctgttttgaacgaagagattttgccatcttttgaagtttaaagtacttttgaatggcgaaataaagaaggtattgttattattcaaaaanaa

SEQ ID NO: 6937 - DNA, 542 bp, Glycine max
gcacgtttgtttgctttgatcgtgcacagagtaaccctagagttaggggttaattgccctcgcaatttccaccacgagaaagtatctttctctaatttgattgattttttgtgttttattccatcgagatttgtgttggtgaaattttgctgctatctcttcaatcggctttattgtccactatacgttcaaatccatgattgttaggatggatccctctcatcatattgaacaacaagaagacgacgagtgggacactgaaggatttgtgattccaagtttgggaattgaagactcagatcaagataaacctcatgttcttgatatagaatcttctgattctgcatcaaaggctaagaggatgaaaacatctatttgggtccgcatggagcgcatccttcactagcaaagcagcaagagctaaattcatctaaccggaagcagaagttcaagcaaaagctgaaagaagctgacaagagaattagtgggaccggtagggagaataacgtggataacctgagggagcttgtgggtggaggaaa

SEQ ID NO: 6938 - DNA, 810 bp, Glycine max
cggggggggaattgttgtcttcaactgaatctgccacaccacggtacaccacacagttccctcacttctctccttttgaccattcaaccttcctcgcctttgcctccgtttccgtgactgagatggctggaggtgttattcagcagatattgaggaggaaactccaccctcggtttactaactctcccttgttgtcacccatcgtagcaaaaaaagatgatgctggctctactggcagtcagtccttaagagcacttgcattaattggagctggtttgtcaggtcttttcagtttttcaacaatggcagcagctgatgaagctgaacatggcctggcatgtccaagctatccgtggcctcacaaaggaattcttagttcatatgatcatgcttcgattcgtcgtggtcatcaagtttatacagaagtctgtgcttcctgccattctatgtctttgatatcgtatcgtgatttggttggtgttgcttatacagaagaagaggtaaaggctatggcagctgagattgaggtggttgatggccctaacgatgagggtgagatgtttacacgccctggtaaactcagcgatcgttttcctcagccatatgcaaatgaagcagctgctaggtttgctaatggaggagcttatcctccagatctaagtcttattaccaaagcccgtcacaatggtcagaactatgtttttgcccttctaactggttatcgtgacccacctgctggtgtttcaatatgagagggacttcattataatccttgctttcctggtggagcaattgccatgcctaaaatgc

SEQ ID NO: 6939 - DNA, 476 bp, Glycine max
  unsure (1)..(476): unsure at all n locations
ngtacgcgtgggcagcttctctgtctcttttcttcactttctccttattcttcattagatcctcagtgggaatcgaccctcatttcatttctgtgaactgagatggctggaggtgttattcggcagttatttaggaggaaactccaatctcattctcctaattcttcttttaagtcatccattatcacaaagaaagatggtgctgactctactggcagcaactccttaagagtgcttgcttttgttggagctggtgtgtcagggtttttaggttttgcaacaacagcatttgctgatgaagctgagcatggcctggcatgtccaagctatccatggcctcacaagggcatccttagttcatatgatcatgcttcgattcgtcgtggtcatcaagtttatcaagaagtctgtgcttcttgtcattctatgtctttgatatcataccgtgatttggttggtgttgcttatacagaaga

SEQ ID NO: 6940 - DNA, 453 bp, Glycine max
  unsure (1)..(453): unsure at all n locations
gcctcatgctatatgccggttcntgnttaaatgtttcaaagctttaggggagtatattgaaacattttaacacgaacccgccgcgaatggctgctactgctccttggttttttagttgttgtgttgttgtcttcaactccacacagttccctcacttctcttccctttgaccattcaaccttcctcgcctttgcctccgtttccgtgactgagatggctggaggtgttattcagcagatattgaggaggaaactccaccctcggtttactaactctcccttgttgtcacccatcgtagcaaaaaaagatgatgctggctctactggcagtcagtccttaagagcacttgcattaattggagctggtttgtcaggtcttttcagtttttcaacaatggcagcagctgatgaagctgaacatggcctggcatgtccaagctatccatggcctcac

SEQ ID NO: 6941 - DNA, 438 bp, Glycine max
gctccttggttttttagttgttgtgttgttgtcttcaactccacacagttccctcacttctctccctttgaccattcaaccttcctcgcctttgcctccgtttcgtgagtccactcttcttcgattctagcgtgactgagatggctggaggtgttattcagcagatattgaggaggaaactccaccctcggtttactaactctcccttgttgtcacccatcgtagcaaaaaaagatgatgctggctctactggcagtcagtccttaagagcacttgcattaattggagctggtttgtcaggtcttttcagtttttcaacaatggcagcagctgatgaagctgaacatggcctggcatgtccaagctatccatggcctcacaagggaattcttagttcatatgatcacgcttcgattcgtcgtggtcatcaagtttata

SEQ ID NO: 6942 - DNA, 819 bp, Glycine max
ggacgcgtgggcggacgcgtgggagtttactttacgttgtgcgtcggagctgtgtctgtgcaaatttgcgttgttcttcgcggtacacctcactcacactgaacggtaagtatggcggacaaggctgttacaatccgaacccgaaagttcatgaccaacaggcttctttccaggaagcagtttgtcgttgatgtccttcatccagggagggcaaatgtttccaaggctgaacttaaggagaagctagctaggatgtatgatgtgaaagaccctaatactgtatttgtcttcaaattccgaacacattttggaggtggcaaatccactggatttggtttgatttatgatacagtggagaatgccaagaagtatgagcccaaatacaggcttatcaggaacggccttgacactaaggtagaaaagtcaaggaagcaaatgaaggagagaaagaatagagctaagaagattcgcggagtaaagaagaccaaggcttccgatgctgccaaggctggaaaaaagaaataagttttgagacaccctgttactcctaaggttaaattggttttggtgctttgtaatagttatttttatcttatgctagatttatagaatgagatgtcttggcgcaagtgttgatccttgttttaatttatgttcgatcgcttataacttcagatgttgagtacattgaacaattgagagaactcgtgttttactttacttggcttctaataccttgtaagttcgagttgcgtaaattgggcctaaacgcagatgcatttatttgatttatatggaattgctcagagtttagttggt

SEQ ID NO: 6943 - DNA, 560 bp, Glycine max
gagatcagcctctttctttctttctctctctctctctctctctgcacctttctttcacaactcaatcaaaaaaagcatatccaaggtgtggtggttaagctgtccatctatcaatcaatccaatcaatcaagagaccaatcatcaaccgaatataagagaacgaaaaaagggggctacccacaacgtcatcctctttcaccacattatcactggaccacctccctccttccgaacagctatgttatcttcactgcaacatttgtgacaccgtcctcgctgtaagtgttccttgcacaagcttgttcaagaccgtcacagtccgatgcggccattgcactaacctcctcccagtgaacatgcgagggctgcttatgccatctcccactcaatttcatttgggtcactctttcttctccccatctcataaccttctggaggagataccaaatccctctccaaattttctgatgaaccaaacaaatttaagtgcatcaaatgagttctctatgcctgctaggattgcagctgatgagcttccacgaccgatcatgaatagacc

SEQ ID NO: 6944 - DNA, 457 bp, Glycine max
gtgtcgttttctgttgctagtgccactgacaatatccaacattatcatcgctctttactctttctgagaaacacagaatccttctgaactcttagaagagcacacttttcgctaccagttacttccctctttcatttcttatatctgctaagtaaaatcaaaagggtgaatctgaatggtttttgctgttagtttctctcaaagcctccttctgtgcaagccatcatcatcatcatcatcatatcaggtcaagtgttgctcacggtcacagaacaaagaagccacgtcacatattcaaacaaagaaacggtgcttgaggtgcaacaccctttactcagatgaagataattccccacttgcttgctccttccatggccacaccaatggagataagggtctattttcatttgctccagcacaccgaggaattgatggggattggagtgataaatctgga

SEQ ID NO: 6945 - DNA, 1216 bp, Glycine max
atttcactccccaaactccagagtcccaccgataattctctttcccatactctctctgtgttcttctgttctctctgtttcttcagattttctccctcctcagcgcctgtgaagtttgattgcttcattctttgaagtgaatttgacaattaagtaaattggttgagaagggttcattcctcttcattggaagaataaaacaaatattgcaggtggattttttctgatggcaactaatgaaaatcttccaccaaatgtaataaagcaactagccaaggaattaaaaaatattgatgaatcacctcctgaggggattaaagttgtggtaaatgatgatgatttttcaataatatatgctgacattgaaggcccagctggaactccttatgataatggagttttccgcatgaagttgttattgtctcgtgatttccctcactctcctcctaaagggtttttccttacaaagattttccatccaaatattgcaaccaatggagagatttgtgtcaacacacttaaaaaggattggaaccctaaccttgggttgcggcatgttctcattgttgttaggtgtctactgattgaaccatttccagaatcagctctaaatgaacaggctggcaaaatgctgcttgaaaattatgaggagtatgctagacatgctaggctttacaccggaatccatgcaaaaccaaagcccaaattcaagagcggagctatatctgaatcaacaactgctctgaatgtggatcagacaaacacctctgtgattagtgctgacatcaaaaccacaccggcgagtgctgcattgccagcagccaccgcaacaagaggaaataatcaggaacaggcagcagcggctgttaatggttctaatgctgccgctacagtcatttctgctgctgcttctgcaccccaaaagaaggaaggtggacaagcaaaagctcaggtggacaagaagaagatagatgccagaaagaaaagtttgaaaagattgtaataaaattgttcaattattgatgttttttttaattgtgtcttagttttacaatttgatagagaaagaggaaggagtggagatatggtctcctgggttcaacatttgttttatataatgaattagtaatttcttgttaggagtaaatggatgaaattgaacttgttgtctttggacatgtgttatactctttggtaaaatattgatcttttagcc

SEQ ID NO: 6946 - DNA, 565 bp, Glycine max
ggtgcctcaaagttccaccaatcaatcattcattcattccaaggagggatctctctctctcatccttcttctctctcctctggcacccctaaagcttcttctgttctgtgcaggcagtttttctttggtttggttgcatcctttgatctgatcagcaaatttgagaattcagtttgggaagggccattcctctttagtgcaaaacagatcgcaggtgcctttgtgctgatggccactaatgaaaatcttccaccaaatgtaattaagcaacttgccaaggagttgaaaaatcttgatgaatctcctcccgagggcattaaagttgtggtaaatgatgatgatttttcgacaatatttgctgacattgaaggcccagctggaactccttatgagaatggagttttccgaatgaagctgttgctgtcccatgatttcccgcattctccacctaaaggttttttcttgactaagattttccatccaaacattgcaaccaatggagagatttgtgtcaacacacttaaaaaggattggaatcctagccttgggttacggcatgttctta

SEQ ID NO: 6947 - DNA, 512 bp, Glycine max
atgcaaaaccaaagtccaaattcaaaactggagctatatctgaatctacaactgctctgaatgttgatcagagtaacacctcagttcttaatgctgaagtcaaaactgccccatcgggtgcgacattgccattgcaatcaccattggccccctcaactaacaacacaacaagaggaaacaagcaggaacaggctgtggttggagctgagccagctgttaacagttcttgtgccacatccatggttcatgctgctgcaccaatgaaggcaggtggagtagcaaaagctcaggctgacaagaagaagattgatgcccggaaaagaagtttgaaaagattgtaatgaagttgttcaataattgaacttatatcatttgtggggtaattttgtttattgaaataatagagaaaggggaaatgtggttggggtgtatgggaagatcaaagatgggttcaaatgaataatacttttgttgggactaaatgaatgaatataaactgaaaaatgtgctct

SEQ ID NO: 6948 - DNA, 531 bp, Glycine max
  unsure (1)..(531): unsure at all n locations
cagagattctctccaccccattcaagtcaaagaagagagaatagagggaatttttcttctttttggaaaaaagaaaagaaggaaaagttggtatggaatgggatgagagagaggaagaaccacagctcatggcatatattcccccaacataaccccactgatgtttcctgatatggagtgagatcatagaacaacacaaccaactccaagttataaagagaactatagctggcacatattgatgcatacatagctaaaagggatcaaaaggcacatctatgtttcagtcctttgccagcaagtaagtagtaactcatccaaatatagcaaatggatccacaaagcatgcattttgtgctgtccactgattccaaaccaaggctgaaatggactcctgagcttcaccgacggttcattgaggctaccaatcagcttggaggtgcagataaagcaactccaaagagtcttatganggtgatgggaattccgggacttactttgtaccacctgaagagccatttacagaaatat

SEQ ID NO: 6949 - DNA, 752 bp, Glycine max
cgcgccccgttcccaaccaaaagaccactctcgacgagcttcccaaaacaagaagcaccaatggcagtcgcgaatctgcagagactgtcctcgcaagtgcaccgcctcccctccgtctcgttcttctccaaatccctgatctcccgcacctccacctcttcctcctccacgaagaaggtcgcggaccgcatcgtgcggctgtcggcgatcgacttcgcgggtaagaagcacgaggtggtgggcctggccggtcagaccctgctgaaggcgctgataaacacgggcctggtcgacccggagtcccaccgcctggaggagatcgacgcctgcgcggcccactgcgaggtcaacattgcccaggagtggctcgacaagctcccccctcgctcctacgacgaggagtacgtcctcgtccgcaattcccgagccagagccctcaacaagcactccaggctcggatgccaggtcctcctcgaccacgacctcgaaggtatggtcgttgctctccccgaacctaggccctgggacacttcctaagtccgaaccgaagccaagtgtttcttttctttttttggctcaataatgtgatccatgaacctttggaagcatagcggaactctggttgaaccttgtattggtttcttcctgttgttatattttgggtggttttagactcccgtgccggttattggctcgctatggataactatttgcaaacttgtgttttgttattatgatgattatgatatgat

SEQ ID NO: 6950 - DNA, 416 bp, Glycine max
ggcgagccctggcagcacacacatctttgtgtctcaaaaatggaacctattgacaaccatctcacctctttcttccaccaccaccagcaacaacaacaacaccaccagcaccagcaccagcatccgccgccgccgccgccgaccacggcgtcgccgaccaacggtctcttgccgaacgcggatgggtcccacatgctgtaccctcactcggtcgcgtccgcggtgtcgtcgcagcttgaaccggcgaagcggaagcgggggcggccgaggaagtacggcacgccggagcaagctctggccgcgaagaaagccgctacgacgtcgtctcagtcgttctctgcggacaagaagccccactctccgaccttcccttcctcttctttcacttcctccacgaaatccctttccttcgctct

SEQ ID NO: 6951 - DNA, 368 bp, Glycine max
acacatctttgtgtttcaaaaatggaaccgaatggcaaccaactcacctctttcttccaccaccaccaccaacagcaccaacaccaccagccgccgccaccaccgcagaccacggcgtctccgaccaacgggctcttgccgaacgcggatgggtcccacatactttacccccactctgtggcgtccgctgtttcgtcgcagcttgaaccggcgaagcggaagcgcgggcggccgaggaagtacggaacgccggagcaagctctggccgcgaagaaagccgctacgacgttgtctcattcgctccctgtggacaagaagccccactccccggcgttcccttcctccaagaaatcccattccttcgctct

SEQ ID NO: 6952 - DNA, 693 bp, Glycine max
ggactcaaaaagagggttaacaagaaaaaaaaaaaacttgaaataccttcaactcgaagaacacaaccactgaaaaaagagaaagtgagaaaagggtcgaacaactggtgaagtcattgatggctacagaggaagagagtgcggtgaaggagcctttggatctcattaggctcagcctcgacgagcgtatctatgtcaaactccgttccgacagagagcttcgtggcaaacttcacgcttatgatcagcatcttaatatgattcttggtgatgttgaagaaattgttactacagtggaaatcgatgatgagacatacgaagaaattgtgaggactacaaagcggacagttcctttcctgtttgtcaggggagatggggtgatattggtttccccgccattgaggactgcatgactggactgatgaactatgtgatcattttaataacaagtgtcactgtttatgaaattgtataactttaagtagtgatctcatttcatatgattaggttagttactcaattggcctcgtgtgctagagatttctgttagacagtcaattttcaattatctttgtaacatgagagaatcatggcatgcacataaacaaggatttttgctgcaatgtggagctgacattatatattagtggctctaatcaaaaaacaataatgattatattttaaatttattaa

SEQ ID NO: 6953 - DNA, 628 bp, Glycine max
ctcgagcggctcgagaggtaattgaactctgggtttgttgcaatagttcgcaagtctgtgcctttcggccttccctaatgatatgccctatgcttatgatcagcatcttaatatgattcttggtgatgttgaagaaattgttactacagtggaaatcgatgatgagacatacgaagaaattgtgaggactacaaagcggacagttcctttcctgtttgtcaggggagatggggtgatattggtttccccgccattgaggactgcatgactggactgatgaactatgtgatcattgcaataacaagtgtcactggctatgaaattgtctaactataagtagcgatctcatttcatatgattaggttagttactcaattggccacgagtgctaaagatatctgatagacagacagttatcaattatctatgtaacatgacagaatcatggcatgcacataaaccaggatttctgctgcaatgtagagcttacattatatattaatagctcatatccgtgaagcggttaccatttaaccactcaccactattcatctctatcttcggtctggagctctaaatgatccatgcttagctacgcgtacttgccagctcttacctattttatagc

SEQ ID NO: 6954 - DNA, 543 bp, Glycine max
tcgcccacgcgttcgaatttttctctcacaaattccgatttctattatttccaactcaaaatttctccattctttttggttcggtagctcgcgacatcagatcaacatcgacagcctctcgcgattggttcgatattccattccctctttctattatctacgcaaagtgatccttaattgcaataccagatatttcacttttcaagcaaccaccgactcaagcaacggtaatgggtataatcaggagttgcttctctttcattgcagggacggtctttgggatttacgtggctcaaagttatcaagttcctgacgtcaagaaggaagctgacactgccttgttacaggcaaagcaagttgaggaaaaatatcgcaagtccaagtaagaacaagggtggtagggggtgatcatgatacatttttgctttcttgggttatgtcctgcatcgtataggattagatacctctattaactacaaattggtggaaaatcttgacacaagtgtaatgtgagagctatactctgattcctaaatcttggat

SEQ ID NO: 6955 - DNA, 559 bp, Glycine max
  unsure (1)..(559): unsure at all n locations
aaagctcgatatcacttccccatctatattcaagtttcagaagacacgtgggtggatagcaacttagaacacaagtgaactcaaagtggaacaacccaagcttgtttcacagctcaacaacaatggcttctatctcatgcatcacccaccaccccatcacttccaagctcaataatgccttctcttcaccccacgtctctgcctcaaacttggcctcacggtttctgggcaccagaaaaagagttgggttgcatagcctcacctctagaataattggaccctctaatggctccaaagccacatgctggttcaggttcggcaagaacggtgttgatgccaaaggtgctggcatctatggcagccagggccgtgatgactttgatagagatgacgtggaacagtacttcaactatatggggatgctcgctgtagaaggtacatatgataaaatgggggctcttctaagccaaaacatccaccccgtggacatccttctgctgttagctgcctcagaaggtgacaagccaaaaattgaagaactcttgagagctggagcana

SEQ ID NO: 6956 - DNA, 435 bp, Glycine max
aggggcacaagtttgttgagatagctagaagcaataagatgaaaatgaaagtgcttgttttgtttgttgctacagttttggtagcatatgaatgccatggctcagactaccagaagttccctctccaaatgaaaactgggtttggtgggcaatacagcaatgaggtggcatgtgccagttggaggcttggcgtggaagcaaacaacgtactcaagtggcaaactgttcctgcagcttgcggagagtacatagctgactacgttctaggagaccaatatagatcagattccaaaacagttaaccaacaagcttatttctatgctaaatccctcaaactcaccaacaaagatgtctttgtcttggacgttgacgacactactctctctaatcttcagtattttgctaaccatggatttggtgtggaaccgcacaata

SEQ ID NO: 6957 - DNA, 778 bp, Glycine max
gactattccttgcggtggcatatgcctataacttcatcattcaattgactcagctctcctttctcaagtagaattgttgattcgtagatcttctctcgcagtcccatccgaagcaagcaatacaccaaaacccaaataaaacagaaaatttatttatttattcgtttttagaaaaaaaaaaaaaaaagtggtgagcgatatggaatttgacgagcacgaggaccaagaggaagaggaggaagaggaaatgggattctcagtggcggctgcgagttacgactcgctgggaaacgcggcggtgaggtctaaaatgagcggcggcgagggagttgcggtcaccgggaattctggtcggaaagggacgctgagatacagagaatgtcagaagaaccacgccgtcagcattggaggccaagccgtcgacggctgctgcgagtttttggccgccggggaggaaggtacgctggaggccgtaatttgcgccgcctgcaactgccaccgtaatttccaccgcaaggagatcgacggcgaaaccagcccttaccggcagcgttcgcagccgcagcctcagcctctgcaccctcagtaccaccaccaattctccccttactaccaccgcgccccaacaccttcggctgccgggtacctccaccaccacctggtaactcctccggtgtcgcagcaccggcccttggctctcccaccgttagcttccggaggagtgttcagtagggagaagaagacatgtcaaaccccagttccagcggcggtggtggcg

SEQ ID NO: 6958 - DNA, 357 bp, Glycine max
gatgacttcatcatttaattgactcagctctcccctctctctcgcagtcccatccatctgaagcaagcattacagcaaaggaccaaaacccaaataaaacacaaatttcattttatttatttatttgtttattcatttatttttagaaaaagtggagagccatatggaatttgacgagcacgaggaccaagagcaagaagaggaggacgacgaggaggaaatgggattctcagtggcggcggcggcgagttacgactcgctgggaaacgccgcggtgaggtcttcgtctagcggcggcgatggtgttgcggccaccgtgaattccggtcgcaaagggacggtgagatacagagaatg

SEQ ID NO: 6959 - DNA, 850 bp, Glycine max
acgacagaaggggatcataacacgtgacacgcgtgcttcttgcgatatcttcactattaaatatctgttcttccaaccataaccagaccacaccgactcgcggaaaaagaaaaaagcgatcaaagtttcacttcagccttatccagtttagggtttcggttctttaccctacctttgacgtatcgaaaccttaaatttcggatcaggtctgagcaatctggttggtagaacctttggtcttagagagtcaagttttatgtctgaattagacgatcaaattcctactgccttcgatccttttgctgatgcaaatgctgatgactcgggtgctgggtcaaaggagtatgtgcatattcgcgtacagcagcgaaatggtaggaaaagcctgacaaccgttcagggattgaaaaaagaattcagctataacaagatacttaaagatgttaagaaagagttctgttgcaatggaacagttgttcaggacccagaactaggacaggttattcaacttcaaggtgatcagaggaagaatgtttctaccttcctggtccaggctggtatcgtgaagaaggagcatatcaagattcatggtttctgagcggttggagtctcaagtgtcaagtcttacgtgcctgcctatgtgttgggcatatataatctgagttgtgtatgtgattgtggtatatctgatgtgttcttatgttttaccatgtgatgtgggattatggatttcagaacattgtgtgttctttgctttgaagacataatatgaaaacagtttaatggacctccgtattcgatcttatttcctttggagtttaataataattaaaaaaaaactgtaactttt

SEQ ID NO: 6960 - DNA, 665 bp, Glycine max
  unsure (1)..(665): unsure at all n locations
cccacgcgtccgcccacgcgttcgcccacgcgtccgtccacgcgtccgcaaatatgttataaagtaaactaaaaaggagactttcatggtcttcattcacagtgcagcctcttcttaagagtagctccatctcttccagctttgtgggaatttgtaacagaaagacgagcaagcggttaaagtatgaattctccgaaaaagaaaaaagcgaccatagtttcacttcggccttatccggtttagggtgttcggttctcgaccctacctttcacgtatcgaaaccttatgtttccgatcaggtctgagcactctgcttgggagaacctttggtcttagtgagtcaagttttatgtctgaattagacgatcatattcctactgccttcggtccggttggcatctttttccagggaataaatatcagtatatatgtaagattaacantagtgggttttttctttaaatgtttcctctcttagttttattgtggtatctgtactagcagaatagggtacctattgttgaacttcacaatttctgtgtcaaactattctaattttatgtcttgctgtaagtaatctgtatatcttataggtccttagtgactgattattaccagttatatttagtgattgaatgcaatatatatatattatatgtgtgtgt

SEQ ID NO: 6961 - DNA, 498 bp, Glycine max
gagagagagagagactctggtctcgtggaagtgtaagcaagcaaaaccctagcggcgcctgctttctttgttcgtgttttgcatcaggatggagtctcaggtgaagcacgcacttgttgtcaaagttatgggtcgtactggatccagaggacaagtgacccaggttagagtgaagtttttggatgatcagaaccgtcacatcatgaggaatgtgaaaggacctgtgagagaaggagacattctcaccctactcgagtctgaaagggaagcaagaagattgcgctagatggtctcttttttttggcttgcctccaaattcgaacaaaagcaatatttttcttgatatttatggtagttagtcggtgctaaaggggttatagcaccctatcttattgttttggatctattttcattcgaattattgcttgaattttgtatgtttaaacttcgagattgaggtatgctttggtttaatatatgatttgaattatggcttat

SEQ ID NO: 6962 - DNA, 431 bp, Glycine max
ggttctttgcgagatagaagagaaagccgtcgctatcctagtctcttcttcccctctacccatttcagtttcaggatggaatctcaggtgaagcacgcccttgttgtcaaagttatgggtcgtactgggtctagggggcaggtgactcaggttagagtgaagtttttggatgatcaaaaccgacacatcatgaggaacgtgaagggacccgtgagagaaggagacattctcaccctacttgagtctgaaagagaagcaagaaggttgcgctagaggatctcttcatggtttggctcaggacttaaacaaaacatcgttgtttttgttgtagttaaaggatgtcaaatgttaattgtcatggacctgaattatgcacctactatgtttgacattatgccattatgtgtgtggctgagttatgactaaattta

SEQ ID NO: 6963 - DNA, 511 bp, Glycine max
cctcgagccgaatcggctcgaggtgcaaagtgtaacccaaaaccctagcggcgcctgctttcttcgttcgtcttttgcatcagccatcaggatggagtctcaggtgaagcatgctcttgttgtcaaagttatgggtcgtactggatccagaggacaggtgactcaggttagagtgaagtttttggatgatcagaaccgtcatatcatgaggaatgttaaaggaccagtgagagaaggagacattctcaccctactcgagtctgaaagggaagcaagaaggttgcgctaagagggtcttttctttcttgatctttatggtagttagtcggtgctaaaggttatagcaccctgtcttgtcttggatctattttcattcaaattatgggttgaattttggatgtttggagtttaatatatgattttgaattatggcttggcttaatatatgattttaattatggcttgagttttggattaatatgatttggcttctatatagtgatattcctgc

SEQ ID NO: 6964 - DNA, 537 bp, Glycine max
cggtcaggaatccgggcgaccacgcgtcaaccacgccttcgttacggtggcaaaagaacaacaaaagggggtggcctccaaaccccaactcgtcgaagcgcgagcaagcatcccaaaaccctagctcgcgttctgctttcgtcttttacatcaggatggagtctcaggtgaagcacgcacttgttgtcaaagttatgggtcgtactggatccagaggacaagtaacccaggttagagtgaaatttttggatgatcagaaccgtcacatcatgaggaatgtgaaaggacctgtgcgagaaggagacattctcaccctactcgagtctgaaagggaagcaagaagattgcgctagatggtttcttttggcttgcctccaaattcgaacaaaacagtgtgattttgttgattttaatggtagttgggtggatgtcaaaggttttagcaccctatcttattgtctgtctttggtctatttttattcgaattatggcgtgaactttggatgatttgagtttaagcttcaagggtttagtatg

SEQ ID NO: 6965 - DNA, 461 bp, Glycine max
gcgcgacaagcatcccaaaaccctagctcgcgttctgctttcgtcttttacatcaggatggagtctcaggtgaagcacgcacttgttgtcagccttatgggtcgtactggatccagaggacaagtaacccaggttagagtgaaatttttggatgatcagaaccgtcacatcatgaggaatgtgaaaggacctgtgcgagaaggagacattctcaccctactcgagtctgaaagggaagcaagaagattgcgctaagagggtctttctttcttgatctttatggtagttagtcggtgctaaaggttatagcaccctatcttgtcttggatctattttcattcgaattatggcttgagttttgctgttttgagtctaagcttcaaggttgaagtatgttttggcttaatatatgattttaattatggcttgagttttggattaatatgatttggcttctatat

SEQ ID NO: 6966 - DNA, 917 bp, Glycine max
  unsure (1)..(917): unsure at all n locations
ccgaagtcttgttgtgcaagtacaagtcgcgaacacaaaagcaagcagctataaggaaggaaaggaaaaggagacttggtgcgaaagttgaaagcacgaaaatggggtgggtttggaaggatgacaacagcgacgatgttcgacgcgataactcttcggaacgatgcgccaccaccaaggtcgtcaaatctcagtgcagaacagaggaggtcgaaactggaaagttcgtcagaaagtgcgagaaaaccgaagagattctcaggaattgcatcggaaagcccgccgaagtgttgcaatcaaacaaagagtatactgaagaggatatcacagatgaagtacttaaaggaaggtctgttccatttagctcatctgacggtgccagtggtgtggttgactttcctgggctacaaaatgatattgaagtcatggaacgtaacctgttaagtggtctcagtcatttcttcgacgcagcgaatgggttttttgatgttttttccaagtctccaagcatctttgatgcagagtcatcctcaccctctgtgaggagagggatacctattgaagaatatcgtcggccagaagcttatcctaaatccaaggagaaggaatcaggagatactgattttgttgcaatggctaaagatgtttaaaccttaaatatgccctgggtataaaataagttttcttagttttgtattagattgtggacatctggaccacaatcaagtcctctagtaacatgtttctctgtattaagtattaacatgtttctttttactttttatttgaagttgtttctgatgtagcgtgtgaccaaatttttgttttccccctacactcagttgtaggccataagtatgattaaacaactcttttttaagccaaattaagagggggggggttnnnnnnnnaannna

SEQ ID NO: 6967 - DNA, 820 bp, Glycine max
  unsure (1)..(820): unsure at all n locations
tcgtgcaggcgtgagaacacctcagagaggacgacagaaaggggagtgagcgtagttgaggttttgcttttgccacttcgaaaccaaattttcttccttcgttggcatctgtgatctcttctcctcacaatgagcagatcagggcaaccaccggatttgaagaagtacatggacaagaagcttcagatcaagctgaatgcaaatcgcatggttgttggtactctccgtggcttcgaccagtttatgaatttagttgttgacaacactgtggaagtgaatggcaatgagaaaaatgacatagggatggtggtaatcagaggaaatagtgtggtcactgttgaggcgcttgaacctgtgaacaggacttgatttctgtggcttgtaaacattctatataagtatttcctggtttaacggttgtgtatttgaacaatgtagctatggagagtcacatgtaattgtggatcttaagaagagggtcatgttggccactcatttgggttcttcgggctaaattgttcgggaaggatacctatagtgttttagtgtgatggctgtgactagactcaatcgaaatgtttacgtatatcccttttagccgatttttttctctttttatattgcatttagtgttctcttcctctctatgctctanagtctaaacttagggtttgtctaaggcatcatattgtgtgtctggtctgcagttgattacttaatggaatagataacaaagcttgattgattccctattgagtgttttggagagtgaatccctgtatgcattgatacaaacaggttccccaacactatattgtta

SEQ ID NO: 6968 - DNA, 442 bp, Glycine max
gagaacctccaaagttaagttagggtttttgggggtgaagttgcgcttccggcacttccacttccacttcttcatcaccatgagcaggtcaggccaaccaccggatttgaagaagtacatggacaagaagcttcagattaaactgaatggaaatcgcatgattgttggcactctccgtggctttgaccagtttatgaatttagttgttgacaacactgtggaagtgaatggcaatgagaaaaatgacatagggatggtggtaatcagaggaaatagtgtggtcactgttgaggcgcttgaacccgtgaacagggcctggttactatttcttgtaaacatttacaagtagattttctggtttctgtgtttgaacaacgttacctattgagagtaacatgtaattgtgaatcttaagagtgtcatgttggctgctaatttgggg

SEQ ID NO: 6969 - DNA, 469 bp, Glycine max
ggaatctgaagtaagagggttgtcgacggtaagggatcgagcctcggaggagggaatcgcagcgaagtccactatgccgaagcaaattcacgagattaaggacttcctcctcactgctaggaggaaggatgcacgctctgtgaaaatcaagcggagcaaggatgtggtgaagttcaaggtccgttgctccaagtacctttacaccctctgtgtgtttgattctgagaaggctgataagttgaagcaatcacttcctccaggtttaagcgtgcaggatgtgtgattcttactgctgtatgaagatcaggtttttctctggattttggggattcatagttagtaaaatggttcagagaattttcgtatttgttgttacattcgggatcatgttagtattttgtttaagacggatccaacttgcttggggattatgtggctagataattaaacctcgttaatttgacgtcaa

SEQ ID NO: 6970 - DNA, 946 bp, Glycine max
gtttttgtagaaaaaaaacaactaatccataatgatcaatatcaaaagcatagctatagcaactggtggaagaaatgttcctaggttccaggagttatctccagaaaagttgggaaaggctggtatggttcgagaaaagtcctttggtacaacaaaagaccgaatgctgtacattgaacattgtgcaaattcaagggctgtaactatattcattcgtggaggtaacaaaatgatcattgaggagacaaagcgcagccttcatgatgccttgtgcgtggctaggaatcttatccggaacaactctattgtctatggtggtggttcagctgagatttcttgctctatagctgtggaggcagctgctgatagataccctggagtagaacagtatgcaattagagcatttggggatgctttggaggccatcccaatggcccttgctgaaaatagtggcctgcaaccaattgaaacattatctgctgttaagtctcagcaaataaaggataataaccctcactttggcattgattgtaatgatgttggcactaatgacatgcgtgagcaaaatgtctttgaaactttgatcggaaagcagcaacagctcctactcgctactcaagttgtcaagatgatactgaaaattgatgatgtcatctccccatctgagtactgatatttttaaactcagtcatggtctacgtcaagatgctgaattggtgatagtattttgtttcaattggtttgtttgtagtcagagtccgtacgctcacttgaaatgtaagattttggcccggtttgtatcggaattgggcgattgtttttgttttgtttaatgcaattgctatgcttttgatattgatcattacggattagttgtttttgttatagacgttttaatctttgtttgtaggcggaatgaaaatttgtcttagttcgtagtcttaac

SEQ ID NO: 6971 - DNA, 1036 bp, Glycine max
gcctcacttcctcccttcctcgcacgtgccgttctctctctcttttttgttttgcagcgaacgatggagccacgatccttgaccagatggacgtggacaaccaaatcgcgaagctgatggtggagctctcgcggagtcaggactacgaaatcggcgacggaaccaccggcgtcgtcgtcatggccggcgcgcttctcgagaaggccgagcgcctcctcgagcggggaattcaccccatcaggatcgccgagggttacgaaatggcgtccaggatcgccgtcgagcatctcgagcgcgtcgccaacaagttcgagttcgacgagtccaatttggagcccctcattcaaacttgcatgaccaccctctcctccaaaattgtgaatcggtgtaagcgtagcttggctgagattgctgttaaggctgttcttgctgttgctgatctggcgaggaaggatgttaatttggatctgattaaagtggaagggaaagttgggggtaaattggaggataccgagttgatctatggaattgttgtggacaaggatatgagtcatcctcaaatgcctaagcaaattgaggatgctaaaattgctatcctcacttgcccctttgagcctcccaagccaaagaccaagcataaggttgatattgatacagtggagaagtttcagacgttgaggttgcaggaacagaagtattttgatgacatggttcagaaatgcaaggatgtgggtgcaacccttgtcatttgccaatggggttttgacgatgaagcaaatcatctcttaatgcacaggaacttgcccgctgtcagatgggttggtggtgtagagttggaattgatagctatagcaactggtggaagaattgttcctaggttccaggagttatctccagaaaagttgggaaaggctggtatggttcgagaaaagtcctttggtacaacaaaagaccgaatgctgtacattgaacattgtgcaaactcaagggctgtaactatattcattcgtggaggtaacaaaatgatcattgagga

SEQ ID NO: 6972 - DNA, 517 bp, Glycine max
ccctcgagccgaatcggctcgagaaggttgtggggttagggctttacagtgtttctcttccttcttcttcttcttcttcttcttcttcgttgaatcgcgattgttctgtgcgagagaaagaagagagagatcgaaaatggcgttggctttcgacgagttcggaaggccgttcataatcctgaaggagcaggagcagaagagcagactccgaggattggacgctcagaaagccaacatctccgccggcaaagccgtggctcgcatcctccgaacctccctcggccccaaaggcatggacaagatgctccagagccccgacggcgacgtcaccatcacgaacgatggagccacgatccttgaccagatggacgtggacaaccaaatcgcgaagctgatggtggagctctcgcggagtcaggactacgaaatcggcgacggaaccaccggcgtcgtcgtcatggccggcgcgcttctcgagaaggccgagcgcctcctcgagcggggaattcaccccatc

SEQ ID NO: 6973 - DNA, 614 bp, Glycine max
cttatctgatgaccatagtattatttttttcatacccctaattgggaatcttgattcatatttttgtgatcaagcctactcttgcacgctaactaacgccatattttcttcttttcttcttatcttattgttgcagactttcgggtcatcattgagcttgctgtagtgaggtgttcaatctgaaatttccttaaccaaattcatggcggaactgatagggcctcgcttgtacagctgctctaattgtaggaaccatgtctcactccatgatgatatcatttccaaggcttttcatggaagaaacggccgagcctttctgttttcccatgcaatgaatattgtcacagggccaaaagaagacagacatctcttgactggcctccacactgttgctgatgtttattgtggtgattgccgtgaagtgttgggttggaagtatgaaagagcttatgaagcatcccagaagtacaaggaaggaaagttcatacttgaaaagtcaaaaattgttaaggagaactggtagcattcctttctgctccccattctattcatgctttgtgattgtcatcttgtacaggaagttcttaccttcaaccatttgaaatttgtcattg

SEQ ID NO: 6974 - DNA, 503 bp, Glycine max
agacgacagaagggggatgcgacagtgaacttgatgaatgaaattggttttgtatttttattttattcttctttattcagaatattattatattatgcatacacttgtgcgccgaacatttctttttcttttaccttaatttattgttgcgaatctttgttttgggtcatcgtttgttggttgcagagcagcgaggtgtttagtgtgcaattgttgacaaattaatggcggaaattgtagggcctcgcttgtactgctgttgtaattgtagaaaccaagtctcccttcacgatgatataattgctaaaacctttcagggaagatatggccgaggttttctgttctcccatgcaatgaatattgtggtagggccaaaagaagacaggcacctcatgactggcctccacaccgttgctgatgtttattgtggtgactgccgtgaagtgttgggttggaaataaaaaagagcttatgaagcatcacagaagtacaaggaaggaaaa

SEQ ID NO: 6975 - DNA, 478 bp, Glycine max
gaaattggttttgtatttttattttattcttctttattcagaatattattatattatgcatacacttgtgcgccgaacatttctttttcttttaccttaatttattgttgcgaatctttgttttgggtcatcgtttgttggttgcaggtaaagaaatctcgttgctttcccactaacgccccactttgtttcttttggtgttgcagatctaaacctcttgtgtgctgttcgcactctagactaactgagattttagctttttattgtttttctttttcccttttccatttcagagcagcgaggtgtttagtgtgcaattgttgacaaattaatggcggaaattgtgggcctcgcttgtactgctgttgtaattgtagaaaccaagtctcccttcacgatgatataattgctaaaacctttcagggaagatatggccgaggttttctgttctcccatgcaatgaatattgtggtagggc

SEQ ID NO: 6976 - DNA, 727 bp, Glycine max
tttgtcttactctagggttacgccgtcgtcgctgtttgtgtgtgtatcaggtgcagctaccaacgatggtgaagggtcgtcaaggagagcgcgtcagactctacgtgaggggtacaatccttggatacaaaaggtccaagtccaaccagtacccaaacacatccctgatccaaattgagggagtgaacaccaaagaagaagtaggatggtatgctggcaagaaaatggcctatatctacaaggctaaggtgaaaaaggatggaagccattaccgctgcatatggggcaaggttacgaggcctcacggcaacagtggtgttgtccgtgcaaaattcaagtcaaaccttccacccagatcgatgggagctcgagtaagagtattcatgtatccaagtaatatatgagattcaggtgataagacgctcagaattcgcagcttaatagtaggcacaaggatttttgtttcagctttgataattttgttgtctgtcaactttttgagaattttccttacggtttagacgttcatttgaacgaatgtttttctccgttattatagctattgtctatgaagattatatattcattactatgaagcgtgtggatttggctcgagctagacactccctccgtgtcatggagccccaaaccaagtaccccttacaaagcagcagcgcggccaacgttgccgccaccggtggcggcaaaaaaaccatcgaggaaatgt

SEQ ID NO: 6977 - DNA, 707 bp, Glycine max
gacccacgcgtccaccacgccttcgttacggttccaaaaaaacaacaaaagggagggttacacgccgtcgtcgctgtttttgtgtgtcgcttcttcgtaggtgcagctgcaatggtgaagggacgccaaggagaacgtgtcagactctacgtgaggggtacaatccttggatacaaaaggtccaagtcaaaccagtatccaaatacatccctgatccaaattgagggtgtgaatgccaaagaagaagtagcatggtatgctggcaagaaaatggcctatatctacaaggctaaggtgaagaagaatggaagccattaccgctgcatatggggcaaggttacaaggcctcatggtaacagtggtattgtccgtgcaaaattcaagtcgaaccttccacccaaatcaatgggagcccgagtaagagtattcatgtatccaagcaacatatgagattcaggtgataaaacgctcagtagaagtcccagcggatttggaggcacaaggattcttgtttcattttctataatcgtgttgtcgtctgtcaacttttgagaatctttcttactgtttagacgttcatgggacagaatggttttctcagttatcctggccattggccatgaagattatatattcggtacctttaagtaaaaaaaaaaaaaaaaaataaaaaagcggcccgctctagagatccagctatacgtacg

SEQ ID NO: 6978 - DNA, 745 bp, Glycine max
  unsure (1)..(745): unsure at all n locations
ccgggccgacccacgattcaacgggcgcgagaagacgacagaaggggagggttttgcgctgttgttgctgctcatcctccgtaacctccgagctctgcaccgaagaacgaagccatggggaagacacatggaatgggatctgctcgcaagctcaagtcccaccgcaggaggcaaaggtgggctgacaagtcatacaagaaatcacatcttggaaatgaatggaagaaaccttttgctggttcatcccatgccaagggaattgtccttgaaaagataggtattgaggctaagcagcccaactctgccattcgtaagtgtgccagggttcaacttatcaagaatgggaagaagattgccgcttttgtccctaatgacggttgcttgaactacattgaagagaatgacgaagtcttgattgctggatttggacgaaaaggtcatgctgtgggagatattcctggtgtcaggtttaaggtcgtgaaggtctctggtgtctctcttttggctctcttcaaggagaagaaggagaagccaaggtcttaaatttgtggagtacttgtgtttgttttcaatagtttctctcaagtattatgaattttgtttttaggtgaacgggttttatgaacaattttctatcttttctagttattttactgaacttcatttaacatttcaagtaacatatctcggcttgcaaagaaaaaaaaaaaaaaaaaaaaaaaaaaccnnagcggccgctctagag

SEQ ID NO: 6979 - DNA, 767 bp, Glycine max
ataaacaccactacactccttttttagggttagggtattgcactgcggctgctacttcggctccatcttcttcgatctctcaaactctatcggcgcagaaccaatcctatatcactatggggaagacacatggaatgggagctgcccgcaagctgaagtctcaccgtaggagacaaaggtgggctgacaagtcatacaaaaagtctcatcttggaaatgaatggaagaagccttttgctggttcatcccatgcaaagggtattgttcttgaaaagataggtattgaggctaagcagcccaactctgccattcgaaaatgtgccagggttcaactcatcaaaaatgggaagaagattgctgcatttgtgccaaatgacggttgcttaaattatattgaagagaatgatgaagtcttgatagctggatttggacgaaaaggtcatgccgtgggtgatattcctggagtcagattcaaggtcgtgaaggtttctggtgtgtctctcctggctcctcttcaaggagaagaaagagaagcctaggtctttagtcttgtgggtcgtgtcctctctctagtctctccaaaaaattattatgaattttgcttcttgagactggatgagttctctggacaattttgtatctctctggtagcaatttttctgaactaaatttggttcatatctcatacttgggctccatttttatagagaatgctttgtgtgaagttcggtcaaaaaaaaaaaaaaaaaaactcgagactagctggt

SEQ ID NO: 6980 - DNA, 562 bp, Glycine max
gccgcttttgtccctaatgacggttgcttgaactacattgaagagaatgacgaaggtggggtgacaagtcatacaagaaatcacatcttggaaatgaatggaagaaaccttttgctggttcatcccatgccaagggaattgtccttcaaaagataggtattgcggctaagcagcccaactacggccattcgtaagtgtgccagggttcaccttatcaagaatcggatcaagattgccgcttttgtcccgaatcatggttgcttgagccccattctacacaatgacgaagtcctgactcctcgatttggacgagacggtcatgctttgggacatattcctggtgtcagatttaaggttgtgaaggcatcaggagactctcatcaggctcttctcaaggagaataaggagaagccagggtcttacatctgcgacatgcttcgtaagttggatgtccataggtactctgaagcatgaccaactttgttcttgggcgcatgggttgtatgaacacccttgtatctttgttcgttattttcctgaacttcatttagcttttctagtg

SEQ ID NO: 6981 - DNA, 461 bp, Glycine max
gaagtattgcatcattacatgaaaatatttatgacaactactaaaatctacgttttcgtgtaacttggggtgtggcccatggttgtttaggacgaagtcttgattgctggatttggacgaaaaggtcatgctgtgggagatattcctggtgtcaggtttaaggtcgtgaaggtctctggtgtctctcttttggctctcttcaaggagaagaaggagaagccaaggtcttaaatttgtggagctacttgtgtttgctttcaatagtttctctcaagtattatgaattttgctcttaggtgaacgggtcttatgaacaattttctatcttttctagctattttactgaacttcattgaacatttcaagtaacatatcttcggcttgcctcgcctatgcttcttcccctttctctggcttcttgcgattgtttttttcattctcttgctgtaaactttcacgga

SEQ ID NO: 6982 - DNA, 687 bp, Glycine max
cgaaagggggccaagtatcattccaccgttaacacattacacaactttaccatctccatctcctctgtgttatattttgtcctcttttattctcatctgatcacacacactctgtcacgcacccaccattctactacactcctctctctcactcactcacactctcttctgtcatagctgtaccacgtttttcttctccatctcagcctctgtcccaacaccattctcatggctgctctagctctagcactgcttcttctggctttcactggcacttcaagtgctacatggtgcgtttgcaaggatggaagcgacgcgatcctgcagaaaaccttggactatgcttgtggagctggtgctgactgtaatcctctccaccaaaacgggccttgtttccagcccaacaccgttagggcccactgtaactacgccgtgaacagctacttccaaaagaagggtcaagctcaagggtcctgcgactttgcgggaacagccactgttactgcatctgaccccagctctagcggtttgtgtctacccttctagcgtcagcgctgcaggcactggtacaactcctgtgactactacaccaacaatgggcactactcctacaactggaactccatcaacaagcaccggcacgggcaccggcaccggcacaggcaccactccatacagcacaacacc

SEQ ID NO: 6983 - DNA, 312 bp, Glycine max
ctctcatctgatcacacacactctgtcacgcacccaacattctactacactcctctgtctcactctcactctctgctccgccgtgatagctgtaccacgtgtcttctctccatctcgaaacaccatctctgcctcagtcccaacccatcaccaattctcatggctgctctagctctagcacttcttcttctggccttcaccggcacttcaagtgctacatggtgcgtttgcaaggatggaagcgacgcgatcctgcagaagacgttagactatgcttgtggagctggtgctgactgtatacctcttcaccta

SEQ ID NO: 6984 - DNA, 540 bp, Glycine max
ggcgtgaggagtgaggtgctccgggtgagtttatcatatgccgttgataagaggagagagagagattgaccgtttgttaatcttatcttttcttatcccaaacaaactgaaactcaactcctgaaaggcaagagtgagagagaaatggagaatgcggaggagatgatgcagcaaaacgacgaggttttgtcggttgaacttccagctccttccggttggaataaactgtttttccctaagaaactgggaacaccaagaaaaagtgagattgtattcattgctccaactggggaggagatcagtaccaaaaaacaattggagcagtacctaaaggcacatcctggcaatcctgtcatttcagagtttgactggggaactggtgagacccctaggcgatcagcaaggatcagtgagaaggtcaagtcaactccaccagcagatagtgatactccaaagaaacgagctcggaaatcatcaggatcaaagaaggataacaaagaaactgaatctgcatcagaggaaggcaaggcaaagtctgat

SEQ ID NO: 6985 - DNA, 1648 bp, Glycine max
tactcgagccgaatcggctcgagcggctcagtgacacattcagctgcacaaagaatcccaaagtagagaaacagcacactctcacctcactcacttgtccttgttatatttgttttatatcttgtcacaatctgtgactgttcgagttatccgaggcccctcttttatatggtcgttgataaaatggcttcgacccttttaacaaagatgcttttgggtcaccgattgatacacccttcttcgttcctcactcaccagccacagattctctcttctctattcagtaaacggctgttttgtatacgagctgtcccggtctcagcctctacatcccaaaacatcaaaacaactggttgggctccttgtatggcttcttcctcagttggtagaagagctacatattcaacacaatctgtatcgacaaatgagccagttgtatctgtagattggctttatgataacctgaaggagccagatatcaaggtactagatgcttcgtggtacatgccggatgagcagaggaatccaattcaagaatatcaggttgctcacattcctggtgcccttttctttgatgtagatggaatagcagatcggactacaaaattaccacacatgctgccatcagcggaagcgtttgctgctgctgtttctgctcttggcatagagaacaaagatgatttggttgtttatgatggaaaaggattatttagtgcagctcgtgtttggtggatgttccgagtatttgggcatgacagagtttgggtattagatggtggcctgccgagatggcgtgcatcaggttatgatgttgaatccagtgcttcaagtgatgctattcttaaagccagtgctgctactgaggctatagagaaagtatataagggacaaacagttggcccactcacatttcagactaaatttcagccacatcttgtttggaacattgatcaggtaaagaaaaatatagaggacaaaactcaccaacacatagatgctcgatcaaagcctagatttgatggaactgtacaagagcctcgaaagggaatcagaagtggtcatgtacctggtagcaaatgcatcccttttgcacagttgttagatagttcacagacattgttaccagcagatgagttgaagaagcgatttgaacaagaaggcatctctctggaaagcccagctgtgacttcatgtggaacaggcgtaactgcttgcattcttgcattgggtcttcatcgtcttagaaagtctgatgttgcagtttatgatggatcttggactgaatggggagcacaatcaaatacacctgttgacactttatgaattcaatacagctaaatttgcatgccaccaaaaagtatctgcaagtgaaggggctgttttcatttgtcaaacattttgaacacaccaatttttgtatgctttactgtttgttgttttggtttagttgtggttgagattcttgagaattgctaatatgttcaaatgttactaatattaaatcctatcatgtggcttataaatataatgataggattgttcaagaatgtctcatagaagtgggaaaaggttgggtttgttaaaaattacaaaataagatttaagatcatatatcacacaccttatgcaaattatttcttatctcgcg

SEQ ID NO: 6986 - DNA, 1093 bp, Glycine max
cctacgcgtccggattgacttcccaaagcagaagattgttgttgctggtgctggaagtgctggaattggggttcttaatgcagcgagaaaaacaatggcaaggatgttgggtaataatgaagtagcttttgagagcgcaaagagtcagttttgggttgttgatgcacagggattaatcacagaaggacgtgaaaatattgatccagatgcccttccttttgcaagaaatttgaaagaaatggatcgccaaggactgagggaaggagcaagcctcgtggaagtggtcaagcaagtgaagcctgacgttctcctaggattatcggctgttggaggattattctcaaaagaggtactagaggccctcaagggttcaacatcaaccagaccagccatatttgctatgtcaaatccaacaaagaatgctgaatgcaccgctgaagaagcattctccattttgggtgacaacattatttttgcaagtggaagtccattcagtaatgtggatcttggaaatggtcatattggccattgcaaccagggaaacaacatgtacctctttccaggcattggtctcggaactcttctttcaggcgctaggatcgtctctgatggcatgctgcaggctgcagctgagcgtctggctacatacatgagtgaagaggaggtactcaaaggaattattttcccttcaacatccagaattcgagatattacaaagcaggtagccacagctgttataaaagaagcagtggaggaggacctagctgaaggatatcatggaatggatgctcgggagctgcagaaactaagcgaggatgaaatcgcggaatatgtgcagaataacatgtggagtccagagtaccctacattagtttacaagaaagaatgagtaacctgcagggttgataactacaatttccctctcgatgcatgtttggttcgaccaggttgttcacagaatcctgtttactggattagatgatttaaattctcaaacattttttcttagcatatttctaaaagtctagcaaacttgtattttatgtacatgatgcttcttttaaataaaaatgaaaagccaagattagttttt

SEQ ID NO: 6987 - DNA, 1070 bp, Glycine max
ggtggataaaaagggtgggaatcggattaggttctgcacaggcaaaaaccctagccttcgaaaaccctaatcctgaggcactgtgatatggcaagagccgtttcctcttcctgcgcgcgcctcacaatgcgcctcttctccaccaccaccaccaccaccaccaccaccgctgcgttcgccgttacattacccaaaccctcgtcactctcagtctcaacgcgtcgattcctcttccctctctcccatgccatcgtccctccctccacccgcgtcgccggaatccggtgccgtgtcaaccgcgccggcgactcagcgtactcgccgctgaactcagcttcgtcatcgtcgtcgtcgttcagcgaccggcctcccacggagatggcgccgctctttcccggctgcgactacaaccactggctcatcgtcatggagaatcccggtggtgagggcgccaacaagcagcagatgatcgattgctacatccaaaccctagccaaggttctcggcagtgaggaggaagctaagaagaagatttacaatgtttcctgtgagaggtactttggattcggctgcgagattgatgaagaaacttctaataagctcgaagggttgcctggtgttctgtttgtgctgccggattcgtatgttgatcctgagaacaaggactatggtgctgaattatttgtgaatggagagatcgtccagagatcacctgaaagacagagaagggtggaaccacagccacaaaggcatcaggacagaccacgatacaatgatagaacaaggtatgtccggcgcagagaaaacatgcagtgaaggaccaatttgagatagggagagggatgtgatgtacatacactatggaagtactttgttacatgcactattttagtcttgcctttggagacattccatatatttccggtggggtaactcaaatgtttgttgtcaaacttctatggctgtatcagatggacacctcttcgttatcatttttactataaacataatgttggactcttttcacgtcattttttccccaacaaagttgccataggtgatttggttct

SEQ ID NO: 6988 - DNA, 529 bp, Glycine max
ccaaaacacagaaaggggttgataaaaagggtgggaatcggattaggttctgcgtgcacaggcgaaaaccctaatcctgaggcactgaaagtgtgatatggcaagagtcatttcctcttcctgcgcacgcctcgcaatgcgcctcttctccaccaccaccacagccaccgcgttcgccgtcactttacccaaaccctcatcactctccctctcatcgcgtcgattcctcttccctctctcccatgccatcgtccctccctccacccgcgtcgccggaatccggtgccgcgttaaccgcgccggagactcggcgtactcaccgctgaactcggggtcgtcgtcttcgtcgttcagcgaccgcccccccacggagatggcgccgctcttccccggctgcgactacaaccactggctcatcgtcatggagaatcccggtggtgagggcgccaacaagcagcagatgatcgattgctacatccaaaccctagccaaggttctctgcagtgaggagggagctaagaagaggatt

SEQ ID NO: 6989 - DNA, 798 bp, Glycine max
gcttccacgcgtacacccacgcatttttacggtttctaaaagacgacctaatggggacagcatatatatcaataatctattttatactatacctacattttgataattttctttgtagttgatagccatggctacccgtggaaagcttgaggttgacattgatctcaagtccaacgcagacaagtactggcaaacccttaggaattctactgaaatattccctaaggccttcccacatgattacaaaagcattgaggttcttgagggtgatggcaagtctcctggttctatccgccacataagttatggtgaaggttcaccacttgtgaaatcatcctttgagaagattgaggctgttgatgaggaaaagaaggtagtgtcgtacactatcattgatggggaactcctccagcactacaaaacattcaagggagacatttctgtgactccagttggcgatggatgcgaggtgaagtggagtgctgtgtacgaaaaggttagccatgatatttctgatccaacccttgtcaaagattttgcagtcaagaatttcctagaggtcgatgcctatgttcaagccaacgcatagagaggttctattctatgcatgcctcttaattaataatggctaatgttttaatctgtgcatgtattatggactattattaaataatatggttgtacttgtaccataccttatctaatataatgttgcagtatcaggtgtctttcgtccttgcttgttgttggactaattaaagagtcatggtgttctatatatgtggtagttctggtcgg

SEQ ID NO: 6990 - DNA, 394 bp, Glycine max
ccctaatagggtatgcttacacccttggtggctgcttggtgagttggaaggcaacacttcaaccttctgttgctctctcaactattgaggctaaatatatggctcttattgaagctgcaaaggaaggaatttggctgagaggtctgataaatgatctcgaaattaatcaagaatatgctaacatctactgtgacagccttagtgctatatgcttggccaaggattaggttcatcatgatagaaccaagcatatagatgttagatatcacttcattcggtcagaaagaagaatcaaagttcataagattatcactctgcacaatcctgccaatatgtttaaaagccagtttccaaagagcaagtttgatcactgcttaagcttgctcaatgtaca

SEQ ID NO: 6991 - DNA, 458 bp, Glycine max
gattttcaggcagtcttttggggtttaaccgtgtacctctcacttcttctacgaccatcatcttccttccttccttcaattgttctaactcttagcagccatggcgagcaccaaagttcagagggttatgactcagcccattaacttgattttcaggtttcttcagagcaaagcacgcattcagatttggctatttgagcaaaaggatttgaggattgaaggccgaatcattggttttgatgaatacatgaatttggttcttgatgatgctgaagaagtgaacatcaagaagaagagcagaaaaacattagggaggatccttcttaaaggagataacataactttaatgatgaacacggggaaatgatgaacactccttgacagttgttaactatgttcctatcaaacaagaaggcataatgatcttttccttgggtttggattcatctaacaaactc

SEQ ID NO: 6992 - DNA, 404 bp, Glycine max
ggttagttaacagagagtgagagagagggcaaaaccctagctttggagtcttccctcccatctcccactatcttgcaatctctgcagccatggcgagtaccaaagttcagagggttatgacccaacctattaacttgattttcaggtttcttcagagcaaagcgcgcattcagatttggctttttgagcagaaggatttgaggattgaaggccgaatcatcggttttgatgaatacatgaatttggttcttgatgatgctgaagaagtgaacgtcaagaagaaaagcagaaagacattagggaggatccttcttaaaggagacaacataaccttgatgatgaacacggggaaatgattaacactctggcacagttgtaaactccgttcctattcaacaagaaag

SEQ ID NO: 6993 - DNA, 359 bp, Glycine max
tggaggaaattacacattcacttcagtcagtctttacgttttagctgtgtacctctgctctcacttccttccttccttccttcaattgttctaactcttagcagccatggcgagcaccaaagttcagagggttatgactcagcccattaacttgattttcaggtttcttcagagcaaagcacgcattcagatttggctatttgagcaaaaggatttgaggattgaaggcagaatcattggttttgatgaatacatgaatttggttcttgatgatgctgaagaagtgagcatcaagaagaagagcagaaagacattagggaggatccttcttaaaggagataacataactttaatgatga

SEQ ID NO: 6994 - DNA, 653 bp, Glycine max
ccgatagcaatttcggacctctctcactctctcgcaaacgctagcgacacatccctcgttcggtctcgcccccacggatcaagctgagaaacgcaatgagttcgtcgaacctcagagatcttcaacgcgaattggagaacaaagccaatgatctcagcaagcttcaaaaggaaattgcgaagaatcaccaaatgagaaagaaatacacggtccagcttggcgagaacgagctcgtccttaaggaactggatttattgaaagacgacgcaaatgtttataagttgattgggccagtacttgttaagcaagatttggccgaggccaatgcaaatgtccgcaagagaatcgaatacatctcagctgaattgaagcgtctggatgccactgttcaagatttggaagagaagcaaaatagcaagaaagatacgatactaaaattgcaacaaaggattcaatcatttcaggctgggaaaggcaaggcgtagttttccctcacatattgttccaggcattgtgatttaaccgtgctactgctaaggttggatgtggatttgaaatttgtgcctctttgttttggactgaagttgactcttaggaatctgttacgggaaacagcttggaacttagtctgctattaatatattccctccgtc

SEQ ID NO: 6995 - DNA, 871 bp, Glycine max
ggttttagaattagggcttttttcagttttcctcttctgaatccaccgccactgcagcgtggacggaatcagagtgcagccatagcagcagcagcagcagcagcagcagcagtccttgaagtgctgctctagtttgaggcacaatgagattggagaaatgctggttttgctcttcaaccatataccctggacatggaatccagtttgttcgtaatgatgcaaagatttttcggttttgtagatctaaatgccacaagaactttaaaatgaagagaaatcctcgtaaggtaaaatggaccaaggcatatcgtcgagtgcatggaaaggatatgactcaggactcaacctttgagtttgagagaaaacgaaacaggcctgaaagatatgacaggaatcttgcggagaatgtcctcaaggccattcctaagattgataagatcagagtctcgagggaggagagacaccataagaacaggatgaaaggcaaaaaggaaaaattgctgaaggaggcagtgaaggagttggagcagggcatcagtttggtcaaagctccttctgtgcttcaacaggatccatctctcactttaccaaagatcaaagtcaaggtttcccaacagcaatcagaggagaatcatgccatggaagagtaattctaacaatgctgcacttaatttttgctattttaatatttgttgctaaattagttgcctgtaaggtccagtttaccagtttcgttgtgatcattagtgtgaatgatgtgattctcaaacaagatttcaaacatttgatgtatttgtctcttgaaactatggttctctgagatagtcaactattataaaggaaatcggaaagttgttgctatagcctagaa

SEQ ID NO: 6996 - DNA, 400 bp, Glycine max
gaagcaacaccccttctatcagtgtgttttcttttccctaccaacttcttctactcttccccacacgatactactacacaaatggagaaccaactcgaactgaaccctaactcgctgaccgaactcagtgagtcctcggcgccgtccgacgacgacgaaccggctctgagctcccacaccctcgccgccctcaaagaattcctcgccgagcagcaacgcggctccgacgccggcggagagtccgaggtttctctggtgtctgaggattggaggctgagccagttctggtacagccccgaaaccgccacaaccgtcgccgaagaagttctcgctctgtgcggcggcgccgtccacgctcgcgtcgcctgcatcgcttgccctactctctatgcttatctca

SEQ ID NO: 6997 - DNA, 696 bp, Glycine max
  unsure (1)..(696): unsure at all n locations
gtaacggtctagaattcccgggccgacccacgcgtcaagttcgaagtcgccgtttgttttcttttcgttcgcatcttctctctctctcagaaagatgaaggtggtcgccgcgtatttgctcgccgtcctcggtggcaacaacagcccctccgccgatgtcatcaaggaaatccttggctccgttggagtagaagcagatgaagataggattgaatcgtttttgtctgaagttaagggtaaggatatagttgagcttattgctgccggtagggaaaagttggccacggttccttctggtggtggtggtgccgttgccgtcgccgcagctcctgggggaggtgctgctgctgctgctcctgctgctgaggcaaagaaggaggaaaaggtggaggagaaagaggaatctgatgatgatatgggtttcagtctcttcgattaattggtgtagtctattcagcttttttgttcagaacatattcttaattaacactagagcatgagtttgtcaaagttttgttctaaggagtaatttactgtgttttttaatatcaatgaccaaccaagttggatgaatttggtttgatattttagtgttttgatgttatggaatttcattttggttaaattcaagccaggcttttccctggttttggnnnnaaaaaaaaaaaaaaaaaaaaaaagcgggcgcgctatagg

SEQ ID NO: 6998 - DNA, 502 bp, Glycine max
cccacgcgttcgcctcaaagtcagcactacaatagcataacccttcgaagtcgtcgtttatctctcctcgttcgcatcttcaccctttccctgtctctcagaaagatgaaggtggtcgctgcgtatctgctcgccgtcctcggtggcaacaacaccccctccgccgatgacatcaaggaaatcctcggctccgttggaatagaggcagatgaagataggattgaatcgttcttgtctgaagttaagggtaaggatatagttgagctaattgctgccggtaaggaaaagctggcctcggtgccttctggtggcggtggtgccgttgccgtcgccgctgctcctggtggaggtggcggtggtgctgctccggctgctgaggtaaagaaagaggaaaaggtggaggagaaagaggaatctgatgatgatatgggtttcagtctcttcgattaattggtgtagtctattcagctttttttagtccagaacatattctcaattaaca

SEQ ID NO: 6999 - DNA, 260 bp, Glycine max
ctttcagcaaaaccaaaccctagcagcactacttcaaaaagaacagcgccatagcataacccttcgaagtcgccgtttgttttcttttcgttcgcatcttctctctctctcagaaagatgaaggtggtcgccgcgtatttgctcgccgtcctcggtggcaacaacagcccctccgccgatgtcatcaaggaaatccttggctccgttggagtagaagcagatgaagataggattgaatcgtttttgtctgaagttaaggg

SEQ ID NO: 7000 - DNA, 333 bp, Glycine max
tttcttttcgttcgcatcttctctctctctcaggttctctcctcttcttcttcttcttctctctctgtgttcttacctttttacaagtgctccctctctcagtgtgtgattccgcagaaagatgaaggtggtcgccgcgtatttgctcgccgtcctcggtggcaacaacagcccctccgccgatgtcatcaaggaaatccttggctccgttggagtagaagcagatgaagataggattgaatcgtttttgtctgaagttaagggtaaggatatagttgagcttattgctgccggtagggaaaagttggccacggttccttctggtggtggtgg

SEQ ID NO: 7001 - DNA, 1889 bp, Glycine max
ggtcgcgtgataccatttaatttcacagcgattaattatttatagttaagtgtggagtgcagtgcaggtcaaggcctgagattcggttctttacttgttgggttgttctgatcttctctcatagcaatcaaatcacactcccatcttctcatctcgtaaaccctaaaccccgttttcagtgacatcgagatcgatcgaacatggatgaggagtacgatgtgatcgtgttgggcacgggtctcaaggagtgcattctcagcggtcttctctccgtcgatggcctcaaggttctgcacatggacaggaacgactattacggaggagaatccacttcgctcaatcttattcagctttggaagagattcaggggagatgacaagcctcctccacatttgggcgctagcagggactacaacatcgatatgaaccccaagtttattatggctaatggcaatttggtgcgggttctcatacataccgatgttactaagtatctctatttcaaagctgtggatgggagctatgtgtttaataaaggaaaggttcataaggtgcctgcaaacgacatggaggccttgaagtccccacttatggggctatttgaaaaacgccgggcacgcaagtttttcatttatgtgcaaaactacaacgagagcgatcccaagacccacgaggggatggacttgacaagagtgtctactaaagagttgatagcaaaatacggccttgatgataacactatagacttcattggtcatgctttggcgcttcatagcgatgatcgctacttggctgagccagcactggacaccgtgaagagaatgaagttatatgcagagtctcttgcacgctttcaaggagggtcaccttacatatatcctttgtatggtttaggagagcttccccaggcatttgcacggcttagtgctgtttatggtgggacatatatgttgaataagcctgagtgcaaggtagaatttgatgaggaaggaaaggttgttggtgtcacatctgaaggggaaactgcaaagtgcaaaaaagttgtttgtgatccatcatatttgcccggcaaggtgaggaaggttggtagggttgcaagggcgatagccatcatgagccacccaatccccagcactgatgattcccattcagtgcaaattattttaccacagaaacagttgggtcggaagtcagacatgtacctattttgttgttcgtatactcacaatgttgctccaaagggaaaatttattgcatttgtatcaaccgaggcagagacagatcagccagcaattgaactaaaacctggaattgaccttctaggacctgttgatgagatattttttgatatctatgacagatatgaaccggtcaatgaacccactttggacaactgctttgtatcaacaagttatgatgctactactcactttgagtcgaccgtggatgatgttctcaacatgtatacattgataactggaaaggttattgacctgagtgtggatcttagtgctgctagtgctgcagaagagtaaagaaaactcggtgatgtccttccttcatgatttgttgctgatgggatccgtaatggacttgataatgaatgttattaacgtttataataaattgatataaaatatttctttttttttttaaacaagatttgtgtggctggggaactttttcccgtccagaagctctgttgtgcgtaacatttttatatgtagacatacattgccttctgatgcagtggttttagtttggtaatgtagtgttattttcatattgttaaatgttaattgcacgtctctccaaccatttcatacccctggcaatttgtgtttggatacttttatctttcattagttgaaactcatgtgggttgtatt

SEQ ID NO: 7002 - DNA, 858 bp, Glycine max
cacagaaacagttgggtcggaagtcagagatgtacctgtggtgaaataatttgcagtgaatgggaatcatcagtgctggggcttgccccgcccctgatgatatcccattcggtgcaaattattttaccacagaaacagttgggtcggaagtcagacatgtacctatgttgttgttcgtatactcacaatgttgctccaaagggaaaatttattgcatttgtatcaaccgaggcagagacagatcagccggcaattgaactgaaacctggaattgaccttctaggacctgttgatgagatattttttgatatctatgacagatatgaaccagtcaacgaacccactttggacaactgctttatatcaacaagttatgatgctactactcactttgagtcgactgtggatgacgttctcaacatgtatacattgataactggaaaggttattgacctcagtgtggatcttagtgctgctagtgctgcagaagagtaaagaaaactcggtgatgatctgttgctgatgggttccgtgatgatggacttgacaacgaatgttattaacgttttataataaatattttctttttttaaaacaagatttgtgtggctggggaactttttcccgtccagaagctctgttgtgtgttcacatacattgccttctgcagtggttttagtttggtaatgtagtgttattttcatattgttaaatgttaattgcacgtctctccaaccatttcatacccctggcaatttgtgtttggatacttttatctttcattagttgaaactcatgtgggttgtattaatcttcattttaattcaaatataaaaaaaattataaataacaaggctt

SEQ ID NO: 7003 - DNA, 525 bp, Glycine max
ggccttcttaggcactaaaatagagactgtatttatcctgagggaaattgaggggcagggtgataataacagtaacagggatgagtgatatcatttcatttcagagggattaattattgttttatttttaagtgtggagtgctgtgcaggtcaaggcccttttacttgttcgtccggttgttcccatcttctctctcgtaccaatcaaatcacacttttgtgttgtgttgggaaaccctaaaccccgttttcggtgagatcgagatcgatcgaacatggatgaggagtacgatgtgatcgtgttgggcacgggtctcaaggagtgcattctcagcggtcttctctccgtcgatggcctcaaggttctgcatatggataggaacgactattacggaggagaatccacttcgctcaatcttattcagctttggaagagattcaggggagatgacaagcctcctccacatttgggcgctagcagggactacaacatcgatatgaaccccaagtttattatggctaatg

SEQ ID NO: 7004 - DNA, 477 bp, Glycine max
gaatccgaaacagagagagcgaggacaccatggccaacaacaacgaagaggaagaggaagcagtggcgccaatggtgaagttgggttcttacggtggtgaggttcggttggtggttggtggggaggaatccgctgcggaggagaccatgctgctttggggtattcagcagcccacactttccaaacccaatgccttcgtctctcaagcttccttgcaactctccctcgactcttgtggccactctctctccattcttcaatccccttcctcattgggaacgcctggagtaactggagcagtgatgtgggacagtggagttgtactgggaaagtttctagagcatgctgttgagtcacagaatgcttgtccttcagggaaagaagattgttgaattgcgttctggttgtggattggttggcccttttgggtagtgaggtcattgtcactgatctgcgagataggctgaggctactgag

SEQ ID NO: 7005 - DNA, 443 bp, Glycine max
gcttaagccttttaaaaacctgttatggcctatttcttgaaggtgtacaatcacaaaaaaaaaatcgtctccttttctctctgcatttgagcaaagccaaaccacgtctgagtgagtgagttccgttggatggcgacgagcaccaccagcagcggtggcggcggcaccggcacccaaacattcaagccgtaccgtcacctgaaaaccctaaaagaccacgagaacgcggtatcgtgcgtgaagttctcgaacgacggaaccctcctagcctcggcctccctggacaaaaccctaatcatatggtcctccgccaccctcaccctctgccaccgcctcgtgggccactccgagggcatctccgacctggcctggtcctccgactcccactacatctgctccgcctccgacgaccacacccttcgcatctgggacgccaccggcgg

SEQ ID NO: 7006 - DNA, 394 bp, Glycine max
gaatgtaatacatagaatgggataaagcatagttattagaggtcggttctcagttgaagcgttaccctcgctggcgccgcatctctccgcagcaaagcgccgcacctcaccgcagcaacgcgccgcacctcactgcagcagctccgtcgccggcaacgccagtgggcctccagaaactgcagcgtttgggacgacggaaacaggctcgagctttgaaactttctgtgctttgctctgtttgaaagttctcgaacccctctgttgaacccttatcgaaactccgaatcctaattagttatgaatatttttaagcaaattagcagcaatgggtaatcccaaaaatccctggcagatagtgcaccctactaggttactttgctacagcgcaagctcc

SEQ ID NO: 7007 - DNA, 404 bp, Glycine max
gacagacacaatcacaaaccacatcattttcgccactctctctctctctctctgatatccaaataatggtatcaaaggtgaagagaagcccagtgaagtccatcaaggacctccgcaacaacaacaaccgtcgctggcgacggaaaacccccataaaaaatgtggtggcggcttcctccgccgcgctggccaccatccgccgccgtatcacgaaactcttctcgaagatcgcgcgcctcagcaccagcgcccacaagaaaaaagcaacctcctacaaaatcctcaagaagactacaacaatcgactgagaactccaaaagattctcccaaacctctcgtgttccacgacaccaccgccaccaccaccaccccgctcctccctcagttgttctccgtccgaaaaa

SEQ ID NO: 7008 - DNA, 689 bp, Glycine max
tgctgatcgctacttaacacaaactagcaagtagcatcacgcatcatggtcatacattatacaaggcaacttctccgttaatttcctcacacatccctttctccctctttctctttctctttctctttctctccttccttttcatcactcacttttcactcccaagtcccaaccacaacccctcctctcctctcctcgatcagtgccataaatcaattctttctttctatctatctctgtccacaattctctttatgtcaacaaacctaaaactaaaacctgcttgagagagtagggaattaattaattaattttctttcatttcatcttttaagttgatctgtgaaaatggcttcatcttcctccaacggcagttccagcggaagcaagagttgggacatcgacggcgacctcgccggtttcggctacaaagtccgttcatcggagctgcaacacgtggcagaaaacatggagcgtttagagaacgtgatggacattgtgaactcatcaaccaacaataacatatctcagctggcctccgatacagtcttctacaacccctccgacataggttcctgggtcgacacgcttctctccgagttcgaccaaacggcgtcgttgccctacgatttctcggattttctcgatctcgacacggatcagaatcaaaaccacaaaccaacgctggt

SEQ ID NO: 7009 - DNA, 1157 bp, Glycine max
atttttccctagtaattttccccttgtgcggctattccaccccacgacgaacctgcgcatctctctctctctcgcgcgcgccgcttttctctcagccagccctgcagctctttttctccgcccacaatgggtaaagctaaaaagggaccaaagtttgctgttatgaagaagattgtcacttccaaagcaatcaaaagctacaaagaagaggttttgaacccagaaaagaagaatcttatgaaggaaaagttacccagaaatgttccaactcattcttcagcgcttttctttcaatacaacactgcactgggacccccttatcgtgttttggtggacaccaacttcatcaatttctcgatccaaaataaattggatctggagaaagggatgatggactgcttatatgcaaaatgcaccccttgtattacggactgtgtgatggcagaactcgagaagttaggccaaaaatatcgtgtagctctaaggattgccaaggatcctcgatttgagagaatactatgtactcataaagggacctatgctgatgactgccttgttgagagagttactcagcacaagtgctacattgttgcaacatgtgatcgggacttgaagaggagaattcggaagattcccggtgttccaataatgtacatcaccaaacgcaagtactcgattgagcgattgcctgaagcaacaattggtggagctccaagaatttgatgcagtaaaactaaaacaggcagagctggctataacaataatattgatactaatttcttggtcgtgaagtatgaaatcctgctacagtacctagcatattcggtcttttgctggctgggctgaattctatcggaagcttgagacttgaacaaaagcagcacttcaatggtttatacctgaaattttcttagtgtaagttggtagatttaggttctgtcaaattttgttttcctcatattgcctatctaatgtatcatggtaaaccttggagagtgtctgaactatgatgacattttcatagttctgggcttgtggcaattaactctcttgaaacgatactttttttgttgcaagagaaaaaccttattttccttgaatctaaattttattagtttcaagcttgacatgccaaaaaaaaaaaaaaaggcgactca

SEQ ID NO: 7010 - DNA, 458 bp, Glycine max
atttttccctagtaattttccccttgtgcggctattccaccccacgacgaacctgcgcatctctctctctctcgcgcgcgccgcttttctctcagccagccctgcagggttttgcataatttagctctttttctccgcccacaatgggtaaagctaaaaagggaccaaagtttgctgttatgaagaagattgtcacttccaaagcaatcaaaagctacaaagaagaggttttgaacccagaaaagaagaatcttatgaaggaaaagttacccagaaatgttccaactcattcttcagcgctttgctttcaatacatcactgcactgggacccccttatcgtgttctggtggacaccaacttcatcaaatttcccgatccacattaaattggatctggagatacggatgatggactgcttatatgtcgaatgcacctcctgtattacggacttggtgat

SEQ ID NO: 7011 - DNA, 747 bp, Glycine max
aggggtgtagaggcagctaaaaacaaagagtgtgatagtaagagtagtagaagagcggtctggtccaagtgctgcaatatgcaaggcaaagaaatggaagggttgtcgtcttcatcggcgatcgcgcagaaaacatgggaactcgagaacaacatcatcccgatggacactccgggcggcgccgctatctcctccaccgctaccaccacgaccaacgccgacgactcgatcttctactacgacgaggcggggcagaacgagttccagcgcgacaagccctgggccaacgacccccactacttcaagcgcgtgaagatctccgcactcgcgctcctcaagatggtcgtccacgcgcgctccggcggcaccatcgaggtcatgggcctcatgcagggcaagaccgacgccgacgccatcatcgtcatggacgccttcgccctcccagtcgaaggcaccgagactcgcgtcaatgcccaggccgatgcctacgagtacatggtcgattattcccagaccaacaaacaggctgggcggttggagaatgttgtgggatggtatcactctcatcctggttacggttgctggctgtcggggatcgatgtttcgacgcagatgctgaatcagcagtttcaagagccgtttctagcggttgtgattgacccgacgaggactgtttcggcggggaaggttgagattggggctttcaggacttatcctggaaggggtataaccctccggatgagccta

SEQ ID NO: 7012 - DNA, 1390 bp, Glycine max
gattcttcactgtcctctctcgccgccagatctcagacacacactctcactctctctccctcaccttccataatgcagctcctccggccactgctcgcggcggcgctgctcctcctcgccaccctctccgacgcgcacaacatcaccagcatcctcgcaaagcaccccgagctctccaccttcaaccactacctcaccctcacccacctcgcccccgaaatcaacggcaaaaccaccatcaccgtctgcgccgtcgacaacgccgccatgtcggaccttctctcgaagcacccctccatctacaccgtcaagaacgtcctctccctccacgtcctcctcgactacttcggcgccaagaagctccaccagatcaccaacggcaccgccctcgccgccaccatgtaccaagccaccggcaccgcccccggatccgccggcttcgtcaacatcaccgacctccacggcggaaaagtcgcattcgcccctgaaaacaacgacggcacactctcctcaacgttcgtcaaatcggtggaagaaatcccttacaacatctccgtaattcagatcagtaaggttctcccctctgccgcagcggaagcccctgcacccgcacccacccaacaaaacctcaccaacattatgtcaaaacacggttgcaaagtcttcgccgacactctctctgctcaacccgacgctctcaacaccttcaatgacaacctcgacggtggcttaaccgtcttttgccccctcgacgacgcgtttaaagcctttctccccaaattcaaaaacctaaccaaatccggtaaggccgcgcttctcgaattccacgctgttccggtttaccagtccaaagccactctcaaatccaacaacggacttcagaacactctcgccactgatggcgccaacaagtttgacttcaccgttcaaaacgacggtgaagatgttactctgaagacgaagcttacaactgccaagatcaccgacactttgattgatgaacagccgcttgcgatttttgctattaataaggtgcttcagcctaaggagttatttaagggtgaggcggaggctccggcgccggcgccggagccttctgccgccgacgctcctgcgccggcgaagaaggggaagaagaagaagaaggcggctgatgcgccggcggatgattctgatgctcctgctgattctcccgatgacgctgccgatgtgaccgccgatgatagtaacgacgccgttagacgtaacggcgggaggtacggtggtggtgttgttgccttggttttgagtttggtttttgggttaccgttaatgctttgatgtgagttaattaattaaaaaagggagttttagggtttagtttttgcaggggattcgaagtgatattcct

SEQ ID NO: 7013 - DNA, 434 bp, Glycine max
gcgagagcacgacagaagggggcgttagtttcgctaaaccctaaacctcacagcacacagagtttcgctttcggttagtttctccgccgtcgcagtagcactcacagcttcgctaggttaaatggcaatgcctgttaatgatgatacactggttgaggctgaaactgaagatcagagagaagaaatgtcatcatctgaatcagagcacgatgaagatgtgaaattaactgaaccatctaaaaatgcagtgtataacagagatgctctactagataaacttggagacatcagttggccagagaatgtggaatggatacacaaactctctgttgatgttgatcaagagcaagaaccacatgtcaatgatgacttggcacgaagaacttccgttttacacacaggcattggagggaactaaagatgcctttgagaaa

SEQ ID NO: 7014 - DNA, 1565 bp, Glycine max
ggtaaacaaaaaccatcagcaacataaaaaaaaaaaaatatagaaagaaaaatgatgctcggagaacaccatcgcgggaatccgacggtcctcgtgccaccgtggccagcccacgacgatccaacggccgagatgtactccgcgttcttaacaaacgacgtcaatgctggtgagtactctccgtactatcttcaagaagcactaacggcgctgcagcgttttctgccgtctaacgaaacggacgctgactcggacacctcggaggcgtcaacccgacgcggcggtggacgcgtactcgtgcgaccatttccgcatgtacgagttcaaggtccgtcgatgcgcacgtggcaggtcacacgactggacggagtgtccgtacgcgcatcccggcgagaaggctcgacgccgggacccgagaaagttccactactccggcgcggcgtgcccggagtttcgcaagggaaactgcaagaaaggcgacacgtgcgagttcgcgcacggcgttttcgagtgctggctccacccggcgcgctatcggactcagccttgcaaggacggcacgagttgccggcggcgggtgtgcttcttcgcgcacacgccggagcagctgcgcgtcttgccgatgcagagtccgcgtagcgcggcgaactcgtctgagtcctacgatggttcgccgatgagacagatgatgtctccggcggcgttcatgtcctctccggcggcttctctctctcctccggagtctccgccggtgtcgccgtcgatcaacgagatggtggcttctctgcggaatctgcagcttgggaaaatgaaatcgatgcctcaaagtagaaacgtttcggtcggatcaccgggttacggttcgccgagaggatcggtgctccgacccgggttttgcagtcttccaacaacgcccactcagcaaccggttcggtcaggggtgaactgtttcgatttttgggatcagagttgtgaggaggaaccagttatggagagggtggagtcagggaggggtataagggctaagatgtttgagaagctgagcaaggagaattctttggaagggtcgggtacgggttcgggtcaaggaagtggtgctccggatgttgggtgggtctcggagctggttaactgatattattattaatatttaacaatgcagatttattttgggagatgcgagtctgtgtaaatattttttattctatctcgtggtatgttatggtatggtatttgggtaaagactgaagagaagaagtgaaggatctcttttttggggagtttgtcttggaaattcatcaacatcgctctattgatttgggaaattgaaagtatccgaagccttttgtacagttagcttactattgttgttattacgaattactattattattatcatgtgctatgttacttaattaactctatcgtgtctgttattttcacttacttgctaatctcatctcattgatgtacaaatgtataaatatgtaggatccaagaggaatcttgttattcaaattatttatgttaatgtatatttttatcctaaaaaaaaaagcacaaaa

SEQ ID NO: 7015 - DNA, 807 bp, Glycine max
ggactcagccatgcaaggacggcacgagctgccggcggcgcgtgtgcttcttcgcgcacacgccggagcagctgcgcgtcctgccgatgcagagtccgcgtagcgtggcaaactcatcggagtcctacgacgggtctccgatgaggcaggtttcgttgtcgtcggcggcggcggcggcgttcatgtcttctccggcggcttctctctctccgccagagtcgccgccatcggtgaacgagatggtggcttctctgcgtaatttgcagcttgggaaaatgaaatcgatgcctcataatagaaacgtgtcggtcgggtcgccgaggggatcggtactccgaccgggttttttaagccttccaacaacgccaactcagcaaccggttcggtctggggtgaagtgttttgatgtttgggatgagagttttgaggaggaaccggttatggagagggtggagtcagggaggggaataagggctaagatgtttgagaagctcagcaaggagaattcactcgacgcctcggcttcgcctccggatcttgggtgggtctcggagcttgttaagtgagaagccagtccttgtaaatatggcatggctgaagagaagaagacaagaagacaagaatctcttttttgtatagttagcttactattattattatcatcatcatggttttaaacagcattcctcaacgcaatcaaggtatttggattcactgtaatacacaatctgtaattgaggctgcgtcagtcgcaattacctaccatttatataaaggttttcacccttgtgcgagtccgatcgcaat

SEQ ID NO: 7016 - DNA, 393 bp, Glycine max
gactgcacgtttttcgtcactcgttctctctcatacatgccggaatttcctctctcgttctctctccggagaatagaataaataccctaaaccttcgctttgctgccacacacatcagatccccactacaacttccaagttcaggaattatgtgtcactagcgatgtccgattccgttcccaaaacgcgaaaccgtccggggccgtggccgccggcgccggctccggacgccaaggcaatgccgcctgcttcctgggctaagaaaacaggcttcaagcccaagttctccggcgaggccaatgccagcgactctggccagataagcctgcagcccaagcctaaggagcacgacgctaacgtggattccgaaccgggccggcctggggccccgga

SEQ ID NO: 7017 - DNA, 1095 bp, Glycine max
gtttgatccataaagccagtggtgtcacttcccattcaaaagcgccgaaagaaagaaacctaacagcgccatagcgttctctaagctatcgtgcgaggtccctcgacctccgcacaaccccagcaccaaggggctgtgcctgtcgccgtcgtcttccacgctcatgtcggaacccgacatccacgcgccgccgttcctgctccagcgcccgccgctcctgcagtcggcctcgccactcttcaagcagcgatcgtggtcgccggacgccttccgcgatgaggcgtggctccggcgcaaggggaactgcaagaaccgccgcagtaagagcgtcaccgatgaggacgtggacgagctcaaggcctgcatcgagttgggcttcggattcgattcctcccccgagaacgagctcgatcaacgcctctccgatactttgcccgctctcggcctctactacgccgtcaacaagcgctacaacaactccctcgtcaccaaaaccacgccgtcctcctcctccgccgcctccgattgcgacagcagtccttccccccacggcagtccccactccgccatcttcaccaccggtgataaccctcagacggtgaagacgaggctgaggcagtgggctcaggtagttgcttgtgcggtgcgtcaaagttcagatgtgtgattgggaagcaaatgaagaagcagggttgtcaaacgtaaaccataaaatagaagcaatgtgtgattggtattattataaatgacaacgattccccatcgaaccggaccaaaccgagagcggaccctagttaaccacccaattgtgacggaaccaaactagttagttaattagctatattacattacatgcggggctgtcggcagcgccttgttttgtactgtacttgtccaatgtgatgactaagccaaggtagatctgttctattatagtattatctgtcacatatatgatatatgctagacttacgtacaatttagttttatttgtgtgccgggtgtgtgacaggaagaaaaaaacaagtcaaaaggtgttctgctgcacttgaatccagtgctgtatctgtgtgtgctgcttttcttttctctttc

SEQ ID NO: 7018 - DNA, 409 bp, Glycine max
agtgggctcaggtagttgcttgtgcggtgcgacaaagttcagatgtgtgatgataataattaccgaatggcgaagcagggttgtaaaacctaaaccatacagtagacgcaatgtgtgatgattgatattataaatgacagcgatttcccaccgaaccagaccaaaccaaaccgagagtgaaccctagttaaccacccaatcgtggcggaaccaaagtagttagttagctatattacattacaattacatgtggggctgtcggcagcgccttgttttgtactgtacttgtccaatatgtgatgactaagccaaggtagatctattatagtattatctatgtcatatgatatatgctagacgtacgtacaaattagttttgtttttgtttttgtgctgagtgtgtgacagg

SEQ ID NO: 7019 - DNA, 537 bp, Glycine max
ggtattcattcccctcaacgctgttttcttttctattcaaactcccgccgcttccctctgttcctcattctctttctttcgttcgtcatcgtcttcttcttcctgagctgttcgttcgttgcatcttcctttctcgcttttgctctaagctaacagtctaagaaattcaggtcaaaatggaagacgggcataagttccaggaagtttcaaagccaaaatatgattgccttttatttgatcttgatgacaccctttatccttatagttctggagtttcagtgcaaatagcaaaaaatattgatgagtatatgattcaaaagcttggggtggaggctgccaaagttgctgaattgaactattcattatataagacttatgggacaacgatggctggtctaagggcaattggctatgactttggctatgatgactttaacagttttgttcatgggagattgccatatgatgtgctgctgaaaccagaccctgttctcaggggcattttgcaaagcctgcctgttaggaaacttattttac

SEQ ID NO: 7020 - DNA, 320 bp, Glycine max
ccacgcgtcagcacacgcgtccgacagaaggggaaggtgcacgagtttgttgtgagctataagctagtttatcgtgaggagaatatgaacttgtttgttttctttgtgtgctgcagtacttctggtagcatggccatgccatggcgcacgctaccaaaggttccctctcccaatgaaaactggctatggtgagcgttcttcggaagtaaaatgcgcaagttttaagcctgctgtgggaccatacaacatccgagcccttaacaaccattcctggatactgcgttaatgcatacaaggactacattaatggcgaacaattt

SEQ ID NO: 7021 - DNA, 861 bp, Glycine max
  unsure (1)..(861): unsure at all n locations
aattcncgggccgacccacgcgtcagagaagggggcagtttcaaattttcttttccttcactttcccgagaaaaaaataacacttttcactttcttcactacgttctcacttcgatatggctcgtacgaagcaaaccgctcgcaagtccaccggtggcaaggcgccacgtaagcagctcgccaccaaggccgctcggaagtccgctccggcgaccggaggagtgaagaagccccaccgcttcaggccgggaaccgtggcgctgagggaaatcagaaagtaccagaagagcaccgagcttctcatcaggaagcttccatttcagaggctcgtgagagaaatcgcgcaggatttcaagaccgatttgcgtttccagagcagcgctgtttccgcgcttcaggaggctgctgaggcctacctcgttgggttgttcgaggacactaacctttgcgcgattcatgcaaagagggttaccattatgcctaaggatattcagcttgctcgcaggatcagaggcgagagggcttaggttggttagggttctgattttgaaggaggcgagacggcttagaaaaagaatcatctatctatgtgcttatgtgggcatgtgaaacgtgaatctgtttgcttttgtaattatctcgtgtttcttagacaagttaattaaaatgctatgttggttctcggagaaaattgttgttgagtcttaaagaacttgatctcggagaaattaaatctatcctaaaactcaagagattgtgtgccttttatgtttaacaatacagtatttgagaagagagtatttatgcttcttttaaagcctactaaataaccccgcgttgatttttttgtttatgnaaaaa

SEQ ID NO: 7022 - DNA, 544 bp, Glycine max
  unsure (1)..(544): unsure at all n locations
ccccccgcttcaggccgggaaccgtggcgctgagggaaatcagaaagtaccagaagagcgccgagcttctcatcaggaagcttccatttcagaggctcgtgagagaaatcgcgcaggatttcaagaccgatttgcgtttccagagcagcgctgtttccgcgcttcaggaggctgctgaggcttacctcgttgggttgttcgaggacactaacctctgcgcgattcatgctaagagggttaccattatgcccaaggatatccagcttgcacgcaggatcagaggcgagagggcttagaaacaaggttgagaggtttgggtgttaggtgcttagggttagggttctggtcttgaaggatgtgtttgggagtttggttgtaggaatcctctccatctgtgtgtttatgtggaatgtgaaatgtgaatctctttgcttttgtaattatattgtgttactatgaggagttaatgaaaatgctatggttatcggcaaaaaaaaaaaaaaaaaaaaaaannnaaccgtccgctgtataggatccaagcttg

SEQ ID NO: 7023 - DNA, 537 bp, Glycine max
  unsure (1)..(537): unsure at all n locations
attggttaagagcgtttggtcagactgtagcacctgtgttgttggacctaccttgcgatcatcaaagggtccttatcctagatatcagttctgcagatcaaggcgaagggcttaggttggtagggttctgattttaaggaggcgagacggcttagaaaaagaatcatctatctatgtgcttatgtgggcatgtgagaacgtcgatctgtttgcttttgtaattatctcgtgtttcttagacaagttaattaaaatgctatgttggttctcggagaaaattgttgttgagtcttaaagaacttgatctcggagaaattaaatctatcctaaaactcacaaaaaaaaaaaaaaaaaaaaaaaaaaaaaaaataaaaaaaaaaaaaaaaaaaaaaaaaaaaaaaaaaaaaaaaaaaaaaaaaaaaaaaaaaaaaaaaaangggggcggccgttttaaaggatccaagtttacttacccttgcatgcaacgtaataatttttttttagttgaacctaaattaaattaactggccggcgttt

SEQ ID NO: 7024 - DNA, 381 bp, Glycine max
gatactttccactttcactttcaaacatcacaaacactttttaacgttgtttgattttggtgcaatctttacttcacaacttcctcgtacttctgagaatcatcatcaaaaaccccaaactcatgatcatgatgatgatgaataggttccttccactctttgtgttcgcattgttattcatgtggtcggttcacgcagacaatgctcctgccccttcacccaagtcatcaccctcgtcgccgacggccaaaccaccctctccggcgacccatccggcgcctcctgcaaagtctccgactttatcaccgccttcacaatctccggcagtttctccatctgggtccaccccgccgccggcgactgcccctccggcgaagtctc

SEQ ID NO: 7025 - DNA, 640 bp, Glycine max
gtactccagaatctcatccttcaccttctccttctccatcctaaatcgaatagatagataggtgaaaatggcgcagtgtgtgaccaacacattcgtgcaaggaaaaccctttcttccagttgcagcagctcccactaaaaatgttcggagagcggttcagtgcggtgtgtggtgcaagaagaaggagatacacccgcaattctacgaggaatcgaaggtgtactgcaacggggagctggtgctgacgacaggtgggacccagaaggaatacgtggtggacgtgtggtcggggaaccaccccttctacctcggaagccggtcggcgtctatggtcagcgacgaccaggtcgagaagttccgcaagaagttcggggagctcaaagagatcatggagattcctgttctcaagggagagattgttatcccctcaaggcgcaagggtgtttccaaaggaggcaagaaaaaataatctattctactcgaacaggattgtctcccataggaagatattaaggtttccttttttaatttcaatttctgtaatattgtaagacgctttaagcctgtgctatggatattgtttcgagcaagcccgtgaatgtggtaatgtgattgatttggtgattatgttcattttgag

SEQ ID NO: 7026 - DNA, 390 bp, Glycine max
ctcgagccgttaagctgaatggtgatagctgtagatcaataagaatcccaagcagagttcacgcactcaaatctgatggtggtaaatggaagaagagagggcaagaagcatctagtgacactgatgacgacgatgacgatgacgatgcacctcagcggtttaatacaaatgacccttaccttatgagtcctgaggagagactggaatggaggaggaacataagacaggtgttggataggaaacctgatgttgaagaggaattagaccctctggaaaagaagaaaaaactggagaagcttttggacgattaccctcttgttgtggacgaagatgatcctgattggccaggagatgctgaatggtggggaatcagctttggccaattttttc

SEQ ID NO: 7027 - DNA, 612 bp, Glycine max
gagagaagagaagagagatctgagagaagcagagctgaagaggtgaagtgaagatgatgtccggaaaatatacgtcgattgacgcgcagcagcttcagggatctgttcctgccgttccagattcacgacccgccaccgtcaatttcgcagattcaaatcttcagacttttcctccttctggagctcagggcaagatcaccgctgcttccgggcctcctcgtgacgctgatgattcattttcaaaacctgtatctggttctgatgaaccgcagcagggtggttggtttcagacttttacaattgctgcttacaaaccatactttgatgttgacacttcagatgttctagagaggattatcgactcactatttccatttagaggatctttcaatgaaaaaactgctaccaaccctgatttgtatggtccattctggatttgcactaccttgatatttgtagcggcatctattggcacctttgtgacatatatagcgcacaagctaaagagcaaagaatgggattatgacataaatctggtgacttggtctgctggtttggtttatggctatgttaccattggtcctctttgcctgtatgtaatcctcaaatatt

SEQ ID NO: 7028 - DNA, 547 bp, Glycine max
gattgaaccacacaatacaagttaaagggatggtggagaaaggaagtgtggttgaagctgcagtaactagatctcccatgcagatgaagatgggggatcatgaattagaaggcaacactaccagtgccctacgcactgccgagacgtttctgcgtttgttccctgttggtctatgtgtttcagcacttgttctcatgcttaagagctctcagcagaatgaatatggatctgttgattacagcgatcttggagctttcaggtacttggtgcatgcaaatggcatttgtgccggctactctctattttcagcggtgattgctgctatgccatgcccttccactatacctcgtgcttggactttctttctgcttgatcaagtgctgacatacataattccatcggctggagcagtgtcaacagacgttctatacctgacatgagaatagatacactacatcaacgtggagctcaccatgtggctcttttggtcgattttgccataacgtcacagcatcagtatctatcatacttgtggcaatgttttgct

SEQ ID NO: 7029 - DNA, 362 bp, Glycine max
atgactcagacccacgttttcaaaatcgtaccttgaaatctctctgcttctgtttcacttgcaattaatctctttgctcagccaccacccaccacccaccaccaaccgtgactcaaagcaccataaggcaacaatgattgatgaccatcagttctttttgaatcccgtgacattcaagtggctataatcataaggaagcttggaggtacttctagtctttagaaggaaacaggcattaatatttattgtataattattgcggggattggtcatttaatttggatatgatggagttctgtgctgaaagttcccattcgtgtcggccacacactttgaagcattctaaatctgcagatgaagtg

SEQ ID NO: 7030 - DNA, 553 bp, Glycine max
gataacattactcagttattttttatgcttatttttttccccctttctcttatgagtggggaaaagtgtcggtttggctacgagtagaatccaagtgtaccatatatctgcttagggaagagtacgaaattgttccaaaaccaaatgttgcagagcctgccaagtggggtgtacaagatgagcctcttttggtttctagttttctctgcacatcttgcactagcatcctctcttgttgaatttcaagataatgataatccaaggcaaaagcaagagggcatgcagctaaatttgtaccatgttaaaggtcttgactcctctcaaacttccacatcaccattttcattctctgacatgatcacaaaagatgaggaacgtgtcaggtttcttcattccagattaacaaacaaggagagtgccagcaattctgccaccactgacaaattggggggaccaaccctagtgagcacaccattgaaatcaggtttgtcaattggttcaggcaactactatgtgaaaataaggaatggtacccctggccaatatttcagca

SEQ ID NO: 7031 - DNA, 414 bp, Glycine max
ggtaacagcgagaggcagacataggcatgttaggtggaatccaattctcaaaccccaatcgttactcagtattcttcttcttgttcttgtttctgtttcgtcattttttatcttatgttccttgaatcaattgtgatgcttagaatttgttgcacttgcacgcgttgacggacaatgaagctccctgtgcgttacttgattgttattttgaccttcatctgcaccttggtttgctacatcgaacgagttgggttttccatcgcgtacacagttgctgctgacggtgccgaactgaatcaatcgagcaaaggtacaatactgagcactttctattacagatacgcctgttctcaaactcccggaggatgggcagctcaaaaaatcggggggaggagggtactgattctttcattt

SEQ ID NO: 7032 - DNA, 318 bp, Glycine max
cgccaaaggcaggtggaatccaattctcaaaccccaatcgttagactaagcaagaggtcgttcagtgtaagtactccttgttcttgtttctgtttcatcatttttgatcttatgctagtcgaatcaattgtgatgcttagaattagtcaatgaagctccctgtgcgttacttgattgttattttgaccttcgtctgcacctcggtttgctacatcgaacgagttgggttttccatcgcgtacacagttgctgctgacggtgccggagtgaatcaatcgagcaaaggtacaatactgtccaccttctattacggatacg

SEQ ID NO: 7033 - DNA, 442 bp, Glycine max
gaggactaaacccaggctgtaaaccctttttccatctagagttgttgcggctctcttctctgcacactcagaatgcagtccacactcttcaaccccacccattcccttatccccacttcaccacactctatcagatccaattctggtcatgcttctctctccgttcgcgcctccatcgccgtggaaacccccacggagacggtgaagctgaacaagtacagctcccgcatcaccgagcccaaatcgcagggcgcctcccaggccgtgctctacggcgtcggtctctccgaggacgacatggccaagccccaggtcggcgtctcctcggtctggtacgagggcaacacctgcaacatgcacctcctccacctctccgaggccgtgcgtgacggcgttgctgctgctggcatggttccttccgcttcaacacgttggcgtcacg

SEQ ID NO: 7034 - DNA, 677 bp, Glycine max
gggagaagaatttgcatagagcaagaatcagaggaagagaagagacactgaggtggttggcgagaatgggaaggaagaaggggtatgttgagttcgaggagtcgccgccggacgatttcgatccggcgcatccgtacaaggacccggtggcgatgctggagatgagggagcacatcgtgagggagaagtggatccaaatcgagaaggccaagatcattagggagaagctccgatggtgctaccgcatcgaaggcgtcaaccacctccagaagtgccgccacctcgtcaaccagtatctcgagtccacccgcggcatcggttggggcaaggacggtcgtcatccttctctccacgctcccaaggttgagcctgttgaatctgattgactgtcctgtggataaatataataaaaaaaagggaagactgtttatccaactgatcatattgctaaatcggaaactgggttggaggagtgcttattttgcagttattgtgttcatgttgtttttatttagttgaactttctgcaaactacaactgtattttgacttagcctcggctatttttccttggcttattagtcttatttttgcttgttaccatttaaatgtaaacaagtatggaaatgctatgagtacatcacaatcagattatgaaataagtttatttcgtcctcc

SEQ ID NO: 7035 - DNA, 410 bp, Glycine max
acttgatttttttacaataacccaatcatagtctcactcgggattggttattcttattctaagagataatccaaatccaaacccaaaagaacaacacaatgaaaggagaatacgtagagcaacagcaacaacatcctaagagtgaaacaccacctagtatgttctcaaagcttcagcctcagcaccatcctttcccgcaccaccctttccaactctccgccgaggatgccaccaccatcaccccgagcaccgctcagaaggccaactcctccggcggcgacggcgcgaccatcgaggttgttcggcgtcccaggggacgtccgcccgggtccaaaaacaagcccaagccaccggttatcataacccgtgacccggaacccgctatgagtccctacattttagaagtgtct

SEQ ID NO: 7036 - DNA, 667 bp, Glycine max
cgacccacgcatcagggcaggcgtcagaacgacgagggtcggagtttcaacattcaacaatggtacctcaagctttgtcagtgcctgcgagttccagcttggctatcgcttctcgcaccagaagtccctcccacctcgtattttctcaaagaaacccgtgctcgatagcttcttccttgccaaacccatatggccattcatcggaagttgggttatcaagtaaaagccgtggctttcctttaaaacatgatgagaaaaatatccatggtgctagtacaagttatggtgcaattgaagccaaggggaatccgccgataactccagcagtgatgactcctggaggacctcttgatctcacatctgttttgttcaggaatcgtataatattcataggacaaccagtcaattcacaagtggctcagagagttatatcccagcttgtgactctagctactataaatgaaaatgcagacatactggtatatataaattgtcctggtggaagcacatattcagtgttggcaatttatgattgcatgtcttggataaagcccaaggttggtaccgtgtgttttggagtagctgcaagccaaggagcacttctacttgctggaggtgagaagggaatgcgctatgcgatgccaaatgctcgcataacgatacatta

SEQ ID NO: 7037 - DNA, 574 bp, Glycine max
actcgagccgaatcggctcgagagagaatgtaataatgtatgaaatgaagaaggggaagaagggaaaggtccattcaacattattgtcattcagagaagagaagaggttttgcatcgcatcgcacagagatgaattcaattacaagaagcggatcgcttagtatcatcctcgttgttttcttctctttgcacttcattcttggtttttccgacgactcatcacctgcttcaaaagatgctacaaagacagaacctcatgccggaagaagcactagtgctatagttatcattgtattaattgtgcttgtgttcttttctttgttctcctttgtactttttaagctgtggcggaagaagaaaagggaggagcaatatgctcgtcttttgaaattatttgaagaggatgatgagttagagcttgagcttggcctaagggactgagactcacctttggaattcaacatcttcaaggtttctgcgagttttattattttgaaatgggttatgctaaccagtgcaaggacacttgttaaaattaaaaaatcgaaaatatatgataaaatgcacacaatat

SEQ ID NO: 7038 - DNA, 411 bp, Glycine max
atttataggaaaaaaatatagagtgaggaagaaacaaacatggaaaggatatagattatagaatacagaggcaccgacgtagcgacggtcaaggtccacaatccacaatccgcaaccgaataacccactacccacagatttctctctctctctctctgttggattggatcctaatatctgtgttccactttcagaggttgctccttcattcacgcccttgctctcttcaaatctattttcttcctctgctctatctatctcttgttattgttccctctcacgccaatcaccatgccttctccttcagatcaccaccgcccccaaccaaaacctaatcccaacctcctttgctctgttcctcaaaccaatcatcatgctccttctcacctccctcttcttcctcttcctcgg

SEQ ID NO: 7039 - DNA, 1800 bp, Glycine max
gactcgccactcggaccaatgaactccatagccttcaaatccttcgtcggcctccgccagtcctcgccggaggccccgcatttcgccgcccagccaagacccgccactccccaccgcaaattccgcgtcttggctggaaaattcagccccaagctcaatggccggaacctccgcgtggcggtggtgggaggcggtccggctggcggggccgccgcggagacgctggcgaagggcggcgtggagacgttcctgatcgagcgaaagatggacaactgcaagccgtgcggtggcgccatcccgctgtgcatggtgggggagttcgacctgccgctggacatcatcgaccggcgcgtgacgaagatgaagatgatatcgccgtcgaacgtggcggtggacatcgggaggacgctgaagccgcacgagtacatcggcatggtgcggcgcgaggtgctggacgcttacctcagggaccgcgccaaggagtacggtgcgaacgtcatcaatggcttgttcttgaaaatggatattcctaaggataagaactccccctacgttctgcattactctagctacgatggcaaaaccaatggggctggtgagaagcgtaccttggaagttgacgctgtcattggcgctgacggggctaattctagagtcgccaagtctattgatgccggtgattatgagtatgccatcgcttttcaggagagggtaaaaatcccggatgataagatggtgtattacgagaaccttgcggagatgtacgtgggcgatgatgtttctccagatttctacgggtgggtgtttccaaaatgtgaccatgtggctgtaggcactggaactgtgacacacaagggggacatcaagaagttccaactagcaacaaggaaaagagcagaggacaagattttgggaggcaagatcatccgagtggaggctcaccctatcccggaacatcctcggccacgaaggttgttggggagagtggcgctggttggcgacgctgctggctacgtaaccaaatgctccggagaggggatctattttgcagccaagagtggcaggatgtgtgcagaggcaattgttgaaggttctgagaatgggaaaaagggatggtggaagaaggggacttgaggaagtacttggagaagtgggacaagacttattggccaacttacaaggtcttggatattcttcagaaggtgttttataggtccaaccctgcaagggaagcgtttgtggagatgtgtgctgatgagtatgtgcagaagatgacctttgatagctacttgtacaagacagtggtgcctggcaatccattggaggatctgaaattggccattaacaccattgggagcttagtgagggccaatgccataaggagggagatgaacaaacttaacgtatgacaataatagtcattatcatatttatcattcatttttgctttgtgtttttcctagtggacatgatctccttataattaagtgataattaactatatatgtgtaagaaaaaggattgaatttcatgcaatcccataaccggtatttgtaccttttatctgcaatgatgtaaaatgctagagtactagcaaagatttacttctcagttctcacacattggccataggttatgtcagctagatttaaagatttaggctctcaagtggtgctgttagtgactcatttagtggcttaagctattccaaattgaaaatatacgtgtaaaatatgttgctatatatccatgccaatgatgaaatgacaactataacagccttcttagtctggttttctg

SEQ ID NO: 7040 - DNA, 390 bp, Glycine max
  unsure (1)..(390): unsure at all n locations
agattgaggaggccaatgaggagcaagtacttgctgaactagctaggatcgaggcttcgaaagaacttgcagatattgaggcccagagagaaaaggaagcaaatcaattttcattcaatttggaaattgcgaggagaaagttgaaggaggccattgaagagattgatgagtcaaaggagcttgaaatgaaattggctgtgacaatatcagatgttgatttcttgcagaacgagttaaagtcagttaaggatatgaataaaagggttcaaggagatgggagtgtaaagcaattggaaggaattttcaggaaaggggaggaaccagaatactctatagtgttgcaaactataacggaagaattggaggcagctangaaagaattagctttgg

SEQ ID NO: 7041 - DNA, 1103 bp, Glycine max
tttgtttgtgtagaccacattttactctttacttgtgttgtctcgcggcaacatcgttccgaatcggttgcttatgacacacacacctctctacccttttctctctttcatttccaacaaaccatttttcatttcttctactaaatcctaatcactttgcgtagttgtgttgtgtgtgctcccttcaactcactcactcactcacaatggagcggaagcaagggttcttctctgcgctcaaagacgaggtggttcgcggcctctcgccggcgcggtcacgcgccaagagccccgccaggagtgcatcgcccatgtcctcgctgctccgccgccgcaggaagcaccacgcgccgccgcctgagctcttcattgcgagatcgggaagcctcaggcccgccgaggccctctcgccgctcaaggaaggtcctgacggaaccgacggcggccaggactcctcgcgcggagagggaaggtggggccagtggatgaaaggaccactcgctagagcaccctctgtttcttcttcctcgtcctcttgcaacaacaaaaagtccgatctgaggttgcttcttggcgtgttgggtgctccactcgctcccgtgcacgtgtgcaccacggatcccttccctcacctcagcatcaaagacatccccattgagacttcttctgctcagtacatattgcagcagtacattgctgccagtggagggcagaggcttcagaattcgattaacaatgcgtatgccatggggaaggtgaggatgatagcctctgaattcgagaccgcaaacaaggtcacgcgcagccggaactcctccaaggccgcggaatctggtgggtttgtcttgtggcagatgaacccggacatgtggtatgtcgagctcgctcttggcggcagcaaggttcacgccggttgcaatgggagactagtgtggcggcacacgccctggcttggtgctcacgcggccaaagggccggttaggcccttgcgacgtgcccttcagggtcttgacccaagaacaactgcaagcatgtttatcaatgcaagatgcattggggagaagaagataaatgaagaggactgtttcatcctcaagcttttt

SEQ ID NO: 7042 - DNA, 1006 bp, Glycine max
ggtcaagaataccgggtcgagccacgcgtccagtttagaagggggcgcattgaacgaaaattagggtttgtagtgtagcaggaagaagcagcaatggcgccgaagataacacgtaaggttagcagaaaccccgaattgataaggggaatcggaaagtactcgaggtcgcagatgtaccacaagaggggcatttgggctatcaaggccaaaaacggtggcgttttacctcgccacgaccctaaacccaaacctgaaactcccgctgaaaaaccacccaaattttaccctgctgatgatatcaagaagccccttgtcaacaagcacaaacccaaaccagctaagctcagggctagcattactcccggaacagtgttgattcttcttgctggtagatttaagggaaagagggtagtctttttgaagcagcttccttctgggttgcttcttgtaactggtcctttcaaggttaatggagttcctttgagacgtgtgaatcaggcctatgttattggcacatcaaccaaagtagatgtctctgctgttaatgttgacagctttgatgacaaatactttgcgaaggaagcccagaagaagaagaagaagggagagggcgagttctttgaggcagagaaggaggaaaagagtgtgttgccccagcagaagaaagatgaccagaaaactgtggacgctgcattgataaaagccatcgagagtgtgccagacttgaagtcttatctgggtgccaggttttctctaaaggctggcgtgaaacctcatgagctagtcttctagaggaaagaagggtgttactcttgtttttcatatcctgttatttttattgattttggtcctaatagttgcacttttataacttccttgtcaacagacaaattaagtacttaaaattttgttagggctaccaattgtgtctcgcatattccttcctgcaaaaaaaaaaaaaaaaaaaaaaaaaagcgcccgctctagaggatcccagcttacgtac

SEQ ID NO: 7043 - DNA, 1014 bp, Glycine max
acgaggcaggaagaagcagcaatggcgccgaagataacacgtaaggttagcagaaaccctgaattgataaggggaatcggaaagtactcgaggtcgcagatgtaccacaagaggggcatttgggctatcaaggccaaaaacggtggcgttttacctcgccacgaccctaaacccaagcctgaagctcctgctgaaaaaccacccaaattttaccctgctgatgatatcaagaagccccttgtcaacaagcacaaaccgaaaccagctaagctcagtgaattgatttgggatctgggctagcattactcccgggacagtgttgattcttcttgccggtagatttaagggaaagagggtagtctttttgaagcagcttccttctgggttgcttcttgtgactggtcctttcaagattaatggagttcctttgagacgtgtcaatcagtcgtatgttattggcacatcaaccaaagtagatgtgtctgctgttaatgttgaccagtttgatgacaaatactttgcaaaggaagcccagaagaagaagaagaagggagagggcgagttctttgaggcagaaaaggaggtgggattgtctattttcttattttgttgaagttcttgttattcttagttgcttctgcgtgctgatccgtctttttcttcttctttataatgcacgaaaagagtgtgttgccccagcagaagaaagatgaccagaaaactgttgactctgcattgataaaagccatcgggagtgttccagatttgaagacatatctgggtgctaggttttctttaaaggctggcgtgaaacctcatgagctagttttctagaggaaagaatggtgtttttcttgtttgcatatcctgttatttttattgattgtggtcctaatagttgcacttttataacttccttgtcaacagacaaattaagtacttaaaaattttgttaggcaccaattgtgtctcggatattccttatgcaattttgctccttttcacgtctgaaaa

SEQ ID NO: 7044 - DNA, 405 bp, Glycine max
agaaggcagttcttgaggcagagaaagaggaaaagagtgtgttgccccagcagaagaaagatgaccagaaaactgtggacgctgcagtgttaaaagccattgagagtgtgccagacttgaagtcctatttgggtgccaggttttctctgaaggccggggtgaaaccacatgagctagtcttctagaggaaagaggggtgttactcttgtttttgatatcgtgtttgtttattgatgctggttcttatagttgccctcttataacattcttgttagcagacaaatgaagaacctaaaattttgttagtcaaattgtgacgcgtgctctttacattttgttgattgtgtgaattttaaacattgtgtggacctttagcatgccaaatgaaaaaaaaattggcaacag

SEQ ID NO: 7045 - DNA, 1671 bp, Glycine max
accacgcgtccgcccacgcgttcgatgacattgtgctaccttttctagggctagcagcactgtaacctcaactcacctctccaaaatccgttccccctttctttcaaacccttttttttttcttccaccaaatcagcgatggcaacgacgtcggtggtgccggcgaaccggcgtcgtgcggcggcgaaccccgccgaggatatggacttcgagacgacggagggcgtgaaggccatcgcgagcttcgaggagatggggatcaaggacgatctgctccgcggaatctaccagtacggcttcgagaagccctccgccattcagcagcgggccgtcacgcccatcattcagggccgtgacgtcatcgctcaggcccaatccggaacggggaaaacgtccatgattgctctcaccgtttgccaggtcgtcgatacctccgtcagagaggttcaggcattgatattgtcaccaacgagggaactggcctcacagactgagaaagttatattggctattggggatttcattaatatacaagctcatgcatgcgttggtggtaaaagtgtgggagaagacataaggaaacttgagtatggagttcatgtggtgtctggaactcctggccgagtttgtgacatgatcaaaaggagaacattacgcacaagggctatcaagatgctagttcttgatgaatctgatgaaactgttgagcagagggtttaaagatcaaatttatgatgtgtatagatatctcccacccgaccttcaggtttgcttgatttctgctacccttcctcatgaaatactggagatgacaaacaaattcatgacagatccagtaaggatccttgtaaaacgtgatgaattgacattggagggcatcaaacaattttttgttgccgtcgaaagggaggaatggaagtttgataccctgtgtgatctttatgataccctcactatcactcaagctgttatattctgtaatactaagcgaaaggtggactggttaactgaaaaaatgcgtaacaacaatttcactgtctcatcaatgcacggtgacatgcctcagaaagaaagagatgctattatgggagaatttcgtgctggaacaacccgtgtgctaataacaactgatgtttgggcccgtggtcttgatgtacagcaggtttctctagttatcaattatgaccttcccaataatcgtgagctttacattcatcgaattggccgttctggacgttttggaagaaagggtgttgcgataaattttgtgaagagcgatgacatcaagatcttgagagacattgaacaatactacagtactcagattgatgaaatgccaatgaatgttgctgatcttatataatttgtcacgtggtgtgctggatggagtggatttgtcatatcttgtggtagggagtagtgtttgaatgtggtttcttgctatggaatgcattcgtgatgctcttgtacacttttgacttttggtcaaattagaatttttaccttagtgttgactgtaccagaggtagtgtttttctttgctgatgaggttgagaattgagattaatgtgtaaattgtgttgagttgttttatctattgtatcactcttgatattgaatttgtaattttatgcttcaaatggcaggtgatatcttgacttggtttttgat

SEQ ID NO: 7046 - DNA, 867 bp, Glycine max
ggcgttttgatattgtaaatcacgtccagcacaacagtccgagaagtgaatggctgacatagtgaagcagctgttggcaaagccgatccagctggcggaccaagtggccaaggcagcggaggaggccagttcctccttcaagcaagagtgcttagagctcaaatccaaggccgacaagctcgcggcgctgctgcggctggcggcgcgtgcgagctccgacctctacgagcgccccacgcgccgcatcatcgccgacaccgagctcgtcctcgacaaggccctctccctaaccctaaaatgccgcgccaacggcctcatgaagcgcgtctttagcatcatccccaccgccgccttccgcaagatgtcctcccagctcgagaactccatcggcgacgtctcctggcttctccgcgtctccactccggctgaggaccgcgccgacaccgagtacctcggtctcccccccatcgccgccaacgagcccatcctcggcctcatctgggagcaggtcgccgtcctccacaccggctccctcgacgaccgctccgacgccgccgcctccctcgtgtcgctcgcacgtgacaacgaccgctacggcaaattaatcatcgaggaaggcggcgtcggacccttactgaagcttatcaaagaaggcaaaaaagtagggcaagagaacgccgcaagagcaattgggcttctcggcccgtgaccctgagagcgtggaactcatgatccacgctggtgtttgctctgtcttcgccaaagtcctcaaagaaggtcccatgaaagtgcaagccgtggtggcttgggccgtgtcggaattagctgcgaaataccctacatgccaagatcttttcgtcagcataa

SEQ ID NO: 7047 - DNA, 1394 bp, Glycine max
gagtgtacctctttgctttttcccattgcttctaacgtgagatctcagattgcaattgcctcttctcttctcccagaatcggtgtaggttacaggtttaagggttttgttttcatttaggtcactaatccgatatcatgaagctcgatacgactagtctcgaatcgtttcccacactgattgcacctcaaaacgacgtcgccggagaactctccgccgctccgttctttgaccttccgaattccaatgacttcgatgggttcttgaaagacgctattcagatggtgaagcccgcgaagggtactacaactcttgcttttatatttaaagagggtgttatggtagctgctgattctcgagctagcatgggaggatatatatcgtcgcagtctgtgaagaaaattatcgaaatcaatccgtatatgcttgggacaatggctggtggtgctgctgattgccagttttggcacaggaatctcgggattaagtgtcgtttgcatgagttggcaaataaaaggagaatttcagtgacaggagcctcaaagctacttgccaatattttatactcttatcgtggaatgggtttatctgttggtaccatgattgccggatgggatgagacgggccctggtctatattatgttgatagtgaaggaggaagacttaaaggcactagattctcggttggatctggttcaccatatgcttatggtgtattggatagcgggtaccggtatgacctgtcagttgaggaagctgctgaacttgctcgacgagcaatttatcatgcaacatttcgtgatggggccagtggtggagttgctagcgtttactatgtgggaccaaatggatggaagaaactgtctggtgatgatgttggggaacttcattaccattactacccagttaccccaagcaccgtggaacaagaaatggttgaggctactggtgcttgatgaagtaactcgtggatgtctttttaagtttcctttgcttgccagcgtattttgaacccattgcatgaaactgattactttataattggaaattgacaatagtttgataaatacaagtgctgtcctatcctgttgtgttttagatcaagccatatttatcatccaaaatgatagattagagccatatataatgtggagtggtttaaattggtaaagcaggtcagacgtgtattgctagctattgctaatgtaatccatcttgcgattaatggttttcgtggcaacttctgaaagttgtacaagaaacttcctagggagaattgtggttcaatgtcttcgactgattgtagtagttagtaagcatacttttggtacgtcatggttttaatttaaagcttcgtcaaattgagacttaaaaaaaaaaaaaaaaaaagggcgg

SEQ ID NO: 7048 - DNA, 637 bp, Glycine max
gtgcctctttctacttttccctcattgcttctaactcaacaattgagatctcacactgcaattccttcttctcccagaatcggtcactaaatccgcaatcatgaagctcgataccaccggtctcgaatcgtttcccacactgcttgcgcctcaaaacgacgtcgttggagaactctccgccgctccatccttcgaccttccgaattccaacgatttcgatgggtttgtgaaagaagctattcagatggtgaagcccgcgaagggtactacgactcttgcttttatatttaaagagggtgttatggtagctgctgattctcgagctagcatgggaggatatatatcgtcgcagtctgtgaagaaaattatcgaaatcaatccgtatatgcttgggacaatggctggtggtgctgctgattgccagttttggcacaggaatctcgggattaagtgacaggagcctcaaagctacttgccaatatttcatactcttatcgtggaatgggttcatctgttggtaccatgattgccggatgggatgagacgggccctggtctatattatgttgatagtgaaggaggaagacttaaaggcactagattctcggatggatctggttcaccatatgcttatggtg

SEQ ID NO: 7049 - DNA, 674 bp, Glycine max
  unsure (1)..(674): unsure at all n locations
atcaccgtacggtttaaattgtatagtattttttccccactcacagactatcaatgttgcccaaatggaatgagttcagacatgtccatagcgttgaacaaaactaacagcagcaaaatgagcacacccttgttccatgaattcaaaaagcaagcttctttcttcttcaaggagaaaattaagactgctagattagctctaacagatgtcacccctgcagaactgatgacagaagaggcaacaagtggaaatccatgggccccagatgccagaactctcagatcaatttcaagggatgcttttgagctaaaacaataatggaaggattgtggagattctgcataaaaggtttcttaaatttgaaaagaagaattggaggatctcttacaattccctgatcgtgcttgagcacttgttgactcatggaccagagagtgttgcggaggaatttaagagtgacaaagatgtcattagccaaatgaaaggttttcagtatattgatgacactgggtttaattggggcctaactgtgagaaagaaatctgagaggataatgaaactgctggaaaaagggactcttctcaaggaagagagaaaaaatgctagaaggttatctanagggattgaaggtttcggaagtttctctcatcggtcaactccggcacaaggtgttc

SEQ ID NO: 7050 - DNA, 268 bp, Glycine max
atccaaaccaaaaccactcactcttctcattttttctgttgcataccaaatggaataagtttagattatgtccaattgttcatagcgttgaacaaaacaaacacgcagcaaaatgagcacacccttgttccatgaattcaaaaggcaagcttctttcttcttcaaggagaaaatcaagactgctagattagcactaacagatgtcacccctgcagaactgatgacagaagaggcaacaagtggaaatccatgggccccagatgccaga

SEQ ID NO: 7051 - DNA, 796 bp, Glycine max
atcccaacctaccctttaaccttacctcaacgaaactgtatggctggaaccgtactcgtatgattcaacagtagtagagtaaccgtagcgtagaacgttgctttcgcagtacttcaaatggccgagaagcaatctcagagacagaatcacagaaccggagagaaagagatagaaagagagagagaatttcattgaccgccattgaagctttgcttcttctatctctcactcataacaaaattccccacacacattcttcattttctcattctctccaatttcaacactgttacggttcataattcttccaattaagacaaaatttgaggtgtgtacggttcaattggaccttctacgctgcgttttgttcgctcaatggaccaagctccgggaggattgcgcggatccgtgcatgacggcgctacgctcgagtcaattcaattcaacgaagaaattcagggaatcatggcgccggtgccggcgccggaaaacgctaactcgttcaccgcgctgcttgaactcccgccgacgcaggcggtggagctccttcactcgccggaatccgacagcgctcggaaaccgcctaattgccacgtcagcgcgaaccagaaaccctacctgcccaactctttcggcagcaatttgaccttcccttccaacgccgccttaatcgaacgcgccgcgaagttctccgtgttcgccggcgagaactcgccgcctccgccgggggaggcgcgcctgattccagcaggaaccggttcgactttggacagagtgaagaacgagccgaaagaga

SEQ ID NO: 7052 - DNA, 2066 bp, Glycine max
  unsure (1)..(2066): unsure at all n locations
tatcgagccgaatcgagcataacaacacaagagtcgcatctcaagcttttgtctttctctacttttcttcttctttctgtgtatcgtatcgtattggtaggttgaaaaacaaagagtgtgtgttgttgttgtgtggtttggttttcacttttgttcatcgtttgcgagacacacaggagagaagagatggcgacgagggtggtggcggaacagaagccgaagacgaagattgtgtgcacgctggggcccgcatcgcgctctgtcccaatgatcgagaagcttctgcgggcgggcatgaacgtggctcgcttcaacttctcccatgggtcccacgagtaccaccaggaaaccctcgacaacctccgcgccgccatggagaacaccggtattctctgcgccgtcatgctcgacaccaaggggcctgagattcgaactgggtttctcaaggacagtaagcctatccaactgaaacaaggtaatgaaataaccatttccactgactatgacctaaagggtgatgagaagacgatttgtatgagctacaaaaagctgcctgaggatgtgaggcctgggatggtcatactctgcgcggatggcaccatatcatttacagttttatcatgtgacaaacaagcgggtttggttcaatgccgatgcgagaactctgccactcttggtgagaggaagaatgttaatttgcctggagtgatagtggatcttccaactttgacagacaaggacaaggaagatatcttggcctggggaattccgaataaaattgacatgattgctctttcttttgttcgaaaaggttctgacctggtggaagtcaggaaagttctgggaaaacatgctaagaacattatgctcatgtctaaggttgaaaaccaagaaggggttgcaaattttgatgaaatccttgcaaattcagatgcatttatggtggcacgtggtgaccttggaatggaaattccaatagagaagatatttctcgcacagaaagtgatgatttacaagtgcaacatccaaggaaaaccagttgtcactgcaacccagatgttggagtcaatgatcaaatctcccaggccaaccagggccgaagctactgatgttgccaatgcagttctggatggcacagactgtgtgatgcttagtggtgaaaccgctgctggagcctatccagaccttgctgttcaaacaatggctaaaatatgcattgaagcagagagcacccttgactatggtgatgtgttcaaaaggattatggagcactcaccggtacccatgagcccattagagagtctagcttcttctgctgttagaacagccaactcggctagagcggctcttatcttggttttaactagaggagggagtactgcaaaattggtggcgaaatacaggccagggatgccaattctttccgtggttgttcccgagctcaagactgatagctttgattgggcatgcagtgatgaggcccctgcgagacatagccttatattccgcgggttggttcccgtgttgagtgcagcttctgctagagcttctcatgctgaaacaacagaagaagcaatagaattcgccatgcaacatgccaagtccaagggtctctgccacaacggggattcagtggtggcactgcatcgtgtgggcactgcatctatcatcaagatcttgactgtgaaatgatcacccccattacaaggaattcttctgctgtttatggcaaattttttggatggtgcaaaagaggtctcgttatacctcttcatatctacattggatgcaaacttcaattaaaagcatttattaggatcggttacctgtttttcacatatcatatattactggttttttttttttttgttacatttgccttatcattgtggcgagtagccacttgctttcatttgttaagattttgtacgaggcttttggtgaaccaaaaaactagccacttctggattttgaattttgcggtctaaagttgttttaattgagaagtgtatgccttttcgtaccattggcnnnnnnnnnnnnnnnnnnnnnnnnnnnnnnnnnnn

SEQ ID NO: 7053 - DNA, 503 bp, Glycine max
atcgcagaggcagagcataacaacacaagagtcgcatctcaagcttttgtctttctctacttttcttcttctttctgtgtatcgtatcgtattggagagaagagatggcgacgagggtggtggcggaacagaagccgaagacgaagattgtgtgcacgctggggcccgcatcgcgctctgtcccaatgatcgagaagcttctgcgggcgggcatgaacgtggctcgcttcaacttctcccatgggtcccacgagtaccaccaggaaaccctcgacaacctccgcgccgccatggagaacaccggtatcctctgcgccgtcgtgctcgccaccaaggggcctgcgattcgaactgggtttctcaaggacagtaagcctatccaactgaaacaaggtaatgaaataaccatttccactgactatgacctacagggtgatgagaagacgatttgtatgagctacaaaaagctgcctgaggatgtgaggcctgggatggtcatactc

SEQ ID NO: 7054 - DNA, 490 bp, Glycine max
cggacgcgtgggcttttttgctttctttcttcttctgtttatcgcatcgcgtattggttggtcgaaaaacaaagagtgtgtgttgtgtggtttggtttggtttttcacttttcttcatctttttgcgagaagacacacacacagagagagatggctacgacgaggattgaggcagagaagaagccgaagacgaagatcgtgtgcactctgggccccgcatcacggtcggtcccaatgatcgagaagcttctgcgagcaggcatgaacgtggcgcgcttcaacttctcccatgggtcccacgagtaccaccaggaaaccctcgacaacctccgcgccgccatggagaacaccggtattctctgcgccgtcatgctcgacaccaaggggcctgagattcgaactggttttctcaaggacggtaagcctatccaactgatacaaggtaatgaaataaccatttccactgactatgacctaaagggagatgaga

SEQ ID NO: 7055 - DNA, 630 bp, Glycine max
ggctgttctaacagcagaagaagctagactctccaatgggctcatgggtactgcaaaattggtggctaaatacaggccaggcatgccaattctttctgtggttgttcccgagcttaagaccgatacctttgactgggcatgcagtgatgaggcccctgcaagacatagccttatattccgcggcttggttcccgtattgagtgcagcttctgctagagcctctcatgctgaaacacctgaagaagccataggattcgccatgccacatgccaagtccaagggtttttgcccccacggggattcagtggtggccctgcatcgtgtgggccctgcatctatcatcaagattttgcctgtgaaatgatcccccccattacaaggaattcttctcctgtttatggcaaattttttggatggtgcaaaaaaggtctcgatatacctcttcatatctacattggatgccaacttccattaaaagcatttattaggatcggttacctgtttttcccatatcaccctctagtgaaccagaaaaaagaagtgcatttgccttatcattgtggcgagtagccccttgttttcattcccccaaattttgttcgctcacaaaaataaaaaaatatataaaaa

SEQ ID NO: 7056 - DNA, 843 bp, Glycine max
agacgacagaagggggagcgcagtagcaagcagcgaggagaggaatcagaatcgcgttagggagaagaagagcaaaatcgctgtgaaaatgagcggaacggtgaagaaagttagcgatgtagcattcaaggtgggaaggaacatcgattgggatggaatggcgaacttctggtctccgatgaggctcgcagggagttctccaatctccgtcgcgctttcgacgaggttaactcccaactccaaaccaagtttagccaggaacctgagcccattgattgggattactatagaaagggaattggcactcgcttggtggatatgtacaaggagcattatgagagcattgagatccccaagtttgttgatacagtaactcctcaatataagcctaaatttgatgcccttttgattgagcttaaagaagcagaggagaaatctctgaaggagtctgagcgtttggaaaaggaaattgttgaagtacaagagttgaagaaaaagcttagtaccatgacggcagatgagtactttgaaaagcatcctgagctgaggaagaagtttgatgatgagatcaggaatgataactggggttattgatttttcaattagcaaaatgtcaggttgatgttgttctggctggtttaataataactacattgatttctttgtaactcggttctctttttcagttcaaaggatcttatatattacagtgtcgaaattttttgtggtactgtagttaatcacttaagacttaaccacaaaagtgcggttgtggtcgactgatcgtcagagaaactgctgttttgcgtttgtcttaataaattatatgtctgccccgtaatg

SEQ ID NO: 7057 - DNA, 520 bp, Glycine max
  unsure (1)..(520): unsure at all n locations
agtaactcctcaatacaagactaaatttgatgccctattgattgagcttaaagaagcagaggagaaatctctgaaggagtctgagcgtttggaaaaggaaattgttgaagtacaagagttgaagaaaaagctcagtaccatgacggcagatgagtactttgaaaaacatcctgagctgaggaagaagtttgatgatgagatcagaaatgatanctggggctattgatttttcaattagcaaaccatcagaggttgatgttgttcttgctggtttaataataacaactacattgaattctttgtaactcggttctctttttcagttcaaaggttcttatattacagtgttgaaattttgtggtacggtagttaatcccttgagacttatccccaaagtgcggttgtggtcgtcggcgaaactgctgataaggtttccgtccggagacaatttgcagaaaatgttgttttgcgttagtcttaataaattatatgtctgccccctaatggaaaatatcgattt

SEQ ID NO: 7058 - DNA, 776 bp, Glycine max
gcaaacgcaatccaaacccaatctaactcaatggaatccatttggtagaaaacaagaatacgaaccgaaaaactaccatagccactacttgcttccacttctgattcagaaactcttaggcattccacattctcaaccccgaaccctaagagcagagcgaaaatgacaaccaccttcgcgaccgtcgcaggactcggtggcgcattactgtcatccacctcatctcgtctcacctcagggtttgtgaaatccccagtgattgctaggaatcccttgaggcaagctgtggcaatgggaaatgggaggattacatgctttgagaggaattggctgcgggcagattacagtgtgattgggtttgggttgattggttggctagcaccctcaagcataccggctatcaacggtaaaagtctgactggcctcttctttgagagcattggtgctgagcttgctcactttcccagccctcctgcccttacttcgtccttttggttatggctggttacgtggcaccttggcttgttcattgtcctcacttttgggcaaattggattcaagggaaggactgaagactacttttgaattctaaacctatggtctctgtttttacttttttttttttctcttccttgtgtgcccccactgccccagtgccttgcaatctatgatgactctatgctacctttttccttcttactaggagaaatctatgtaatatcgccttcataatgttgtatattattattgttgtacttgcaccaaaaaaaaaaaaa

SEQ ID NO: 7059 - DNA, 561 bp, Glycine max
agcaactcttaggcatagcgaaaatgacaaccaccttcgcgaccgtcgcaggactcggtggtgcatcactgtcatccacctcatctcgtctcacctcagggtttgtgaaatcgccagtgagtgctaggaattggctgcgggcagattacagtgtcattgggtttggattgattggttggctagcaccctcaagcgtaccggctatcaacggtaaaagtctgactggcctcttctttgagagcattggagctgagctagctcacttccccacccctcctgcccttacttcatccttttggttatggctggttacgtggcaccttggcttgttcatctgcctcacttttgggcaaattggattcaagggaaggactgaagagtacttttgaattccaaacttatggtatgcttttgctttctctttttttcttcattcccttttgtgccttgcaatctataatgtataactctatgctacctttttccttcttactaggagaaatctgtgtaatatcgccttcataatgttgtatattattattgttgtacttgctccaaaaa

SEQ ID NO: 7060 - DNA, 419 bp, Glycine max
gaggaacccaaaaactaccatagccactactgattcagaaactcttaggcatagcgaaaatgacaaccaccttcgcgaccgtcgcaggactcggtggtgcatcactgtcatccacctcatctcgtctcacctcagggtttgtgaaatcgccagtgagtgctaggaatcccttgaggaaagctgtggcaatgggaaatgggagggttacatgcttcgagaggaattggctgcgggcagattacagtgtcattgggtttggattgattggttggctagcaccctcaagcgtaccggctatcaacggtaaaagtctgactggcctcttctttgagagcattggagctgagctagctcacttccccacccctcctgcccttacttcatccttttggttatggctggttacgtggcaccttggc

SEQ ID NO: 7061 - DNA, 285 bp, Glycine max
ccacattctcaaccccgaaccctaagagcagagcgcaaatgacaaccaccttcgcgaccgtcgcaggactcggtggcgcattactgtcatccacctcatctcgtctcacctcagggtttgtgaaatccccagtgattgctaggaatcccttgaggcaagctgtggcaatgggaaatgggaggattacatggtaattttagtacaagattaataatttgtctgattttgaaattggatcaaataactgcatgatgatgatgttgtatatatgatatgatacttgaa

SEQ ID NO: 7062 - DNA, 353 bp, Glycine max
gcttctctttctttgtcacaaacacaacacagcacccttcacacactgcacagtgcctcctttctagtttctactatctgcttcttcttcttcaattagggttttccccttctccgagatcagcgccaacatcatgaacatgaatatcttcaagaagaaaacctcacccaaagaggctctgcggtcaagtaagagggaaatggctgttgcaaccagaggaattgaaagagagatagcatcacttcagatggaggaaaaaaaattggtggcagagattaaaagagaagcaaaaacaggaaatgaggctgccaacagaatcttagctcgtcaacttgttaggttacgtcaacaga

SEQ ID NO: 7063 - DNA, 1670 bp, Glycine max
gaacgaaggatgggcatatccattcatggaacgatcgttagaaagcatgacgtttttttcttaaaaaaaaataaaatcaaagtaattaatagaaattagaaagtacaaaatggtccctatataacttgagtgtcctaagctcgcaataatacgataaagggtttttgttttgtttccttgggtgctgcatgcactttcactcgaagaaccttgaagcgagtctgggccacagcaaccagcgacaacaactcaatcagctagggttgctttgcttgctatcttgttggaggattttctgttcaagagaagatggtaactagaattgtggatcttcgttcagacacagttacaaagccaactgaagcaatgagagctgctatggcaagtgctgaagttgatgacgatgttctaggctatgatccaactgcttttcgcttagaaacagagatggcaaagacaatgggcaaagaagctgctctttttgttccatctggcactatggggaaccttgtatctgtacttgttcattgtgatgtcaggggaagtgaggttattcttggagacaattgccatatcaacatttttgagaatggaggcattgcaaccattgggggagtgcatccaagacaagtgaaaaataacgatgatggaaccatagacattgatttgattgaggctgctataagggacccaatgggggagctattctatccaaccaccaagcttatttgcttggaaaacactcatgcaaactctggtggcagatgcctctcagttgaatatacagacagagttggagagttagctaagaagcatggactgaagcttcacattgatggggcccgtatttttaacgcatcagttgcacttggtgttccagtggataggcttgtccaggcggctgattcagtttccgtttgcctatctaaaggtataggtgctccagttggatctgttattgttggttccaagaattttattgccaaggctagacgactccggaaaaccttaggaggtggaatgagacagattggcctcctttgtgccgctgcacttgttgccttgcaggaaaatgttgggaagctggaaagtgatcacaagaaagctagacttttggctgatggattaaaagaagttaaaggactgagagtggatgctggttctgtggagaccaatatggtatttattgacattgaagagggtacaaagactagggcagaaaagatatgcaagtacatggaagaacgtggtatccttgtgatgcaagagagttcatcaagaatgagagttgttctccaccaccaaatatcagcaagtgatgtgcaatatgcattgtcgtgctttcagcaagctctagctgtcaagggagtacaaaatgaaatgggcaactagtggaagaatttgaatatggcacgttgctgccatattagtcattaaaaaggaattccgtgttccatttgcctttgctcatttgattttcttaaatgtaccctaaagaacatgcaaagatttacatctttgatgttgttccctgttatgaattatgttgactatcatcgtcgttcccctgctaatttagctcattgtttactgtcccattattaggcatgttaggcatgtataggatattgtgcaacgttagcaatatatttttaatatatcttttcccc

SEQ ID NO: 7064 - DNA, 393 bp, Glycine max
  unsure (1)..(393): unsure at all n locations
ggttgtactttttcttgaatttcgttctgagtggagactatttcaagatcaccatcactcctctcattttgcgggaaaggtttcgttcaagagaagatggtaactagaattgtggatcttcgttcagacacagttacaaagccaactgaagcaatgagagctgctatggcaagtgctgaagttgatgacgatgttctaggctatgatccaactgcttttcgcttagaaacagagatggcaaagacaatgggcaaagaagctgctctttttgttccatctggcactatggggaaccttgtatctgtacttgttcattgcgatgtcangggaagtgaggttattcttggagacaattgccatatcaacatttttgagaatggaggcattgcaacc

SEQ ID NO: 7065 - DNA, 687 bp, Glycine max
catgacagagagagagagagagagagagagagagagaaatggcttgcaggcaattgtgggcttcaagagctgcctcttacctgaggatctctgtgtttcacagaggcttttctaatgttattaaagatttgaagtatgctgattctcatgagtgggtgaaagttgatggaaattctgcaaccgtcggcataactgatcatgcccaagatcatttgggtgatgttgtatatgttgaattgccagaagtgggagcagctgtgacacaaggaggtagttttggtgcagttgaaagtgtgaaggcaactagtgatattaactctcctgtttcaggaaaagttgttgaagttaatgaagcgcttaacagctctcctgctttggtcaattcaagcccttataaagatggatggataattaaagttgaaataaatgacagtggtgaactaaacaacttgatggattcagaacaatactccaagttctgtgaagaagaagattccaagcactgatggtcttgccaagatctttcagcactctccaatctccatggtgtagatcatgtttttattgggaaagctgctaaattacttattcctttttctccttgtgtcatggtttgaccactgctctatttttatttttcataagcttctgaaccagtgggatgatatttttcactctttgcaatgg

SEQ ID NO: 7066 - DNA, 580 bp, Glycine max
attaggggttaaagagaaaaaaaagaaggggtttgaagccaatggtggctttaaagacctgcctttaacctgaggatctctggttcacagaggcttttctaatgttattaaagatttcaagtatgttgattctcatgagtgggtgaaagttgatggaaattacgcaaccatcggcataactgatcatgcccaagatcatttgggtgatgttgtatatgtagaattgccagaagtgggagcagctgtgacacaaggaggtagttttggtgcagttgaaagtgtgaaggctactagtgatattaactctcctgtttcaggaaaagtggtcgatcttaatgagaaacttaccagttctcctgctttggtcaacacaagcccttacaaagatggatggataattaaagtggagatgagtgacagtggtgaactaaacaacctgatggattcagagaagtactccaagttctgtgaagaagaagattccaaccattgatagccttgccaagtgctttcattagtactcttcatgatgttgatcatgttcgactagggaagctaaaaattgcttgatttctcctcc

SEQ ID NO: 7067 - DNA, 1154 bp, Glycine max
caaatccatatcacagaaaaccattttggcttctcaaaaccccactcatcatccatatcacaaaaaactattttggcttctgcctttccttttccagggagctcattgacaatggctgaaacaaagtgggtcatgaaggacaaaagatggtctctccatggaatgacagctctagtcacaggaggcacccgaggcatagggcatgccattgttgaagagttagctgagtttggagcaactgttcatatatgtgcacgtaatcaagatgatattgataaatgtttagaagagtggaaaaacaagggacttaatgtgactggttcagtatgtgatttactatgttctgaccaacgtaaaagattaatggaaattgttggctccatctttcatggaaagctcaatattctagtgaacaatgctgctacaaatataacaaagaagataacagattacacagcagaggatatatcagccataatgggcaccaattttgagtccgtttaccatttgtgtcaagttgcacacccacttctaaaagattctgggaatgggagcatagtatttatttcttccgtagcaggtttaaaagctcttcctgtgttctctgtttatgcagcctctaaaggagccatgaatcaattcaccaaaaacttggcattggaatgggcaaaggataatattcgtgcaaatgctgttgcccctggacctgttaagactaaacttttggagtgtatcgtgaattcttcggaagggaatgagtctataaatggaatagtgtctcaaacatttgttggtcgcatgggagaaactaaagagatatcagcattagttgcttttctttgccttccggctgcatcatacatcactggacaggttatatgtgtagatgggggtttcacaacttagattgttgttaatgattttgttgctgaattaaatcttgtgtttcgtgttcctccaaacgactcatgcttatgtcgttggttaggtttatctcctgttcttaaacataaccatgtgttcttgtttagtttcgtgtgtctttctctcagaattcaacaaggcagaacaattgttaattgcctgctccccatgactccatgttatcttatttgttctttagatgaaacataacttcaattccctggtaaaaa

SEQ ID NO: 7068 - DNA, 412 bp, Glycine max
aaaaggggaatacccaaaaaaacaatttgggttaaattgcccttcccctttcaagggacctcattgaagagacaaaaaacaatggctgaaacaaagttgagcatgatgaaggacaaaagatggtcactccgtggaatgactgctctcgtcacaggagccacccgaggcatagggcatgccattgttgaagaattggccgactttggagcaactgttcatatatgtgcacgtaatcaagatgatattgataagtgtttagaagagtggaaaaacgagggacttaatgtgactggctcagtatgtgatttacaatgttctgaacaacgtataagataaatggagtttgttggcccatccttcacggaaagctcaacatactagtgaacaatgctggaagatgtatagcaaagac

SEQ ID NO: 7069 - DNA, 460 bp, Glycine max
ggacgggggggttgttaaattaaagaaggaaggaacgccgcaatggcaatggcaatggagacgagaaggcgaggttgatgattgtgatggcggaagcagagacaaacaggaatggcagtggcatcctccttcatcatcatcatcgtcgtcatcatcgctctcatcttcttctccctaaaccctcctcctgcaccatcacgtaggtcacttctcctcaccacttcatcgtcttgctccaacgaatccaatggccttctcaactaccactgcatcttcccccaaacttcctctttctcaatcccctccctctcgctcttcctcctcctccacttctacatcctcatcaccaccgcgcagcaccacttctccctcgtcaccacaaagctcgcctcgcacctcaacctctcccccagcatggccgccgtcacgctcctctccctcggcaacggcgcccccgacg

SEQ ID NO: 7070 - DNA, 823 bp, Glycine max
  unsure (1)..(823): unsure at all n locations
acataaaattcctctgagaatgcattaccaagcagcggcggcggcgtggtgggggagctacgtggcggcccctcggaacgcggcgggcgcggtagtgggggacccgctggagcgcatagagaggctggcgtcngaaagcgcggtggtgatattcagcgtgagcacgtgctgcatgtgccacgccgtcaagaggctcctctgcggcatgggtgtgaacccacccgtgcacgagctggacgaggatccaagaggcacaggacctcgaacgcgccctcatgcggctccttggaaccccctcggtggtccctgtcgtcttcatcggtggcaagcttgtcggaaccatggaccgggtcatggcatgccacatcaacggcacccttgttcctctcctcaaagaagccggtgctctctggctctgaaaagtagacccacccaactaacgctatctaagtataaataaacaaaaaaaatatatatgagagaggaaaaaaaaaggttttattaaacagtgtttattattattattattatcagaggaaagggatgaagtggtccttttgtgagtctcttcttctttcattccattttggatacactactactactactacttgcagcagcagcagcagcagcttcttactgacttgttaatcaatcttctttctttaatttctttctttcgagtttcatgctctttttattattattattctttttggtttttctgggtgatacttatttgggtttgttatggtttgcttgtttttgtaaagatagaaggcgaaatgcaaaaaaaaaaaaaaaagttaattttaaaaaaaaa

SEQ ID NO: 7071 - DNA, 481 bp, Glycine max
gggagagcagatactatagctagcagtgagagggtgtggtgtgggggttgcattgcagtatcatcagaatcagagttgagttgaccccttcattccattaactatcactcttaacaatgcaagcagcaattgcagccatggccgcccacactattctcttttcttccttcccagctcctcaatccattgcccttcccgccactaccaagaaagccgttgcaatcctcaagggcaattcctccgtccatggccttgtcactctaacccaacaacaagacaacggcccaacaactgttactgttcgtgtttctggtcttactcctgggcctcatggttttcatctccatgagtttggtgatataacaaatgggtgcatatcaactgggccacatttcaatcctaataaactcaaacatggtgctccggaggataaaattcgccatgcgggtgacctgggaaacatagttgctaatgccgatgg

SEQ ID NO: 7072 - DNA, 510 bp, Glycine max
ggctccggaattcggatcgatcaagaagcaagcaaagcaccagctgcttcatcaaagacacagaagaaaccttttcttttcgattccgacaatgcgtccaccgcgtaagagggtggatttcgcgcgcgacgacaaggtggagatctgcggcaacgaggatggcttcctcggctcctactaccaagccacggtcgtgtcgcgcctcgacaacggcctctacgtcgtacgctacgacacgctcctcgaagacgacgcatcacaacaaccccttaccgaaacccttttccccaaagaactccgtccccagccgccacgtgtccccaggacccacttcgcgctccaccagtgcgtcgacgccttcgacaacgacggctggtggctcggccaggtcaccggaaaaaaagacgccgagcattactacgtgtatttttctaccactaatgaggagattgcgtatcatgtttctgcgattagggttcatcatgagtggagccatggggagtgggtttt

SEQ ID NO: 7073 - DNA, 419 bp, Glycine max
ggatcattcataatccatcaatcaagaaagaaacagaaacttttttctttgataaatttgttctttgttccgacaatgcgtccaccgcggaagagggtggatttctcgcgcggcgacaaggtggagatctgcagcaacgaggagggcttcctcggctcctactacccggccacggtcgtgtcgcgcctcgacaacggcctctacgtcgtacgctacgacacgctcctcgaggacgacgcctcgttccagcccctcaccgaaaccctatttccgaaagagctccgtccccatccgccacgtgtccccaggacccacttcgcgctccaccagtgcgtcgacgccttcgacaacgacggctggtggctcggccagatcaccggcaagaacgacggcgagcattactatgtttacttttccac

SEQ ID NO: 7074 - DNA, 780 bp, Glycine max
agacaatgtgtgagtttaaggcacacacattgttccattattctctttctcttttttctgtctaagacccacaatggctctttcaaactccgaaggagtctttcacttcatcctctcttctttcagctaccctttgcaacacaaaaggtaggaagtagatattgactgcttcctgggttcacatacaatgaaatcaggtttaaaaaatggttggccctctgttgtgcgtcttcgtctccgagacaaatcagtgacacccttttgcatattctctaaagtgaaatcagctggcaacatacctgggaatacacctgtctatctcaatgtctatgacttgacaacagtaaatggctatatgtattgggcaggcattggtattttccactcaggggttgaagtttatggagtagaatatgcatttggagcccatgactatccaacaagtggtgtcttcgaggttgagcctcgacagtgtcctggctttaagtttaggaagtcgatattcatgggaactacaaacttagatcctttccagattagagagttcatggagcgccagtctgcaaattacaatggtgatacttatcacttgattgtgaagaattgcaaccatttctgtgaggatatttgttacaagctaacaggcaattctattccaaaatgggtcaatcgtcttgcaagaataggttccttttgcaactgtatactccctgatgctcttaaaacttccactgttcagcatgatgatcccaactttcaagggtgtgatagtgagaaacg

SEQ ID NO: 7075 - DNA, 739 bp, Glycine max
cggagagccggcttcttcctctgcgcaggaattaggaatattcgacaggtagagtttcttcaatggctcctaaagttgataagaagaatgatccaaaggcccaggccttgaagactgctaaggcagttaagtcaggtgctacctttaagaagaaggtaaagaagatccgaacttctgtcactttccacaggccgaagaccttgaagaaggacaggaaccccaagtaccctcgcattagcgccccgccgaggaacaagcttgatcattatcagatcctgaaataccccctcaccactgagtctgccatgaagaagattgaggacaacaacactttggttttcattgtcgacctgcgtgccgacaagaagaagatcaaggatgcggtgaagaaaatgtatgacatccaggccaaaaaagtgaacaccttgatcaggcctgatggcaccaagaaggcatatgtcaggttgacacctgattacgatgcattggatgtggcaaacaagattgggattatctagggtagtactagtacttaggcagctctatggttattcttgaagaaaacttttttaaaaagcatagattctatattttgtgttttgttattttgtatcttttgtctcagttgacactaagcagaccttgtgtttcaattttgactagagagttgtttaaattgaagatttaaatgatcatgttaaaatataaccatcccaaaatataatgcgcccgctcgaat

SEQ ID NO: 7076 - DNA, 243 bp, Glycine max
cccacgcgtccgcacatccaatgcatcgtaatcaggtgtcaaacaagattggaataaccatagagctgcctaagtactagtactaccctagataatcccaatcttgaagaaaacttttttaaaaagcatagattctatattttgtgttttgttattttgtatcttttgtctcagttgacactaagcagaccttgtgtttcaattttgactagagagttgtttaaattgaagatttaaatgatc

SEQ ID NO: 7077 - DNA, 588 bp, Glycine max
ggtagttctaacttctaagcccttgcccagtgctctgctcatcgaggcttaaaccctttcggcggcagcgaaaaaagtctccccgcccccaaacccaaacaatgaggaagaaaaaacaagggttcagaagacccgttgtcataaaaaagccgaagcaaccgcaagagcaacccagcgttgatcctattacgggaaagaaaatccccaaaagtttcgtgttttcgcgaggcaagttgccggctcctctcaaacagcttcagatggacctcagaaagttgatgcttccatacactgctctcagccttagggaaaagaaacggaataatctgagggactttctgaatgttgctggacctatgggtgtcacgcatttcttcatattgtcaaaaactgctacttcatcttacttgagggttgcaactacccctcaagggcccactcttacgtttaagatacatgaatactcattggccgctgacattgctcgatctcaattgcatcctcgatgccctaaggatctgtttaaaagttctgctctgattgtgctttctggatttgtgagtggagatccaccactgcagcttacaa

SEQ ID NO: 7078 - DNA, 338 bp, Glycine max
cagggggacataaatacacgtatgcaatcctattattcacttctttcagctctagcctctatctctaagcccttgcccagtgctctttcagcggcacctaaaaccctttcggcggctgcgaaaacaccctccacgcccccaaacccaaacaatgaggaagaagaaacaagggttcagaagacccgttatcataggaaatccgaagcaaccgcaagagcaacccagcgtcgatcctattacgggaaagataatccccacaagtttcgtcttttcacgaggcaagttgccggctcctctcaaacagcttcagatggacctcagaaagttgatgcttccgt

SEQ ID NO: 7079 - DNA, 652 bp, Glycine max
gccttcagaggaggattcatattggaaaaaatcatgggtccaatctcaagcgggcatttggagctccgaacccgcgacccgaacgacaacccatcagtgaccttcaactacttccaggaccctcgagacttgcagcgatgcgtgcagggcctgagcaccgtggagaagataatcgagtccaaagctttctctcccttcagataccccaacatgccagtgcccgttctgctcaacctgaccgcaagtgcccccgttaacttgttgcccaagcacaccagttcttcactttctttggaacagtattgcagagacactgtcatgaccatttggcactaccacggtggctgccaagtagggaaggttcttgatagggactacaagcttcttggtgtggatgcactgcgtgttattgatggctccacctttaactactctcctggaactaatcctcaggccactgttatgatgcttggcaggtatatgggagtgaaaatattgagcgagagactaggtggtgcggctgctgctgctgaaacagagcaataagttgtatagttttcctttcaacaaagtgtcttcgtgtcactgaggaaaaacaaattcttgtgagaatgatttgtgaagtaacctttcaatgagaaaaataacaaat

SEQ ID NO: 7080 - DNA, 298 bp, Glycine max
gactttactgatatcctgagcttccattgtgctcactcaacccgtacaacgaaaccctcttcatcttgttctatcagtgacgagcatcattgtctcaacagcaatgttactggtggctatgtgtgtgcttccggcgatgggtgtggccagtcgcctagcatggaaccctttctgcgtgaatggtcatgtctactgtgacccttgccgtgctggttttgagaccacatctaccagctacattgctggtgctgagattattttgcaatgcaagaacagggttagcaactaagttgtgtac

SEQ ID NO: 7081 - DNA, 458 bp, Glycine max
gaagaagagagtgagtgaagaagcattatttccacttgacttgggtgcctccgcctttctcttctcaaatcaaatcaatgagcatggcttctctccccaattcccccgctctttcattctcctcatctctctccaccaccgccaatctcctcccatgtcgccgcttcaccgcattcccccgccgccgcgcctcttcattctccgtgcaagctaagatccgcgaaatcttcatgcccgcactcagctccaccatgaccgagggcaaaatcgtctcctggatcaaatccgagggcgacatgctctccaagggcgacagcgttgtcgtcgtcgaatccgacaaggccgacatggacgtcgagaccttctacgatggcatcctcgctgccatcgtcgtcgccgacggcgaaactgcccccgtcggagcccccatcggtttgctcgccgattctaccgaagaa

SEQ ID NO: 7082 - DNA, 451 bp, Glycine max
ggttggtgcagtgaataacactagcactagaatgcaacgttactaacattgggggctatggtggttggttttggttagagttggaacctccgtcttctttcgatgaattcgaggacttaattaacacttcataaacacacatatcatttcgtttcttctcttcattccattctcattcaatccaatgatggctcaccttctccacactccctttatcccttcctcctccgcgctccgccgcgccgcccccattccccaccgcaaaacgaccactccactcgtcgttcgggccaagatccgggagattttcatgccggcactgagctccaccatgacggagggcaaaatcgtctcgtggaccaaatccgaaggcgacaagctctccaagggcgacagcgtggtcgtcgtcgagtccgacaaggccgacatggacgtcgagaccttctacgac

SEQ ID NO: 7083 - DNA, 1091 bp, Glycine max
gacgaacttctataataataagctccgacgacagcagatcataagcgcagttcgttccacgttgttgttcgctctgtgtctctcactctctctatatttgcatcattcatcggaaatggctctcgaggttgctgttaaggctgctgttggggctccaaatgttctcggagattgtccattttcccaaagggtcctcttaactttggaggagaagaaaatcccttacaaactccacctcatcgatctcagtaacaaacccgaatggtttttgggtgtgaatcctgaagggaaggtgccagtggttctttttgatggcaaatgggtggctgattctgatgtaattgtggggatactagaggaaaagtacccagaaccctctctaatcactcctcctgaatttgcctccgtgggatcaaagatatttgggtcttttgtgagttttctgaagagcaaggatacaaacgatggaactgagcaagcattggttgctgaattgagtgccttggatgaacatctcaagacccatggtccatacattgctggggagaaagtcactgctgttgatctgagtttggcaccaaaactgtaccatcttgtggtagcactgggccacttcaagaattggaatattccagaaagtttggtacatgtgcacaattacactaagctgctgttctcccgagagtcatttgagaaaacaaagcctccaaaggaggaatatgttattgctggatgggcgcctaaggtgaatgcttgaagtaattctaaattatgaggcatctgaacatcagatatgtgatgtactgtgactgaacctggttaaaaataggatggcgaactcatgatgtttaagagtattgttacccttttaataatgaataaacatgtagtttgttggtgtttttattggtgatgtgacaacagttgtcactagtagtacatagtgttttagattttaatgtcggaaaaagatcctctcaaattaagaaaaaaactggatgaaatgtcaagcttacttttaatgttagataaatttaatttataaagaatacaaaaatgtattaacggtgaggaaaaaaaaaaaaaaaaaa

SEQ ID NO: 7084 - DNA, 539 bp, Glycine max
  unsure (1)..(539): unsure at all n locations
gggcgtgtccggaaattttctgaatccctacatttcctcctccagccacgggcgcgtatcgacgacgatgctctcatccaaacctccgcgccggaaagttgttccggcgaacggcgatgactccgccgacaaactcgaccagctcctcctctcctccgccatctccaacaacgaggacctaggtccgttcatccgcaaggccttcgcctccggcaagccggagaccctccaccaccaccttcgccacttcgcgaggtcgaaagagtcggagatcgaagaggtgtgcaaggctcactaccaggacttcatcctcgccgtcgacgacctccgatctctcctctccgacgtcgattcgctcaagtcctccctctccgactccaactcgcgcctccagcacgtcgcgtgcccgctcctctcctcgctcgacgccttcggcgagacgcgcaacgtctccaagaatgtcaacctcgacatcgactccgtccncacgtgtgtgaagctcatgggggtctacacacgcgagaaccgacaccgcggcg

SEQ ID NO: 7085 - DNA, 374 bp, Glycine max
aggggaaatgggaaaggaagaagcattgaatgtgtttggtggaagatgagtgaattggtgtacagaatcagtacggcgaaggagtgggaggagttgcagagcaatggatccagtttcggtggggaccttgacaagtcttctgctttcatccatctcagcaagctcgaccaggttcggtcaacactggagaactttttcctgaacagcaaggaggaactctacctgcttcaaattgatgctaaaaagctaggtgatggtttggtgtatgaaattgtggatggtaaaaatagcttccctcatttctatgggccatctcgaagctttgttcctctcactcttgatgcagtgataaaagcagataaactaacactcac

SEQ ID NO: 7086 - DNA, 503 bp, Glycine max
ggtggaggataattataactcttcagcgacggcgcatggttccagttcctcctcttctcaccgcccaccgccgtcactttgagttattcttctcttctcttctcactcaccctttgcaatttctctctttccttcctgtatttgttgcaaccctcttcaaggtggatgtgaatccacaccactcatggattttagaggaaatcttaattgcaagagaagggctctcactgtcaaaccggtgagtagtgatagtgataggaagtttctcattgacttcatcgtcactacttatttgggacctgatgtcaagtctcataatccaagatgttctgttattcgaagactaatcgctggatccccaccctatatctcgagtgatttgggaccttcgtatgttagtgtttctttcttggagagattgtattattatctcctcagagatgcttcccctgacctagtcttggatatcaatatgttccatatgtatctaaaggggaaattag

SEQ ID NO: 7087 - DNA, 398 bp, Glycine max
gagggagcaagggtttcaaactcgaggcagtggctgcgtgggtgcgtgcgtctgagtgggatagaaaagaaaagaatggcggaaagggcgaaaccgatcgacttcgaactcaccttaaagcctttctatcagagagcctcagaagcagaggagcgcttatcaagactagaagcagccttgaatagtaaaaaaggtactggaaacgaggaaaacttgaaagtgattaatgatcttcagtcaaagttagaagttgcaaacgtagagttaatttctgaaaaagagaaggctcaaatgcttgttgcagaaaatgcaaaacttcaataccgaattattcatcttctgagagcactcaaggaagctgatctgaagttagaaaaagctacagtgcatgagcagct

SEQ ID NO: 7088 - DNA, 1523 bp, Glycine max
ggatgttgtggtgcaacacaacagtacaatacaatacaatggtccgaaccgggttcgaaacgcagcacgagcagcaacaacagtcaaactcaaaacagtgggaatgcgaagacctataaatagcgaacacttgagccttgtctttgttagtttggaattggatccgcccacgcactaccgaaagccgaaccttaaacacaaacgccaaatctagcaactattgagttttgttttctttgaaacatcgtgtgcacagtaccccagaagatcgaacaaggatctccacgaagacaaacctctgttctcaactgtgtttctttacctctcacctactttcagaccataccagattgactaggctgagaagatgcagcagacaccgcctatgattcctatgatgccttcgttcccacctacgaacataaccaccgagcagattcaaaaataccttgatgagaacaagaagctgattctggcaatattggacaatcaaaatcttggaaaacttgcagaatgtgcccagtaccaagctcagcttcaaaagaatttgatgtatttagctgcaattgctgatgcccagcctcaaacaccagccatgcctccacagatggcaccacaccctgccatgcaaccaggattctatatgcaacatcctcaggctgcagcagcagcaatggctcagcagcagcagcaaggaatgttcccccagaaaatgccattgcaatttggcaatccacatcaaatgcaggaacaacagcagcagctacaccagcaagccatccaaggtcaaatgggactgagacctggaggaataaataatggcatgcatccaatgcacagtgaggctgctcttggaggtggaaacagcggtggtccaccttcggctactggtccaaacgatgcacgtggtggaagcaagcaagatgcttctgaggctggaacagctggtggagatggccaaggcagctctgcagctgctcataacagtggagatggtgaagaggcaaagtgacatttttttatgtgcttttcatgagatacatatgactgttgatagtaggtttttctttaaaggtaggactagtgtgatctgatgacctttaataggtcgaccaaaggacaaaagggcttctcttgtttgatagattaggtagtttgtgttgttagaattttggcacaaagcaagtttgcatcaactgaaactgctggtgcctcaacatactgtactcgtcactggaaggtctaagcatgtggtatttgtgatcacctaaattgcttctggtttttaacaatttttctttgcagtttgttgtggtcatataaacaaaaatgtttgcttttggtgctggtaattctgctggattctaggcgtcaattgaaacgtgaaatgcagtggatggattctctgtctgaatttagttcaggtctattcttcattaggccctgaacttgcaattcaggaacaagtactttgacctgctgctaaaggatatttgcctttattccgggcaaaaaaaaaaaaa

SEQ ID NO: 7089 - DNA, 581 bp, Glycine max
ccgggctcaaaacgcagcagcagcagcagcagcagcaacagcagtcaaactcaaacagggggcaatgcgaagacctataattagcgaacacttgagccttgtcgattgcggctcgagatttggaactaccaaaagccgaacgtcgcacaaaaaccccaaacctagcaaccattgagttttgtttgctttgaaacatcgtgtgcacagtaccccagaagatcgaacaaggatctccacaaagacaaaccccagttctcaactgtgttttacctctctctcacctactttcagaccatacccagggtttttgctttttctttttaaattagtttcagtgacattaacgaggctgagaagatgcagcagacaccgccaatgattcctatgatgccttctttcccacctacgaacataaccaccgagcagattcaaaaataccttgatgagaacaagaagctgattctggcaatattggacaatcaaaatcttggaaaacttgcagaatgtgcccagtaccaagctcagcttcaaaagaatttgatgtatttagctgcaattgctgatgcccagcctcaaacccc

SEQ ID NO: 7090 - DNA, 719 bp, Glycine max
ggacgcacattcaacaaaacagaatttgtctgattcaagggcccaaaagagagagagaaaatggaaacaagtttggcttggctggttggtaccttcttcgctcattcagctgctacattacactacacttaacacttcctttatcaacggtcattctatagggacgtttcggtaaattccactccctccttcgttccaccgtcgctatcaactgtttcacactgaactcccttcttcgttttcacaccatttgacttctactgtgcctccagaaatctcatctttcttctttataccgaattgggtagagttcatcagtgacaatggaaactgggtcgaaatcagaatcactgaacagaaacgtggcgatgagtgtgaggggtggcactgggaagaagaaacagcagggtggtgtagcaggcaaagtggactcttttgtgccgagaagtgagcacaacccgcgagagttacggtcgtgggcgaaaagaacgggttttgtttctgattactcgggggaagcagggacaagtgggagtgcaaagtttgaagctttagagaggagaagagaagggtcatctccgaagatagagatagatccggtggtgggaagagcgaggcaaaacgagatcgtaccagagtctcatggaggtgcaacgaggggtgagaatggtgctgttttggatgggagggggaggaaagagaaggagaatgagggtggt

SEQ ID NO: 7091 - DNA, 347 bp, Glycine max
ggacggcagtttatattccccaaccggaccaaacacacagtccaaatcctttgtgccctaatttctcaaatcggaatctttcactccaccgctctaacccctaattccgatcaacgcttttgccttcgtcgctcgccagtttgttagcgggagctcagttattctgttttattgacgaagtgataacaaatggatgattgggaggatgagcatattgcccctattgatcttacattgaaagatccagttaaaagtaattgggatgatgaagatgtggatgaaaatgatgtgaaggaatcatgggaggatgaagacgagcctgctccggcacctgcagcacctgctgt

SEQ ID NO: 7092 - DNA, 302 bp, Glycine max
ggaccaaacacacagaccaaatcctttgtgccctaatttctcaaatcggaacctcacactccaccgccccaaccccaacccctaattccgatcaacgctctccccagttggttagcggaaactcagttattctgttttattgacgaagtgataacaaatggatgattgggaggatgagcatattgcccctattgatctaacattgaaagatccagttaaaactaattgggacgatgaagatgtggatgaaaatgatgtgaaggaatcatgggaggatgaagatgagcctgctccggcacctg

SEQ ID NO: 7093 - DNA, 1110 bp, Glycine max
ttcacgaacaaaaaaaaaacaactttgcggctgcgctgctgctaatagcgcgttgcatctgctacctatcatacatattttcgccaaaccgccgattccgttgagcgtttctaccgtagcgctcaggaaggaggcagtggctggtggtgttggttgtggtggaggtggttttgctgatcatttgtggtagagggtaggaaagaaaaaaaagttgaaaatgagttcagacagccgcagcaggagcagaagcaggagcccaatggaccgtaagatccgctctgatcgattttcctatcgtgatgcaccttacaggagagattcacgtcggggtttcagccgtgacaatctgtgcaagaactgcaagagacctggtcattatgcaagagaatgccctaatgtcgcaatttgccacaactgtggcctccctgggcatattgcttctgaatgtacgacaaagtcactgtgctggaactgtaaagaacctggccacatggccagcagttgtccaaatgagggtatttgccacacctgtggtaaagctggacaccgtgctagggaatgctcagcccctccaatgcctccaggggacttaaggttgtgcaacaactgttataagcaggggcacattgccgcggaatgtacgaatgagaaggcttgcaacaactgtaggaagacaggccacttggcacgtgattgtcctaacgatccaatttgtaatttgtgcaatgtttctgggcatgtggctagacagtgtccgaatgccaatgttcttggagatcgcagcggtggtggcggtggtgctcgtggtggtggcggtggtggctatagagatgttgtttgcaggaactgccagcaattaggtcacatgagtagggattgcatgggccccttgatgatttgccacaattgtggaggtcgtggtcacctggcatatgagtgcccttcgggtcggtttatggaccgctaccccaggaggtactgatgatgggaaatttatgcgttaccagttatatggatgtttttctatgatttctttgccgaggacagattagttgagttcttggtaagtgtatgtgtttggcttatattatttttaagcttttctagagt

SEQ ID NO: 7094 - DNA, 331 bp, Glycine max
ggccatgatttgattcctcaacaccccacacacacgtagttaaaatgggttttactaggaaacccatgtttcctgtgttgctggttttgttcatcagaagtcttcttgagccgccccatgttgcagaatctacttcttctgattactccactttggtctacaacggctgctcaaaggagcctttcacagatcccaatggggtgtactctcaggcactttcagcactctttggctcattggtttcacaatccaccaaagccaagttccacagagccacttctggctctggccagaacaccataactggcctcttccaatgcagaggggatct

SEQ ID NO: 7095 - DNA, 1285 bp, Glycine max
gaaccactgaaccaggataatctgtcttcactcttcaatccgaacttagattgttttactgttacaccattcctaggtaccatttgcaccactctcttcttcttcaatcaatggcagcaacctcaacatccctcttctcctcaaatctccattctctcaactcacaacctttctcttcctcactctccttcttccgaaatgtccattccaccctctctttcccttcttctaaaccctcccgtggcgttgtagccatggctggctctggcaagttctttgttggtggcaattggaagtgtaatgggaccaaagactccatcagaaagcttgtctctgacttgaacagtgcaacattggagtctgatgttgatgttgttgttgcacctccctttgtgtacatcgatcaggtgaaaaactcaattacagataggattgaaatttctgcccagaattcttgggtgggaaaaggtggggctttcacgggagaaatcagtgtggagcaactaaaagaccttggctgcaagtgggttattcttggacattctgagcgaagacatgtaattggagaaaatgatgagtttatagggaagaaggctgcctatgctttgagtgagggtcttggtgtgatagcatgtattggggaactgttacaagaaagagaagctgggaaaactttcgatgtttgttttcagcaattgaaggcttttgcagatgcagtgcctagttgggacaacattgttattgcatatgagcctgtatgggcaattggaacgggcaaagtggccactccccaacaagctcaggaagtacatgtagctgttcgagattggctaaaaaagaatgtccctgatgaagttgcatctaaaacgcgaattatttatggagggtctgtaaatggaggcaacagtgctgagctggcaaagcaagaagatattgatggatttctcgttggaggtgcttcattaaagggtcctgagtttgctaccattgtcaattcagtcacatccaagaaagttgcggcttaattacttattgtgattttggcaatatgagagcattaaggataaagacgggctagtcataaatgtggcaataatgtgggtgtataataacagattggtttttattatcaaaattactgccaatttctttgcaatcagtaggaatggcattatctgatttttccaaagagccagtgtatttatcagcatttagacatgcagagatggtagaaagcaataaataataaatgtttctcaactattgtttttttcatatcgtcaaa

SEQ ID NO: 7096 - DNA, 639 bp, Glycine max
  unsure (1)..(639): unsure at all n locations
gacttcccagttgctacctcaacgtccccaacactgtgttcctgtttttgttcttcgatggcggcaacctcaacatcactggcttctcaactctacattggcctgcgccgcccctgcctcaagctcgattctttcaattctcaatctttctctctcttcgaccctaatcttcgcctatccctctctccacccaaaccctcacgcgccgtcatcgccatggccggcaccgggaagttctttgttggtggcaactggaagtgtaacggaacaaaagactcaatcagcaagcttgttgctgacttgaacaatgcaaaattggagcctgatgttgatgttgtcgttgcacctcccttcctctacatcgatcaagtgaaaaactcactcactgagcggattgaaatatctgcccagaattcttgggttggaaaaggtggtgcttttactggagaaatcagcgcggaacaactaaaagatcttggatgcaagtgggttgttcttggacattctgagcgaagacatgttattggagaaaatgatgagtttatagggaagaaagctgcctatgctttgagccaaggtcnttgggtgattgcatgcattggagaattgttagaagaaagggaggctgggaaaaacttt

SEQ ID NO: 7097 - DNA, 523 bp, Glycine max
acccgagcaagcccaggaagtccatgcagctgttcgtgactggcttaagaagaatgtctcggctgaagtttcatctaaaacgcgaattatttatggagggtctgtaaatgcgagcaacagtgctgagctcgcgaagcaagaagatattgatggatttcttgttggtggtgcttcattaaagggtcctgagtttgctaccattatcaattcagtcacatccaagaaagttgtggcttaattacttattatggttttcaagagcgcattaaaaatgtggcaataacatgggtgtattatgagttttatttgtatcccttctatggctatgatacctgcgtttagtttgctacttcgaagaaataatcgtttatttttgtcagcacccagaggcttgagagaacttttgaaaaataaacgattatttctcaaaattcaagtgtttctaaacatgtaaggtatgagaaacattctccttttctcatgagccatgttttcttcatttcttggaacaattccatatacg

SEQ ID NO: 7098 - DNA, 404 bp, Glycine max
ttttgaacgtcacttactgaaatggaaaatggctttttcgcctatgtaatacagtccggggtaagcaaaatgttgatgaaatataaatatctattcgtccaacatatgggtgtaagtgggaccttcctatcataatgaaccaattatcaaaaacgaaaaaggtatacattctagtttgtggcctatactacaaacatattcttaatagcatatggtatttgtcagtttattttgtctttttatcctgttttctaatccttttaatttttgtgagaagtacagatgttgttgttgcacctccctttgtgtacatcgatcaggtgaaaaactcaattacagataggattgaaatttctgcccagaattcttgggtgggaaaaagtggggctttcacgggagaaatc

SEQ ID NO: 7099 - DNA, 653 bp, Glycine max
  unsure (1)..(653): unsure at all n locations
ggtcgttacaaattactacacactgttccaatgggtgaagaccgatccgaaatagtgttcttcgatgtggagaccagcgttcccacccgaacggggcagggttttgcgcttctggaattcggcgccattttggtttgccccaaaacgctcacggagcttcggaattactctactctcgttcgtcccgccaacctctccgtcatctcccccttgtcggagcgctgcaacggcatcaccgccgccgccgtctccgccgccccttccttcgccgacattgctcacctcgtttacgacctcctccacgggaggatttgggcggggcataacatcataagattcgactgtgttcggattagagatgcgtttgctgagattaatcagccaccgcctgaacctaaggggaccattgactcgctggttttgttgactcaaaagtttggtagaagagctggtgacatgaagatggctactcttgctacttattttgggcttggacgccagacacataggagcttggatgatgttcggatgaatcttgaagtcctcaaatactgtgcaacagttctattctttggagtcaagtctcccagatatattcactgcaaatagttggngtttaccaaatgctactacaagaagccgcagtaatggga

SEQ ID NO: 7100 - DNA, 572 bp, Glycine max
gacacgttaacatatccaacccatttcatcgctcttcacataaacttcaagcgagcaaacaaacaactagcaagggaagaaagaaactacagaaaagaaatggcttccacttctgcagtttcaatggctatgccagtaacttatgctagccagaagagggtggtgcctagctcggatgcattcttcaagccactgcctctacggtcttccaaggcagtgacagcatcaaaactcaatggaaggtttcaagtgagggcctccatgaaggagaaagttgtgacggggctcaccgcagctgcattgacagcttcaatgatggttcctgatgtggctgaggctgccgttacaccttctctcaagaacttcttgctcagcatcgcggcaggtggagttgttgttgttgccattattggtgctgtgatcggtgtttccaatttcgatcccgtcaagcgtagctgatggagttctgaggcactgtgttttatttatttttttgttacctcttatcatgatatgtatctttaatgtaatgttcttcagaaattaagtgaaccctttgatgtgtgtttttt

SEQ ID NO: 7101 - DNA, 525 bp, Glycine max
ggaagaagagtcacagtcacaccactttagttttaggctaatattgtgaaagaaagatgagcaagagggcaaggagtccaaggttggaactgaggctgaacttgtccccaccaagggcagcagcaacctcaattatatcttcttcggagctgtcatcgacggagtcttcgacgttgtcgccggtgtcggtgcaatcgctggagagctcctgcgtgtcttccgaggctgaagagacaagggcaatgcttctcgtggggtgtcctcggtgcctcttgtatgttatgttgtcggaggttgaccctaaatgccccaaatgcaagagtgctgtgttgcttgacttcctcaacaacgaggaacacaataccaagaagagtagcagcgagtgagagatatgttgtgaacaccacatgcattaccgtcgaagattaaccactccacctagtaccaagaaaatgttgttttttgttattgttggatttccctttttagttaattattagagtagaattggcattttcctctctc

SEQ ID NO: 7102 - DNA, 615 bp, Glycine max
gagtggtagccgctgcatctcaacgaaacagagcgagctagagagagagagagagagagaaagagaagagagagaagcagcgattcatcacaatgggtaaggttcacggatctctcgcacgtgcgggtaaagtgagaggacaaactcccaaagtggcgaagcaagacaagaagaaaaagccacgcggacgcgctcacaagagaatgcaatacaaccgccgattcgtcaccgccgtggtgggattcggaaagaagcgtggaccaaactcctcggagaagtgagggaggcgtgttgaagatcatggtttttcttagtttgtgaaatgtatcacttgttttgatttgattgatgaactcaaacttttatgatagttcttattaagcttcaatgaaggagttttttgctagttaatatgaaaccacatttttctttctcactggcaattgtgtaaagagtttcttctacacacgattgtgttgttttgtttctattagaaattagaaataggggtgcaattaggtaaacagggaatgccaagctcatcaattaaattattgtagcgggttttagattttgtagttgttgtcttattcttatgtcgtctttcattgctta

SEQ ID NO: 7103 - DNA, 608 bp, Glycine max
  unsure (1)..(608): unsure at all n locations
tagaacatctctttctgtgtcttaggttttagttgtagccgctgcatctgaacgaaacacagagggagagagagtgagagaagcagtaattcatcacaatgggtaaggttcacggatctctcgcacgtgcggggaaagtgagaggccaaactcccaaagtggcggagcaagccaagaagaagaagccccccggacgcggctcccaagagaatgcaataccacccccgtttcgtcccccccgtggtgggtttcggaaaaaagggtggcccaaaccccccggaaaagtgagggaggcgtgttaaagatcacggtttttcttagtttgtgaaaaggaaccccctgttttgatttgattgatgaaccccaacttttatgatagttcttattatgggtcaaagaaggggttttttgccagttaaaatgtttctttccccccgccaattggggaaaaagttttttttccccccgattgggttgttttgtttttattaaaaattaaaaaaaggggggccattaggtaaacagggaatgcccagctcctccttttttttttttttnnnnnnnnnnnnnnnnnnnnnnnnnnnnnnnnnnnnnnnnnnnnnnnnnnn

SEQ ID NO: 7104 - DNA, 355 bp, Glycine max
gacgcaactgaaaaagaaaagccttccactattccatatatagcagccaaaaaagaatgaagaatactgcgttgttcactatctttctactccttgctttcacctcatacctaccttcagccaccgctgctagtgtgtacgatacggatggtaatattcttcaacaagggtcgcacatattttgtgttggcagctacaagaggaaacggcggtggaatagaatttgccgcaactggaaacgacacttgccctctaactgtcgtgcaatctcccagtggcgactctattgggtttccaataaggttttcagatccatttatagaaacgcctgatgatatccttgaaggctttggtt

SEQ ID NO: 7105 - DNA, 689 bp, Glycine max
  unsure (1)..(689): unsure at all n locations
ggaagttgaaaaccccaaatctcagtttttcttctacactcattctttcattctcattgccgtcacacagagagagacaagaaacaatgaagtttaaccctagggtttcctcaagccgtcgcaagagccgcaaggctcacttcaccgctccgtcgagcgtgcgccgcgtcctgatgagcgcgcctctctccaccgatctccggtcaaagtacaacgtgcggtccattccggttcgcaaggacgacgaggtgcaggtggtgaggggaacctacaagggccgcgagggcaaagtggtccaggtctatcgccgcaagtgggtcatccacatcgagcgcatcacccgcgagaaggttaacggctccaccgtcaacgttggcattcacccttccaaggttgtcgtcaccaagcttcgaatggacaaggaccgcaaatccttgctcgatcggaaggccaagggtcgcgccgccgccgacaaggaaaagggtaccaagttcgctcctgaggatgtcatgcagaccgtcgattaatttctctctttacttttttgccctctctgtactttcttatttgctgcttttgtttgtggtttggatctcaagggttccgctattgtgaggcctttctgttttgtttaatttaatcaaatgcttgacattattactgcnnnnnnnnnnnnnnnnnnnnnnnnn

SEQ ID NO: 7106 - DNA, 470 bp, Glycine max
aggggaacctacaaggtccgcgagggcaaagtggtccaggtctatcgccgcaagtgggtcatccacatcgagcgcatcacccgcgagaaggttaacggctccaccgttaacgttggcattcacccttccaaggttgtcgtcaccaagctccgaatggacaaggaccgcaaatccttgctcgatcggaaggccaagggtcgcgccgccgccgacaaggaaaagggtaccaaagttcgctcctgaggatattatgcagaccgtcgattagtttctctcctttttttaccctcgctatactttttatttaccgcatttgttgtcgctattatttggaacttggattcggttatttttagtgtttcttgtgtttttttttatttagtagtttaagggtcttgtggtttggatcttaagggttccgctattgtaaggcccctctgttttgtttaatttaatcaaatgtttgccat

SEQ ID NO: 7107 - DNA, 1083 bp, Glycine max
  unsure (1)..(1083): unsure at all n locations
cctttaaagggggaaccaananagncntgggnnagccctccatcactgcggangggctgtgcccgcntanctagcatcncatgctaggactccccccngnnggctggcaggggaatgggcggctactgatgaacctacatttactgcaacctaccacacatcttctccacgacgtctagtaacaggcatcctgatatcatgatgcaataagtctccacgacttgcgagaaattatggcaagagatcttgaaagtggcggtggaggaaccaagaataacagaactgcagaggaaaactactctgcacctgaatcttcccatgtttatgattctgagacccattggacatcatggctcgtgcctatgtttgtggttgctaatattgctgtctttgttattaccatgtacatcaacaattgtcccaggaacaaccttcgtttccaaggtcgctgcgtggccaggttccttggaaggttctcttttcagcctatgcaggagaatcccttgcttggtccttcttcttcaacattgaccaagatgggagcccttcgatgggataatgttgtgaatagacatcagggatggagactcttcacttgcatttggttacatgctggggttattcatttgctagctaatatgttgagtctggtcttcattggcattcgccttgaacagcaattcggatttattaagattggaatcatatacttggtgtccgggtttggtggaagtgtactgtcgtctctatttatcagagaccacatctctgttggtgcttctggtgccctttttggacttcttggcgcaatgctgtctgaacttatcacaaactggactatatattccaataaagcaatggctttaataacccttctagtgatcattgtgatcaaccttggcattggcattttgccccacgtagataattttgctcacattggaggattcctggtgggatttctccttggttttattttgctgccacgtcctcagttcagttggttagagcagcgacgtcttcctgccggtgttgggatgaagtcaaagtacaaggcttaccaatatgttctatggattgtgt

SEQ ID NO: 7108 - DNA, 419 bp, Glycine max
cttattcccccatttaaactcatttaccaactccacctcttccacctctataaagcaccgatacagagcaaaagttccagacttgcgagaaattatggcaagagatcttgaaagtggcggtggaggaaccaagaataacagaactgcagaggaaaactactctgcacctgaatcttcccatgtttatgattctgagacccattggacatcatggctcgtgcctatgtttgtggttgctaatattgctgtctttgttattaccatgtacatcaacaattgtcccaggaacaaccttcgtttccaaggtcgctgcgtggccaggttccttggaaggttctcttttcagcctatgcaggagaatcccttgcttggtccttcttcttcaacattgaccaagatgggagcccttcgatgggata

SEQ ID NO: 7109 - DNA, 1098 bp, Glycine max
atatattgtagcttaataatttctatttcaaacagtcaaatttattctaatttcatccaaataatcgtgttcgtgggtgcaagtcagttattctttcttatcttaatatacacgcaaaggcaagggaaattttttttcgaggaagcgcacagcagcagctgataccacgttgcttgacgaaactgataaaaagcgctgtcattgtgtctttgtttgatcatcttcacaatcacatctccagaacacaaagaagagtgacccttcttcttgttattccacttgcgttaggtattggtgtgattgtttgtaccatccggtggtggagcttgttggaaattggagatgagtcagaggggtttaatatatagctttgttgccaaaggaactgttgttttagcagagcacacgcaatataccgggaatttcagtaccattgccgttcagtgcctgcagaagctgccatcaaatagcagcaaatacacgtattcctgtgatggtcacaccttcaatttcctcctagacaatggatttgttttccttgttgttgctgatgaatcgattggcaggagtgttccttttgtatttcttgaacgggtgaaggatgactttatgaagcgctatggtgctagcattaagaatgacggtgcccatccacttgccgatgatgaggacgatgacgatttgtttgaggacagatttagcattgcatataatcttgacagagaatttggaccagcactcaaggagcatatgcagtattgcatgaaccatccagaagaaatgagtaaactatcaaaattgaaggctcaaataactgaggtcaaggggataatgatggacaatattgagaaggttttggatcgtggagagaagattgaactgctggtggacaaaacagaaaacttacagttccaggctgacagcttccagaggcagggcaggcagctgagaaggaagatgtggctgcagaatctccaaatgaagctgatggtgggaggaggaatcctcatcttaattataattctgtgggttattgcttgtgggggtttcaaatgttgatggagacactggaagtgtaagtctgtataaagcaagaga

SEQ ID NO: 7110 - DNA, 424 bp, Glycine max
ggaggaagcgcagcagcagcagctataccacgttgcttgaagaaactgataaaaagcgctgccgttgtgtctttcagtcttcgttggatcatcttcacaatcacatcatcagaacacaaagaagagaagagacccttcatcttgttattccactcgggctaggccaattttccctctaacagtcaattttcattcagattcgtaaatttctcgattagatcacgaggtgttggtgtgattgtttgtaccttctggtggtggagcttgttggaaattggagatgagtcagaggggtttaatatatagctttgttgccaaaggaactgttgttttagcagagcacacgcaatatacggggaatttcagtaccattgccgttcagtgcctgcagaaactgccttcaaatagcagcaaatacacatat

SEQ ID NO: 7111 - DNA, 651 bp, Glycine max
cccacgcgttcggttatggagaagtagtagtaagcggtcagcacgaacaaacaatcacattacacacttctctctcttcaatggccggaatccgcttgcagccggaggactctgacgtctcccaacaatcccgcgcggtggctctctccgccaccgatctggtctccgacgacgaccgctccgtcgccgccgactcttggtccatcaagagcgagtacggaagcactctggacgacgaccagcgccatgctgacgccgccgaagctctctccaacgccaacctccgacctccctccgattacagttctgacaaggatgaacctgattctgaagcagtcacatccatgctgggatttcagagttattgggattctgcatatgctgacgagctcacaaattttcgtgaacatggtcatactggtgaagtctggtttggagttcatgtgatggaagtagtagcatcttggacaaaagccttgtgtgttgaaatttctcaaggtcacataccaaatggtgtcgatgaggttaaggctgaagctgacaaactaggtgataaagttttgtctacttggagtgtactagatattgggactggcaatggtttactgctccaagaattagctaaacaagcggtctctgatttaactggga

SEQ ID NO: 7112 - DNA, 388 bp, Glycine max
ggcacaagtttgttgagatagctagaagcactaagatgaaaatgaaagtgcttgttttgtttgttgctacagttttggtagcatatgaatgccatggctcagactaccagaagttccctctccaaatgaaaactgggtttggtgggcaatacagcaatgaggtggcatgtgccagttggaggcttggcgtggaagcaaacaacgtagtcaagtggcaaactgttcctgcagcttgcggatagtacatagctgactacgttctacgagaccaatatagatcagattccaaaacagtttaccaacaagcttatttctatgctaaatccctcagactcaccagcacagatgtcgttgccctggacgttgacgacaccagtctctctaatct

SEQ ID NO: 7113 - DNA, 874 bp, Glycine max
cttgcactgcacattgcacaacaaggattcatcttgcaaaaagccaccacacttcgcctttttccctgttcattcgacagtaacctcaacactctattggggtctgatagagatggggtcttgctgtggtgaaagtgcagataacatgcaagtgatagctgctgataaggaccacatatggagcagcaagaaagtggaagcagatgagggtctgaatctgaacactgtggggtgcctcagagggagattactggctgagagacaagcttcaagggtggccaagaaggaagctgaatcaatggggaacaagttggttgagttggaaaaattgcttagagaagagatcagattaagagataaagctgaaagaaggcttaaacttttaaagaagaaggttggatctttcaattgcatgccctccaagtcagggcaattggagcattctgattcgtcggagaaatgtgaaaattcttgtggatcatcctcaattagttcactttccaaacattctgaagcaaacgaaataacgcatgatgcaaaaattccagctttgccagaaaatgtacatcactgtgacaatgtttcagaagcctctacacttattcagacccacaatagtccatccagtacaaaagattgtgattctcagaatactgataatttcagtactaattcagaacagggttgttcttccccacaaattctgagacagaatccgaatctgagctctgggaatttgaagaatgatgaaagcaggctttccaccttaagctcaaggtcatcagtgacagagaatgagagtcatcacgccgatttctatgataattctctggcattagttcccgtgaccgtgacagctacatcacaagccacc

SEQ ID NO: 7114 - DNA, 400 bp, Glycine max
gagtagcagagaaaagaatagggttttgctatggagaagctagaagcagagaacgttctggtccttccctctgagcaacccaacaacaataggccaaagccaaaaccaaagcgtttcgtgaaaaaccaaatcccagactcaatccttaacaaccctcttctgagcgccgcaatctctgtgctcccttccaactacaacttcgaggtccacaagtgcgtctggcgcgtgctctccacgggagcaaaacgcgtggctctccagttcccggagggtctcctcatgtactctctcccactctccgacatcttcaccaccttcgccggcgtcacccactgcttcgtcctcgccgacgtcacctacggcgcttgctgcgtcgacgaccttgctgcctccgccctcg
